United States Patent Application Publication US 2022/0213167 A1 - sequence listing, part 21

SEQ ID NO: 437096 - protein, 15 aa, Homo sapiens
  CDR3 for beta chain variable domain of TCR clone 218548 (TRBV10-3, TRBJ2-1)
CAIRNGTSGHNEQFF

SEQ ID NO: 437097 - protein, 13 aa, Homo sapiens
  CDR3 for alpha chain variable domain of TCR clone 218549 (TRAV20, TRAJ54)
CAVQAGGAQKLVF

SEQ ID NO: 437098 - protein, 13 aa, Homo sapiens
  CDR3 for beta chain variable domain of TCR clone 218549 (TRBV20-1, TRBJ2-7)
SAKTGTGGYEQYF

SEQ ID NO: 437099 - protein, 14 aa, Homo sapiens
  CDR3 for alpha chain variable domain of TCR clone 218550 (TRAV12-3, TRAJ10)
SHLPLTGGGNKLTF

SEQ ID NO: 437100 - protein, 13 aa, Homo sapiens
  CDR3 for beta chain variable domain of TCR clone 218550 (TRBV7-7, TRBJ2-5)
CASSRSGQETQYV

SEQ ID NO: 437101 - protein, 13 aa, Homo sapiens
  CDR3 for alpha chain variable domain of TCR clone 218551 (TRAV21, TRAJ57)
CAVTQGGSEELVF

SEQ ID NO: 437102 - protein, 16 aa, Homo sapiens
  CDR3 for beta chain variable domain of TCR clone 218551 (TRBV29-1, TRBJ2-7)
CSVEDAEDGTAYEPYF

SEQ ID NO: 437103 - protein, 14 aa, Homo sapiens
  CDR3 for alpha chain variable domain of TCR clone 218552 (TRAV20, TRAJ42)
CAVQAGGSQGNLIF

SEQ ID NO: 437104 - protein, 13 aa, Homo sapiens
  CDR3 for beta chain variable domain of TCR clone 218552 (TRBV28, TRBJ1-2)
CSRIQGANYGYTF

SEQ ID NO: 437105 - protein, 12 aa, Homo sapiens
  CDR3 for alpha chain variable domain of TCR clone 218553 (TRAV8-3, TRAJ26)
CAGDNYGQIFVF

SEQ ID NO: 437106 - protein, 15 aa, Homo sapiens
  CDR3 for beta chain variable domain of TCR clone 218553 (TRBV9, TRBJ2-1)
CASSRAGSSYNEQFF

SEQ ID NO: 437107 - protein, 14 aa, Homo sapiens
  CDR3 for alpha chain variable domain of TCR clone 218554 (TRAV12-2, TRAJ40)
CAVKIPSGTYKYIF

SEQ ID NO: 437108 - protein, 15 aa, Homo sapiens
  CDR3 for beta chain variable domain of TCR clone 218554 (TRBV4-1, TRBJ2-3)
CASSRGQGIPDTQYF

SEQ ID NO: 437109 - protein, 11 aa, Homo sapiens
  CDR3 for alpha chain variable domain of TCR clone 218555 (TRAV1-1, TRAJ9)
CAVAGGFKTIF

SEQ ID NO: 437110 - protein, 13 aa, Homo sapiens
  CDR3 for beta chain variable domain of TCR clone 218555 (TRBV14, TRBJ2-7)
CSSSQDRRYEQYF

SEQ ID NO: 437111 - protein, 16 aa, Homo sapiens
  CDR3 for alpha chain variable domain of TCR clone 218556 (TRAV16, TRAJ54)
CALSPPLIQGAQKLVF

SEQ ID NO: 437112 - protein, 18 aa, Homo sapiens
  CDR3 for beta chain variable domain of TCR clone 218556 (TRBV7-9, TRBJ2-1)
CASSLAVSGTSGRNEQFF

SEQ ID NO: 437113 - protein, 11 aa, Homo sapiens
  CDR3 for alpha chain variable domain of TCR clone 218557 (TRAV2, TRAJ33)
CSVESNYQLIW

SEQ ID NO: 437114 - protein, 15 aa, Homo sapiens
  CDR3 for beta chain variable domain of TCR clone 218557 (TRBV19, TRBJ1-1)
CASTLGQIQNTEAFF

SEQ ID NO: 437115 - protein, 14 aa, Homo sapiens
  CDR3 for alpha chain variable domain of TCR clone 218558 (TRAV29/DV5, TRAJ20)
CAASAPIEDYKLSF

SEQ ID NO: 437116 - protein, 14 aa, Homo sapiens
  CDR3 for beta chain variable domain of TCR clone 218558 (TRBV7-2, TRBJ2-6)
CASRQSSGANVLTF

SEQ ID NO: 437117 - protein, 12 aa, Homo sapiens
  CDR3 for alpha chain variable domain of TCR clone 218559 (TRAV12-3, TRAJ20)
CAMVRGDYKLSF

SEQ ID NO: 437118 - protein, 17 aa, Homo sapiens
  CDR3 for beta chain variable domain of TCR clone 218559 (TRBV5-1, TRBJ2-5)
CASSPVALGQNQETQYF

SEQ ID NO: 437119 - protein, 13 aa, Homo sapiens
  CDR3 for alpha chain variable domain of TCR clone 218560 (TRAV13-1, TRAJ12)
CSKYMGSSYKLIF

SEQ ID NO: 437120 - protein, 14 aa, Homo sapiens
  CDR3 for beta chain variable domain of TCR clone 218560 (TRBV18, TRBJ2-5)
CASSPGVSQETQYF

SEQ ID NO: 437121 - protein, 13 aa, Homo sapiens
  CDR3 for alpha chain variable domain of TCR clone 218561 (TRAV2, TRAJ40)
CAVVTSGTCKYIF

SEQ ID NO: 437122 - protein, 14 aa, Homo sapiens
  CDR3 for beta chain variable domain of TCR clone 218561 (TRBV19, TRBJ2-1)
YASPTFVLSGEQFF

SEQ ID NO: 437123 - protein, 16 aa, Homo sapiens
  CDR3 for alpha chain variable domain of TCR clone 218562 (TRAV3, TRAJ10)
CAVRDMRAGGGNKLTF

SEQ ID NO: 437124 - protein, 17 aa, Homo sapiens
  CDR3 for beta chain variable domain of TCR clone 218562 (TRBV13, TRBJ2-3)
CASSLSRVVGGRNTQYF

SEQ ID NO: 437125 - protein, 12 aa, Homo sapiens
  CDR3 for alpha chain variable domain of TCR clone 218563 (TRAV12-1, TRAJ40)
CVVYSGTYKYIF

SEQ ID NO: 437126 - protein, 16 aa, Homo sapiens
  CDR3 for beta chain variable domain of TCR clone 218563 (TRBV19, TRBJ1-1)
CASSPTRFWPGTEAFF

SEQ ID NO: 437127 - protein, 14 aa, Homo sapiens
  CDR3 for alpha chain variable domain of TCR clone 218564 (TRAV12-2, TRAJ40)
CAVKISSGTYKYIF

SEQ ID NO: 437128 - protein, 20 aa, Homo sapiens
  CDR3 for beta chain variable domain of TCR clone 218564 (TRBV28, TRBJ2-1)
CASTPIGRSPGLAGGNEKFF

SEQ ID NO: 437129 - protein, 12 aa, Homo sapiens
  CDR3 for alpha chain variable domain of TCR clone 218565 (TRAV12-3, TRAJ17)
CAMTLTGNKLTF

SEQ ID NO: 437130 - protein, 15 aa, Homo sapiens
  CDR3 for beta chain variable domain of TCR clone 218565 (TRBV20-1, TRBJ2-7)
CRARERFSGMDEQYF

SEQ ID NO: 437131 - protein, 12 aa, Homo sapiens
  CDR3 for alpha chain variable domain of TCR clone 218566 (TRAV29/DV5, TRAJ34)
CGARHNTDKLIF

SEQ ID NO: 437132 - protein, 15 aa, Homo sapiens
  CDR3 for beta chain variable domain of TCR clone 218566 (TRBV19, TRBJ2-7)
CASSPAGSGEALRYF

SEQ ID NO: 437133 - protein, 14 aa, Homo sapiens
  CDR3 for alpha chain variable domain of TCR clone 218567 (TRAV8-3, TRAJ7)
CAAIELYGNNRLAF

SEQ ID NO: 437134 - protein, 15 aa, Homo sapiens
  CDR3 for beta chain variable domain of TCR clone 218567 (TRBV6-3, TRBJ2-7)
CASSSPGTVFYEQYF

SEQ ID NO: 437135 - protein, 15 aa, Homo sapiens
  CDR3 for alpha chain variable domain of TCR clone 218568 (TRAV3, TRAJ20)
CAVRDIKLSDYKLSF

SEQ ID NO: 437136 - protein, 13 aa, Homo sapiens
  CDR3 for beta chain variable domain of TCR clone 218568 (TRBV11-2, TRBJ2-7)
CASSGTRPYEQYF

SEQ ID NO: 437137 - protein, 12 aa, Homo sapiens
  CDR3 for alpha chain variable domain of TCR clone 218569 (TRAV2, TRAJ23)
CAVEDVGGKLIF

SEQ ID NO: 437138 - protein, 13 aa, Homo sapiens
  CDR3 for beta chain variable domain of TCR clone 218569 (TRBV5-1, TRBJ2-4)
CASSVEGGMNQYF

SEQ ID NO: 437139 - protein, 12 aa, Homo sapiens
  CDR3 for alpha chain variable domain of TCR clone 218570 (TRAV17, TRAJ20)
CATQSNDYKLSF

SEQ ID NO: 437140 - protein, 13 aa, Homo sapiens
  CDR3 for beta chain variable domain of TCR clone 218570 (TRBV10-3, TRBJ1-1)
CSIIPEGGTEAFF

SEQ ID NO: 437141 - protein, 11 aa, Homo sapiens
  CDR3 for alpha chain variable domain of TCR clone 218571 (TRAV3, TRAJ21)
CAVGNFNKFYF

SEQ ID NO: 437142 - protein, 16 aa, Homo sapiens
  CDR3 for beta chain variable domain of TCR clone 218571 (TRBV19, TRBJ2-1)
CASSKAGPRSYNEQCF

SEQ ID NO: 437143 - protein, 14 aa, Homo sapiens
  CDR3 for alpha chain variable domain of TCR clone 218572 (TRAV13-2, TRAJ17)
CAENSKAAGNKLTF

SEQ ID NO: 437144 - protein, 14 aa, Homo sapiens
  CDR3 for beta chain variable domain of TCR clone 218572 (TRBV7-2, TRBJ1-3)
CASSRLRSGNTIYF

SEQ ID NO: 437145 - protein, 23 aa, Homo sapiens
  CDR3 for alpha chain variable domain of TCR clone 218573 (TRAV12-2, TRAJ22)
CAVSFRVHPGPPIVSGSARQLTF

SEQ ID NO: 437146 - protein, 13 aa, Homo sapiens
  CDR3 for beta chain variable domain of TCR clone 218573 (TRBV12-4, TRBJ1-2)
CASSVDSNYGYTF

SEQ ID NO: 437147 - protein, 12 aa, Homo sapiens
  CDR3 for alpha chain variable domain of TCR clone 218574 (TRAV12-3, TRAJ17)
CAMTLTGNKLTF

SEQ ID NO: 437148 - protein, 16 aa, Homo sapiens
  CDR3 for beta chain variable domain of TCR clone 218574 (TRBV19, TRBJ2-2)
CASSAAGTGGTGELFF

SEQ ID NO: 437149 - protein, 15 aa, Homo sapiens
  CDR3 for alpha chain variable domain of TCR clone 218575 (TRAV2, TRAJ9)
CAVEDRGTGGFQTIF

SEQ ID NO: 437150 - protein, 15 aa, Homo sapiens
  CDR3 for beta chain variable domain of TCR clone 218575 (TRBV7-2, TRBJ2-1)
CASSSGLAGGNEQFF

SEQ ID NO: 437151 - protein, 14 aa, Homo sapiens
  CDR3 for alpha chain variable domain of TCR clone 218576 (TRAV12-2, TRAJ24)
CAVTPADSWGKLQF

SEQ ID NO: 437152 - protein, 15 aa, Homo sapiens
  CDR3 for beta chain variable domain of TCR clone 218576 (TRBV12-5, TRBJ2-2)
CASGRLGGNTGELFF

SEQ ID NO: 437153 - protein, 13 aa, Homo sapiens
  CDR3 for alpha chain variable domain of TCR clone 218577 (TRAV21, TRAJ27)
CAAHPGNAGKSTF

SEQ ID NO: 437154 - protein, 15 aa, Homo sapiens
  CDR3 for beta chain variable domain of TCR clone 218577 (TRBV2, TRBJ2-3)
CASSDAGGPPDTQYF

SEQ ID NO: 437155 - protein, 15 aa, Homo sapiens
  CDR3 for alpha chain variable domain of TCR clone 218578 (TRAV21, TRAJ53)
CATLNSGGRNYKLTF

SEQ ID NO: 437156 - protein, 16 aa, Homo sapiens
  CDR3 for beta chain variable domain of TCR clone 218578 (TRBV9, TRBJ2-1)
YASSVGGGGNYNEQFF

SEQ ID NO: 437157 - protein, 15 aa, Homo sapiens
  CDR3 for alpha chain variable domain of TCR clone 218579 (TRAV26-1, TRAJ29)
CIVRVEGSGNTPLVF

SEQ ID NO: 437158 - protein, 14 aa, Homo sapiens
  CDR3 for beta chain variable domain of TCR clone 218579 (TRBV18, TRBJ2-5)
CASSPGVSQETHYS

SEQ ID NO: 437159 - protein, 14 aa, Homo sapiens
  CDR3 for alpha chain variable domain of TCR clone 218580 (TRAV1-2, TRAJ8)
CAVREDTGFQTLVF

SEQ ID NO: 437160 - protein, 14 aa, Homo sapiens
  CDR3 for beta chain variable domain of TCR clone 218580 (TRBV11-2, TRBJ2-3)
CASSRLARTDTQYF

SEQ ID NO: 437161 - protein, 17 aa, Homo sapiens
  CDR3 for alpha chain variable domain of TCR clone 218581 (TRAV4, TRAJ22)
CCVLLPRGGGSARPLTF

SEQ ID NO: 437162 - protein, 14 aa, Homo sapiens
  CDR3 for beta chain variable domain of TCR clone 218581 (TRBV20-1, TRBJ1-1)
CSARAVNGYTEAFF

SEQ ID NO: 437163 - protein, 15 aa, Homo sapiens
  CDR3 for alpha chain variable domain of TCR clone 218582 (TRAV8-3, TRAJ32)
CAVGPYGGAKNKLIF

SEQ ID NO: 437164 - protein, 14 aa, Homo sapiens
  CDR3 for beta chain variable domain of TCR clone 218582 (TRBV29-1, TRBJ2-2)
CSLLAETNTGELFF

SEQ ID NO: 437165 - protein, 12 aa, Homo sapiens
  CDR3 for alpha chain variable domain of TCR clone 218583 (TRAV2, TRAJ9)
CAVGAGGFKTIF

SEQ ID NO: 437166 - protein, 16 aa, Homo sapiens
  CDR3 for beta chain variable domain of TCR clone 218583 (TRBV13, TRBJ2-2)
CASCPRTGEHTGELFF

SEQ ID NO: 437167 - protein, 14 aa, Homo sapiens
  CDR3 for alpha chain variable domain of TCR clone 218584 (TRAV12-2, TRAJ6)
CAVIASGGSYIPTF

SEQ ID NO: 437168 - protein, 14 aa, Homo sapiens
  CDR3 for beta chain variable domain of TCR clone 218584 (TRBV6-1, TRBJ1-3)
CASVQGGGGNTIYF

SEQ ID NO: 437169 - protein, 13 aa, Homo sapiens
  CDR3 for alpha chain variable domain of TCR clone 218585 (TRAV23/DV6, TRAJ6)
CAAKTGGSYIPTF

SEQ ID NO: 437170 - protein, 15 aa, Homo sapiens
  CDR3 for beta chain variable domain of TCR clone 218585 (TRBV5-1, TRBJ1-2)
CASSSYGEFGYGYTF

SEQ ID NO: 437171 - protein, 12 aa, Homo sapiens
  CDR3 for alpha chain variable domain of TCR clone 218586 (TRAV25, TRAJ11)
CAGASGYSTLTF

SEQ ID NO: 437172 - protein, 16 aa, Homo sapiens
  CDR3 for beta chain variable domain of TCR clone 218586 (TRBV5-1, TRBJ2-3)
CASSLGLAVYTDTQYF

SEQ ID NO: 437173 - protein, 14 aa, Homo sapiens
  CDR3 for alpha chain variable domain of TCR clone 218587 (TRAV13-1, TRAJ44)
CAAKATGTASKLTF

SEQ ID NO: 437174 - protein, 15 aa, Homo sapiens
  CDR3 for beta chain variable domain of TCR clone 218587 (TRBV28, TRBJ2-3)
CAPTFRDWGTDTQYF

SEQ ID NO: 437175 - protein, 14 aa, Homo sapiens
  CDR3 for alpha chain variable domain of TCR clone 218588 (TRAV12-2, TRAJ13)
CAVKKTGGYQKVTC

SEQ ID NO: 437176 - protein, 15 aa, Homo sapiens
  CDR3 for beta chain variable domain of TCR clone 218588 (TRBV27, TRBJ2-1)
CASSNGEGPPMSSSS

SEQ ID NO: 437177 - protein, 15 aa, Homo sapiens
  CDR3 for alpha chain variable domain of TCR clone 218589 (TRAV23/DV6, TRAJ18)
CAARYRGSTLGRLYF

SEQ ID NO: 437178 - protein, 13 aa, Homo sapiens
  CDR3 for beta chain variable domain of TCR clone 218589 (TRBV7-2, TRBJ2-7)
CASSSPSWSEQYF

SEQ ID NO: 437179 - protein, 14 aa, Homo sapiens
  CDR3 for alpha chain variable domain of TCR clone 218590 (TRAV8-4, TRAJ15)
CAVTIREAGIALIF

SEQ ID NO: 437180 - protein, 13 aa, Homo sapiens
  CDR3 for beta chain variable domain of TCR clone 218590 (TRBV10-3, TRBJ2-7)
CAISEKGGYEQYF

SEQ ID NO: 437181 - protein, 18 aa, Homo sapiens
  CDR3 for alpha chain variable domain of TCR clone 218591 (TRAV16, TRAJ45)
CAQASYPSSGGGADGLTF

SEQ ID NO: 437182 - protein, 13 aa, Homo sapiens
  CDR3 for beta chain variable domain of TCR clone 218591 (TRBV7-9, TRBJ1-2)
CASSLKQNYGYTF

SEQ ID NO: 437183 - protein, 22 aa, Homo sapiens
  CDR3 for alpha chain variable domain of TCR clone 218592 (TRAV4, )
CLGGRVKPNIQNPDPAVNQLRD

SEQ ID NO: 437184 - protein, 16 aa, Homo sapiens
  CDR3 for beta chain variable domain of TCR clone 218592 (TRBV6-6, TRBJ2-7)
CASIETGTNSSYEQYF

SEQ ID NO: 437185 - protein, 15 aa, Homo sapiens
  CDR3 for alpha chain variable domain of TCR clone 218593 (TRAV27, TRAJ38)
CPARRNAGNNRKRIW

SEQ ID NO: 437186 - protein, 13 aa, Homo sapiens
  CDR3 for beta chain variable domain of TCR clone 218593 (TRBV12-5, TRBJ2-3)
CASGDRQSDTQYF

SEQ ID NO: 437187 - protein, 11 aa, Homo sapiens
  CDR3 for alpha chain variable domain of TCR clone 218594 (TRAV12-1, TRAJ3)
CVVNRQQCFQD

SEQ ID NO: 437188 - protein, 14 aa, Homo sapiens
  CDR3 for beta chain variable domain of TCR clone 218594 (TRBV19, TRBJ2-1)
CASPTFVLSGEQFF

SEQ ID NO: 437189 - protein, 15 aa, Homo sapiens
  CDR3 for alpha chain variable domain of TCR clone 218595 (TRAV13-1, TRAJ44)
CAASRGGGTASQLTF

SEQ ID NO: 437190 - protein, 14 aa, Homo sapiens
  CDR3 for beta chain variable domain of TCR clone 218595 (TRBV7-2, TRBJ2-5)
CASSPRGSSETQYF

SEQ ID NO: 437191 - protein, 14 aa, Homo sapiens
  CDR3 for alpha chain variable domain of TCR clone 218596 (TRAV10, TRAJ34)
CVVSRGGDTDKLIF

SEQ ID NO: 437192 - protein, 17 aa, Homo sapiens
  CDR3 for beta chain variable domain of TCR clone 218596 (TRBV6-3, TRBJ2-3)
CASSRPLGGGSTDTQYF

SEQ ID NO: 437193 - protein, 11 aa, Homo sapiens
  CDR3 for alpha chain variable domain of TCR clone 218597 (TRAV2, TRAJ33)
CAVESNDQLIW

SEQ ID NO: 437194 - protein, 17 aa, Homo sapiens
  CDR3 for beta chain variable domain of TCR clone 218597 (TRBV19, TRBJ2-7)
CASSISFYDSYPYEQYF

SEQ ID NO: 437195 - protein, 14 aa, Homo sapiens
  CDR3 for alpha chain variable domain of TCR clone 218598 (TRAV13-1, TRAJ35)
CAASKGGFGNVLHC

SEQ ID NO: 437196 - protein, 13 aa, Homo sapiens
  CDR3 for beta chain variable domain of TCR clone 218598 (TRBV7-3, TRBJ1-1)
CASSQDGGADAFF

SEQ ID NO: 437197 - protein, 13 aa, Homo sapiens
  CDR3 for alpha chain variable domain of TCR clone 218599 (TRAV2, TRAJ40)
CAVVTSGTYKYIF

SEQ ID NO: 437198 - protein, 12 aa, Homo sapiens
  CDR3 for beta chain variable domain of TCR clone 218599 (TRBV7-6, TRBJ2-7)
CASSLADSEQYF

SEQ ID NO: 437199 - protein, 13 aa, Homo sapiens
  CDR3 for alpha chain variable domain of TCR clone 218600 (TRAV13-1, TRAJ29)
CAASIGLHTPLVF

SEQ ID NO: 437200 - protein, 15 aa, Homo sapiens
  CDR3 for beta chain variable domain of TCR clone 218600 (TRBV6-1, TRBJ2-5)
CASSEFPLMGETQYF

SEQ ID NO: 437201 - protein, 13 aa, Homo sapiens
  CDR3 for alpha chain variable domain of TCR clone 218601 (TRAV12-3, TRAJ7)
CAMSASGNNRLAF

SEQ ID NO: 437202 - protein, 12 aa, Homo sapiens
  CDR3 for beta chain variable domain of TCR clone 218601 (TRBV19, TRBJ2-7)
CASTDRGYEQYF

SEQ ID NO: 437203 - protein, 12 aa, Homo sapiens
  CDR3 for alpha chain variable domain of TCR clone 218602 (TRAV12-3, TRAJ17)
CAMTLTGNKRTF

SEQ ID NO: 437204 - protein, 15 aa, Homo sapiens
  CDR3 for beta chain variable domain of TCR clone 218602 (TRBV20-1, TRBJ2-7)
CSARDRVSRMDEQYF

SEQ ID NO: 437205 - protein, 13 aa, Homo sapiens
  CDR3 for alpha chain variable domain of TCR clone 218603 (TRAV13-1, TRAJ29)
CAASIGLNTPLVF

SEQ ID NO: 437206 - protein, 12 aa, Homo sapiens
  CDR3 for beta chain variable domain of TCR clone 218603 (TRBV20-1, TRBJ2-7)
QCQRGGAYEQYF

SEQ ID NO: 437207 - protein, 14 aa, Homo sapiens
  CDR3 for alpha chain variable domain of TCR clone 218604 (TRAV23/DV6, TRAJ11)
CAASLDSGYSTLTF

SEQ ID NO: 437208 - protein, 15 aa, Homo sapiens
  CDR3 for beta chain variable domain of TCR clone 218604 (TRBV28, TRBJ2-7)
CASSSPGTEPFEQYF

SEQ ID NO: 437209 - protein, 13 aa, Homo sapiens
  CDR3 for alpha chain variable domain of TCR clone 218605 (TRAV12-3, TRAJ21)
CAPGPHNFNKFYF

SEQ ID NO: 437210 - protein, 14 aa, Homo sapiens
  CDR3 for beta chain variable domain of TCR clone 218605 (TRBV28, TRBJ2-1)
CASSPGEGGNEQFF

SEQ ID NO: 437211 - protein, 12 aa, Homo sapiens
  CDR3 for alpha chain variable domain of TCR clone 218606 (TRAV12-3, TRAJ40)
CAMSSGTYKYIF

SEQ ID NO: 437212 - protein, 14 aa, Homo sapiens
  CDR3 for beta chain variable domain of TCR clone 218606 (TRBV7-3, TRBJ2-2)
CASSAGGYTGELFF

SEQ ID NO: 437213 - protein, 15 aa, Homo sapiens
  CDR3 for alpha chain variable domain of TCR clone 218607 (TRAV27, TRAJ38)
CAARRNAGNNRKLIW

SEQ ID NO: 437214 - protein, 13 aa, Homo sapiens
  CDR3 for beta chain variable domain of TCR clone 218607 (TRBV7-3, TRBJ2-1)
CASSLDSYNEQCF

SEQ ID NO: 437215 - protein, 17 aa, Homo sapiens
  CDR3 for alpha chain variable domain of TCR clone 218608 (TRAV35, TRAJ52)
CAGQLAAGGTSYRKLTF

SEQ ID NO: 437216 - protein, 12 aa, Homo sapiens
  CDR3 for beta chain variable domain of TCR clone 218608 (TRBV20-1, TRBJ2-7)
CSAGRRQSEQYF

SEQ ID NO: 437217 - protein, 13 aa, Homo sapiens
  CDR3 for alpha chain variable domain of TCR clone 218609 (TRAV21, TRAJ27)
CAARPGNAVKSTF

SEQ ID NO: 437218 - protein, 13 aa, Homo sapiens
  CDR3 for beta chain variable domain of TCR clone 218609 (TRBV7-3, TRBJ2-7)
CASSQAGGYEQYF

SEQ ID NO: 437219 - protein, 13 aa, Homo sapiens
  CDR3 for alpha chain variable domain of TCR clone 218610 (TRAV30, TRAJ24)
CGTVTDSWGKLQF

SEQ ID NO: 437220 - protein, 19 aa, Homo sapiens
  CDR3 for beta chain variable domain of TCR clone 218610 (TRBV12-4, TRBJ2-6)
CASSLSLGQGGSGANVLTF

SEQ ID NO: 437221 - protein, 11 aa, Homo sapiens
  CDR3 for alpha chain variable domain of TCR clone 218611 (TRAV2, TRAJ33)
CAVDSNYQLIW

SEQ ID NO: 437222 - protein, 13 aa, Homo sapiens
  CDR3 for beta chain variable domain of TCR clone 218611 (TRBV7-2, TRBJ2-7)
CASSSPSGSGQYF

SEQ ID NO: 437223 - protein, 11 aa, Homo sapiens
  CDR3 for alpha chain variable domain of TCR clone 218612 (TRAV2, TRAJ13)
CASGGYQKVTF

SEQ ID NO: 437224 - protein, 13 aa, Homo sapiens
  CDR3 for beta chain variable domain of TCR clone 218612 (TRBV2, TRBJ2-7)
CASTGGSSYEQYF

SEQ ID NO: 437225 - protein, 14 aa, Homo sapiens
  CDR3 for alpha chain variable domain of TCR clone 218613 (TRAV12-1, TRAJ17)
CVVNYKAAGNKLTF

SEQ ID NO: 437226 - protein, 15 aa, Homo sapiens
  CDR3 for beta chain variable domain of TCR clone 218613 (TRBV20-1, TRBJ2-7)
CSARDRVSGMDEQDF

SEQ ID NO: 437227 - protein, 13 aa, Homo sapiens
  CDR3 for alpha chain variable domain of TCR clone 218614 (TRAV12-1, TRAJ3)
CVVNPRGASKITF

SEQ ID NO: 437228 - protein, 13 aa, Homo sapiens
  CDR3 for beta chain variable domain of TCR clone 218614 (TRBV28, TRBJ1-5)
CASSDRGNQPQHF

SEQ ID NO: 437229 - protein, 14 aa, Homo sapiens
  CDR3 for alpha chain variable domain of TCR clone 218615 (TRAV13-1, TRAJ6)
CAPSITGGSYIPTF

SEQ ID NO: 437230 - protein, 14 aa, Homo sapiens
  CDR3 for beta chain variable domain of TCR clone 218615 (TRBV6-3, TRBJ2-1)
CASLHSAYYNEQFF

SEQ ID NO: 437231 - protein, 13 aa, Homo sapiens
  CDR3 for alpha chain variable domain of TCR clone 218616 (TRAV1-2, TRAJ9)
CAALNTGGFKTIF

SEQ ID NO: 437232 - protein, 15 aa, Homo sapiens
  CDR3 for beta chain variable domain of TCR clone 218616 (TRBV4-2, TRBJ2-3)
CASSKQQIRTDTQYF

SEQ ID NO: 437233 - protein, 15 aa, Homo sapiens
  CDR3 for alpha chain variable domain of TCR clone 218617 (TRAV8-4, TRAJ47)
CAVSDPEEYGNKLVL

SEQ ID NO: 437234 - protein, 15 aa, Homo sapiens
  CDR3 for beta chain variable domain of TCR clone 218617 (TRBV11-2, TRBJ2-1)
CASSLGPDSYNEQFF

SEQ ID NO: 437235 - protein, 12 aa, Homo sapiens
  CDR3 for alpha chain variable domain of TCR clone 218618 (TRAV16, TRAJ10)
CSRTGGGNKLTS

SEQ ID NO: 437236 - protein, 13 aa, Homo sapiens
  CDR3 for beta chain variable domain of TCR clone 218618 (TRBV10-3, TRBJ2-7)
CASKLAVNYEQYF

SEQ ID NO: 437237 - protein, 16 aa, Homo sapiens
  CDR3 for alpha chain variable domain of TCR clone 218619 (TRAV35, TRAJ28)
CAGYLYSGAGSYQLTF

SEQ ID NO: 437238 - protein, 14 aa, Homo sapiens
  CDR3 for beta chain variable domain of TCR clone 218619 (TRBV7-2, TRBJ2-7)
CASSPKTSFYEQYF

SEQ ID NO: 437239 - protein, 14 aa, Homo sapiens
  CDR3 for alpha chain variable domain of TCR clone 218620 (TRAV35, TRAJ50)
CAGHRKTSYDKVIF

SEQ ID NO: 437240 - protein, 15 aa, Homo sapiens
  CDR3 for beta chain variable domain of TCR clone 218620 (TRBV28, TRBJ2-2)
CASSLPGAGVGELFF

SEQ ID NO: 437241 - protein, 16 aa, Homo sapiens
  CDR3 for alpha chain variable domain of TCR clone 218621 (TRAV25, TRAJ53)
CAGPKGSGGSNYKLTF

SEQ ID NO: 437242 - protein, 17 aa, Homo sapiens
  CDR3 for beta chain variable domain of TCR clone 218621 (TRBV11-3, TRBJ2-6)
CASKWGQGLSGANVLPF

SEQ ID NO: 437243 - protein, 13 aa, Homo sapiens
  CDR3 for alpha chain variable domain of TCR clone 218622 (TRAV8-3, TRAJ28)
CAVGAVGSYQPTF

SEQ ID NO: 437244 - protein, 16 aa, Homo sapiens
  CDR3 for beta chain variable domain of TCR clone 218622 (TRBV2, TRBJ1-1)
CASSPPNRGMNTEAFF

SEQ ID NO: 437245 - protein, 13 aa, Homo sapiens
  CDR3 for alpha chain variable domain of TCR clone 218623 (TRAV27, TRAJ53)
CAGQGGSNYKLTF

SEQ ID NO: 437246 - protein, 13 aa, Homo sapiens
  CDR3 for beta chain variable domain of TCR clone 218623 (TRBV29-1, TRBJ1-1)
CSVESGFGSEAFF

SEQ ID NO: 437247 - protein, 18 aa, Homo sapiens
  CDR3 for alpha chain variable domain of TCR clone 218624 (TRAV38-2/DV8, TRAJ42)
CAYRSADLTGGSHVNLIF

SEQ ID NO: 437248 - protein, 12 aa, Homo sapiens
  CDR3 for beta chain variable domain of TCR clone 218624 (TRBV11-2, TRBJ2-2)
CASSLGGGELFF

SEQ ID NO: 437249 - protein, 12 aa, Homo sapiens
  CDR3 for alpha chain variable domain of TCR clone 218625 (TRAV17, TRAJ57)
CATDGGSEKLVF

SEQ ID NO: 437250 - protein, 16 aa, Homo sapiens
  CDR3 for beta chain variable domain of TCR clone 218625 (TRBV5-5, TRBJ2-2)
CASSGRREGATGELFF

SEQ ID NO: 437251 - protein, 11 aa, Homo sapiens
  CDR3 for alpha chain variable domain of TCR clone 218626 (TRAV2, TRAJ33)
CAVDSNYQLIW

SEQ ID NO: 437252 - protein, 14 aa, Homo sapiens
  CDR3 for beta chain variable domain of TCR clone 218626 (TRBV10-3, TRBJ2-2)
CAASSRVNTGELFF

SEQ ID NO: 437253 - protein, 13 aa, Homo sapiens
  CDR3 for alpha chain variable domain of TCR clone 218627 (TRAV21, TRAJ27)
CAARPGNVGKSTF

SEQ ID NO: 437254 - protein, 20 aa, Homo sapiens
  CDR3 for beta chain variable domain of TCR clone 218627 (TRBV4-2, TRBJ2-7)
CASSQASGGNLRAVLRAGHQ

SEQ ID NO: 437255 - protein, 14 aa, Homo sapiens
  CDR3 for alpha chain variable domain of TCR clone 218628 (TRAV17, TRAJ57)
CATDPQGGSEKLVF

SEQ ID NO: 437256 - protein, 13 aa, Homo sapiens
  CDR3 for beta chain variable domain of TCR clone 218628 (TRBV7-7, TRBJ2-3)
CASSLSRADTQYF

SEQ ID NO: 437257 - protein, 13 aa, Homo sapiens
  CDR3 for alpha chain variable domain of TCR clone 218629 (TRAV20, TRAJ45)
CAVKKRRCRRPHL

SEQ ID NO: 437258 - protein, 14 aa, Homo sapiens
  CDR3 for beta chain variable domain of TCR clone 218629 (TRBV15, TRBJ2-5)
CATSIGGLGETQYF

SEQ ID NO: 437259 - protein, 15 aa, Homo sapiens
  CDR3 for alpha chain variable domain of TCR clone 218630 (TRAV3, TRAJ9)
CAVRDINTGGFKTIF

SEQ ID NO: 437260 - protein, 13 aa, Homo sapiens
  CDR3 for beta chain variable domain of TCR clone 218630 (TRBV19, TRBJ2-7)
CAGSIPSVHEQYF

SEQ ID NO: 437261 - protein, 14 aa, Homo sapiens
  CDR3 for alpha chain variable domain of TCR clone 218631 (TRAV13-1, TRAJ9)
CAASALTEGFKTIF

SEQ ID NO: 437262 - protein, 13 aa, Homo sapiens
  CDR3 for beta chain variable domain of TCR clone 218631 (TRBV20-1, TRBJ1-1)
CSAGTVGNTEAFF

SEQ ID NO: 437263 - protein, 14 aa, Homo sapiens
  CDR3 for alpha chain variable domain of TCR clone 218632 (TRAV12-1, TRAJ17)
CVVDYKAAGNKLTF

SEQ ID NO: 437264 - protein, 15 aa, Homo sapiens
  CDR3 for beta chain variable domain of TCR clone 218632 (TRBV7-2, TRBJ2-7)
CASSLALGSAYEQYF

SEQ ID NO: 437265 - protein, 13 aa, Homo sapiens
  CDR3 for alpha chain variable domain of TCR clone 218633 (TRAV3, TRAJ3)
CAVRALRASKIIF

SEQ ID NO: 437266 - protein, 18 aa, Homo sapiens
  CDR3 for beta chain variable domain of TCR clone 218633 (TRBV12-4, TRBJ2-5)
CASSPSGGRDPVLRARHA

SEQ ID NO: 437267 - protein, 11 aa, Homo sapiens
  CDR3 for alpha chain variable domain of TCR clone 218634 (TRAV12-1, TRAJ30)
CVVNGHDKIIF

SEQ ID NO: 437268 - protein, 15 aa, Homo sapiens
  CDR3 for beta chain variable domain of TCR clone 218634 (TRBV11-3, TRBJ1-1)
CASSLGGPGDTAAFF

SEQ ID NO: 437269 - protein, 14 aa, Homo sapiens
  CDR3 for alpha chain variable domain of TCR clone 218635 (TRAV12-2, TRAJ24)
CAVTPADSWGKLQF

SEQ ID NO: 437270 - protein, 12 aa, Homo sapiens
  CDR3 for beta chain variable domain of TCR clone 218635 (TRBV3-1, TRBJ2-1)
CARSQGSSGQFF

SEQ ID NO: 437271 - protein, 12 aa, Homo sapiens
  CDR3 for alpha chain variable domain of TCR clone 218636 (TRAV3, TRAJ43)
CAVRDPNNDMRF

SEQ ID NO: 437272 - protein, 13 aa, Homo sapiens
  CDR3 for beta chain variable domain of TCR clone 218636 (TRBV7-6, TRBJ1-2)
CASSLVADYGYTF

SEQ ID NO: 437273 - protein, 13 aa, Homo sapiens
  CDR3 for alpha chain variable domain of TCR clone 218637 (TRAV2, TRAJ24)
CAVSTDSWGKLKF

SEQ ID NO: 437274 - protein, 13 aa, Homo sapiens
  CDR3 for beta chain variable domain of TCR clone 218637 (TRBV20-1, TRBJ2-2)
CSASAAGTGELFF

SEQ ID NO: 437275 - protein, 16 aa, Homo sapiens
  CDR3 for alpha chain variable domain of TCR clone 218638 (TRAV26-1, TRAJ37)
CIVRGDGSGNTGKLIF

SEQ ID NO: 437276 - protein, 20 aa, Homo sapiens
  CDR3 for beta chain variable domain of TCR clone 218638 (TRBV4-1, TRBJ2-7)
CISAPAAETRWGVREGEQYF

SEQ ID NO: 437277 - protein, 13 aa, Homo sapiens
  CDR3 for alpha chain variable domain of TCR clone 218639 (TRAV12-2, TRAJ6)
CAVNVSRKLHTYI

SEQ ID NO: 437278 - protein, 15 aa, Homo sapiens
  CDR3 for beta chain variable domain of TCR clone 218639 (TRBV5-1, TRBJ2-1)
CASSPPRAPYNEQFF

SEQ ID NO: 437279 - protein, 15 aa, Homo sapiens
  CDR3 for alpha chain variable domain of TCR clone 218640 (TRAV3, TRAJ5)
CAVRDLDTGKRALTF

SEQ ID NO: 437280 - protein, 15 aa, Homo sapiens
  CDR3 for beta chain variable domain of TCR clone 218640 (TRBV28, TRBJ2-5)
CASSPPWSYQETQYF

SEQ ID NO: 437281 - protein, 15 aa, Homo sapiens
  CDR3 for alpha chain variable domain of TCR clone 218641 (TRAV21, TRAJ24)
CAARSSTDSWGKLQF

SEQ ID NO: 437282 - protein, 14 aa, Homo sapiens
  CDR3 for beta chain variable domain of TCR clone 218641 (TRBV7-2, TRBJ2-7)
CASRSQGAAYEQYF

SEQ ID NO: 437283 - protein, 15 aa, Homo sapiens
  CDR3 for alpha chain variable domain of TCR clone 218642 (TRAV12-3, TRAJ42)
CAMSGHGGSQGNLIF

SEQ ID NO: 437284 - protein, 16 aa, Homo sapiens
  CDR3 for beta chain variable domain of TCR clone 218642 (TRBV6-1, TRBJ2-5)
CASSETLDRGAETQYF

SEQ ID NO: 437285 - protein, 11 aa, Homo sapiens
  CDR3 for alpha chain variable domain of TCR clone 218643 (TRAV27, TRAJ57)
CAGVRRADLNS

SEQ ID NO: 437286 - protein, 11 aa, Homo sapiens
  CDR3 for beta chain variable domain of TCR clone 218643 (TRBV11-2, TRBJ1-1)
CASSINTEAFF

SEQ ID NO: 437287 - protein, 13 aa, Homo sapiens
  CDR3 for alpha chain variable domain of TCR clone 218644 (TRAV13-1, TRAJ5)
CAASDTGRRALTF

SEQ ID NO: 437288 - protein, 12 aa, Homo sapiens
  CDR3 for beta chain variable domain of TCR clone 218644 (TRBV28, TRBJ2-3)
CDSSLYRDTQYF

SEQ ID NO: 437289 - protein, 14 aa, Homo sapiens
  CDR3 for alpha chain variable domain of TCR clone 218645 (TRAV12-2, TRAJ3)
CAVSPYSSASKIIF

SEQ ID NO: 437290 - protein, 15 aa, Homo sapiens
  CDR3 for beta chain variable domain of TCR clone 218645 (TRBV5-4, TRBJ2-1)
CASSFSGGSYNEQFF

SEQ ID NO: 437291 - protein, 14 aa, Homo sapiens
  CDR3 for alpha chain variable domain of TCR clone 218646 (TRAV1-2, TRAJ8)
CAVREDTGFQKLVF

SEQ ID NO: 437292 - protein, 15 aa, Homo sapiens
  CDR3 for beta chain variable domain of TCR clone 218646 (TRBV7-9, TRBJ1-6)
CASSTPGRGNSPLHF

SEQ ID NO: 437293 - protein, 16 aa, Homo sapiens
  CDR3 for alpha chain variable domain of TCR clone 218647 (TRAV1-2, TRAJ10)
CAVRGVLTGGGKKLTF

SEQ ID NO: 437294 - protein, 14 aa, Homo sapiens
  CDR3 for beta chain variable domain of TCR clone 218647 (TRBV25-1, TRBJ1-1)
CASTHLGGNTEAFF

SEQ ID NO: 437295 - protein, 12 aa, Homo sapiens
  CDR3 for alpha chain variable domain of TCR clone 218648 (TRAV3, TRAJ20)
CAVRDPDYKLSF

SEQ ID NO: 437296 - protein, 14 aa, Homo sapiens
  CDR3 for beta chain variable domain of TCR clone 218648 (TRBV7-2, TRBJ1-2)
CASGQTGSTYGYTF

SEQ ID NO: 437297 - protein, 14 aa, Homo sapiens
  CDR3 for alpha chain variable domain of TCR clone 218649 (TRAV3, TRAJ21)
CAVESQANFNKFYF

SEQ ID NO: 437298 - protein, 14 aa, Homo sapiens
  CDR3 for beta chain variable domain of TCR clone 218649 (TRBV7-9, TRBJ2-7)
CASSLDYGGLGQYF

SEQ ID NO: 437299 - protein, 14 aa, Homo sapiens
  CDR3 for alpha chain variable domain of TCR clone 218650 (TRAV1-2, TRAJ16)
CAVNRCSDGQKLLF

SEQ ID NO: 437300 - protein, 13 aa, Homo sapiens
  CDR3 for beta chain variable domain of TCR clone 218650 (TRBV19, TRBJ1-2)
CASSVPGQDGYTF

SEQ ID NO: 437301 - protein, 11 aa, Homo sapiens
  CDR3 for alpha chain variable domain of TCR clone 218651 (TRAV1-2, TRAJ20)
CAVANDYKLSF

SEQ ID NO: 437302 - protein, 18 aa, Homo sapiens
  CDR3 for beta chain variable domain of TCR clone 218651 (TRBV20-1, TRBJ2-6)
CSAETTPTHGSGANFLTF

SEQ ID NO: 437303 - protein, 13 aa, Homo sapiens
  CDR3 for alpha chain variable domain of TCR clone 218652 (TRAV23/DV6, TRAJ47)
CAASMTRGNKLVF

SEQ ID NO: 437304 - protein, 12 aa, Homo sapiens
  CDR3 for beta chain variable domain of TCR clone 218652 (TRBV28, TRBJ2-7)
CDSSFSSYEQYF

SEQ ID NO: 437305 - protein, 14 aa, Homo sapiens
  CDR3 for alpha chain variable domain of TCR clone 218653 (TRAV12-1, TRAJ17)
CGVNFKAAGNKLTF

SEQ ID NO: 437306 - protein, 17 aa, Homo sapiens
  CDR3 for beta chain variable domain of TCR clone 218653 (TRBV20-1, TRBJ2-1)
CSASASGLAGPYNEQFF

SEQ ID NO: 437307 - protein, 11 aa, Homo sapiens
  CDR3 for alpha chain variable domain of TCR clone 218654 (TRAV27, TRAJ20)
CAGADDYKLSF

SEQ ID NO: 437308 - protein, 12 aa, Homo sapiens
  CDR3 for beta chain variable domain of TCR clone 218654 (TRBV11-2, TRBJ2-2)
CASSLPTGELFF

SEQ ID NO: 437309 - protein, 13 aa, Homo sapiens
  CDR3 for alpha chain variable domain of TCR clone 218655 (TRAV1-1, TRAJ9)
CAAKNTGGFKTIF

SEQ ID NO: 437310 - protein, 14 aa, Homo sapiens
  CDR3 for beta chain variable domain of TCR clone 218655 (TRBV27, TRBJ2-1)
CASSATGGYNEQFF

SEQ ID NO: 437311 - protein, 17 aa, Homo sapiens
  CDR3 for alpha chain variable domain of TCR clone 218656 (TRAV4, TRAJ13)
CLVGVQGSSGGYQKVTF

SEQ ID NO: 437312 - protein, 15 aa, Homo sapiens
  CDR3 for beta chain variable domain of TCR clone 218656 (TRBV6-1, TRBJ2-3)
CASSERGGITDTQYF

SEQ ID NO: 437313 - protein, 14 aa, Homo sapiens
  CDR3 for alpha chain variable domain of TCR clone 218657 (TRAV1-2, TRAJ8)
CAVREDTGFQKLVF

SEQ ID NO: 437314 - protein, 13 aa, Homo sapiens
  CDR3 for beta chain variable domain of TCR clone 218657 (TRBV10-3, TRBJ2-7)
CASKLALNYEQYF

SEQ ID NO: 437315 - protein, 12 aa, Homo sapiens
  CDR3 for alpha chain variable domain of TCR clone 218658 (TRAV8-3, TRAJ20)
CAVGANDYKLSF

SEQ ID NO: 437316 - protein, 15 aa, Homo sapiens
  CDR3 for beta chain variable domain of TCR clone 218658 (TRBV27, TRBJ2-5)
CASSLYPQGGETQYF

SEQ ID NO: 437317 - protein, 18 aa, Homo sapiens
  CDR3 for alpha chain variable domain of TCR clone 218659 (TRAV3, TRAJ28)
CAVLPRSGLGVTNSLSGS

SEQ ID NO: 437318 - protein, 13 aa, Homo sapiens
  CDR3 for beta chain variable domain of TCR clone 218659 (TRBV12-4, TRBJ2-5)
CASRLAVQETQYF

SEQ ID NO: 437319 - protein, 11 aa, Homo sapiens
  CDR3 for alpha chain variable domain of TCR clone 218660 (TRAV1-1, TRAJ23)
CAVRQGGKLIF

SEQ ID NO: 437320 - protein, 14 aa, Homo sapiens
  CDR3 for beta chain variable domain of TCR clone 218660 (TRBV2, TRBJ2-2)
CASRARGNTGELFF

SEQ ID NO: 437321 - protein, 14 aa, Homo sapiens
  CDR3 for alpha chain variable domain of TCR clone 218661 (TRAV12-1, TRAJ17)
CVVNYKAAGNKLTF

SEQ ID NO: 437322 - protein, 14 aa, Homo sapiens
  CDR3 for beta chain variable domain of TCR clone 218661 (TRBV4-2, TRBJ2-7)
CASSQGQTAYEQYF

SEQ ID NO: 437323 - protein, 16 aa, Homo sapiens
  CDR3 for alpha chain variable domain of TCR clone 218662 (TRAV3, TRAJ10)
CAVRDMRAGGGNKLAF

SEQ ID NO: 437324 - protein, 15 aa, Homo sapiens
  CDR3 for beta chain variable domain of TCR clone 218662 (TRBV9, TRBJ1-6)
CASSVAGTGDSPLHF

SEQ ID NO: 437325 - protein, 15 aa, Homo sapiens
  CDR3 for alpha chain variable domain of TCR clone 218663 (TRAV21, TRAJ24)
CAARSSTDGWGTLQF

SEQ ID NO: 437326 - protein, 13 aa, Homo sapiens
  CDR3 for beta chain variable domain of TCR clone 218663 (TRBV11-2, TRBJ2-5)
CASSSTGEETQYF

SEQ ID NO: 437327 - protein, 14 aa, Homo sapiens
  CDR3 for alpha chain variable domain of TCR clone 218664 (TRAV26-1, TRAJ38)
CIADNAGNNRKLMW

SEQ ID NO: 437328 - protein, 13 aa, Homo sapiens
  CDR3 for beta chain variable domain of TCR clone 218664 (TRBV15, TRBJ1-6)
CATSGGLNSPLHF

SEQ ID NO: 437329 - protein, 15 aa, Homo sapiens
  CDR3 for alpha chain variable domain of TCR clone 218665 (TRAV12-3, TRAJ11)
CAMSEENSGYSTLTF

SEQ ID NO: 437330 - protein, 16 aa, Homo sapiens
  CDR3 for beta chain variable domain of TCR clone 218665 (TRBV5-1, TRBJ2-7)
CASSLDGLAGLYEQYF

SEQ ID NO: 437331 - protein, 13 aa, Homo sapiens
  CDR3 for alpha chain variable domain of TCR clone 218666 (TRAV26-1, TRAJ33)
CIVRVEGNYQLIW

SEQ ID NO: 437332 - protein, 13 aa, Homo sapiens
  CDR3 for beta chain variable domain of TCR clone 218666 (TRBV20-1, TRBJ1-6)
CSAPLGVGSPLHF

SEQ ID NO: 437333 - protein, 15 aa, Homo sapiens
  CDR3 for alpha chain variable domain of TCR clone 218667 (TRAV25, TRAJ52)
FAGTSGGTSYGKLTF

SEQ ID NO: 437334 - protein, 16 aa, Homo sapiens
  CDR3 for beta chain variable domain of TCR clone 218667 (TRBV15, TRBJ1-2)
CATSRGPRTGGGGYTF

SEQ ID NO: 437335 - protein, 11 aa, Homo sapiens
  CDR3 for alpha chain variable domain of TCR clone 218668 (TRAV3, TRAJ17)
CAEAAGNKLTF

SEQ ID NO: 437336 - protein, 15 aa, Homo sapiens
  CDR3 for beta chain variable domain of TCR clone 218668 (TRBV12-4, TRBJ2-7)
CASSLGSGRPYEQYF

SEQ ID NO: 437337 - protein, 15 aa, Homo sapiens
  CDR3 for alpha chain variable domain of TCR clone 218669 (TRAV26-1, TRAJ22)
CIVRVSFWFCKATDL

SEQ ID NO: 437338 - protein, 18 aa, Homo sapiens
  CDR3 for beta chain variable domain of TCR clone 218669 (TRBV7-9, TRBJ2-7)
CASSLTTSGSRTWYEQYF

SEQ ID NO: 437339 - protein, 13 aa, Homo sapiens
  CDR3 for alpha chain variable domain of TCR clone 218670 (TRAV30, TRAJ18)
CGTDASTLGRLYF

SEQ ID NO: 437340 - protein, 15 aa, Homo sapiens
  CDR3 for beta chain variable domain of TCR clone 218670 (TRBV7-3, TRBJ2-1)
CASSRIGTGSSEQFF

SEQ ID NO: 437341 - protein, 14 aa, Homo sapiens
  CDR3 for alpha chain variable domain of TCR clone 218671 (TRAV8-1, TRAJ34)
CAVNPSYNTDKLIF

SEQ ID NO: 437342 - protein, 16 aa, Homo sapiens
  CDR3 for beta chain variable domain of TCR clone 218671 (TRBV7-2, TRBJ2-6)
CASSLAGRAGANVLTF

SEQ ID NO: 437343 - protein, 13 aa, Homo sapiens
  CDR3 for alpha chain variable domain of TCR clone 218672 (TRAV8-3, TRAJ43)
CGVGIYNNNDMRF

SEQ ID NO: 437344 - protein, 16 aa, Homo sapiens
  CDR3 for beta chain variable domain of TCR clone 218672 (TRBV7-2, TRBJ2-5)
CASSLVLWTKQETQYF

SEQ ID NO: 437345 - protein, 13 aa, Homo sapiens
  CDR3 for alpha chain variable domain of TCR clone 218673 (TRAV13-1, TRAJ39)
CAASIWAGKMLTF

SEQ ID NO: 437346 - protein, 13 aa, Homo sapiens
  CDR3 for beta chain variable domain of TCR clone 218673 (TRBV11-2, TRBJ1-3)
CASSLEPVNTIYF

SEQ ID NO: 437347 - protein, 11 aa, Homo sapiens
  CDR3 for alpha chain variable domain of TCR clone 218674 (TRAV12-3, TRAJ43)
CAMSVSNDMRF

SEQ ID NO: 437348 - protein, 13 aa, Homo sapiens
  CDR3 for beta chain variable domain of TCR clone 218674 (TRBV7-6, TRBJ1-2)
CASSLVADYGYTF

SEQ ID NO: 437349 - protein, 16 aa, Homo sapiens
  CDR3 for alpha chain variable domain of TCR clone 218675 (TRAV12-2, TRAJ18)
CAVTTDRGSTLGRLYF

SEQ ID NO: 437350 - protein, 14 aa, Homo sapiens
  CDR3 for beta chain variable domain of TCR clone 218675 (TRBV4-2, TRBJ1-5)
CASSQDGINQPQHF

SEQ ID NO: 437351 - protein, 14 aa, Homo sapiens
  CDR3 for alpha chain variable domain of TCR clone 218676 (TRAV3, TRAJ16)
CCERLKSDGQKMLF

SEQ ID NO: 437352 - protein, 15 aa, Homo sapiens
  CDR3 for beta chain variable domain of TCR clone 218676 (TRBV28, TRBJ2-7)
CASSPGGRGFYEQYF

SEQ ID NO: 437353 - protein, 14 aa, Homo sapiens
  CDR3 for alpha chain variable domain of TCR clone 218677 (TRAV29/DV5, TRAJ20)
CAASAPIEDYTLSF

SEQ ID NO: 437354 - protein, 15 aa, Homo sapiens
  CDR3 for beta chain variable domain of TCR clone 218677 (TRBV6-1, TRBJ2-1)
CASSEAAYSYNEQFF

SEQ ID NO: 437355 - protein, 16 aa, Homo sapiens
  CDR3 for alpha chain variable domain of TCR clone 218678 (TRAV23/DV6, TRAJ9)
CAASIGGNTGGFKTIF

SEQ ID NO: 437356 - protein, 14 aa, Homo sapiens
  CDR3 for beta chain variable domain of TCR clone 218678 (TRBV19, TRBJ1-4)
CASSINRGGEKLFF

SEQ ID NO: 437357 - protein, 14 aa, Homo sapiens
  CDR3 for alpha chain variable domain of TCR clone 218679 (TRAV26-1, TRAJ45)
CIVRVVGGADGLTF

SEQ ID NO: 437358 - protein, 18 aa, Homo sapiens
  CDR3 for beta chain variable domain of TCR clone 218679 (TRBV7-9, TRBJ1-1)
CASSVTQVRSNTEAFLDK

SEQ ID NO: 437359 - protein, 16 aa, Homo sapiens
  CDR3 for alpha chain variable domain of TCR clone 218680 (TRAV35, TRAJ28)
CAGQRYSGAGSYQLTF

SEQ ID NO: 437360 - protein, 12 aa, Homo sapiens
  CDR3 for beta chain variable domain of TCR clone 218680 (TRBV19, TRBJ1-2)
CASQGQVYGYTF

SEQ ID NO: 437361 - protein, 17 aa, Homo sapiens
  CDR3 for alpha chain variable domain of TCR clone 218681 (TRAV3, TRAJ42)
CAVRDRDYGGSQGNLIF

SEQ ID NO: 437362 - protein, 13 aa, Homo sapiens
  CDR3 for beta chain variable domain of TCR clone 218681 (TRBV10-3, TRBJ2-7)
CAVKLAVNYEQYF

SEQ ID NO: 437363 - protein, 14 aa, Homo sapiens
  CDR3 for alpha chain variable domain of TCR clone 218682 (TRAV16, TRAJ17)
CALSGRAAGNKLTF

SEQ ID NO: 437364 - protein, 12 aa, Homo sapiens
  CDR3 for beta chain variable domain of TCR clone 218682 (TRBV3-1, TRBJ2-1)
CASSQGSSGQFF

SEQ ID NO: 437365 - protein, 14 aa, Homo sapiens
  CDR3 for alpha chain variable domain of TCR clone 218683 (TRAV12-3, TRAJ58)
CAMSTETSGSRLTF

SEQ ID NO: 437366 - protein, 16 aa, Homo sapiens
  CDR3 for beta chain variable domain of TCR clone 218683 (TRBV19, TRBJ2-1)
CASSKAGPSSYNEQFF

SEQ ID NO: 437367 - protein, 14 aa, Homo sapiens
  CDR3 for alpha chain variable domain of TCR clone 218684 (TRAV1-2, TRAJ27)
CAVRSGTNAGKSTF

SEQ ID NO: 437368 - protein, 13 aa, Homo sapiens
  CDR3 for beta chain variable domain of TCR clone 218684 (TRBV13, TRBJ2-5)
CASSLGGEETQYF

SEQ ID NO: 437369 - protein, 12 aa, Homo sapiens
  CDR3 for alpha chain variable domain of TCR clone 218685 (TRAV2, TRAJ32)
CAVGGATNKLIF

SEQ ID NO: 437370 - protein, 15 aa, Homo sapiens
  CDR3 for beta chain variable domain of TCR clone 218685 (TRBV20-1, TRBJ2-7)
CSARVPAAYFYKQYF

SEQ ID NO: 437371 - protein, 14 aa, Homo sapiens
  CDR3 for alpha chain variable domain of TCR clone 218686 (TRAV9-2, TRAJ39)
CALYIYNAGNMLNF

SEQ ID NO: 437372 - protein, 14 aa, Homo sapiens
  CDR3 for beta chain variable domain of TCR clone 218686 (TRBV7-9, TRBJ2-1)
CASSPRDSLYEQFF

SEQ ID NO: 437373 - protein, 12 aa, Homo sapiens
  CDR3 for alpha chain variable domain of TCR clone 218687 (TRAV13-1, TRAJ53)
AASGGSNYKLTF

SEQ ID NO: 437374 - protein, 15 aa, Homo sapiens
  CDR3 for beta chain variable domain of TCR clone 218687 (TRBV5-1, TRBJ2-1)
CARSPPRAPYNKQFF

SEQ ID NO: 437375 - protein, 14 aa, Homo sapiens
  CDR3 for alpha chain variable domain of TCR clone 218688 (TRAV35, TRAJ46)
CAGPQKSSGDKLTF

SEQ ID NO: 437376 - protein, 16 aa, Homo sapiens
  CDR3 for beta chain variable domain of TCR clone 218688 (TRBV12-5, TRBJ2-5)
CASGPRTSGNQETQYF

SEQ ID NO: 437377 - protein, 14 aa, Homo sapiens
  CDR3 for alpha chain variable domain of TCR clone 218689 (TRAV17, TRAJ32)
CATDPGGATNKLIF

SEQ ID NO: 437378 - protein, 14 aa, Homo sapiens
  CDR3 for beta chain variable domain of TCR clone 218689 (TRBV19, TRBJ2-7)
CASNFRDTFTGMYF

SEQ ID NO: 437379 - protein, 12 aa, Homo sapiens
  CDR3 for alpha chain variable domain of TCR clone 218690 (TRAV12-3, TRAJ41)
CAMSYSGYALNF

SEQ ID NO: 437380 - protein, 15 aa, Homo sapiens
  CDR3 for beta chain variable domain of TCR clone 218690 (TRBV5-1, TRBJ2-1)
CASRPPRAPYNEQFF

SEQ ID NO: 437381 - protein, 13 aa, Homo sapiens
  CDR3 for alpha chain variable domain of TCR clone 218691 (TRAV21, TRAJ57)
CAVTQGGSEKLVF

SEQ ID NO: 437382 - protein, 12 aa, Homo sapiens
  CDR3 for beta chain variable domain of TCR clone 218691 (TRBV2, TRBJ2-1)
CAYGPPGNEQFF

SEQ ID NO: 437383 - protein, 14 aa, Homo sapiens
  CDR3 for alpha chain variable domain of TCR clone 218692 (TRAV1-2, TRAJ16)
CAVRSASDCQKLLF

SEQ ID NO: 437384 - protein, 13 aa, Homo sapiens
  CDR3 for beta chain variable domain of TCR clone 218692 (TRBV6-3, TRBJ1-4)
CASSPGPGEKLFF

SEQ ID NO: 437385 - protein, 18 aa, Homo sapiens
  CDR3 for alpha chain variable domain of TCR clone 218693 (TRAV26-2, TRAJ54)
CILRDVEVGIQGAQKLVF

SEQ ID NO: 437386 - protein, 17 aa, Homo sapiens
  CDR3 for beta chain variable domain of TCR clone 218693 (TRBV20-1, TRBJ1-5)
CSASLSPGQVGNQPQHF

SEQ ID NO: 437387 - protein, 14 aa, Homo sapiens
  CDR3 for alpha chain variable domain of TCR clone 218694 (TRAV17, TRAJ57)
CATDASGGSEKLVF

SEQ ID NO: 437388 - protein, 14 aa, Homo sapiens
  CDR3 for beta chain variable domain of TCR clone 218694 (TRBV20-1, TRBJ2-1)
CSAQIGGSANEQFF

SEQ ID NO: 437389 - protein, 13 aa, Homo sapiens
  CDR3 for alpha chain variable domain of TCR clone 218695 (TRAV8-3, TRAJ44)
CAVVPGTASKLTF

SEQ ID NO: 437390 - protein, 14 aa, Homo sapiens
  CDR3 for beta chain variable domain of TCR clone 218695 (TRBV7-6, TRBJ2-5)
CASSLGGLRETQYF

SEQ ID NO: 437391 - protein, 11 aa, Homo sapiens
  CDR3 for alpha chain variable domain of TCR clone 218696 (TRAV13-1, TRAJ40)
CAVPGTYKYIF

SEQ ID NO: 437392 - protein, 16 aa, Homo sapiens
  CDR3 for beta chain variable domain of TCR clone 218696 (TRBV10-3, TRBJ2-3)
CAISVSRLALTDTQYF

SEQ ID NO: 437393 - protein, 17 aa, Homo sapiens
  CDR3 for alpha chain variable domain of TCR clone 218697 (TRAV2, TRAJ36)
CAVEDRRNWGKQPLLWD

SEQ ID NO: 437394 - protein, 14 aa, Homo sapiens
  CDR3 for beta chain variable domain of TCR clone 218697 (TRBV13, TRBJ2-5)
CASSLERVGETQYF

SEQ ID NO: 437395 - protein, 13 aa, Homo sapiens
  CDR3 for alpha chain variable domain of TCR clone 218698 (TRAV21, TRAJ20)
CAVGLRVDCKLSF

SEQ ID NO: 437396 - protein, 16 aa, Homo sapiens
  CDR3 for beta chain variable domain of TCR clone 218698 (TRBV6-1, TRBJ2-5)
CASSETLDRGAETQYF

SEQ ID NO: 437397 - protein, 14 aa, Homo sapiens
  CDR3 for alpha chain variable domain of TCR clone 218699 (TRAV26-1, TRAJ38)
CIADNAGNNRNLVW

SEQ ID NO: 437398 - protein, 13 aa, Homo sapiens
  CDR3 for beta chain variable domain of TCR clone 218699 (TRBV20-1, TRBJ1-1)
CSARGGGNTEAFF

SEQ ID NO: 437399 - protein, 13 aa, Homo sapiens
  CDR3 for alpha chain variable domain of TCR clone 218700 (TRAV3, TRAJ21)
CAVREPDFNKFYF

SEQ ID NO: 437400 - protein, 13 aa, Homo sapiens
  CDR3 for beta chain variable domain of TCR clone 218700 (TRBV3-1, TRBJ1-1)
CASSPGVITEAFF

SEQ ID NO: 437401 - protein, 11 aa, Homo sapiens
  CDR3 for alpha chain variable domain of TCR clone 218701 (TRAV27, TRAJ20)
CAGADDYKPSF

SEQ ID NO: 437402 - protein, 14 aa, Homo sapiens
  CDR3 for beta chain variable domain of TCR clone 218701 (TRBV11-2, TRBJ2-5)
CASSHRTVQETQYF

SEQ ID NO: 437403 - protein, 13 aa, Homo sapiens
  CDR3 for alpha chain variable domain of TCR clone 218702 (TRAV12-2, TRAJ4)
CAGFSGGYNKLIF

SEQ ID NO: 437404 - protein, 17 aa, Homo sapiens
  CDR3 for beta chain variable domain of TCR clone 218702 (TRBV20-1, TRBJ2-7)
CSASSPERRAATYEQYF

SEQ ID NO: 437405 - protein, 23 aa, Homo sapiens
  CDR3 for alpha chain variable domain of TCR clone 218703 (TRAV27, TRAJ40)
TAAQPGDTGLCLSLTSGTYKYIF

SEQ ID NO: 437406 - protein, 13 aa, Homo sapiens
  CDR3 for beta chain variable domain of TCR clone 218703 (TRBV2, TRBJ2-5)
CASGTPYQETQYF

SEQ ID NO: 437407 - protein, 14 aa, Homo sapiens
  CDR3 for alpha chain variable domain of TCR clone 218704 (TRAV38-2/DV8, TRAJ23)
FAYRSQNQGGKLIF

SEQ ID NO: 437408 - protein, 13 aa, Homo sapiens
  CDR3 for beta chain variable domain of TCR clone 218704 (TRBV24-1, TRBJ2-1)
CATSAGPYNEQFF

SEQ ID NO: 437409 - protein, 11 aa, Homo sapiens
  CDR3 for alpha chain variable domain of TCR clone 218705 (TRAV2, TRAJ23)
CAVETRGKLIF

SEQ ID NO: 437410 - protein, 14 aa, Homo sapiens
  CDR3 for beta chain variable domain of TCR clone 218705 (TRBV2, TRBJ2-3)
CASSEGQNTDTQYY

SEQ ID NO: 437411 - protein, 14 aa, Homo sapiens
  CDR3 for alpha chain variable domain of TCR clone 218706 (TRAV8-3, TRAJ39)
CAVVANNAGNMLTF

SEQ ID NO: 437412 - protein, 16 aa, Homo sapiens
  CDR3 for beta chain variable domain of TCR clone 218706 (TRBV6-1, TRBJ2-5)
CASSETLDRGAETQYF

SEQ ID NO: 437413 - protein, 15 aa, Homo sapiens
  CDR3 for alpha chain variable domain of TCR clone 218707 (TRAV8-3, TRAJ37)
CAVGARASNTGKLIF

SEQ ID NO: 437414 - protein, 15 aa, Homo sapiens
  CDR3 for beta chain variable domain of TCR clone 218707 (TRBV5-4, TRBJ2-3)
CASSLAGRVTDTLYF

SEQ ID NO: 437415 - protein, 13 aa, Homo sapiens
  CDR3 for alpha chain variable domain of TCR clone 218708 (TRAV13-2, TRAJ5)
CAVMDTGRRALTF

SEQ ID NO: 437416 - protein, 16 aa, Homo sapiens
  CDR3 for beta chain variable domain of TCR clone 218708 (TRBV2, TRBJ2-7)
CASSEPWTGPSYEQYF

SEQ ID NO: 437417 - protein, 13 aa, Homo sapiens
  CDR3 for alpha chain variable domain of TCR clone 218709 (TRAV8-3, TRAJ44)
CAVVPGTASKLTF

SEQ ID NO: 437418 - protein, 14 aa, Homo sapiens
  CDR3 for beta chain variable domain of TCR clone 218709 (TRBV11-2, TRBJ2-3)
CDSSRLARTDTQYF

SEQ ID NO: 437419 - protein, 14 aa, Homo sapiens
  CDR3 for alpha chain variable domain of TCR clone 218710 (TRAV21, TRAJ35)
CAVMLIGFGNVLHC

SEQ ID NO: 437420 - protein, 12 aa, Homo sapiens
  CDR3 for beta chain variable domain of TCR clone 218710 (TRBV7-9, TRBJ2-7)
YASSIKREEQYF

SEQ ID NO: 437421 - protein, 13 aa, Homo sapiens
  CDR3 for alpha chain variable domain of TCR clone 218711 (TRAV27, TRAJ8)
CAGGPTGFQKLVF

SEQ ID NO: 437422 - protein, 15 aa, Homo sapiens
  CDR3 for beta chain variable domain of TCR clone 218711 (TRBV5-1, TRBJ2-6)
CASSLDPSGANVLTF

SEQ ID NO: 437423 - protein, 14 aa, Homo sapiens
  CDR3 for alpha chain variable domain of TCR clone 218712 (TRAV8-6, TRAJ29)
CAVSGWAGNTPLVF

SEQ ID NO: 437424 - protein, 16 aa, Homo sapiens
  CDR3 for beta chain variable domain of TCR clone 218712 (TRBV13, TRBJ2-2)
CASSPRTGEHTGELFF

SEQ ID NO: 437425 - protein, 15 aa, Homo sapiens
  CDR3 for alpha chain variable domain of TCR clone 218713 (TRAV17, TRAJ57)
CATCPSQGGSEKLVF

SEQ ID NO: 437426 - protein, 12 aa, Homo sapiens
  CDR3 for beta chain variable domain of TCR clone 218713 (TRBV12-4, TRBJ2-7)
CASSLGGYEQYF

SEQ ID NO: 437427 - protein, 15 aa, Homo sapiens
  CDR3 for alpha chain variable domain of TCR clone 218714 (TRAV17, TRAJ16)
CATALRFSDGQKLLF

SEQ ID NO: 437428 - protein, 15 aa, Homo sapiens
  CDR3 for beta chain variable domain of TCR clone 218714 (TRBV13, TRBJ1-5)
CASGFGQGGVQPQHF

SEQ ID NO: 437429 - protein, 12 aa, Homo sapiens
  CDR3 for alpha chain variable domain of TCR clone 218715 (TRAV12-1, TRAJ34)
CVVAGATDKLIF

SEQ ID NO: 437430 - protein, 15 aa, Homo sapiens
  CDR3 for beta chain variable domain of TCR clone 218715 (TRBV6-1, TRBJ2-1)
CASSEAAYSYNEQFF

SEQ ID NO: 437431 - protein, 16 aa, Homo sapiens
  CDR3 for alpha chain variable domain of TCR clone 218716 (TRAV3, TRAJ10)
CAVRDMRAGGGNKLTC

SEQ ID NO: 437432 - protein, 14 aa, Homo sapiens
  CDR3 for beta chain variable domain of TCR clone 218716 (TRBV19, TRBJ2-1)
CASPTFVLSGEQFF

SEQ ID NO: 437433 - protein, 14 aa, Homo sapiens
  CDR3 for alpha chain variable domain of TCR clone 218717 (TRAV12-2, TRAJ52)
CAVPGGTSYGKLTF

SEQ ID NO: 437434 - protein, 13 aa, Homo sapiens
  CDR3 for beta chain variable domain of TCR clone 218717 (TRBV27, TRBJ2-7)
CASSLTTGYEQYF

SEQ ID NO: 437435 - protein, 15 aa, Homo sapiens
  CDR3 for alpha chain variable domain of TCR clone 218718 (TRAV26-1, TRAJ44)
CIARVPFGTASKLTF

SEQ ID NO: 437436 - protein, 17 aa, Homo sapiens
  CDR3 for beta chain variable domain of TCR clone 218718 (TRBV20-1, TRBJ2-1)
CSASSSGLAGSYNEQFF

SEQ ID NO: 437437 - protein, 13 aa, Homo sapiens
  CDR3 for alpha chain variable domain of TCR clone 218719 (TRAV12-2, TRAJ10)
CAAPTGGGNKPTF

SEQ ID NO: 437438 - protein, 11 aa, Homo sapiens
  CDR3 for beta chain variable domain of TCR clone 218719 (TRBV6-1, TRBJ2-1)
CASISSNEQFF

SEQ ID NO: 437439 - protein, 16 aa, Homo sapiens
  CDR3 for alpha chain variable domain of TCR clone 218720 (TRAV30, TRAJ24)
CGTEIVDADSWGKIQF

SEQ ID NO: 437440 - protein, 17 aa, Homo sapiens
  CDR3 for beta chain variable domain of TCR clone 218720 (TRBV20-1, TRBJ2-1)
CSAPPRLAGTRYNEQFF

SEQ ID NO: 437441 - protein, 14 aa, Homo sapiens
  CDR3 for alpha chain variable domain of TCR clone 218721 (TRAV13-2, TRAJ17)
CAENSKAAGNKLTF

SEQ ID NO: 437442 - protein, 15 aa, Homo sapiens
  CDR3 for beta chain variable domain of TCR clone 218721 (TRBV20-1, TRBJ1-6)
CSARAASSYNSPLHF

SEQ ID NO: 437443 - protein, 14 aa, Homo sapiens
  CDR3 for alpha chain variable domain of TCR clone 218722 (TRAV14/DV4, TRAJ54)
CAMREAPGAQKLVF

SEQ ID NO: 437444 - protein, 13 aa, Homo sapiens
  CDR3 for beta chain variable domain of TCR clone 218722 (TRBV4-1, TRBJ2-2)
CASSQENTGELFF

SEQ ID NO: 437445 - protein, 13 aa, Homo sapiens
  CDR3 for alpha chain variable domain of TCR clone 218723 (TRAV1-2, TRAJ9)
CAALNTGGFQTIF

SEQ ID NO: 437446 - protein, 13 aa, Homo sapiens
  CDR3 for beta chain variable domain of TCR clone 218723 (TRBV19, TRBJ1-2)
CASSVPGQDGYTS

SEQ ID NO: 437447 - protein, 13 aa, Homo sapiens
  CDR3 for alpha chain variable domain of TCR clone 218724 (TRAV3, TRAJ5)
CAVRDTGRRALTF

SEQ ID NO: 437448 - protein, 20 aa, Homo sapiens
  CDR3 for beta chain variable domain of TCR clone 218724 (TRBV19, TRBJ2-1)
CASSISRTVTSTRLNNEQFF

SEQ ID NO: 437449 - protein, 13 aa, Homo sapiens
  CDR3 for alpha chain variable domain of TCR clone 218725 (TRAV27, TRAJ40)
CAGVLASPYKYIF

SEQ ID NO: 437450 - protein, 16 aa, Homo sapiens
  CDR3 for beta chain variable domain of TCR clone 218725 (TRBV11-3, TRBJ2-3)
CASSSISGAGTDTQYF

SEQ ID NO: 437451 - protein, 14 aa, Homo sapiens
  CDR3 for alpha chain variable domain of TCR clone 218726 (TRAV17, TRAJ57)
CATDPQGGSEKLVF

SEQ ID NO: 437452 - protein, 20 aa, Homo sapiens
  CDR3 for beta chain variable domain of TCR clone 218726 (TRBV6-6, TRBJ1-3)
CASSYSKWDSISGNTIYLER

SEQ ID NO: 437453 - protein, 12 aa, Homo sapiens
  CDR3 for alpha chain variable domain of TCR clone 218727 (TRAV27, TRAJ36)
CAGMTGANNLFF

SEQ ID NO: 437454 - protein, 16 aa, Homo sapiens
  CDR3 for beta chain variable domain of TCR clone 218727 (TRBV13, TRBJ2-2)
CASSTRTGEHTGELFF

SEQ ID NO: 437455 - protein, 15 aa, Homo sapiens
  CDR3 for alpha chain variable domain of TCR clone 218728 (TRAV3, TRAJ4)
CAVRDGTGGYNKLIF

SEQ ID NO: 437456 - protein, 18 aa, Homo sapiens
  CDR3 for beta chain variable domain of TCR clone 218728 (TRBV28, TRBJ2-1)
CASSSTSGRANSYNEQFF

SEQ ID NO: 437457 - protein, 15 aa, Homo sapiens
  CDR3 for alpha chain variable domain of TCR clone 218729 (TRAV3, TRAJ22)
CAVRDRGGSARQLTF

SEQ ID NO: 437458 - protein, 13 aa, Homo sapiens
  CDR3 for beta chain variable domain of TCR clone 218729 (TRBV5-1, TRBJ2-2)
CASIVARTGELFF

SEQ ID NO: 437459 - protein, 12 aa, Homo sapiens
  CDR3 for alpha chain variable domain of TCR clone 218730 (TRAV13-2, TRAJ23)
CAERHRGGKLIF

SEQ ID NO: 437460 - protein, 16 aa, Homo sapiens
  CDR3 for beta chain variable domain of TCR clone 218730 (TRBV20-1, TRBJ1-4)
CSAPGQVLLTNEKLFF

SEQ ID NO: 437461 - protein, 15 aa, Homo sapiens
  CDR3 for alpha chain variable domain of TCR clone 218731 (TRAV17, TRAJ57)
CATGPSQGGSEKLVF

SEQ ID NO: 437462 - protein, 17 aa, Homo sapiens
  CDR3 for beta chain variable domain of TCR clone 218731 (TRBV4-1, TRBJ1-4)
CASSQGGPRGVEEKLFF

SEQ ID NO: 437463 - protein, 14 aa, Homo sapiens
  CDR3 for alpha chain variable domain of TCR clone 218732 (TRAV13-1, TRAJ35)
CAASKGGFGNVLHC

SEQ ID NO: 437464 - protein, 18 aa, Homo sapiens
  CDR3 for beta chain variable domain of TCR clone 218732 (TRBV13, TRBJ2-6)
CASSPMTSGGSGANVLTF

SEQ ID NO: 437465 - protein, 14 aa, Homo sapiens
  CDR3 for alpha chain variable domain of TCR clone 218733 (TRAV1-2, TRAJ8)
CAVREDTGFQKLVF

SEQ ID NO: 437466 - protein, 16 aa, Homo sapiens
  CDR3 for beta chain variable domain of TCR clone 218733 (TRBV10-2, TRBJ2-2)
SAPAVHRQADAGELFF

SEQ ID NO: 437467 - protein, 10 aa, Homo sapiens
  CDR3 for alpha chain variable domain of TCR clone 218734 (TRAV38-2/DV8, TRAJ40)
CASGTYKYIF

SEQ ID NO: 437468 - protein, 12 aa, Homo sapiens
  CDR3 for beta chain variable domain of TCR clone 218734 (TRBV7-9, TRBJ2-7)
CATRTDAYEQYF

SEQ ID NO: 437469 - protein, 14 aa, Homo sapiens
  CDR3 for alpha chain variable domain of TCR clone 218735 (TRAV1-2, TRAJ16)
CAVNRFSDGQKLLF

SEQ ID NO: 437470 - protein, 14 aa, Homo sapiens
  CDR3 for beta chain variable domain of TCR clone 218735 (TRBV7-9, TRBJ1-6)
ASSSPGRGNSPLHF

SEQ ID NO: 437471 - protein, 15 aa, Homo sapiens
  CDR3 for alpha chain variable domain of TCR clone 218736 (TRAV12-2, TRAJ53)
CAVNGGGGSNYKLKF

SEQ ID NO: 437472 - protein, 17 aa, Homo sapiens
  CDR3 for beta chain variable domain of TCR clone 218736 (TRBV7-3, TRBJ2-3)
RASSFMKRMRGADTQYF

SEQ ID NO: 437473 - protein, 18 aa, Homo sapiens
  CDR3 for alpha chain variable domain of TCR clone 218737 (TRAV38-2/DV8, TRAJ42)
CAYRSADLTGGSHGNLIF

SEQ ID NO: 437474 - protein, 12 aa, Homo sapiens
  CDR3 for beta chain variable domain of TCR clone 218737 (TRBV11-2, TRBJ2-2)
CASSLGGGELFF

SEQ ID NO: 437475 - protein, 14 aa, Homo sapiens
  CDR3 for alpha chain variable domain of TCR clone 218738 (TRAV4, TRAJ10)
CLVGDTGGGNKLSF

SEQ ID NO: 437476 - protein, 12 aa, Homo sapiens
  CDR3 for beta chain variable domain of TCR clone 218738 (TRBV11-2, TRBJ2-2)
CASSLGGGELFF

SEQ ID NO: 437477 - protein, 18 aa, Homo sapiens
  CDR3 for alpha chain variable domain of TCR clone 218739 (TRAV12-3, TRAJ52)
CAMSVGGAGGTSYGKLTF

SEQ ID NO: 437478 - protein, 15 aa, Homo sapiens
  CDR3 for beta chain variable domain of TCR clone 218739 (TRBV20-1, TRBJ2-7)
CSARGPLAGGREQYF

SEQ ID NO: 437479 - protein, 11 aa, Homo sapiens
  CDR3 for alpha chain variable domain of TCR clone 218740 (TRAV21, TRAJ4)
HVSGGYTKLIF

SEQ ID NO: 437480 - protein, 13 aa, Homo sapiens
  CDR3 for beta chain variable domain of TCR clone 218740 (TRBV7-3, TRBJ2-5)
CASSLTAGETQYF

SEQ ID NO: 437481 - protein, 14 aa, Homo sapiens
  CDR3 for alpha chain variable domain of TCR clone 218741 (TRAV38-2/DV8, TRAJ23)
CAYRSQNQGGKLIF

SEQ ID NO: 437482 - protein, 13 aa, Homo sapiens
  CDR3 for beta chain variable domain of TCR clone 218741 (TRBV7-9, TRBJ1-2)
CASSLKQNYGYTF

SEQ ID NO: 437483 - protein, 14 aa, Homo sapiens
  CDR3 for alpha chain variable domain of TCR clone 218742 (TRAV12-3, TRAJ22)
CAMGLFGSARQLTF

SEQ ID NO: 437484 - protein, 16 aa, Homo sapiens
  CDR3 for beta chain variable domain of TCR clone 218742 (TRBV13, TRBJ2-3)
CQQPLQGSGGRNTQYF

SEQ ID NO: 437485 - protein, 16 aa, Homo sapiens
  CDR3 for alpha chain variable domain of TCR clone 218743 (TRAV12-3, TRAJ53)
CAMSPGSGGSNYKLTF

SEQ ID NO: 437486 - protein, 14 aa, Homo sapiens
  CDR3 for beta chain variable domain of TCR clone 218743 (TRBV6-3, TRBJ2-2)
CASTYTPDTGELFF

SEQ ID NO: 437487 - protein, 13 aa, Homo sapiens
  CDR3 for alpha chain variable domain of TCR clone 218744 (TRAV21, TRAJ33)
CAVAGDSNYQLIW

SEQ ID NO: 437488 - protein, 14 aa, Homo sapiens
  CDR3 for beta chain variable domain of TCR clone 218744 (TRBV7-3, TRBJ2-7)
CASSLKADSYEQYF

SEQ ID NO: 437489 - protein, 13 aa, Homo sapiens
  CDR3 for alpha chain variable domain of TCR clone 218745 (TRAV8-6, TRAJ8)
CAFMNTGFQKLVF

SEQ ID NO: 437490 - protein, 15 aa, Homo sapiens
  CDR3 for beta chain variable domain of TCR clone 218745 (TRBV28, TRBJ2-5)
CASSSGRVIQDTQYF

SEQ ID NO: 437491 - protein, 13 aa, Homo sapiens
  CDR3 for alpha chain variable domain of TCR clone 218746 (TRAV21, TRAJ27)
GAARPGNAGKSTL

SEQ ID NO: 437492 - protein, 14 aa, Homo sapiens
  CDR3 for beta chain variable domain of TCR clone 218746 (TRBV7-6, TRBJ2-3)
CASSLGTVTDTQYF

SEQ ID NO: 437493 - protein, 14 aa, Homo sapiens
  CDR3 for alpha chain variable domain of TCR clone 218747 (TRAV1-2, TRAJ8)
CAVREDTGFQKLVF

SEQ ID NO: 437494 - protein, 11 aa, Homo sapiens
  CDR3 for beta chain variable domain of TCR clone 218747 (TRBV12-4, TRBJ2-3)
FASTATDTQYF

SEQ ID NO: 437495 - protein, 14 aa, Homo sapiens
  CDR3 for alpha chain variable domain of TCR clone 218748 (TRAV1-1, TRAJ27)
CAVIYNTNAGKSTF

SEQ ID NO: 437496 - protein, 14 aa, Homo sapiens
  CDR3 for beta chain variable domain of TCR clone 218748 (TRBV7-2, TRBJ1-5)
CASSPRGGPQPQHF

SEQ ID NO: 437497 - protein, 14 aa, Homo sapiens
  CDR3 for alpha chain variable domain of TCR clone 218749 (TRAV9-2, TRAJ39)
CALYIYNAGNMPTF

SEQ ID NO: 437498 - protein, 16 aa, Homo sapiens
  CDR3 for beta chain variable domain of TCR clone 218749 (TRBV20-1, TRBJ1-4)
CSAPGQGLLTNEKLFF

SEQ ID NO: 437499 - protein, 16 aa, Homo sapiens
  CDR3 for alpha chain variable domain of TCR clone 218750 (TRAV14/DV4, TRAJ15)
CAMREGSFQAGTALIF

SEQ ID NO: 437500 - protein, 18 aa, Homo sapiens
  CDR3 for beta chain variable domain of TCR clone 218750 (TRBV12-4, TRBJ2-4)
CASSRTGAVDVANNIQYF

SEQ ID NO: 437501 - protein, 12 aa, Homo sapiens
  CDR3 for alpha chain variable domain of TCR clone 218751 (TRAV12-3, TRAJ17)
CAMTITGNKLTF

SEQ ID NO: 437502 - protein, 13 aa, Homo sapiens
  CDR3 for beta chain variable domain of TCR clone 218751 (TRBV9, TRBJ2-2)
CASSPRPAGELFF

SEQ ID NO: 437503 - protein, 12 aa, Homo sapiens
  CDR3 for alpha chain variable domain of TCR clone 218752 (TRAV2, TRAJ31)
CAVEDNNARLMF

SEQ ID NO: 437504 - protein, 13 aa, Homo sapiens
  CDR3 for beta chain variable domain of TCR clone 218752 (TRBV12-4, TRBJ1-2)
CASSLDSNYGYTF

SEQ ID NO: 437505 - protein, 13 aa, Homo sapiens
  CDR3 for alpha chain variable domain of TCR clone 218753 (TRAV21, TRAJ27)
CAACPGNAGKSTF

SEQ ID NO: 437506 - protein, 14 aa, Homo sapiens
  CDR3 for beta chain variable domain of TCR clone 218753 (TRBV7-6, TRBJ2-3)
CASSLGPVTDTQYF

SEQ ID NO: 437507 - protein, 13 aa, Homo sapiens
  CDR3 for alpha chain variable domain of TCR clone 218754 (TRAV12-3, TRAJ9)
CSMRNTGGFKTIF

SEQ ID NO: 437508 - protein, 14 aa, Homo sapiens
  CDR3 for beta chain variable domain of TCR clone 218754 (TRBV11-2, TRBJ2-7)
CASSSTGEGYEQYF

SEQ ID NO: 437509 - protein, 14 aa, Homo sapiens
  CDR3 for alpha chain variable domain of TCR clone 218755 (TRAV12-2, TRAJ5)
CAVNRSTGRRALTF

SEQ ID NO: 437510 - protein, 21 aa, Homo sapiens
  CDR3 for beta chain variable domain of TCR clone 218755 (TRBV2, TRBJ2-7)
CASRGTTQLAALSTPFYEQYF

SEQ ID NO: 437511 - protein, 13 aa, Homo sapiens
  CDR3 for alpha chain variable domain of TCR clone 218756 (TRAV26-2, TRAJ43)
CILRAVNNNDMRF

SEQ ID NO: 437512 - protein, 16 aa, Homo sapiens
  CDR3 for beta chain variable domain of TCR clone 218756 (TRBV7-3, TRBJ2-2)
CASSLKRGTLSGELFF

SEQ ID NO: 437513 - protein, 14 aa, Homo sapiens
  CDR3 for alpha chain variable domain of TCR clone 218757 (TRAV17, TRAJ57)
CATDPQGGSEKLVF

SEQ ID NO: 437514 - protein, 14 aa, Homo sapiens
  CDR3 for beta chain variable domain of TCR clone 218757 (TRBV7-2, TRBJ2-7)
CASSPKTSFYEQHF

SEQ ID NO: 437515 - protein, 12 aa, Homo sapiens
  CDR3 for alpha chain variable domain of TCR clone 218758 (TRAV21, TRAJ49)
CAVTNTGNQFYF

SEQ ID NO: 437516 - protein, 17 aa, Homo sapiens
  CDR3 for beta chain variable domain of TCR clone 218758 (TRBV13, TRBJ2-3)
CASRLSRVAGGGNTQYF

SEQ ID NO: 437517 - protein, 16 aa, Homo sapiens
  CDR3 for alpha chain variable domain of TCR clone 218759 (TRAV12-3, TRAJ45)
CAMGWGSGGGADGLTF

SEQ ID NO: 437518 - protein, 15 aa, Homo sapiens
  CDR3 for beta chain variable domain of TCR clone 218759 (TRBV3-1, TRBJ1-2)
CASSHPGTPGYGHTF

SEQ ID NO: 437519 - protein, 16 aa, Homo sapiens
  CDR3 for alpha chain variable domain of TCR clone 218760 (TRAV30, TRAJ24)
CGTEIVDAGSWGKFQF

SEQ ID NO: 437520 - protein, 18 aa, Homo sapiens
  CDR3 for beta chain variable domain of TCR clone 218760 (TRBV4-1, TRBJ1-5)
CASSQDPRGQGLNQPQHF

SEQ ID NO: 437521 - protein, 13 aa, Homo sapiens
  CDR3 for alpha chain variable domain of TCR clone 218761 (TRAV13-2, TRAJ48)
CAEKDFGNEKLTF

SEQ ID NO: 437522 - protein, 15 aa, Homo sapiens
  CDR3 for beta chain variable domain of TCR clone 218761 (TRBV7-9, TRBJ1-6)
CASSSPGRGNSPLHF

SEQ ID NO: 437523 - protein, 15 aa, Homo sapiens
  CDR3 for alpha chain variable domain of TCR clone 218762 (TRAV17, TRAJ35)
CATAFVIGFGNVLNG

SEQ ID NO: 437524 - protein, 14 aa, Homo sapiens
  CDR3 for beta chain variable domain of TCR clone 218762 (TRBV6-1, TRBJ1-3)
CASVQGGGGNTIYF

SEQ ID NO: 437525 - protein, 14 aa, Homo sapiens
  CDR3 for alpha chain variable domain of TCR clone 218763 (TRAV8-3, TRAJ42)
CAVGAWGSQGNLIF

SEQ ID NO: 437526 - protein, 16 aa, Homo sapiens
  CDR3 for beta chain variable domain of TCR clone 218763 (TRBV9, TRBJ2-2)
CASSATGKGNTGELFF

SEQ ID NO: 437527 - protein, 14 aa, Homo sapiens
  CDR3 for alpha chain variable domain of TCR clone 218764 (TRAV13-1, TRAJ44)
CAAKATGTASKLTF

SEQ ID NO: 437528 - protein, 14 aa, Homo sapiens
  CDR3 for beta chain variable domain of TCR clone 218764 (TRBV25-1, TRBJ1-1)
CASTHLGGNTEAVF

SEQ ID NO: 437529 - protein, 18 aa, Homo sapiens
  CDR3 for alpha chain variable domain of TCR clone 218765 (TRAV26-2, TRAJ54)
CILRDVEVGIQGAQKLVF

SEQ ID NO: 437530 - protein, 15 aa, Homo sapiens
  CDR3 for beta chain variable domain of TCR clone 218765 (TRBV28, TRBJ2-1)
CASSPPGLADHEQFF

SEQ ID NO: 437531 - protein, 14 aa, Homo sapiens
  CDR3 for alpha chain variable domain of TCR clone 218766 (TRAV36/DV7, TRAJ45)
CPLYSGGGADGLTF

SEQ ID NO: 437532 - protein, 15 aa, Homo sapiens
  CDR3 for beta chain variable domain of TCR clone 218766 (TRBV5-1, TRBJ2-7)
CASSLNGGPAREQYF

SEQ ID NO: 437533 - protein, 15 aa, Homo sapiens
  CDR3 for alpha chain variable domain of TCR clone 218767 (TRAV12-3, TRAJ54)
CAMSPPFQGAQKLAF

SEQ ID NO: 437534 - protein, 15 aa, Homo sapiens
  CDR3 for beta chain variable domain of TCR clone 218767 (TRBV20-1, TRBJ2-7)
CSARDRVSGMDEQYF

SEQ ID NO: 437535 - protein, 18 aa, Homo sapiens
  CDR3 for alpha chain variable domain of TCR clone 218768 (TRAV21, TRAJ52)
CAVRPSPAGGTSYGKLTF

SEQ ID NO: 437536 - protein, 15 aa, Homo sapiens
  CDR3 for beta chain variable domain of TCR clone 218768 (TRBV19, TRBJ1-1)
CASTSGQIQNSEAFF

SEQ ID NO: 437537 - protein, 11 aa, Homo sapiens
  CDR3 for alpha chain variable domain of TCR clone 218769 (TRAV1-2, TRAJ20)
CAVANDYKLSF

SEQ ID NO: 437538 - protein, 12 aa, Homo sapiens
  CDR3 for beta chain variable domain of TCR clone 218769 (TRBV11-2, TRBJ2-5)
CASSLDTQTQYF

SEQ ID NO: 437539 - protein, 12 aa, Homo sapiens
  CDR3 for alpha chain variable domain of TCR clone 218770 (TRAV12-2, TRAJ7)
CAVMRGNNRLAF

SEQ ID NO: 437540 - protein, 17 aa, Homo sapiens
  CDR3 for beta chain variable domain of TCR clone 218770 (TRBV7-9, TRBJ2-3)
CASSPTVAGDLTDAQYF

SEQ ID NO: 437541 - protein, 14 aa, Homo sapiens
  CDR3 for alpha chain variable domain of TCR clone 218771 (TRAV12-2, TRAJ17)
CAVLFKAAGNKLTF

SEQ ID NO: 437542 - protein, 17 aa, Homo sapiens
  CDR3 for beta chain variable domain of TCR clone 218771 (TRBV11-2, TRBJ2-1)
CASSICPPGVEYNEQFF

SEQ ID NO: 437543 - protein, 16 aa, Homo sapiens
  CDR3 for alpha chain variable domain of TCR clone 218772 (TRAV1-2, TRAJ10)
CAVRGVLTGGGNKLTF

SEQ ID NO: 437544 - protein, 14 aa, Homo sapiens
  CDR3 for beta chain variable domain of TCR clone 218772 (TRBV12-4, TRBJ2-5)
RASSLWQKQETQYF

SEQ ID NO: 437545 - protein, 10 aa, Homo sapiens
  CDR3 for alpha chain variable domain of TCR clone 218773 (TRAV1-2, TRAJ31)
CVSEDARLMF

SEQ ID NO: 437546 - protein, 17 aa, Homo sapiens
  CDR3 for beta chain variable domain of TCR clone 218773 (TRBV28, TRBJ2-5)
CASSTPEGDALQETQYF

SEQ ID NO: 437547 - protein, 18 aa, Homo sapiens
  CDR3 for alpha chain variable domain of TCR clone 218774 (TRAV13-1, TRAJ52)
CAASKRSAGGTSYGKLTF

SEQ ID NO: 437548 - protein, 15 aa, Homo sapiens
  CDR3 for beta chain variable domain of TCR clone 218774 (TRBV10-3, TRBJ2-7)
CASKLAVNYESTSGR

SEQ ID NO: 437549 - protein, 18 aa, Homo sapiens
  CDR3 for alpha chain variable domain of TCR clone 218775 (TRAV26-2, TRAJ45)
CILRLWVYSGGGADGLTF

SEQ ID NO: 437550 - protein, 17 aa, Homo sapiens
  CDR3 for beta chain variable domain of TCR clone 218775 (TRBV28, TRBJ2-3)
CASSPTPAGGRVDTQYF

SEQ ID NO: 437551 - protein, 15 aa, Homo sapiens
  CDR3 for alpha chain variable domain of TCR clone 218776 (TRAV26-1, TRAJ29)
CIVRVEGSGNKPLVF

SEQ ID NO: 437552 - protein, 14 aa, Homo sapiens
  CDR3 for beta chain variable domain of TCR clone 218776 (TRBV18, TRBJ2-5)
CASSPGVSQEIQYF

SEQ ID NO: 437553 - protein, 14 aa, Homo sapiens
  CDR3 for alpha chain variable domain of TCR clone 218777 (TRAV1-2, TRAJ16)
CAVNRFSDGQKLLF

SEQ ID NO: 437554 - protein, 15 aa, Homo sapiens
  CDR3 for beta chain variable domain of TCR clone 218777 (TRBV24-1, TRBJ2-5)
CAPSETTGAVGAQYF

SEQ ID NO: 437555 - protein, 18 aa, Homo sapiens
  CDR3 for alpha chain variable domain of TCR clone 218778 (TRAV26-1, TRAJ22)
CIVRVALISSGSAGKLTF

SEQ ID NO: 437556 - protein, 13 aa, Homo sapiens
  CDR3 for beta chain variable domain of TCR clone 218778 (TRBV13, TRBJ2-5)
CASSPGVGETQYF

SEQ ID NO: 437557 - protein, 15 aa, Homo sapiens
  CDR3 for alpha chain variable domain of TCR clone 218779 (TRAV8-4, TRAJ47)
CAVSDPEEYGNKLVF

SEQ ID NO: 437558 - protein, 15 aa, Homo sapiens
  CDR3 for beta chain variable domain of TCR clone 218779 (TRBV11-2, TRBJ2-1)
CAGSLGPDSYNEQFF

SEQ ID NO: 437559 - protein, 14 aa, Homo sapiens
  CDR3 for alpha chain variable domain of TCR clone 218780 (TRAV1-2, TRAJ8)
CAVREDTGFQKLVF

SEQ ID NO: 437560 - protein, 20 aa, Homo sapiens
  CDR3 for beta chain variable domain of TCR clone 218780 (TRBV7-8, TRBJ2-2)
CASSHLFPGPTIQITGELFF

SEQ ID NO: 437561 - protein, 14 aa, Homo sapiens
  CDR3 for alpha chain variable domain of TCR clone 218781 (TRAV34, TRAJ44)
CGADGTGTASNLTF

SEQ ID NO: 437562 - protein, 15 aa, Homo sapiens
  CDR3 for beta chain variable domain of TCR clone 218781 (TRBV5-1, TRBJ2-1)
CASSPPRAPYNEQFF

SEQ ID NO: 437563 - protein, 14 aa, Homo sapiens
  CDR3 for alpha chain variable domain of TCR clone 218782 (TRAV12-1, TRAJ43)
CVVNGRSNNNDMRF

SEQ ID NO: 437564 - protein, 13 aa, Homo sapiens
  CDR3 for beta chain variable domain of TCR clone 218782 (TRBV10-3, TRBJ2-7)
CASKLAVKYEQYF

SEQ ID NO: 437565 - protein, 14 aa, Homo sapiens
  CDR3 for alpha chain variable domain of TCR clone 218783 (TRAV8-4, TRAJ37)
CAVSEPSNTGKLIF

SEQ ID NO: 437566 - protein, 17 aa, Homo sapiens
  CDR3 for beta chain variable domain of TCR clone 218783 (TRBV5-1, TRBJ2-1)
CASSLGQISFSYNEQFF

SEQ ID NO: 437567 - protein, 13 aa, Homo sapiens
  CDR3 for alpha chain variable domain of TCR clone 218784 (TRAV8-4, TRAJ36)
CAVSVAGANNLFF

SEQ ID NO: 437568 - protein, 15 aa, Homo sapiens
  CDR3 for beta chain variable domain of TCR clone 218784 (TRBV7-2, TRBJ2-5)
CASSLEGRGAETQYF

SEQ ID NO: 437569 - protein, 12 aa, Homo sapiens
  CDR3 for alpha chain variable domain of TCR clone 218785 (TRAV16, TRAJ22)
CALVVSARQLTF

SEQ ID NO: 437570 - protein, 14 aa, Homo sapiens
  CDR3 for beta chain variable domain of TCR clone 218785 (TRBV11-2, TRBJ2-3)
CASSSIASTDTQYF

SEQ ID NO: 437571 - protein, 11 aa, Homo sapiens
  CDR3 for alpha chain variable domain of TCR clone 218786 (TRAV12-2, TRAJ29)
CAVTLRSPLVF

SEQ ID NO: 437572 - protein, 13 aa, Homo sapiens
  CDR3 for beta chain variable domain of TCR clone 218786 (TRBV3-1, TRBJ2-7)
CASSQQGPYEQYF

SEQ ID NO: 437573 - protein, 14 aa, Homo sapiens
  CDR3 for alpha chain variable domain of TCR clone 218787 (TRAV29/DV5, TRAJ45)
CAASFRGGAAGLTF

SEQ ID NO: 437574 - protein, 11 aa, Homo sapiens
  CDR3 for beta chain variable domain of TCR clone 218787 (TRBV11-2, TRBJ2-2)
CAGSLPGELFF

SEQ ID NO: 437575 - protein, 18 aa, Homo sapiens
  CDR3 for alpha chain variable domain of TCR clone 218788 (TRAV13-1, TRAJ52)
CAAKNPNAGGTSYGKLTF

SEQ ID NO: 437576 - protein, 14 aa, Homo sapiens
  CDR3 for beta chain variable domain of TCR clone 218788 (TRBV7-3, TRBJ2-1)
CASSLAVGTNEQFF

SEQ ID NO: 437577 - protein, 16 aa, Homo sapiens
  CDR3 for alpha chain variable domain of TCR clone 218789 (TRAV30, TRAJ24)
CGTEIVDADSWGKFHF

SEQ ID NO: 437578 - protein, 15 aa, Homo sapiens
  CDR3 for beta chain variable domain of TCR clone 218789 (TRBV4-3, TRBJ2-7)
CASSQGGRGIYEQYF

SEQ ID NO: 437579 - protein, 16 aa, Homo sapiens
  CDR3 for alpha chain variable domain of TCR clone 218790 (TRAV30, TRAJ24)
CGTEIVDADSWGQVQF

SEQ ID NO: 437580 - protein, 14 aa, Homo sapiens
  CDR3 for beta chain variable domain of TCR clone 218790 (TRBV12-5, TRBJ2-5)
CASGSRTHQETQYF

SEQ ID NO: 437581 - protein, 13 aa, Homo sapiens
  CDR3 for alpha chain variable domain of TCR clone 218791 (TRAV13-2, TRAJ13)
CAERPGGYQKVTF

SEQ ID NO: 437582 - protein, 15 aa, Homo sapiens
  CDR3 for beta chain variable domain of TCR clone 218791 (TRBV11-3, TRBJ2-1)
CASSLAGQTYNEQFL

SEQ ID NO: 437583 - protein, 13 aa, Homo sapiens
  CDR3 for alpha chain variable domain of TCR clone 218792 (TRAV12-1, TRAJ23)
CVVNLMDGGKLIF

SEQ ID NO: 437584 - protein, 15 aa, Homo sapiens
  CDR3 for beta chain variable domain of TCR clone 218792 (TRBV20-1, TRBJ2-7)
CSARDRVSGMDEQYF

SEQ ID NO: 437585 - protein, 12 aa, Homo sapiens
  CDR3 for alpha chain variable domain of TCR clone 218793 (TRAV16, TRAJ10)
CSRMGGGNKLTL

SEQ ID NO: 437586 - protein, 15 aa, Homo sapiens
  CDR3 for beta chain variable domain of TCR clone 218793 (TRBV6-3, TRBJ2-7)
CASSSPGTVFYEQYS

SEQ ID NO: 437587 - protein, 14 aa, Homo sapiens
  CDR3 for alpha chain variable domain of TCR clone 218794 (TRAV1-2, TRAJ16)
CAVNRFSDGQKLLF

SEQ ID NO: 437588 - protein, 13 aa, Homo sapiens
  CDR3 for beta chain variable domain of TCR clone 218794 (TRBV20-1, TRBJ2-1)
CSATRGRLNEQFF

SEQ ID NO: 437589 - protein, 14 aa, Homo sapiens
  CDR3 for alpha chain variable domain of TCR clone 218795 (TRAV23/DV6, TRAJ11)
CEASLESGYSTLTF

SEQ ID NO: 437590 - protein, 13 aa, Homo sapiens
  CDR3 for beta chain variable domain of TCR clone 218795 (TRBV4-1, TRBJ2-5)
CASSLTRGETQYF

SEQ ID NO: 437591 - protein, 18 aa, Homo sapiens
  CDR3 for alpha chain variable domain of TCR clone 218796 (TRAV26-1, TRAJ23)
CIVRVGLEVWNQGGRLIF

SEQ ID NO: 437592 - protein, 15 aa, Homo sapiens
  CDR3 for beta chain variable domain of TCR clone 218796 (TRBV19, TRBJ1-2)
CASSVGQVLNYGYTF

SEQ ID NO: 437593 - protein, 15 aa, Homo sapiens
  CDR3 for alpha chain variable domain of TCR clone 218797 (TRAV3, TRAJ40)
CAVRDVTSGTNKYIF

SEQ ID NO: 437594 - protein, 13 aa, Homo sapiens
  CDR3 for beta chain variable domain of TCR clone 218797 (TRBV7-9, TRBJ1-2)
CASSLKQNYGYTF

SEQ ID NO: 437595 - protein, 21 aa, Homo sapiens
  CDR3 for alpha chain variable domain of TCR clone 218798 (TRAV2, TRAJ39)
CGRQMLLFTTVHNNAGNMLTF

SEQ ID NO: 437596 - protein, 16 aa, Homo sapiens
  CDR3 for beta chain variable domain of TCR clone 218798 (TRBV24-1, TRBJ2-3)
CATSGYRDRDTDTQYF

SEQ ID NO: 437597 - protein, 14 aa, Homo sapiens
  CDR3 for alpha chain variable domain of TCR clone 218799 (TRAV12-2, TRAJ6)
CASKWGGGSYIPTF

SEQ ID NO: 437598 - protein, 13 aa, Homo sapiens
  CDR3 for beta chain variable domain of TCR clone 218799 (TRBV2, TRBJ1-1)
CASSEGGNTEAFF

SEQ ID NO: 437599 - protein, 10 aa, Homo sapiens
  CDR3 for alpha chain variable domain of TCR clone 218800 (TRAV12-3, TRAJ49)
CAMNDDQFYF

SEQ ID NO: 437600 - protein, 13 aa, Homo sapiens
  CDR3 for beta chain variable domain of TCR clone 218800 (TRBV12-4, TRBJ1-1)
CASSQDWGAEAFF

SEQ ID NO: 437601 - protein, 15 aa, Homo sapiens
  CDR3 for alpha chain variable domain of TCR clone 218801 (TRAV3, TRAJ47)
CAVRDIGEYGNKLVF

SEQ ID NO: 437602 - protein, 12 aa, Homo sapiens
  CDR3 for beta chain variable domain of TCR clone 218801 (TRBV19, TRBJ1-1)
CASSTTGIEAFF

SEQ ID NO: 437603 - protein, 12 aa, Homo sapiens
  CDR3 for alpha chain variable domain of TCR clone 218802 (TRAV8-2, TRAJ6)
CVVSKGIYIPTF

SEQ ID NO: 437604 - protein, 18 aa, Homo sapiens
  CDR3 for beta chain variable domain of TCR clone 218802 (TRBV4-1, TRBJ2-3)
CASSQGGASGGATDTQYF

SEQ ID NO: 437605 - protein, 13 aa, Homo sapiens
  CDR3 for alpha chain variable domain of TCR clone 218803 (TRAV38-1, TRAJ42)
CARRGGSQGNLIF

SEQ ID NO: 437606 - protein, 10 aa, Homo sapiens
  CDR3 for beta chain variable domain of TCR clone 218803 (TRBV2, TRBJ2-5)
CASSAATQYF

SEQ ID NO: 437607 - protein, 13 aa, Homo sapiens
  CDR3 for alpha chain variable domain of TCR clone 218804 (TRAV8-3, TRAJ43)
CAVGPDNNKDMRF

SEQ ID NO: 437608 - protein, 14 aa, Homo sapiens
  CDR3 for beta chain variable domain of TCR clone 218804 (TRBV19, TRBJ2-1)
CASPTFVLSGEQFF

SEQ ID NO: 437609 - protein, 12 aa, Homo sapiens
  CDR3 for alpha chain variable domain of TCR clone 218805 (TRAV25, TRAJ52)
RPGGTSYGKLTF

SEQ ID NO: 437610 - protein, 17 aa, Homo sapiens
  CDR3 for beta chain variable domain of TCR clone 218805 (TRBV7-8, TRBJ2-6)
CASSAGTGGAGANVLTF

SEQ ID NO: 437611 - protein, 11 aa, Homo sapiens
  CDR3 for alpha chain variable domain of TCR clone 218806 (TRAV3, TRAJ21)
CAVGNFNKFYF

SEQ ID NO: 437612 - protein, 15 aa, Homo sapiens
  CDR3 for beta chain variable domain of TCR clone 218806 (TRBV18, TRBJ2-7)
CASSPTFMDSYEQYF

SEQ ID NO: 437613 - protein, 16 aa, Homo sapiens
  CDR3 for alpha chain variable domain of TCR clone 218807 (TRAV12-1, TRAJ43)
CVVKPNRFGEGTRLTV

SEQ ID NO: 437614 - protein, 13 aa, Homo sapiens
  CDR3 for beta chain variable domain of TCR clone 218807 (TRBV20-1, TRBJ1-1)
CSARGGGNTEAFF

SEQ ID NO: 437615 - protein, 12 aa, Homo sapiens
  CDR3 for alpha chain variable domain of TCR clone 218808 (TRAV12-3, TRAJ17)
CALTLTGNKLTF

SEQ ID NO: 437616 - protein, 15 aa, Homo sapiens
  CDR3 for beta chain variable domain of TCR clone 218808 (TRBV20-1, TRBJ2-7)
CSARDRVSGMDEQYL

SEQ ID NO: 437617 - protein, 14 aa, Homo sapiens
  CDR3 for alpha chain variable domain of TCR clone 218809 (TRAV8-4, TRAJ54)
CAVSEVLGAQKLVF

SEQ ID NO: 437618 - protein, 17 aa, Homo sapiens
  CDR3 for beta chain variable domain of TCR clone 218809 (TRBV4-1, TRBJ1-4)
CASSQEGLRGVEEKLFF

SEQ ID NO: 437619 - protein, 15 aa, Homo sapiens
  CDR3 for alpha chain variable domain of TCR clone 218810 (TRAV26-2, TRAJ26)
CILRDFDNYGQNFVF

SEQ ID NO: 437620 - protein, 11 aa, Homo sapiens
  CDR3 for beta chain variable domain of TCR clone 218810 (TRBV29-1, TRBJ2-5)
WTPYAGETQYF

SEQ ID NO: 437621 - protein, 18 aa, Homo sapiens
  CDR3 for alpha chain variable domain of TCR clone 218811 (TRAV9-2, TRAJ52)
CALIDLNLGGTSYGKLTF

SEQ ID NO: 437622 - protein, 15 aa, Homo sapiens
  CDR3 for beta chain variable domain of TCR clone 218811 (TRBV6-5, TRBJ1-2)
CASSYLLQGGYGYTF

SEQ ID NO: 437623 - protein, 12 aa, Homo sapiens
  CDR3 for alpha chain variable domain of TCR clone 218812 (TRAV12-3, TRAJ17)
CATTLTGNKQTF

SEQ ID NO: 437624 - protein, 15 aa, Homo sapiens
  CDR3 for beta chain variable domain of TCR clone 218812 (TRBV20-1, TRBJ2-7)
CSARDRVSGMDEQYF

SEQ ID NO: 437625 - protein, 12 aa, Homo sapiens
  CDR3 for alpha chain variable domain of TCR clone 218813 (TRAV12-3, TRAJ20)
CAMVRGNYKLSF

SEQ ID NO: 437626 - protein, 12 aa, Homo sapiens
  CDR3 for beta chain variable domain of TCR clone 218813 (TRBV6-1, TRBJ2-7)
CASSDYSYEQYF

SEQ ID NO: 437627 - protein, 17 aa, Homo sapiens
  CDR3 for alpha chain variable domain of TCR clone 218814 (TRAV3, TRAJ38)
CAVRDCLNAGNNRKLIW

SEQ ID NO: 437628 - protein, 13 aa, Homo sapiens
  CDR3 for beta chain variable domain of TCR clone 218814 (TRBV23-1, TRBJ1-4)
CASRGKFNVKLFF

SEQ ID NO: 437629 - protein, 14 aa, Homo sapiens
  CDR3 for alpha chain variable domain of TCR clone 218815 (TRAV8-6, TRAJ5)
CAVSVDTGRRALTF

SEQ ID NO: 437630 - protein, 14 aa, Homo sapiens
  CDR3 for beta chain variable domain of TCR clone 218815 (TRBV6-1, TRBJ1-3)
CASVQGGGGNTMYF

SEQ ID NO: 437631 - protein, 13 aa, Homo sapiens
  CDR3 for alpha chain variable domain of TCR clone 218816 (TRAV12-1, TRAJ16)
CVVNGPDGQKLLF

SEQ ID NO: 437632 - protein, 12 aa, Homo sapiens
  CDR3 for beta chain variable domain of TCR clone 218816 (TRBV11-2, TRBJ2-2)
CASSLPTGELFF

SEQ ID NO: 437633 - protein, 16 aa, Homo sapiens
  CDR3 for alpha chain variable domain of TCR clone 218817 (TRAV3, TRAJ23)
CAVKIGICDQGGKLIF

SEQ ID NO: 437634 - protein, 17 aa, Homo sapiens
  CDR3 for beta chain variable domain of TCR clone 218817 (TRBV10-3, TRBJ2-6)
CAISESTAPSGANVLTF

SEQ ID NO: 437635 - protein, 12 aa, Homo sapiens
  CDR3 for alpha chain variable domain of TCR clone 218818 (TRAV21, TRAJ37)
CAVRGNTGKLIF

SEQ ID NO: 437636 - protein, 13 aa, Homo sapiens
  CDR3 for beta chain variable domain of TCR clone 218818 (TRBV19, TRBJ1-2)
CTSSVPGQDGYTF

SEQ ID NO: 437637 - protein, 18 aa, Homo sapiens
  CDR3 for alpha chain variable domain of TCR clone 218819 (TRAV13-1, TRAJ52)
CAASKRSAGGTSYGKLTF

SEQ ID NO: 437638 - protein, 11 aa, Homo sapiens
  CDR3 for beta chain variable domain of TCR clone 218819 (TRBV7-8, TRBJ2-7)
CASSLSPEQYF

SEQ ID NO: 437639 - protein, 12 aa, Homo sapiens
  CDR3 for alpha chain variable domain of TCR clone 218820 (TRAV3, TRAJ21)
CAVISNFNKFYF

SEQ ID NO: 437640 - protein, 12 aa, Homo sapiens
  CDR3 for beta chain variable domain of TCR clone 218820 (TRBV11-2, TRBJ2-2)
CASSLGGGELFF

SEQ ID NO: 437641 - protein, 15 aa, Homo sapiens
  CDR3 for alpha chain variable domain of TCR clone 218821 (TRAV21, TRAJ24)
CAARSSTDSWGKLLF

SEQ ID NO: 437642 - protein, 14 aa, Homo sapiens
  CDR3 for beta chain variable domain of TCR clone 218821 (TRBV11-2, TRBJ2-5)
CASSRTGGIETQYF

SEQ ID NO: 437643 - protein, 14 aa, Homo sapiens
  CDR3 for alpha chain variable domain of TCR clone 218822 (TRAV13-2, TRAJ45)
CAEMAGGGADGLTF

SEQ ID NO: 437644 - protein, 14 aa, Homo sapiens
  CDR3 for beta chain variable domain of TCR clone 218822 (TRBV2, TRBJ1-4)
CASNQGGLSLGLFF

SEQ ID NO: 437645 - protein, 13 aa, Homo sapiens
  CDR3 for alpha chain variable domain of TCR clone 218823 (TRAV12-1, TRAJ22)
CVIYSGSARQLTF

SEQ ID NO: 437646 - protein, 10 aa, Homo sapiens
  CDR3 for beta chain variable domain of TCR clone 218823 (TRBV6-3, TRBJ2-2)
CASRDGELFF

SEQ ID NO: 437647 - protein, 16 aa, Homo sapiens
  CDR3 for alpha chain variable domain of TCR clone 218824 (TRAV30, TRAJ24)
CGTEIVDADSWGKFQF

SEQ ID NO: 437648 - protein, 17 aa, Homo sapiens
  CDR3 for beta chain variable domain of TCR clone 218824 (TRBV20-1, TRBJ2-1)
CSASDPLAGVWDNEQFF

SEQ ID NO: 437649 - protein, 12 aa, Homo sapiens
  CDR3 for alpha chain variable domain of TCR clone 218825 (TRAV2, TRAJ9)
CAVDPKYWRLQN

SEQ ID NO: 437650 - protein, 13 aa, Homo sapiens
  CDR3 for beta chain variable domain of TCR clone 218825 (TRBV20-1, TRBJ2-1)
CSASTGTSNEQFF

SEQ ID NO: 437651 - protein, 15 aa, Homo sapiens
  CDR3 for alpha chain variable domain of TCR clone 218826 (TRAV8-1, TRAJ6)
CAVNSNPGGSYIPTF

SEQ ID NO: 437652 - protein, 12 aa, Homo sapiens
  CDR3 for beta chain variable domain of TCR clone 218826 (TRBV5-7, TRBJ2-7)
CASSVQGGEQYF

SEQ ID NO: 437653 - protein, 13 aa, Homo sapiens
  CDR3 for alpha chain variable domain of TCR clone 218827 (TRAV21, TRAJ57)
CAVTQGGSEKLVF

SEQ ID NO: 437654 - protein, 12 aa, Homo sapiens
  CDR3 for beta chain variable domain of TCR clone 218827 (TRBV6-3, TRBJ2-7)
CASSEPGFEQYF

SEQ ID NO: 437655 - protein, 17 aa, Homo sapiens
  CDR3 for alpha chain variable domain of TCR clone 218828 (TRAV3, TRAJ6)
CAVRDGPRAGGSYIPTF

SEQ ID NO: 437656 - protein, 14 aa, Homo sapiens
  CDR3 for beta chain variable domain of TCR clone 218828 (TRBV12-5, TRBJ2-5)
CASGSRIHQETQYF

SEQ ID NO: 437657 - protein, 15 aa, Homo sapiens
  CDR3 for alpha chain variable domain of TCR clone 218829 (TRAV36/DV7, TRAJ53)
CAVEGSGGSNYKLTF

SEQ ID NO: 437658 - protein, 16 aa, Homo sapiens
  CDR3 for beta chain variable domain of TCR clone 218829 (TRBV19, TRBJ1-1)
CASRFGGPVTGTEAFF

SEQ ID NO: 437659 - protein, 12 aa, Homo sapiens
  CDR3 for alpha chain variable domain of TCR clone 218830 (TRAV8-3, TRAJ26)
CAGDNYGQNFVF

SEQ ID NO: 437660 - protein, 15 aa, Homo sapiens
  CDR3 for beta chain variable domain of TCR clone 218830 (TRBV11-2, TRBJ1-3)
CASSAHSSSGNTIYF

SEQ ID NO: 437661 - protein, 12 aa, Homo sapiens
  CDR3 for alpha chain variable domain of TCR clone 218831 (TRAV13-1, TRAJ20)
CAASMGDYKLSF

SEQ ID NO: 437662 - protein, 15 aa, Homo sapiens
  CDR3 for beta chain variable domain of TCR clone 218831 (TRBV11-3, TRBJ2-3)
CASLKDGREGDTQYF

SEQ ID NO: 437663 - protein, 15 aa, Homo sapiens
  CDR3 for alpha chain variable domain of TCR clone 218832 (TRAV4, TRAJ42)
CLVGGDGGSQGNLIF

SEQ ID NO: 437664 - protein, 16 aa, Homo sapiens
  CDR3 for beta chain variable domain of TCR clone 218832 (TRBV27, TRBJ1-1)
CASSTRTGGVCTEAFF

SEQ ID NO: 437665 - protein, 15 aa, Homo sapiens
  CDR3 for alpha chain variable domain of TCR clone 218833 (TRAV12-1, TRAJ44)
CVADLPTGTASKLTF

SEQ ID NO: 437666 - protein, 15 aa, Homo sapiens
  CDR3 for beta chain variable domain of TCR clone 218833 (TRBV25-1, TRBJ1-4)
CASSKRIATNEKLFF

SEQ ID NO: 437667 - protein, 13 aa, Homo sapiens
  CDR3 for alpha chain variable domain of TCR clone 218834 (TRAV12-2, TRAJ34)
CAVKGYNTDKLIF

SEQ ID NO: 437668 - protein, 18 aa, Homo sapiens
  CDR3 for beta chain variable domain of TCR clone 218834 (TRBV11-2, TRBJ2-3)
CASSLGGASRGAPNTQYF

SEQ ID NO: 437669 - protein, 12 aa, Homo sapiens
  CDR3 for alpha chain variable domain of TCR clone 218835 (TRAV13-1, TRAJ21)
CAAKECFNKFYF

SEQ ID NO: 437670 - protein, 15 aa, Homo sapiens
  CDR3 for beta chain variable domain of TCR clone 218835 (TRBV7-7, TRBJ2-5)
CASSQLERAEETQYF

SEQ ID NO: 437671 - protein, 15 aa, Homo sapiens
  CDR3 for alpha chain variable domain of TCR clone 218836 (TRAV14/DV4, TRAJ46)
CAMREKKSSGDKLTF

SEQ ID NO: 437672 - protein, 16 aa, Homo sapiens
  CDR3 for beta chain variable domain of TCR clone 218836 (TRBV20-1, TRBJ1-2)
CSASMGQGVANYGYTF

SEQ ID NO: 437673 - protein, 12 aa, Homo sapiens
  CDR3 for alpha chain variable domain of TCR clone 218837 (TRAV1-2, TRAJ33)
CAALDSNYQLIW

SEQ ID NO: 437674 - protein, 12 aa, Homo sapiens
  CDR3 for beta chain variable domain of TCR clone 218837 (TRBV6-3, TRBJ2-7)
CASSLTPYEQYF

SEQ ID NO: 437675 - protein, 14 aa, Homo sapiens
  CDR3 for alpha chain variable domain of TCR clone 218838 (TRAV12-2, TRAJ13)
CAVKKTRGYQKVIF

SEQ ID NO: 437676 - protein, 15 aa, Homo sapiens
  CDR3 for beta chain variable domain of TCR clone 218838 (TRBV27, TRBJ2-1)
CASSNGGGSSNEQFF

SEQ ID NO: 437677 - protein, 14 aa, Homo sapiens
  CDR3 for alpha chain variable domain of TCR clone 218839 (TRAV35, TRAJ41)
CAGQASVRRNALSF

SEQ ID NO: 437678 - protein, 14 aa, Homo sapiens
  CDR3 for beta chain variable domain of TCR clone 218839 (TRBV20-1, TRBJ1-2)
CSASGLGAVYGYTF

SEQ ID NO: 437679 - protein, 16 aa, Homo sapiens
  CDR3 for alpha chain variable domain of TCR clone 218840 (TRAV3, TRAJ37)
CAVRGKGSGNTGKLIF

SEQ ID NO: 437680 - protein, 13 aa, Homo sapiens
  CDR3 for beta chain variable domain of TCR clone 218840 (TRBV10-3, TRBJ1-2)
CAISERDSYGYSF

SEQ ID NO: 437681 - protein, 14 aa, Homo sapiens
  CDR3 for alpha chain variable domain of TCR clone 218841 (TRAV14/DV4, TRAJ15)
CAMRRDQAGTARIF

SEQ ID NO: 437682 - protein, 11 aa, Homo sapiens
  CDR3 for beta chain variable domain of TCR clone 218841 (TRBV7-2, TRBJ2-7)
CASSSGLWQYF

SEQ ID NO: 437683 - protein, 14 aa, Homo sapiens
  CDR3 for alpha chain variable domain of TCR clone 218842 (TRAV1-2, TRAJ27)
CAVRSGTNAGKSTF

SEQ ID NO: 437684 - protein, 15 aa, Homo sapiens
  CDR3 for beta chain variable domain of TCR clone 218842 (TRBV18, TRBJ2-7)
CASSPLQRRTYEQYF

SEQ ID NO: 437685 - protein, 14 aa, Homo sapiens
  CDR3 for alpha chain variable domain of TCR clone 218843 (TRAV1-2, TRAJ16)
CAANRFSDGQKLLF

SEQ ID NO: 437686 - protein, 13 aa, Homo sapiens
  CDR3 for beta chain variable domain of TCR clone 218843 (TRBV7-9, TRBJ1-2)
CASSLKQNYGYAF

SEQ ID NO: 437687 - protein, 14 aa, Homo sapiens
  CDR3 for alpha chain variable domain of TCR clone 218844 (TRAV2, TRAJ37)
CAVDFTSNTGELIF

SEQ ID NO: 437688 - protein, 14 aa, Homo sapiens
  CDR3 for beta chain variable domain of TCR clone 218844 (TRBV19, TRBJ2-7)
CASSMGQGAIEQYF

SEQ ID NO: 437689 - protein, 15 aa, Homo sapiens
  CDR3 for alpha chain variable domain of TCR clone 218845 (TRAV13-1, TRAJ44)
CAASRNTGTASKLTF

SEQ ID NO: 437690 - protein, 15 aa, Homo sapiens
  CDR3 for beta chain variable domain of TCR clone 218845 (TRBV9, TRBJ1-6)
CASSVAGTGDSPLHF

SEQ ID NO: 437691 - protein, 15 aa, Homo sapiens
  CDR3 for alpha chain variable domain of TCR clone 218846 (TRAV8-3, TRAJ11)
GAVGLLNSGYSTLTF

SEQ ID NO: 437692 - protein, 16 aa, Homo sapiens
  CDR3 for beta chain variable domain of TCR clone 218846 (TRBV7-9, TRBJ1-2)
CASSLGFSSGEDGYTF

SEQ ID NO: 437693 - protein, 14 aa, Homo sapiens
  CDR3 for alpha chain variable domain of TCR clone 218847 (TRAV12-3, TRAJ54)
CAMRIIQGAQKLVF

SEQ ID NO: 437694 - protein, 16 aa, Homo sapiens
  CDR3 for beta chain variable domain of TCR clone 218847 (TRBV28, TRBJ2-1)
CASRVTASGRIGEQFF

SEQ ID NO: 437695 - protein, 17 aa, Homo sapiens
  CDR3 for alpha chain variable domain of TCR clone 218848 (TRAV27, TRAJ26)
CAGARVPLDHYGQNFVF

SEQ ID NO: 437696 - protein, 15 aa, Homo sapiens
  CDR3 for beta chain variable domain of TCR clone 218848 (TRBV11-2, TRBJ2-5)
CASSPRSGGLETQYF

SEQ ID NO: 437697 - protein, 13 aa, Homo sapiens
  CDR3 for alpha chain variable domain of TCR clone 218849 (TRAV26-1, TRAJ35)
CIVSRRVGEMLQC

SEQ ID NO: 437698 - protein, 17 aa, Homo sapiens
  CDR3 for beta chain variable domain of TCR clone 218849 (TRBV7-9, TRBJ2-7)
CASSFDGSRGGAYEQYF

SEQ ID NO: 437699 - protein, 11 aa, Homo sapiens
  CDR3 for alpha chain variable domain of TCR clone 218850 (TRAV12-2, TRAJ49)
CAVTGGNQFYF

SEQ ID NO: 437700 - protein, 12 aa, Homo sapiens
  CDR3 for beta chain variable domain of TCR clone 218850 (TRBV11-2, TRBJ2-2)
CASSLGGGELFF

SEQ ID NO: 437701 - protein, 16 aa, Homo sapiens
  CDR3 for alpha chain variable domain of TCR clone 218851 (TRAV3, TRAJ37)
GAVRGKGSGNTGKLIF

SEQ ID NO: 437702 - protein, 13 aa, Homo sapiens
  CDR3 for beta chain variable domain of TCR clone 218851 (TRBV7-2, TRBJ2-2)
CASSSVRAGELFF

SEQ ID NO: 437703 - protein, 14 aa, Homo sapiens
  CDR3 for alpha chain variable domain of TCR clone 218852 (TRAV16, TRAJ33)
CALSAMDSNYQLIW

SEQ ID NO: 437704 - protein, 17 aa, Homo sapiens
  CDR3 for beta chain variable domain of TCR clone 218852 (TRBV15, TRBJ1-4)
CATSRYGTGDPNEKLFF

SEQ ID NO: 437705 - protein, 12 aa, Homo sapiens
  CDR3 for alpha chain variable domain of TCR clone 218853 (TRAV8-3, TRAJ40)
CAVTSGTYKSIF

SEQ ID NO: 437706 - protein, 14 aa, Homo sapiens
  CDR3 for beta chain variable domain of TCR clone 218853 (TRBV12-4, TRBJ2-3)
CASSGQGSTDTQCF

SEQ ID NO: 437707 - protein, 16 aa, Homo sapiens
  CDR3 for alpha chain variable domain of TCR clone 218854 (TRAV12-3, TRAJ53)
CAMSPGSGGSNYKLTF

SEQ ID NO: 437708 - protein, 15 aa, Homo sapiens
  CDR3 for beta chain variable domain of TCR clone 218854 (TRBV7-2, TRBJ2-5)
CASSLGLGGLETQYF

SEQ ID NO: 437709 - protein, 13 aa, Homo sapiens
  CDR3 for alpha chain variable domain of TCR clone 218855 (TRAV8-6, TRAJ34)
CAVSDQGTDKLIF

SEQ ID NO: 437710 - protein, 15 aa, Homo sapiens
  CDR3 for beta chain variable domain of TCR clone 218855 (TRBV6-3, TRBJ2-7)
CASSSPGTVFYEQYF

SEQ ID NO: 437711 - protein, 15 aa, Homo sapiens
  CDR3 for alpha chain variable domain of TCR clone 218856 (TRAV3, TRAJ22)
CAVRDRGGSARQLTF

SEQ ID NO: 437712 - protein, 17 aa, Homo sapiens
  CDR3 for beta chain variable domain of TCR clone 218856 (TRBV13, TRBJ2-3)
CASSLSRVAGGEEYAVF

SEQ ID NO: 437713 - protein, 12 aa, Homo sapiens
  CDR3 for alpha chain variable domain of TCR clone 218857 (TRAV27, TRAJ35)
CAGADFGNVLHC

SEQ ID NO: 437714 - protein, 14 aa, Homo sapiens
  CDR3 for beta chain variable domain of TCR clone 218857 (TRBV7-8, TRBJ2-3)
CASSFKSSTDTQYF

SEQ ID NO: 437715 - protein, 16 aa, Homo sapiens
  CDR3 for alpha chain variable domain of TCR clone 218858 (TRAV23/DV6, TRAJ9)
CAASIVGNTGGFKTIF

SEQ ID NO: 437716 - protein, 13 aa, Homo sapiens
  CDR3 for beta chain variable domain of TCR clone 218858 (TRBV19, TRBJ1-3)
CASRLSLGNTIYF

SEQ ID NO: 437717 - protein, 16 aa, Homo sapiens
  CDR3 for alpha chain variable domain of TCR clone 218859 (TRAV4, TRAJ37)
CLVGWFGSRNTGKLIF

SEQ ID NO: 437718 - protein, 15 aa, Homo sapiens
  CDR3 for beta chain variable domain of TCR clone 218859 (TRBV12-4, TRBJ2-3)
CASSLAERPTDTQYF

SEQ ID NO: 437719 - protein, 15 aa, Homo sapiens
  CDR3 for alpha chain variable domain of TCR clone 218860 (TRAV3, TRAJ20)
CAVRDIKLSDYKLSF

SEQ ID NO: 437720 - protein, 13 aa, Homo sapiens
  CDR3 for beta chain variable domain of TCR clone 218860 (TRBV25-1, TRBJ2-7)
CASSEDGDYEQYF

SEQ ID NO: 437721 - protein, 13 aa, Homo sapiens
  CDR3 for alpha chain variable domain of TCR clone 218861 (TRAV3, TRAJ16)
CAVRARNGQKLLF

SEQ ID NO: 437722 - protein, 15 aa, Homo sapiens
  CDR3 for beta chain variable domain of TCR clone 218861 (TRBV5-1, TRBJ2-1)
CASSPPRAPYNEQFF

SEQ ID NO: 437723 - protein, 14 aa, Homo sapiens
  CDR3 for alpha chain variable domain of TCR clone 218862 (TRAV20, TRAJ29)
CAVQAWVGDTPLVF

SEQ ID NO: 437724 - protein, 15 aa, Homo sapiens
  CDR3 for beta chain variable domain of TCR clone 218862 (TRBV29-1, TRBJ2-7)
CSVEFFDRGSYEQYF

SEQ ID NO: 437725 - protein, 13 aa, Homo sapiens
  CDR3 for alpha chain variable domain of TCR clone 218863 (TRAV12-2, TRAJ24)
CAVSTDSWGKLQF

SEQ ID NO: 437726 - protein, 15 aa, Homo sapiens
  CDR3 for beta chain variable domain of TCR clone 218863 (TRBV7-2, TRBJ2-2)
CASSPTGANIGELFF

SEQ ID NO: 437727 - protein, 15 aa, Homo sapiens
  CDR3 for alpha chain variable domain of TCR clone 218864 (TRAV12-3, TRAJ6)
CAMSATTGGSYIPTF

SEQ ID NO: 437728 - protein, 15 aa, Homo sapiens
  CDR3 for beta chain variable domain of TCR clone 218864 (TRBV5-8, TRBJ1-1)
CASSFSGTSLKGAFF

SEQ ID NO: 437729 - protein, 15 aa, Homo sapiens
  CDR3 for alpha chain variable domain of TCR clone 218865 (TRAV12-3, TRAJ6)
CAMSATTGGSYIPTI

SEQ ID NO: 437730 - protein, 16 aa, Homo sapiens
  CDR3 for beta chain variable domain of TCR clone 218865 (TRBV19, TRBJ2-1)
CASSMGGGSSYNEQFF

SEQ ID NO: 437731 - protein, 12 aa, Homo sapiens
  CDR3 for alpha chain variable domain of TCR clone 218866 (TRAV12-2, TRAJ8)
CAVNTGFQKLVF

SEQ ID NO: 437732 - protein, 13 aa, Homo sapiens
  CDR3 for beta chain variable domain of TCR clone 218866 (TRBV7-3, TRBJ1-1)
CASSQDWGAEAFF

SEQ ID NO: 437733 - protein, 17 aa, Homo sapiens
  CDR3 for alpha chain variable domain of TCR clone 218867 (TRAV21, TRAJ52)
CAVGVNAGGTSYGKLTF

SEQ ID NO: 437734 - protein, 11 aa, Homo sapiens
  CDR3 for beta chain variable domain of TCR clone 218867 (TRBV29-1, TRBJ2-5)
CSEDRTGTQYF

SEQ ID NO: 437735 - protein, 18 aa, Homo sapiens
  CDR3 for alpha chain variable domain of TCR clone 218868 (TRAV13-1, TRAJ52)
CAAKNPNAGGTSYGKLTF

SEQ ID NO: 437736 - protein, 17 aa, Homo sapiens
  CDR3 for beta chain variable domain of TCR clone 218868 (TRBV4-1, TRBJ1-4)
CASSQEGPRGVEEKLFF

SEQ ID NO: 437737 - protein, 18 aa, Homo sapiens
  CDR3 for alpha chain variable domain of TCR clone 218869 (TRAV9-2, TRAJ52)
CALSRHNAGGTSYGKLTF

SEQ ID NO: 437738 - protein, 12 aa, Homo sapiens
  CDR3 for beta chain variable domain of TCR clone 218869 (TRBV11-2, TRBJ2-1)
CASSPGNNEQFF

SEQ ID NO: 437739 - protein, 14 aa, Homo sapiens
  CDR3 for alpha chain variable domain of TCR clone 218870 (TRAV8-1, TRAJ5)
CAVSMDTVRRALTF

SEQ ID NO: 437740 - protein, 15 aa, Homo sapiens
  CDR3 for beta chain variable domain of TCR clone 218870 (TRBV19, TRBJ2-4)
CASRGPRRGENIQYF

SEQ ID NO: 437741 - protein, 13 aa, Homo sapiens
  CDR3 for alpha chain variable domain of TCR clone 218871 (TRAV3, TRAJ21)
CAVREPDFNKFYF

SEQ ID NO: 437742 - protein, 13 aa, Homo sapiens
  CDR3 for beta chain variable domain of TCR clone 218871 (TRBV7-9, TRBJ2-1)
CASSLSGNNEQFF

SEQ ID NO: 437743 - protein, 14 aa, Homo sapiens
  CDR3 for alpha chain variable domain of TCR clone 218872 (TRAV1-2, TRAJ16)
CAVNRFSDGQKLLF

SEQ ID NO: 437744 - protein, 15 aa, Homo sapiens
  CDR3 for beta chain variable domain of TCR clone 218872 (TRBV7-2, TRBJ2-1)
CASSSGLAGGNGQFF

SEQ ID NO: 437745 - protein, 12 aa, Homo sapiens
  CDR3 for alpha chain variable domain of TCR clone 218873 (TRAV22, TRAJ43)
CAVELNNNDMRF

SEQ ID NO: 437746 - protein, 16 aa, Homo sapiens
  CDR3 for beta chain variable domain of TCR clone 218873 (TRBV20-1, TRBJ1-2)
CSASMGQGVANYGYTF

SEQ ID NO: 437747 - protein, 14 aa, Homo sapiens
  CDR3 for alpha chain variable domain of TCR clone 218874 (TRAV3, TRAJ8)
CAALMNTGFQKLVF

SEQ ID NO: 437748 - protein, 15 aa, Homo sapiens
  CDR3 for beta chain variable domain of TCR clone 218874 (TRBV28, TRBJ2-5)
CASSLGLGNQETQDF

SEQ ID NO: 437749 - protein, 15 aa, Homo sapiens
  CDR3 for alpha chain variable domain of TCR clone 218875 (TRAV8-1, TRAJ6)
CAMSATTGGSYIPTF

SEQ ID NO: 437750 - protein, 16 aa, Homo sapiens
  CDR3 for beta chain variable domain of TCR clone 218875 (TRBV20-1, TRBJ1-2)
CSASMGQGVANYGYTF

SEQ ID NO: 437751 - protein, 14 aa, Homo sapiens
  CDR3 for alpha chain variable domain of TCR clone 218876 (TRAV26-1, TRAJ44)
CISPLPGTASKPNF

SEQ ID NO: 437752 - protein, 16 aa, Homo sapiens
  CDR3 for beta chain variable domain of TCR clone 218876 (TRBV19, TRBJ2-1)
CASSKAGPSSNNEQFF

SEQ ID NO: 437753 - protein, 14 aa, Homo sapiens
  CDR3 for alpha chain variable domain of TCR clone 218877 (TRAV20, TRAJ42)
CAVQAGGSQGNLIF

SEQ ID NO: 437754 - protein, 16 aa, Homo sapiens
  CDR3 for beta chain variable domain of TCR clone 218877 (TRBV28, TRBJ1-2)
CTSVPRIQGANYGYTF

SEQ ID NO: 437755 - protein, 12 aa, Homo sapiens
  CDR3 for alpha chain variable domain of TCR clone 218878 (TRAV4, TRAJ6)
CLAPGGSYIPTF

SEQ ID NO: 437756 - protein, 17 aa, Homo sapiens
  CDR3 for beta chain variable domain of TCR clone 218878 (TRBV13, TRBJ2-3)
CASSLSRVAGGRNTQCF

SEQ ID NO: 437757 - protein, 14 aa, Homo sapiens
  CDR3 for alpha chain variable domain of TCR clone 218879 (TRAV2, TRAJ9)
CAVEDRSGGFTTIF

SEQ ID NO: 437758 - protein, 13 aa, Homo sapiens
  CDR3 for beta chain variable domain of TCR clone 218879 (TRBV27, TRBJ1-1)
CASSLSIGAEAFF

SEQ ID NO: 437759 - protein, 12 aa, Homo sapiens
  CDR3 for alpha chain variable domain of TCR clone 218880 (TRAV21, TRAJ29)
CAVSSGNTPLVF

SEQ ID NO: 437760 - protein, 15 aa, Homo sapiens
  CDR3 for beta chain variable domain of TCR clone 218880 (TRBV12-4, TRBJ1-2)
CASRLGVAGNYGYTF

SEQ ID NO: 437761 - protein, 14 aa, Homo sapiens
  CDR3 for alpha chain variable domain of TCR clone 218881 (TRAV12-2, TRAJ17)
CAVLFKAEGNKLTF

SEQ ID NO: 437762 - protein, 17 aa, Homo sapiens
  CDR3 for beta chain variable domain of TCR clone 218881 (TRBV11-2, TRBJ2-1)
CASSLYPPGVEYNEQFF

SEQ ID NO: 437763 - protein, 15 aa, Homo sapiens
  CDR3 for alpha chain variable domain of TCR clone 218882 (TRAV17, TRAJ57)
CATGPSQGGSEKLVF

SEQ ID NO: 437764 - protein, 12 aa, Homo sapiens
  CDR3 for beta chain variable domain of TCR clone 218882 (TRBV2, TRBJ2-1)
CASRPGPREQFF

SEQ ID NO: 437765 - protein, 12 aa, Homo sapiens
  CDR3 for alpha chain variable domain of TCR clone 218883 (TRAV12-3, TRAJ17)
CAMTLTGNKLTF

SEQ ID NO: 437766 - protein, 19 aa, Homo sapiens
  CDR3 for beta chain variable domain of TCR clone 218883 (TRBV11-2, TRBJ2-3)
CASSLTSGTRFRVTDTQYF

SEQ ID NO: 437767 - protein, 13 aa, Homo sapiens
  CDR3 for alpha chain variable domain of TCR clone 218884 (TRAV27, TRAJ6)
WAGGTRGSYIPTF

SEQ ID NO: 437768 - protein, 15 aa, Homo sapiens
  CDR3 for beta chain variable domain of TCR clone 218884 (TRBV11-2, TRBJ1-3)
CASSLSPLVRDTIYF

SEQ ID NO: 437769 - protein, 12 aa, Homo sapiens
  CDR3 for alpha chain variable domain of TCR clone 218885 (TRAV4, TRAJ26)
CLVGDYGQNFVF

SEQ ID NO: 437770 - protein, 14 aa, Homo sapiens
  CDR3 for beta chain variable domain of TCR clone 218885 (TRBV11-2, TRBJ2-1)
CASSLSGPYNEQFF

SEQ ID NO: 437771 - protein, 11 aa, Homo sapiens
  CDR3 for alpha chain variable domain of TCR clone 218886 (TRAV12-2, TRAJ33)
CAVTSNDQLIW

SEQ ID NO: 437772 - protein, 14 aa, Homo sapiens
  CDR3 for beta chain variable domain of TCR clone 218886 (TRBV28, TRBJ2-2)
CASRIRSGTGELFF

SEQ ID NO: 437773 - protein, 12 aa, Homo sapiens
  CDR3 for alpha chain variable domain of TCR clone 218887 (TRAV21, TRAJ33)
CAKMDSNYQLIW

SEQ ID NO: 437774 - protein, 14 aa, Homo sapiens
  CDR3 for beta chain variable domain of TCR clone 218887 (TRBV2, TRBJ2-7)
CASSPKTSFYEQYF

SEQ ID NO: 437775 - protein, 17 aa, Homo sapiens
  CDR3 for alpha chain variable domain of TCR clone 218888 (TRAV3, TRAJ38)
CAVRDCLNAGNNRKLIW

SEQ ID NO: 437776 - protein, 14 aa, Homo sapiens
  CDR3 for beta chain variable domain of TCR clone 218888 (TRBV7-2, TRBJ1-1)
CASSFLTGTTEAFF

SEQ ID NO: 437777 - protein, 14 aa, Homo sapiens
  CDR3 for alpha chain variable domain of TCR clone 218889 (TRAV2, TRAJ37)
RAVDFTSNTGKLIF

SEQ ID NO: 437778 - protein, 14 aa, Homo sapiens
  CDR3 for beta chain variable domain of TCR clone 218889 (TRBV7-6, TRBJ2-3)
CASSLGTVTDTQYF

SEQ ID NO: 437779 - protein, 14 aa, Homo sapiens
  CDR3 for alpha chain variable domain of TCR clone 218890 (TRAV1-2, TRAJ8)
CAVREDTGFQKLVF

SEQ ID NO: 437780 - protein, 15 aa, Homo sapiens
  CDR3 for beta chain variable domain of TCR clone 218890 (TRBV12-4, TRBJ2-5)
CASSPPTCLQETQYF

SEQ ID NO: 437781 - protein, 12 aa, Homo sapiens
  CDR3 for alpha chain variable domain of TCR clone 218891 (TRAV13-1, TRAJ49)
CAASPMGNQFYF

SEQ ID NO: 437782 - protein, 15 aa, Homo sapiens
  CDR3 for beta chain variable domain of TCR clone 218891 (TRBV7-7, TRBJ2-5)
CASSQLERAEETQYF

SEQ ID NO: 437783 - protein, 14 aa, Homo sapiens
  CDR3 for alpha chain variable domain of TCR clone 218892 (TRAV17, TRAJ15)
CATTTNQAGTALIF

SEQ ID NO: 437784 - protein, 16 aa, Homo sapiens
  CDR3 for beta chain variable domain of TCR clone 218892 (TRBV4-1, TRBJ2-7)
CASSRGDIMNSYEQYF

SEQ ID NO: 437785 - protein, 12 aa, Homo sapiens
  CDR3 for alpha chain variable domain of TCR clone 218893 (TRAV8-3, TRAJ26)
CAGDNHGHNLVF

SEQ ID NO: 437786 - protein, 15 aa, Homo sapiens
  CDR3 for beta chain variable domain of TCR clone 218893 (TRBV9, TRBJ2-1)
CASSLAGSSYNEQFF

SEQ ID NO: 437787 - protein, 19 aa, Homo sapiens
  CDR3 for alpha chain variable domain of TCR clone 218894 (TRAV16, )
CALSGDIQNPDPAVYQLRD

SEQ ID NO: 437788 - protein, 16 aa, Homo sapiens
  CDR3 for beta chain variable domain of TCR clone 218894 (TRBV12-5, TRBJ2-5)
CASGPRTSGKQETQYF

SEQ ID NO: 437789 - protein, 13 aa, Homo sapiens
  CDR3 for alpha chain variable domain of TCR clone 218895 (TRAV20, TRAJ37)
CAGCSSNTGKLIF

SEQ ID NO: 437790 - protein, 15 aa, Homo sapiens
  CDR3 for beta chain variable domain of TCR clone 218895 (TRBV19, TRBJ1-6)
CASSTQGAVGSPLHF

SEQ ID NO: 437791 - protein, 14 aa, Homo sapiens
  CDR3 for alpha chain variable domain of TCR clone 218896 (TRAV9-2, TRAJ6)
CALSDPGGSYIPTF

SEQ ID NO: 437792 - protein, 16 aa, Homo sapiens
  CDR3 for beta chain variable domain of TCR clone 218896 (TRBV19, TRBJ2-2)
CASRSPGAGATGELFF

SEQ ID NO: 437793 - protein, 14 aa, Homo sapiens
  CDR3 for alpha chain variable domain of TCR clone 218897 (TRAV1-2, TRAJ16)
CAVNRFSDGQQLLF

SEQ ID NO: 437794 - protein, 14 aa, Homo sapiens
  CDR3 for beta chain variable domain of TCR clone 218897 (TRBV7-9, TRBJ2-1)
CASSPRDSLYEQFF

SEQ ID NO: 437795 - protein, 11 aa, Homo sapiens
  CDR3 for alpha chain variable domain of TCR clone 218898 (TRAV17, TRAJ9)
CATTGGFKTIF

SEQ ID NO: 437796 - protein, 15 aa, Homo sapiens
  CDR3 for beta chain variable domain of TCR clone 218898 (TRBV9, TRBJ1-5)
CASSVAGGANQPQHF

SEQ ID NO: 437797 - protein, 12 aa, Homo sapiens
  CDR3 for alpha chain variable domain of TCR clone 218899 (TRAV16, TRAJ10)
CSRTGGGKKLTF

SEQ ID NO: 437798 - protein, 10 aa, Homo sapiens
  CDR3 for beta chain variable domain of TCR clone 218899 (TRBV6-3, TRBJ2-7)
CASSCPGQFS

SEQ ID NO: 437799 - protein, 18 aa, Homo sapiens
  CDR3 for alpha chain variable domain of TCR clone 218900 (TRAV26-1, TRAJ56)
CIVRVASGVTGANSKLTF

SEQ ID NO: 437800 - protein, 15 aa, Homo sapiens
  CDR3 for beta chain variable domain of TCR clone 218900 (TRBV7-9, TRBJ2-5)
CASSDTGRGRETQYF

SEQ ID NO: 437801 - protein, 14 aa, Homo sapiens
  CDR3 for alpha chain variable domain of TCR clone 218901 (TRAV12-1, TRAJ30)
CVVNIGGRDDKIIF

SEQ ID NO: 437802 - protein, 13 aa, Homo sapiens
  CDR3 for beta chain variable domain of TCR clone 218901 (TRBV12-5, TRBJ2-1)
CASGLGRGNEQFV

SEQ ID NO: 437803 - protein, 16 aa, Homo sapiens
  CDR3 for alpha chain variable domain of TCR clone 218902 (TRAV30, TRAJ24)
CGTEIVDADSWGKFQF

SEQ ID NO: 437804 - protein, 14 aa, Homo sapiens
  CDR3 for beta chain variable domain of TCR clone 218902 (TRBV7-2, TRBJ2-5)
CASSIRLTQETQYF

SEQ ID NO: 437805 - protein, 15 aa, Homo sapiens
  CDR3 for alpha chain variable domain of TCR clone 218903 (TRAV17, TRAJ6)
RATDLPSGGSYIPTF

SEQ ID NO: 437806 - protein, 16 aa, Homo sapiens
  CDR3 for beta chain variable domain of TCR clone 218903 (TRBV4-1, TRBJ2-7)
CASSQDPTGYSYEQYF

SEQ ID NO: 437807 - protein, 12 aa, Homo sapiens
  CDR3 for alpha chain variable domain of TCR clone 218904 (TRAV3, TRAJ7)
CADLLWEQQTRF

SEQ ID NO: 437808 - protein, 15 aa, Homo sapiens
  CDR3 for beta chain variable domain of TCR clone 218904 (TRBV20-1, TRBJ2-7)
CSARDRVSGMDEQYF

SEQ ID NO: 437809 - protein, 16 aa, Homo sapiens
  CDR3 for alpha chain variable domain of TCR clone 218905 (TRAV8-2, TRAJ45)
CVVSEGTGGGADGLTF

SEQ ID NO: 437810 - protein, 16 aa, Homo sapiens
  CDR3 for beta chain variable domain of TCR clone 218905 (TRBV7-9, TRBJ1-1)
CASSLTQVRANTEAFF

SEQ ID NO: 437811 - protein, 12 aa, Homo sapiens
  CDR3 for alpha chain variable domain of TCR clone 218906 (TRAV12-3, TRAJ17)
CAMTLTGNKLTF

SEQ ID NO: 437812 - protein, 13 aa, Homo sapiens
  CDR3 for beta chain variable domain of TCR clone 218906 (TRBV25-1, TRBJ1-1)
CASSGQVRAEAFF

SEQ ID NO: 437813 - protein, 14 aa, Homo sapiens
  CDR3 for alpha chain variable domain of TCR clone 218907 (TRAV8-4, TRAJ38)
CARLNAGNNRTLIW

SEQ ID NO: 437814 - protein, 12 aa, Homo sapiens
  CDR3 for beta chain variable domain of TCR clone 218907 (TRBV6-1, TRBJ2-7)
CASSEPLYEQYF

SEQ ID NO: 437815 - protein, 12 aa, Homo sapiens
  CDR3 for alpha chain variable domain of TCR clone 218908 (TRAV26-2, TRAJ21)
CILKGNFNTFYF

SEQ ID NO: 437816 - protein, 14 aa, Homo sapiens
  CDR3 for beta chain variable domain of TCR clone 218908 (TRBV7-9, TRBJ1-1)
CASTPLQSYTEAFF

SEQ ID NO: 437817 - protein, 16 aa, Homo sapiens
  CDR3 for alpha chain variable domain of TCR clone 218909 (TRAV12-2, TRAJ18)
CAVTTDRGSTLGRLYF

SEQ ID NO: 437818 - protein, 13 aa, Homo sapiens
  CDR3 for beta chain variable domain of TCR clone 218909 (TRBV10-2, TRBJ2-5)
CASSVGPQETQYF

SEQ ID NO: 437819 - protein, 18 aa, Homo sapiens
  CDR3 for alpha chain variable domain of TCR clone 218910 (TRAV21, TRAJ52)
CAVRPSPAGGTSYGKLTF

SEQ ID NO: 437820 - protein, 14 aa, Homo sapiens
  CDR3 for beta chain variable domain of TCR clone 218910 (TRBV25-1, TRBJ1-1)
CASTHLGGNTEAFV

SEQ ID NO: 437821 - protein, 14 aa, Homo sapiens
  CDR3 for alpha chain variable domain of TCR clone 218911 (TRAV23/DV6, TRAJ22)
CADISSGSARQLTF

SEQ ID NO: 437822 - protein, 16 aa, Homo sapiens
  CDR3 for beta chain variable domain of TCR clone 218911 (TRBV5-7, TRBJ2-5)
CASIRGQTVYQETQYF

SEQ ID NO: 437823 - protein, 14 aa, Homo sapiens
  CDR3 for alpha chain variable domain of TCR clone 218912 (TRAV17, TRAJ17)
CATDDPAAGNKLTF

SEQ ID NO: 437824 - protein, 16 aa, Homo sapiens
  CDR3 for beta chain variable domain of TCR clone 218912 (TRBV19, TRBJ2-1)
CASSIETGSPYNEQFF

SEQ ID NO: 437825 - protein, 12 aa, Homo sapiens
  CDR3 for alpha chain variable domain of TCR clone 218913 (TRAV12-2, TRAJ31)
CAVNTPDARLMF

SEQ ID NO: 437826 - protein, 14 aa, Homo sapiens
  CDR3 for beta chain variable domain of TCR clone 218913 (TRBV11-2, TRBJ2-5)
CASSGHSLQETQYF

SEQ ID NO: 437827 - protein, 15 aa, Homo sapiens
  CDR3 for alpha chain variable domain of TCR clone 218914 (TRAV26-1, TRAJ29)
CIVKVEGSGNTPLAF

SEQ ID NO: 437828 - protein, 14 aa, Homo sapiens
  CDR3 for beta chain variable domain of TCR clone 218914 (TRBV18, TRBJ2-5)
CASSPGVSQETQYF

SEQ ID NO: 437829 - protein, 16 aa, Homo sapiens
  CDR3 for alpha chain variable domain of TCR clone 218915 (TRAV30, TRAJ24)
CGTEIVDADSWGKFQF

SEQ ID NO: 437830 - protein, 13 aa, Homo sapiens
  CDR3 for beta chain variable domain of TCR clone 218915 (TRBV6-1, TRBJ1-1)
CASSRKGNTEAFF

SEQ ID NO: 437831 - protein, 11 aa, Homo sapiens
  CDR3 for alpha chain variable domain of TCR clone 218916 (TRAV1-1, TRAJ23)
CAVRQGGKLIF

SEQ ID NO: 437832 - protein, 12 aa, Homo sapiens
  CDR3 for beta chain variable domain of TCR clone 218916 (TRBV28, TRBJ2-7)
CASSTPGGEQYF

SEQ ID NO: 437833 - protein, 14 aa, Homo sapiens
  CDR3 for alpha chain variable domain of TCR clone 218917 (TRAV40, TRAJ41)
CLLGPPNSGYALDF

SEQ ID NO: 437834 - protein, 11 aa, Homo sapiens
  CDR3 for beta chain variable domain of TCR clone 218917 (TRBV19, TRBJ2-7)
CASSVLGEQYF

SEQ ID NO: 437835 - protein, 15 aa, Homo sapiens
  CDR3 for alpha chain variable domain of TCR clone 218918 (TRAV12-3, TRAJ10)
CASYILTGGGNKLTF

SEQ ID NO: 437836 - protein, 15 aa, Homo sapiens
  CDR3 for beta chain variable domain of TCR clone 218918 (TRBV7-2, TRBJ1-6)
CANSLGPDRGMPLHF

SEQ ID NO: 437837 - protein, 13 aa, Homo sapiens
  CDR3 for alpha chain variable domain of TCR clone 218919 (TRAV17, TRAJ22)
CAGRRESARQLTF

SEQ ID NO: 437838 - protein, 14 aa, Homo sapiens
  CDR3 for beta chain variable domain of TCR clone 218919 (TRBV19, TRBJ1-1)
CASSITGWETEAFF

SEQ ID NO: 437839 - protein, 12 aa, Homo sapiens
  CDR3 for alpha chain variable domain of TCR clone 218920 (TRAV13-2, TRAJ23)
CAERHRGGKLIF

SEQ ID NO: 437840 - protein, 15 aa, Homo sapiens
  CDR3 for beta chain variable domain of TCR clone 218920 (TRBV10-2, TRBJ2-6)
CASSTQSPGANVLTF

SEQ ID NO: 437841 - protein, 12 aa, Homo sapiens
  CDR3 for alpha chain variable domain of TCR clone 218921 (TRAV12-2, TRAJ16)
CAVNLDGQKLLF

SEQ ID NO: 437842 - protein, 12 aa, Homo sapiens
  CDR3 for beta chain variable domain of TCR clone 218921 (TRBV5-7, TRBJ2-7)
CASSVEGGEQYF

SEQ ID NO: 437843 - protein, 12 aa, Homo sapiens
  CDR3 for alpha chain variable domain of TCR clone 218922 (TRAV23/DV6, TRAJ37)
CAASMNTGKLIF

SEQ ID NO: 437844 - protein, 12 aa, Homo sapiens
  CDR3 for beta chain variable domain of TCR clone 218922 (TRBV7-9, TRBJ2-7)
CASSLFDYEQFF

SEQ ID NO: 437845 - protein, 14 aa, Homo sapiens
  CDR3 for alpha chain variable domain of TCR clone 218923 (TRAV2, TRAJ9)
CAVEDRSGGFKTIL

SEQ ID NO: 437846 - protein, 15 aa, Homo sapiens
  CDR3 for beta chain variable domain of TCR clone 218923 (TRBV27, TRBJ1-5)
CASSLGTGFDQPQHF

SEQ ID NO: 437847 - protein, 15 aa, Homo sapiens
  CDR3 for alpha chain variable domain of TCR clone 218924 (TRAV17, TRAJ57)
CATGPSQGGSEKLVF

SEQ ID NO: 437848 - protein, 15 aa, Homo sapiens
  CDR3 for beta chain variable domain of TCR clone 218924 (TRBV7-9, TRBJ2-7)
CASSPGGGLTYEQYF

SEQ ID NO: 437849 - protein, 12 aa, Homo sapiens
  CDR3 for alpha chain variable domain of TCR clone 218925 (TRAV2, TRAJ9)
CALGAGGVKTIF

SEQ ID NO: 437850 - protein, 16 aa, Homo sapiens
  CDR3 for beta chain variable domain of TCR clone 218925 (TRBV13, TRBJ2-2)
CASSPRTGEHTGELFF

SEQ ID NO: 437851 - protein, 14 aa, Homo sapiens
  CDR3 for alpha chain variable domain of TCR clone 218926 (TRAV12-2, TRAJ45)
CAVNKGGGADGLTF

SEQ ID NO: 437852 - protein, 13 aa, Homo sapiens
  CDR3 for beta chain variable domain of TCR clone 218926 (TRBV15, TRBJ1-6)
CATSGGLNSPLHF

SEQ ID NO: 437853 - protein, 14 aa, Homo sapiens
  CDR3 for alpha chain variable domain of TCR clone 218927 (TRAV26-1, TRAJ38)
CIADNAGKNRKLIW

SEQ ID NO: 437854 - protein, 16 aa, Homo sapiens
  CDR3 for beta chain variable domain of TCR clone 218927 (TRBV20-1, TRBJ2-7)
CSASTSGRLSSYEQYF

SEQ ID NO: 437855 - protein, 14 aa, Homo sapiens
  CDR3 for alpha chain variable domain of TCR clone 218928 (TRAV8-1, TRAJ23)
CAVGTYDQGGKLIF

SEQ ID NO: 437856 - protein, 16 aa, Homo sapiens
  CDR3 for beta chain variable domain of TCR clone 218928 (TRBV18, TRBJ1-5)
CASSPSTGNSNQPQHF

SEQ ID NO: 437857 - protein, 11 aa, Homo sapiens
  CDR3 for alpha chain variable domain of TCR clone 218929 (TRAV17, TRAJ31)
CATSNNARLMF

SEQ ID NO: 437858 - protein, 15 aa, Homo sapiens
  CDR3 for beta chain variable domain of TCR clone 218929 (TRBV5-1, TRBJ2-3)
CASSVTAGSTDTQYF

SEQ ID NO: 437859 - protein, 15 aa, Homo sapiens
  CDR3 for alpha chain variable domain of TCR clone 218930 (TRAV26-1, TRAJ29)
CIVRGSRAGNTPLVF

SEQ ID NO: 437860 - protein, 13 aa, Homo sapiens
  CDR3 for beta chain variable domain of TCR clone 218930 (TRBV7-9, TRBJ1-2)
CASSLKQNYGYTF

SEQ ID NO: 437861 - protein, 14 aa, Homo sapiens
  CDR3 for alpha chain variable domain of TCR clone 218931 (TRAV13-1, TRAJ44)
CAAKATGTASKLTF

SEQ ID NO: 437862 - protein, 13 aa, Homo sapiens
  CDR3 for beta chain variable domain of TCR clone 218931 (TRBV4-3, TRBJ2-3)
CASSQGYTDTQYF

SEQ ID NO: 437863 - protein, 15 aa, Homo sapiens
  CDR3 for alpha chain variable domain of TCR clone 218932 (TRAV1-1, TRAJ36)
CAVRPQGTGSNNLSF

SEQ ID NO: 437864 - protein, 17 aa, Homo sapiens
  CDR3 for beta chain variable domain of TCR clone 218932 (TRBV20-1, TRBJ2-7)
CSASGTSGRVGESEQYF

SEQ ID NO: 437865 - protein, 11 aa, Homo sapiens
  CDR3 for alpha chain variable domain of TCR clone 218933 (TRAV12-3, TRAJ41)
CAMNAREALNF

SEQ ID NO: 437866 - protein, 16 aa, Homo sapiens
  CDR3 for beta chain variable domain of TCR clone 218933 (TRBV7-8, TRBJ2-3)
CARSTEGQRETDTQYF

SEQ ID NO: 437867 - protein, 15 aa, Homo sapiens
  CDR3 for alpha chain variable domain of TCR clone 218934 (TRAV13-1, TRAJ57)
CAASNTQGGSDKLVF

SEQ ID NO: 437868 - protein, 13 aa, Homo sapiens
  CDR3 for beta chain variable domain of TCR clone 218934 (TRBV7-6, TRBJ1-5)
CASSQGPNRPQHF

SEQ ID NO: 437869 - protein, 14 aa, Homo sapiens
  CDR3 for alpha chain variable domain of TCR clone 218935 (TRAV1-2, TRAJ8)
CAVREDTRFQKLVF

SEQ ID NO: 437870 - protein, 17 aa, Homo sapiens
  CDR3 for beta chain variable domain of TCR clone 218935 (TRBV11-2, TRBJ2-1)
CASSLYPPGVEYNEQFF

SEQ ID NO: 437871 - protein, 10 aa, Homo sapiens
  CDR3 for alpha chain variable domain of TCR clone 218936 (TRAV30, TRAJ32)
CGTEKDMVVL

SEQ ID NO: 437872 - protein, 13 aa, Homo sapiens
  CDR3 for beta chain variable domain of TCR clone 218936 (TRBV10-3, TRBJ2-7)
CASQLAVNYEQYF

SEQ ID NO: 437873 - protein, 16 aa, Homo sapiens
  CDR3 for alpha chain variable domain of TCR clone 218937 (TRAV30, TRAJ24)
CGTEIVDADSWGKVQF

SEQ ID NO: 437874 - protein, 13 aa, Homo sapiens
  CDR3 for beta chain variable domain of TCR clone 218937 (TRBV4-1, TRBJ2-2)
CASSQENTGELFF

SEQ ID NO: 437875 - protein, 14 aa, Homo sapiens
  CDR3 for alpha chain variable domain of TCR clone 218938 (TRAV21, TRAJ37)
CAVKGSSNTGKLIF

SEQ ID NO: 437876 - protein, 15 aa, Homo sapiens
  CDR3 for beta chain variable domain of TCR clone 218938 (TRBV7-9, TRBJ2-2)
CASSPETGAGGELFF

SEQ ID NO: 437877 - protein, 17 aa, Homo sapiens
  CDR3 for alpha chain variable domain of TCR clone 218939 (TRAV13-1, TRAJ52)
CAAGRNAGGTIYGKLTF

SEQ ID NO: 437878 - protein, 16 aa, Homo sapiens
  CDR3 for beta chain variable domain of TCR clone 218939 (TRBV15, TRBJ2-7)
CATSARQARSSYEQYF

SEQ ID NO: 437879 - protein, 14 aa, Homo sapiens
  CDR3 for alpha chain variable domain of TCR clone 218940 (TRAV12-3, TRAJ10)
SHLPLTGGGNKLTF

SEQ ID NO: 437880 - protein, 17 aa, Homo sapiens
  CDR3 for beta chain variable domain of TCR clone 218940 (TRBV2, TRBJ2-7)
CASSQALTGWDSYEQYF

SEQ ID NO: 437881 - protein, 12 aa, Homo sapiens
  CDR3 for alpha chain variable domain of TCR clone 218941 (TRAV8-3, TRAJ41)
CAVGALVYALNF

SEQ ID NO: 437882 - protein, 16 aa, Homo sapiens
  CDR3 for beta chain variable domain of TCR clone 218941 (TRBV7-6, TRBJ2-3)
CASSDSRGEGTDTQYF

SEQ ID NO: 437883 - protein, 14 aa, Homo sapiens
  CDR3 for alpha chain variable domain of TCR clone 218942 (TRAV17, TRAJ54)
CATDANQGAQKLVF

SEQ ID NO: 437884 - protein, 16 aa, Homo sapiens
  CDR3 for beta chain variable domain of TCR clone 218942 (TRBV12-4, TRBJ1-5)
CASSSGYGASNQPQHF

SEQ ID NO: 437885 - protein, 12 aa, Homo sapiens
  CDR3 for alpha chain variable domain of TCR clone 218943 (TRAV8-3, TRAJ6)
CAVAGGSYIPTF

SEQ ID NO: 437886 - protein, 13 aa, Homo sapiens
  CDR3 for beta chain variable domain of TCR clone 218943 (TRBV27, TRBJ1-1)
CASSLSIGAEAFF

SEQ ID NO: 437887 - protein, 10 aa, Homo sapiens
  CDR3 for alpha chain variable domain of TCR clone 218944 (TRAV12-2, TRAJ43)
CAVKVLSMRC

SEQ ID NO: 437888 - protein, 14 aa, Homo sapiens
  CDR3 for beta chain variable domain of TCR clone 218944 (TRBV11-2, TRBJ2-7)
CASSLGNSLYEQYF

SEQ ID NO: 437889 - protein, 13 aa, Homo sapiens
  CDR3 for alpha chain variable domain of TCR clone 218945 (TRAV21, TRAJ57)
CAVTQGGSEKLVF

SEQ ID NO: 437890 - protein, 13 aa, Homo sapiens
  CDR3 for beta chain variable domain of TCR clone 218945 (TRBV19, TRBJ1-2)
CASSQGQVYGYTF

SEQ ID NO: 437891 - protein, 14 aa, Homo sapiens
  CDR3 for alpha chain variable domain of TCR clone 218946 (TRAV1-2, TRAJ16)
CAVNRVSDGQKLLF

SEQ ID NO: 437892 - protein, 14 aa, Homo sapiens
  CDR3 for beta chain variable domain of TCR clone 218946 (TRBV6-1, TRBJ1-3)
CASVQGGGGNTIYF

SEQ ID NO: 437893 - protein, 15 aa, Homo sapiens
  CDR3 for alpha chain variable domain of TCR clone 218947 (TRAV3, TRAJ5)
CAVRYLDTGRRGLTF

SEQ ID NO: 437894 - protein, 13 aa, Homo sapiens
  CDR3 for beta chain variable domain of TCR clone 218947 (TRBV12-4, TRBJ2-7)
CASSPTETYEQYF

SEQ ID NO: 437895 - protein, 15 aa, Homo sapiens
  CDR3 for alpha chain variable domain of TCR clone 218948 (TRAV3, TRAJ7)
FAVRDKDNGNNRLAF

SEQ ID NO: 437896 - protein, 19 aa, Homo sapiens
  CDR3 for beta chain variable domain of TCR clone 218948 (TRBV5-8, TRBJ2-3)
CASSFLGTSGSHRTDTQYF

SEQ ID NO: 437897 - protein, 15 aa, Homo sapiens
  CDR3 for alpha chain variable domain of TCR clone 218949 (TRAV17, TRAJ4)
CATGTWSGGYNELIF

SEQ ID NO: 437898 - protein, 15 aa, Homo sapiens
  CDR3 for beta chain variable domain of TCR clone 218949 (TRBV7-9, TRBJ1-6)
CASSSPGRGNSPLHF

SEQ ID NO: 437899 - protein, 13 aa, Homo sapiens
  CDR3 for alpha chain variable domain of TCR clone 218950 (TRAV26-2, TRAJ54)
CIPRLGGAQKLVF

SEQ ID NO: 437900 - protein, 12 aa, Homo sapiens
  CDR3 for beta chain variable domain of TCR clone 218950 (TRBV6-5, TRBJ2-5)
CASSEGSETQYF

SEQ ID NO: 437901 - protein, 11 aa, Homo sapiens
  CDR3 for alpha chain variable domain of TCR clone 218951 (TRAV3, TRAJ21)
CAVGNFNKFYF

SEQ ID NO: 437902 - protein, 12 aa, Homo sapiens
  CDR3 for beta chain variable domain of TCR clone 218951 (TRBV29-1, TRBJ2-3)
CSVAGGADTQYF

SEQ ID NO: 437903 - protein, 11 aa, Homo sapiens
  CDR3 for alpha chain variable domain of TCR clone 218952 (TRAV12-3, TRAJ27)
CAMANAGKSTF

SEQ ID NO: 437904 - protein, 14 aa, Homo sapiens
  CDR3 for beta chain variable domain of TCR clone 218952 (TRBV19, TRBJ2-7)
CASSIFAGTYEQYF

SEQ ID NO: 437905 - protein, 13 aa, Homo sapiens
  CDR3 for alpha chain variable domain of TCR clone 218953 (TRAV3, TRAJ20)
CCEAFCNDYKLSF

SEQ ID NO: 437906 - protein, 12 aa, Homo sapiens
  CDR3 for beta chain variable domain of TCR clone 218953 (TRBV27, TRBJ2-5)
CASGSGVETQYF

SEQ ID NO: 437907 - protein, 14 aa, Homo sapiens
  CDR3 for alpha chain variable domain of TCR clone 218954 (TRAV17, TRAJ31)
CATDAEDNNARLMF

SEQ ID NO: 437908 - protein, 17 aa, Homo sapiens
  CDR3 for beta chain variable domain of TCR clone 218954 (TRBV11-2, TRBJ2-1)
CASSLYPPGVEYNEQFF

SEQ ID NO: 437909 - protein, 13 aa, Homo sapiens
  CDR3 for alpha chain variable domain of TCR clone 218955 (TRAV1-2, TRAJ9)
CAALNTGGFNTIF

SEQ ID NO: 437910 - protein, 14 aa, Homo sapiens
  CDR3 for beta chain variable domain of TCR clone 218955 (TRBV28, TRBJ1-5)
CASSGQALYQPQHF

SEQ ID NO: 437911 - protein, 14 aa, Homo sapiens
  CDR3 for alpha chain variable domain of TCR clone 218956 (TRAV16, TRAJ33)
CALSAMDSNYQLIS

SEQ ID NO: 437912 - protein, 12 aa, Homo sapiens
  CDR3 for beta chain variable domain of TCR clone 218956 (TRBV5-1, TRBJ1-2)
CASSQDTYGYTF

SEQ ID NO: 437913 - protein, 11 aa, Homo sapiens
  CDR3 for alpha chain variable domain of TCR clone 218957 (TRAV12-3, TRAJ43)
CAISVSNDMRF

SEQ ID NO: 437914 - protein, 16 aa, Homo sapiens
  CDR3 for beta chain variable domain of TCR clone 218957 (TRBV20-1, TRBJ2-1)
CSARDSLGAVYNEQFF

SEQ ID NO: 437915 - protein, 14 aa, Homo sapiens
  CDR3 for alpha chain variable domain of TCR clone 218958 (TRAV21, TRAJ35)
CAVMPIGFGNVLHC

SEQ ID NO: 437916 - protein, 14 aa, Homo sapiens
  CDR3 for beta chain variable domain of TCR clone 218958 (TRBV19, TRBJ2-7)
CASSSDRVGREQYF

SEQ ID NO: 437917 - protein, 18 aa, Homo sapiens
  CDR3 for alpha chain variable domain of TCR clone 218959 (TRAV13-1, TRAJ52)
CAAKNPNAGGTSYGKLTF

SEQ ID NO: 437918 - protein, 14 aa, Homo sapiens
  CDR3 for beta chain variable domain of TCR clone 218959 (TRBV15, TRBJ2-5)
CATSIGGLGETQYF

SEQ ID NO: 437919 - protein, 12 aa, Homo sapiens
  CDR3 for alpha chain variable domain of TCR clone 218960 (TRAV12-3, TRAJ17)
CAMTLTGNRLTF

SEQ ID NO: 437920 - protein, 15 aa, Homo sapiens
  CDR3 for beta chain variable domain of TCR clone 218960 (TRBV12-4, TRBJ2-5)
CASSPPTGLQETQYF

SEQ ID NO: 437921 - protein, 14 aa, Homo sapiens
  CDR3 for alpha chain variable domain of TCR clone 218961 (TRAV1-2, TRAJ8)
CAVREDTGFQKLVF

SEQ ID NO: 437922 - protein, 15 aa, Homo sapiens
  CDR3 for beta chain variable domain of TCR clone 218961 (TRBV9, TRBJ1-6)
CASSVAGTGDSALHF

SEQ ID NO: 437923 - protein, 14 aa, Homo sapiens
  CDR3 for alpha chain variable domain of TCR clone 218962 (TRAV38-1, TRAJ40)
CALRPTSGTYKYIF

SEQ ID NO: 437924 - protein, 14 aa, Homo sapiens
  CDR3 for beta chain variable domain of TCR clone 218962 (TRBV25-1, TRBJ1-1)
CASTHLGGNTEVFL

SEQ ID NO: 437925 - protein, 14 aa, Homo sapiens
  CDR3 for alpha chain variable domain of TCR clone 218963 (TRAV29/DV5, TRAJ36)
CAARRKTGANNLLF

SEQ ID NO: 437926 - protein, 13 aa, Homo sapiens
  CDR3 for beta chain variable domain of TCR clone 218963 (TRBV28, TRBJ2-7)
CASRSSGVYEQYF

SEQ ID NO: 437927 - protein, 14 aa, Homo sapiens
  CDR3 for alpha chain variable domain of TCR clone 218964 (TRAV8-3, TRAJ35)
CAVVPQGFGNVLNC

SEQ ID NO: 437928 - protein, 15 aa, Homo sapiens
  CDR3 for beta chain variable domain of TCR clone 218964 (TRBV6-1, TRBJ2-2)
CASSAGQGYTGELFF

SEQ ID NO: 437929 - protein, 13 aa, Homo sapiens
  CDR3 for alpha chain variable domain of TCR clone 218965 (TRAV12-3, TRAJ54)
CAMFAQGAQKLVF

SEQ ID NO: 437930 - protein, 16 aa, Homo sapiens
  CDR3 for beta chain variable domain of TCR clone 218965 (TRBV7-6, TRBJ2-3)
CANSPRRGGLGDTQYF

SEQ ID NO: 437931 - protein, 13 aa, Homo sapiens
  CDR3 for alpha chain variable domain of TCR clone 218966 (TRAV2, TRAJ40)
CAVVTSGTYNYIF

SEQ ID NO: 437932 - protein, 14 aa, Homo sapiens
  CDR3 for beta chain variable domain of TCR clone 218966 (TRBV19, TRBJ2-1)
CASPTFVLSGEEFF

SEQ ID NO: 437933 - protein, 14 aa, Homo sapiens
  CDR3 for alpha chain variable domain of TCR clone 218967 (TRAV13-1, TRAJ31)
CAASSRPNNARLMF

SEQ ID NO: 437934 - protein, 15 aa, Homo sapiens
  CDR3 for beta chain variable domain of TCR clone 218967 (TRBV4-2, TRBJ2-4)
CASSPLGAAKNTQYF

SEQ ID NO: 437935 - protein, 14 aa, Homo sapiens
  CDR3 for alpha chain variable domain of TCR clone 218968 (TRAV8-4, TRAJ8)
CAVSEDTGFQKLVF

SEQ ID NO: 437936 - protein, 12 aa, Homo sapiens
  CDR3 for beta chain variable domain of TCR clone 218968 (TRBV5-1, TRBJ2-3)
LAGARGADTQYF

SEQ ID NO: 437937 - protein, 13 aa, Homo sapiens
  CDR3 for alpha chain variable domain of TCR clone 218969 (TRAV3, TRAJ21)
CAVREPDFNKFYF

SEQ ID NO: 437938 - protein, 15 aa, Homo sapiens
  CDR3 for beta chain variable domain of TCR clone 218969 (TRBV10-2, TRBJ2-6)
CASSEQGTGANGLTF

SEQ ID NO: 437939 - protein, 14 aa, Homo sapiens
  CDR3 for alpha chain variable domain of TCR clone 218970 (TRAV12-2, TRAJ44)
CAVNPAGPASKLTF

SEQ ID NO: 437940 - protein, 15 aa, Homo sapiens
  CDR3 for beta chain variable domain of TCR clone 218970 (TRBV5-1, TRBJ2-1)
CASSPPRAPYNEQFF

SEQ ID NO: 437941 - protein, 12 aa, Homo sapiens
  CDR3 for alpha chain variable domain of TCR clone 218971 (TRAV12-3, TRAJ17)
CAMTLTGNKLNF

SEQ ID NO: 437942 - protein, 13 aa, Homo sapiens
  CDR3 for beta chain variable domain of TCR clone 218971 (TRBV19, TRBJ1-2)
CASSQGQVYGYTF

SEQ ID NO: 437943 - protein, 15 aa, Homo sapiens
  CDR3 for alpha chain variable domain of TCR clone 218972 (TRAV8-3, TRAJ13)
CAVAPNSWGYQKVTF

SEQ ID NO: 437944 - protein, 12 aa, Homo sapiens
  CDR3 for beta chain variable domain of TCR clone 218972 (TRBV19, TRBJ2-7)
CASTDRDYEQYF

SEQ ID NO: 437945 - protein, 13 aa, Homo sapiens
  CDR3 for alpha chain variable domain of TCR clone 218973 (TRAV12-3, TRAJ49)
CAMLSNTGNQFYF

SEQ ID NO: 437946 - protein, 16 aa, Homo sapiens
  CDR3 for beta chain variable domain of TCR clone 218973 (TRBV7-3, TRBJ2-2)
CASSLKRGTLSGELFF

SEQ ID NO: 437947 - protein, 13 aa, Homo sapiens
  CDR3 for alpha chain variable domain of TCR clone 218974 (TRAV8-3, TRAJ21)
CAVGAYNSNKFNF

SEQ ID NO: 437948 - protein, 15 aa, Homo sapiens
  CDR3 for beta chain variable domain of TCR clone 218974 (TRBV19, TRBJ1-5)
CASSIVWADNQPQHF

SEQ ID NO: 437949 - protein, 15 aa, Homo sapiens
  CDR3 for alpha chain variable domain of TCR clone 218975 (TRAV8-3, TRAJ32)
CAMGPYGGATNKLIF

SEQ ID NO: 437950 - protein, 14 aa, Homo sapiens
  CDR3 for beta chain variable domain of TCR clone 218975 (TRBV29-1, TRBJ2-2)
CSVLAETNTGELFF

SEQ ID NO: 437951 - protein, 14 aa, Homo sapiens
  CDR3 for alpha chain variable domain of TCR clone 218976 (TRAV12-2, TRAJ53)
CRERGGGSNYKLTF

SEQ ID NO: 437952 - protein, 13 aa, Homo sapiens
  CDR3 for beta chain variable domain of TCR clone 218976 (TRBV7-9, TRBJ1-2)
CASSLKQNYGYTF

SEQ ID NO: 437953 - protein, 14 aa, Homo sapiens
  CDR3 for alpha chain variable domain of TCR clone 218977 (TRAV3, TRAJ27)
CAVRDDTNTGKSTF

SEQ ID NO: 437954 - protein, 15 aa, Homo sapiens
  CDR3 for beta chain variable domain of TCR clone 218977 (TRBV7-7, TRBJ2-2)
CVTSKLAKNTGELFF

SEQ ID NO: 437955 - protein, 10 aa, Homo sapiens
  CDR3 for alpha chain variable domain of TCR clone 218978 (TRAV12-3, TRAJ49)
CAMNDDQFYF

SEQ ID NO: 437956 - protein, 17 aa, Homo sapiens
  CDR3 for beta chain variable domain of TCR clone 218978 (TRBV28, TRBJ2-5)
CASSTPEGDALQETQYF

SEQ ID NO: 437957 - protein, 14 aa, Homo sapiens
  CDR3 for alpha chain variable domain of TCR clone 218979 (TRAV27, TRAJ37)
CAGERSSNTGKLIF

SEQ ID NO: 437958 - protein, 15 aa, Homo sapiens
  CDR3 for beta chain variable domain of TCR clone 218979 (TRBV11-3, TRBJ1-6)
CASSLDWGANSTLHF

SEQ ID NO: 437959 - protein, 14 aa, Homo sapiens
  CDR3 for alpha chain variable domain of TCR clone 218980 (TRAV12-2, TRAJ13)
CAVKKTGGYQKVTF

SEQ ID NO: 437960 - protein, 14 aa, Homo sapiens
  CDR3 for beta chain variable domain of TCR clone 218980 (TRBV4-2, TRBJ2-1)
CASGPDRAYNEQFF

SEQ ID NO: 437961 - protein, 12 aa, Homo sapiens
  CDR3 for alpha chain variable domain of TCR clone 218981 (TRAV21, TRAJ31)
CVLAGNNARLMF

SEQ ID NO: 437962 - protein, 14 aa, Homo sapiens
  CDR3 for beta chain variable domain of TCR clone 218981 (TRBV7-6, TRBJ2-3)
CASSLGTVTDTQYF

SEQ ID NO: 437963 - protein, 16 aa, Homo sapiens
  CDR3 for alpha chain variable domain of TCR clone 218982 (TRAV23/DV6, TRAJ9)
CAASIGGNTGGFKTIF

SEQ ID NO: 437964 - protein, 15 aa, Homo sapiens
  CDR3 for beta chain variable domain of TCR clone 218982 (TRBV7-3, TRBJ2-1)
CASSLGQGPFGEQFF

SEQ ID NO: 437965 - protein, 13 aa, Homo sapiens
  CDR3 for alpha chain variable domain of TCR clone 218983 (TRAV8-2, TRAJ9)
CVVFNTGGFKTIF

SEQ ID NO: 437966 - protein, 15 aa, Homo sapiens
  CDR3 for beta chain variable domain of TCR clone 218983 (TRBV20-1, TRBJ2-7)
CSARDRVSGMDEQYF

SEQ ID NO: 437967 - protein, 13 aa, Homo sapiens
  CDR3 for alpha chain variable domain of TCR clone 218984 (TRAV12-3, TRAJ29)
CAMTLSGNTPLVF

SEQ ID NO: 437968 - protein, 15 aa, Homo sapiens
  CDR3 for beta chain variable domain of TCR clone 218984 (TRBV28, TRBJ2-5)
CASSLGLGNQETQYF

SEQ ID NO: 437969 - protein, 12 aa, Homo sapiens
  CDR3 for alpha chain variable domain of TCR clone 218985 (TRAV3, TRAJ20)
CAVRDPDYKLSF

SEQ ID NO: 437970 - protein, 14 aa, Homo sapiens
  CDR3 for beta chain variable domain of TCR clone 218985 (TRBV28, TRBJ2-3)
CASSWRGRADTQYF

SEQ ID NO: 437971 - protein, 15 aa, Homo sapiens
  CDR3 for alpha chain variable domain of TCR clone 218986 (TRAV24, TRAJ24)
CARTMTTDSWGKVQF

SEQ ID NO: 437972 - protein, 15 aa, Homo sapiens
  CDR3 for beta chain variable domain of TCR clone 218986 (TRBV5-1, TRBJ2-7)
CASSLGDFTTYEQYF

SEQ ID NO: 437973 - protein, 15 aa, Homo sapiens
  CDR3 for alpha chain variable domain of TCR clone 218987 (TRAV16, TRAJ20)
CALKGGLRADYTLSF

SEQ ID NO: 437974 - protein, 16 aa, Homo sapiens
  CDR3 for beta chain variable domain of TCR clone 218987 (TRBV11-3, TRBJ2-2)
CASSSRTSPGTGELFF

SEQ ID NO: 437975 - protein, 14 aa, Homo sapiens
  CDR3 for alpha chain variable domain of TCR clone 218988 (TRAV26-1, TRAJ21)
CIVRVVYNFNKFCF

SEQ ID NO: 437976 - protein, 11 aa, Homo sapiens
  CDR3 for beta chain variable domain of TCR clone 218988 (TRBV5-6, TRBJ2-5)
CASSLERTQYF

SEQ ID NO: 437977 - protein, 14 aa, Homo sapiens
  CDR3 for alpha chain variable domain of TCR clone 218989 (TRAV13-1, TRAJ35)
CAARKGGFGNVLHC

SEQ ID NO: 437978 - protein, 13 aa, Homo sapiens
  CDR3 for beta chain variable domain of TCR clone 218989 (TRBV7-3, TRBJ1-1)
CASSQDWEAEAFF

SEQ ID NO: 437979 - protein, 17 aa, Homo sapiens
  CDR3 for alpha chain variable domain of TCR clone 218990 (TRAV3, TRAJ6)
CAVRDGPRAGGSGIPTF

SEQ ID NO: 437980 - protein, 14 aa, Homo sapiens
  CDR3 for beta chain variable domain of TCR clone 218990 (TRBV7-2, TRBJ2-7)
CASSPKTSFYEQYF

SEQ ID NO: 437981 - protein, 15 aa, Homo sapiens
  CDR3 for alpha chain variable domain of TCR clone 218991 (TRAV8-3, TRAJ27)
RAVGPSKTNAGKSTF

SEQ ID NO: 437982 - protein, 13 aa, Homo sapiens
  CDR3 for beta chain variable domain of TCR clone 218991 (TRBV12-5, TRBJ1-2)
CASGVRTGNGYTF

SEQ ID NO: 437983 - protein, 15 aa, Homo sapiens
  CDR3 for alpha chain variable domain of TCR clone 218992 (TRAV8-3, TRAJ7)
RAVGSISYGNNRLAF

SEQ ID NO: 437984 - protein, 15 aa, Homo sapiens
  CDR3 for beta chain variable domain of TCR clone 218992 (TRBV4-2, TRBJ1-1)
CASSQEDLPRTEAFF

SEQ ID NO: 437985 - protein, 13 aa, Homo sapiens
  CDR3 for alpha chain variable domain of TCR clone 218993 (TRAV12-2, TRAJ3)
CVSLYSSASKLIF

SEQ ID NO: 437986 - protein, 14 aa, Homo sapiens
  CDR3 for beta chain variable domain of TCR clone 218993 (TRBV27, TRBJ2-1)
CAGSIAETYNEQFF

SEQ ID NO: 437987 - protein, 12 aa, Homo sapiens
  CDR3 for alpha chain variable domain of TCR clone 218994 (TRAV27, TRAJ9)
CAGESGGFKTLF

SEQ ID NO: 437988 - protein, 14 aa, Homo sapiens
  CDR3 for beta chain variable domain of TCR clone 218994 (TRBV6-1, TRBJ2-1)
CASAKDGFYNEQFF

SEQ ID NO: 437989 - protein, 16 aa, Homo sapiens
  CDR3 for alpha chain variable domain of TCR clone 218995 (TRAV1-2, TRAJ10)
CGVRGVLTGGGNKLTF

SEQ ID NO: 437990 - protein, 17 aa, Homo sapiens
  CDR3 for beta chain variable domain of TCR clone 218995 (TRBV13, TRBJ2-3)
CASILSRVAGGRNTQYF

SEQ ID NO: 437991 - protein, 13 aa, Homo sapiens
  CDR3 for alpha chain variable domain of TCR clone 218996 (TRAV8-3, TRAJ43)
CAVVPYNNNDMRF

SEQ ID NO: 437992 - protein, 16 aa, Homo sapiens
  CDR3 for beta chain variable domain of TCR clone 218996 (TRBV7-2, TRBJ2-5)
CASSPVPTGGEETQYF

SEQ ID NO: 437993 - protein, 16 aa, Homo sapiens
  CDR3 for alpha chain variable domain of TCR clone 218997 (TRAV14/DV4, TRAJ8)
CAMREGQYTCFQKLVL

SEQ ID NO: 437994 - protein, 15 aa, Homo sapiens
  CDR3 for beta chain variable domain of TCR clone 218997 (TRBV28, TRBJ1-3)
CASGATGNSGNTIYF

SEQ ID NO: 437995 - protein, 13 aa, Homo sapiens
  CDR3 for alpha chain variable domain of TCR clone 218998 (TRAV3, TRAJ43)
CAVKARNNNDMRL

SEQ ID NO: 437996 - protein, 16 aa, Homo sapiens
  CDR3 for beta chain variable domain of TCR clone 218998 (TRBV7-9, TRBJ2-3)
CASSFSVAGGTDTQYF

SEQ ID NO: 437997 - protein, 13 aa, Homo sapiens
  CDR3 for alpha chain variable domain of TCR clone 218999 (TRAV23/DV6, TRAJ12)
CAPRVDSSYKLIF

SEQ ID NO: 437998 - protein, 13 aa, Homo sapiens
  CDR3 for beta chain variable domain of TCR clone 218999 (TRBV7-3, TRBJ1-1)
CASSQDWGAEAFF

SEQ ID NO: 437999 - protein, 12 aa, Homo sapiens
  CDR3 for alpha chain variable domain of TCR clone 219000 (TRAV12-3, TRAJ17)
CAMTLTGNKLTF

SEQ ID NO: 438000 - protein, 15 aa, Homo sapiens
  CDR3 for beta chain variable domain of TCR clone 219000 (TRBV20-1, TRBJ2-7)
YSARDRVSGMDEQYF

SEQ ID NO: 438001 - protein, 14 aa, Homo sapiens
  CDR3 for alpha chain variable domain of TCR clone 219001 (TRAV30, TRAJ33)
CGTVAPRSNYQLIW

SEQ ID NO: 438002 - protein, 18 aa, Homo sapiens
  CDR3 for beta chain variable domain of TCR clone 219001 (TRBV4-1, TRBJ2-3)
CASSHQLAGGRSTDTQYF

SEQ ID NO: 438003 - protein, 14 aa, Homo sapiens
  CDR3 for alpha chain variable domain of TCR clone 219002 (TRAV17, TRAJ57)
CATDPQGGSEKLVF

SEQ ID NO: 438004 - protein, 13 aa, Homo sapiens
  CDR3 for beta chain variable domain of TCR clone 219002 (TRBV18, TRBJ2-1)
CASSPPSSNEQFF

SEQ ID NO: 438005 - protein, 15 aa, Homo sapiens
  CDR3 for alpha chain variable domain of TCR clone 219003 (TRAV12-3, TRAJ49)
CAMAVTPNTGNQFYF

SEQ ID NO: 438006 - protein, 18 aa, Homo sapiens
  CDR3 for beta chain variable domain of TCR clone 219003 (TRBV4-1, TRBJ1-5)
CASSQDPRGQGLTQPQHF

SEQ ID NO: 438007 - protein, 14 aa, Homo sapiens
  CDR3 for alpha chain variable domain of TCR clone 219004 (TRAV29/DV5, TRAJ44)
CAASATGTASKLTS

SEQ ID NO: 438008 - protein, 16 aa, Homo sapiens
  CDR3 for beta chain variable domain of TCR clone 219004 (TRBV7-9, TRBJ1-3)
CASSQTSGLRMGTIYF

SEQ ID NO: 438009 - protein, 15 aa, Homo sapiens
  CDR3 for alpha chain variable domain of TCR clone 219005 (TRAV23/DV6, TRAJ18)
CAARYRGSTLGRRYF

SEQ ID NO: 438010 - protein, 13 aa, Homo sapiens
  CDR3 for beta chain variable domain of TCR clone 219005 (TRBV7-2, TRBJ2-7)
CASSSPSGSEQYF

SEQ ID NO: 438011 - protein, 15 aa, Homo sapiens
  CDR3 for alpha chain variable domain of TCR clone 219006 (TRAV12-3, TRAJ11)
CAMSEENSGYSTHTF

SEQ ID NO: 438012 - protein, 20 aa, Homo sapiens
  CDR3 for beta chain variable domain of TCR clone 219006 (TRBV7-8, TRBJ2-2)
CASSHLFPGPTIHITGELFF

SEQ ID NO: 438013 - protein, 13 aa, Homo sapiens
  CDR3 for alpha chain variable domain of TCR clone 219007 (TRAV8-6, TRAJ49)
WAVITNTGNQFYF

SEQ ID NO: 438014 - protein, 16 aa, Homo sapiens
  CDR3 for beta chain variable domain of TCR clone 219007 (TRBV2, TRBJ2-1)
CASSVGGSLSYNEQFF

SEQ ID NO: 438015 - protein, 16 aa, Homo sapiens
  CDR3 for alpha chain variable domain of TCR clone 219008 (TRAV30, TRAJ24)
CGTEIVDADSCGKFQF

SEQ ID NO: 438016 - protein, 13 aa, Homo sapiens
  CDR3 for beta chain variable domain of TCR clone 219008 (TRBV18, TRBJ1-2)
CASSASATEGYTF

SEQ ID NO: 438017 - protein, 13 aa, Homo sapiens
  CDR3 for alpha chain variable domain of TCR clone 219009 (TRAV8-6, TRAJ9)
CAVWDTGGFKTIF

SEQ ID NO: 438018 - protein, 14 aa, Homo sapiens
  CDR3 for beta chain variable domain of TCR clone 219009 (TRBV2, TRBJ2-1)
CASSEALIYNERFF

SEQ ID NO: 438019 - protein, 12 aa, Homo sapiens
  CDR3 for alpha chain variable domain of TCR clone 219010 (TRAV16, TRAJ13)
CITLRGYQKVTF

SEQ ID NO: 438020 - protein, 14 aa, Homo sapiens
  CDR3 for beta chain variable domain of TCR clone 219010 (TRBV7-2, TRBJ2-7)
CASSPKTSFYEQYF

SEQ ID NO: 438021 - protein, 17 aa, Homo sapiens
  CDR3 for alpha chain variable domain of TCR clone 219011 (TRAV12-3, TRAJ6)
CAMSARGGAGGSYIPTF

SEQ ID NO: 438022 - protein, 12 aa, Homo sapiens
  CDR3 for beta chain variable domain of TCR clone 219011 (TRBV12-4, TRBJ2-3)
RASSTLPDTQYF

SEQ ID NO: 438023 - protein, 13 aa, Homo sapiens
  CDR3 for alpha chain variable domain of TCR clone 219012 (TRAV1-2, TRAJ24)
CAVRADSWGKFQF

SEQ ID NO: 438024 - protein, 13 aa, Homo sapiens
  CDR3 for beta chain variable domain of TCR clone 219012 (TRBV20-1, TRBJ2-1)
CSATGLAGYEQFF

SEQ ID NO: 438025 - protein, 13 aa, Homo sapiens
  CDR3 for alpha chain variable domain of TCR clone 219013 (TRAV3, TRAJ21)
CAVREPDFNKFYF

SEQ ID NO: 438026 - protein, 15 aa, Homo sapiens
  CDR3 for beta chain variable domain of TCR clone 219013 (TRBV2, TRBJ2-1)
CASSELAGGYNDQFF

SEQ ID NO: 438027 - protein, 14 aa, Homo sapiens
  CDR3 for alpha chain variable domain of TCR clone 219014 (TRAV13-1, TRAJ9)
CAASRPSGGFKTIF

SEQ ID NO: 438028 - protein, 14 aa, Homo sapiens
  CDR3 for beta chain variable domain of TCR clone 219014 (TRBV9, TRBJ2-2)
CASSVGFLTGELCF

SEQ ID NO: 438029 - protein, 16 aa, Homo sapiens
  CDR3 for alpha chain variable domain of TCR clone 219015 (TRAV30, TRAJ24)
CGTEIVDADSWGKFQF

SEQ ID NO: 438030 - protein, 14 aa, Homo sapiens
  CDR3 for beta chain variable domain of TCR clone 219015 (TRBV5-4, TRBJ1-6)
CASSLWSDNSPLHF

SEQ ID NO: 438031 - protein, 15 aa, Homo sapiens
  CDR3 for alpha chain variable domain of TCR clone 219016 (TRAV21, TRAJ38)
CAVRQAAGNNRKQIW

SEQ ID NO: 438032 - protein, 16 aa, Homo sapiens
  CDR3 for beta chain variable domain of TCR clone 219016 (TRBV4-2, TRBJ1-1)
CASRPLDGGGDTEAFF

SEQ ID NO: 438033 - protein, 11 aa, Homo sapiens
  CDR3 for alpha chain variable domain of TCR clone 219017 (TRAV3, TRAJ13)
CAVTSYQKVTF

SEQ ID NO: 438034 - protein, 15 aa, Homo sapiens
  CDR3 for beta chain variable domain of TCR clone 219017 (TRBV4-1, TRBJ2-7)
CASSQQGQGFDEQYF

SEQ ID NO: 438035 - protein, 15 aa, Homo sapiens
  CDR3 for alpha chain variable domain of TCR clone 219018 (TRAV21, TRAJ38)
CAVRQDAGNNRKLIW

SEQ ID NO: 438036 - protein, 16 aa, Homo sapiens
  CDR3 for beta chain variable domain of TCR clone 219018 (TRBV4-2, TRBJ1-1)
CASRPLDGGGDTEAYF

SEQ ID NO: 438037 - protein, 13 aa, Homo sapiens
  CDR3 for alpha chain variable domain of TCR clone 219019 (TRAV17, TRAJ22)
CAGRRGSAMQLTF

SEQ ID NO: 438038 - protein, 14 aa, Homo sapiens
  CDR3 for beta chain variable domain of TCR clone 219019 (TRBV19, TRBJ1-1)
CASSITGWETEAFF

SEQ ID NO: 438039 - protein, 15 aa, Homo sapiens
  CDR3 for alpha chain variable domain of TCR clone 219020 (TRAV26-1, TRAJ39)
CIVRVVGDAGNMLTF

SEQ ID NO: 438040 - protein, 15 aa, Homo sapiens
  CDR3 for beta chain variable domain of TCR clone 219020 (TRBV11-3, TRBJ2-7)
CASSPGPASSYEQYF

SEQ ID NO: 438041 - protein, 16 aa, Homo sapiens
  CDR3 for alpha chain variable domain of TCR clone 219021 (TRAV17, TRAJ53)
CATDALSGGSNYKLTF

SEQ ID NO: 438042 - protein, 15 aa, Homo sapiens
  CDR3 for beta chain variable domain of TCR clone 219021 (TRBV6-5, TRBJ2-1)
CASSYDAGAGNEQFF

SEQ ID NO: 438043 - protein, 12 aa, Homo sapiens
  CDR3 for alpha chain variable domain of TCR clone 219022 (TRAV12-2, TRAJ3)
CAGWSSASKIIF

SEQ ID NO: 438044 - protein, 12 aa, Homo sapiens
  CDR3 for beta chain variable domain of TCR clone 219022 (TRBV11-2, TRBJ2-1)
CASSPGNNEQSF

SEQ ID NO: 438045 - protein, 14 aa, Homo sapiens
  CDR3 for alpha chain variable domain of TCR clone 219023 (TRAV16, TRAJ17)
CALSGRAAGNKLTF

SEQ ID NO: 438046 - protein, 17 aa, Homo sapiens
  CDR3 for beta chain variable domain of TCR clone 219023 (TRBV18, TRBJ2-6)
CSSSPRQGAVGANVLTF

SEQ ID NO: 438047 - protein, 15 aa, Homo sapiens
  CDR3 for alpha chain variable domain of TCR clone 219024 (TRAV8-4, TRAJ3)
CAVTSENLVQQCFQD

SEQ ID NO: 438048 - protein, 16 aa, Homo sapiens
  CDR3 for beta chain variable domain of TCR clone 219024 (TRBV4-2, TRBJ1-1)
CASSQAGFGMNTEAFF

SEQ ID NO: 438049 - protein, 17 aa, Homo sapiens
  CDR3 for alpha chain variable domain of TCR clone 219025 (TRAV3, TRAJ42)
CAVRDRDYGGSQGNPIL

SEQ ID NO: 438050 - protein, 15 aa, Homo sapiens
  CDR3 for beta chain variable domain of TCR clone 219025 (TRBV2, TRBJ2-7)
CASSEGLARSYEQYF

SEQ ID NO: 438051 - protein, 14 aa, Homo sapiens
  CDR3 for alpha chain variable domain of TCR clone 219026 (TRAV12-1, TRAJ9)
CVVTGDTGGFKTIF

SEQ ID NO: 438052 - protein, 16 aa, Homo sapiens
  CDR3 for beta chain variable domain of TCR clone 219026 (TRBV29-1, TRBJ1-2)
CSAEANRDIANYGYTF

SEQ ID NO: 438053 - protein, 18 aa, Homo sapiens
  CDR3 for alpha chain variable domain of TCR clone 219027 (TRAV26-1, TRAJ57)
CIVRVALRFQGGSEKLGF

SEQ ID NO: 438054 - protein, 15 aa, Homo sapiens
  CDR3 for beta chain variable domain of TCR clone 219027 (TRBV27, TRBJ2-1)
CASSNGGGSSNEQFF

SEQ ID NO: 438055 - protein, 15 aa, Homo sapiens
  CDR3 for alpha chain variable domain of TCR clone 219028 (TRAV13-1, TRAJ3)
CAATPGYSSASKIIF

SEQ ID NO: 438056 - protein, 14 aa, Homo sapiens
  CDR3 for beta chain variable domain of TCR clone 219028 (TRBV19, TRBJ2-5)
CASSMTGQQETQYF

SEQ ID NO: 438057 - protein, 15 aa, Homo sapiens
  CDR3 for alpha chain variable domain of TCR clone 219029 (TRAV25, TRAJ10)
CAGPLLTGGGNKPTF

SEQ ID NO: 438058 - protein, 15 aa, Homo sapiens
  CDR3 for beta chain variable domain of TCR clone 219029 (TRBV12-5, TRBJ2-2)
CASGRLGGNTGELFF

SEQ ID NO: 438059 - protein, 14 aa, Homo sapiens
  CDR3 for alpha chain variable domain of TCR clone 219030 (TRAV1-2, TRAJ16)
CAVNRFSDGQKLLF

SEQ ID NO: 438060 - protein, 15 aa, Homo sapiens
  CDR3 for beta chain variable domain of TCR clone 219030 (TRBV5-7, TRBJ1-2)
CASSLGVAANYGYTF

SEQ ID NO: 438061 - protein, 14 aa, Homo sapiens
  CDR3 for alpha chain variable domain of TCR clone 219031 (TRAV1-2, TRAJ16)
CAVNRFSDGQKLIF

SEQ ID NO: 438062 - protein, 15 aa, Homo sapiens
  CDR3 for beta chain variable domain of TCR clone 219031 (TRBV9, TRBJ1-6)
CASSVGGTGDSHLHF

SEQ ID NO: 438063 - protein, 11 aa, Homo sapiens
  CDR3 for alpha chain variable domain of TCR clone 219032 (TRAV3, TRAJ21)
CAVGNFNKFYF

SEQ ID NO: 438064 - protein, 16 aa, Homo sapiens
  CDR3 for beta chain variable domain of TCR clone 219032 (TRBV19, TRBJ2-1)
CASSKAGRAPTMSSSS

SEQ ID NO: 438065 - protein, 14 aa, Homo sapiens
  CDR3 for alpha chain variable domain of TCR clone 219033 (TRAV17, TRAJ40)
CATALTSGTYKYIF

SEQ ID NO: 438066 - protein, 15 aa, Homo sapiens
  CDR3 for beta chain variable domain of TCR clone 219033 (TRBV5-1, TRBJ2-1)
CASSPPRAPYNEQFF

SEQ ID NO: 438067 - protein, 14 aa, Homo sapiens
  CDR3 for alpha chain variable domain of TCR clone 219034 (TRAV12-3, TRAJ10)
SHLPLTGGGNKLTF

SEQ ID NO: 438068 - protein, 13 aa, Homo sapiens
  CDR3 for beta chain variable domain of TCR clone 219034 (TRBV29-1, TRBJ2-5)
CSVEAKAQGTQYF

SEQ ID NO: 438069 - protein, 12 aa, Homo sapiens
  CDR3 for alpha chain variable domain of TCR clone 219035 (TRAV4, TRAJ21)
CLVGDNCNKVYF

SEQ ID NO: 438070 - protein, 17 aa, Homo sapiens
  CDR3 for beta chain variable domain of TCR clone 219035 (TRBV3-1, TRBJ2-7)
CASSQDLTGLSSYEQYF

SEQ ID NO: 438071 - protein, 17 aa, Homo sapiens
  CDR3 for alpha chain variable domain of TCR clone 219036 (TRAV3, TRAJ38)
CAVRDCLNARNNRKLIW

SEQ ID NO: 438072 - protein, 13 aa, Homo sapiens
  CDR3 for beta chain variable domain of TCR clone 219036 (TRBV23-1, TRBJ1-4)
CASRGKFNEKLFF

SEQ ID NO: 438073 - protein, 14 aa, Homo sapiens
  CDR3 for alpha chain variable domain of TCR clone 219037 (TRAV17, TRAJ6)
CATDASGGSYIPTF

SEQ ID NO: 438074 - protein, 19 aa, Homo sapiens
  CDR3 for beta chain variable domain of TCR clone 219037 (TRBV4-2, TRBJ2-7)
CSSSQEFIGWQVTPYEQYF

SEQ ID NO: 438075 - protein, 14 aa, Homo sapiens
  CDR3 for alpha chain variable domain of TCR clone 219038 (TRAV17, TRAJ12)
CAILPMDSSYTLIF

SEQ ID NO: 438076 - protein, 15 aa, Homo sapiens
  CDR3 for beta chain variable domain of TCR clone 219038 (TRBV5-1, TRBJ1-1)
CASSLGEGENTEAFF

SEQ ID NO: 438077 - protein, 13 aa, Homo sapiens
  CDR3 for alpha chain variable domain of TCR clone 219039 (TRAV30, TRAJ29)
CGTEDSGNTPLVF

SEQ ID NO: 438078 - protein, 17 aa, Homo sapiens
  CDR3 for beta chain variable domain of TCR clone 219039 (TRBV20-1, TRBJ2-2)
CSASGSGQGGLTGELFF

SEQ ID NO: 438079 - protein, 11 aa, Homo sapiens
  CDR3 for alpha chain variable domain of TCR clone 219040 (TRAV8-3, TRAJ18)
CAVGGRQRLNP

SEQ ID NO: 438080 - protein, 18 aa, Homo sapiens
  CDR3 for beta chain variable domain of TCR clone 219040 (TRBV11-2, TRBJ2-3)
CASSLGGASRGAPNTQYF

SEQ ID NO: 438081 - protein, 15 aa, Homo sapiens
  CDR3 for alpha chain variable domain of TCR clone 219041 (TRAV12-1, TRAJ36)
CVVSEHQTGANNRFF

SEQ ID NO: 438082 - protein, 12 aa, Homo sapiens
  CDR3 for beta chain variable domain of TCR clone 219041 (TRBV29-1, TRBJ2-3)
CSVTGGADTQYF

SEQ ID NO: 438083 - protein, 15 aa, Homo sapiens
  CDR3 for alpha chain variable domain of TCR clone 219042 (TRAV3, TRAJ20)
CAVRDIKLIDYKLSF

SEQ ID NO: 438084 - protein, 15 aa, Homo sapiens
  CDR3 for beta chain variable domain of TCR clone 219042 (TRBV7-9, TRBJ1-6)
CASGSPGRGNSPLHF

SEQ ID NO: 438085 - protein, 12 aa, Homo sapiens
  CDR3 for alpha chain variable domain of TCR clone 219043 (TRAV12-3, TRAJ13)
CAMSSGGYQSYL

SEQ ID NO: 438086 - protein, 13 aa, Homo sapiens
  CDR3 for beta chain variable domain of TCR clone 219043 (TRBV20-1, TRBJ1-1)
CSAPPGGHTEAFF

SEQ ID NO: 438087 - protein, 14 aa, Homo sapiens
  CDR3 for alpha chain variable domain of TCR clone 219044 (TRAV35, TRAJ13)
CAGRSPGGFQKVTF

SEQ ID NO: 438088 - protein, 14 aa, Homo sapiens
  CDR3 for beta chain variable domain of TCR clone 219044 (TRBV19, TRBJ2-2)
CASSMVGLSGELFF

SEQ ID NO: 438089 - protein, 13 aa, Homo sapiens
  CDR3 for alpha chain variable domain of TCR clone 219045 (TRAV3, TRAJ15)
CAVRDQAGTVLIF

SEQ ID NO: 438090 - protein, 15 aa, Homo sapiens
  CDR3 for beta chain variable domain of TCR clone 219045 (TRBV11-1, TRBJ2-7)
CASSLNYGASYEQYF

SEQ ID NO: 438091 - protein, 11 aa, Homo sapiens
  CDR3 for alpha chain variable domain of TCR clone 219046 (TRAV13-2, TRAJ31)
CAENMDARLMF

SEQ ID NO: 438092 - protein, 15 aa, Homo sapiens
  CDR3 for beta chain variable domain of TCR clone 219046 (TRBV7-8, TRBJ1-2)
CASSLVRDGGLGYAF

SEQ ID NO: 438093 - protein, 18 aa, Homo sapiens
  CDR3 for alpha chain variable domain of TCR clone 219047 (TRAV29/DV5, TRAJ52)
CAAGFRGAGGISYGKLTF

SEQ ID NO: 438094 - protein, 16 aa, Homo sapiens
  CDR3 for beta chain variable domain of TCR clone 219047 (TRBV7-3, TRBJ2-2)
CASSLKRGTLPGELFF

SEQ ID NO: 438095 - protein, 15 aa, Homo sapiens
  CDR3 for alpha chain variable domain of TCR clone 219048 (TRAV26-1, TRAJ29)
CIVRVEGSGNTPLVF

SEQ ID NO: 438096 - protein, 19 aa, Homo sapiens
  CDR3 for beta chain variable domain of TCR clone 219048 (TRBV7-2, TRBJ2-3)
CASSFLSRNWGGGTDTQYF

SEQ ID NO: 438097 - protein, 11 aa, Homo sapiens
  CDR3 for alpha chain variable domain of TCR clone 219049 (TRAV8-4, TRAJ20)
CAVTNVPTTTS

SEQ ID NO: 438098 - protein, 16 aa, Homo sapiens
  CDR3 for beta chain variable domain of TCR clone 219049 (TRBV6-1, TRBJ1-2)
CASSGAWQGRSHGYTF

SEQ ID NO: 438099 - protein, 17 aa, Homo sapiens
  CDR3 for alpha chain variable domain of TCR clone 219050 (TRAV12-1, TRAJ42)
CVVMRMNYGGSQGNLIF

SEQ ID NO: 438100 - protein, 13 aa, Homo sapiens
  CDR3 for beta chain variable domain of TCR clone 219050 (TRBV7-2, TRBJ1-1)
CASSLARPDEAFF

SEQ ID NO: 438101 - protein, 14 aa, Homo sapiens
  CDR3 for alpha chain variable domain of TCR clone 219051 (TRAV1-1, TRAJ28)
CAAPSGAGSYQLTF

SEQ ID NO: 438102 - protein, 15 aa, Homo sapiens
  CDR3 for beta chain variable domain of TCR clone 219051 (TRBV7-2, TRBJ1-2)
CASSLVSGGEYGYTF

SEQ ID NO: 438103 - protein, 13 aa, Homo sapiens
  CDR3 for alpha chain variable domain of TCR clone 219052 (TRAV8-3, TRAJ4)
WVFYSGGYNKLIF

SEQ ID NO: 438104 - protein, 14 aa, Homo sapiens
  CDR3 for beta chain variable domain of TCR clone 219052 (TRBV7-9, TRBJ2-3)
CASSLDDGTDTQYF

SEQ ID NO: 438105 - protein, 14 aa, Homo sapiens
  CDR3 for alpha chain variable domain of TCR clone 219053 (TRAV1-2, TRAJ16)
CAVNRFSDGQKLLF

SEQ ID NO: 438106 - protein, 19 aa, Homo sapiens
  CDR3 for beta chain variable domain of TCR clone 219053 (TRBV7-2, TRBJ2-3)
CASSSQGGPRLAGADTQYF

SEQ ID NO: 438107 - protein, 13 aa, Homo sapiens
  CDR3 for alpha chain variable domain of TCR clone 219054 (TRAV17, TRAJ15)
CATANQAGTALIF

SEQ ID NO: 438108 - protein, 15 aa, Homo sapiens
  CDR3 for beta chain variable domain of TCR clone 219054 (TRBV18, TRBJ1-5)
CASSPSDRSNQPQHF

SEQ ID NO: 438109 - protein, 12 aa, Homo sapiens
  CDR3 for alpha chain variable domain of TCR clone 219055 (TRAV26-2, TRAJ47)
CILGEYGNKLVF

SEQ ID NO: 438110 - protein, 16 aa, Homo sapiens
  CDR3 for beta chain variable domain of TCR clone 219055 (TRBV18, TRBJ1-4)
CASSPLVGDRAEKLFF

SEQ ID NO: 438111 - protein, 14 aa, Homo sapiens
  CDR3 for alpha chain variable domain of TCR clone 219056 (TRAV26-1, TRAJ48)
CIVRVGFGNEKLTF

SEQ ID NO: 438112 - protein, 16 aa, Homo sapiens
  CDR3 for beta chain variable domain of TCR clone 219056 (TRBV20-1, TRBJ1-4)
CSAPGQGLLTNEKLFF

SEQ ID NO: 438113 - protein, 14 aa, Homo sapiens
  CDR3 for alpha chain variable domain of TCR clone 219057 (TRAV9-2, TRAJ39)
CALYIYNAGNMLTF

SEQ ID NO: 438114 - protein, 16 aa, Homo sapiens
  CDR3 for beta chain variable domain of TCR clone 219057 (TRBV4-1, TRBJ2-3)
CASSQSTSGAEDTQYF

SEQ ID NO: 438115 - protein, 13 aa, Homo sapiens
  CDR3 for alpha chain variable domain of TCR clone 219058 (TRAV21, TRAJ27)
CAARPGNARISTF

SEQ ID NO: 438116 - protein, 14 aa, Homo sapiens
  CDR3 for beta chain variable domain of TCR clone 219058 (TRBV7-6, TRBJ2-3)
CASSLGTVTDTQYF

SEQ ID NO: 438117 - protein, 23 aa, Homo sapiens
  CDR3 for alpha chain variable domain of TCR clone 219059 (TRAV2, TRAJ9)
CAVEDRGLEASKLSLEQEQDYLL

SEQ ID NO: 438118 - protein, 16 aa, Homo sapiens
  CDR3 for beta chain variable domain of TCR clone 219059 (TRBV24-1, TRBJ2-3)
CATSDPGTGATDTQYF

SEQ ID NO: 438119 - protein, 13 aa, Homo sapiens
  CDR3 for alpha chain variable domain of TCR clone 219060 (TRAV29/DV5, TRAJ40)
CAASTSGTYKYIF

SEQ ID NO: 438120 - protein, 17 aa, Homo sapiens
  CDR3 for beta chain variable domain of TCR clone 219060 (TRBV7-8, TRBJ2-6)
RASSAGTGGAGANVLTF

SEQ ID NO: 438121 - protein, 13 aa, Homo sapiens
  CDR3 for alpha chain variable domain of TCR clone 219061 (TRAV27, TRAJ6)
CAGGTRGSYIPTF

SEQ ID NO: 438122 - protein, 15 aa, Homo sapiens
  CDR3 for beta chain variable domain of TCR clone 219061 (TRBV7-2, TRBJ2-1)
CASSLVGSSYNEQFF

SEQ ID NO: 438123 - protein, 12 aa, Homo sapiens
  CDR3 for alpha chain variable domain of TCR clone 219062 (TRAV3, TRAJ43)
CAVRGPNNDMRF

SEQ ID NO: 438124 - protein, 15 aa, Homo sapiens
  CDR3 for beta chain variable domain of TCR clone 219062 (TRBV27, TRBJ1-5)
GASSLGAGFDQPQHF

SEQ ID NO: 438125 - protein, 14 aa, Homo sapiens
  CDR3 for alpha chain variable domain of TCR clone 219063 (TRAV1-1, TRAJ27)
CAVIYNTNAGKSTF

SEQ ID NO: 438126 - protein, 17 aa, Homo sapiens
  CDR3 for beta chain variable domain of TCR clone 219063 (TRBV28, TRBJ2-5)
CASSRQGGLAGAETQYF

SEQ ID NO: 438127 - protein, 11 aa, Homo sapiens
  CDR3 for alpha chain variable domain of TCR clone 219064 (TRAV26-1, TRAJ37)
CIVRVGRKLIF

SEQ ID NO: 438128 - protein, 15 aa, Homo sapiens
  CDR3 for beta chain variable domain of TCR clone 219064 (TRBV29-1, TRBJ2-1)
CSGRDRKSSYNEQFF

SEQ ID NO: 438129 - protein, 14 aa, Homo sapiens
  CDR3 for alpha chain variable domain of TCR clone 219065 (TRAV8-3, TRAJ4)
CAVGAAGGYDKLIF

SEQ ID NO: 438130 - protein, 15 aa, Homo sapiens
  CDR3 for beta chain variable domain of TCR clone 219065 (TRBV5-1, TRBJ2-1)
CASSPPRAPYNEQFF

SEQ ID NO: 438131 - protein, 14 aa, Homo sapiens
  CDR3 for alpha chain variable domain of TCR clone 219066 (TRAV1-2, TRAJ16)
CAVNRFADGQKLLF

SEQ ID NO: 438132 - protein, 15 aa, Homo sapiens
  CDR3 for beta chain variable domain of TCR clone 219066 (TRBV29-1, TRBJ2-7)
CSVEFFDRGSYEQYF

SEQ ID NO: 438133 - protein, 13 aa, Homo sapiens
  CDR3 for alpha chain variable domain of TCR clone 219067 (TRAV1-2, TRAJ9)
FAVLNTGGFKTIF

SEQ ID NO: 438134 - protein, 14 aa, Homo sapiens
  CDR3 for beta chain variable domain of TCR clone 219067 (TRBV19, TRBJ2-1)
CASPTFVLSGEQFF

SEQ ID NO: 438135 - protein, 14 aa, Homo sapiens
  CDR3 for alpha chain variable domain of TCR clone 219068 (TRAV8-6, TRAJ53)
CAVTSGGRNYKLTF

SEQ ID NO: 438136 - protein, 11 aa, Homo sapiens
  CDR3 for beta chain variable domain of TCR clone 219068 (TRBV24-1, TRBJ2-3)
CATSDLDTQYF

SEQ ID NO: 438137 - protein, 16 aa, Homo sapiens
  CDR3 for alpha chain variable domain of TCR clone 219069 (TRAV1-2, TRAJ10)
CAVRGVLTGGGNNPTF

SEQ ID NO: 438138 - protein, 15 aa, Homo sapiens
  CDR3 for beta chain variable domain of TCR clone 219069 (TRBV7-9, TRBJ1-6)
CASSSPGRGNSPLHF

SEQ ID NO: 438139 - protein, 18 aa, Homo sapiens
  CDR3 for alpha chain variable domain of TCR clone 219070 (TRAV16, TRAJ4)
CITALSRMFSGGYNKLIF

SEQ ID NO: 438140 - protein, 12 aa, Homo sapiens
  CDR3 for beta chain variable domain of TCR clone 219070 (TRBV29-1, TRBJ2-3)
CSVTGGADTQYF

SEQ ID NO: 438141 - protein, 16 aa, Homo sapiens
  CDR3 for alpha chain variable domain of TCR clone 219071 (TRAV30, TRAJ24)
CGTEIVDADSWGKFQS

SEQ ID NO: 438142 - protein, 16 aa, Homo sapiens
  CDR3 for beta chain variable domain of TCR clone 219071 (TRBV5-1, TRBJ1-1)
CASSSGGNSLNTEAFL

SEQ ID NO: 438143 - protein, 14 aa, Homo sapiens
  CDR3 for alpha chain variable domain of TCR clone 219072 (TRAV3, TRAJ21)
CALGRGSTNFTLDL

SEQ ID NO: 438144 - protein, 15 aa, Homo sapiens
  CDR3 for beta chain variable domain of TCR clone 219072 (TRBV7-8, TRBJ2-1)
CASSLHGGPYNEQFF

SEQ ID NO: 438145 - protein, 15 aa, Homo sapiens
  CDR3 for alpha chain variable domain of TCR clone 219073 (TRAV8-3, TRAJ11)
CAVGLLNSGYSTLTF

SEQ ID NO: 438146 - protein, 16 aa, Homo sapiens
  CDR3 for beta chain variable domain of TCR clone 219073 (TRBV7-9, TRBJ1-2)
RASSLGFSSGEDGYTF

SEQ ID NO: 438147 - protein, 11 aa, Homo sapiens
  CDR3 for alpha chain variable domain of TCR clone 219074 (TRAV13-1, TRAJ15)
CAATPGTALIF

SEQ ID NO: 438148 - protein, 15 aa, Homo sapiens
  CDR3 for beta chain variable domain of TCR clone 219074 (TRBV7-2, TRBJ2-1)
CASSLVAGRYNEQFF

SEQ ID NO: 438149 - protein, 12 aa, Homo sapiens
  CDR3 for alpha chain variable domain of TCR clone 219075 (TRAV8-3, TRAJ26)
CAGDNYGQNFVF

SEQ ID NO: 438150 - protein, 18 aa, Homo sapiens
  CDR3 for beta chain variable domain of TCR clone 219075 (TRBV12-4, TRBJ2-4)
CASSRTGAVDVAKNIQYF

SEQ ID NO: 438151 - protein, 14 aa, Homo sapiens
  CDR3 for alpha chain variable domain of TCR clone 219076 (TRAV17, TRAJ54)
CATDANQGAQKLVF

SEQ ID NO: 438152 - protein, 16 aa, Homo sapiens
  CDR3 for beta chain variable domain of TCR clone 219076 (TRBV7-7, TRBJ2-1)
CASSLASGTSYNEQFF

SEQ ID NO: 438153 - protein, 16 aa, Homo sapiens
  CDR3 for alpha chain variable domain of TCR clone 219077 (TRAV30, TRAJ24)
CGTETVDADSWGKFQF

SEQ ID NO: 438154 - protein, 13 aa, Homo sapiens
  CDR3 for beta chain variable domain of TCR clone 219077 (TRBV20-1, TRBJ1-1)
CSARGGGNTEAFF

SEQ ID NO: 438155 - protein, 14 aa, Homo sapiens
  CDR3 for alpha chain variable domain of TCR clone 219078 (TRAV26-1, TRAJ11)
CIVPLYSGYSTLTF

SEQ ID NO: 438156 - protein, 12 aa, Homo sapiens
  CDR3 for beta chain variable domain of TCR clone 219078 (TRBV11-3, TRBJ2-2)
CASSLGGGELFF

SEQ ID NO: 438157 - protein, 13 aa, Homo sapiens
  CDR3 for alpha chain variable domain of TCR clone 219079 (TRAV1-2, TRAJ11)
CAVRREGYSTLTF

SEQ ID NO: 438158 - protein, 14 aa, Homo sapiens
  CDR3 for beta chain variable domain of TCR clone 219079 (TRBV19, TRBJ2-5)
CASSMTGQQETQYF

SEQ ID NO: 438159 - protein, 13 aa, Homo sapiens
  CDR3 for alpha chain variable domain of TCR clone 219080 (TRAV2, TRAJ40)
CAVVPQEPTNTSL

SEQ ID NO: 438160 - protein, 14 aa, Homo sapiens
  CDR3 for beta chain variable domain of TCR clone 219080 (TRBV19, TRBJ2-1)
CASPTFVLSGEQFF

SEQ ID NO: 438161 - protein, 13 aa, Homo sapiens
  CDR3 for alpha chain variable domain of TCR clone 219081 (TRAV8-3, TRAJ30)
CAVSVNRDDKIIF

SEQ ID NO: 438162 - protein, 13 aa, Homo sapiens
  CDR3 for beta chain variable domain of TCR clone 219081 (TRBV3-1, TRBJ2-2)
CASLARGSGELFF

SEQ ID NO: 438163 - protein, 13 aa, Homo sapiens
  CDR3 for alpha chain variable domain of TCR clone 219082 (TRAV9-2, TRAJ53)
CALSGGSNYKLTF

SEQ ID NO: 438164 - protein, 17 aa, Homo sapiens
  CDR3 for beta chain variable domain of TCR clone 219082 (TRBV11-2, TRBJ2-1)
CASNLYPPGVEYNEQFF

SEQ ID NO: 438165 - protein, 12 aa, Homo sapiens
  CDR3 for alpha chain variable domain of TCR clone 219083 (TRAV8-3, TRAJ41)
CAVALSGYALNL

SEQ ID NO: 438166 - protein, 16 aa, Homo sapiens
  CDR3 for beta chain variable domain of TCR clone 219083 (TRBV27, TRBJ2-7)
CASSSERRDSAYEQYF

SEQ ID NO: 438167 - protein, 13 aa, Homo sapiens
  CDR3 for alpha chain variable domain of TCR clone 219084 (TRAV2, TRAJ40)
CAVVTSGTYKYIF

SEQ ID NO: 438168 - protein, 14 aa, Homo sapiens
  CDR3 for beta chain variable domain of TCR clone 219084 (TRBV7-9, TRBJ2-5)
CASSLDTAQETQYF

SEQ ID NO: 438169 - protein, 17 aa, Homo sapiens
  CDR3 for alpha chain variable domain of TCR clone 219085 (TRAV3, TRAJ6)
CAVRDGPRAGGSYIPPF

SEQ ID NO: 438170 - protein, 14 aa, Homo sapiens
  CDR3 for beta chain variable domain of TCR clone 219085 (TRBV7-2, TRBJ2-7)
CASSPKTSFYEQYV

SEQ ID NO: 438171 - protein, 16 aa, Homo sapiens
  CDR3 for alpha chain variable domain of TCR clone 219086 (TRAV30, TRAJ24)
CGTEIVDADSWGKFQF

SEQ ID NO: 438172 - protein, 17 aa, Homo sapiens
  CDR3 for beta chain variable domain of TCR clone 219086 (TRBV12-4, TRBJ2-3)
CASSGPGLAGGADTQYF

SEQ ID NO: 438173 - protein, 18 aa, Homo sapiens
  CDR3 for alpha chain variable domain of TCR clone 219087 (TRAV21, TRAJ52)
CAVRPSPAGGTSSGKLTF

SEQ ID NO: 438174 - protein, 13 aa, Homo sapiens
  CDR3 for beta chain variable domain of TCR clone 219087 (TRBV20-1, TRBJ1-1)
CSARVGGNTEAFF

SEQ ID NO: 438175 - protein, 14 aa, Homo sapiens
  CDR3 for alpha chain variable domain of TCR clone 219088 (TRAV23/DV6, TRAJ23)
CAAGPYNQGGKLTF

SEQ ID NO: 438176 - protein, 17 aa, Homo sapiens
  CDR3 for beta chain variable domain of TCR clone 219088 (TRBV4-2, TRBJ1-1)
CASSQVATGGMNTEAFF

SEQ ID NO: 438177 - protein, 13 aa, Homo sapiens
  CDR3 for alpha chain variable domain of TCR clone 219089 (TRAV12-3, TRAJ56)
CALATGAYSKLTF

SEQ ID NO: 438178 - protein, 12 aa, Homo sapiens
  CDR3 for beta chain variable domain of TCR clone 219089 (TRBV10-2, TRBJ2-3)
CASSPESDTQYF

SEQ ID NO: 438179 - protein, 13 aa, Homo sapiens
  CDR3 for alpha chain variable domain of TCR clone 219090 (TRAV35, TRAJ33)
CAGQLYGVYQLIW

SEQ ID NO: 438180 - protein, 13 aa, Homo sapiens
  CDR3 for beta chain variable domain of TCR clone 219090 (TRBV12-4, TRBJ1-1)
CASSPGTGFEAFF

SEQ ID NO: 438181 - protein, 15 aa, Homo sapiens
  CDR3 for alpha chain variable domain of TCR clone 219091 (TRAV13-1, TRAJ10)
CAAEVVTGGGNKLTF

SEQ ID NO: 438182 - protein, 13 aa, Homo sapiens
  CDR3 for beta chain variable domain of TCR clone 219091 (TRBV7-9, TRBJ2-1)
CASSLDVGNEQFF

SEQ ID NO: 438183 - protein, 12 aa, Homo sapiens
  CDR3 for alpha chain variable domain of TCR clone 219092 (TRAV3, TRAJ26)
CAVRDYGQYFVF

SEQ ID NO: 438184 - protein, 16 aa, Homo sapiens
  CDR3 for beta chain variable domain of TCR clone 219092 (TRBV11-2, TRBJ1-2)
CASSPSGREANYGYTF

SEQ ID NO: 438185 - protein, 12 aa, Homo sapiens
  CDR3 for alpha chain variable domain of TCR clone 219093 (TRAV13-2, TRAJ23)
CAERHRGGKLIF

SEQ ID NO: 438186 - protein, 19 aa, Homo sapiens
  CDR3 for beta chain variable domain of TCR clone 219093 (TRBV19, TRBJ2-5)
CASSIGQVTDFCLGETQYF

SEQ ID NO: 438187 - protein, 14 aa, Homo sapiens
  CDR3 for alpha chain variable domain of TCR clone 219094 (TRAV21, TRAJ28)
CAVGSGAGSYQLTF

SEQ ID NO: 438188 - protein, 13 aa, Homo sapiens
  CDR3 for beta chain variable domain of TCR clone 219094 (TRBV18, TRBJ1-4)
CQLPGPNGEKLFF

SEQ ID NO: 438189 - protein, 13 aa, Homo sapiens
  CDR3 for alpha chain variable domain of TCR clone 219095 (TRAV20, TRAJ20)
CAVQAGSGYKLSF

SEQ ID NO: 438190 - protein, 12 aa, Homo sapiens
  CDR3 for beta chain variable domain of TCR clone 219095 (TRBV5-5, TRBJ2-5)
CASSYFGETQYF

SEQ ID NO: 438191 - protein, 12 aa, Homo sapiens
  CDR3 for alpha chain variable domain of TCR clone 219096 (TRAV25, TRAJ11)
CAGYSGYSTLTF

SEQ ID NO: 438192 - protein, 16 aa, Homo sapiens
  CDR3 for beta chain variable domain of TCR clone 219096 (TRBV6-5, TRBJ2-7)
CASSYFRVGISDEQYF

SEQ ID NO: 438193 - protein, 14 aa, Homo sapiens
  CDR3 for alpha chain variable domain of TCR clone 219097 (TRAV29/DV5, TRAJ36)
CAARRKTGAKNLFF

SEQ ID NO: 438194 - protein, 14 aa, Homo sapiens
  CDR3 for beta chain variable domain of TCR clone 219097 (TRBV12-5, TRBJ2-5)
CASVSRTHQETQYF

SEQ ID NO: 438195 - protein, 14 aa, Homo sapiens
  CDR3 for alpha chain variable domain of TCR clone 219098 (TRAV21, TRAJ3)
CAVTGYRSASKIIF

SEQ ID NO: 438196 - protein, 17 aa, Homo sapiens
  CDR3 for beta chain variable domain of TCR clone 219098 (TRBV28, TRBJ2-5)
CASSRQGGLAGAETQYF

SEQ ID NO: 438197 - protein, 14 aa, Homo sapiens
  CDR3 for alpha chain variable domain of TCR clone 219099 (TRAV13-2, TRAJ32)
CAESLGGATNKLIF

SEQ ID NO: 438198 - protein, 12 aa, Homo sapiens
  CDR3 for beta chain variable domain of TCR clone 219099 (TRBV11-2, TRBJ2-1)
CASSPGHNEQSF

SEQ ID NO: 438199 - protein, 18 aa, Homo sapiens
  CDR3 for alpha chain variable domain of TCR clone 219100 (TRAV12-3, TRAJ52)
CAMSVGGAGGTSYGQLTF

SEQ ID NO: 438200 - protein, 17 aa, Homo sapiens
  CDR3 for beta chain variable domain of TCR clone 219100 (TRBV13, TRBJ2-3)
CASSLSRVAGGRNTQYF

SEQ ID NO: 438201 - protein, 13 aa, Homo sapiens
  CDR3 for alpha chain variable domain of TCR clone 219101 (TRAV36/DV7, TRAJ37)
CAVFSSNTGKLIS

SEQ ID NO: 438202 - protein, 12 aa, Homo sapiens
  CDR3 for beta chain variable domain of TCR clone 219101 (TRBV11-2, TRBJ2-2)
CASSLGGGELFF

SEQ ID NO: 438203 - protein, 14 aa, Homo sapiens
  CDR3 for alpha chain variable domain of TCR clone 219102 (TRAV12-1, TRAJ17)
CVVNYKAAGNKLPF

SEQ ID NO: 438204 - protein, 17 aa, Homo sapiens
  CDR3 for beta chain variable domain of TCR clone 219102 (TRBV20-1, TRBJ2-1)
CSASSSGLAGSCNEQFF

SEQ ID NO: 438205 - protein, 14 aa, Homo sapiens
  CDR3 for alpha chain variable domain of TCR clone 219103 (TRAV12-3, TRAJ57)
CAMSAWGGSEKLVF

SEQ ID NO: 438206 - protein, 16 aa, Homo sapiens
  CDR3 for beta chain variable domain of TCR clone 219103 (TRBV7-3, TRBJ2-2)
CASSLKRGALSGELFF

SEQ ID NO: 438207 - protein, 14 aa, Homo sapiens
  CDR3 for alpha chain variable domain of TCR clone 219104 (TRAV1-1, TRAJ27)
CAVIYNTNAGKSTF

SEQ ID NO: 438208 - protein, 13 aa, Homo sapiens
  CDR3 for beta chain variable domain of TCR clone 219104 (TRBV7-3, TRBJ1-2)
CASSLKRGYGYTF

SEQ ID NO: 438209 - protein, 12 aa, Homo sapiens
  CDR3 for alpha chain variable domain of TCR clone 219105 (TRAV20, TRAJ56)
CAVTGANSKLTF

SEQ ID NO: 438210 - protein, 12 aa, Homo sapiens
  CDR3 for beta chain variable domain of TCR clone 219105 (TRBV12-4, TRBJ2-5)
CASSSAQETQYF

SEQ ID NO: 438211 - protein, 18 aa, Homo sapiens
  CDR3 for alpha chain variable domain of TCR clone 219106 (TRAV16, TRAJ10)
CAPAREEEQTHLWDRHSA

SEQ ID NO: 438212 - protein, 15 aa, Homo sapiens
  CDR3 for beta chain variable domain of TCR clone 219106 (TRBV6-3, TRBJ2-7)
CASSSPGTVFYEQYF

SEQ ID NO: 438213 - protein, 15 aa, Homo sapiens
  CDR3 for alpha chain variable domain of TCR clone 219107 (TRAV3, TRAJ20)
CAVRDIKLSDYKLSF

SEQ ID NO: 438214 - protein, 12 aa, Homo sapiens
  CDR3 for beta chain variable domain of TCR clone 219107 (TRBV7-9, TRBJ1-4)
CASSTDREKLFF

SEQ ID NO: 438215 - protein, 12 aa, Homo sapiens
  CDR3 for alpha chain variable domain of TCR clone 219108 (TRAV12-2, TRAJ47)
CAVAEYGNKLVF

SEQ ID NO: 438216 - protein, 14 aa, Homo sapiens
  CDR3 for beta chain variable domain of TCR clone 219108 (TRBV20-1, TRBJ1-1)
CSAMGGTANTQPFF

SEQ ID NO: 438217 - protein, 14 aa, Homo sapiens
  CDR3 for alpha chain variable domain of TCR clone 219109 (TRAV1-2, TRAJ8)
CAVREDTGFQKLGF

SEQ ID NO: 438218 - protein, 12 aa, Homo sapiens
  CDR3 for beta chain variable domain of TCR clone 219109 (TRBV27, TRBJ2-2)
CASKLFTGELFF

SEQ ID NO: 438219 - protein, 14 aa, Homo sapiens
  CDR3 for alpha chain variable domain of TCR clone 219110 (TRAV16, TRAJ33)
CALSAMDSNYQLIW

SEQ ID NO: 438220 - protein, 17 aa, Homo sapiens
  CDR3 for beta chain variable domain of TCR clone 219110 (TRBV7-9, TRBJ2-6)
CASSFGAGYSGANVLTF

SEQ ID NO: 438221 - protein, 13 aa, Homo sapiens
  CDR3 for alpha chain variable domain of TCR clone 219111 (TRAV27, TRAJ49)
CAPRPYTGNQFHF

SEQ ID NO: 438222 - protein, 16 aa, Homo sapiens
  CDR3 for beta chain variable domain of TCR clone 219111 (TRBV4-1, TRBJ1-2)
CASSQDAGQVPYGYTF

SEQ ID NO: 438223 - protein, 12 aa, Homo sapiens
  CDR3 for alpha chain variable domain of TCR clone 219112 (TRAV21, TRAJ23)
CAVPTQGGKLIF

SEQ ID NO: 438224 - protein, 15 aa, Homo sapiens
  CDR3 for beta chain variable domain of TCR clone 219112 (TRBV27, TRBJ2-1)
CASSFGAGTGPEQFF

SEQ ID NO: 438225 - protein, 13 aa, Homo sapiens
  CDR3 for alpha chain variable domain of TCR clone 219113 (TRAV12-3, TRAJ13)
CAMSSEGYQKVTF

SEQ ID NO: 438226 - protein, 13 aa, Homo sapiens
  CDR3 for beta chain variable domain of TCR clone 219113 (TRBV20-1, TRBJ1-1)
CSAPPGGHTEAFF

SEQ ID NO: 438227 - protein, 12 aa, Homo sapiens
  CDR3 for alpha chain variable domain of TCR clone 219114 (TRAV21, TRAJ11)
CAATSGYSTITF

SEQ ID NO: 438228 - protein, 14 aa, Homo sapiens
  CDR3 for beta chain variable domain of TCR clone 219114 (TRBV20-1, TRBJ2-7)
CSAPELAGVGEQSF

SEQ ID NO: 438229 - protein, 14 aa, Homo sapiens
  CDR3 for alpha chain variable domain of TCR clone 219115 (TRAV14/DV4, TRAJ54)
CAMREAPGAQKLVF

SEQ ID NO: 438230 - protein, 16 aa, Homo sapiens
  CDR3 for beta chain variable domain of TCR clone 219115 (TRBV7-8, TRBJ2-1)
CASSLVGGGPYNEQFF

SEQ ID NO: 438231 - protein, 11 aa, Homo sapiens
  CDR3 for alpha chain variable domain of TCR clone 219116 (TRAV29/DV5, TRAJ49)
CAAVPGNQFYF

SEQ ID NO: 438232 - protein, 13 aa, Homo sapiens
  CDR3 for beta chain variable domain of TCR clone 219116 (TRBV10-3, TRBJ2-7)
CASKLAVSYEQYF

SEQ ID NO: 438233 - protein, 13 aa, Homo sapiens
  CDR3 for alpha chain variable domain of TCR clone 219117 (TRAV1-2, TRAJ9)
CAALNTGGFITIF

SEQ ID NO: 438234 - protein, 13 aa, Homo sapiens
  CDR3 for beta chain variable domain of TCR clone 219117 (TRBV19, TRBJ1-2)
CASSVPGQDGYTF

SEQ ID NO: 438235 - protein, 15 aa, Homo sapiens
  CDR3 for alpha chain variable domain of TCR clone 219118 (TRAV21, TRAJ38)
CAVRQDAGNNRKLIW

SEQ ID NO: 438236 - protein, 16 aa, Homo sapiens
  CDR3 for beta chain variable domain of TCR clone 219118 (TRBV4-2, TRBJ1-1)
CASRPLDGGCDTEAFF

SEQ ID NO: 438237 - protein, 10 aa, Homo sapiens
  CDR3 for alpha chain variable domain of TCR clone 219119 (TRAV23/DV6, TRAJ57)
CAASSTLSQG

SEQ ID NO: 438238 - protein, 13 aa, Homo sapiens
  CDR3 for beta chain variable domain of TCR clone 219119 (TRBV25-1, TRBJ1-1)
CQDPPGGNTEAFF

SEQ ID NO: 438239 - protein, 12 aa, Homo sapiens
  CDR3 for alpha chain variable domain of TCR clone 219120 (TRAV12-3, TRAJ17)
CAMTLTGNKLTF

SEQ ID NO: 438240 - protein, 15 aa, Homo sapiens
  CDR3 for beta chain variable domain of TCR clone 219120 (TRBV5-1, TRBJ2-1)
CASSLPGAPYNEQFF

SEQ ID NO: 438241 - protein, 14 aa, Homo sapiens
  CDR3 for alpha chain variable domain of TCR clone 219121 (TRAV12-3, TRAJ47)
CAMSVREYGTKLVF

SEQ ID NO: 438242 - protein, 15 aa, Homo sapiens
  CDR3 for beta chain variable domain of TCR clone 219121 (TRBV20-1, TRBJ2-2)
CSARDTRLNTGELFF

SEQ ID NO: 438243 - protein, 12 aa, Homo sapiens
  CDR3 for alpha chain variable domain of TCR clone 219122 (TRAV36/DV7, TRAJ54)
CAVGRGAQKLVF

SEQ ID NO: 438244 - protein, 14 aa, Homo sapiens
  CDR3 for beta chain variable domain of TCR clone 219122 (TRBV7-3, TRBJ1-1)
CASSLKGGNTEAFF

SEQ ID NO: 438245 - protein, 13 aa, Homo sapiens
  CDR3 for alpha chain variable domain of TCR clone 219123 (TRAV3, TRAJ21)
CAVREPYFNKFYF

SEQ ID NO: 438246 - protein, 16 aa, Homo sapiens
  CDR3 for beta chain variable domain of TCR clone 219123 (TRBV27, TRBJ2-2)
CASSFRGLVRTGELFF

SEQ ID NO: 438247 - protein, 16 aa, Homo sapiens
  CDR3 for alpha chain variable domain of TCR clone 219124 (TRAV30, TRAJ24)
CGPEIVDADSWGKFPF

SEQ ID NO: 438248 - protein, 14 aa, Homo sapiens
  CDR3 for beta chain variable domain of TCR clone 219124 (TRBV12-5, TRBJ2-5)
CASGSRTHQETQYF

SEQ ID NO: 438249 - protein, 14 aa, Homo sapiens
  CDR3 for alpha chain variable domain of TCR clone 219125 (TRAV13-1, TRAJ3)
CASEGYSSASKIIF

SEQ ID NO: 438250 - protein, 16 aa, Homo sapiens
  CDR3 for beta chain variable domain of TCR clone 219125 (TRBV7-3, TRBJ2-2)
CASSLKRGTLSGELFF

SEQ ID NO: 438251 - protein, 16 aa, Homo sapiens
  CDR3 for alpha chain variable domain of TCR clone 219126 (TRAV12-3, TRAJ53)
CAMSVGSGGSNYKLPF

SEQ ID NO: 438252 - protein, 13 aa, Homo sapiens
  CDR3 for beta chain variable domain of TCR clone 219126 (TRBV7-6, TRBJ1-2)
CASSLVADYGYTF

SEQ ID NO: 438253 - protein, 15 aa, Homo sapiens
  CDR3 for alpha chain variable domain of TCR clone 219127 (TRAV19, TRAJ9)
CALSLPDTGGFKTIF

SEQ ID NO: 438254 - protein, 14 aa, Homo sapiens
  CDR3 for beta chain variable domain of TCR clone 219127 (TRBV11-2, TRBJ2-7)
CASSSTGEGYEQYF

SEQ ID NO: 438255 - protein, 13 aa, Homo sapiens
  CDR3 for alpha chain variable domain of TCR clone 219128 (TRAV6, TRAJ23)
CALDQNQEGKLIF

SEQ ID NO: 438256 - protein, 15 aa, Homo sapiens
  CDR3 for beta chain variable domain of TCR clone 219128 (TRBV28, TRBJ1-2)
CASSGSEQRAFGYTF

SEQ ID NO: 438257 - protein, 12 aa, Homo sapiens
  CDR3 for alpha chain variable domain of TCR clone 219129 (TRAV16, TRAJ49)
CALNEGGNQFYF

SEQ ID NO: 438258 - protein, 15 aa, Homo sapiens
  CDR3 for beta chain variable domain of TCR clone 219129 (TRBV11-3, TRBJ2-3)
CASLKDGREGDTQYF

SEQ ID NO: 438259 - protein, 13 aa, Homo sapiens
  CDR3 for alpha chain variable domain of TCR clone 219130 (TRAV38-2/DV8, TRAJ34)
CAYRTWNTDKLIF

SEQ ID NO: 438260 - protein, 15 aa, Homo sapiens
  CDR3 for beta chain variable domain of TCR clone 219130 (TRBV12-4, TRBJ2-3)
CASSSTSGSTDTQYL

SEQ ID NO: 438261 - protein, 16 aa, Homo sapiens
  CDR3 for alpha chain variable domain of TCR clone 219131 (TRAV30, TRAJ24)
CGTEILDADSWGKFQF

SEQ ID NO: 438262 - protein, 15 aa, Homo sapiens
  CDR3 for beta chain variable domain of TCR clone 219131 (TRBV12-4, TRBJ2-2)
CASSPNDSGTGELFF

SEQ ID NO: 438263 - protein, 10 aa, Homo sapiens
  CDR3 for alpha chain variable domain of TCR clone 219132 (TRAV1-2, TRAJ34)
CAVNTDKLII

SEQ ID NO: 438264 - protein, 13 aa, Homo sapiens
  CDR3 for beta chain variable domain of TCR clone 219132 (TRBV10-1, TRBJ2-1)
CASSAGPDNEQFF

SEQ ID NO: 438265 - protein, 18 aa, Homo sapiens
  CDR3 for alpha chain variable domain of TCR clone 219133 (TRAV12-2, )
CAVEDIQNPDPAVYQLRD

SEQ ID NO: 438266 - protein, 16 aa, Homo sapiens
  CDR3 for beta chain variable domain of TCR clone 219133 (TRBV20-1, TRBJ2-3)
CSAVRDRGPIADTQYF

SEQ ID NO: 438267 - protein, 21 aa, Homo sapiens
  CDR3 for alpha chain variable domain of TCR clone 219134 (TRAV25, TRAJ53)
TATQTTDVGTGSGGRNYKLTF

SEQ ID NO: 438268 - protein, 16 aa, Homo sapiens
  CDR3 for beta chain variable domain of TCR clone 219134 (TRBV4-2, TRBJ2-3)
CASSLSSGGHTDTQYF

SEQ ID NO: 438269 - protein, 15 aa, Homo sapiens
  CDR3 for alpha chain variable domain of TCR clone 219135 (TRAV1-2, TRAJ35)
CSVRDREGFGNVLHF

SEQ ID NO: 438270 - protein, 14 aa, Homo sapiens
  CDR3 for beta chain variable domain of TCR clone 219135 (TRBV28, TRBJ1-4)
CASSRTVGNEKLFF

SEQ ID NO: 438271 - protein, 13 aa, Homo sapiens
  CDR3 for alpha chain variable domain of TCR clone 219136 (TRAV8-3, TRAJ28)
CAVGAVGSYQLTF

SEQ ID NO: 438272 - protein, 15 aa, Homo sapiens
  CDR3 for beta chain variable domain of TCR clone 219136 (TRBV7-9, TRBJ2-5)
CASSLGQGVQETQYF

SEQ ID NO: 438273 - protein, 14 aa, Homo sapiens
  CDR3 for alpha chain variable domain of TCR clone 219137 (TRAV17, TRAJ6)
CATDASGGSYIPTF

SEQ ID NO: 438274 - protein, 19 aa, Homo sapiens
  CDR3 for beta chain variable domain of TCR clone 219137 (TRBV4-3, TRBJ2-7)
CASSQDFIGWQVTPYEPYF

SEQ ID NO: 438275 - protein, 17 aa, Homo sapiens
  CDR3 for alpha chain variable domain of TCR clone 219138 (TRAV12-3, TRAJ6)
CAMSARGGAGGSYIPTF

SEQ ID NO: 438276 - protein, 16 aa, Homo sapiens
  CDR3 for beta chain variable domain of TCR clone 219138 (TRBV7-3, TRBJ2-1)
CASSKPLAGGYNEQFF

SEQ ID NO: 438277 - protein, 13 aa, Homo sapiens
  CDR3 for alpha chain variable domain of TCR clone 219139 (TRAV29/DV5, TRAJ31)
CAASRNNNARLMF

SEQ ID NO: 438278 - protein, 18 aa, Homo sapiens
  CDR3 for beta chain variable domain of TCR clone 219139 (TRBV12-4, TRBJ2-2)
CASSLVAGTRGRTGELFF

SEQ ID NO: 438279 - protein, 13 aa, Homo sapiens
  CDR3 for alpha chain variable domain of TCR clone 219140 (TRAV16, TRAJ34)
CITVLSHTDKLIF

SEQ ID NO: 438280 - protein, 13 aa, Homo sapiens
  CDR3 for beta chain variable domain of TCR clone 219140 (TRBV11-2, TRBJ2-5)
CASSSTGEETQYF

SEQ ID NO: 438281 - protein, 17 aa, Homo sapiens
  CDR3 for alpha chain variable domain of TCR clone 219141 (TRAV3, TRAJ42)
CAVRDRDYGGSQGNIIF

SEQ ID NO: 438282 - protein, 16 aa, Homo sapiens
  CDR3 for beta chain variable domain of TCR clone 219141 (TRBV19, TRBJ2-1)
CASSKAGPSSYNEQFF

SEQ ID NO: 438283 - protein, 13 aa, Homo sapiens
  CDR3 for alpha chain variable domain of TCR clone 219142 (TRAV8-6, TRAJ49)
CAVITNTGNQFYF

SEQ ID NO: 438284 - protein, 14 aa, Homo sapiens
  CDR3 for beta chain variable domain of TCR clone 219142 (TRBV5-1, TRBJ2-3)
CASSLFGPTDTQYF

SEQ ID NO: 438285 - protein, 14 aa, Homo sapiens
  CDR3 for alpha chain variable domain of TCR clone 219143 (TRAV13-1, TRAJ39)
CAASYNNAGNMLTF

SEQ ID NO: 438286 - protein, 13 aa, Homo sapiens
  CDR3 for beta chain variable domain of TCR clone 219143 (TRBV24-1, IGHJ2)
CATNNGRSEKLFF

SEQ ID NO: 438287 - protein, 13 aa, Homo sapiens
  CDR3 for alpha chain variable domain of TCR clone 219144 (TRAV35, TRAJ42)
CAGFPGSQVNLIF

SEQ ID NO: 438288 - protein, 14 aa, Homo sapiens
  CDR3 for beta chain variable domain of TCR clone 219144 (TRBV19, TRBJ2-1)
CASPTFVLSGEQFS

SEQ ID NO: 438289 - protein, 15 aa, Homo sapiens
  CDR3 for alpha chain variable domain of TCR clone 219145 (TRAV16, TRAJ16)
CALQGGGSDGQKLLF

SEQ ID NO: 438290 - protein, 14 aa, Homo sapiens
  CDR3 for beta chain variable domain of TCR clone 219145 (TRBV7-3, TRBJ2-1)
CASSTSGGWDEQFF

SEQ ID NO: 438291 - protein, 13 aa, Homo sapiens
  CDR3 for alpha chain variable domain of TCR clone 219146 (TRAV2, TRAJ15)
CAVASQAGTALIF

SEQ ID NO: 438292 - protein, 16 aa, Homo sapiens
  CDR3 for beta chain variable domain of TCR clone 219146 (TRBV20-1, TRBJ1-4)
CSARPYGGELNEKLFF

SEQ ID NO: 438293 - protein, 12 aa, Homo sapiens
  CDR3 for alpha chain variable domain of TCR clone 219147 (TRAV13-1, TRAJ53)
AASGGSNYKLTF

SEQ ID NO: 438294 - protein, 11 aa, Homo sapiens
  CDR3 for beta chain variable domain of TCR clone 219147 (TRBV12-4, TRBJ2-2)
CAGSSAGELFF

SEQ ID NO: 438295 - protein, 13 aa, Homo sapiens
  CDR3 for alpha chain variable domain of TCR clone 219148 (TRAV12-3, TRAJ40)
CAMSDSGTYKYIF

SEQ ID NO: 438296 - protein, 14 aa, Homo sapiens
  CDR3 for beta chain variable domain of TCR clone 219148 (TRBV7-2, TRBJ1-5)
CASSTQGAGQPQHL

SEQ ID NO: 438297 - protein, 10 aa, Homo sapiens
  CDR3 for alpha chain variable domain of TCR clone 219149 (TRAV23/DV6, TRAJ43)
CAAAVAALKQ

SEQ ID NO: 438298 - protein, 13 aa, Homo sapiens
  CDR3 for beta chain variable domain of TCR clone 219149 (TRBV12-4, TRBJ1-2)
CASSLRQGKGYTF

SEQ ID NO: 438299 - protein, 15 aa, Homo sapiens
  CDR3 for alpha chain variable domain of TCR clone 219150 (TRAV3, TRAJ4)
CAGRDGTGGYNKLIF

SEQ ID NO: 438300 - protein, 16 aa, Homo sapiens
  CDR3 for beta chain variable domain of TCR clone 219150 (TRBV27, TRBJ2-2)
CASSSSGLSNTGELFF

SEQ ID NO: 438301 - protein, 15 aa, Homo sapiens
  CDR3 for alpha chain variable domain of TCR clone 219151 (TRAV12-3, TRAJ6)
CAMSATSGGTYIPTF

SEQ ID NO: 438302 - protein, 11 aa, Homo sapiens
  CDR3 for beta chain variable domain of TCR clone 219151 (TRBV20-1, TRBJ1-5)
CSAQGDQPQHF

SEQ ID NO: 438303 - protein, 15 aa, Homo sapiens
  CDR3 for alpha chain variable domain of TCR clone 219152 (TRAV12-1, TRAJ45)
CVVLSGGGGADGLTF

SEQ ID NO: 438304 - protein, 14 aa, Homo sapiens
  CDR3 for beta chain variable domain of TCR clone 219152 (TRBV7-8, TRBJ2-7)
CASSPGLADYEQYF

SEQ ID NO: 438305 - protein, 17 aa, Homo sapiens
  CDR3 for alpha chain variable domain of TCR clone 219153 (TRAV3, TRAJ6)
CAVRDCPRAGGSYIPTF

SEQ ID NO: 438306 - protein, 18 aa, Homo sapiens
  CDR3 for beta chain variable domain of TCR clone 219153 (TRBV7-9, TRBJ2-7)
CASGLTTSGSRTWYEQYF

SEQ ID NO: 438307 - protein, 12 aa, Homo sapiens
  CDR3 for alpha chain variable domain of TCR clone 219154 (TRAV3, TRAJ34)
CAVLGNTDKLIF

SEQ ID NO: 438308 - protein, 13 aa, Homo sapiens
  CDR3 for beta chain variable domain of TCR clone 219154 (TRBV19, TRBJ2-1)
CASSIGTGNGQFF

SEQ ID NO: 438309 - protein, 12 aa, Homo sapiens
  CDR3 for alpha chain variable domain of TCR clone 219155 (TRAV13-1, TRAJ15)
CAANQAGTALIF

SEQ ID NO: 438310 - protein, 15 aa, Homo sapiens
  CDR3 for beta chain variable domain of TCR clone 219155 (TRBV28, TRBJ2-5)
CASSAPRQVQETQYF

SEQ ID NO: 438311 - protein, 15 aa, Homo sapiens
  CDR3 for alpha chain variable domain of TCR clone 219156 (TRAV10, TRAJ6)
CVVRPRTGGSYIPTF

SEQ ID NO: 438312 - protein, 13 aa, Homo sapiens
  CDR3 for beta chain variable domain of TCR clone 219156 (TRBV4-1, TRBJ2-2)
CASSQENTGELFF

SEQ ID NO: 438313 - protein, 16 aa, Homo sapiens
  CDR3 for alpha chain variable domain of TCR clone 219157 (TRAV3, TRAJ10)
CAVRGMRAGGGNKLTF

SEQ ID NO: 438314 - protein, 13 aa, Homo sapiens
  CDR3 for beta chain variable domain of TCR clone 219157 (TRBV27, TRBJ1-1)
CASSLSIGAEAVF

SEQ ID NO: 438315 - protein, 14 aa, Homo sapiens
  CDR3 for alpha chain variable domain of TCR clone 219158 (TRAV13-1, TRAJ13)
CAASREGGYQKVTF

SEQ ID NO: 438316 - protein, 17 aa, Homo sapiens
  CDR3 for beta chain variable domain of TCR clone 219158 (TRBV15, TRBJ1-5)
CATSRAPPGTRNQPQHF

SEQ ID NO: 438317 - protein, 17 aa, Homo sapiens
  CDR3 for alpha chain variable domain of TCR clone 219159 (TRAV23/DV6, TRAJ57)
CAASSTLSQGGSENLVL

SEQ ID NO: 438318 - protein, 14 aa, Homo sapiens
  CDR3 for beta chain variable domain of TCR clone 219159 (TRBV25-1, TRBJ1-1)
CASTHLGGNTEAFF

SEQ ID NO: 438319 - protein, 12 aa, Homo sapiens
  CDR3 for alpha chain variable domain of TCR clone 219160 (TRAV12-3, TRAJ17)
CAMTLTGNKLNF

SEQ ID NO: 438320 - protein, 15 aa, Homo sapiens
  CDR3 for beta chain variable domain of TCR clone 219160 (TRBV20-1, TRBJ2-7)
CSARDRVSGVDEQYF

SEQ ID NO: 438321 - protein, 15 aa, Homo sapiens
  CDR3 for alpha chain variable domain of TCR clone 219161 (TRAV12-1, TRAJ45)
CVVLSGGGGADGLTF

SEQ ID NO: 438322 - protein, 14 aa, Homo sapiens
  CDR3 for beta chain variable domain of TCR clone 219161 (TRBV11-2, TRBJ2-3)
CASSSRDSTDTQYF

SEQ ID NO: 438323 - protein, 12 aa, Homo sapiens
  CDR3 for alpha chain variable domain of TCR clone 219162 (TRAV8-6, TRAJ43)
CAVSNNNNDMRF

SEQ ID NO: 438324 - protein, 14 aa, Homo sapiens
  CDR3 for beta chain variable domain of TCR clone 219162 (TRBV7-3, TRBJ2-6)
CQQLRGSGANVLTF

SEQ ID NO: 438325 - protein, 13 aa, Homo sapiens
  CDR3 for alpha chain variable domain of TCR clone 219163 (TRAV12-3, TRAJ33)
CAMSVNSNYQLIW

SEQ ID NO: 438326 - protein, 13 aa, Homo sapiens
  CDR3 for beta chain variable domain of TCR clone 219163 (TRBV19, TRBJ2-5)
CASSIPYGETQYF

SEQ ID NO: 438327 - protein, 16 aa, Homo sapiens
  CDR3 for alpha chain variable domain of TCR clone 219164 (TRAV30, TRAJ24)
CGTEIVDADSWGKFQF

SEQ ID NO: 438328 - protein, 13 aa, Homo sapiens
  CDR3 for beta chain variable domain of TCR clone 219164 (TRBV7-2, TRBJ1-4)
CASSLAGLDKLFF

SEQ ID NO: 438329 - protein, 15 aa, Homo sapiens
  CDR3 for alpha chain variable domain of TCR clone 219165 (TRAV21, TRAJ53)
CATLNSGGSNYKMTF

SEQ ID NO: 438330 - protein, 13 aa, Homo sapiens
  CDR3 for beta chain variable domain of TCR clone 219165 (TRBV7-9, TRBJ2-3)
CASSPGSTDTQYF

SEQ ID NO: 438331 - protein, 15 aa, Homo sapiens
  CDR3 for alpha chain variable domain of TCR clone 219166 (TRAV34, TRAJ38)
CGADFTPGNNRKLIW

SEQ ID NO: 438332 - protein, 16 aa, Homo sapiens
  CDR3 for beta chain variable domain of TCR clone 219166 (TRBV11-2, TRBJ2-7)
CASSTVTAPKTYEQYF

SEQ ID NO: 438333 - protein, 14 aa, Homo sapiens
  CDR3 for alpha chain variable domain of TCR clone 219167 (TRAV12-2, TRAJ9)
CAVNMEGGGFKTIF

SEQ ID NO: 438334 - protein, 15 aa, Homo sapiens
  CDR3 for beta chain variable domain of TCR clone 219167 (TRBV5-1, TRBJ2-7)
CASSLGDFTTYEQYF

SEQ ID NO: 438335 - protein, 12 aa, Homo sapiens
  CDR3 for alpha chain variable domain of TCR clone 219168 (TRAV12-3, TRAJ17)
CAMTLTGNELTF

SEQ ID NO: 438336 - protein, 15 aa, Homo sapiens
  CDR3 for beta chain variable domain of TCR clone 219168 (TRBV20-1, TRBJ2-7)
CSARDRVSGMDEQCF

SEQ ID NO: 438337 - protein, 15 aa, Homo sapiens
  CDR3 for alpha chain variable domain of TCR clone 219169 (TRAV29/DV5, TRAJ24)
CAASGATDSWVKFQV

SEQ ID NO: 438338 - protein, 12 aa, Homo sapiens
  CDR3 for beta chain variable domain of TCR clone 219169 (TRBV11-2, TRBJ2-2)
CASSLPTGELFF

SEQ ID NO: 438339 - protein, 22 aa, Homo sapiens
  CDR3 for alpha chain variable domain of TCR clone 219170 (TRAV13-1, TRAJ37)
CAARIGGLWQHRQTNLWARDNF

SEQ ID NO: 438340 - protein, 13 aa, Homo sapiens
  CDR3 for beta chain variable domain of TCR clone 219170 (TRBV7-3, TRBJ1-1)
CASSKDWGAEAFF

SEQ ID NO: 438341 - protein, 14 aa, Homo sapiens
  CDR3 for alpha chain variable domain of TCR clone 219171 (TRAV1-2, TRAJ16)
CAVNRVSDGQKLLF

SEQ ID NO: 438342 - protein, 17 aa, Homo sapiens
  CDR3 for beta chain variable domain of TCR clone 219171 (TRBV15, TRBJ1-2)
CATSGREIDVVNYGYTF

SEQ ID NO: 438343 - protein, 11 aa, Homo sapiens
  CDR3 for alpha chain variable domain of TCR clone 219172 (TRAV21, TRAJ49)
CAVITGNQFYF

SEQ ID NO: 438344 - protein, 14 aa, Homo sapiens
  CDR3 for beta chain variable domain of TCR clone 219172 (TRBV7-2, TRBJ2-7)
CASRSQGAAYEQYF

SEQ ID NO: 438345 - protein, 12 aa, Homo sapiens
  CDR3 for alpha chain variable domain of TCR clone 219173 (TRAV12-3, TRAJ17)
CAVTLTGNKLTF

SEQ ID NO: 438346 - protein, 15 aa, Homo sapiens
  CDR3 for beta chain variable domain of TCR clone 219173 (TRBV20-1, TRBJ2-7)
CSARERVSGMDEQYF

SEQ ID NO: 438347 - protein, 18 aa, Homo sapiens
  CDR3 for alpha chain variable domain of TCR clone 219174 (TRAV13-1, TRAJ52)
CAAKNPNAGGTSYGKLTF

SEQ ID NO: 438348 - protein, 13 aa, Homo sapiens
  CDR3 for beta chain variable domain of TCR clone 219174 (TRBV13, TRBJ2-1)
CASTPGSYNEQFF

SEQ ID NO: 438349 - protein, 13 aa, Homo sapiens
  CDR3 for alpha chain variable domain of TCR clone 219175 (TRAV12-1, TRAJ20)
CVVNVPNDYKLSF

SEQ ID NO: 438350 - protein, 12 aa, Homo sapiens
  CDR3 for beta chain variable domain of TCR clone 219175 (TRBV11-2, TRBJ2-1)
CASRVQREGQFF

SEQ ID NO: 438351 - protein, 10 aa, Homo sapiens
  CDR3 for alpha chain variable domain of TCR clone 219176 (TRAV23/DV6, TRAJ57)
CAASSTLSQG

SEQ ID NO: 438352 - protein, 17 aa, Homo sapiens
  CDR3 for beta chain variable domain of TCR clone 219176 (TRBV7-3, TRBJ2-3)
CASSLMKRIRGADTQYF

SEQ ID NO: 438353 - protein, 14 aa, Homo sapiens
  CDR3 for alpha chain variable domain of TCR clone 219177 (TRAV23/DV6, TRAJ8)
CAASKATGFQKLVF

SEQ ID NO: 438354 - protein, 14 aa, Homo sapiens
  CDR3 for beta chain variable domain of TCR clone 219177 (TRBV20-1, TRBJ1-1)
CSAQTRIGGTEAFF

SEQ ID NO: 438355 - protein, 14 aa, Homo sapiens
  CDR3 for alpha chain variable domain of TCR clone 219178 (TRAV12-1, TRAJ37)
CAVTGSSNTGKLIF

SEQ ID NO: 438356 - protein, 20 aa, Homo sapiens
  CDR3 for beta chain variable domain of TCR clone 219178 (TRBV23-1, TRBJ2-5)
CISAPAVPERVLLIQETQYF

SEQ ID NO: 438357 - protein, 14 aa, Homo sapiens
  CDR3 for alpha chain variable domain of TCR clone 219179 (TRAV13-1, TRAJ9)
CAASALTGVFKTIF

SEQ ID NO: 438358 - protein, 16 aa, Homo sapiens
  CDR3 for beta chain variable domain of TCR clone 219179 (TRBV12-4, TRBJ2-3)
CASSFGTGGISDTQYF

SEQ ID NO: 438359 - protein, 14 aa, Homo sapiens
  CDR3 for alpha chain variable domain of TCR clone 219180 (TRAV9-2, TRAJ39)
CALYIYNAGNMLTF

SEQ ID NO: 438360 - protein, 15 aa, Homo sapiens
  CDR3 for beta chain variable domain of TCR clone 219180 (TRBV7-3, TRBJ2-1)
CASGPTGGGEVEQFF

SEQ ID NO: 438361 - protein, 12 aa, Homo sapiens
  CDR3 for alpha chain variable domain of TCR clone 219181 (TRAV8-6, TRAJ7)
CAVFYGNNRLAF

SEQ ID NO: 438362 - protein, 16 aa, Homo sapiens
  CDR3 for beta chain variable domain of TCR clone 219181 (TRBV4-2, TRBJ2-7)
CASSQEGLANSYEQYF

SEQ ID NO: 438363 - protein, 14 aa, Homo sapiens
  CDR3 for alpha chain variable domain of TCR clone 219182 (TRAV9-2, TRAJ39)
CALYIYNAGNMLTF

SEQ ID NO: 438364 - protein, 16 aa, Homo sapiens
  CDR3 for beta chain variable domain of TCR clone 219182 (TRBV13, TRBJ2-7)
CASSSREGGRTYEQYF

SEQ ID NO: 438365 - protein, 12 aa, Homo sapiens
  CDR3 for alpha chain variable domain of TCR clone 219183 (TRAV12-3, TRAJ17)
CARTLTGNKLTF

SEQ ID NO: 438366 - protein, 15 aa, Homo sapiens
  CDR3 for beta chain variable domain of TCR clone 219183 (TRBV20-1, TRBJ2-7)
CGARDRVSGMDEQYF

SEQ ID NO: 438367 - protein, 12 aa, Homo sapiens
  CDR3 for alpha chain variable domain of TCR clone 219184 (TRAV13-1, TRAJ21)
CAAKEGFNKFYF

SEQ ID NO: 438368 - protein, 14 aa, Homo sapiens
  CDR3 for beta chain variable domain of TCR clone 219184 (TRBV7-2, TRBJ2-7)
CASSPKTSFYEQSF

SEQ ID NO: 438369 - protein, 14 aa, Homo sapiens
  CDR3 for alpha chain variable domain of TCR clone 219185 (TRAV12-1, TRAJ12)
CVVTRMDSSYKLIF

SEQ ID NO: 438370 - protein, 15 aa, Homo sapiens
  CDR3 for beta chain variable domain of TCR clone 219185 (TRBV20-1, TRBJ2-7)
CSARDRVSGMDEQYL

SEQ ID NO: 438371 - protein, 12 aa, Homo sapiens
  CDR3 for alpha chain variable domain of TCR clone 219186 (TRAV2, TRAJ9)
CAVGAGGFKTIF

SEQ ID NO: 438372 - protein, 15 aa, Homo sapiens
  CDR3 for beta chain variable domain of TCR clone 219186 (TRBV5-1, TRBJ2-3)
CASSSTSGSTDTQYF

SEQ ID NO: 438373 - protein, 14 aa, Homo sapiens
  CDR3 for alpha chain variable domain of TCR clone 219187 (TRAV22, TRAJ6)
CAGVGPGGSYIPTF

SEQ ID NO: 438374 - protein, 14 aa, Homo sapiens
  CDR3 for beta chain variable domain of TCR clone 219187 (TRBV6-1, TRBJ2-1)
CASAKDGFYNEQFF

SEQ ID NO: 438375 - protein, 15 aa, Homo sapiens
  CDR3 for alpha chain variable domain of TCR clone 219188 (TRAV27, TRAJ38)
CAARRNAGNNRKLIW

SEQ ID NO: 438376 - protein, 15 aa, Homo sapiens
  CDR3 for beta chain variable domain of TCR clone 219188 (TRBV3-1, TRBJ2-7)
CASSQGVGVKVEQYF

SEQ ID NO: 438377 - protein, 13 aa, Homo sapiens
  CDR3 for alpha chain variable domain of TCR clone 219189 (TRAV20, TRAJ54)
CAVQAGGTQKLVF

SEQ ID NO: 438378 - protein, 14 aa, Homo sapiens
  CDR3 for beta chain variable domain of TCR clone 219189 (TRBV20-1, TRBJ2-7)
CSAKTGTGGYEQYF

SEQ ID NO: 438379 - protein, 15 aa, Homo sapiens
  CDR3 for alpha chain variable domain of TCR clone 219190 (TRAV29/DV5, TRAJ53)
CAARYSGGSNYKLTF

SEQ ID NO: 438380 - protein, 13 aa, Homo sapiens
  CDR3 for beta chain variable domain of TCR clone 219190 (TRBV28, TRBJ2-7)
CASKAGGVYEQYF

SEQ ID NO: 438381 - protein, 13 aa, Homo sapiens
  CDR3 for alpha chain variable domain of TCR clone 219191 (TRAV12-2, TRAJ24)
CAVSTDSWGKLQF

SEQ ID NO: 438382 - protein, 16 aa, Homo sapiens
  CDR3 for beta chain variable domain of TCR clone 219191 (TRBV25-1, TRBJ1-1)
CASTHLGGNTEAFLDK

SEQ ID NO: 438383 - protein, 15 aa, Homo sapiens
  CDR3 for alpha chain variable domain of TCR clone 219192 (TRAV8-3, TRAJ45)
CASSYSGGGADGFTF

SEQ ID NO: 438384 - protein, 14 aa, Homo sapiens
  CDR3 for beta chain variable domain of TCR clone 219192 (TRBV28, TRBJ2-5)
CASSLGDRAETQYF

SEQ ID NO: 438385 - protein, 15 aa, Homo sapiens
  CDR3 for alpha chain variable domain of TCR clone 219193 (TRAV14/DV4, TRAJ39)
CAMRAVNIAGNMLTF

SEQ ID NO: 438386 - protein, 15 aa, Homo sapiens
  CDR3 for beta chain variable domain of TCR clone 219193 (TRBV9, TRBJ2-3)
CASSLEGGLTDTQYF

SEQ ID NO: 438387 - protein, 14 aa, Homo sapiens
  CDR3 for alpha chain variable domain of TCR clone 219194 (TRAV12-3, TRAJ10)
SHLPLTGGGNKLTF

SEQ ID NO: 438388 - protein, 14 aa, Homo sapiens
  CDR3 for beta chain variable domain of TCR clone 219194 (TRBV11-3, TRBJ2-3)
CQPEGRAGRGYAVF

SEQ ID NO: 438389 - protein, 17 aa, Homo sapiens
  CDR3 for alpha chain variable domain of TCR clone 219195 (TRAV3, TRAJ42)
CAVRDRDYGGSQGNLIF

SEQ ID NO: 438390 - protein, 15 aa, Homo sapiens
  CDR3 for beta chain variable domain of TCR clone 219195 (TRBV6-6, TRBJ2-1)
CASSYSYGGSYEQYF

SEQ ID NO: 438391 - protein, 14 aa, Homo sapiens
  CDR3 for alpha chain variable domain of TCR clone 219196 (TRAV2, TRAJ37)
CAVDFTSNTGKLIF

SEQ ID NO: 438392 - protein, 13 aa, Homo sapiens
  CDR3 for beta chain variable domain of TCR clone 219196 (TRBV7-9, TRBJ2-3)
CASSAAGSDTQYF

SEQ ID NO: 438393 - protein, 17 aa, Homo sapiens
  CDR3 for alpha chain variable domain of TCR clone 219197 (TRAV3, TRAJ38)
CAVRDCLNAGNNRKLIW

SEQ ID NO: 438394 - protein, 17 aa, Homo sapiens
  CDR3 for beta chain variable domain of TCR clone 219197 (TRBV7-3, TRBJ2-3)
CASSLMKRMRGADTQYF

SEQ ID NO: 438395 - protein, 15 aa, Homo sapiens
  CDR3 for alpha chain variable domain of TCR clone 219198 (TRAV12-3, TRAJ6)
CAMSATTGGSYIPTF

SEQ ID NO: 438396 - protein, 15 aa, Homo sapiens
  CDR3 for beta chain variable domain of TCR clone 219198 (TRBV20-1, TRBJ2-5)
CSAEGTGGLQETQYF

SEQ ID NO: 438397 - protein, 14 aa, Homo sapiens
  CDR3 for alpha chain variable domain of TCR clone 219199 (TRAV1-2, TRAJ16)
CAVNRFSDGQMLLF

SEQ ID NO: 438398 - protein, 14 aa, Homo sapiens
  CDR3 for beta chain variable domain of TCR clone 219199 (TRBV7-9, TRBJ1-4)
CAITEGEANEKLFF

SEQ ID NO: 438399 - protein, 14 aa, Homo sapiens
  CDR3 for alpha chain variable domain of TCR clone 219200 (TRAV9-2, TRAJ39)
CALYIYNAGNMLTF

SEQ ID NO: 438400 - protein, 14 aa, Homo sapiens
  CDR3 for beta chain variable domain of TCR clone 219200 (TRBV27, TRBJ2-7)
CASASGRTSYEQYF

SEQ ID NO: 438401 - protein, 16 aa, Homo sapiens
  CDR3 for alpha chain variable domain of TCR clone 219201 (TRAV3, TRAJ10)
CAVRDMRAGGGNKLTF

SEQ ID NO: 438402 - protein, 14 aa, Homo sapiens
  CDR3 for beta chain variable domain of TCR clone 219201 (TRBV12-4, TRBJ1-4)
CASRMTGRSEELFF

SEQ ID NO: 438403 - protein, 18 aa, Homo sapiens
  CDR3 for alpha chain variable domain of TCR clone 219202 (TRAV1-1, TRAJ10)
CAGYSTLTFGKGTMLLVS

SEQ ID NO: 438404 - protein, 16 aa, Homo sapiens
  CDR3 for beta chain variable domain of TCR clone 219202 (TRBV7-3, TRBJ2-2)
CASSLKRGTLSGELFF

SEQ ID NO: 438405 - protein, 19 aa, Homo sapiens
  CDR3 for alpha chain variable domain of TCR clone 219203 (TRAV16, )
CALSGDIQNPDPAVYQLRD

SEQ ID NO: 438406 - protein, 11 aa, Homo sapiens
  CDR3 for beta chain variable domain of TCR clone 219203 (TRBV7-2, TRBJ2-5)
CASSFGETQYF

SEQ ID NO: 438407 - protein, 15 aa, Homo sapiens
  CDR3 for alpha chain variable domain of TCR clone 219204 (TRAV12-3, TRAJ6)
CAMSATTGGSYIPTF

SEQ ID NO: 438408 - protein, 15 aa, Homo sapiens
  CDR3 for beta chain variable domain of TCR clone 219204 (TRBV7-6, TRBJ1-5)
CASSQSSGINKPQHF

SEQ ID NO: 438409 - protein, 12 aa, Homo sapiens
  CDR3 for alpha chain variable domain of TCR clone 219205 (TRAV13-2, TRAJ23)
CAERHGGGKLIF

SEQ ID NO: 438410 - protein, 12 aa, Homo sapiens
  CDR3 for beta chain variable domain of TCR clone 219205 (TRBV29-1, TRBJ2-3)
CSVTGGADTQYF

SEQ ID NO: 438411 - protein, 14 aa, Homo sapiens
  CDR3 for alpha chain variable domain of TCR clone 219206 (TRAV2, TRAJ23)
CAVMEDNQGGKLIF

SEQ ID NO: 438412 - protein, 13 aa, Homo sapiens
  CDR3 for beta chain variable domain of TCR clone 219206 (TRBV7-9, TRBJ1-2)
CASSLKQNYGYTF

SEQ ID NO: 438413 - protein, 12 aa, Homo sapiens
  CDR3 for alpha chain variable domain of TCR clone 219207 (TRAV12-3, TRAJ17)
CAMTLTGKKLTF

SEQ ID NO: 438414 - protein, 14 aa, Homo sapiens
  CDR3 for beta chain variable domain of TCR clone 219207 (TRBV7-2, TRBJ2-7)
CASSPKTSFYEQYF

SEQ ID NO: 438415 - protein, 12 aa, Homo sapiens
  CDR3 for alpha chain variable domain of TCR clone 219208 (TRAV1-1, TRAJ8)
CAGCTGFQKLVF

SEQ ID NO: 438416 - protein, 16 aa, Homo sapiens
  CDR3 for beta chain variable domain of TCR clone 219208 (TRBV12-4, TRBJ1-5)
CASSRPVGGSNQPQHF

SEQ ID NO: 438417 - protein, 16 aa, Homo sapiens
  CDR3 for alpha chain variable domain of TCR clone 219209 (TRAV14/DV4, TRAJ11)
CAMREGGNSGYSTLTF

SEQ ID NO: 438418 - protein, 14 aa, Homo sapiens
  CDR3 for beta chain variable domain of TCR clone 219209 (TRBV12-5, TRBJ2-5)
CASGSRTHQETQYF

SEQ ID NO: 438419 - protein, 15 aa, Homo sapiens
  CDR3 for alpha chain variable domain of TCR clone 219210 (TRAV21, TRAJ40)
CAVRPQTSGTYKYIF

SEQ ID NO: 438420 - protein, 13 aa, Homo sapiens
  CDR3 for beta chain variable domain of TCR clone 219210 (TRBV29-1, TRBJ2-7)
CSVKRGGNYEQYF

SEQ ID NO: 438421 - protein, 13 aa, Homo sapiens
  CDR3 for alpha chain variable domain of TCR clone 219211 (TRAV17, TRAJ5)
CATVDTGRRALTF

SEQ ID NO: 438422 - protein, 15 aa, Homo sapiens
  CDR3 for beta chain variable domain of TCR clone 219211 (TRBV7-9, TRBJ1-6)
CASSSPGRGNSPLHF

SEQ ID NO: 438423 - protein, 18 aa, Homo sapiens
  CDR3 for alpha chain variable domain of TCR clone 219212 (TRAV21, TRAJ52)
CAVRPSPAGGTSSGKLTF

SEQ ID NO: 438424 - protein, 14 aa, Homo sapiens
  CDR3 for beta chain variable domain of TCR clone 219212 (TRBV4-2, TRBJ2-1)
CASGLDRAYNEQFL

SEQ ID NO: 438425 - protein, 15 aa, Homo sapiens
  CDR3 for alpha chain variable domain of TCR clone 219213 (TRAV27, TRAJ38)
CAARHNAGNNRKLNL

SEQ ID NO: 438426 - protein, 15 aa, Homo sapiens
  CDR3 for beta chain variable domain of TCR clone 219213 (TRBV12-4, TRBJ2-5)
CASSPPTGLQETQYF

SEQ ID NO: 438427 - protein, 16 aa, Homo sapiens
  CDR3 for alpha chain variable domain of TCR clone 219214 (TRAV12-3, TRAJ53)
CAMSPGSGGSNYKLTF

SEQ ID NO: 438428 - protein, 16 aa, Homo sapiens
  CDR3 for beta chain variable domain of TCR clone 219214 (TRBV19, TRBJ2-1)
CASGKAGPSSYNEQFF

SEQ ID NO: 438429 - protein, 11 aa, Homo sapiens
  CDR3 for alpha chain variable domain of TCR clone 219215 (TRAV3, TRAJ21)
CAVGNVNKFYF

SEQ ID NO: 438430 - protein, 17 aa, Homo sapiens
  CDR3 for beta chain variable domain of TCR clone 219215 (TRBV24-1, TRBJ2-1)
CATSDVSTSGTYNEQFF

SEQ ID NO: 438431 - protein, 17 aa, Homo sapiens
  CDR3 for alpha chain variable domain of TCR clone 219216 (TRAV3, TRAJ6)
CAVRDGPRAGGSYIPTF

SEQ ID NO: 438432 - protein, 14 aa, Homo sapiens
  CDR3 for beta chain variable domain of TCR clone 219216 (TRBV7-2, TRBJ2-3)
CASRRGLAADTQYF

SEQ ID NO: 438433 - protein, 17 aa, Homo sapiens
  CDR3 for alpha chain variable domain of TCR clone 219217 (TRAV12-2, TRAJ48)
CASNEKLTFGTGTRLTI

SEQ ID NO: 438434 - protein, 17 aa, Homo sapiens
  CDR3 for beta chain variable domain of TCR clone 219217 (TRBV5-1, TRBJ2-2)
CASSRTSGRFSTGELFF

SEQ ID NO: 438435 - protein, 15 aa, Homo sapiens
  CDR3 for alpha chain variable domain of TCR clone 219218 (TRAV8-3, TRAJ20)
CAVEAKGSNDYNLSV

SEQ ID NO: 438436 - protein, 12 aa, Homo sapiens
  CDR3 for beta chain variable domain of TCR clone 219218 (TRBV7-2, TRBJ1-2)
CASRDSIYGYTF

SEQ ID NO: 438437 - protein, 16 aa, Homo sapiens
  CDR3 for alpha chain variable domain of TCR clone 219219 (TRAV8-3, TRAJ42)
CAVGPNYGGSQGNLIF

SEQ ID NO: 438438 - protein, 17 aa, Homo sapiens
  CDR3 for beta chain variable domain of TCR clone 219219 (TRBV11-2, TRBJ2-1)
CASSLYPPGVEYNEQFF

SEQ ID NO: 438439 - protein, 18 aa, Homo sapiens
  CDR3 for alpha chain variable domain of TCR clone 219220 (TRAV21, TRAJ52)
CAVRPSPAGGPSYGKLTF

SEQ ID NO: 438440 - protein, 15 aa, Homo sapiens
  CDR3 for beta chain variable domain of TCR clone 219220 (TRBV27, TRBJ1-4)
CASSAQQDLNEKLFF

SEQ ID NO: 438441 - protein, 13 aa, Homo sapiens
  CDR3 for alpha chain variable domain of TCR clone 219221 (TRAV13-1, TRAJ26)
CAIVFGPGTRLSV

SEQ ID NO: 438442 - protein, 18 aa, Homo sapiens
  CDR3 for beta chain variable domain of TCR clone 219221 (TRBV11-2, TRBJ2-6)
CASILNPFLGTGANVLTF

SEQ ID NO: 438443 - protein, 14 aa, Homo sapiens
  CDR3 for alpha chain variable domain of TCR clone 219222 (TRAV13-1, TRAJ9)
CAASALTGGFKTIF

SEQ ID NO: 438444 - protein, 15 aa, Homo sapiens
  CDR3 for beta chain variable domain of TCR clone 219222 (TRBV11-3, TRBJ2-3)
CASLKDGREGDTQYF

SEQ ID NO: 438445 - protein, 17 aa, Homo sapiens
  CDR3 for alpha chain variable domain of TCR clone 219223 (TRAV26-1, TRAJ46)
IASSESEKKSSGDKLTF

SEQ ID NO: 438446 - protein, 11 aa, Homo sapiens
  CDR3 for beta chain variable domain of TCR clone 219223 (TRBV29-1, TRBJ2-5)
CSEDRTGTQYF

SEQ ID NO: 438447 - protein, 17 aa, Homo sapiens
  CDR3 for alpha chain variable domain of TCR clone 219224 (TRAV12-1, TRAJ53)
CVAGAIVGGGSNYKLTF

SEQ ID NO: 438448 - protein, 13 aa, Homo sapiens
  CDR3 for beta chain variable domain of TCR clone 219224 (TRBV12-4, TRBJ1-2)
CASSLRQGKGYTF

SEQ ID NO: 438449 - protein, 12 aa, Homo sapiens
  CDR3 for alpha chain variable domain of TCR clone 219225 (TRAV27, TRAJ9)
CAGESGGFKTIF

SEQ ID NO: 438450 - protein, 15 aa, Homo sapiens
  CDR3 for beta chain variable domain of TCR clone 219225 (TRBV12-4, TRBJ1-1)
CASTLTEGAGSEAFF

SEQ ID NO: 438451 - protein, 15 aa, Homo sapiens
  CDR3 for alpha chain variable domain of TCR clone 219226 (TRAV8-3, TRAJ27)
CAVGPSKTNAGKSTF

SEQ ID NO: 438452 - protein, 12 aa, Homo sapiens
  CDR3 for beta chain variable domain of TCR clone 219226 (TRBV20-1, TRBJ1-5)
CSAAGWDQPQHF

SEQ ID NO: 438453 - protein, 15 aa, Homo sapiens
  CDR3 for alpha chain variable domain of TCR clone 219227 (TRAV12-2, TRAJ56)
CAVNAFTGANSKLTF

SEQ ID NO: 438454 - protein, 13 aa, Homo sapiens
  CDR3 for beta chain variable domain of TCR clone 219227 (TRBV20-1, TRBJ1-2)
CSARDRVYGGYTF

SEQ ID NO: 438455 - protein, 13 aa, Homo sapiens
  CDR3 for alpha chain variable domain of TCR clone 219228 (TRAV38-2/DV8, TRAJ29)
CAYRTPGNTPLVF

SEQ ID NO: 438456 - protein, 16 aa, Homo sapiens
  CDR3 for beta chain variable domain of TCR clone 219228 (TRBV6-4, TRBJ1-2)
CASSEAVGDPNYGYTF

SEQ ID NO: 438457 - protein, 17 aa, Homo sapiens
  CDR3 for alpha chain variable domain of TCR clone 219229 (TRAV8-3, TRAJ10)
EASNTVILTGGGNKLTF

SEQ ID NO: 438458 - protein, 16 aa, Homo sapiens
  CDR3 for beta chain variable domain of TCR clone 219229 (TRBV7-9, TRBJ1-2)
CDSSLGFSSGEDGYTF

SEQ ID NO: 438459 - protein, 13 aa, Homo sapiens
  CDR3 for alpha chain variable domain of TCR clone 219230 (TRAV2, TRAJ21)
CALDDLNFNKFYF

SEQ ID NO: 438460 - protein, 15 aa, Homo sapiens
  CDR3 for beta chain variable domain of TCR clone 219230 (TRBV28, TRBJ2-5)
CASSPGQGSIETQYF

SEQ ID NO: 438461 - protein, 14 aa, Homo sapiens
  CDR3 for alpha chain variable domain of TCR clone 219231 (TRAV8-4, TRAJ5)
CAVSTDTGRRALTF

SEQ ID NO: 438462 - protein, 14 aa, Homo sapiens
  CDR3 for beta chain variable domain of TCR clone 219231 (TRBV5-1, TRBJ2-2)
CASSLGGGFGELFF

SEQ ID NO: 438463 - protein, 13 aa, Homo sapiens
  CDR3 for alpha chain variable domain of TCR clone 219232 (TRAV20, TRAJ31)
CAVQAIGGARLMF

SEQ ID NO: 438464 - protein, 18 aa, Homo sapiens
  CDR3 for beta chain variable domain of TCR clone 219232 (TRBV11-2, TRBJ2-3)
CASSLGGASRGAPNTQYF

SEQ ID NO: 438465 - protein, 13 aa, Homo sapiens
  CDR3 for alpha chain variable domain of TCR clone 219233 (TRAV13-2, TRAJ11)
CAENYSRYSTLTF

SEQ ID NO: 438466 - protein, 14 aa, Homo sapiens
  CDR3 for beta chain variable domain of TCR clone 219233 (TRBV7-7, TRBJ2-2)
CATRQDSDTGELFF

SEQ ID NO: 438467 - protein, 13 aa, Homo sapiens
  CDR3 for alpha chain variable domain of TCR clone 219234 (TRAV16, TRAJ54)
CVLMVQGAQKLVF

SEQ ID NO: 438468 - protein, 12 aa, Homo sapiens
  CDR3 for beta chain variable domain of TCR clone 219234 (TRBV18, TRBJ2-7)
CASSTAMGEHYF

SEQ ID NO: 438469 - protein, 12 aa, Homo sapiens
  CDR3 for alpha chain variable domain of TCR clone 219235 (TRAV12-2, TRAJ7)
CAVMRGNNRLAF

SEQ ID NO: 438470 - protein, 17 aa, Homo sapiens
  CDR3 for beta chain variable domain of TCR clone 219235 (TRBV7-9, TRBJ2-3)
CASSPTVEGDLTDTQYF

SEQ ID NO: 438471 - protein, 15 aa, Homo sapiens
  CDR3 for alpha chain variable domain of TCR clone 219236 (TRAV35, TRAJ42)
CAGQLRGGSQGNLIF

SEQ ID NO: 438472 - protein, 15 aa, Homo sapiens
  CDR3 for beta chain variable domain of TCR clone 219236 (TRBV20-1, TRBJ2-7)
CSARDRVSGMDEQYF

SEQ ID NO: 438473 - protein, 13 aa, Homo sapiens
  CDR3 for alpha chain variable domain of TCR clone 219237 (TRAV1-2, TRAJ11)
CAVRREGYSTLTF

SEQ ID NO: 438474 - protein, 15 aa, Homo sapiens
  CDR3 for beta chain variable domain of TCR clone 219237 (TRBV9, TRBJ1-6)
CASSVAGTGDSPLHF

SEQ ID NO: 438475 - protein, 14 aa, Homo sapiens
  CDR3 for alpha chain variable domain of TCR clone 219238 (TRAV26-1, TRAJ48)
CIVGVPFGNEKLTF

SEQ ID NO: 438476 - protein, 16 aa, Homo sapiens
  CDR3 for beta chain variable domain of TCR clone 219238 (TRBV18, TRBJ2-1)
CASSPYLSIRGDEQFF

SEQ ID NO: 438477 - protein, 23 aa, Homo sapiens
  CDR3 for alpha chain variable domain of TCR clone 219239 (TRAV13-2, TRAJ6)
CAEEVHQEEATYLHLEEEPALLF

SEQ ID NO: 438478 - protein, 13 aa, Homo sapiens
  CDR3 for beta chain variable domain of TCR clone 219239 (TRBV10-3, TRBJ2-7)
CASKLAVNYEQYF

SEQ ID NO: 438479 - protein, 15 aa, Homo sapiens
  CDR3 for alpha chain variable domain of TCR clone 219240 (TRAV12-2, TRAJ43)
CAFDMRFGAGTRLTV

SEQ ID NO: 438480 - protein, 16 aa, Homo sapiens
  CDR3 for beta chain variable domain of TCR clone 219240 (TRBV7-9, TRBJ2-1)
CTSSDVAGGSYNEQFF

SEQ ID NO: 438481 - protein, 14 aa, Homo sapiens
  CDR3 for alpha chain variable domain of TCR clone 219241 (TRAV12-3, TRAJ9)
CAMSVETGGFKTIF

SEQ ID NO: 438482 - protein, 14 aa, Homo sapiens
  CDR3 for beta chain variable domain of TCR clone 219241 (TRBV7-2, TRBJ2-7)
CASRSQGAEYEQYF

SEQ ID NO: 438483 - protein, 11 aa, Homo sapiens
  CDR3 for alpha chain variable domain of TCR clone 219242 (TRAV1-2, TRAJ31)
FAVNNSARLMF

SEQ ID NO: 438484 - protein, 15 aa, Homo sapiens
  CDR3 for beta chain variable domain of TCR clone 219242 (TRBV28, TRBJ2-1)
CASSIIAGGRSEQFF

SEQ ID NO: 438485 - protein, 16 aa, Homo sapiens
  CDR3 for alpha chain variable domain of TCR clone 219243 (TRAV14/DV4, TRAJ39)
CAMREAYNNAGNMLTF

SEQ ID NO: 438486 - protein, 14 aa, Homo sapiens
  CDR3 for beta chain variable domain of TCR clone 219243 (TRBV7-9, TRBJ2-5)
CASSPAQDQETQYF

SEQ ID NO: 438487 - protein, 12 aa, Homo sapiens
  CDR3 for alpha chain variable domain of TCR clone 219244 (TRAV1-2, TRAJ33)
CAALDSNYQLIW

SEQ ID NO: 438488 - protein, 13 aa, Homo sapiens
  CDR3 for beta chain variable domain of TCR clone 219244 (TRBV6-4, TRBJ1-5)
CASSADLNQPQHF

SEQ ID NO: 438489 - protein, 12 aa, Homo sapiens
  CDR3 for alpha chain variable domain of TCR clone 219245 (TRAV21, TRAJ49)
CAVNDGGNQFYF

SEQ ID NO: 438490 - protein, 16 aa, Homo sapiens
  CDR3 for beta chain variable domain of TCR clone 219245 (TRBV19, TRBJ2-2)
CASRSPGTGATGELFF

SEQ ID NO: 438491 - protein, 12 aa, Homo sapiens
  CDR3 for alpha chain variable domain of TCR clone 219246 (TRAV1-1, TRAJ39)
CAVPVVGNMLTF

SEQ ID NO: 438492 - protein, 12 aa, Homo sapiens
  CDR3 for beta chain variable domain of TCR clone 219246 (TRBV7-8, TRBJ2-7)
CASSLGDREQYF

SEQ ID NO: 438493 - protein, 17 aa, Homo sapiens
  CDR3 for alpha chain variable domain of TCR clone 219247 (TRAV3, TRAJ6)
CAVRDGPRAGGSYIPTF

SEQ ID NO: 438494 - protein, 17 aa, Homo sapiens
  CDR3 for beta chain variable domain of TCR clone 219247 (TRBV2, TRBJ1-6)
CASSLRSGGLMTSPLHF

SEQ ID NO: 438495 - protein, 14 aa, Homo sapiens
  CDR3 for alpha chain variable domain of TCR clone 219248 (TRAV12-3, TRAJ9)
CAMSPDTGGFKTIF

SEQ ID NO: 438496 - protein, 12 aa, Homo sapiens
  CDR3 for beta chain variable domain of TCR clone 219248 (TRBV19, TRBJ1-5)
CASSIAQQPQHF

SEQ ID NO: 438497 - protein, 16 aa, Homo sapiens
  CDR3 for alpha chain variable domain of TCR clone 219249 (TRAV23/DV6, TRAJ34)
CAASGALSYNTDKLIF

SEQ ID NO: 438498 - protein, 14 aa, Homo sapiens
  CDR3 for beta chain variable domain of TCR clone 219249 (TRBV2, TRBJ2-7)
CASSLTSGGYEQYF

SEQ ID NO: 438499 - protein, 11 aa, Homo sapiens
  CDR3 for alpha chain variable domain of TCR clone 219250 (TRAV1-2, TRAJ31)
CAVNNNARLMF

SEQ ID NO: 438500 - protein, 15 aa, Homo sapiens
  CDR3 for beta chain variable domain of TCR clone 219250 (TRBV7-3, TRBJ2-2)
CASSLEVLPTGELFF

SEQ ID NO: 438501 - protein, 15 aa, Homo sapiens
  CDR3 for alpha chain variable domain of TCR clone 219251 (TRAV21, TRAJ24)
CAARSSTDSWGKLQF

SEQ ID NO: 438502 - protein, 15 aa, Homo sapiens
  CDR3 for beta chain variable domain of TCR clone 219251 (TRBV11-2, TRBJ2-1)
CASSKNRGLIYEQFF

SEQ ID NO: 438503 - protein, 15 aa, Homo sapiens
  CDR3 for alpha chain variable domain of TCR clone 219252 (TRAV4, TRAJ39)
CLVGPNNNAGNMLTF

SEQ ID NO: 438504 - protein, 14 aa, Homo sapiens
  CDR3 for beta chain variable domain of TCR clone 219252 (TRBV11-1, TRBJ2-7)
CASSFRQGSYEQYF

SEQ ID NO: 438505 - protein, 15 aa, Homo sapiens
  CDR3 for alpha chain variable domain of TCR clone 219253 (TRAV17, TRAJ6)
CATDLPSGGSYIPTF

SEQ ID NO: 438506 - protein, 15 aa, Homo sapiens
  CDR3 for beta chain variable domain of TCR clone 219253 (TRBV7-9, TRBJ1-5)
CASSQGHQPNQPQHF

SEQ ID NO: 438507 - protein, 14 aa, Homo sapiens
  CDR3 for alpha chain variable domain of TCR clone 219254 (TRAV1-2, TRAJ16)
CAVNRFSDGQKLLF

SEQ ID NO: 438508 - protein, 16 aa, Homo sapiens
  CDR3 for beta chain variable domain of TCR clone 219254 (TRBV12-4, TRBJ1-5)
CASSRPVWGSNQPQHF

SEQ ID NO: 438509 - protein, 15 aa, Homo sapiens
  CDR3 for alpha chain variable domain of TCR clone 219255 (TRAV3, TRAJ5)
CAVRDRKTGRRALTF

SEQ ID NO: 438510 - protein, 15 aa, Homo sapiens
  CDR3 for beta chain variable domain of TCR clone 219255 (TRBV7-9, TRBJ2-2)
RASGPLDTFPGELFF

SEQ ID NO: 438511 - protein, 11 aa, Homo sapiens
  CDR3 for alpha chain variable domain of TCR clone 219256 (TRAV4, TRAJ20)
CLVGDKVTTTR

SEQ ID NO: 438512 - protein, 13 aa, Homo sapiens
  CDR3 for beta chain variable domain of TCR clone 219256 (TRBV10-3, TRBJ2-7)
CASKLAVNYEQYF

SEQ ID NO: 438513 - protein, 16 aa, Homo sapiens
  CDR3 for alpha chain variable domain of TCR clone 219257 (TRAV27, TRAJ53)
RAAPEGSGGSNYKLTF

SEQ ID NO: 438514 - protein, 15 aa, Homo sapiens
  CDR3 for beta chain variable domain of TCR clone 219257 (TRBV20-1, TRBJ1-1)
CSASRGVTGNTEAFF

SEQ ID NO: 438515 - protein, 15 aa, Homo sapiens
  CDR3 for alpha chain variable domain of TCR clone 219258 (TRAV13-1, TRAJ32)
CAASNGWWCYKKAHL

SEQ ID NO: 438516 - protein, 17 aa, Homo sapiens
  CDR3 for beta chain variable domain of TCR clone 219258 (TRBV15, TRBJ1-2)
CATSGREIDVVNYGYTF

SEQ ID NO: 438517 - protein, 12 aa, Homo sapiens
  CDR3 for alpha chain variable domain of TCR clone 219259 (TRAV21, TRAJ33)
CAVQDSNYQLIW

SEQ ID NO: 438518 - protein, 15 aa, Homo sapiens
  CDR3 for beta chain variable domain of TCR clone 219259 (TRBV20-1, TRBJ2-5)
CSAEGTGGLQETQYF

SEQ ID NO: 438519 - protein, 17 aa, Homo sapiens
  CDR3 for alpha chain variable domain of TCR clone 219260 (TRAV8-4, TRAJ11)
RAVSDRGENSGYSTLTF

SEQ ID NO: 438520 - protein, 14 aa, Homo sapiens
  CDR3 for beta chain variable domain of TCR clone 219260 (TRBV20-1, TRBJ2-1)
CSPNDEASYNEQFF

SEQ ID NO: 438521 - protein, 15 aa, Homo sapiens
  CDR3 for alpha chain variable domain of TCR clone 219261 (TRAV12-2, TRAJ53)
CAVNGGGGSNYKLTL

SEQ ID NO: 438522 - protein, 17 aa, Homo sapiens
  CDR3 for beta chain variable domain of TCR clone 219261 (TRBV7-3, TRBJ2-3)
CARSLMKRMRGADTQYF

SEQ ID NO: 438523 - protein, 13 aa, Homo sapiens
  CDR3 for alpha chain variable domain of TCR clone 219262 (TRAV36/DV7, TRAJ37)
CAVFSSNTGKLIF

SEQ ID NO: 438524 - protein, 15 aa, Homo sapiens
  CDR3 for beta chain variable domain of TCR clone 219262 (TRBV5-1, TRBJ2-2)
CASSAQGGNTGELFF

SEQ ID NO: 438525 - protein, 15 aa, Homo sapiens
  CDR3 for alpha chain variable domain of TCR clone 219263 (TRAV12-2, TRAJ53)
CAVNGGGGSKYKLTF

SEQ ID NO: 438526 - protein, 17 aa, Homo sapiens
  CDR3 for beta chain variable domain of TCR clone 219263 (TRBV7-3, TRBJ2-3)
RASSLMKRMRGADTQYF

SEQ ID NO: 438527 - protein, 19 aa, Homo sapiens
  CDR3 for alpha chain variable domain of TCR clone 219264 (TRAV26-1, TRAJ52)
CIVRAHRNAGGTSYGKLTF

SEQ ID NO: 438528 - protein, 13 aa, Homo sapiens
  CDR3 for beta chain variable domain of TCR clone 219264 (TRBV20-1, TRBJ1-6)
CSAHLGVGSPLHF

SEQ ID NO: 438529 - protein, 14 aa, Homo sapiens
  CDR3 for alpha chain variable domain of TCR clone 219265 (TRAV38-1, TRAJ29)
CAFITPSGNTPLVF

SEQ ID NO: 438530 - protein, 14 aa, Homo sapiens
  CDR3 for beta chain variable domain of TCR clone 219265 (TRBV18, TRBJ2-7)
CACSPRGGAYEQYF

SEQ ID NO: 438531 - protein, 16 aa, Homo sapiens
  CDR3 for alpha chain variable domain of TCR clone 219266 (TRAV30, TRAJ24)
CGTEIVDAVSWGKFQF

SEQ ID NO: 438532 - protein, 14 aa, Homo sapiens
  CDR3 for beta chain variable domain of TCR clone 219266 (TRBV7-2, TRBJ2-7)
CASSPKTSFYEQYF

SEQ ID NO: 438533 - protein, 18 aa, Homo sapiens
  CDR3 for alpha chain variable domain of TCR clone 219267 (TRAV9-2, TRAJ52)
CALSRHDAGGTSYGKLTF

SEQ ID NO: 438534 - protein, 14 aa, Homo sapiens
  CDR3 for beta chain variable domain of TCR clone 219267 (TRBV7-3, TRBJ2-1)
CASSLAGGTNEQFF

SEQ ID NO: 438535 - protein, 14 aa, Homo sapiens
  CDR3 for alpha chain variable domain of TCR clone 219268 (TRAV8-6, TRAJ8)
CAVNENTGFQKLVF

SEQ ID NO: 438536 - protein, 11 aa, Homo sapiens
  CDR3 for beta chain variable domain of TCR clone 219268 (TRBV29-1, TRBJ2-5)
CGEDRTGTQYF

SEQ ID NO: 438537 - protein, 12 aa, Homo sapiens
  CDR3 for alpha chain variable domain of TCR clone 219269 (TRAV3, TRAJ7)
CADFLWEQQTRF

SEQ ID NO: 438538 - protein, 13 aa, Homo sapiens
  CDR3 for beta chain variable domain of TCR clone 219269 (TRBV7-3, TRBJ2-5)
CASSFRGGETQYF

SEQ ID NO: 438539 - protein, 13 aa, Homo sapiens
  CDR3 for alpha chain variable domain of TCR clone 219270 (TRAV23/DV6, TRAJ12)
CAPRVDSSYKLIF

SEQ ID NO: 438540 - protein, 14 aa, Homo sapiens
  CDR3 for beta chain variable domain of TCR clone 219270 (TRBV7-8, TRBJ2-3)
CASSLEAGTDTQYF

SEQ ID NO: 438541 - protein, 14 aa, Homo sapiens
  CDR3 for alpha chain variable domain of TCR clone 219271 (TRAV12-2, TRAJ33)
FAVKRARSNYQLIW

SEQ ID NO: 438542 - protein, 14 aa, Homo sapiens
  CDR3 for beta chain variable domain of TCR clone 219271 (TRBV13, TRBJ2-7)
CASSLKGASYEQYF

SEQ ID NO: 438543 - protein, 11 aa, Homo sapiens
  CDR3 for alpha chain variable domain of TCR clone 219272 (TRAV12-1, TRAJ34)
CVVNKGRELIF

SEQ ID NO: 438544 - protein, 12 aa, Homo sapiens
  CDR3 for beta chain variable domain of TCR clone 219272 (TRBV2, TRBJ2-1)
CAYGPPRNEQFF

SEQ ID NO: 438545 - protein, 17 aa, Homo sapiens
  CDR3 for alpha chain variable domain of TCR clone 219273 (TRAV26-1, TRAJ58)
CIVRVGAEETSGARLTF

SEQ ID NO: 438546 - protein, 12 aa, Homo sapiens
  CDR3 for beta chain variable domain of TCR clone 219273 (TRBV11-2, TRBJ2-5)
CASSLDTQTQYF

SEQ ID NO: 438547 - protein, 14 aa, Homo sapiens
  CDR3 for alpha chain variable domain of TCR clone 219274 (TRAV12-2, TRAJ11)
CAVNRESGYSTLTF

SEQ ID NO: 438548 - protein, 10 aa, Homo sapiens
  CDR3 for beta chain variable domain of TCR clone 219274 (TRBV20-1, TRBJ2-5)
CSARSETQYF

SEQ ID NO: 438549 - protein, 15 aa, Homo sapiens
  CDR3 for alpha chain variable domain of TCR clone 219275 (TRAV21, TRAJ24)
FAARSSTDSRGKLQF

SEQ ID NO: 438550 - protein, 13 aa, Homo sapiens
  CDR3 for beta chain variable domain of TCR clone 219275 (TRBV11-2, TRBJ2-5)
CASSSTGEETQYF

SEQ ID NO: 438551 - protein, 14 aa, Homo sapiens
  CDR3 for alpha chain variable domain of TCR clone 219276 (TRAV26-1, TRAJ38)
CIADNAGDNRKLIW

SEQ ID NO: 438552 - protein, 14 aa, Homo sapiens
  CDR3 for beta chain variable domain of TCR clone 219276 (TRBV7-3, TRBJ1-1)
CASSLGTGYTEAFF

SEQ ID NO: 438553 - protein, 16 aa, Homo sapiens
  CDR3 for alpha chain variable domain of TCR clone 219277 (TRAV13-1, TRAJ18)
CAASRMRGSTLGRRYV

SEQ ID NO: 438554 - protein, 15 aa, Homo sapiens
  CDR3 for beta chain variable domain of TCR clone 219277 (TRBV29-1, TRBJ2-1)
CSVGRHALFYNEQFF

SEQ ID NO: 438555 - protein, 15 aa, Homo sapiens
  CDR3 for alpha chain variable domain of TCR clone 219278 (TRAV3, TRAJ4)
CAQNMFSGGYNKLIF

SEQ ID NO: 438556 - protein, 13 aa, Homo sapiens
  CDR3 for beta chain variable domain of TCR clone 219278 (TRBV7-6, TRBJ1-2)
CASSLVADYGYTF

SEQ ID NO: 438557 - protein, 14 aa, Homo sapiens
  CDR3 for alpha chain variable domain of TCR clone 219279 (TRAV1-2, TRAJ16)
CAVNRFSDGQKLLF

SEQ ID NO: 438558 - protein, 16 aa, Homo sapiens
  CDR3 for beta chain variable domain of TCR clone 219279 (TRBV4-3, TRBJ2-3)
CASSQGGLAGTDTQYF

SEQ ID NO: 438559 - protein, 14 aa, Homo sapiens
  CDR3 for alpha chain variable domain of TCR clone 219280 (TRAV1-2, TRAJ16)
CAVNRFSDGQKMLF

SEQ ID NO: 438560 - protein, 13 aa, Homo sapiens
  CDR3 for beta chain variable domain of TCR clone 219280 (TRBV19, TRBJ2-7)
CASRKAGGSEQYF

SEQ ID NO: 438561 - protein, 12 aa, Homo sapiens
  CDR3 for alpha chain variable domain of TCR clone 219281 (TRAV13-1, TRAJ21)
CAAFFNFNKFYF

SEQ ID NO: 438562 - protein, 14 aa, Homo sapiens
  CDR3 for beta chain variable domain of TCR clone 219281 (TRBV4-1, TRBJ2-3)
CASSRLARTDTQYF

SEQ ID NO: 438563 - protein, 12 aa, Homo sapiens
  CDR3 for alpha chain variable domain of TCR clone 219282 (TRAV17, TRAJ12)
CVTLRSSYKLIF

SEQ ID NO: 438564 - protein, 16 aa, Homo sapiens
  CDR3 for beta chain variable domain of TCR clone 219282 (TRBV28, TRBJ2-7)
CASSVFLETGGTEQYF

SEQ ID NO: 438565 - protein, 13 aa, Homo sapiens
  CDR3 for alpha chain variable domain of TCR clone 219283 (TRAV8-6, TRAJ16)
CAVSRWVGQKLLF

SEQ ID NO: 438566 - protein, 15 aa, Homo sapiens
  CDR3 for beta chain variable domain of TCR clone 219283 (TRBV12-4, TRBJ2-1)
CASSLSTGESNEQFF

SEQ ID NO: 438567 - protein, 14 aa, Homo sapiens
  CDR3 for alpha chain variable domain of TCR clone 219284 (TRAV12-1, TRAJ12)
CVVNSGDSSYKLIF

SEQ ID NO: 438568 - protein, 13 aa, Homo sapiens
  CDR3 for beta chain variable domain of TCR clone 219284 (TRBV20-1, TRBJ1-1)
CSPRGGGNTEAFF

SEQ ID NO: 438569 - protein, 12 aa, Homo sapiens
  CDR3 for alpha chain variable domain of TCR clone 219285 (TRAV1-2, TRAJ17)
CAVRAAGNKLTF

SEQ ID NO: 438570 - protein, 16 aa, Homo sapiens
  CDR3 for beta chain variable domain of TCR clone 219285 (TRBV20-1, TRBJ2-1)
CSAPGRAGSYSDEQFF

SEQ ID NO: 438571 - protein, 13 aa, Homo sapiens
  CDR3 for alpha chain variable domain of TCR clone 219286 (TRAV12-2, TRAJ10)
CAVPTGGGNKLTF

SEQ ID NO: 438572 - protein, 13 aa, Homo sapiens
  CDR3 for beta chain variable domain of TCR clone 219286 (TRBV24-1, TRBJ2-2)
CATSDWSTGELFF

SEQ ID NO: 438573 - protein, 16 aa, Homo sapiens
  CDR3 for alpha chain variable domain of TCR clone 219287 (TRAV12-2, TRAJ10)
CAVNRVLTGGGNKLTF

SEQ ID NO: 438574 - protein, 15 aa, Homo sapiens
  CDR3 for beta chain variable domain of TCR clone 219287 (TRBV7-9, TRBJ1-6)
CASSSPGRGNSPLHF

SEQ ID NO: 438575 - protein, 14 aa, Homo sapiens
  CDR3 for alpha chain variable domain of TCR clone 219288 (TRAV12-2, TRAJ17)
CAALFKAAGNKLTF

SEQ ID NO: 438576 - protein, 16 aa, Homo sapiens
  CDR3 for beta chain variable domain of TCR clone 219288 (TRBV20-1, TRBJ2-2)
CSASASGIPVAGELFF

SEQ ID NO: 438577 - protein, 13 aa, Homo sapiens
  CDR3 for alpha chain variable domain of TCR clone 219289 (TRAV13-1, TRAJ27)
CAVSIHQCRQINL

SEQ ID NO: 438578 - protein, 16 aa, Homo sapiens
  CDR3 for beta chain variable domain of TCR clone 219289 (TRBV2, TRBJ2-5)
CASSEAQGLGQETQYF

SEQ ID NO: 438579 - protein, 15 aa, Homo sapiens
  CDR3 for alpha chain variable domain of TCR clone 219290 (TRAV17, TRAJ57)
SATGPSQGGSEKLVF

SEQ ID NO: 438580 - protein, 14 aa, Homo sapiens
  CDR3 for beta chain variable domain of TCR clone 219290 (TRBV12-5, TRBJ2-5)
CASGSRTHQETQYF

SEQ ID NO: 438581 - protein, 20 aa, Homo sapiens
  CDR3 for alpha chain variable domain of TCR clone 219291 (TRAV26-1, TRAJ42)
CCVLLHRQTSYGGSQGNLIF

SEQ ID NO: 438582 - protein, 16 aa, Homo sapiens
  CDR3 for beta chain variable domain of TCR clone 219291 (TRBV7-3, TRBJ2-2)
RASSLKRGTLSGELFF

SEQ ID NO: 438583 - protein, 13 aa, Homo sapiens
  CDR3 for alpha chain variable domain of TCR clone 219292 (TRAV12-1, TRAJ6)
CVVYPGGSYIPTI

SEQ ID NO: 438584 - protein, 13 aa, Homo sapiens
  CDR3 for beta chain variable domain of TCR clone 219292 (TRBV4-2, TRBJ1-1)
CASSQAGNNGAFF

SEQ ID NO: 438585 - protein, 17 aa, Homo sapiens
  CDR3 for alpha chain variable domain of TCR clone 219293 (TRAV35, TRAJ47)
GLLDCRTHTDYGNKLVF

SEQ ID NO: 438586 - protein, 11 aa, Homo sapiens
  CDR3 for beta chain variable domain of TCR clone 219293 (TRBV29-1, TRBJ1-1)
CSVEVGTRTFF

SEQ ID NO: 438587 - protein, 16 aa, Homo sapiens
  CDR3 for alpha chain variable domain of TCR clone 219294 (TRAV26-1, TRAJ53)
CIVRVAMGGSNYKLTF

SEQ ID NO: 438588 - protein, 16 aa, Homo sapiens
  CDR3 for beta chain variable domain of TCR clone 219294 (TRBV28, TRBJ2-7)
CDSSLFFETGGPEQYF

SEQ ID NO: 438589 - protein, 17 aa, Homo sapiens
  CDR3 for alpha chain variable domain of TCR clone 219295 (TRAV3, TRAJ6)
CAVRDGPRAGGSYIPTF

SEQ ID NO: 438590 - protein, 17 aa, Homo sapiens
  CDR3 for beta chain variable domain of TCR clone 219295 (TRBV7-2, TRBJ2-2)
CASSPRGAGEGTGELFF

SEQ ID NO: 438591 - protein, 12 aa, Homo sapiens
  CDR3 for alpha chain variable domain of TCR clone 219296 (TRAV12-3, TRAJ4)
CAMTGAGTRLAV

SEQ ID NO: 438592 - protein, 13 aa, Homo sapiens
  CDR3 for beta chain variable domain of TCR clone 219296 (TRBV12-4, TRBJ1-5)
CASSPDRAQPQHF

SEQ ID NO: 438593 - protein, 15 aa, Homo sapiens
  CDR3 for alpha chain variable domain of TCR clone 219297 (TRAV8-6, TRAJ6)
CAVSGESGGSYIPPF

SEQ ID NO: 438594 - protein, 15 aa, Homo sapiens
  CDR3 for beta chain variable domain of TCR clone 219297 (TRBV20-1, TRBJ2-7)
CSARDRVSGMDEQYF

SEQ ID NO: 438595 - protein, 13 aa, Homo sapiens
  CDR3 for alpha chain variable domain of TCR clone 219298 (TRAV12-1, TRAJ13)
CVVTSVGYQKVTF

SEQ ID NO: 438596 - protein, 14 aa, Homo sapiens
  CDR3 for beta chain variable domain of TCR clone 219298 (TRBV27, TRBJ2-7)
CASSLAGLSYEQYF

SEQ ID NO: 438597 - protein, 19 aa, Homo sapiens
  CDR3 for alpha chain variable domain of TCR clone 219299 (TRAV1-2, TRAJ26)
CLLPLCCERPVNYGQNFVF

SEQ ID NO: 438598 - protein, 15 aa, Homo sapiens
  CDR3 for beta chain variable domain of TCR clone 219299 (TRBV9, TRBJ1-6)
CASSVAGTGDSPLHF

SEQ ID NO: 438599 - protein, 14 aa, Homo sapiens
  CDR3 for alpha chain variable domain of TCR clone 219300 (TRAV1-2, TRAJ16)
CAVNRFSDGQKLFF

SEQ ID NO: 438600 - protein, 14 aa, Homo sapiens
  CDR3 for beta chain variable domain of TCR clone 219300 (TRBV4-1, TRBJ2-2)
CASSQAVNTGELFF

SEQ ID NO: 438601 - protein, 16 aa, Homo sapiens
  CDR3 for alpha chain variable domain of TCR clone 219301 (TRAV36/DV7, TRAJ30)
CAVETYGLDRDDKIIF

SEQ ID NO: 438602 - protein, 14 aa, Homo sapiens
  CDR3 for beta chain variable domain of TCR clone 219301 (TRBV25-1, TRBJ1-1)
CASTHLGGNTEAFF

SEQ ID NO: 438603 - protein, 13 aa, Homo sapiens
  CDR3 for alpha chain variable domain of TCR clone 219302 (TRAV13-1, TRAJ5)
CAARVTGRRALTF

SEQ ID NO: 438604 - protein, 15 aa, Homo sapiens
  CDR3 for beta chain variable domain of TCR clone 219302 (TRBV7-9, TRBJ2-7)
CASSPGGGLTYEQSF

SEQ ID NO: 438605 - protein, 18 aa, Homo sapiens
  CDR3 for alpha chain variable domain of TCR clone 219303 (TRAV21, TRAJ52)
CAVGPSPAGGTSYEKLTF

SEQ ID NO: 438606 - protein, 17 aa, Homo sapiens
  CDR3 for beta chain variable domain of TCR clone 219303 (TRBV13, TRBJ2-3)
CASSLSRVAGGRNTQYF

SEQ ID NO: 438607 - protein, 10 aa, Homo sapiens
  CDR3 for alpha chain variable domain of TCR clone 219304 (TRAV17, TRAJ52)
SATSYGKLTF

SEQ ID NO: 438608 - protein, 13 aa, Homo sapiens
  CDR3 for beta chain variable domain of TCR clone 219304 (TRBV29-1, TRBJ2-5)
CSVGGTSEETQYF

SEQ ID NO: 438609 - protein, 15 aa, Homo sapiens
  CDR3 for alpha chain variable domain of TCR clone 219305 (TRAV23/DV6, TRAJ13)
CAAWPGGGGYLKVTF

SEQ ID NO: 438610 - protein, 17 aa, Homo sapiens
  CDR3 for beta chain variable domain of TCR clone 219305 (TRBV19, TRBJ2-7)
CASSISFYDSYPYEQYF

SEQ ID NO: 438611 - protein, 17 aa, Homo sapiens
  CDR3 for alpha chain variable domain of TCR clone 219306 (TRAV3, TRAJ6)
CAVRDGPRPGGSYIPTF

SEQ ID NO: 438612 - protein, 14 aa, Homo sapiens
  CDR3 for beta chain variable domain of TCR clone 219306 (TRBV11-2, TRBJ2-3)
CASSRLARTDTQYF

SEQ ID NO: 438613 - protein, 11 aa, Homo sapiens
  CDR3 for alpha chain variable domain of TCR clone 219307 (TRAV1-2, TRAJ12)
CASYGSYKLIF

SEQ ID NO: 438614 - protein, 12 aa, Homo sapiens
  CDR3 for beta chain variable domain of TCR clone 219307 (TRBV7-2, TRBJ2-5)
CASSQYQETQYF

SEQ ID NO: 438615 - protein, 15 aa, Homo sapiens
  CDR3 for alpha chain variable domain of TCR clone 219308 (TRAV26-1, TRAJ15)
CMVRAANQAGTALIF

SEQ ID NO: 438616 - protein, 15 aa, Homo sapiens
  CDR3 for beta chain variable domain of TCR clone 219308 (TRBV20-1, TRBJ1-1)
CSARSAATSNTEAFF

SEQ ID NO: 438617 - protein, 16 aa, Homo sapiens
  CDR3 for alpha chain variable domain of TCR clone 219309 (TRAV9-2, TRAJ6)
CALRGPASGGSYIPTF

SEQ ID NO: 438618 - protein, 13 aa, Homo sapiens
  CDR3 for beta chain variable domain of TCR clone 219309 (TRBV7-9, TRBJ1-2)
CASSLKQNYGYTF

SEQ ID NO: 438619 - protein, 14 aa, Homo sapiens
  CDR3 for alpha chain variable domain of TCR clone 219310 (TRAV35, TRAJ22)
CAGLRPGSARQLTF

SEQ ID NO: 438620 - protein, 13 aa, Homo sapiens
  CDR3 for beta chain variable domain of TCR clone 219310 (TRBV7-6, TRBJ1-2)
CASSLVADYGYTF

SEQ ID NO: 438621 - protein, 16 aa, Homo sapiens
  CDR3 for alpha chain variable domain of TCR clone 219311 (TRAV30, TRAJ24)
CGTEIVDADSWGEFQF

SEQ ID NO: 438622 - protein, 14 aa, Homo sapiens
  CDR3 for beta chain variable domain of TCR clone 219311 (TRBV7-2, TRBJ2-7)
CASSPKTSFYEQYF

SEQ ID NO: 438623 - protein, 14 aa, Homo sapiens
  CDR3 for alpha chain variable domain of TCR clone 219312 (TRAV8-1, TRAJ6)
CAVNASGGSYIPTF

SEQ ID NO: 438624 - protein, 14 aa, Homo sapiens
  CDR3 for beta chain variable domain of TCR clone 219312 (TRBV11-2, TRBJ2-3)
CASSRLARTDTQYF

SEQ ID NO: 438625 - protein, 15 aa, Homo sapiens
  CDR3 for alpha chain variable domain of TCR clone 219313 (TRAV4, TRAJ4)
CLVGPLSGGYNKLIF

SEQ ID NO: 438626 - protein, 13 aa, Homo sapiens
  CDR3 for beta chain variable domain of TCR clone 219313 (TRBV3-1, TRBJ1-4)
CASSQDRGEKLFF

SEQ ID NO: 438627 - protein, 15 aa, Homo sapiens
  CDR3 for alpha chain variable domain of TCR clone 219314 (TRAV8-4, TRAJ40)
CAVSSITSGTYNYIF

SEQ ID NO: 438628 - protein, 13 aa, Homo sapiens
  CDR3 for beta chain variable domain of TCR clone 219314 (TRBV2, TRBJ2-1)
CATSRGTDNEQFF

SEQ ID NO: 438629 - protein, 14 aa, Homo sapiens
  CDR3 for alpha chain variable domain of TCR clone 219315 (TRAV20, TRAJ56)
CAVQFGGANSKLTF

SEQ ID NO: 438630 - protein, 15 aa, Homo sapiens
  CDR3 for beta chain variable domain of TCR clone 219315 (TRBV27, TRBJ1-5)
CASSLGTGFDQPQHF

SEQ ID NO: 438631 - protein, 13 aa, Homo sapiens
  CDR3 for alpha chain variable domain of TCR clone 219316 (TRAV13-1, TRAJ21)
CAASIYNFNKFYF

SEQ ID NO: 438632 - protein, 15 aa, Homo sapiens
  CDR3 for beta chain variable domain of TCR clone 219316 (TRBV19, TRBJ2-1)
CASSNGGGSSNEQFF

SEQ ID NO: 438633 - protein, 13 aa, Homo sapiens
  CDR3 for alpha chain variable domain of TCR clone 219317 (TRAV26-2, TRAJ43)
FILRAVNNNDMRF

SEQ ID NO: 438634 - protein, 17 aa, Homo sapiens
  CDR3 for beta chain variable domain of TCR clone 219317 (TRBV7-3, TRBJ2-3)
CASSLMKRMRGADTQYF

SEQ ID NO: 438635 - protein, 14 aa, Homo sapiens
  CDR3 for alpha chain variable domain of TCR clone 219318 (TRAV1-2, TRAJ29)
CAVRELTSATPLVF

SEQ ID NO: 438636 - protein, 14 aa, Homo sapiens
  CDR3 for beta chain variable domain of TCR clone 219318 (TRBV7-3, TRBJ1-1)
CASSLKGGNTEAFF

SEQ ID NO: 438637 - protein, 13 aa, Homo sapiens
  CDR3 for alpha chain variable domain of TCR clone 219319 (TRAV12-1, TRAJ41)
CGLNSNFGYALNF

SEQ ID NO: 438638 - protein, 14 aa, Homo sapiens
  CDR3 for beta chain variable domain of TCR clone 219319 (TRBV5-8, TRBJ1-1)
CASSPRTGFSEAFF

SEQ ID NO: 438639 - protein, 13 aa, Homo sapiens
  CDR3 for alpha chain variable domain of TCR clone 219320 (TRAV1-2, TRAJ20)
CAVRDGNDYKLSF

SEQ ID NO: 438640 - protein, 14 aa, Homo sapiens
  CDR3 for beta chain variable domain of TCR clone 219320 (TRBV7-2, TRBJ2-3)
CQQLKGGGRDTQYF

SEQ ID NO: 438641 - protein, 12 aa, Homo sapiens
  CDR3 for alpha chain variable domain of TCR clone 219321 (TRAV21, TRAJ31)
CAVWGNNARLMF

SEQ ID NO: 438642 - protein, 16 aa, Homo sapiens
  CDR3 for beta chain variable domain of TCR clone 219321 (TRBV5-5, TRBJ2-2)
CASSGRREGATGELFF

SEQ ID NO: 438643 - protein, 17 aa, Homo sapiens
  CDR3 for alpha chain variable domain of TCR clone 219322 (TRAV3, TRAJ6)
CAVRDGRRAGGSYIPTF

SEQ ID NO: 438644 - protein, 15 aa, Homo sapiens
  CDR3 for beta chain variable domain of TCR clone 219322 (TRBV2, TRBJ2-7)
CASSEGLARSYEQYF

SEQ ID NO: 438645 - protein, 18 aa, Homo sapiens
  CDR3 for alpha chain variable domain of TCR clone 219323 (TRAV13-1, TRAJ52)
CAAKNPNAGGTSYGKLTF

SEQ ID NO: 438646 - protein, 18 aa, Homo sapiens
  CDR3 for beta chain variable domain of TCR clone 219323 (TRBV4-1, TRBJ1-4)
CASSPRTGGAWTKEKLFF

SEQ ID NO: 438647 - protein, 16 aa, Homo sapiens
  CDR3 for alpha chain variable domain of TCR clone 219324 (TRAV12-1, TRAJ42)
CVVTPYYGGRQGNIIF

SEQ ID NO: 438648 - protein, 15 aa, Homo sapiens
  CDR3 for beta chain variable domain of TCR clone 219324 (TRBV4-3, TRBJ2-7)
CASSQGGRGIYEQYF

SEQ ID NO: 438649 - protein, 15 aa, Homo sapiens
  CDR3 for alpha chain variable domain of TCR clone 219325 (TRAV27, TRAJ38)
CAARRNAGNNRKMIW

SEQ ID NO: 438650 - protein, 11 aa, Homo sapiens
  CDR3 for beta chain variable domain of TCR clone 219325 (TRBV12-4, TRBJ2-2)
CASSSAGELFF

SEQ ID NO: 438651 - protein, 14 aa, Homo sapiens
  CDR3 for alpha chain variable domain of TCR clone 219326 (TRAV12-2, TRAJ13)
CSVKKTGGYQKVTF

SEQ ID NO: 438652 - protein, 12 aa, Homo sapiens
  CDR3 for beta chain variable domain of TCR clone 219326 (TRBV11-2, TRBJ2-1)
CASSPGNNEQFF

SEQ ID NO: 438653 - protein, 13 aa, Homo sapiens
  CDR3 for alpha chain variable domain of TCR clone 219327 (TRAV13-2, TRAJ48)
CAEMDFGNEKLTF

SEQ ID NO: 438654 - protein, 15 aa, Homo sapiens
  CDR3 for beta chain variable domain of TCR clone 219327 (TRBV7-9, TRBJ1-6)
CASSSPGRGNSRLHF

SEQ ID NO: 438655 - protein, 13 aa, Homo sapiens
  CDR3 for alpha chain variable domain of TCR clone 219328 (TRAV22, TRAJ29)
CAVGGSGNTPLVF

SEQ ID NO: 438656 - protein, 16 aa, Homo sapiens
  CDR3 for beta chain variable domain of TCR clone 219328 (TRBV19, TRBJ1-5)
CASSIQGGYSNQPQHF

SEQ ID NO: 438657 - protein, 13 aa, Homo sapiens
  CDR3 for alpha chain variable domain of TCR clone 219329 (TRAV35, TRAJ32)
CAGVGGATNKLIF

SEQ ID NO: 438658 - protein, 15 aa, Homo sapiens
  CDR3 for beta chain variable domain of TCR clone 219329 (TRBV2, TRBJ1-2)
CASSEIGGANYGYTF

SEQ ID NO: 438659 - protein, 14 aa, Homo sapiens
  CDR3 for alpha chain variable domain of TCR clone 219330 (TRAV17, TRAJ12)
CAILPMDSSYKLIF

SEQ ID NO: 438660 - protein, 14 aa, Homo sapiens
  CDR3 for beta chain variable domain of TCR clone 219330 (TRBV12-5, TRBJ2-5)
CASGSRTHQETQYF

SEQ ID NO: 438661 - protein, 13 aa, Homo sapiens
  CDR3 for alpha chain variable domain of TCR clone 219331 (TRAV26-2, TRAJ43)
CILRAVDNNDMRF

SEQ ID NO: 438662 - protein, 11 aa, Homo sapiens
  CDR3 for beta chain variable domain of TCR clone 219331 (TRBV29-1, TRBJ2-5)
CSEDRTGTQYF

SEQ ID NO: 438663 - protein, 15 aa, Homo sapiens
  CDR3 for alpha chain variable domain of TCR clone 219332 (TRAV25, TRAJ53)
CPTSNSGGSNYKLTF

SEQ ID NO: 438664 - protein, 15 aa, Homo sapiens
  CDR3 for beta chain variable domain of TCR clone 219332 (TRBV6-3, TRBJ2-7)
CASSSPGTVFYEQYF

SEQ ID NO: 438665 - protein, 14 aa, Homo sapiens
  CDR3 for alpha chain variable domain of TCR clone 219333 (TRAV1-2, TRAJ8)
CAVREDTGFQKLVF

SEQ ID NO: 438666 - protein, 14 aa, Homo sapiens
  CDR3 for beta chain variable domain of TCR clone 219333 (TRBV7-7, TRBJ2-7)
CASSLGRGVGEQYF

SEQ ID NO: 438667 - protein, 15 aa, Homo sapiens
  CDR3 for alpha chain variable domain of TCR clone 219334 (TRAV36/DV7, TRAJ53)
CAVEGSGGSNYKLTF

SEQ ID NO: 438668 - protein, 16 aa, Homo sapiens
  CDR3 for beta chain variable domain of TCR clone 219334 (TRBV27, TRBJ2-2)
CARSLSGFWVTGELFF

SEQ ID NO: 438669 - protein, 15 aa, Homo sapiens
  CDR3 for alpha chain variable domain of TCR clone 219335 (TRAV8-6, TRAJ38)
CAVSSNAGNNRKLIW

SEQ ID NO: 438670 - protein, 14 aa, Homo sapiens
  CDR3 for beta chain variable domain of TCR clone 219335 (TRBV20-1, TRBJ1-1)
CSAQTRIGGTEAFF

SEQ ID NO: 438671 - protein, 14 aa, Homo sapiens
  CDR3 for alpha chain variable domain of TCR clone 219336 (TRAV38-1, TRAJ40)
CALRPTPGTYKYIF

SEQ ID NO: 438672 - protein, 15 aa, Homo sapiens
  CDR3 for beta chain variable domain of TCR clone 219336 (TRBV20-1, TRBJ2-7)
CSARDRVSGMDEQYF

SEQ ID NO: 438673 - protein, 13 aa, Homo sapiens
  CDR3 for alpha chain variable domain of TCR clone 219337 (TRAV12-1, TRAJ49)
CVVILNTGNQFYF

SEQ ID NO: 438674 - protein, 13 aa, Homo sapiens
  CDR3 for beta chain variable domain of TCR clone 219337 (TRBV10-3, TRBJ2-7)
CASNLAVNYEQYF

SEQ ID NO: 438675 - protein, 13 aa, Homo sapiens
  CDR3 for alpha chain variable domain of TCR clone 219338 (TRAV12-1, TRAJ20)
CVGQRFNDYKFSF

SEQ ID NO: 438676 - protein, 14 aa, Homo sapiens
  CDR3 for beta chain variable domain of TCR clone 219338 (TRBV6-3, TRBJ1-5)
CASSYSRFAQPQHF

SEQ ID NO: 438677 - protein, 17 aa, Homo sapiens
  CDR3 for alpha chain variable domain of TCR clone 219339 (TRAV12-2, TRAJ52)
CAVNPYAGGTSHGKLTF

SEQ ID NO: 438678 - protein, 16 aa, Homo sapiens
  CDR3 for beta chain variable domain of TCR clone 219339 (TRBV5-7, TRBJ2-2)
CASSGRREGATGELFF

SEQ ID NO: 438679 - protein, 18 aa, Homo sapiens
  CDR3 for alpha chain variable domain of TCR clone 219340 (TRAV9-2, TRAJ13)
CQTQRRTEPSGGYQKVTF

SEQ ID NO: 438680 - protein, 15 aa, Homo sapiens
  CDR3 for beta chain variable domain of TCR clone 219340 (TRBV12-4, TRBJ2-1)
CASSLLATGNNEQFF

SEQ ID NO: 438681 - protein, 16 aa, Homo sapiens
  CDR3 for alpha chain variable domain of TCR clone 219341 (TRAV12-2, TRAJ10)
CAVNRVLTGGGNKLTF

SEQ ID NO: 438682 - protein, 12 aa, Homo sapiens
  CDR3 for beta chain variable domain of TCR clone 219341 (TRBV28, TRBJ2-7)
CASSFSSYEQYS

SEQ ID NO: 438683 - protein, 12 aa, Homo sapiens
  CDR3 for alpha chain variable domain of TCR clone 219342 (TRAV21, TRAJ11)
CAATSGYSTLTF

SEQ ID NO: 438684 - protein, 15 aa, Homo sapiens
  CDR3 for beta chain variable domain of TCR clone 219342 (TRBV25-1, TRBJ1-4)
CASSKRIATNEKLFF

SEQ ID NO: 438685 - protein, 17 aa, Homo sapiens
  CDR3 for alpha chain variable domain of TCR clone 219343 (TRAV3, TRAJ28)
CAVRPLYSGAGSYQLTF

SEQ ID NO: 438686 - protein, 13 aa, Homo sapiens
  CDR3 for beta chain variable domain of TCR clone 219343 (TRBV7-2, TRBJ1-1)
CASNLKGAKVAFF

SEQ ID NO: 438687 - protein, 14 aa, Homo sapiens
  CDR3 for alpha chain variable domain of TCR clone 219344 (TRAV35, TRAJ22)
CAGLRPGSARQLTF

SEQ ID NO: 438688 - protein, 15 aa, Homo sapiens
  CDR3 for beta chain variable domain of TCR clone 219344 (TRBV7-2, TRBJ1-1)
CASSPQGGANTEAFF

SEQ ID NO: 438689 - protein, 14 aa, Homo sapiens
  CDR3 for alpha chain variable domain of TCR clone 219345 (TRAV13-1, TRAJ13)
CAASKGGGYQKVTF

SEQ ID NO: 438690 - protein, 13 aa, Homo sapiens
  CDR3 for beta chain variable domain of TCR clone 219345 (TRBV15, TRBJ1-6)
CATSGGLNSPLHF

SEQ ID NO: 438691 - protein, 14 aa, Homo sapiens
  CDR3 for alpha chain variable domain of TCR clone 219346 (TRAV8-3, TRAJ4)
CAVGAACGYNKLIF

SEQ ID NO: 438692 - protein, 15 aa, Homo sapiens
  CDR3 for beta chain variable domain of TCR clone 219346 (TRBV6-3, TRBJ2-7)
CASSSPGIVFYEQYF

SEQ ID NO: 438693 - protein, 11 aa, Homo sapiens
  CDR3 for alpha chain variable domain of TCR clone 219347 (TRAV27, TRAJ43)
CAGANNNDMRF

SEQ ID NO: 438694 - protein, 14 aa, Homo sapiens
  CDR3 for beta chain variable domain of TCR clone 219347 (TRBV19, TRBJ2-1)
CASPTFVLSGEQFF

SEQ ID NO: 438695 - protein, 16 aa, Homo sapiens
  CDR3 for alpha chain variable domain of TCR clone 219348 (TRAV12-2, TRAJ10)
CAVNRVLTGGGNKLAF

SEQ ID NO: 438696 - protein, 14 aa, Homo sapiens
  CDR3 for beta chain variable domain of TCR clone 219348 (TRBV4-1, TRBJ2-7)
CASRLTSGSYEQYF

SEQ ID NO: 438697 - protein, 14 aa, Homo sapiens
  CDR3 for alpha chain variable domain of TCR clone 219349 (TRAV1-2, TRAJ8)
CAVREDTGFQKLVV

SEQ ID NO: 438698 - protein, 14 aa, Homo sapiens
  CDR3 for beta chain variable domain of TCR clone 219349 (TRBV7-9, TRBJ1-1)
CASTPLQSYTEAFF

SEQ ID NO: 438699 - protein, 11 aa, Homo sapiens
  CDR3 for alpha chain variable domain of TCR clone 219350 (TRAV12-1, TRAJ15)
CVVNAGTALIF

SEQ ID NO: 438700 - protein, 17 aa, Homo sapiens
  CDR3 for beta chain variable domain of TCR clone 219350 (TRBV7-3, TRBJ2-3)
CASSLMKRMRGADTQYF

SEQ ID NO: 438701 - protein, 16 aa, Homo sapiens
  CDR3 for alpha chain variable domain of TCR clone 219351 (TRAV26-2, TRAJ28)
CILRPYSGAGSYQLPF

SEQ ID NO: 438702 - protein, 17 aa, Homo sapiens
  CDR3 for beta chain variable domain of TCR clone 219351 (TRBV27, TRBJ2-5)
CASRLRPGQGVQETQYF

SEQ ID NO: 438703 - protein, 17 aa, Homo sapiens
  CDR3 for alpha chain variable domain of TCR clone 219352 (TRAV2, TRAJ26)
FATVLGPPGDYGQNFVF

SEQ ID NO: 438704 - protein, 16 aa, Homo sapiens
  CDR3 for beta chain variable domain of TCR clone 219352 (TRBV13, TRBJ2-2)
CAGSPRTGEHTGELFF

SEQ ID NO: 438705 - protein, 18 aa, Homo sapiens
  CDR3 for alpha chain variable domain of TCR clone 219353 (TRAV9-2, TRAJ52)
CALSRHNAGGTSYGKLRF

SEQ ID NO: 438706 - protein, 13 aa, Homo sapiens
  CDR3 for beta chain variable domain of TCR clone 219353 (TRBV7-9, TRBJ1-2)
CASSLKQNYGYTF

SEQ ID NO: 438707 - protein, 17 aa, Homo sapiens
  CDR3 for alpha chain variable domain of TCR clone 219354 (TRAV1-1, TRAJ3)
CLLLLRCPYSSASKIIF

SEQ ID NO: 438708 - protein, 13 aa, Homo sapiens
  CDR3 for beta chain variable domain of TCR clone 219354 (TRBV19, TRBJ2-1)
CATSRGVYNEQFF

SEQ ID NO: 438709 - protein, 23 aa, Homo sapiens
  CDR3 for alpha chain variable domain of TCR clone 219355 (TRAV27, TRAJ38)
CAARRNAGNNHIQNPAPAVYQLR

SEQ ID NO: 438710 - protein, 13 aa, Homo sapiens
  CDR3 for beta chain variable domain of TCR clone 219355 (TRBV12-5, TRBJ2-3)
CASGDRQSDTQYF

SEQ ID NO: 438711 - protein, 13 aa, Homo sapiens
  CDR3 for alpha chain variable domain of TCR clone 219356 (TRAV3, TRAJ16)
CAVRDRNGQKLLF

SEQ ID NO: 438712 - protein, 15 aa, Homo sapiens
  CDR3 for beta chain variable domain of TCR clone 219356 (TRBV5-1, TRBJ2-1)
CASSPPRAPYNEQFF

SEQ ID NO: 438713 - protein, 14 aa, Homo sapiens
  CDR3 for alpha chain variable domain of TCR clone 219357 (TRAV30, TRAJ26)
CGTEIVSYGQNFVF

SEQ ID NO: 438714 - protein, 14 aa, Homo sapiens
  CDR3 for beta chain variable domain of TCR clone 219357 (TRBV7-6, TRBJ2-3)
CASNSGGDANTQYF

SEQ ID NO: 438715 - protein, 14 aa, Homo sapiens
  CDR3 for alpha chain variable domain of TCR clone 219358 (TRAV23/DV6, TRAJ13)
CAAMYSGGYQKVTF

SEQ ID NO: 438716 - protein, 16 aa, Homo sapiens
  CDR3 for beta chain variable domain of TCR clone 219358 (TRBV2, TRBJ2-1)
CASSVGGSLSYNEQFF

SEQ ID NO: 438717 - protein, 10 aa, Homo sapiens
  CDR3 for alpha chain variable domain of TCR clone 219359 (TRAV12-3, TRAJ49)
CAMNDDQFYF

SEQ ID NO: 438718 - protein, 17 aa, Homo sapiens
  CDR3 for beta chain variable domain of TCR clone 219359 (TRBV4-1, TRBJ1-4)
CASSQEGPRGVEEKLFF

SEQ ID NO: 438719 - protein, 15 aa, Homo sapiens
  CDR3 for alpha chain variable domain of TCR clone 219360 (TRAV27, TRAJ38)
RAARRNAGNNRKLIW

SEQ ID NO: 438720 - protein, 13 aa, Homo sapiens
  CDR3 for beta chain variable domain of TCR clone 219360 (TRBV12-5, TRBJ2-3)
CASGDRQSDTQYF

SEQ ID NO: 438721 - protein, 15 aa, Homo sapiens
  CDR3 for alpha chain variable domain of TCR clone 219361 (TRAV26-1, TRAJ22)
CIVRVSFWFCKATEL

SEQ ID NO: 438722 - protein, 14 aa, Homo sapiens
  CDR3 for beta chain variable domain of TCR clone 219361 (TRBV11-2, TRBJ2-3)
CASSRLARTDTQYF

SEQ ID NO: 438723 - protein, 14 aa, Homo sapiens
  CDR3 for alpha chain variable domain of TCR clone 219362 (TRAV8-4, TRAJ9)
CAVSDRTGGFKTIF

SEQ ID NO: 438724 - protein, 13 aa, Homo sapiens
  CDR3 for beta chain variable domain of TCR clone 219362 (TRBV11-2, TRBJ2-7)
CASSLGDSYEQHF

SEQ ID NO: 438725 - protein, 16 aa, Homo sapiens
  CDR3 for alpha chain variable domain of TCR clone 219363 (TRAV21, TRAJ37)
CAVRPRGSSNTGKLNF

SEQ ID NO: 438726 - protein, 16 aa, Homo sapiens
  CDR3 for beta chain variable domain of TCR clone 219363 (TRBV4-1, TRBJ2-7)
CASSQNDRDNSYEQYF

SEQ ID NO: 438727 - protein, 14 aa, Homo sapiens
  CDR3 for alpha chain variable domain of TCR clone 219364 (TRAV12-1, TRAJ9)
CVVNIITGGFKTIF

SEQ ID NO: 438728 - protein, 13 aa, Homo sapiens
  CDR3 for beta chain variable domain of TCR clone 219364 (TRBV27, TRBJ1-4)
CASSLMGDEKLFF

SEQ ID NO: 438729 - protein, 14 aa, Homo sapiens
  CDR3 for alpha chain variable domain of TCR clone 219365 (TRAV12-1, TRAJ42)
CVVIYGGSQGNLIF

SEQ ID NO: 438730 - protein, 15 aa, Homo sapiens
  CDR3 for beta chain variable domain of TCR clone 219365 (TRBV4-3, TRBJ1-1)
CASSQGPTGNTEAFF

SEQ ID NO: 438731 - protein, 15 aa, Homo sapiens
  CDR3 for alpha chain variable domain of TCR clone 219366 (TRAV21, TRAJ53)
CATLNSGGSNYKLTF

SEQ ID NO: 438732 - protein, 15 aa, Homo sapiens
  CDR3 for beta chain variable domain of TCR clone 219366 (TRBV7-9, TRBJ2-7)
CASSLALAEAYEQYF

SEQ ID NO: 438733 - protein, 10 aa, Homo sapiens
  CDR3 for alpha chain variable domain of TCR clone 219367 (TRAV1-2, TRAJ20)
CACNDYKLSF

SEQ ID NO: 438734 - protein, 16 aa, Homo sapiens
  CDR3 for beta chain variable domain of TCR clone 219367 (TRBV20-1, TRBJ2-1)
CSARDLKQGMDNEQFF

SEQ ID NO: 438735 - protein, 11 aa, Homo sapiens
  CDR3 for alpha chain variable domain of TCR clone 219368 (TRAV21, TRAJ34)
CAVTNTDKLMF

SEQ ID NO: 438736 - protein, 16 aa, Homo sapiens
  CDR3 for beta chain variable domain of TCR clone 219368 (TRBV18, TRBJ1-1)
CASSPGVGGRGGEAFF

SEQ ID NO: 438737 - protein, 14 aa, Homo sapiens
  CDR3 for alpha chain variable domain of TCR clone 219369 (TRAV1-2, TRAJ16)
CAVNRFSDGQKLLF

SEQ ID NO: 438738 - protein, 17 aa, Homo sapiens
  CDR3 for beta chain variable domain of TCR clone 219369 (TRBV9, TRBJ1-6)
CASSVAGQGIHPSTLGT

SEQ ID NO: 438739 - protein, 16 aa, Homo sapiens
  CDR3 for alpha chain variable domain of TCR clone 219370 (TRAV3, TRAJ3)
CAVRDRAKSIASKIIF

SEQ ID NO: 438740 - protein, 16 aa, Homo sapiens
  CDR3 for beta chain variable domain of TCR clone 219370 (TRBV20-1, TRBJ2-4)
CSATSLAELAKNIQYF

SEQ ID NO: 438741 - protein, 11 aa, Homo sapiens
  CDR3 for alpha chain variable domain of TCR clone 219371 (TRAV13-1, TRAJ34)
CAAENTDKLIF

SEQ ID NO: 438742 - protein, 14 aa, Homo sapiens
  CDR3 for beta chain variable domain of TCR clone 219371 (TRBV7-9, TRBJ2-1)
CASRPTGLRNEQFF

SEQ ID NO: 438743 - protein, 16 aa, Homo sapiens
  CDR3 for alpha chain variable domain of TCR clone 219372 (TRAV3, TRAJ10)
CAVRDMRAGGGNKLTL

SEQ ID NO: 438744 - protein, 15 aa, Homo sapiens
  CDR3 for beta chain variable domain of TCR clone 219372 (TRBV7-2, TRBJ1-5)
CASSRGQGDNQPQHF

SEQ ID NO: 438745 - protein, 13 aa, Homo sapiens
  CDR3 for alpha chain variable domain of TCR clone 219373 (TRAV36/DV7, TRAJ49)
CAGNSNTGNQFYF

SEQ ID NO: 438746 - protein, 12 aa, Homo sapiens
  CDR3 for beta chain variable domain of TCR clone 219373 (TRBV11-2, TRBJ2-2)
CASSLGGGELFF

SEQ ID NO: 438747 - protein, 13 aa, Homo sapiens
  CDR3 for alpha chain variable domain of TCR clone 219374 (TRAV12-1, TRAJ11)
CVVNRAGYSTLPF

SEQ ID NO: 438748 - protein, 16 aa, Homo sapiens
  CDR3 for beta chain variable domain of TCR clone 219374 (TRBV27, TRBJ2-2)
CASSLRPGGAPGELFF

SEQ ID NO: 438749 - protein, 14 aa, Homo sapiens
  CDR3 for alpha chain variable domain of TCR clone 219375 (TRAV8-2, TRAJ4)
CVVSTSGGYNKLIF

SEQ ID NO: 438750 - protein, 15 aa, Homo sapiens
  CDR3 for beta chain variable domain of TCR clone 219375 (TRBV2, TRBJ2-1)
CASSELAGSYNEQFF

SEQ ID NO: 438751 - protein, 11 aa, Homo sapiens
  CDR3 for alpha chain variable domain of TCR clone 219376 (TRAV2, TRAJ33)
CAVESNYQLIW

SEQ ID NO: 438752 - protein, 11 aa, Homo sapiens
  CDR3 for beta chain variable domain of TCR clone 219376 (TRBV6-1, TRBJ2-1)
CASISSNEQFF

SEQ ID NO: 438753 - protein, 16 aa, Homo sapiens
  CDR3 for alpha chain variable domain of TCR clone 219377 (TRAV3, TRAJ5)
CAVRNLMDTGRRALTF

SEQ ID NO: 438754 - protein, 16 aa, Homo sapiens
  CDR3 for beta chain variable domain of TCR clone 219377 (TRBV4-2, TRBJ2-7)
CASSQEGLANSYEQYV

SEQ ID NO: 438755 - protein, 18 aa, Homo sapiens
  CDR3 for alpha chain variable domain of TCR clone 219378 (TRAV12-2, )
CAVEDIQNPDPAVYQLRD

SEQ ID NO: 438756 - protein, 14 aa, Homo sapiens
  CDR3 for beta chain variable domain of TCR clone 219378 (TRBV4-1, TRBJ2-7)
CASRLTSGSYEQYF

SEQ ID NO: 438757 - protein, 14 aa, Homo sapiens
  CDR3 for alpha chain variable domain of TCR clone 219379 (TRAV25, TRAJ53)
CAGPPGGSNYKLTF

SEQ ID NO: 438758 - protein, 12 aa, Homo sapiens
  CDR3 for beta chain variable domain of TCR clone 219379 (TRBV2, TRBJ2-1)
CAKREGYNEQFF

SEQ ID NO: 438759 - protein, 11 aa, Homo sapiens
  CDR3 for alpha chain variable domain of TCR clone 219380 (TRAV2, TRAJ13)
CASGGYQKVTL

SEQ ID NO: 438760 - protein, 15 aa, Homo sapiens
  CDR3 for beta chain variable domain of TCR clone 219380 (TRBV11-2, TRBJ2-2)
CASSPSGGGTGELFF

SEQ ID NO: 438761 - protein, 11 aa, Homo sapiens
  CDR3 for alpha chain variable domain of TCR clone 219381 (TRAV13-2, TRAJ23)
CRASQGRKLIF

SEQ ID NO: 438762 - protein, 14 aa, Homo sapiens
  CDR3 for beta chain variable domain of TCR clone 219381 (TRBV2, TRBJ2-7)
CASSLTSGGYEQYF

SEQ ID NO: 438763 - protein, 14 aa, Homo sapiens
  CDR3 for alpha chain variable domain of TCR clone 219382 (TRAV12-1, TRAJ22)
CVVTTSGSARQLTF

SEQ ID NO: 438764 - protein, 13 aa, Homo sapiens
  CDR3 for beta chain variable domain of TCR clone 219382 (TRBV12-5, TRBJ2-3)
CASGDRQSDTQYF

SEQ ID NO: 438765 - protein, 15 aa, Homo sapiens
  CDR3 for alpha chain variable domain of TCR clone 219383 (TRAV8-3, TRAJ45)
CASSCSGGGADGLTF

SEQ ID NO: 438766 - protein, 13 aa, Homo sapiens
  CDR3 for beta chain variable domain of TCR clone 219383 (TRBV10-3, TRBJ2-7)
CASTLAVNYEQYF

SEQ ID NO: 438767 - protein, 14 aa, Homo sapiens
  CDR3 for alpha chain variable domain of TCR clone 219384 (TRAV38-1, TRAJ40)
CALRPTSGTYKYIF

SEQ ID NO: 438768 - protein, 16 aa, Homo sapiens
  CDR3 for beta chain variable domain of TCR clone 219384 (TRBV5-1, TRBJ1-1)
CASSSGGNSLNTEAFF

SEQ ID NO: 438769 - protein, 15 aa, Homo sapiens
  CDR3 for alpha chain variable domain of TCR clone 219385 (TRAV3, TRAJ22)
CAVRDRGGSARQLTF

SEQ ID NO: 438770 - protein, 16 aa, Homo sapiens
  CDR3 for beta chain variable domain of TCR clone 219385 (TRBV11-2, TRBJ2-1)
CASARSSYSHHNEQFF

SEQ ID NO: 438771 - protein, 15 aa, Homo sapiens
  CDR3 for alpha chain variable domain of TCR clone 219386 (TRAV20, TRAJ58)
CAVQDLETSGSRVTF

SEQ ID NO: 438772 - protein, 12 aa, Homo sapiens
  CDR3 for beta chain variable domain of TCR clone 219386 (TRBV9, TRBJ2-2)
CASSARTGELFF

SEQ ID NO: 438773 - protein, 16 aa, Homo sapiens
  CDR3 for alpha chain variable domain of TCR clone 219387 (TRAV12-2, TRAJ28)
CAVITGSGAGSYQLTF

SEQ ID NO: 438774 - protein, 14 aa, Homo sapiens
  CDR3 for beta chain variable domain of TCR clone 219387 (TRBV25-1, TRBJ1-1)
CASTHLGGNTEAFF

SEQ ID NO: 438775 - protein, 13 aa, Homo sapiens
  CDR3 for alpha chain variable domain of TCR clone 219388 (TRAV20, TRAJ37)
CAGCSSNTGKLIF

SEQ ID NO: 438776 - protein, 21 aa, Homo sapiens
  CDR3 for beta chain variable domain of TCR clone 219388 (TRBV4-2, TRBJ2-3)
PCSQKTRPCISVPPAPDTHYF

SEQ ID NO: 438777 - protein, 18 aa, Homo sapiens
  CDR3 for alpha chain variable domain of TCR clone 219389 (TRAV12-2, )
CAVEDIQDPDPAVYQLRD

SEQ ID NO: 438778 - protein, 18 aa, Homo sapiens
  CDR3 for beta chain variable domain of TCR clone 219389 (TRBV11-2, TRBJ2-3)
CASSLGGASRGAPNTQYF

SEQ ID NO: 438779 - protein, 15 aa, Homo sapiens
  CDR3 for alpha chain variable domain of TCR clone 219390 (TRAV13-2, TRAJ5)
CAENPHWTGRRALTF

SEQ ID NO: 438780 - protein, 16 aa, Homo sapiens
  CDR3 for beta chain variable domain of TCR clone 219390 (TRBV7-9, TRBJ1-3)
CASSQTSGLRMGNIYF

SEQ ID NO: 438781 - protein, 17 aa, Homo sapiens
  CDR3 for alpha chain variable domain of TCR clone 219391 (TRAV26-1, TRAJ47)
CIVPSLLYMEYGNKLVF

SEQ ID NO: 438782 - protein, 13 aa, Homo sapiens
  CDR3 for beta chain variable domain of TCR clone 219391 (TRBV7-7, TRBJ2-2)
CASSLTSAGELFF

SEQ ID NO: 438783 - protein, 11 aa, Homo sapiens
  CDR3 for alpha chain variable domain of TCR clone 219392 (TRAV12-3, TRAJ16)
LTGGDGQKMLF

SEQ ID NO: 438784 - protein, 13 aa, Homo sapiens
  CDR3 for beta chain variable domain of TCR clone 219392 (TRBV12-4, TRBJ1-4)
CASAMGHNEKLFF

SEQ ID NO: 438785 - protein, 14 aa, Homo sapiens
  CDR3 for alpha chain variable domain of TCR clone 219393 (TRAV26-1, TRAJ38)
CIADNAGNNRKMIW

SEQ ID NO: 438786 - protein, 13 aa, Homo sapiens
  CDR3 for beta chain variable domain of TCR clone 219393 (TRBV20-1, TRBJ1-1)
CSARGGGNTEAFF

SEQ ID NO: 438787 - protein, 12 aa, Homo sapiens
  CDR3 for alpha chain variable domain of TCR clone 219394 (TRAV12-1, TRAJ16)
CVVFRDGQKLLF

SEQ ID NO: 438788 - protein, 16 aa, Homo sapiens
  CDR3 for beta chain variable domain of TCR clone 219394 (TRBV7-3, TRBJ2-2)
CASSLKRGTLSGELFF

SEQ ID NO: 438789 - protein, 16 aa, Homo sapiens
  CDR3 for alpha chain variable domain of TCR clone 219395 (TRAV13-1, TRAJ45)
CAAIFYSGGGADGLTF

SEQ ID NO: 438790 - protein, 17 aa, Homo sapiens
  CDR3 for beta chain variable domain of TCR clone 219395 (TRBV11-2, TRBJ2-1)
CASSLYPPGVEYNEQFF

SEQ ID NO: 438791 - protein, 13 aa, Homo sapiens
  CDR3 for alpha chain variable domain of TCR clone 219396 (TRAV8-3, TRAJ44)
CAVVPGTASKLTF

SEQ ID NO: 438792 - protein, 13 aa, Homo sapiens
  CDR3 for beta chain variable domain of TCR clone 219396 (TRBV20-1, TRBJ1-1)
CSARVGGNTEAFF

SEQ ID NO: 438793 - protein, 15 aa, Homo sapiens
  CDR3 for alpha chain variable domain of TCR clone 219397 (TRAV13-2, TRAJ50)
CAEEPLKTSYDKVIF

SEQ ID NO: 438794 - protein, 13 aa, Homo sapiens
  CDR3 for beta chain variable domain of TCR clone 219397 (TRBV7-6, TRBJ1-2)
CASSLVADYGYTF

SEQ ID NO: 438795 - protein, 15 aa, Homo sapiens
  CDR3 for alpha chain variable domain of TCR clone 219398 (TRAV21, TRAJ32)
CAAAPYGGATNKLIF

SEQ ID NO: 438796 - protein, 17 aa, Homo sapiens
  CDR3 for beta chain variable domain of TCR clone 219398 (TRBV18, TRBJ2-3)
CASPPFGDGGFTDTQYF

SEQ ID NO: 438797 - protein, 13 aa, Homo sapiens
  CDR3 for alpha chain variable domain of TCR clone 219399 (TRAV12-3, TRAJ33)
CAMSVNSNYQLIW

SEQ ID NO: 438798 - protein, 12 aa, Homo sapiens
  CDR3 for beta chain variable domain of TCR clone 219399 (TRBV4-1, TRBJ2-2)
RQQPREHRELFF

SEQ ID NO: 438799 - protein, 14 aa, Homo sapiens
  CDR3 for alpha chain variable domain of TCR clone 219400 (TRAV26-1, TRAJ38)
CIADNAGHNRKLIW

SEQ ID NO: 438800 - protein, 17 aa, Homo sapiens
  CDR3 for beta chain variable domain of TCR clone 219400 (TRBV20-1, TRBJ2-2)
CSASGSGQGGLTGELFF

SEQ ID NO: 438801 - protein, 15 aa, Homo sapiens
  CDR3 for alpha chain variable domain of TCR clone 219401 (TRAV26-1, TRAJ39)
CIVRVASNAGNLLTF

SEQ ID NO: 438802 - protein, 14 aa, Homo sapiens
  CDR3 for beta chain variable domain of TCR clone 219401 (TRBV7-6, TRBJ2-3)
CASSVAGGTDTQYF

SEQ ID NO: 438803 - protein, 14 aa, Homo sapiens
  CDR3 for alpha chain variable domain of TCR clone 219402 (TRAV36/DV7, TRAJ37)
CAVVVWSNTGKLIF

SEQ ID NO: 438804 - protein, 15 aa, Homo sapiens
  CDR3 for beta chain variable domain of TCR clone 219402 (TRBV7-2, TRBJ2-2)
CASRRPGQNTGELFF

SEQ ID NO: 438805 - protein, 14 aa, Homo sapiens
  CDR3 for alpha chain variable domain of TCR clone 219403 (TRAV12-2, TRAJ17)
CAALFKAAGNKLTF

SEQ ID NO: 438806 - protein, 14 aa, Homo sapiens
  CDR3 for beta chain variable domain of TCR clone 219403 (TRBV4-1, TRBJ2-2)
CASSQAVNTGELFF

SEQ ID NO: 438807 - protein, 14 aa, Homo sapiens
  CDR3 for alpha chain variable domain of TCR clone 219404 (TRAV21, TRAJ58)
CAVGEETSGSRLTF

SEQ ID NO: 438808 - protein, 14 aa, Homo sapiens
  CDR3 for beta chain variable domain of TCR clone 219404 (TRBV5-7, TRBJ2-7)
CASSGGLSSYEQYF

SEQ ID NO: 438809 - protein, 12 aa, Homo sapiens
  CDR3 for alpha chain variable domain of TCR clone 219405 (TRAV2, TRAJ5)
CALATGRRALTF

SEQ ID NO: 438810 - protein, 15 aa, Homo sapiens
  CDR3 for beta chain variable domain of TCR clone 219405 (TRBV10-3, TRBJ2-1)
CAISDVQDRAYEQFF

SEQ ID NO: 438811 - protein, 13 aa, Homo sapiens
  CDR3 for alpha chain variable domain of TCR clone 219406 (TRAV8-3, TRAJ20)
CAVVRPNDYMLSF

SEQ ID NO: 438812 - protein, 14 aa, Homo sapiens
  CDR3 for beta chain variable domain of TCR clone 219406 (TRBV12-5, TRBJ2-5)
CASGSRTHQETQYF

SEQ ID NO: 438813 - protein, 12 aa, Homo sapiens
  CDR3 for alpha chain variable domain of TCR clone 219407 (TRAV13-1, TRAJ17)
CSARTAGNKLTF

SEQ ID NO: 438814 - protein, 15 aa, Homo sapiens
  CDR3 for beta chain variable domain of TCR clone 219407 (TRBV7-6, TRBJ1-1)
CASSPQGGANTEAFL

SEQ ID NO: 438815 - protein, 17 aa, Homo sapiens
  CDR3 for alpha chain variable domain of TCR clone 219408 (TRAV29/DV5, TRAJ40)
CSASVIYTTSGTYKYIF

SEQ ID NO: 438816 - protein, 13 aa, Homo sapiens
  CDR3 for beta chain variable domain of TCR clone 219408 (TRBV6-1, TRBJ2-1)
CASSHDRNNEQFF

SEQ ID NO: 438817 - protein, 14 aa, Homo sapiens
  CDR3 for alpha chain variable domain of TCR clone 219409 (TRAV12-2, TRAJ33)
CAVDYPDSNYQLIW

SEQ ID NO: 438818 - protein, 16 aa, Homo sapiens
  CDR3 for beta chain variable domain of TCR clone 219409 (TRBV2, TRBJ2-4)
CASSEAPGGEQNIQYF

SEQ ID NO: 438819 - protein, 14 aa, Homo sapiens
  CDR3 for alpha chain variable domain of TCR clone 219410 (TRAV12-2, TRAJ17)
CAVLFKAAGNKLTF

SEQ ID NO: 438820 - protein, 12 aa, Homo sapiens
  CDR3 for beta chain variable domain of TCR clone 219410 (TRBV11-2, TRBJ2-2)
CASSRGGGELFF

SEQ ID NO: 438821 - protein, 14 aa, Homo sapiens
  CDR3 for alpha chain variable domain of TCR clone 219411 (TRAV1-2, TRAJ8)
CAVREDTAFQKLVF

SEQ ID NO: 438822 - protein, 13 aa, Homo sapiens
  CDR3 for beta chain variable domain of TCR clone 219411 (TRBV4-1, TRBJ2-2)
CASSQENTGELFF

SEQ ID NO: 438823 - protein, 14 aa, Homo sapiens
  CDR3 for alpha chain variable domain of TCR clone 219412 (TRAV26-1, TRAJ45)
CIEVTGGGADGLTF

SEQ ID NO: 438824 - protein, 12 aa, Homo sapiens
  CDR3 for beta chain variable domain of TCR clone 219412 (TRBV7-9, TRBJ1-4)
CASSTDREKLFF

SEQ ID NO: 438825 - protein, 15 aa, Homo sapiens
  CDR3 for alpha chain variable domain of TCR clone 219413 (TRAV21, TRAJ48)
FAVPITNFGNEKLTF

SEQ ID NO: 438826 - protein, 16 aa, Homo sapiens
  CDR3 for beta chain variable domain of TCR clone 219413 (TRBV5-7, TRBJ2-7)
CASSLAPSVLNYEQYF

SEQ ID NO: 438827 - protein, 14 aa, Homo sapiens
  CDR3 for alpha chain variable domain of TCR clone 219414 (TRAV8-4, TRAJ9)
CAVRINTGGFKTIF

SEQ ID NO: 438828 - protein, 15 aa, Homo sapiens
  CDR3 for beta chain variable domain of TCR clone 219414 (TRBV10-2, TRBJ2-6)
CASSEQGSGANVLTF

SEQ ID NO: 438829 - protein, 12 aa, Homo sapiens
  CDR3 for alpha chain variable domain of TCR clone 219415 (TRAV2, TRAJ26)
CAGSPGRPWSEF

SEQ ID NO: 438830 - protein, 13 aa, Homo sapiens
  CDR3 for beta chain variable domain of TCR clone 219415 (TRBV7-9, TRBJ1-2)
CASSLKQNYGYTF

SEQ ID NO: 438831 - protein, 12 aa, Homo sapiens
  CDR3 for alpha chain variable domain of TCR clone 219416 (TRAV22, TRAJ43)
CAVELNNNDMRF

SEQ ID NO: 438832 - protein, 14 aa, Homo sapiens
  CDR3 for beta chain variable domain of TCR clone 219416 (TRBV10-3, TRBJ2-5)
CAIRTSGGQETQYF

SEQ ID NO: 438833 - protein, 16 aa, Homo sapiens
  CDR3 for alpha chain variable domain of TCR clone 219417 (TRAV21, TRAJ52)
CALTNAGGTSYGKLTF

SEQ ID NO: 438834 - protein, 16 aa, Homo sapiens
  CDR3 for beta chain variable domain of TCR clone 219417 (TRBV2, TRBJ2-1)
CASSVGGSLSYNEQFF

SEQ ID NO: 438835 - protein, 16 aa, Homo sapiens
  CDR3 for alpha chain variable domain of TCR clone 219418 (TRAV3, TRAJ10)
CAVRDMRAGGGNNLTS

SEQ ID NO: 438836 - protein, 19 aa, Homo sapiens
  CDR3 for beta chain variable domain of TCR clone 219418 (TRBV6-3, TRBJ1-2)
CASSYSRGRTGPPNYGYTF

SEQ ID NO: 438837 - protein, 15 aa, Homo sapiens
  CDR3 for alpha chain variable domain of TCR clone 219419 (TRAV27, TRAJ38)
CAARRNAGNTRKLLL

SEQ ID NO: 438838 - protein, 13 aa, Homo sapiens
  CDR3 for beta chain variable domain of TCR clone 219419 (TRBV12-5, TRBJ2-3)
CASGDRQSDTQYF

SEQ ID NO: 438839 - protein, 13 aa, Homo sapiens
  CDR3 for alpha chain variable domain of TCR clone 219420 (TRAV13-1, TRAJ21)
CAASIYNFNKFYF

SEQ ID NO: 438840 - protein, 13 aa, Homo sapiens
  CDR3 for beta chain variable domain of TCR clone 219420 (TRBV12-4, TRBJ2-7)
CASSPTETYEQYF

SEQ ID NO: 438841 - protein, 15 aa, Homo sapiens
  CDR3 for alpha chain variable domain of TCR clone 219421 (TRAV20, TRAJ23)
CAVQAVRNQGGKLIF

SEQ ID NO: 438842 - protein, 16 aa, Homo sapiens
  CDR3 for beta chain variable domain of TCR clone 219421 (TRBV27, TRBJ2-7)
RASSKQGRGWAYEQYF

SEQ ID NO: 438843 - protein, 12 aa, Homo sapiens
  CDR3 for alpha chain variable domain of TCR clone 219422 (TRAV14/DV4, TRAJ11)
CAMSLYDSTLTF

SEQ ID NO: 438844 - protein, 14 aa, Homo sapiens
  CDR3 for beta chain variable domain of TCR clone 219422 (TRBV7-2, TRBJ2-6)
CASRQSAGANVLTF

SEQ ID NO: 438845 - protein, 15 aa, Homo sapiens
  CDR3 for alpha chain variable domain of TCR clone 219423 (TRAV13-1, TRAJ5)
CAASPRGHGQESTYF

SEQ ID NO: 438846 - protein, 15 aa, Homo sapiens
  CDR3 for beta chain variable domain of TCR clone 219423 (TRBV6-5, TRBJ2-1)
CASSYDAGAGNEQCF

SEQ ID NO: 438847 - protein, 14 aa, Homo sapiens
  CDR3 for alpha chain variable domain of TCR clone 219424 (TRAV26-1, TRAJ57)
CIRAGQGGYEKLVF

SEQ ID NO: 438848 - protein, 13 aa, Homo sapiens
  CDR3 for beta chain variable domain of TCR clone 219424 (TRBV19, TRBJ2-7)
CASSLTTSYEQYF

SEQ ID NO: 438849 - protein, 17 aa, Homo sapiens
  CDR3 for alpha chain variable domain of TCR clone 219425 (TRAV29/DV5, TRAJ52)
CAATSTADGTSDGKLTF

SEQ ID NO: 438850 - protein, 15 aa, Homo sapiens
  CDR3 for beta chain variable domain of TCR clone 219425 (TRBV3-1, TRBJ2-7)
CASSQEWTGAYEQYF

SEQ ID NO: 438851 - protein, 16 aa, Homo sapiens
  CDR3 for alpha chain variable domain of TCR clone 219426 (TRAV30, TRAJ24)
CGTDIVDADSWGKFQF

SEQ ID NO: 438852 - protein, 17 aa, Homo sapiens
  CDR3 for beta chain variable domain of TCR clone 219426 (TRBV20-1, TRBJ2-1)
CSARDPLAGVWDNEQFF

SEQ ID NO: 438853 - protein, 13 aa, Homo sapiens
  CDR3 for alpha chain variable domain of TCR clone 219427 (TRAV27, TRAJ45)
CRSAGGGADGLTF

SEQ ID NO: 438854 - protein, 16 aa, Homo sapiens
  CDR3 for beta chain variable domain of TCR clone 219427 (TRBV7-3, TRBJ2-2)
CASSLKRGTLSGELFF

SEQ ID NO: 438855 - protein, 14 aa, Homo sapiens
  CDR3 for alpha chain variable domain of TCR clone 219428 (TRAV1-2, TRAJ8)
CAVIEDTGFQKLVF

SEQ ID NO: 438856 - protein, 16 aa, Homo sapiens
  CDR3 for beta chain variable domain of TCR clone 219428 (TRBV12-4, TRBJ1-5)
CASSRPVGGSNQPQHF

SEQ ID NO: 438857 - protein, 17 aa, Homo sapiens
  CDR3 for alpha chain variable domain of TCR clone 219429 (TRAV3, TRAJ6)
CAVSDGPRAGGSYIPTF

SEQ ID NO: 438858 - protein, 14 aa, Homo sapiens
  CDR3 for beta chain variable domain of TCR clone 219429 (TRBV20-1, TRBJ1-1)
CSAQTRIGGTEAFF

SEQ ID NO: 438859 - protein, 13 aa, Homo sapiens
  CDR3 for alpha chain variable domain of TCR clone 219430 (TRAV27, TRAJ41)
CAGEGNSGYALNF

SEQ ID NO: 438860 - protein, 13 aa, Homo sapiens
  CDR3 for beta chain variable domain of TCR clone 219430 (TRBV7-2, TRBJ1-1)
CQQLLTGTTEAFF

SEQ ID NO: 438861 - protein, 14 aa, Homo sapiens
  CDR3 for alpha chain variable domain of TCR clone 219431 (TRAV12-3, TRAJ43)
CAMSLGGAGTRLTG

SEQ ID NO: 438862 - protein, 14 aa, Homo sapiens
  CDR3 for beta chain variable domain of TCR clone 219431 (TRBV7-9, TRBJ2-7)
CASSPRTGTYEQYF

SEQ ID NO: 438863 - protein, 14 aa, Homo sapiens
  CDR3 for alpha chain variable domain of TCR clone 219432 (TRAV29/DV5, TRAJ20)
CEASAPIEDYKLSF

SEQ ID NO: 438864 - protein, 15 aa, Homo sapiens
  CDR3 for beta chain variable domain of TCR clone 219432 (TRBV10-2, TRBJ2-6)
CASSEQGTGANVLTF

SEQ ID NO: 438865 - protein, 15 aa, Homo sapiens
  CDR3 for alpha chain variable domain of TCR clone 219433 (TRAV3, TRAJ5)
CAVRDLDTGRRALNF

SEQ ID NO: 438866 - protein, 13 aa, Homo sapiens
  CDR3 for beta chain variable domain of TCR clone 219433 (TRBV12-4, TRBJ2-7)
CASSPTETYAQYF

SEQ ID NO: 438867 - protein, 13 aa, Homo sapiens
  CDR3 for alpha chain variable domain of TCR clone 219434 (TRAV35, TRAJ43)
CSGHPYNNNDMRF

SEQ ID NO: 438868 - protein, 15 aa, Homo sapiens
  CDR3 for beta chain variable domain of TCR clone 219434 (TRBV25-1, TRBJ1-4)
CASSKRIATNEKLFF

SEQ ID NO: 438869 - protein, 14 aa, Homo sapiens
  CDR3 for alpha chain variable domain of TCR clone 219435 (TRAV12-1, TRAJ17)
CVVNYKAAGNRLPF

SEQ ID NO: 438870 - protein, 17 aa, Homo sapiens
  CDR3 for beta chain variable domain of TCR clone 219435 (TRBV20-1, TRBJ2-1)
CSASSSGLAGSYNEQFF

SEQ ID NO: 438871 - protein, 14 aa, Homo sapiens
  CDR3 for alpha chain variable domain of TCR clone 219436 (TRAV8-3, TRAJ23)
CAVIIYNQGGKLIF

SEQ ID NO: 438872 - protein, 15 aa, Homo sapiens
  CDR3 for beta chain variable domain of TCR clone 219436 (TRBV18, TRBJ2-1)
CASSPPCASYNEQFF

SEQ ID NO: 438873 - protein, 17 aa, Homo sapiens
  CDR3 for alpha chain variable domain of TCR clone 219437 (TRAV3, TRAJ6)
CAVRDGPRAGGSYIPTF

SEQ ID NO: 438874 - protein, 14 aa, Homo sapiens
  CDR3 for beta chain variable domain of TCR clone 219437 (TRBV7-2, TRBJ2-7)
CASSPTTGSYEQYF

SEQ ID NO: 438875 - protein, 13 aa, Homo sapiens
  CDR3 for alpha chain variable domain of TCR clone 219438 (TRAV1-1, TRAJ23)
CAVVANQGGKLIF

SEQ ID NO: 438876 - protein, 15 aa, Homo sapiens
  CDR3 for beta chain variable domain of TCR clone 219438 (TRBV7-2, TRBJ2-1)
CASSSGLAGGNEQFF

SEQ ID NO: 438877 - protein, 16 aa, Homo sapiens
  CDR3 for alpha chain variable domain of TCR clone 219439 (TRAV8-6, TRAJ22)
CAVSPISSGSAGQLTF

SEQ ID NO: 438878 - protein, 14 aa, Homo sapiens
  CDR3 for beta chain variable domain of TCR clone 219439 (TRBV2, TRBJ2-1)
CASSARAAYNEQFF

SEQ ID NO: 438879 - protein, 12 aa, Homo sapiens
  CDR3 for alpha chain variable domain of TCR clone 219440 (TRAV29/DV5, TRAJ15)
CASNQAGTALIF

SEQ ID NO: 438880 - protein, 18 aa, Homo sapiens
  CDR3 for beta chain variable domain of TCR clone 219440 (TRBV11-2, TRBJ2-3)
CASSLGGASRGAPNTQYF

SEQ ID NO: 438881 - protein, 14 aa, Homo sapiens
  CDR3 for alpha chain variable domain of TCR clone 219441 (TRAV12-2, TRAJ40)
CAVKIPSGTYKYIF

SEQ ID NO: 438882 - protein, 13 aa, Homo sapiens
  CDR3 for beta chain variable domain of TCR clone 219441 (TRBV11-2, TRBJ2-1)
CASSSEAYNEQFF

SEQ ID NO: 438883 - protein, 15 aa, Homo sapiens
  CDR3 for alpha chain variable domain of TCR clone 219442 (TRAV26-1, TRAJ38)
CIVRAEGGKNRKLIW

SEQ ID NO: 438884 - protein, 14 aa, Homo sapiens
  CDR3 for beta chain variable domain of TCR clone 219442 (TRBV7-6, TRBJ2-5)
CASSSPSGSETQYF

SEQ ID NO: 438885 - protein, 22 aa, Homo sapiens
  CDR3 for alpha chain variable domain of TCR clone 219443 (TRAV27, )
CAVRTQIPDIQNPDPAVSQLRA

SEQ ID NO: 438886 - protein, 16 aa, Homo sapiens
  CDR3 for beta chain variable domain of TCR clone 219443 (TRBV5-1, TRBJ2-3)
CASSLGLAVYTDTQYF

SEQ ID NO: 438887 - protein, 13 aa, Homo sapiens
  CDR3 for alpha chain variable domain of TCR clone 219444 (TRAV12-1, TRAJ12)
CVTRMDSSYKLIF

SEQ ID NO: 438888 - protein, 13 aa, Homo sapiens
  CDR3 for beta chain variable domain of TCR clone 219444 (TRBV20-1, TRBJ1-1)
CSARGGGKTETFF

SEQ ID NO: 438889 - protein, 13 aa, Homo sapiens
  CDR3 for alpha chain variable domain of TCR clone 219445 (TRAV27, TRAJ49)
CAPRPYNGNQFCF

SEQ ID NO: 438890 - protein, 16 aa, Homo sapiens
  CDR3 for beta chain variable domain of TCR clone 219445 (TRBV4-1, TRBJ1-2)
CASSQDAGQVLYGYTF

SEQ ID NO: 438891 - protein, 20 aa, Homo sapiens
  CDR3 for alpha chain variable domain of TCR clone 219446 (TRAV12-1, TRAJ42)
SSVIQPPTSVKGGSQGNLIF

SEQ ID NO: 438892 - protein, 18 aa, Homo sapiens
  CDR3 for beta chain variable domain of TCR clone 219446 (TRBV7-2, TRBJ2-3)
CAGSLETSRGRKADTQYF

SEQ ID NO: 438893 - protein, 22 aa, Homo sapiens
  CDR3 for alpha chain variable domain of TCR clone 219447 (TRAV8-2, TRAJ45)
HLTKPSAHMSDAAEYSADGLTF

SEQ ID NO: 438894 - protein, 15 aa, Homo sapiens
  CDR3 for beta chain variable domain of TCR clone 219447 (TRBV2, TRBJ2-7)
CASSEGLARSYEQYF

SEQ ID NO: 438895 - protein, 10 aa, Homo sapiens
  CDR3 for alpha chain variable domain of TCR clone 219448 (TRAV2, TRAJ34)
CAVVNDKLIF

SEQ ID NO: 438896 - protein, 12 aa, Homo sapiens
  CDR3 for beta chain variable domain of TCR clone 219448 (TRBV7-8, TRBJ2-7)
CASSLGYREQYF

SEQ ID NO: 438897 - protein, 15 aa, Homo sapiens
  CDR3 for alpha chain variable domain of TCR clone 219449 (TRAV17, TRAJ57)
CATGPSQGGSENRVF

SEQ ID NO: 438898 - protein, 16 aa, Homo sapiens
  CDR3 for beta chain variable domain of TCR clone 219449 (TRBV12-4, TRBJ1-5)
CASSRPVGGSNQPQHF

SEQ ID NO: 438899 - protein, 15 aa, Homo sapiens
  CDR3 for alpha chain variable domain of TCR clone 219450 (TRAV17, TRAJ57)
CATGPSQGGSEKRVF

SEQ ID NO: 438900 - protein, 13 aa, Homo sapiens
  CDR3 for beta chain variable domain of TCR clone 219450 (TRBV6-5, TRBJ2-5)
CASSPQGGETQYF

SEQ ID NO: 438901 - protein, 12 aa, Homo sapiens
  CDR3 for alpha chain variable domain of TCR clone 219451 (TRAV12-3, TRAJ40)
CAMSTGTYKYVF

SEQ ID NO: 438902 - protein, 15 aa, Homo sapiens
  CDR3 for beta chain variable domain of TCR clone 219451 (TRBV11-2, TRBJ2-3)
CASSPRSGGTDTQYF

SEQ ID NO: 438903 - protein, 13 aa, Homo sapiens
  CDR3 for alpha chain variable domain of TCR clone 219452 (TRAV27, TRAJ41)
CAGEGNSGYALNF

SEQ ID NO: 438904 - protein, 16 aa, Homo sapiens
  CDR3 for beta chain variable domain of TCR clone 219452 (TRBV19, TRBJ2-2)
CASRSPGTGATGEMFF

SEQ ID NO: 438905 - protein, 16 aa, Homo sapiens
  CDR3 for alpha chain variable domain of TCR clone 219453 (TRAV30, TRAJ24)
CGTEIVDADSWGNFQF

SEQ ID NO: 438906 - protein, 14 aa, Homo sapiens
  CDR3 for beta chain variable domain of TCR clone 219453 (TRBV9, TRBJ2-4)
CASSPSGTSGLQYF

SEQ ID NO: 438907 - protein, 14 aa, Homo sapiens
  CDR3 for alpha chain variable domain of TCR clone 219454 (TRAV12-2, TRAJ36)
CAVKITTGANNLFF

SEQ ID NO: 438908 - protein, 14 aa, Homo sapiens
  CDR3 for beta chain variable domain of TCR clone 219454 (TRBV20-1, TRBJ2-3)
CSARGGTSTDTQYF

SEQ ID NO: 438909 - protein, 13 aa, Homo sapiens
  CDR3 for alpha chain variable domain of TCR clone 219455 (TRAV3, TRAJ27)
CAFRPLGEVKSTF

SEQ ID NO: 438910 - protein, 13 aa, Homo sapiens
  CDR3 for beta chain variable domain of TCR clone 219455 (TRBV7-9, TRBJ2-3)
CASSPGSTDTQYF

SEQ ID NO: 438911 - protein, 12 aa, Homo sapiens
  CDR3 for alpha chain variable domain of TCR clone 219456 (TRAV13-2, TRAJ23)
CAERHGGGKLIF

SEQ ID NO: 438912 - protein, 13 aa, Homo sapiens
  CDR3 for beta chain variable domain of TCR clone 219456 (TRBV7-9, TRBJ1-2)
CASSLKQNYGYTF

SEQ ID NO: 438913 - protein, 13 aa, Homo sapiens
  CDR3 for alpha chain variable domain of TCR clone 219457 (TRAV12-1, TRAJ6)
CVVFPGGSYIPTF

SEQ ID NO: 438914 - protein, 13 aa, Homo sapiens
  CDR3 for beta chain variable domain of TCR clone 219457 (TRBV7-9, TRBJ1-2)
CASSLKQNYGYTS

SEQ ID NO: 438915 - protein, 14 aa, Homo sapiens
  CDR3 for alpha chain variable domain of TCR clone 219458 (TRAV12-1, TRAJ12)
CVVTRMDSSYKLIF

SEQ ID NO: 438916 - protein, 13 aa, Homo sapiens
  CDR3 for beta chain variable domain of TCR clone 219458 (TRBV20-1, TRBJ1-1)
CSARGGWNTEAFF

SEQ ID NO: 438917 - protein, 13 aa, Homo sapiens
  CDR3 for alpha chain variable domain of TCR clone 219459 (TRAV20, TRAJ21)
CAVEGYNFNKFYF

SEQ ID NO: 438918 - protein, 15 aa, Homo sapiens
  CDR3 for beta chain variable domain of TCR clone 219459 (TRBV5-7, TRBJ1-2)
CASSLGVAANYGYTF

SEQ ID NO: 438919 - protein, 17 aa, Homo sapiens
  CDR3 for alpha chain variable domain of TCR clone 219460 (TRAV12-2, TRAJ6)
CAPQGPPRTGGSYITTF

SEQ ID NO: 438920 - protein, 16 aa, Homo sapiens
  CDR3 for beta chain variable domain of TCR clone 219460 (TRBV19, TRBJ2-2)
CASSTARASNTGELFF

SEQ ID NO: 438921 - protein, 16 aa, Homo sapiens
  CDR3 for alpha chain variable domain of TCR clone 219461 (TRAV8-3, TRAJ13)
CAVGAYLSGGYQKVTF

SEQ ID NO: 438922 - protein, 14 aa, Homo sapiens
  CDR3 for beta chain variable domain of TCR clone 219461 (TRBV18, TRBJ2-5)
CASSPRASSETQYF

SEQ ID NO: 438923 - protein, 14 aa, Homo sapiens
  CDR3 for alpha chain variable domain of TCR clone 219462 (TRAV2, TRAJ9)
WAVEDRSGGFKTIF

SEQ ID NO: 438924 - protein, 17 aa, Homo sapiens
  CDR3 for beta chain variable domain of TCR clone 219462 (TRBV24-1, TRBJ2-1)
CATSDVSTSGTYNEQFF

SEQ ID NO: 438925 - protein, 15 aa, Homo sapiens
  CDR3 for alpha chain variable domain of TCR clone 219463 (TRAV17, TRAJ57)
CATGPSQGGAEKLVF

SEQ ID NO: 438926 - protein, 16 aa, Homo sapiens
  CDR3 for beta chain variable domain of TCR clone 219463 (TRBV12-4, TRBJ1-5)
CASSRPVGGSNQSQHF

SEQ ID NO: 438927 - protein, 14 aa, Homo sapiens
  CDR3 for alpha chain variable domain of TCR clone 219464 (TRAV12-2, TRAJ17)
CAVLFKAAGNKLTF

SEQ ID NO: 438928 - protein, 14 aa, Homo sapiens
  CDR3 for beta chain variable domain of TCR clone 219464 (TRBV19, TRBJ2-1)
CASPTFVLSGEQLF

SEQ ID NO: 438929 - protein, 13 aa, Homo sapiens
  CDR3 for alpha chain variable domain of TCR clone 219465 (TRAV2, TRAJ40)
CAVVTSGTYKYIF

SEQ ID NO: 438930 - protein, 16 aa, Homo sapiens
  CDR3 for beta chain variable domain of TCR clone 219465 (TRBV29-1, TRBJ1-2)
CSVEANRDIANYGYTC

SEQ ID NO: 438931 - protein, 13 aa, Homo sapiens
  CDR3 for alpha chain variable domain of TCR clone 219466 (TRAV1-1, TRAJ9)
CAAKNTGAFKTIF

SEQ ID NO: 438932 - protein, 14 aa, Homo sapiens
  CDR3 for beta chain variable domain of TCR clone 219466 (TRBV20-1, TRBJ2-1)
CSAQIGGSANEQFF

SEQ ID NO: 438933 - protein, 18 aa, Homo sapiens
  CDR3 for alpha chain variable domain of TCR clone 219467 (TRAV12-2, TRAJ52)
CAVNGLRAGGTSYGKLTF

SEQ ID NO: 438934 - protein, 15 aa, Homo sapiens
  CDR3 for beta chain variable domain of TCR clone 219467 (TRBV4-2, TRBJ1-6)
CASSYHRDSDSPLHF

SEQ ID NO: 438935 - protein, 14 aa, Homo sapiens
  CDR3 for alpha chain variable domain of TCR clone 219468 (TRAV12-2, TRAJ13)
WAVKKTGGYQKVTF

SEQ ID NO: 438936 - protein, 16 aa, Homo sapiens
  CDR3 for beta chain variable domain of TCR clone 219468 (TRBV2, TRBJ2-1)
CASRSPAGGKYNEQFF

SEQ ID NO: 438937 - protein, 10 aa, Homo sapiens
  CDR3 for alpha chain variable domain of TCR clone 219469 (TRAV13-1, TRAJ41)
CAASGTRRTQ

SEQ ID NO: 438938 - protein, 16 aa, Homo sapiens
  CDR3 for beta chain variable domain of TCR clone 219469 (TRBV18, TRBJ2-3)
CASSPPAGGPRKYAVF

SEQ ID NO: 438939 - protein, 14 aa, Homo sapiens
  CDR3 for alpha chain variable domain of TCR clone 219470 (TRAV1-2, TRAJ16)
CAVNRFSDGQKLLF

SEQ ID NO: 438940 - protein, 11 aa, Homo sapiens
  CDR3 for beta chain variable domain of TCR clone 219470 (TRBV29-1, TRBJ2-5)
SSEDRTGTQYF

SEQ ID NO: 438941 - protein, 11 aa, Homo sapiens
  CDR3 for alpha chain variable domain of TCR clone 219471 (TRAV12-2, TRAJ31)
CAILNNARIMF

SEQ ID NO: 438942 - protein, 14 aa, Homo sapiens
  CDR3 for beta chain variable domain of TCR clone 219471 (TRBV4-2, TRBJ2-1)
CASGLDRAYNEQFF

SEQ ID NO: 438943 - protein, 13 aa, Homo sapiens
  CDR3 for alpha chain variable domain of TCR clone 219472 (TRAV17, TRAJ39)
CATDYGAGNMLTF

SEQ ID NO: 438944 - protein, 15 aa, Homo sapiens
  CDR3 for beta chain variable domain of TCR clone 219472 (TRBV7-9, TRBJ1-5)
CASSQGHQPNQPQHF

SEQ ID NO: 438945 - protein, 12 aa, Homo sapiens
  CDR3 for alpha chain variable domain of TCR clone 219473 (TRAV17, TRAJ4)
CATDGGNNKLIF

SEQ ID NO: 438946 - protein, 13 aa, Homo sapiens
  CDR3 for beta chain variable domain of TCR clone 219473 (TRBV29-1, TRBJ2-2)
CSTTGVNTGELFF

SEQ ID NO: 438947 - protein, 12 aa, Homo sapiens
  CDR3 for alpha chain variable domain of TCR clone 219474 (TRAV23/DV6, TRAJ30)
CAAIKGDDKIIF

SEQ ID NO: 438948 - protein, 15 aa, Homo sapiens
  CDR3 for beta chain variable domain of TCR clone 219474 (TRBV20-1, TRBJ2-7)
CSARDRVSGMDEQYF

SEQ ID NO: 438949 - protein, 14 aa, Homo sapiens
  CDR3 for alpha chain variable domain of TCR clone 219475 (TRAV1-2, TRAJ16)
CAVRGFSDGQKLLF

SEQ ID NO: 438950 - protein, 13 aa, Homo sapiens
  CDR3 for beta chain variable domain of TCR clone 219475 (TRBV11-3, TRBJ1-1)
CASSLALGTEAFF

SEQ ID NO: 438951 - protein, 16 aa, Homo sapiens
  CDR3 for alpha chain variable domain of TCR clone 219476 (TRAV3, TRAJ10)
CAVRDMRAGGGNKVTF

SEQ ID NO: 438952 - protein, 14 aa, Homo sapiens
  CDR3 for beta chain variable domain of TCR clone 219476 (TRBV25-1, TRBJ1-1)
CASTHLGGNTEAFF

SEQ ID NO: 438953 - protein, 15 aa, Homo sapiens
  CDR3 for alpha chain variable domain of TCR clone 219477 (TRAV36/DV7, TRAJ21)
CALEFYFGSGTKLNV

SEQ ID NO: 438954 - protein, 13 aa, Homo sapiens
  CDR3 for beta chain variable domain of TCR clone 219477 (TRBV11-3, TRBJ2-5)
CASSSGLQETQYF

SEQ ID NO: 438955 - protein, 16 aa, Homo sapiens
  CDR3 for alpha chain variable domain of TCR clone 219478 (TRAV26-1, TRAJ58)
CIVRVLGETSGSRLTF

SEQ ID NO: 438956 - protein, 14 aa, Homo sapiens
  CDR3 for beta chain variable domain of TCR clone 219478 (TRBV25-1, TRBJ1-1)
CASTHLGGNTEAFF

SEQ ID NO: 438957 - protein, 14 aa, Homo sapiens
  CDR3 for alpha chain variable domain of TCR clone 219479 (TRAV12-2, TRAJ13)
YAVKKTGGYQKVNF

SEQ ID NO: 438958 - protein, 15 aa, Homo sapiens
  CDR3 for beta chain variable domain of TCR clone 219479 (TRBV27, TRBJ2-1)
CASSNGGGSSNEQFF

SEQ ID NO: 438959 - protein, 14 aa, Homo sapiens
  CDR3 for alpha chain variable domain of TCR clone 219480 (TRAV1-2, TRAJ8)
CAVREDTGFQKLVF

SEQ ID NO: 438960 - protein, 14 aa, Homo sapiens
  CDR3 for beta chain variable domain of TCR clone 219480 (TRBV7-3, TRBJ2-2)
CASSSGGYTGELYF

SEQ ID NO: 438961 - protein, 16 aa, Homo sapiens
  CDR3 for alpha chain variable domain of TCR clone 219481 (TRAV30, TRAJ24)
CGTAIVDADSWGKFQF

SEQ ID NO: 438962 - protein, 13 aa, Homo sapiens
  CDR3 for beta chain variable domain of TCR clone 219481 (TRBV20-1, TRBJ1-1)
GSARGGGNTEAFF

SEQ ID NO: 438963 - protein, 12 aa, Homo sapiens
  CDR3 for alpha chain variable domain of TCR clone 219482 (TRAV3, TRAJ43)
CAVRDPNNDMRF

SEQ ID NO: 438964 - protein, 13 aa, Homo sapiens
  CDR3 for beta chain variable domain of TCR clone 219482 (TRBV24-1, TRBJ2-3)
CATSTGGTDTQYF

SEQ ID NO: 438965 - protein, 13 aa, Homo sapiens
  CDR3 for alpha chain variable domain of TCR clone 219483 (TRAV8-3, TRAJ36)
CAVGATGANNLFV

SEQ ID NO: 438966 - protein, 15 aa, Homo sapiens
  CDR3 for beta chain variable domain of TCR clone 219483 (TRBV7-2, TRBJ1-2)
CASSPRAGWNYGYTF

SEQ ID NO: 438967 - protein, 17 aa, Homo sapiens
  CDR3 for alpha chain variable domain of TCR clone 219484 (TRAV3, TRAJ12)
CAVRDGGRMDSSYKLIF

SEQ ID NO: 438968 - protein, 14 aa, Homo sapiens
  CDR3 for beta chain variable domain of TCR clone 219484 (TRBV7-9, TRBJ1-2)
CARSRQGANYGYTF

SEQ ID NO: 438969 - protein, 12 aa, Homo sapiens
  CDR3 for alpha chain variable domain of TCR clone 219485 (TRAV12-2, TRAJ10)
WVVTGGGNKLTF

SEQ ID NO: 438970 - protein, 16 aa, Homo sapiens
  CDR3 for beta chain variable domain of TCR clone 219485 (TRBV6-4, TRBJ1-2)
CASSEAVVDPNYGYTF

SEQ ID NO: 438971 - protein, 16 aa, Homo sapiens
  CDR3 for alpha chain variable domain of TCR clone 219486 (TRAV3, TRAJ37)
CAVRVRGLGNTGKLIF

SEQ ID NO: 438972 - protein, 13 aa, Homo sapiens
  CDR3 for beta chain variable domain of TCR clone 219486 (TRBV14, TRBJ2-1)
CASSQDRRNEQFF

SEQ ID NO: 438973 - protein, 18 aa, Homo sapiens
  CDR3 for alpha chain variable domain of TCR clone 219487 (TRAV21, TRAJ52)
CAVRPSSAGGTSYGKLTS

SEQ ID NO: 438974 - protein, 17 aa, Homo sapiens
  CDR3 for beta chain variable domain of TCR clone 219487 (TRBV13, TRBJ2-3)
CASSLSRVAGGRNTQYF

SEQ ID NO: 438975 - protein, 15 aa, Homo sapiens
  CDR3 for alpha chain variable domain of TCR clone 219488 (TRAV12-2, TRAJ53)
CAVNGGGGSHYKLTF

SEQ ID NO: 438976 - protein, 15 aa, Homo sapiens
  CDR3 for beta chain variable domain of TCR clone 219488 (TRBV6-3, TRBJ2-7)
CASSSPGTVFYEQYF

SEQ ID NO: 438977 - protein, 14 aa, Homo sapiens
  CDR3 for alpha chain variable domain of TCR clone 219489 (TRAV12-2, TRAJ24)
CAVTPADSWGKLQF

SEQ ID NO: 438978 - protein, 16 aa, Homo sapiens
  CDR3 for beta chain variable domain of TCR clone 219489 (TRBV19, TRBJ2-2)
CASRSPGTGATGELFF

SEQ ID NO: 438979 - protein, 14 aa, Homo sapiens
  CDR3 for alpha chain variable domain of TCR clone 219490 (TRAV3, TRAJ9)
CAVRLNIGGFKTIF

SEQ ID NO: 438980 - protein, 15 aa, Homo sapiens
  CDR3 for beta chain variable domain of TCR clone 219490 (TRBV7-2, TRBJ2-1)
CASSLASGRVNEQFF

SEQ ID NO: 438981 - protein, 11 aa, Homo sapiens
  CDR3 for alpha chain variable domain of TCR clone 219491 (TRAV2, TRAJ13)
CASGGYQKVTF

SEQ ID NO: 438982 - protein, 13 aa, Homo sapiens
  CDR3 for beta chain variable domain of TCR clone 219491 (TRBV20-1, TRBJ1-5)
CSATAAGGQPQHF

SEQ ID NO: 438983 - protein, 13 aa, Homo sapiens
  CDR3 for alpha chain variable domain of TCR clone 219492 (TRAV21, TRAJ27)
CAARPGNAGKSTF

SEQ ID NO: 438984 - protein, 16 aa, Homo sapiens
  CDR3 for beta chain variable domain of TCR clone 219492 (TRBV4-2, TRBJ1-1)
CASSQFWGTDMPEAFF

SEQ ID NO: 438985 - protein, 22 aa, Homo sapiens
  CDR3 for alpha chain variable domain of TCR clone 219493 (TRAV27, )
CAVRTQIPYIQNPDPAVYQLRD

SEQ ID NO: 438986 - protein, 16 aa, Homo sapiens
  CDR3 for beta chain variable domain of TCR clone 219493 (TRBV5-1, TRBJ2-3)
CASSLGLAVYTDTQYF

SEQ ID NO: 438987 - protein, 13 aa, Homo sapiens
  CDR3 for alpha chain variable domain of TCR clone 219494 (TRAV12-2, TRAJ39)
CAVNNNAGNLLTF

SEQ ID NO: 438988 - protein, 12 aa, Homo sapiens
  CDR3 for beta chain variable domain of TCR clone 219494 (TRBV7-9, TRBJ1-4)
CASSTDREKLFF

SEQ ID NO: 438989 - protein, 11 aa, Homo sapiens
  CDR3 for alpha chain variable domain of TCR clone 219495 (TRAV23/DV6, TRAJ43)
CAASSGNAMRF

SEQ ID NO: 438990 - protein, 14 aa, Homo sapiens
  CDR3 for beta chain variable domain of TCR clone 219495 (TRBV4-1, TRBJ1-2)
CASSRDPLPYGYTF

SEQ ID NO: 438991 - protein, 13 aa, Homo sapiens
  CDR3 for alpha chain variable domain of TCR clone 219496 (TRAV20, TRAJ21)
CAVEGYNFNKFYF

SEQ ID NO: 438992 - protein, 13 aa, Homo sapiens
  CDR3 for beta chain variable domain of TCR clone 219496 (TRBV19, TRBJ1-2)
CASSVPGQDGYTF

SEQ ID NO: 438993 - protein, 16 aa, Homo sapiens
  CDR3 for alpha chain variable domain of TCR clone 219497 (TRAV26-1, TRAJ58)
IASSESGETSGSRLTF

SEQ ID NO: 438994 - protein, 14 aa, Homo sapiens
  CDR3 for beta chain variable domain of TCR clone 219497 (TRBV11-2, TRBJ2-3)
CASSRLARTDTQYF

SEQ ID NO: 438995 - protein, 13 aa, Homo sapiens
  CDR3 for alpha chain variable domain of TCR clone 219498 (TRAV30, TRAJ34)
CGTVGYNTDKLIF

SEQ ID NO: 438996 - protein, 14 aa, Homo sapiens
  CDR3 for beta chain variable domain of TCR clone 219498 (TRBV7-9, TRBJ2-5)
CASSLDTAQETQYF

SEQ ID NO: 438997 - protein, 14 aa, Homo sapiens
  CDR3 for alpha chain variable domain of TCR clone 219499 (TRAV8-3, TRAJ4)
CAVGAAGGYNKLIF

SEQ ID NO: 438998 - protein, 15 aa, Homo sapiens
  CDR3 for beta chain variable domain of TCR clone 219499 (TRBV20-1, TRBJ2-5)
CGALPRTGFGETQYF

SEQ ID NO: 438999 - protein, 13 aa, Homo sapiens
  CDR3 for alpha chain variable domain of TCR clone 219500 (TRAV38-2/DV8, TRAJ56)
CAYQSRANSKLTS

SEQ ID NO: 439000 - protein, 16 aa, Homo sapiens
  CDR3 for beta chain variable domain of TCR clone 219500 (TRBV28, TRBJ1-1)
CASSSGGQPVATEAFF

SEQ ID NO: 439001 - protein, 14 aa, Homo sapiens
  CDR3 for alpha chain variable domain of TCR clone 219501 (TRAV8-4, TRAJ5)
CAVSTDTGRRALTF

SEQ ID NO: 439002 - protein, 14 aa, Homo sapiens
  CDR3 for beta chain variable domain of TCR clone 219501 (TRBV7-6, TRBJ2-3)
CASSLGTVTDTQYF

SEQ ID NO: 439003 - protein, 12 aa, Homo sapiens
  CDR3 for alpha chain variable domain of TCR clone 219502 (TRAV16, TRAJ12)
CALEDSSYKLIF

SEQ ID NO: 439004 - protein, 11 aa, Homo sapiens
  CDR3 for beta chain variable domain of TCR clone 219502 (TRBV29-1, TRBJ2-5)
CSEDRTGTQYF

SEQ ID NO: 439005 - protein, 11 aa, Homo sapiens
  CDR3 for alpha chain variable domain of TCR clone 219503 (TRAV23/DV6, TRAJ49)
CAVAPVTSSIF

SEQ ID NO: 439006 - protein, 13 aa, Homo sapiens
  CDR3 for beta chain variable domain of TCR clone 219503 (TRBV6-1, TRBJ1-1)
CASSRQGNTEAFF

SEQ ID NO: 439007 - protein, 16 aa, Homo sapiens
  CDR3 for alpha chain variable domain of TCR clone 219504 (TRAV16, TRAJ52)
CALSAAGGTSYGKLTF

SEQ ID NO: 439008 - protein, 13 aa, Homo sapiens
  CDR3 for beta chain variable domain of TCR clone 219504 (TRBV7-7, TRBJ2-5)
CASSRSGQETQYF

SEQ ID NO: 439009 - protein, 11 aa, Homo sapiens
  CDR3 for alpha chain variable domain of TCR clone 219505 (TRAV3, TRAJ21)
CAVGNFNKFYF

SEQ ID NO: 439010 - protein, 11 aa, Homo sapiens
  CDR3 for beta chain variable domain of TCR clone 219505 (TRBV29-1, TRBJ1-1)
CSVEVGTRTFF

SEQ ID NO: 439011 - protein, 17 aa, Homo sapiens
  CDR3 for alpha chain variable domain of TCR clone 219506 (TRAV3, TRAJ28)
CAVRPLYSGAGSYQLTF

SEQ ID NO: 439012 - protein, 15 aa, Homo sapiens
  CDR3 for beta chain variable domain of TCR clone 219506 (TRBV7-9, TRBJ1-5)
CASSQGHQPNQPQHF

SEQ ID NO: 439013 - protein, 12 aa, Homo sapiens
  CDR3 for alpha chain variable domain of TCR clone 219507 (TRAV12-1, TRAJ40)
CVVYSGTYKYVF

SEQ ID NO: 439014 - protein, 15 aa, Homo sapiens
  CDR3 for beta chain variable domain of TCR clone 219507 (TRBV11-2, TRBJ2-1)
CASSLTSGGYNEQFF

SEQ ID NO: 439015 - protein, 12 aa, Homo sapiens
  CDR3 for alpha chain variable domain of TCR clone 219508 (TRAV21, TRAJ13)
PGPSGGYQKVTF

SEQ ID NO: 439016 - protein, 14 aa, Homo sapiens
  CDR3 for beta chain variable domain of TCR clone 219508 (TRBV28, TRBJ1-2)
CASRIQGANYGYTF

SEQ ID NO: 439017 - protein, 17 aa, Homo sapiens
  CDR3 for alpha chain variable domain of TCR clone 219509 (TRAV23/DV6, TRAJ58)
CAARLLRGETSGSRLTF

SEQ ID NO: 439018 - protein, 16 aa, Homo sapiens
  CDR3 for beta chain variable domain of TCR clone 219509 (TRBV12-4, TRBJ1-5)
CASSRPVGGSNQPQHF

SEQ ID NO: 439019 - protein, 14 aa, Homo sapiens
  CDR3 for alpha chain variable domain of TCR clone 219510 (TRAV1-1, TRAJ28)
CAAPSGAGSYQLTF

SEQ ID NO: 439020 - protein, 14 aa, Homo sapiens
  CDR3 for beta chain variable domain of TCR clone 219510 (TRBV5-5, TRBJ1-5)
CASSGQGVDQPQHF

SEQ ID NO: 439021 - protein, 11 aa, Homo sapiens
  CDR3 for alpha chain variable domain of TCR clone 219511 (TRAV23/DV6, TRAJ21)
CAANNFNKFYF

SEQ ID NO: 439022 - protein, 12 aa, Homo sapiens
  CDR3 for beta chain variable domain of TCR clone 219511 (TRBV4-1, TRBJ2-3)
CASSQGTDTQYF

SEQ ID NO: 439023 - protein, 13 aa, Homo sapiens
  CDR3 for alpha chain variable domain of TCR clone 219512 (TRAV3, TRAJ15)
CAVRDQAGTALIF

SEQ ID NO: 439024 - protein, 15 aa, Homo sapiens
  CDR3 for beta chain variable domain of TCR clone 219512 (TRBV19, TRBJ2-1)
CASSIIAGGRSEQFF

SEQ ID NO: 439025 - protein, 14 aa, Homo sapiens
  CDR3 for alpha chain variable domain of TCR clone 219513 (TRAV26-1, TRAJ34)
CIGRESYNTDKLIF

SEQ ID NO: 439026 - protein, 13 aa, Homo sapiens
  CDR3 for beta chain variable domain of TCR clone 219513 (TRBV19, TRBJ2-1)
CATSRGVYNEQFF

SEQ ID NO: 439027 - protein, 12 aa, Homo sapiens
  CDR3 for alpha chain variable domain of TCR clone 219514 (TRAV13-1, TRAJ21)
CAAKEGFNKFYF

SEQ ID NO: 439028 - protein, 17 aa, Homo sapiens
  CDR3 for beta chain variable domain of TCR clone 219514 (TRBV14, TRBJ2-3)
CASSQEPSGLSTDTQYF

SEQ ID NO: 439029 - protein, 14 aa, Homo sapiens
  CDR3 for alpha chain variable domain of TCR clone 219515 (TRAV12-2, TRAJ32)
CAHPESGATNKLIF

SEQ ID NO: 439030 - protein, 14 aa, Homo sapiens
  CDR3 for beta chain variable domain of TCR clone 219515 (TRBV4-2, TRBJ2-3)
CASRETRAPEMQYF

SEQ ID NO: 439031 - protein, 13 aa, Homo sapiens
  CDR3 for alpha chain variable domain of TCR clone 219516 (TRAV36/DV7, TRAJ37)
CAVFSSNTGKLIF

SEQ ID NO: 439032 - protein, 18 aa, Homo sapiens
  CDR3 for beta chain variable domain of TCR clone 219516 (TRBV11-2, TRBJ2-3)
CASSLGGASRGATNTQYF

SEQ ID NO: 439033 - protein, 14 aa, Homo sapiens
  CDR3 for alpha chain variable domain of TCR clone 219517 (TRAV12-2, TRAJ38)
CAPQTAGNKRKLIW

SEQ ID NO: 439034 - protein, 18 aa, Homo sapiens
  CDR3 for beta chain variable domain of TCR clone 219517 (TRBV28, TRBJ1-3)
CASKTPVGQIGSGNTIYF

SEQ ID NO: 439035 - protein, 13 aa, Homo sapiens
  CDR3 for alpha chain variable domain of TCR clone 219518 (TRAV8-3, TRAJ36)
CAVGATGANNLFF

SEQ ID NO: 439036 - protein, 15 aa, Homo sapiens
  CDR3 for beta chain variable domain of TCR clone 219518 (TRBV4-2, TRBJ1-2)
CASSQRTGGRDGYTF

SEQ ID NO: 439037 - protein, 15 aa, Homo sapiens
  CDR3 for alpha chain variable domain of TCR clone 219519 (TRAV12-1, TRAJ44)
CVVFVNTGTASKLTF

SEQ ID NO: 439038 - protein, 17 aa, Homo sapiens
  CDR3 for beta chain variable domain of TCR clone 219519 (TRBV7-8, TRBJ2-6)
CASSAGTGGAGANVLTY

SEQ ID NO: 439039 - protein, 12 aa, Homo sapiens
  CDR3 for alpha chain variable domain of TCR clone 219520 (TRAV12-1, TRAJ40)
CVVYSGTYKYIF

SEQ ID NO: 439040 - protein, 13 aa, Homo sapiens
  CDR3 for beta chain variable domain of TCR clone 219520 (TRBV2, TRBJ2-7)
CASSEGGQFEQYF

SEQ ID NO: 439041 - protein, 14 aa, Homo sapiens
  CDR3 for alpha chain variable domain of TCR clone 219521 (TRAV10, TRAJ34)
CVVSRGVDTDKLIF

SEQ ID NO: 439042 - protein, 17 aa, Homo sapiens
  CDR3 for beta chain variable domain of TCR clone 219521 (TRBV6-3, TRBJ2-3)
CASRRPLGGGSTDTQYF

SEQ ID NO: 439043 - protein, 15 aa, Homo sapiens
  CDR3 for alpha chain variable domain of TCR clone 219522 (TRAV8-3, TRAJ11)
CAVGLLNSGYSTLTF

SEQ ID NO: 439044 - protein, 16 aa, Homo sapiens
  CDR3 for beta chain variable domain of TCR clone 219522 (TRBV7-9, TRBJ1-2)
CASSLGFSSGVDGYTF

SEQ ID NO: 439045 - protein, 11 aa, Homo sapiens
  CDR3 for alpha chain variable domain of TCR clone 219523 (TRAV16, TRAJ31)
CALFNNARLMF

SEQ ID NO: 439046 - protein, 17 aa, Homo sapiens
  CDR3 for beta chain variable domain of TCR clone 219523 (TRBV7-8, TRBJ2-6)
CASSAGTGGAGANVLTF

SEQ ID NO: 439047 - protein, 14 aa, Homo sapiens
  CDR3 for alpha chain variable domain of TCR clone 219524 (TRAV26-1, TRAJ21)
CIVRPPYNFNKFYF

SEQ ID NO: 439048 - protein, 15 aa, Homo sapiens
  CDR3 for beta chain variable domain of TCR clone 219524 (TRBV19, TRBJ2-4)
CASRGPRRGENIQYF

SEQ ID NO: 439049 - protein, 16 aa, Homo sapiens
  CDR3 for alpha chain variable domain of TCR clone 219525 (TRAV12-3, TRAJ53)
CAMSPGSGGSHYKLTL

SEQ ID NO: 439050 - protein, 14 aa, Homo sapiens
  CDR3 for beta chain variable domain of TCR clone 219525 (TRBV7-2, TRBJ1-1)
CASSFLTGTTEAFF

SEQ ID NO: 439051 - protein, 14 aa, Homo sapiens
  CDR3 for alpha chain variable domain of TCR clone 219526 (TRAV29/DV5, TRAJ36)
CAARRKTGAHNLFF

SEQ ID NO: 439052 - protein, 13 aa, Homo sapiens
  CDR3 for beta chain variable domain of TCR clone 219526 (TRBV7-9, TRBJ2-7)
CASSFAGAYEQYF

SEQ ID NO: 439053 - protein, 14 aa, Homo sapiens
  CDR3 for alpha chain variable domain of TCR clone 219527 (TRAV20, TRAJ42)
CAVQAGGNQGNLIF

SEQ ID NO: 439054 - protein, 14 aa, Homo sapiens
  CDR3 for beta chain variable domain of TCR clone 219527 (TRBV28, TRBJ1-2)
CASRIQGANYGYTF

SEQ ID NO: 439055 - protein, 12 aa, Homo sapiens
  CDR3 for alpha chain variable domain of TCR clone 219528 (TRAV8-3, TRAJ20)
CAVDFNEYKLSF

SEQ ID NO: 439056 - protein, 14 aa, Homo sapiens
  CDR3 for beta chain variable domain of TCR clone 219528 (TRBV19, TRBJ2-7)
CASSMGQGAIEQYF

SEQ ID NO: 439057 - protein, 12 aa, Homo sapiens
  CDR3 for alpha chain variable domain of TCR clone 219529 (TRAV13-1, TRAJ53)
AASGGSNYKLTF

SEQ ID NO: 439058 - protein, 14 aa, Homo sapiens
  CDR3 for beta chain variable domain of TCR clone 219529 (TRBV12-4, TRBJ2-1)
CASSLGQGASEQFF

SEQ ID NO: 439059 - protein, 13 aa, Homo sapiens
  CDR3 for alpha chain variable domain of TCR clone 219530 (TRAV21, TRAJ3)
CCEPYSSASKIIF

SEQ ID NO: 439060 - protein, 14 aa, Homo sapiens
  CDR3 for beta chain variable domain of TCR clone 219530 (TRBV7-2, TRBJ2-5)
CASSPRGSSETQYF

SEQ ID NO: 439061 - protein, 16 aa, Homo sapiens
  CDR3 for alpha chain variable domain of TCR clone 219531 (TRAV3, TRAJ6)
CLRDGPRAGGSYITTF

SEQ ID NO: 439062 - protein, 20 aa, Homo sapiens
  CDR3 for beta chain variable domain of TCR clone 219531 (TRBV28, TRBJ2-1)
CASTPIGRSPGLAGGNEQFF

SEQ ID NO: 439063 - protein, 10 aa, Homo sapiens
  CDR3 for alpha chain variable domain of TCR clone 219532 (TRAV13-1, TRAJ48)
CAASIVSLTL

SEQ ID NO: 439064 - protein, 17 aa, Homo sapiens
  CDR3 for beta chain variable domain of TCR clone 219532 (TRBV28, TRBJ2-1)
CASSSARQALTYNEQFF

SEQ ID NO: 439065 - protein, 13 aa, Homo sapiens
  CDR3 for alpha chain variable domain of TCR clone 219533 (TRAV36/DV7, TRAJ49)
CAGDSNTGNQFHF

SEQ ID NO: 439066 - protein, 12 aa, Homo sapiens
  CDR3 for beta chain variable domain of TCR clone 219533 (TRBV11-2, TRBJ2-2)
CASSLGGGELFF

SEQ ID NO: 439067 - protein, 12 aa, Homo sapiens
  CDR3 for alpha chain variable domain of TCR clone 219534 (TRAV12-1, TRAJ40)
CVVSSGTYKYIF

SEQ ID NO: 439068 - protein, 12 aa, Homo sapiens
  CDR3 for beta chain variable domain of TCR clone 219534 (TRBV29-1, TRBJ2-3)
CSVTGGADTQYF

SEQ ID NO: 439069 - protein, 14 aa, Homo sapiens
  CDR3 for alpha chain variable domain of TCR clone 219535 (TRAV3, TRAJ28)
CAVRRGAGSYQLPF

SEQ ID NO: 439070 - protein, 13 aa, Homo sapiens
  CDR3 for beta chain variable domain of TCR clone 219535 (TRBV7-3, TRBJ1-1)
CASSQDWGAEAFF

SEQ ID NO: 439071 - protein, 10 aa, Homo sapiens
  CDR3 for alpha chain variable domain of TCR clone 219536 (TRAV23/DV6, TRAJ43)
CAAAVAALEQ

SEQ ID NO: 439072 - protein, 16 aa, Homo sapiens
  CDR3 for beta chain variable domain of TCR clone 219536 (TRBV18, TRBJ1-2)
CASSPTERVTIYGYTF

SEQ ID NO: 439073 - protein, 14 aa, Homo sapiens
  CDR3 for alpha chain variable domain of TCR clone 219537 (TRAV22, TRAJ37)
CASPYSVNTGKLIF

SEQ ID NO: 439074 - protein, 13 aa, Homo sapiens
  CDR3 for beta chain variable domain of TCR clone 219537 (TRBV20-1, TRBJ2-1)
CSAHGSSYNEQFF

SEQ ID NO: 439075 - protein, 12 aa, Homo sapiens
  CDR3 for alpha chain variable domain of TCR clone 219538 (TRAV12-3, TRAJ17)
CAMTLTGNKLTF

SEQ ID NO: 439076 - protein, 13 aa, Homo sapiens
  CDR3 for beta chain variable domain of TCR clone 219538 (TRBV7-9, TRBJ1-2)
CGSSLKQNYGYTF

SEQ ID NO: 439077 - protein, 11 aa, Homo sapiens
  CDR3 for alpha chain variable domain of TCR clone 219539 (TRAV12-3, TRAJ41)
CAMNARVALNF

SEQ ID NO: 439078 - protein, 16 aa, Homo sapiens
  CDR3 for beta chain variable domain of TCR clone 219539 (TRBV7-8, TRBJ2-3)
CASSTEGQRETDTQYF

SEQ ID NO: 439079 - protein, 14 aa, Homo sapiens
  CDR3 for alpha chain variable domain of TCR clone 219540 (TRAV27, TRAJ22)
CAGLPSGSARQLTF

SEQ ID NO: 439080 - protein, 14 aa, Homo sapiens
  CDR3 for beta chain variable domain of TCR clone 219540 (TRBV7-8, TRBJ2-5)
CASSATGGQETQYF

SEQ ID NO: 439081 - protein, 13 aa, Homo sapiens
  CDR3 for alpha chain variable domain of TCR clone 219541 (TRAV12-1, TRAJ33)
CGCAPDSNYQLIW

SEQ ID NO: 439082 - protein, 12 aa, Homo sapiens
  CDR3 for beta chain variable domain of TCR clone 219541 (TRBV11-2, TRBJ2-2)
CASSLGGGELFF

SEQ ID NO: 439083 - protein, 15 aa, Homo sapiens
  CDR3 for alpha chain variable domain of TCR clone 219542 (TRAV26-1, TRAJ42)
CIVRVRGGRQGNLIF

SEQ ID NO: 439084 - protein, 14 aa, Homo sapiens
  CDR3 for beta chain variable domain of TCR clone 219542 (TRBV19, TRBJ2-2)
CATTGHANTGELFF

SEQ ID NO: 439085 - protein, 13 aa, Homo sapiens
  CDR3 for alpha chain variable domain of TCR clone 219543 (TRAV8-2, TRAJ36)
CVVSHLPTNNLLF

SEQ ID NO: 439086 - protein, 18 aa, Homo sapiens
  CDR3 for beta chain variable domain of TCR clone 219543 (TRBV7-9, TRBJ2-6)
CASSFPGAGISGANVLTF

SEQ ID NO: 439087 - protein, 11 aa, Homo sapiens
  CDR3 for alpha chain variable domain of TCR clone 219544 (TRAV2, TRAJ33)
CAVDSNYQLIW

SEQ ID NO: 439088 - protein, 16 aa, Homo sapiens
  CDR3 for beta chain variable domain of TCR clone 219544 (TRBV4-3, TRBJ2-7)
CASSPRTSGRSYEQYF

SEQ ID NO: 439089 - protein, 15 aa, Homo sapiens
  CDR3 for alpha chain variable domain of TCR clone 219545 (TRAV21, TRAJ52)
CAVRGGGTSYGKLTF

SEQ ID NO: 439090 - protein, 13 aa, Homo sapiens
  CDR3 for beta chain variable domain of TCR clone 219545 (TRBV6-5, TRBJ2-5)
CATALSPQETQYF

SEQ ID NO: 439091 - protein, 15 aa, Homo sapiens
  CDR3 for alpha chain variable domain of TCR clone 219546 (TRAV3, TRAJ36)
CAVRASQTGANNLFF

SEQ ID NO: 439092 - protein, 15 aa, Homo sapiens
  CDR3 for beta chain variable domain of TCR clone 219546 (TRBV24-1, TRBJ2-2)
CATSDLRESTGELFF

SEQ ID NO: 439093 - protein, 13 aa, Homo sapiens
  CDR3 for alpha chain variable domain of TCR clone 219547 (TRAV12-3, TRAJ35)
CAMAIGFGNVLHC

SEQ ID NO: 439094 - protein, 12 aa, Homo sapiens
  CDR3 for beta chain variable domain of TCR clone 219547 (TRBV6-3, TRBJ2-7)
CASSLTPYEQYF

SEQ ID NO: 439095 - protein, 13 aa, Homo sapiens
  CDR3 for alpha chain variable domain of TCR clone 219548 (TRAV12-3, TRAJ9)
CAMSADGGFKTIF

SEQ ID NO: 439096 - protein, 14 aa, Homo sapiens
  CDR3 for beta chain variable domain of TCR clone 219548 (TRBV6-1, TRBJ2-7)
CASSERVSPYEQYF

SEQ ID NO: 439097 - protein, 15 aa, Homo sapiens
  CDR3 for alpha chain variable domain of TCR clone 219549 (TRAV8-4, TRAJ37)
CAVSTKSGNTGKLIF

SEQ ID NO: 439098 - protein, 20 aa, Homo sapiens
  CDR3 for beta chain variable domain of TCR clone 219549 (TRBV7-8, TRBJ2-2)
CASSHLFPGPTIHITGELFF

SEQ ID NO: 439099 - protein, 11 aa, Homo sapiens
  CDR3 for alpha chain variable domain of TCR clone 219550 (TRAV23/DV6, TRAJ58)
CAPPLLRGETS

SEQ ID NO: 439100 - protein, 13 aa, Homo sapiens
  CDR3 for beta chain variable domain of TCR clone 219550 (TRBV6-4, TRBJ1-5)
CASSADLNQPQHF

SEQ ID NO: 439101 - protein, 15 aa, Homo sapiens
  CDR3 for alpha chain variable domain of TCR clone 219551 (TRAV12-1, TRAJ44)
CVVFVNTGTASKLTY

SEQ ID NO: 439102 - protein, 17 aa, Homo sapiens
  CDR3 for beta chain variable domain of TCR clone 219551 (TRBV7-8, TRBJ2-6)
CASSAGTGGAGANVLTF

SEQ ID NO: 439103 - protein, 16 aa, Homo sapiens
  CDR3 for alpha chain variable domain of TCR clone 219552 (TRAV30, TRAJ24)
CGTEIVDADSWGKSSL

SEQ ID NO: 439104 - protein, 14 aa, Homo sapiens
  CDR3 for beta chain variable domain of TCR clone 219552 (TRBV12-5, TRBJ2-5)
CASGSRTHQETQYF

SEQ ID NO: 439105 - protein, 13 aa, Homo sapiens
  CDR3 for alpha chain variable domain of TCR clone 219553 (TRAV2, TRAJ40)
CAVVTSGTYKYIF

SEQ ID NO: 439106 - protein, 15 aa, Homo sapiens
  CDR3 for beta chain variable domain of TCR clone 219553 (TRBV19, TRBJ2-1)
CASSPPGQGPNEQFF

SEQ ID NO: 439107 - protein, 14 aa, Homo sapiens
  CDR3 for alpha chain variable domain of TCR clone 219554 (TRAV13-1, TRAJ39)
CAASEGNAGNMLTF

SEQ ID NO: 439108 - protein, 13 aa, Homo sapiens
  CDR3 for beta chain variable domain of TCR clone 219554 (TRBV27, TRBJ2-7)
CASSFSQGYEQYF

SEQ ID NO: 439109 - protein, 15 aa, Homo sapiens
  CDR3 for alpha chain variable domain of TCR clone 219555 (TRAV17, TRAJ22)
CATVAPSGSARQLTF

SEQ ID NO: 439110 - protein, 15 aa, Homo sapiens
  CDR3 for beta chain variable domain of TCR clone 219555 (TRBV7-2, TRBJ2-1)
CASTHGTGVYNEQFF

SEQ ID NO: 439111 - protein, 14 aa, Homo sapiens
  CDR3 for alpha chain variable domain of TCR clone 219556 (TRAV13-1, TRAJ37)
CAAADSSNTGKLIF

SEQ ID NO: 439112 - protein, 16 aa, Homo sapiens
  CDR3 for beta chain variable domain of TCR clone 219556 (TRBV11-2, TRBJ2-2)
CASSLRTGNLIGELFF

SEQ ID NO: 439113 - protein, 13 aa, Homo sapiens
  CDR3 for alpha chain variable domain of TCR clone 219557 (TRAV13-1, TRAJ40)
CAARTSGTYKYIF

SEQ ID NO: 439114 - protein, 17 aa, Homo sapiens
  CDR3 for beta chain variable domain of TCR clone 219557 (TRBV4-1, TRBJ2-3)
CASSQWYVSGGTDTQYF

SEQ ID NO: 439115 - protein, 14 aa, Homo sapiens
  CDR3 for alpha chain variable domain of TCR clone 219558 (TRAV23/DV6, TRAJ11)
CAASLEAGYSTLTF

SEQ ID NO: 439116 - protein, 15 aa, Homo sapiens
  CDR3 for beta chain variable domain of TCR clone 219558 (TRBV28, TRBJ2-7)
CASSSPGTEPFEQYF

SEQ ID NO: 439117 - protein, 17 aa, Homo sapiens
  CDR3 for alpha chain variable domain of TCR clone 219559 (TRAV12-2, TRAJ22)
CAVNRIPFSGSARQLTF

SEQ ID NO: 439118 - protein, 14 aa, Homo sapiens
  CDR3 for beta chain variable domain of TCR clone 219559 (TRBV7-2, TRBJ2-7)
CASRSQGAAYEQYF

SEQ ID NO: 439119 - protein, 13 aa, Homo sapiens
  CDR3 for alpha chain variable domain of TCR clone 219560 (TRAV36/DV7, TRAJ54)
CAVDIQGAQKLVF

SEQ ID NO: 439120 - protein, 13 aa, Homo sapiens
  CDR3 for beta chain variable domain of TCR clone 219560 (TRBV12-5, TRBJ2-3)
CASGDRQSDTQYF

SEQ ID NO: 439121 - protein, 14 aa, Homo sapiens
  CDR3 for alpha chain variable domain of TCR clone 219561 (TRAV13-1, TRAJ48)
CAASTDFGNERLTF

SEQ ID NO: 439122 - protein, 15 aa, Homo sapiens
  CDR3 for beta chain variable domain of TCR clone 219561 (TRBV10-2, TRBJ2-5)
CASKPEDRRQETQYF

SEQ ID NO: 439123 - protein, 13 aa, Homo sapiens
  CDR3 for alpha chain variable domain of TCR clone 219562 (TRAV6, TRAJ20)
CALAVSNDYKLSF

SEQ ID NO: 439124 - protein, 16 aa, Homo sapiens
  CDR3 for beta chain variable domain of TCR clone 219562 (TRBV7-9, TRBJ2-1)
CASSDLAGGSYNEQFF

SEQ ID NO: 439125 - protein, 14 aa, Homo sapiens
  CDR3 for alpha chain variable domain of TCR clone 219563 (TRAV30, TRAJ33)
CGTVAPRSNYQLIW

SEQ ID NO: 439126 - protein, 15 aa, Homo sapiens
  CDR3 for beta chain variable domain of TCR clone 219563 (TRBV7-9, TRBJ1-5)
CASSQGHQPNQPQHS

SEQ ID NO: 439127 - protein, 19 aa, Homo sapiens
  CDR3 for alpha chain variable domain of TCR clone 219564 (TRAV1-1, TRAJ30)
CAGSEMTRSSLEKGHDFIF

SEQ ID NO: 439128 - protein, 14 aa, Homo sapiens
  CDR3 for beta chain variable domain of TCR clone 219564 (TRBV11-3, TRBJ1-6)
CASSFSGGDSPLRF

SEQ ID NO: 439129 - protein, 16 aa, Homo sapiens
  CDR3 for alpha chain variable domain of TCR clone 219565 (TRAV21, TRAJ37)
CAVRTAGSSNTGKLIF

SEQ ID NO: 439130 - protein, 17 aa, Homo sapiens
  CDR3 for beta chain variable domain of TCR clone 219565 (TRBV15, TRBJ1-4)
CATSRYGTGDPNEKLFF

SEQ ID NO: 439131 - protein, 14 aa, Homo sapiens
  CDR3 for alpha chain variable domain of TCR clone 219566 (TRAV21, TRAJ3)
CAVMGYSSASKIIF

SEQ ID NO: 439132 - protein, 12 aa, Homo sapiens
  CDR3 for beta chain variable domain of TCR clone 219566 (TRBV12-4, TRBJ2-1)
CASSLQGSEQFF

SEQ ID NO: 439133 - protein, 12 aa, Homo sapiens
  CDR3 for alpha chain variable domain of TCR clone 219567 (TRAV27, TRAJ9)
CAGESGGFKTIF

SEQ ID NO: 439134 - protein, 12 aa, Homo sapiens
  CDR3 for beta chain variable domain of TCR clone 219567 (TRBV29-1, TRBJ2-3)
CSVTGGADTQYF

SEQ ID NO: 439135 - protein, 14 aa, Homo sapiens
  CDR3 for alpha chain variable domain of TCR clone 219568 (TRAV27, TRAJ24)
CRRYKCRQLGKLQF

SEQ ID NO: 439136 - protein, 13 aa, Homo sapiens
  CDR3 for beta chain variable domain of TCR clone 219568 (TRBV7-2, TRBJ2-7)
CASSSPSGSEQYF

SEQ ID NO: 439137 - protein, 15 aa, Homo sapiens
  CDR3 for alpha chain variable domain of TCR clone 219569 (TRAV34, TRAJ38)
CGADFTPGNNRKLIW

SEQ ID NO: 439138 - protein, 16 aa, Homo sapiens
  CDR3 for beta chain variable domain of TCR clone 219569 (TRBV7-2, TRBJ2-1)
CASSLLAQLFSKGQFF

SEQ ID NO: 439139 - protein, 14 aa, Homo sapiens
  CDR3 for alpha chain variable domain of TCR clone 219570 (TRAV12-2, TRAJ24)
CAVTPADSWEKLQF

SEQ ID NO: 439140 - protein, 12 aa, Homo sapiens
  CDR3 for beta chain variable domain of TCR clone 219570 (TRBV3-1, TRBJ2-1)
CASSQGSSGQFF

SEQ ID NO: 439141 - protein, 14 aa, Homo sapiens
  CDR3 for alpha chain variable domain of TCR clone 219571 (TRAV13-1, TRAJ35)
CAASKGGFGNVLHC

SEQ ID NO: 439142 - protein, 15 aa, Homo sapiens
  CDR3 for beta chain variable domain of TCR clone 219571 (TRBV7-2, TRBJ1-1)
CASSFAGDRDTEAFF

SEQ ID NO: 439143 - protein, 12 aa, Homo sapiens
  CDR3 for alpha chain variable domain of TCR clone 219572 (TRAV13-1, TRAJ49)
CAASIWGNQFYF

SEQ ID NO: 439144 - protein, 17 aa, Homo sapiens
  CDR3 for beta chain variable domain of TCR clone 219572 (TRBV11-2, TRBJ2-1)
CASSLYPPGVEYNEQFF

SEQ ID NO: 439145 - protein, 17 aa, Homo sapiens
  CDR3 for alpha chain variable domain of TCR clone 219573 (TRAV26-1, TRAJ53)
CIVRVDDSGGSNYKLTF

SEQ ID NO: 439146 - protein, 13 aa, Homo sapiens
  CDR3 for beta chain variable domain of TCR clone 219573 (TRBV6-6, TRBJ2-7)
CASSPKHLAEQYF

SEQ ID NO: 439147 - protein, 12 aa, Homo sapiens
  CDR3 for alpha chain variable domain of TCR clone 219574 (TRAV12-3, TRAJ20)
CAMVRGGYKLSF

SEQ ID NO: 439148 - protein, 17 aa, Homo sapiens
  CDR3 for beta chain variable domain of TCR clone 219574 (TRBV24-1, TRBJ2-1)
CATSDVSTSGTYNEQFF

SEQ ID NO: 439149 - protein, 13 aa, Homo sapiens
  CDR3 for alpha chain variable domain of TCR clone 219575 (TRAV12-3, TRAJ9)
CAMRNTGGVKTIF

SEQ ID NO: 439150 - protein, 16 aa, Homo sapiens
  CDR3 for beta chain variable domain of TCR clone 219575 (TRBV19, TRBJ2-1)
CASSIDGSFAYNEQFF

SEQ ID NO: 439151 - protein, 15 aa, Homo sapiens
  CDR3 for alpha chain variable domain of TCR clone 219576 (TRAV35, TRAJ23)
CAGPLGNNQGGKLIF

SEQ ID NO: 439152 - protein, 15 aa, Homo sapiens
  CDR3 for beta chain variable domain of TCR clone 219576 (TRBV11-2, TRBJ2-1)
CASSKNRGLIYEQFF

SEQ ID NO: 439153 - protein, 13 aa, Homo sapiens
  CDR3 for alpha chain variable domain of TCR clone 219577 (TRAV27, TRAJ45)
CRSSGGGADRLTF

SEQ ID NO: 439154 - protein, 13 aa, Homo sapiens
  CDR3 for beta chain variable domain of TCR clone 219577 (TRBV7-7, TRBJ2-5)
CASSRSGQETQYF

SEQ ID NO: 439155 - protein, 10 aa, Homo sapiens
  CDR3 for alpha chain variable domain of TCR clone 219578 (TRAV1-2, TRAJ31)
CVSEDARLMF

SEQ ID NO: 439156 - protein, 14 aa, Homo sapiens
  CDR3 for beta chain variable domain of TCR clone 219578 (TRBV19, TRBJ2-1)
CASPTSVLSGEQFF

SEQ ID NO: 439157 - protein, 12 aa, Homo sapiens
  CDR3 for alpha chain variable domain of TCR clone 219579 (TRAV12-3, TRAJ3)
CAIDSSASKIIF

SEQ ID NO: 439158 - protein, 14 aa, Homo sapiens
  CDR3 for beta chain variable domain of TCR clone 219579 (TRBV15, TRBJ2-4)
CATEGGQGANMQYF

SEQ ID NO: 439159 - protein, 14 aa, Homo sapiens
  CDR3 for alpha chain variable domain of TCR clone 219580 (TRAV1-2, TRAJ16)
CAVNRFSYGQKLLF

SEQ ID NO: 439160 - protein, 14 aa, Homo sapiens
  CDR3 for beta chain variable domain of TCR clone 219580 (TRBV7-3, TRBJ1-1)
CASSLKGGNTEAFF

SEQ ID NO: 439161 - protein, 17 aa, Homo sapiens
  CDR3 for alpha chain variable domain of TCR clone 219581 (TRAV38-1, TRAJ45)
CAFMRSHSGGGADGLTF

SEQ ID NO: 439162 - protein, 16 aa, Homo sapiens
  CDR3 for beta chain variable domain of TCR clone 219581 (TRBV7-8, TRBJ2-1)
CASSVGTSGAYNEQFF

SEQ ID NO: 439163 - protein, 15 aa, Homo sapiens
  CDR3 for alpha chain variable domain of TCR clone 219582 (TRAV35, TRAJ40)
CAGQLGTSGTYKYIF

SEQ ID NO: 439164 - protein, 13 aa, Homo sapiens
  CDR3 for beta chain variable domain of TCR clone 219582 (TRBV7-3, TRBJ2-1)
CRQLSGGTNEQFF

SEQ ID NO: 439165 - protein, 15 aa, Homo sapiens
  CDR3 for alpha chain variable domain of TCR clone 219583 (TRAV1-2, TRAJ35)
CAVRDPGGFGNVLHC

SEQ ID NO: 439166 - protein, 17 aa, Homo sapiens
  CDR3 for beta chain variable domain of TCR clone 219583 (TRBV11-2, TRBJ2-1)
CASSLYPPGVEYNEQFF

SEQ ID NO: 439167 - protein, 14 aa, Homo sapiens
  CDR3 for alpha chain variable domain of TCR clone 219584 (TRAV2, TRAJ9)
CAVEDRSGDFKTIF

SEQ ID NO: 439168 - protein, 18 aa, Homo sapiens
  CDR3 for beta chain variable domain of TCR clone 219584 (TRBV20-1, TRBJ2-5)
CSQTGDSGRLGGKETQYF

SEQ ID NO: 439169 - protein, 14 aa, Homo sapiens
  CDR3 for alpha chain variable domain of TCR clone 219585 (TRAV13-1, TRAJ35)
CAASKGGFGMCCIA

SEQ ID NO: 439170 - protein, 15 aa, Homo sapiens
  CDR3 for beta chain variable domain of TCR clone 219585 (TRBV7-9, TRBJ1-6)
CASSSPGRGNSPLHF

SEQ ID NO: 439171 - protein, 10 aa, Homo sapiens
  CDR3 for alpha chain variable domain of TCR clone 219586 (TRAV25, TRAJ17)
CQAAGNKLTF

SEQ ID NO: 439172 - protein, 12 aa, Homo sapiens
  CDR3 for beta chain variable domain of TCR clone 219586 (TRBV11-2, TRBJ2-1)
CASSPGNNEQFF

SEQ ID NO: 439173 - protein, 14 aa, Homo sapiens
  CDR3 for alpha chain variable domain of TCR clone 219587 (TRAV8-3, TRAJ9)
CAVIYNTGGFKTIF

SEQ ID NO: 439174 - protein, 16 aa, Homo sapiens
  CDR3 for beta chain variable domain of TCR clone 219587 (TRBV7-3, TRBJ2-2)
CASSLKRGTLSGELFF

SEQ ID NO: 439175 - protein, 18 aa, Homo sapiens
  CDR3 for alpha chain variable domain of TCR clone 219588 (TRAV21, TRAJ52)
CAVRPSPSGGTSYGQLTF

SEQ ID NO: 439176 - protein, 17 aa, Homo sapiens
  CDR3 for beta chain variable domain of TCR clone 219588 (TRBV13, TRBJ2-3)
CASSLSRVAGGRNTQYF

SEQ ID NO: 439177 - protein, 14 aa, Homo sapiens
  CDR3 for alpha chain variable domain of TCR clone 219589 (TRAV12-3, TRAJ58)
YAMSTETSGSRLTF

SEQ ID NO: 439178 - protein, 15 aa, Homo sapiens
  CDR3 for beta chain variable domain of TCR clone 219589 (TRBV11-3, TRBJ2-3)
CASLKDGREGDTQYF

SEQ ID NO: 439179 - protein, 15 aa, Homo sapiens
  CDR3 for alpha chain variable domain of TCR clone 219590 (TRAV25, TRAJ52)
CAGTLGGTSYGKLTF

SEQ ID NO: 439180 - protein, 15 aa, Homo sapiens
  CDR3 for beta chain variable domain of TCR clone 219590 (TRBV6-3, TRBJ1-3)
CASRGGGSAGNTIYF

SEQ ID NO: 439181 - protein, 14 aa, Homo sapiens
  CDR3 for alpha chain variable domain of TCR clone 219591 (TRAV12-2, TRAJ13)
CAVKKTGGYQKVTF

SEQ ID NO: 439182 - protein, 15 aa, Homo sapiens
  CDR3 for beta chain variable domain of TCR clone 219591 (TRBV28, TRBJ1-3)
CASSMGWASGNTIYF

SEQ ID NO: 439183 - protein, 13 aa, Homo sapiens
  CDR3 for alpha chain variable domain of TCR clone 219592 (TRAV1-2, TRAJ20)
CPVRDGNDYKLSF

SEQ ID NO: 439184 - protein, 16 aa, Homo sapiens
  CDR3 for beta chain variable domain of TCR clone 219592 (TRBV12-5, TRBJ2-1)
CASGPRTSGNQETQYF

SEQ ID NO: 439185 - protein, 17 aa, Homo sapiens
  CDR3 for alpha chain variable domain of TCR clone 219593 (TRAV8-3, TRAJ42)
CAVGNPEERRSQGNLIF

SEQ ID NO: 439186 - protein, 17 aa, Homo sapiens
  CDR3 for beta chain variable domain of TCR clone 219593 (TRBV11-2, TRBJ2-1)
CASSLYPPGVEYNEQFF

SEQ ID NO: 439187 - protein, 14 aa, Homo sapiens
  CDR3 for alpha chain variable domain of TCR clone 219594 (TRAV4, TRAJ26)
CLVGPHNYGQNFVF

SEQ ID NO: 439188 - protein, 15 aa, Homo sapiens
  CDR3 for beta chain variable domain of TCR clone 219594 (TRBV6-5, TRBJ1-5)
CASSLTALGNQPQHF

SEQ ID NO: 439189 - protein, 16 aa, Homo sapiens
  CDR3 for alpha chain variable domain of TCR clone 219595 (TRAV30, TRAJ44)
CGTEDKRTGNASKLTF

SEQ ID NO: 439190 - protein, 16 aa, Homo sapiens
  CDR3 for beta chain variable domain of TCR clone 219595 (TRBV10-2, TRBJ2-7)
CASSESPGSSGFEQYF

SEQ ID NO: 439191 - protein, 13 aa, Homo sapiens
  CDR3 for alpha chain variable domain of TCR clone 219596 (TRAV27, TRAJ57)
CAGFQGGSEKLVF

SEQ ID NO: 439192 - protein, 14 aa, Homo sapiens
  CDR3 for beta chain variable domain of TCR clone 219596 (TRBV20-1, TRBJ1-2)
CSGRKDGGAYGYTF

SEQ ID NO: 439193 - protein, 14 aa, Homo sapiens
  CDR3 for alpha chain variable domain of TCR clone 219597 (TRAV8-3, TRAJ4)
CAVGAAGGYNKLIF

SEQ ID NO: 439194 - protein, 16 aa, Homo sapiens
  CDR3 for beta chain variable domain of TCR clone 219597 (TRBV28, TRBJ2-2)
CASSLEGGSNTGELFF

SEQ ID NO: 439195 - protein, 15 aa, Homo sapiens
  CDR3 for alpha chain variable domain of TCR clone 219598 (TRAV17, TRAJ56)
CATDANTGANSKLTF

SEQ ID NO: 439196 - protein, 14 aa, Homo sapiens
  CDR3 for beta chain variable domain of TCR clone 219598 (TRBV19, TRBJ1-5)
CASSLGTGGQPQPF

SEQ ID NO: 439197 - protein, 14 aa, Homo sapiens
  CDR3 for alpha chain variable domain of TCR clone 219599 (TRAV12-2, TRAJ40)
CAVKIPSGTYKYIF

SEQ ID NO: 439198 - protein, 15 aa, Homo sapiens
  CDR3 for beta chain variable domain of TCR clone 219599 (TRBV24-1, TRBJ2-2)
TSVPPVIGPPGSCFF

SEQ ID NO: 439199 - protein, 12 aa, Homo sapiens
  CDR3 for alpha chain variable domain of TCR clone 219600 (TRAV13-1, TRAJ27)
CAAHNNAGKPTF

SEQ ID NO: 439200 - protein, 14 aa, Homo sapiens
  CDR3 for beta chain variable domain of TCR clone 219600 (TRBV19, TRBJ2-2)
CASSGQGIAGELFF

SEQ ID NO: 439201 - protein, 23 aa, Homo sapiens
  CDR3 for alpha chain variable domain of TCR clone 219601 (TRAV26-1, TRAJ38)
CIADNAGNNHIQNPDPAVYQLSD

SEQ ID NO: 439202 - protein, 13 aa, Homo sapiens
  CDR3 for beta chain variable domain of TCR clone 219601 (TRBV20-1, TRBJ1-1)
CSARGGGNTEAVF

SEQ ID NO: 439203 - protein, 14 aa, Homo sapiens
  CDR3 for alpha chain variable domain of TCR clone 219602 (TRAV1-2, TRAJ16)
CAVNRFSDGQKLLF

SEQ ID NO: 439204 - protein, 16 aa, Homo sapiens
  CDR3 for beta chain variable domain of TCR clone 219602 (TRBV20-1, TRBJ1-4)
CSAPGQGLLTNEKLFV

SEQ ID NO: 439205 - protein, 14 aa, Homo sapiens
  CDR3 for alpha chain variable domain of TCR clone 219603 (TRAV13-1, TRAJ48)
CAASTDFGNEQLTF

SEQ ID NO: 439206 - protein, 15 aa, Homo sapiens
  CDR3 for beta chain variable domain of TCR clone 219603 (TRBV10-2, TRBJ2-5)
CASKPEDRRQETQYF

SEQ ID NO: 439207 - protein, 14 aa, Homo sapiens
  CDR3 for alpha chain variable domain of TCR clone 219604 (TRAV12-2, TRAJ13)
CAVKKTGGYQKVTF

SEQ ID NO: 439208 - protein, 13 aa, Homo sapiens
  CDR3 for beta chain variable domain of TCR clone 219604 (TRBV11-2, TRBJ1-1)
CASSAVVGTEAFF

SEQ ID NO: 439209 - protein, 16 aa, Homo sapiens
  CDR3 for alpha chain variable domain of TCR clone 219605 (TRAV21, TRAJ37)
CAVRPRGSSNTGKLIF

SEQ ID NO: 439210 - protein, 13 aa, Homo sapiens
  CDR3 for beta chain variable domain of TCR clone 219605 (TRBV20-1, TRBJ2-2)
FSALSGGAGELFF

SEQ ID NO: 439211 - protein, 22 aa, Homo sapiens
  CDR3 for alpha chain variable domain of TCR clone 219606 (TRAV27, )
CAARRSAGNNHIQNPDPAVYQL

SEQ ID NO: 439212 - protein, 16 aa, Homo sapiens
  CDR3 for beta chain variable domain of TCR clone 219606 (TRBV20-1, TRBJ1-2)
CSASMGQGVANYGYTF

SEQ ID NO: 439213 - protein, 14 aa, Homo sapiens
  CDR3 for alpha chain variable domain of TCR clone 219607 (TRAV12-3, TRAJ10)
SHLPLTGGGNKLTF

SEQ ID NO: 439214 - protein, 11 aa, Homo sapiens
  CDR3 for beta chain variable domain of TCR clone 219607 (TRBV20-1, TRBJ2-5)
CSADRAVTQYF

SEQ ID NO: 439215 - protein, 21 aa, Homo sapiens
  CDR3 for alpha chain variable domain of TCR clone 219608 (TRAV13-1, TRAJ37)
CAATPKEIKHRQTNLWARDTF

SEQ ID NO: 439216 - protein, 13 aa, Homo sapiens
  CDR3 for beta chain variable domain of TCR clone 219608 (TRBV20-1, TRBJ2-7)
CSATSEDSYEQYF

SEQ ID NO: 439217 - protein, 16 aa, Homo sapiens
  CDR3 for alpha chain variable domain of TCR clone 219609 (TRAV30, TRAJ24)
CGTEIEDADSWGKFQF

SEQ ID NO: 439218 - protein, 12 aa, Homo sapiens
  CDR3 for beta chain variable domain of TCR clone 219609 (TRBV11-2, TRBJ2-2)
CASSLPTGELFF

SEQ ID NO: 439219 - protein, 12 aa, Homo sapiens
  CDR3 for alpha chain variable domain of TCR clone 219610 (TRAV1-1, TRAJ30)
CAVRGRDDKIIF

SEQ ID NO: 439220 - protein, 16 aa, Homo sapiens
  CDR3 for beta chain variable domain of TCR clone 219610 (TRBV7-9, TRBJ2-6)
CASSLKGPLRANVLTF

SEQ ID NO: 439221 - protein, 16 aa, Homo sapiens
  CDR3 for alpha chain variable domain of TCR clone 219611 (TRAV16, TRAJ42)
CALSGLLGGSEGNLIF

SEQ ID NO: 439222 - protein, 15 aa, Homo sapiens
  CDR3 for beta chain variable domain of TCR clone 219611 (TRBV5-1, TRBJ2-1)
CASSPGGLAGNEQFF

SEQ ID NO: 439223 - protein, 15 aa, Homo sapiens
  CDR3 for alpha chain variable domain of TCR clone 219612 (TRAV12-1, TRAJ42)
CVVTRDGGSQGNLLF

SEQ ID NO: 439224 - protein, 14 aa, Homo sapiens
  CDR3 for beta chain variable domain of TCR clone 219612 (TRBV11-2, TRBJ2-3)
CASSLGGGANTQYS

SEQ ID NO: 439225 - protein, 12 aa, Homo sapiens
  CDR3 for alpha chain variable domain of TCR clone 219613 (TRAV12-2, TRAJ10)
WGVTGGGNKLTF

SEQ ID NO: 439226 - protein, 13 aa, Homo sapiens
  CDR3 for beta chain variable domain of TCR clone 219613 (TRBV7-8, TRBJ2-7)
CASSFAGLYEQYF

SEQ ID NO: 439227 - protein, 13 aa, Homo sapiens
  CDR3 for alpha chain variable domain of TCR clone 219614 (TRAV17, TRAJ9)
CATDYTGGFKTIF

SEQ ID NO: 439228 - protein, 12 aa, Homo sapiens
  CDR3 for beta chain variable domain of TCR clone 219614 (TRBV12-4, TRBJ2-7)
CASSLGGYEQYF

SEQ ID NO: 439229 - protein, 13 aa, Homo sapiens
  CDR3 for alpha chain variable domain of TCR clone 219615 (TRAV8-3, TRAJ43)
CAVGPDNNNDMSF

SEQ ID NO: 439230 - protein, 13 aa, Homo sapiens
  CDR3 for beta chain variable domain of TCR clone 219615 (TRBV29-1, TRBJ2-1)
CSVEGGRVNEQFF

SEQ ID NO: 439231 - protein, 15 aa, Homo sapiens
  CDR3 for alpha chain variable domain of TCR clone 219616 (TRAV23/DV6, TRAJ13)
CAAWPGGGGYQKVTF

SEQ ID NO: 439232 - protein, 17 aa, Homo sapiens
  CDR3 for beta chain variable domain of TCR clone 219616 (TRBV19, TRBJ2-7)
SASSISFYDSYPYEQYF

SEQ ID NO: 439233 - protein, 15 aa, Homo sapiens
  CDR3 for alpha chain variable domain of TCR clone 219617 (TRAV34, TRAJ38)
CGADSTPGNNRKLIW

SEQ ID NO: 439234 - protein, 16 aa, Homo sapiens
  CDR3 for beta chain variable domain of TCR clone 219617 (TRBV12-5, TRBJ2-5)
CASGPRTNGNPETQYF

SEQ ID NO: 439235 - protein, 16 aa, Homo sapiens
  CDR3 for alpha chain variable domain of TCR clone 219618 (TRAV20, TRAJ28)
CAVRDPSGAGSYQLTF

SEQ ID NO: 439236 - protein, 17 aa, Homo sapiens
  CDR3 for beta chain variable domain of TCR clone 219618 (TRBV27, TRBJ2-6)
CASSLTGFASGANVLTF

SEQ ID NO: 439237 - protein, 14 aa, Homo sapiens
  CDR3 for alpha chain variable domain of TCR clone 219619 (TRAV8-1, TRAJ24)
CAVNAADSWGKLQF

SEQ ID NO: 439238 - protein, 16 aa, Homo sapiens
  CDR3 for beta chain variable domain of TCR clone 219619 (TRBV4-3, TRBJ2-1)
CASSPAPDRGVNEQFF

SEQ ID NO: 439239 - protein, 15 aa, Homo sapiens
  CDR3 for alpha chain variable domain of TCR clone 219620 (TRAV29/DV5, TRAJ24)
CAASGATDSWGKFQF

SEQ ID NO: 439240 - protein, 18 aa, Homo sapiens
  CDR3 for beta chain variable domain of TCR clone 219620 (TRBV7-3, TRBJ2-5)
CASSLGGAAQGRWETQYF

SEQ ID NO: 439241 - protein, 15 aa, Homo sapiens
  CDR3 for alpha chain variable domain of TCR clone 219621 (TRAV13-1, TRAJ16)
CAARYQMARSCSLQG

SEQ ID NO: 439242 - protein, 13 aa, Homo sapiens
  CDR3 for beta chain variable domain of TCR clone 219621 (TRBV4-1, TRBJ2-1)
CDSSQAGGDEQFF

SEQ ID NO: 439243 - protein, 14 aa, Homo sapiens
  CDR3 for alpha chain variable domain of TCR clone 219622 (TRAV12-2, TRAJ3)
CAVSLYSSASKIIF

SEQ ID NO: 439244 - protein, 14 aa, Homo sapiens
  CDR3 for beta chain variable domain of TCR clone 219622 (TRBV12-5, TRBJ2-5)
CASGSRTHQETQYF

SEQ ID NO: 439245 - protein, 14 aa, Homo sapiens
  CDR3 for alpha chain variable domain of TCR clone 219623 (TRAV2, TRAJ3)
CAVRPYSSASKIIF

SEQ ID NO: 439246 - protein, 17 aa, Homo sapiens
  CDR3 for beta chain variable domain of TCR clone 219623 (TRBV7-6, TRBJ2-5)
CASSSPQAGDPSETQYC

SEQ ID NO: 439247 - protein, 18 aa, Homo sapiens
  CDR3 for alpha chain variable domain of TCR clone 219624 (TRAV13-1, TRAJ52)
CAASKRSAGGTSYGKLTF

SEQ ID NO: 439248 - protein, 16 aa, Homo sapiens
  CDR3 for beta chain variable domain of TCR clone 219624 (TRBV5-1, TRBJ2-1)
CASSLDLGGPEGSSSS

SEQ ID NO: 439249 - protein, 14 aa, Homo sapiens
  CDR3 for alpha chain variable domain of TCR clone 219625 (TRAV1-2, TRAJ16)
CAVNRFSDGQKLLL

SEQ ID NO: 439250 - protein, 15 aa, Homo sapiens
  CDR3 for beta chain variable domain of TCR clone 219625 (TRBV20-1, TRBJ2-7)
CSARDRVSGMDEQYF

SEQ ID NO: 439251 - protein, 14 aa, Homo sapiens
  CDR3 for alpha chain variable domain of TCR clone 219626 (TRAV13-1, TRAJ20)
CAARPGSNDYKLSF

SEQ ID NO: 439252 - protein, 14 aa, Homo sapiens
  CDR3 for beta chain variable domain of TCR clone 219626 (TRBV11-2, TRBJ2-5)
CASSRTGGIETQYF

SEQ ID NO: 439253 - protein, 12 aa, Homo sapiens
  CDR3 for alpha chain variable domain of TCR clone 219627 (TRAV12-1, TRAJ40)
CVFFSGTYKYIF

SEQ ID NO: 439254 - protein, 18 aa, Homo sapiens
  CDR3 for beta chain variable domain of TCR clone 219627 (TRBV12-4, TRBJ2-2)
CASSLVAGTRGRTGELFF

SEQ ID NO: 439255 - protein, 19 aa, Homo sapiens
  CDR3 for alpha chain variable domain of TCR clone 219628 (TRAV1-2, TRAJ16)
CAGSVARHGKASRQTDLSL

SEQ ID NO: 439256 - protein, 16 aa, Homo sapiens
  CDR3 for beta chain variable domain of TCR clone 219628 (TRBV2, TRBJ2-1)
CASRSPAGGKYNEQFF

SEQ ID NO: 439257 - protein, 14 aa, Homo sapiens
  CDR3 for alpha chain variable domain of TCR clone 219629 (TRAV12-1, TRAJ33)
CVVNPEDSNYQLIW

SEQ ID NO: 439258 - protein, 11 aa, Homo sapiens
  CDR3 for beta chain variable domain of TCR clone 219629 (TRBV7-6, TRBJ2-1)
GASSNYGEQFF

SEQ ID NO: 439259 - protein, 14 aa, Homo sapiens
  CDR3 for alpha chain variable domain of TCR clone 219630 (TRAV17, TRAJ57)
CATDPQGGSEKLVF

SEQ ID NO: 439260 - protein, 13 aa, Homo sapiens
  CDR3 for beta chain variable domain of TCR clone 219630 (TRBV20-1, TRBJ2-2)
CSASAAGTGELFF

SEQ ID NO: 439261 - protein, 12 aa, Homo sapiens
  CDR3 for alpha chain variable domain of TCR clone 219631 (TRAV12-1, TRAJ34)
CVVAGATDKLIF

SEQ ID NO: 439262 - protein, 15 aa, Homo sapiens
  CDR3 for beta chain variable domain of TCR clone 219631 (TRBV7-9, TRBJ2-1)
CASSSGLAGGNEQFF

SEQ ID NO: 439263 - protein, 10 aa, Homo sapiens
  CDR3 for alpha chain variable domain of TCR clone 219632 (TRAV26-1, TRAJ40)
CIAGTYKYIF

SEQ ID NO: 439264 - protein, 14 aa, Homo sapiens
  CDR3 for beta chain variable domain of TCR clone 219632 (TRBV4-1, TRBJ2-2)
CASSQAVNTGELFF

SEQ ID NO: 439265 - protein, 16 aa, Homo sapiens
  CDR3 for alpha chain variable domain of TCR clone 219633 (TRAV12-3, TRAJ53)
CAMSPGSGGCNYKLPF

SEQ ID NO: 439266 - protein, 11 aa, Homo sapiens
  CDR3 for beta chain variable domain of TCR clone 219633 (TRBV29-1, TRBJ2-5)
CSEDRTGTQYF

SEQ ID NO: 439267 - protein, 14 aa, Homo sapiens
  CDR3 for alpha chain variable domain of TCR clone 219634 (TRAV17, TRAJ37)
CATVPSSNTGKLIF

SEQ ID NO: 439268 - protein, 13 aa, Homo sapiens
  CDR3 for beta chain variable domain of TCR clone 219634 (TRBV7-9, TRBJ1-2)
CASSLKQNYGYTF

SEQ ID NO: 439269 - protein, 13 aa, Homo sapiens
  CDR3 for alpha chain variable domain of TCR clone 219635 (TRAV36/DV7, TRAJ49)
CSVEANTGNQFYF

SEQ ID NO: 439270 - protein, 13 aa, Homo sapiens
  CDR3 for beta chain variable domain of TCR clone 219635 (TRBV10-3, TRBJ2-7)
CASKLAVNYEQYF

SEQ ID NO: 439271 - protein, 13 aa, Homo sapiens
  CDR3 for alpha chain variable domain of TCR clone 219636 (TRAV13-2, TRAJ53)
CAENMGSNYKLSF

SEQ ID NO: 439272 - protein, 13 aa, Homo sapiens
  CDR3 for beta chain variable domain of TCR clone 219636 (TRBV4-1, TRBJ2-2)
CASSQENTGELFF

SEQ ID NO: 439273 - protein, 14 aa, Homo sapiens
  CDR3 for alpha chain variable domain of TCR clone 219637 (TRAV1-2, TRAJ16)
FAVNRFSDGQKLLF

SEQ ID NO: 439274 - protein, 14 aa, Homo sapiens
  CDR3 for beta chain variable domain of TCR clone 219637 (TRBV13, TRBJ2-5)
CASSLGRGQETQYF

SEQ ID NO: 439275 - protein, 17 aa, Homo sapiens
  CDR3 for alpha chain variable domain of TCR clone 219638 (TRAV12-3, TRAJ6)
CAMSARGGAGGSYITTF

SEQ ID NO: 439276 - protein, 14 aa, Homo sapiens
  CDR3 for beta chain variable domain of TCR clone 219638 (TRBV7-2, TRBJ2-7)
CASRSQGAAYEQYF

SEQ ID NO: 439277 - protein, 11 aa, Homo sapiens
  CDR3 for alpha chain variable domain of TCR clone 219639 (TRAV1-1, TRAJ23)
CAVRQGGKLIF

SEQ ID NO: 439278 - protein, 15 aa, Homo sapiens
  CDR3 for beta chain variable domain of TCR clone 219639 (TRBV18, TRBJ2-6)
CASSPSYAGANVLTF

SEQ ID NO: 439279 - protein, 14 aa, Homo sapiens
  CDR3 for alpha chain variable domain of TCR clone 219640 (TRAV35, TRAJ33)
CAGSSQDSNYKLIW

SEQ ID NO: 439280 - protein, 13 aa, Homo sapiens
  CDR3 for beta chain variable domain of TCR clone 219640 (TRBV7-3, TRBJ1-1)
CASSQDWGAEAFF

SEQ ID NO: 439281 - protein, 17 aa, Homo sapiens
  CDR3 for alpha chain variable domain of TCR clone 219641 (TRAV2, TRAJ36)
CAVEDRGNWGKQPLLWD

SEQ ID NO: 439282 - protein, 16 aa, Homo sapiens
  CDR3 for beta chain variable domain of TCR clone 219641 (TRBV7-9, TRBJ2-7)
CASTSPKGQPSGEQYF

SEQ ID NO: 439283 - protein, 14 aa, Homo sapiens
  CDR3 for alpha chain variable domain of TCR clone 219642 (TRAV20, TRAJ16)
CAVQENSDGQKLPF

SEQ ID NO: 439284 - protein, 13 aa, Homo sapiens
  CDR3 for beta chain variable domain of TCR clone 219642 (TRBV27, TRBJ2-3)
CASSALPGDTQYF

SEQ ID NO: 439285 - protein, 21 aa, Homo sapiens
  CDR3 for alpha chain variable domain of TCR clone 219643 (TRAV1-1, TRAJ6)
CLLLLRCERLERTGVSYIPTF

SEQ ID NO: 439286 - protein, 14 aa, Homo sapiens
  CDR3 for beta chain variable domain of TCR clone 219643 (TRBV7-2, TRBJ2-5)
CASSLSGGGETQYF

SEQ ID NO: 439287 - protein, 13 aa, Homo sapiens
  CDR3 for alpha chain variable domain of TCR clone 219644 (TRAV27, TRAJ53)
CAPSGGSNYKLTF

SEQ ID NO: 439288 - protein, 12 aa, Homo sapiens
  CDR3 for beta chain variable domain of TCR clone 219644 (TRBV6-3, TRBJ2-7)
CASSRQGYEQYF

SEQ ID NO: 439289 - protein, 20 aa, Homo sapiens
  CDR3 for alpha chain variable domain of TCR clone 219645 (TRAV13-1, )
CAASPMDIQNPDPAVYQLRD

SEQ ID NO: 439290 - protein, 13 aa, Homo sapiens
  CDR3 for beta chain variable domain of TCR clone 219645 (TRBV20-1, TRBJ2-2)
YSASAAGTGELFF

SEQ ID NO: 439291 - protein, 17 aa, Homo sapiens
  CDR3 for alpha chain variable domain of TCR clone 219646 (TRAV17, TRAJ28)
CATDPRRGGAGSYQLTF

SEQ ID NO: 439292 - protein, 12 aa, Homo sapiens
  CDR3 for beta chain variable domain of TCR clone 219646 (TRBV7-2, TRBJ2-5)
CASSQYQETQYF

SEQ ID NO: 439293 - protein, 17 aa, Homo sapiens
  CDR3 for alpha chain variable domain of TCR clone 219647 (TRAV3, TRAJ6)
CAVRDGPRAGGSYIPHF

SEQ ID NO: 439294 - protein, 14 aa, Homo sapiens
  CDR3 for beta chain variable domain of TCR clone 219647 (TRBV7-2, TRBJ2-7)
CASSPKTSFYEQYF

SEQ ID NO: 439295 - protein, 11 aa, Homo sapiens
  CDR3 for alpha chain variable domain of TCR clone 219648 (TRAV3, TRAJ49)
CAPITGNQFYV

SEQ ID NO: 439296 - protein, 16 aa, Homo sapiens
  CDR3 for beta chain variable domain of TCR clone 219648 (TRBV5-1, TRBJ2-3)
CASSVFPMSSTDTQYF

SEQ ID NO: 439297 - protein, 15 aa, Homo sapiens
  CDR3 for alpha chain variable domain of TCR clone 219649 (TRAV17, TRAJ57)
CATGPSQGGSKKLVF

SEQ ID NO: 439298 - protein, 18 aa, Homo sapiens
  CDR3 for beta chain variable domain of TCR clone 219649 (TRBV7-9, TRBJ2-7)
CASSLTTSGSRTWYEQYF

SEQ ID NO: 439299 - protein, 12 aa, Homo sapiens
  CDR3 for alpha chain variable domain of TCR clone 219650 (TRAV27, TRAJ42)
CAGGGSQGNLIF

SEQ ID NO: 439300 - protein, 13 aa, Homo sapiens
  CDR3 for beta chain variable domain of TCR clone 219650 (TRBV19, TRBJ2-7)
CASSIRSSYKQYF

SEQ ID NO: 439301 - protein, 14 aa, Homo sapiens
  CDR3 for alpha chain variable domain of TCR clone 219651 (TRAV12-1, TRAJ17)
CVVNYKAAGNKLTF

SEQ ID NO: 439302 - protein, 15 aa, Homo sapiens
  CDR3 for beta chain variable domain of TCR clone 219651 (TRBV11-2, TRBJ2-1)
CASSLGTSGLNEQFF

SEQ ID NO: 439303 - protein, 13 aa, Homo sapiens
  CDR3 for alpha chain variable domain of TCR clone 219652 (TRAV23/DV6, TRAJ35)
CAAQPGFGNVLHC

SEQ ID NO: 439304 - protein, 15 aa, Homo sapiens
  CDR3 for beta chain variable domain of TCR clone 219652 (TRBV27, TRBJ2-2)
CASSKQGASTGELFF

SEQ ID NO: 439305 - protein, 14 aa, Homo sapiens
  CDR3 for alpha chain variable domain of TCR clone 219653 (TRAV16, TRAJ17)
CAPRIKAAGNKLTF

SEQ ID NO: 439306 - protein, 12 aa, Homo sapiens
  CDR3 for beta chain variable domain of TCR clone 219653 (TRBV29-1, TRBJ2-3)
CSVTGGADTQYF

SEQ ID NO: 439307 - protein, 14 aa, Homo sapiens
  CDR3 for alpha chain variable domain of TCR clone 219654 (TRAV12-3, TRAJ10)
SQLPLTGGGNKLTF

SEQ ID NO: 439308 - protein, 15 aa, Homo sapiens
  CDR3 for beta chain variable domain of TCR clone 219654 (TRBV29-1, TRBJ2-6)
CSVGDRGSGANVLTF

SEQ ID NO: 439309 - protein, 13 aa, Homo sapiens
  CDR3 for alpha chain variable domain of TCR clone 219655 (TRAV29/DV5, TRAJ31)
CAASRNNNARLMF

SEQ ID NO: 439310 - protein, 15 aa, Homo sapiens
  CDR3 for beta chain variable domain of TCR clone 219655 (TRBV19, TRBJ1-1)
CASTSGQIQNTEAFF

SEQ ID NO: 439311 - protein, 14 aa, Homo sapiens
  CDR3 for alpha chain variable domain of TCR clone 219656 (TRAV26-1, TRAJ34)
CIVRVAYNTAKLIF

SEQ ID NO: 439312 - protein, 14 aa, Homo sapiens
  CDR3 for beta chain variable domain of TCR clone 219656 (TRBV20-1, TRBJ2-7)
CSAWTALSSYEQYF

SEQ ID NO: 439313 - protein, 16 aa, Homo sapiens
  CDR3 for alpha chain variable domain of TCR clone 219657 (TRAV23/DV6, TRAJ48)
CAPSGVVNFGNEKLTF

SEQ ID NO: 439314 - protein, 15 aa, Homo sapiens
  CDR3 for beta chain variable domain of TCR clone 219657 (TRBV20-1, TRBJ2-5)
CSAGLAGVSQETQYF

SEQ ID NO: 439315 - protein, 12 aa, Homo sapiens
  CDR3 for alpha chain variable domain of TCR clone 219658 (TRAV29/DV5, TRAJ34)
CAASGNTDKLIF

SEQ ID NO: 439316 - protein, 15 aa, Homo sapiens
  CDR3 for beta chain variable domain of TCR clone 219658 (TRBV10-2, TRBJ2-6)
CASSGQGTGANVLTF

SEQ ID NO: 439317 - protein, 12 aa, Homo sapiens
  CDR3 for alpha chain variable domain of TCR clone 219659 (TRAV13-1, TRAJ21)
CAAKEGFNKFYF

SEQ ID NO: 439318 - protein, 14 aa, Homo sapiens
  CDR3 for beta chain variable domain of TCR clone 219659 (TRBV23-1, TRBJ2-5)
CASSVLRSQETQYF

SEQ ID NO: 439319 - protein, 16 aa, Homo sapiens
  CDR3 for alpha chain variable domain of TCR clone 219660 (TRAV3, TRAJ10)
CAVRDMRAEGGNKLTF

SEQ ID NO: 439320 - protein, 19 aa, Homo sapiens
  CDR3 for beta chain variable domain of TCR clone 219660 (TRBV6-3, TRBJ1-2)
CASSYSKGRTGPPNYGYTF

SEQ ID NO: 439321 - protein, 16 aa, Homo sapiens
  CDR3 for alpha chain variable domain of TCR clone 219661 (TRAV3, TRAJ10)
CAVRDMRAGGGNKLTC

SEQ ID NO: 439322 - protein, 15 aa, Homo sapiens
  CDR3 for beta chain variable domain of TCR clone 219661 (TRBV11-3, TRBJ2-7)
CASSPGPASSYEQYF

SEQ ID NO: 439323 - protein, 12 aa, Homo sapiens
  CDR3 for alpha chain variable domain of TCR clone 219662 (TRAV12-3, TRAJ5)
CASGQGRRALTF

SEQ ID NO: 439324 - protein, 16 aa, Homo sapiens
  CDR3 for beta chain variable domain of TCR clone 219662 (TRBV9, TRBJ2-1)
CASSVGGGGNYNEQFF

SEQ ID NO: 439325 - protein, 12 aa, Homo sapiens
  CDR3 for alpha chain variable domain of TCR clone 219663 (TRAV21, TRAJ49)
CAVTNTGNQFYF

SEQ ID NO: 439326 - protein, 17 aa, Homo sapiens
  CDR3 for beta chain variable domain of TCR clone 219663 (TRBV13, TRBJ2-3)
CASSLSRVAGGGEYAVF

SEQ ID NO: 439327 - protein, 13 aa, Homo sapiens
  CDR3 for alpha chain variable domain of TCR clone 219664 (TRAV8-6, TRAJ24)
CAVSSDSWGKFQF

SEQ ID NO: 439328 - protein, 15 aa, Homo sapiens
  CDR3 for beta chain variable domain of TCR clone 219664 (TRBV5-1, TRBJ2-1)
CASSPPRAPYNEQFF

SEQ ID NO: 439329 - protein, 13 aa, Homo sapiens
  CDR3 for alpha chain variable domain of TCR clone 219665 (TRAV38-1, TRAJ42)
CARWGGSQGNLIF

SEQ ID NO: 439330 - protein, 16 aa, Homo sapiens
  CDR3 for beta chain variable domain of TCR clone 219665 (TRBV19, TRBJ2-1)
CASSKAGPSSYNERFF

SEQ ID NO: 439331 - protein, 11 aa, Homo sapiens
  CDR3 for alpha chain variable domain of TCR clone 219666 (TRAV1-2, TRAJ31)
CAVNNNARLMF

SEQ ID NO: 439332 - protein, 15 aa, Homo sapiens
  CDR3 for beta chain variable domain of TCR clone 219666 (TRBV7-2, TRBJ1-1)
CASRSATGWNTEAFF

SEQ ID NO: 439333 - protein, 14 aa, Homo sapiens
  CDR3 for alpha chain variable domain of TCR clone 219667 (TRAV12-1, TRAJ12)
CVVVGGDSSYKLIF

SEQ ID NO: 439334 - protein, 15 aa, Homo sapiens
  CDR3 for beta chain variable domain of TCR clone 219667 (TRBV28, TRBJ1-2)
CASTRPGIMAYGYTF

SEQ ID NO: 439335 - protein, 15 aa, Homo sapiens
  CDR3 for alpha chain variable domain of TCR clone 219668 (TRAV13-1, TRAJ32)
CAASIYGGATNKLIF

SEQ ID NO: 439336 - protein, 15 aa, Homo sapiens
  CDR3 for beta chain variable domain of TCR clone 219668 (TRBV9, TRBJ1-6)
CASSVAGTGDSPLHF

SEQ ID NO: 439337 - protein, 17 aa, Homo sapiens
  CDR3 for alpha chain variable domain of TCR clone 219669 (TRAV26-1, TRAJ37)
CIVRVITVSSNTGKLIF

SEQ ID NO: 439338 - protein, 17 aa, Homo sapiens
  CDR3 for beta chain variable domain of TCR clone 219669 (TRBV7-7, TRBJ2-2)
CASSSVPAGGEIGELFF

SEQ ID NO: 439339 - protein, 13 aa, Homo sapiens
  CDR3 for alpha chain variable domain of TCR clone 219670 (TRAV29/DV5, TRAJ31)
CAASRNNNARLMF

SEQ ID NO: 439340 - protein, 12 aa, Homo sapiens
  CDR3 for beta chain variable domain of TCR clone 219670 (TRBV14, TRBJ2-4)
CASSTLKSIQYF

SEQ ID NO: 439341 - protein, 14 aa, Homo sapiens
  CDR3 for alpha chain variable domain of TCR clone 219671 (TRAV2, TRAJ29)
CAGPVQYGNTPLVF

SEQ ID NO: 439342 - protein, 11 aa, Homo sapiens
  CDR3 for beta chain variable domain of TCR clone 219671 (TRBV29-1, TRBJ2-5)
CSEDRTGTQYF

SEQ ID NO: 439343 - protein, 12 aa, Homo sapiens
  CDR3 for alpha chain variable domain of TCR clone 219672 (TRAV12-3, TRAJ17)
CAMTLTGNKLTF

SEQ ID NO: 439344 - protein, 15 aa, Homo sapiens
  CDR3 for beta chain variable domain of TCR clone 219672 (TRBV20-1, TRBJ2-7)
CSARDRASGMDEHYF

SEQ ID NO: 439345 - protein, 14 aa, Homo sapiens
  CDR3 for alpha chain variable domain of TCR clone 219673 (TRAV8-3, TRAJ36)
CAVGPITGANNLFF

SEQ ID NO: 439346 - protein, 15 aa, Homo sapiens
  CDR3 for beta chain variable domain of TCR clone 219673 (TRBV4-1, TRBJ2-1)
CASSQDPGNYNEQLF

SEQ ID NO: 439347 - protein, 14 aa, Homo sapiens
  CDR3 for alpha chain variable domain of TCR clone 219674 (TRAV1-2, TRAJ8)
CAVREDTGVQKLVF

SEQ ID NO: 439348 - protein, 14 aa, Homo sapiens
  CDR3 for beta chain variable domain of TCR clone 219674 (TRBV6-1, TRBJ2-1)
CASAKDGFYNEQFF

SEQ ID NO: 439349 - protein, 13 aa, Homo sapiens
  CDR3 for alpha chain variable domain of TCR clone 219675 (TRAV13-1, TRAJ39)
CAASIWAGNMLTF

SEQ ID NO: 439350 - protein, 13 aa, Homo sapiens
  CDR3 for beta chain variable domain of TCR clone 219675 (TRBV12-4, TRBJ2-7)
CASSPTETYEQYF

SEQ ID NO: 439351 - protein, 15 aa, Homo sapiens
  CDR3 for alpha chain variable domain of TCR clone 219676 (TRAV12-2, TRAJ53)
CAVNGGGGSNYKLTF

SEQ ID NO: 439352 - protein, 13 aa, Homo sapiens
  CDR3 for beta chain variable domain of TCR clone 219676 (TRBV3-1, TRBJ1-1)
CASSPGVITEEFF

SEQ ID NO: 439353 - protein, 16 aa, Homo sapiens
  CDR3 for alpha chain variable domain of TCR clone 219677 (TRAV12-3, TRAJ58)
CAMTDTEETSGSRLTF

SEQ ID NO: 439354 - protein, 22 aa, Homo sapiens
  CDR3 for beta chain variable domain of TCR clone 219677 (TRBV23-1, TRBJ2-7)
CASSRRLDSGQGYVGGGYEQCF

SEQ ID NO: 439355 - protein, 16 aa, Homo sapiens
  CDR3 for alpha chain variable domain of TCR clone 219678 (TRAV3, TRAJ39)
CAVRDSDESCRQHAHL

SEQ ID NO: 439356 - protein, 15 aa, Homo sapiens
  CDR3 for beta chain variable domain of TCR clone 219678 (TRBV7-6, TRBJ2-7)
CASSLGQGASYEQYF

SEQ ID NO: 439357 - protein, 13 aa, Homo sapiens
  CDR3 for alpha chain variable domain of TCR clone 219679 (TRAV12-3, TRAJ54)
CATSVQGAQKLVF

SEQ ID NO: 439358 - protein, 13 aa, Homo sapiens
  CDR3 for beta chain variable domain of TCR clone 219679 (TRBV2, TRBJ1-6)
CADSGSYNSPLHF

SEQ ID NO: 439359 - protein, 14 aa, Homo sapiens
  CDR3 for alpha chain variable domain of TCR clone 219680 (TRAV1-2, TRAJ8)
CAVREDTGFQKLVF

SEQ ID NO: 439360 - protein, 17 aa, Homo sapiens
  CDR3 for beta chain variable domain of TCR clone 219680 (TRBV28, TRBJ2-5)
CASSRQGGLAGAETQYV

SEQ ID NO: 439361 - protein, 17 aa, Homo sapiens
  CDR3 for alpha chain variable domain of TCR clone 219681 (TRAV2, TRAJ23)
CCLLLCWERGLGGQLIF

SEQ ID NO: 439362 - protein, 20 aa, Homo sapiens
  CDR3 for beta chain variable domain of TCR clone 219681 (TRBV3-1, TRBJ2-6)
CASSPRPGLEGGAGANVLTF

SEQ ID NO: 439363 - protein, 13 aa, Homo sapiens
  CDR3 for alpha chain variable domain of TCR clone 219682 (TRAV13-1, TRAJ12)
CAASPDSSYKLIF

SEQ ID NO: 439364 - protein, 16 aa, Homo sapiens
  CDR3 for beta chain variable domain of TCR clone 219682 (TRBV2, TRBJ1-4)
CASNLLQGATNEKLFF

SEQ ID NO: 439365 - protein, 17 aa, Homo sapiens
  CDR3 for alpha chain variable domain of TCR clone 219683 (TRAV23/DV6, TRAJ58)
CAARLLRGETSGSRLTF

SEQ ID NO: 439366 - protein, 15 aa, Homo sapiens
  CDR3 for beta chain variable domain of TCR clone 219683 (TRBV20-1, TRBJ2-7)
CSARDRVSGMDEQYF

SEQ ID NO: 439367 - protein, 15 aa, Homo sapiens
  CDR3 for alpha chain variable domain of TCR clone 219684 (TRAV13-1, TRAJ36)
CAASIRQTGANTLFF

SEQ ID NO: 439368 - protein, 14 aa, Homo sapiens
  CDR3 for beta chain variable domain of TCR clone 219684 (TRBV6-1, TRBJ1-3)
CASVQGGGGNTIYF

SEQ ID NO: 439369 - protein, 14 aa, Homo sapiens
  CDR3 for alpha chain variable domain of TCR clone 219685 (TRAV3, TRAJ34)
CAVRDINNTDKLIF

SEQ ID NO: 439370 - protein, 14 aa, Homo sapiens
  CDR3 for beta chain variable domain of TCR clone 219685 (TRBV7-2, TRBJ2-2)
CASSLGQNTGELSF

SEQ ID NO: 439371 - protein, 16 aa, Homo sapiens
  CDR3 for alpha chain variable domain of TCR clone 219686 (TRAV16, TRAJ52)
CALSGVGGTSYGKLTF

SEQ ID NO: 439372 - protein, 19 aa, Homo sapiens
  CDR3 for beta chain variable domain of TCR clone 219686 (TRBV25-1, TRBJ2-2)
CAILVYRVDRGRKTGELFF

SEQ ID NO: 439373 - protein, 14 aa, Homo sapiens
  CDR3 for alpha chain variable domain of TCR clone 219687 (TRAV13-1, TRAJ44)
CAAKATGTASKLTF

SEQ ID NO: 439374 - protein, 13 aa, Homo sapiens
  CDR3 for beta chain variable domain of TCR clone 219687 (TRBV5-7, TRBJ1-1)
CSSLAGDWTEAFF

SEQ ID NO: 439375 - protein, 14 aa, Homo sapiens
  CDR3 for alpha chain variable domain of TCR clone 219688 (TRAV12-1, TRAJ17)
CVVNDKAAGNKLTF

SEQ ID NO: 439376 - protein, 14 aa, Homo sapiens
  CDR3 for beta chain variable domain of TCR clone 219688 (TRBV7-8, TRBJ2-3)
CASSLEAGTDTQYF

SEQ ID NO: 439377 - protein, 15 aa, Homo sapiens
  CDR3 for alpha chain variable domain of TCR clone 219689 (TRAV27, TRAJ38)
CAGRFNAGNNRKLIW

SEQ ID NO: 439378 - protein, 14 aa, Homo sapiens
  CDR3 for beta chain variable domain of TCR clone 219689 (TRBV7-8, TRBJ2-3)
CASSSRDSTDTQYF

SEQ ID NO: 439379 - protein, 13 aa, Homo sapiens
  CDR3 for alpha chain variable domain of TCR clone 219690 (TRAV1-1, TRAJ23)
CAVVANQGGKLIF

SEQ ID NO: 439380 - protein, 12 aa, Homo sapiens
  CDR3 for beta chain variable domain of TCR clone 219690 (TRBV5-7, TRBJ1-1)
CTSSLGRGKAFF

SEQ ID NO: 439381 - protein, 16 aa, Homo sapiens
  CDR3 for alpha chain variable domain of TCR clone 219691 (TRAV14/DV4, TRAJ54)
CAMREGRIQGAQKLVF

SEQ ID NO: 439382 - protein, 14 aa, Homo sapiens
  CDR3 for beta chain variable domain of TCR clone 219691 (TRBV7-2, TRBJ2-7)
CASSPKTIFYEQYF

SEQ ID NO: 439383 - protein, 12 aa, Homo sapiens
  CDR3 for alpha chain variable domain of TCR clone 219692 (TRAV23/DV6, TRAJ30)
CAASERDDKIIF

SEQ ID NO: 439384 - protein, 15 aa, Homo sapiens
  CDR3 for beta chain variable domain of TCR clone 219692 (TRBV6-6, TRBJ1-2)
CASSYADRGNYGYTF

SEQ ID NO: 439385 - protein, 14 aa, Homo sapiens
  CDR3 for alpha chain variable domain of TCR clone 219693 (TRAV12-2, TRAJ40)
CAVKIPSGTYKKIF

SEQ ID NO: 439386 - protein, 14 aa, Homo sapiens
  CDR3 for beta chain variable domain of TCR clone 219693 (TRBV20-1, TRBJ1-1)
CSAQTRIGGTEAFF

SEQ ID NO: 439387 - protein, 12 aa, Homo sapiens
  CDR3 for alpha chain variable domain of TCR clone 219694 (TRAV13-1, TRAJ21)
CAAKEGFNKFYF

SEQ ID NO: 439388 - protein, 15 aa, Homo sapiens
  CDR3 for beta chain variable domain of TCR clone 219694 (TRBV7-3, TRBJ2-2)
CASSETGQGTGELFF

SEQ ID NO: 439389 - protein, 14 aa, Homo sapiens
  CDR3 for alpha chain variable domain of TCR clone 219695 (TRAV12-2, TRAJ45)
CSVYSGGGADGLTF

SEQ ID NO: 439390 - protein, 14 aa, Homo sapiens
  CDR3 for beta chain variable domain of TCR clone 219695 (TRBV6-5, TRBJ1-2)
CASTRGGGSDGYTF

SEQ ID NO: 439391 - protein, 13 aa, Homo sapiens
  CDR3 for alpha chain variable domain of TCR clone 219696 (TRAV27, TRAJ41)
CAGEGNSGYALNF

SEQ ID NO: 439392 - protein, 16 aa, Homo sapiens
  CDR3 for beta chain variable domain of TCR clone 219696 (TRBV29-1, TRBJ2-7)
CSVEDAEDGTAYEQYF

SEQ ID NO: 439393 - protein, 17 aa, Homo sapiens
  CDR3 for alpha chain variable domain of TCR clone 219697 (TRAV26-1, TRAJ53)
CIVRVHDSGGSNYKLTF

SEQ ID NO: 439394 - protein, 15 aa, Homo sapiens
  CDR3 for beta chain variable domain of TCR clone 219697 (TRBV20-1, TRBJ2-7)
CSARVPAAYFYEQYF

SEQ ID NO: 439395 - protein, 14 aa, Homo sapiens
  CDR3 for alpha chain variable domain of TCR clone 219698 (TRAV27, TRAJ22)
CAGLTSGSARQLTF

SEQ ID NO: 439396 - protein, 16 aa, Homo sapiens
  CDR3 for beta chain variable domain of TCR clone 219698 (TRBV2, TRBJ2-1)
CASSANPRDWQAEQFF

SEQ ID NO: 439397 - protein, 17 aa, Homo sapiens
  CDR3 for alpha chain variable domain of TCR clone 219699 (TRAV3, TRAJ6)
CAVRDGPRAGGSYIPPC

SEQ ID NO: 439398 - protein, 14 aa, Homo sapiens
  CDR3 for beta chain variable domain of TCR clone 219699 (TRBV7-2, TRBJ2-7)
CASSPKTSFYEQYF

SEQ ID NO: 439399 - protein, 15 aa, Homo sapiens
  CDR3 for alpha chain variable domain of TCR clone 219700 (TRAV2, TRAJ45)
YAVDGTGGGSDGLTF

SEQ ID NO: 439400 - protein, 13 aa, Homo sapiens
  CDR3 for beta chain variable domain of TCR clone 219700 (TRBV7-3, TRBJ1-1)
CASSQDWGAEAFF

SEQ ID NO: 439401 - protein, 15 aa, Homo sapiens
  CDR3 for alpha chain variable domain of TCR clone 219701 (TRAV3, TRAJ22)
CAVRDRGGSARQLPF

SEQ ID NO: 439402 - protein, 14 aa, Homo sapiens
  CDR3 for beta chain variable domain of TCR clone 219701 (TRBV19, TRBJ1-5)
CASSLGLIGQPQHF

SEQ ID NO: 439403 - protein, 16 aa, Homo sapiens
  CDR3 for alpha chain variable domain of TCR clone 219702 (TRAV26-1, TRAJ33)
CIAPFWGEDSNYQLIW

SEQ ID NO: 439404 - protein, 14 aa, Homo sapiens
  CDR3 for beta chain variable domain of TCR clone 219702 (TRBV6-3, TRBJ1-1)
CASSYHSKNTEAFF

SEQ ID NO: 439405 - protein, 16 aa, Homo sapiens
  CDR3 for alpha chain variable domain of TCR clone 219703 (TRAV30, TRAJ49)
SAAQRVGPNTGNQFYF

SEQ ID NO: 439406 - protein, 15 aa, Homo sapiens
  CDR3 for beta chain variable domain of TCR clone 219703 (TRBV2, TRBJ2-1)
CASSGLAGSYNEQFF

SEQ ID NO: 439407 - protein, 16 aa, Homo sapiens
  CDR3 for alpha chain variable domain of TCR clone 219704 (TRAV12-3, TRAJ45)
CAMGWGSGGGADGLTF

SEQ ID NO: 439408 - protein, 14 aa, Homo sapiens
  CDR3 for beta chain variable domain of TCR clone 219704 (TRBV19, TRBJ2-1)
CASPTLVLSGEQFF

SEQ ID NO: 439409 - protein, 15 aa, Homo sapiens
  CDR3 for alpha chain variable domain of TCR clone 219705 (TRAV25, TRAJ53)
CAATGGGGSNYKLTL

SEQ ID NO: 439410 - protein, 15 aa, Homo sapiens
  CDR3 for beta chain variable domain of TCR clone 219705 (TRBV9, TRBJ2-1)
CASSLAGSSYNEQFF

SEQ ID NO: 439411 - protein, 16 aa, Homo sapiens
  CDR3 for alpha chain variable domain of TCR clone 219706 (TRAV4, TRAJ6)
CLVGDNGIRRKLHTYI

SEQ ID NO: 439412 - protein, 15 aa, Homo sapiens
  CDR3 for beta chain variable domain of TCR clone 219706 (TRBV11-3, TRBJ2-3)
CASLKDGREGDTQYF

SEQ ID NO: 439413 - protein, 15 aa, Homo sapiens
  CDR3 for alpha chain variable domain of TCR clone 219707 (TRAV26-1, TRAJ48)
CIVRVGDFGNGKLTF

SEQ ID NO: 439414 - protein, 16 aa, Homo sapiens
  CDR3 for beta chain variable domain of TCR clone 219707 (TRBV4-1, TRBJ2-3)
CASSQRAGGLTDTQYF

SEQ ID NO: 439415 - protein, 16 aa, Homo sapiens
  CDR3 for alpha chain variable domain of TCR clone 219708 (TRAV12-1, TRAJ48)
CAVNMVSHFGNEKLTF

SEQ ID NO: 439416 - protein, 18 aa, Homo sapiens
  CDR3 for beta chain variable domain of TCR clone 219708 (TRBV11-2, TRBJ2-6)
CASSLNPFLGTGANVLTF

SEQ ID NO: 439417 - protein, 14 aa, Homo sapiens
  CDR3 for alpha chain variable domain of TCR clone 219709 (TRAV13-2, TRAJ6)
CAERGSGGSYILTV

SEQ ID NO: 439418 - protein, 13 aa, Homo sapiens
  CDR3 for beta chain variable domain of TCR clone 219709 (TRBV19, TRBJ1-2)
CASSQGQVYGYTF

SEQ ID NO: 439419 - protein, 14 aa, Homo sapiens
  CDR3 for alpha chain variable domain of TCR clone 219710 (TRAV4, TRAJ10)
CLVGDTGGGNTLIF

SEQ ID NO: 439420 - protein, 13 aa, Homo sapiens
  CDR3 for beta chain variable domain of TCR clone 219710 (TRBV10-2, TRBJ2-5)
CVSSVGPQETQYF

SEQ ID NO: 439421 - protein, 21 aa, Homo sapiens
  CDR3 for alpha chain variable domain of TCR clone 219711 (TRAV23/DV6, TRAJ30)
PSLGTQPPTSVQQARDDKIIF

SEQ ID NO: 439422 - protein, 17 aa, Homo sapiens
  CDR3 for beta chain variable domain of TCR clone 219711 (TRBV10-3, TRBJ1-2)
CAISETRDRGLEYGYTF

SEQ ID NO: 439423 - protein, 13 aa, Homo sapiens
  CDR3 for alpha chain variable domain of TCR clone 219712 (TRAV21, TRAJ45)
CAVMGGGDDGLTF

SEQ ID NO: 439424 - protein, 16 aa, Homo sapiens
  CDR3 for beta chain variable domain of TCR clone 219712 (TRBV20-1, TRBJ2-1)
CSARDHLAGGRGEQFF

SEQ ID NO: 439425 - protein, 15 aa, Homo sapiens
  CDR3 for alpha chain variable domain of TCR clone 219713 (TRAV8-4, TRAJ13)
CAVSDRGVGYQKVTF

SEQ ID NO: 439426 - protein, 16 aa, Homo sapiens
  CDR3 for beta chain variable domain of TCR clone 219713 (TRBV6-4, TRBJ1-2)
CASSEAVGDPNYGYTF

SEQ ID NO: 439427 - protein, 16 aa, Homo sapiens
  CDR3 for alpha chain variable domain of TCR clone 219714 (TRAV12-3, TRAJ53)
CAMSPGSGGSNYKLTF

SEQ ID NO: 439428 - protein, 14 aa, Homo sapiens
  CDR3 for beta chain variable domain of TCR clone 219714 (TRBV4-2, TRBJ2-1)
CASGLDRAYNEQSF

SEQ ID NO: 439429 - protein, 11 aa, Homo sapiens
  CDR3 for alpha chain variable domain of TCR clone 219715 (TRAV16, TRAJ29)
WAPSGNTPLVF

SEQ ID NO: 439430 - protein, 15 aa, Homo sapiens
  CDR3 for beta chain variable domain of TCR clone 219715 (TRBV5-7, TRBJ2-7)
WASSPYFEGSYEQYF

SEQ ID NO: 439431 - protein, 15 aa, Homo sapiens
  CDR3 for alpha chain variable domain of TCR clone 219716 (TRAV12-3, TRAJ4)
CAMTRGSGGYNKLIF

SEQ ID NO: 439432 - protein, 17 aa, Homo sapiens
  CDR3 for beta chain variable domain of TCR clone 219716 (TRBV29-1, TRBJ2-1)
CSVVGLAGAYSYNEQFF

SEQ ID NO: 439433 - protein, 13 aa, Homo sapiens
  CDR3 for alpha chain variable domain of TCR clone 219717 (TRAV17, TRAJ21)
CATDGHNFNKFYF

SEQ ID NO: 439434 - protein, 12 aa, Homo sapiens
  CDR3 for beta chain variable domain of TCR clone 219717 (TRBV20-1, TRBJ1-1)
CSARGGNTEAFF

SEQ ID NO: 439435 - protein, 12 aa, Homo sapiens
  CDR3 for alpha chain variable domain of TCR clone 219718 (TRAV12-1, TRAJ16)
CVVSRDGQKLLF

SEQ ID NO: 439436 - protein, 16 aa, Homo sapiens
  CDR3 for beta chain variable domain of TCR clone 219718 (TRBV27, TRBJ2-5)
CASSYGPGGQKETQYF

SEQ ID NO: 439437 - protein, 14 aa, Homo sapiens
  CDR3 for alpha chain variable domain of TCR clone 219719 (TRAV16, TRAJ17)
CALSGRAAGNKLTF

SEQ ID NO: 439438 - protein, 15 aa, Homo sapiens
  CDR3 for beta chain variable domain of TCR clone 219719 (TRBV3-1, TRBJ1-2)
CASSPTRLPEGGYTC

SEQ ID NO: 439439 - protein, 13 aa, Homo sapiens
  CDR3 for alpha chain variable domain of TCR clone 219720 (TRAV21, TRAJ20)
CAVGLRVDYKLSF

SEQ ID NO: 439440 - protein, 13 aa, Homo sapiens
  CDR3 for beta chain variable domain of TCR clone 219720 (TRBV4-3, TRBJ2-1)
CASSQDMRYEQFF

SEQ ID NO: 439441 - protein, 16 aa, Homo sapiens
  CDR3 for alpha chain variable domain of TCR clone 219721 (TRAV30, TRAJ24)
CGTEIVDADSWGKFQF

SEQ ID NO: 439442 - protein, 13 aa, Homo sapiens
  CDR3 for beta chain variable domain of TCR clone 219721 (TRBV27, TRBJ2-1)
CASSSGSYNEQFF

SEQ ID NO: 439443 - protein, 12 aa, Homo sapiens
  CDR3 for alpha chain variable domain of TCR clone 219722 (TRAV8-4, TRAJ43)
CAVSVNNNDIRF

SEQ ID NO: 439444 - protein, 13 aa, Homo sapiens
  CDR3 for beta chain variable domain of TCR clone 219722 (TRBV4-2, TRBJ1-1)
CASSQAGNTEAFF

SEQ ID NO: 439445 - protein, 14 aa, Homo sapiens
  CDR3 for alpha chain variable domain of TCR clone 219723 (TRAV8-3, TRAJ47)
CAVGAQGYGNKLGF

SEQ ID NO: 439446 - protein, 14 aa, Homo sapiens
  CDR3 for beta chain variable domain of TCR clone 219723 (TRBV6-5, TRBJ2-7)
CASSSGVPPYEQYF

SEQ ID NO: 439447 - protein, 14 aa, Homo sapiens
  CDR3 for alpha chain variable domain of TCR clone 219724 (TRAV16, TRAJ17)
CALSGRASGNKLTF

SEQ ID NO: 439448 - protein, 15 aa, Homo sapiens
  CDR3 for beta chain variable domain of TCR clone 219724 (TRBV3-1, TRBJ1-2)
CASSPTRLPEGGYTF

SEQ ID NO: 439449 - protein, 14 aa, Homo sapiens
  CDR3 for alpha chain variable domain of TCR clone 219725 (TRAV12-2, TRAJ13)
CAVKETGVYQKVTF

SEQ ID NO: 439450 - protein, 18 aa, Homo sapiens
  CDR3 for beta chain variable domain of TCR clone 219725 (TRBV11-2, TRBJ2-3)
CASSLGGASRGAPNTQYF

SEQ ID NO: 439451 - protein, 11 aa, Homo sapiens
  CDR3 for alpha chain variable domain of TCR clone 219726 (TRAV1-2, TRAJ34)
SASPNTDKLIF

SEQ ID NO: 439452 - protein, 18 aa, Homo sapiens
  CDR3 for beta chain variable domain of TCR clone 219726 (TRBV3-1, TRBJ2-5)
CASSQAGTSGGGRETQYF

SEQ ID NO: 439453 - protein, 15 aa, Homo sapiens
  CDR3 for alpha chain variable domain of TCR clone 219727 (TRAV3, TRAJ4)
CAQNMFSGGYNKLIF

SEQ ID NO: 439454 - protein, 13 aa, Homo sapiens
  CDR3 for beta chain variable domain of TCR clone 219727 (TRBV10-2, TRBJ2-7)
CASSEGQYYEQYF

SEQ ID NO: 439455 - protein, 14 aa, Homo sapiens
  CDR3 for alpha chain variable domain of TCR clone 219728 (TRAV26-1, TRAJ34)
CIVRVAYNTDKLIF

SEQ ID NO: 439456 - protein, 17 aa, Homo sapiens
  CDR3 for beta chain variable domain of TCR clone 219728 (TRBV7-3, TRBJ2-2)
CASSLSGTSGGTGELFF

SEQ ID NO: 439457 - protein, 14 aa, Homo sapiens
  CDR3 for alpha chain variable domain of TCR clone 219729 (TRAV2, TRAJ9)
CAVEDRSGGFKTIF

SEQ ID NO: 439458 - protein, 12 aa, Homo sapiens
  CDR3 for beta chain variable domain of TCR clone 219729 (TRBV7-6, TRBJ2-5)
CASSLSQETQYF

SEQ ID NO: 439459 - protein, 14 aa, Homo sapiens
  CDR3 for alpha chain variable domain of TCR clone 219730 (TRAV35, TRAJ42)
CSGPKGGSQGNLIF

SEQ ID NO: 439460 - protein, 16 aa, Homo sapiens
  CDR3 for beta chain variable domain of TCR clone 219730 (TRBV4-2, TRBJ2-3)
CASSQELAGDTDTQYF

SEQ ID NO: 439461 - protein, 12 aa, Homo sapiens
  CDR3 for alpha chain variable domain of TCR clone 219731 (TRAV25, TRAJ45)
DYSGGGADGLTF

SEQ ID NO: 439462 - protein, 19 aa, Homo sapiens
  CDR3 for beta chain variable domain of TCR clone 219731 (TRBV28, TRBJ2-7)
CSSSYSGTSRLGWVYEQYF

SEQ ID NO: 439463 - protein, 12 aa, Homo sapiens
  CDR3 for alpha chain variable domain of TCR clone 219732 (TRAV2, TRAJ9)
CAVVAGGLKTIF

SEQ ID NO: 439464 - protein, 16 aa, Homo sapiens
  CDR3 for beta chain variable domain of TCR clone 219732 (TRBV13, TRBJ2-2)
CASSPRTGEHTGELFF

SEQ ID NO: 439465 - protein, 15 aa, Homo sapiens
  CDR3 for alpha chain variable domain of TCR clone 219733 (TRAV17, TRAJ57)
CATRPSQGGSEKLVF

SEQ ID NO: 439466 - protein, 14 aa, Homo sapiens
  CDR3 for beta chain variable domain of TCR clone 219733 (TRBV12-5, TRBJ2-5)
CASGSRTHQETQYF

SEQ ID NO: 439467 - protein, 14 aa, Homo sapiens
  CDR3 for alpha chain variable domain of TCR clone 219734 (TRAV34, TRAJ22)
CGADTSGSARQLTF

SEQ ID NO: 439468 - protein, 16 aa, Homo sapiens
  CDR3 for beta chain variable domain of TCR clone 219734 (TRBV2, TRBJ2-3)
CQHRGAPRRWTHTQYF

SEQ ID NO: 439469 - protein, 14 aa, Homo sapiens
  CDR3 for alpha chain variable domain of TCR clone 219735 (TRAV27, TRAJ13)
CRSSNSGGYQKVTF

SEQ ID NO: 439470 - protein, 19 aa, Homo sapiens
  CDR3 for beta chain variable domain of TCR clone 219735 (TRBV7-2, TRBJ2-3)
CASSFLSRNWGGGTDTQYF

SEQ ID NO: 439471 - protein, 15 aa, Homo sapiens
  CDR3 for alpha chain variable domain of TCR clone 219736 (TRAV3, TRAJ15)
CAVRPANQAGTALIF

SEQ ID NO: 439472 - protein, 14 aa, Homo sapiens
  CDR3 for beta chain variable domain of TCR clone 219736 (TRBV4-1, TRBJ2-2)
YASSQAVNTGELFF

SEQ ID NO: 439473 - protein, 11 aa, Homo sapiens
  CDR3 for alpha chain variable domain of TCR clone 219737 (TRAV1-2, TRAJ34)
CAGYNTDRLIF

SEQ ID NO: 439474 - protein, 16 aa, Homo sapiens
  CDR3 for beta chain variable domain of TCR clone 219737 (TRBV10-3, TRBJ2-1)
CAISGVGDGGGGEQFF

SEQ ID NO: 439475 - protein, 17 aa, Homo sapiens
  CDR3 for alpha chain variable domain of TCR clone 219738 (TRAV3, TRAJ12)
CAVRDGGRMDSSYKLIF

SEQ ID NO: 439476 - protein, 17 aa, Homo sapiens
  CDR3 for beta chain variable domain of TCR clone 219738 (TRBV13, TRBJ2-3)
CVSSLSRVAGGRNTQYF

SEQ ID NO: 439477 - protein, 15 aa, Homo sapiens
  CDR3 for alpha chain variable domain of TCR clone 219739 (TRAV17, TRAJ57)
CATGPSKGGSEKLVV

SEQ ID NO: 439478 - protein, 14 aa, Homo sapiens
  CDR3 for beta chain variable domain of TCR clone 219739 (TRBV12-5, TRBJ2-5)
CASGSRTHQETQYF

SEQ ID NO: 439479 - protein, 12 aa, Homo sapiens
  CDR3 for alpha chain variable domain of TCR clone 219740 (TRAV10, TRAJ6)
CVASEGSYIPTF

SEQ ID NO: 439480 - protein, 12 aa, Homo sapiens
  CDR3 for beta chain variable domain of TCR clone 219740 (TRBV4-2, TRBJ2-7)
CASSLEGYEQYF

SEQ ID NO: 439481 - protein, 15 aa, Homo sapiens
  CDR3 for alpha chain variable domain of TCR clone 219741 (TRAV21, TRAJ53)
CATLNSGGSNYKLTF

SEQ ID NO: 439482 - protein, 14 aa, Homo sapiens
  CDR3 for beta chain variable domain of TCR clone 219741 (TRBV7-2, TRBJ2-7)
CASSLPPGQGPQYC

SEQ ID NO: 439483 - protein, 11 aa, Homo sapiens
  CDR3 for alpha chain variable domain of TCR clone 219742 (TRAV2, TRAJ13)
CASGGYQKVTF

SEQ ID NO: 439484 - protein, 15 aa, Homo sapiens
  CDR3 for beta chain variable domain of TCR clone 219742 (TRBV7-9, TRBJ1-6)
CASSSPGRGNSTLHF

SEQ ID NO: 439485 - protein, 15 aa, Homo sapiens
  CDR3 for alpha chain variable domain of TCR clone 219743 (TRAV8-3, TRAJ27)
GAVGPAKTNAGKSTF

SEQ ID NO: 439486 - protein, 15 aa, Homo sapiens
  CDR3 for beta chain variable domain of TCR clone 219743 (TRBV7-2, TRBJ2-1)
CASSSGLAGGNEQFF

SEQ ID NO: 439487 - protein, 12 aa, Homo sapiens
  CDR3 for alpha chain variable domain of TCR clone 219744 (TRAV8-3, TRAJ26)
CAGDSYGQNPVF

SEQ ID NO: 439488 - protein, 13 aa, Homo sapiens
  CDR3 for beta chain variable domain of TCR clone 219744 (TRBV27, TRBJ1-1)
CASSLSIGAEAFF

SEQ ID NO: 439489 - protein, 16 aa, Homo sapiens
  CDR3 for alpha chain variable domain of TCR clone 219745 (TRAV25, TRAJ53)
CAGPKGRGGSNYKLTF

SEQ ID NO: 439490 - protein, 17 aa, Homo sapiens
  CDR3 for beta chain variable domain of TCR clone 219745 (TRBV11-3, TRBJ2-6)
CASKWRQGLSGANVLTF

SEQ ID NO: 439491 - protein, 14 aa, Homo sapiens
  CDR3 for alpha chain variable domain of TCR clone 219746 (TRAV13-1, TRAJ26)
CAASRGNYGQNFVF

SEQ ID NO: 439492 - protein, 14 aa, Homo sapiens
  CDR3 for beta chain variable domain of TCR clone 219746 (TRBV6-1, TRBJ2-7)
CASNRARPDYEQYF

SEQ ID NO: 439493 - protein, 18 aa, Homo sapiens
  CDR3 for alpha chain variable domain of TCR clone 219747 (TRAV26-1, TRAJ52)
CIVRVEGAGGTSYGKPTF

SEQ ID NO: 439494 - protein, 13 aa, Homo sapiens
  CDR3 for beta chain variable domain of TCR clone 219747 (TRBV7-3, TRBJ1-2)
CASSLKRGYGDTF

SEQ ID NO: 439495 - protein, 14 aa, Homo sapiens
  CDR3 for alpha chain variable domain of TCR clone 219748 (TRAV3, TRAJ27)
CAVRDDTNSGKSTF

SEQ ID NO: 439496 - protein, 15 aa, Homo sapiens
  CDR3 for beta chain variable domain of TCR clone 219748 (TRBV7-7, TRBJ2-2)
CATSKLAKNTGELFF

SEQ ID NO: 439497 - protein, 14 aa, Homo sapiens
  CDR3 for alpha chain variable domain of TCR clone 219749 (TRAV2, TRAJ37)
CAVDFTSSTGKLIF

SEQ ID NO: 439498 - protein, 15 aa, Homo sapiens
  CDR3 for beta chain variable domain of TCR clone 219749 (TRBV20-1, TRBJ1-1)
CSACRGVTGNTEAFF

SEQ ID NO: 439499 - protein, 14 aa, Homo sapiens
  CDR3 for alpha chain variable domain of TCR clone 219750 (TRAV1-2, TRAJ8)
CAVRDPPGFQKLVF

SEQ ID NO: 439500 - protein, 16 aa, Homo sapiens
  CDR3 for beta chain variable domain of TCR clone 219750 (TRBV19, TRBJ2-1)
CASSKAGPSSYNEQFF

SEQ ID NO: 439501 - protein, 13 aa, Homo sapiens
  CDR3 for alpha chain variable domain of TCR clone 219751 (TRAV8-3, TRAJ36)
CAVGATGANNLFF

SEQ ID NO: 439502 - protein, 15 aa, Homo sapiens
  CDR3 for beta chain variable domain of TCR clone 219751 (TRBV19, TRBJ2-2)
CASSPRTGWTGELFF

SEQ ID NO: 439503 - protein, 11 aa, Homo sapiens
  CDR3 for alpha chain variable domain of TCR clone 219752 (TRAV2, TRAJ33)
CAVESNYQLIW

SEQ ID NO: 439504 - protein, 13 aa, Homo sapiens
  CDR3 for beta chain variable domain of TCR clone 219752 (TRBV12-5, TRBJ2-3)
CASGDRQSDTQYF

SEQ ID NO: 439505 - protein, 14 aa, Homo sapiens
  CDR3 for alpha chain variable domain of TCR clone 219753 (TRAV23/DV6, TRAJ4)
CAANLSGGYNKLIF

SEQ ID NO: 439506 - protein, 11 aa, Homo sapiens
  CDR3 for beta chain variable domain of TCR clone 219753 (TRBV7-9, TRBJ2-3)
CASSPTGTQYF

SEQ ID NO: 439507 - protein, 16 aa, Homo sapiens
  CDR3 for alpha chain variable domain of TCR clone 219754 (TRAV30, TRAJ24)
CGTEIVDADSWGKFQF

SEQ ID NO: 439508 - protein, 19 aa, Homo sapiens
  CDR3 for beta chain variable domain of TCR clone 219754 (TRBV25-1, TRBJ2-2)
CAILVYRVYRGRKTGELFF

SEQ ID NO: 439509 - protein, 11 aa, Homo sapiens
  CDR3 for alpha chain variable domain of TCR clone 219755 (TRAV3, TRAJ21)
CAVGNFNKFYF

SEQ ID NO: 439510 - protein, 16 aa, Homo sapiens
  CDR3 for beta chain variable domain of TCR clone 219755 (TRBV19, TRBJ2-1)
CASSKAGPGTYNEQFF

SEQ ID NO: 439511 - protein, 23 aa, Homo sapiens
  CDR3 for alpha chain variable domain of TCR clone 219756 (TRAV30, TRAJ43)
CTLRPPSSVTQEPTSAALSDMRF

SEQ ID NO: 439512 - protein, 17 aa, Homo sapiens
  CDR3 for beta chain variable domain of TCR clone 219756 (TRBV7-3, TRBJ2-3)
CASSLMKRMRGADTQYF

SEQ ID NO: 439513 - protein, 14 aa, Homo sapiens
  CDR3 for alpha chain variable domain of TCR clone 219757 (TRAV12-3, TRAJ10)
SHLPLTGRGNKLTF

SEQ ID NO: 439514 - protein, 13 aa, Homo sapiens
  CDR3 for beta chain variable domain of TCR clone 219757 (TRBV7-7, TRBJ2-5)
CASSRSGQETQYF

SEQ ID NO: 439515 - protein, 21 aa, Homo sapiens
  CDR3 for alpha chain variable domain of TCR clone 219758 (TRAV12-1, TRAJ37)
CVVNGGLWQHRQTNLCARDNF

SEQ ID NO: 439516 - protein, 12 aa, Homo sapiens
  CDR3 for beta chain variable domain of TCR clone 219758 (TRBV20-1, TRBJ1-2)
CSAPGFNYGYTF

SEQ ID NO: 439517 - protein, 22 aa, Homo sapiens
  CDR3 for alpha chain variable domain of TCR clone 219759 (TRAV3, TRAJ38)
CAVRDCLNAGNNHIQNPDPAVY

SEQ ID NO: 439518 - protein, 13 aa, Homo sapiens
  CDR3 for beta chain variable domain of TCR clone 219759 (TRBV23-1, TRBJ1-4)
CASRGKFNENLFF

SEQ ID NO: 439519 - protein, 13 aa, Homo sapiens
  CDR3 for alpha chain variable domain of TCR clone 219760 (TRAV26-1, TRAJ34)
CIVRGPNTDKLIF

SEQ ID NO: 439520 - protein, 15 aa, Homo sapiens
  CDR3 for beta chain variable domain of TCR clone 219760 (TRBV4-1, TRBJ2-7)
CASSQEWGPSYEQYF

SEQ ID NO: 439521 - protein, 16 aa, Homo sapiens
  CDR3 for alpha chain variable domain of TCR clone 219761 (TRAV30, TRAJ24)
CGTEIVDADSWGKFQF

SEQ ID NO: 439522 - protein, 19 aa, Homo sapiens
  CDR3 for beta chain variable domain of TCR clone 219761 (TRBV25-1, TRBJ2-2)
CAIPVYRVERGRKTGELFF

SEQ ID NO: 439523 - protein, 12 aa, Homo sapiens
  CDR3 for alpha chain variable domain of TCR clone 219762 (TRAV17, TRAJ20)
CATDSNDYKLSL

SEQ ID NO: 439524 - protein, 11 aa, Homo sapiens
  CDR3 for beta chain variable domain of TCR clone 219762 (TRBV11-2, TRBJ1-1)
CASSINTEAFF

SEQ ID NO: 439525 - protein, 12 aa, Homo sapiens
  CDR3 for alpha chain variable domain of TCR clone 219763 (TRAV13-2, TRAJ23)
CAERHRGGKLIF

SEQ ID NO: 439526 - protein, 16 aa, Homo sapiens
  CDR3 for beta chain variable domain of TCR clone 219763 (TRBV12-4, TRBJ2-1)
CASSAVGQGNGDEQFF

SEQ ID NO: 439527 - protein, 15 aa, Homo sapiens
  CDR3 for alpha chain variable domain of TCR clone 219764 (TRAV3, TRAJ13)
CAVRDIGGGYQKVTF

SEQ ID NO: 439528 - protein, 14 aa, Homo sapiens
  CDR3 for beta chain variable domain of TCR clone 219764 (TRBV4-2, TRBJ2-5)
CASSQDRGRETQYF

SEQ ID NO: 439529 - protein, 11 aa, Homo sapiens
  CDR3 for alpha chain variable domain of TCR clone 219765 (TRAV1-1, TRAJ23)
CAVRQGGKLIF

SEQ ID NO: 439530 - protein, 20 aa, Homo sapiens
  CDR3 for beta chain variable domain of TCR clone 219765 (TRBV7-8, TRBJ2-2)
CSSSHLFPGPTIHITGELFF

SEQ ID NO: 439531 - protein, 13 aa, Homo sapiens
  CDR3 for alpha chain variable domain of TCR clone 219766 (TRAV13-1, TRAJ20)
CAASVSNDYKLSF

SEQ ID NO: 439532 - protein, 16 aa, Homo sapiens
  CDR3 for beta chain variable domain of TCR clone 219766 (TRBV11-1, TRBJ1-1)
CATNPRDRAFNTEAFF

SEQ ID NO: 439533 - protein, 13 aa, Homo sapiens
  CDR3 for alpha chain variable domain of TCR clone 219767 (TRAV27, TRAJ49)
CAPRPYTGNQFYF

SEQ ID NO: 439534 - protein, 16 aa, Homo sapiens
  CDR3 for beta chain variable domain of TCR clone 219767 (TRBV4-1, TRBJ1-2)
CASSQDAGQVLHGYTF

SEQ ID NO: 439535 - protein, 11 aa, Homo sapiens
  CDR3 for alpha chain variable domain of TCR clone 219768 (TRAV21, TRAJ34)
CAVTNTDKLIF

SEQ ID NO: 439536 - protein, 16 aa, Homo sapiens
  CDR3 for beta chain variable domain of TCR clone 219768 (TRBV11-2, TRBJ1-1)
CASSLRQGGEHSKAFF

SEQ ID NO: 439537 - protein, 13 aa, Homo sapiens
  CDR3 for alpha chain variable domain of TCR clone 219769 (TRAV2, TRAJ40)
CAVVTSGTYKYIF

SEQ ID NO: 439538 - protein, 16 aa, Homo sapiens
  CDR3 for beta chain variable domain of TCR clone 219769 (TRBV29-1, TRBJ2-6)
CSVEDITYSWANVLTF

SEQ ID NO: 439539 - protein, 14 aa, Homo sapiens
  CDR3 for alpha chain variable domain of TCR clone 219770 (TRAV12-1, TRAJ22)
CVVNVGGSARQLTF

SEQ ID NO: 439540 - protein, 13 aa, Homo sapiens
  CDR3 for beta chain variable domain of TCR clone 219770 (TRBV10-3, TRBJ2-7)
CASKLAVNYEQYF

SEQ ID NO: 439541 - protein, 13 aa, Homo sapiens
  CDR3 for alpha chain variable domain of TCR clone 219771 (TRAV12-2, TRAJ52)
CALSGTSYGKLTF

SEQ ID NO: 439542 - protein, 16 aa, Homo sapiens
  CDR3 for beta chain variable domain of TCR clone 219771 (TRBV5-7, TRBJ2-7)
CASSPTSGRELDEQYF

SEQ ID NO: 439543 - protein, 14 aa, Homo sapiens
  CDR3 for alpha chain variable domain of TCR clone 219772 (TRAV17, TRAJ12)
CAMDEKDSSYKLIF

SEQ ID NO: 439544 - protein, 16 aa, Homo sapiens
  CDR3 for beta chain variable domain of TCR clone 219772 (TRBV11-2, TRBJ2-1)
CASSPRLAGVYNEQFF

SEQ ID NO: 439545 - protein, 14 aa, Homo sapiens
  CDR3 for alpha chain variable domain of TCR clone 219773 (TRAV2, TRAJ13)
CAVEDSGGYQKVTF

SEQ ID NO: 439546 - protein, 16 aa, Homo sapiens
  CDR3 for beta chain variable domain of TCR clone 219773 (TRBV5-5, TRBJ1-2)
CASSFHSTEVNYGYTF

SEQ ID NO: 439547 - protein, 13 aa, Homo sapiens
  CDR3 for alpha chain variable domain of TCR clone 219774 (TRAV26-1, TRAJ48)
CIVRVVGEAKLTF

SEQ ID NO: 439548 - protein, 19 aa, Homo sapiens
  CDR3 for beta chain variable domain of TCR clone 219774 (TRBV11-3, TRBJ2-2)
CASSTRPGAKTTNTGELFF

SEQ ID NO: 439549 - protein, 14 aa, Homo sapiens
  CDR3 for alpha chain variable domain of TCR clone 219775 (TRAV23/DV6, TRAJ40)
CAASLTSGTYKYIF

SEQ ID NO: 439550 - protein, 11 aa, Homo sapiens
  CDR3 for beta chain variable domain of TCR clone 219775 (TRBV5-1, TRBJ2-3)
SRGQGGGTQYF

SEQ ID NO: 439551 - protein, 15 aa, Homo sapiens
  CDR3 for alpha chain variable domain of TCR clone 219776 (TRAV21, TRAJ52)
CAVRGGGTSYGKLTF

SEQ ID NO: 439552 - protein, 15 aa, Homo sapiens
  CDR3 for beta chain variable domain of TCR clone 219776 (TRBV7-2, TRBJ2-1)
CASSSGLAGGNEQFF

SEQ ID NO: 439553 - protein, 10 aa, Homo sapiens
  CDR3 for alpha chain variable domain of TCR clone 219777 (TRAV26-1, TRAJ40)
CIAGTYTYIF

SEQ ID NO: 439554 - protein, 15 aa, Homo sapiens
  CDR3 for beta chain variable domain of TCR clone 219777 (TRBV19, TRBJ2-1)
CASSSPGVPLDEQFF

SEQ ID NO: 439555 - protein, 17 aa, Homo sapiens
  CDR3 for alpha chain variable domain of TCR clone 219778 (TRAV16, TRAJ58)
CITVLSNGETSGSRLTF

SEQ ID NO: 439556 - protein, 16 aa, Homo sapiens
  CDR3 for beta chain variable domain of TCR clone 219778 (TRBV18, TRBJ2-1)
CQLKRAWRGADNEQFF

SEQ ID NO: 439557 - protein, 12 aa, Homo sapiens
  CDR3 for alpha chain variable domain of TCR clone 219779 (TRAV12-1, TRAJ40)
CLVYSGTYKYIF

SEQ ID NO: 439558 - protein, 14 aa, Homo sapiens
  CDR3 for beta chain variable domain of TCR clone 219779 (TRBV11-2, TRBJ2-7)
CASRSQGAAYEQYF

SEQ ID NO: 439559 - protein, 11 aa, Homo sapiens
  CDR3 for alpha chain variable domain of TCR clone 219780 (TRAV17, TRAJ9)
CGFTGGFKTIF

SEQ ID NO: 439560 - protein, 18 aa, Homo sapiens
  CDR3 for beta chain variable domain of TCR clone 219780 (TRBV12-4, TRBJ2-2)
CASSLVSGTRGRTGELFF

SEQ ID NO: 439561 - protein, 11 aa, Homo sapiens
  CDR3 for alpha chain variable domain of TCR clone 219781 (TRAV12-1, TRAJ16)
CGDPDGQKLLF

SEQ ID NO: 439562 - protein, 14 aa, Homo sapiens
  CDR3 for beta chain variable domain of TCR clone 219781 (TRBV20-1, TRBJ2-1)
CSARGTVSYNEQFF

SEQ ID NO: 439563 - protein, 11 aa, Homo sapiens
  CDR3 for alpha chain variable domain of TCR clone 219782 (TRAV4, TRAJ31)
CLVGLNARPMF

SEQ ID NO: 439564 - protein, 16 aa, Homo sapiens
  CDR3 for beta chain variable domain of TCR clone 219782 (TRBV15, TRBJ2-6)
CANSVNGGFLANVLTF

SEQ ID NO: 439565 - protein, 13 aa, Homo sapiens
  CDR3 for alpha chain variable domain of TCR clone 219783 (TRAV12-2, TRAJ52)
CAAHGTSYGKLTF

SEQ ID NO: 439566 - protein, 16 aa, Homo sapiens
  CDR3 for beta chain variable domain of TCR clone 219783 (TRBV4-1, TRBJ2-3)
CASSQSTSGAEDTQYF

SEQ ID NO: 439567 - protein, 16 aa, Homo sapiens
  CDR3 for alpha chain variable domain of TCR clone 219784 (TRAV20, TRAJ52)
CAVLPAGGTSYGKLTF

SEQ ID NO: 439568 - protein, 12 aa, Homo sapiens
  CDR3 for beta chain variable domain of TCR clone 219784 (TRBV19, TRBJ2-1)
CASSQISNEQFF

SEQ ID NO: 439569 - protein, 12 aa, Homo sapiens
  CDR3 for alpha chain variable domain of TCR clone 219785 (TRAV12-3, TRAJ17)
CAMTLTGNKLTF

SEQ ID NO: 439570 - protein, 13 aa, Homo sapiens
  CDR3 for beta chain variable domain of TCR clone 219785 (TRBV6-9, TRBJ2-5)
CASKGDGRRTQYF

SEQ ID NO: 439571 - protein, 14 aa, Homo sapiens
  CDR3 for alpha chain variable domain of TCR clone 219786 (TRAV38-1, TRAJ45)
CASHSGGGADGLTF

SEQ ID NO: 439572 - protein, 13 aa, Homo sapiens
  CDR3 for beta chain variable domain of TCR clone 219786 (TRBV10-3, TRBJ1-2)
CAISERGSYDYTF

SEQ ID NO: 439573 - protein, 12 aa, Homo sapiens
  CDR3 for alpha chain variable domain of TCR clone 219787 (TRAV17, TRAJ45)
CAAGGGADGLTF

SEQ ID NO: 439574 - protein, 15 aa, Homo sapiens
  CDR3 for beta chain variable domain of TCR clone 219787 (TRBV20-1, TRBJ2-7)
YSARDRVSGMDEQYF

SEQ ID NO: 439575 - protein, 16 aa, Homo sapiens
  CDR3 for alpha chain variable domain of TCR clone 219788 (TRAV30, TRAJ24)
CGTEIVDADSWGKFQF

SEQ ID NO: 439576 - protein, 12 aa, Homo sapiens
  CDR3 for beta chain variable domain of TCR clone 219788 (TRBV7-8, TRBJ2-7)
CASEGGPYGQYF

SEQ ID NO: 439577 - protein, 13 aa, Homo sapiens
  CDR3 for alpha chain variable domain of TCR clone 219789 (TRAV13-1, TRAJ21)
CAASIYNFNKFYF

SEQ ID NO: 439578 - protein, 13 aa, Homo sapiens
  CDR3 for beta chain variable domain of TCR clone 219789 (TRBV27, TRBJ1-4)
CASSVMGNEKLFF

SEQ ID NO: 439579 - protein, 14 aa, Homo sapiens
  CDR3 for alpha chain variable domain of TCR clone 219790 (TRAV35, TRAJ22)
CAGLRPGSAWQLTF

SEQ ID NO: 439580 - protein, 15 aa, Homo sapiens
  CDR3 for beta chain variable domain of TCR clone 219790 (TRBV12-4, TRBJ2-5)
CASSPPTGLQKTQYF

SEQ ID NO: 439581 - protein, 16 aa, Homo sapiens
  CDR3 for alpha chain variable domain of TCR clone 219791 (TRAV30, TRAJ24)
CGTEIVDADSWGKFQF

SEQ ID NO: 439582 - protein, 14 aa, Homo sapiens
  CDR3 for beta chain variable domain of TCR clone 219791 (TRBV7-2, TRBJ2-7)
CASSPKISFYEQYF

SEQ ID NO: 439583 - protein, 16 aa, Homo sapiens
  CDR3 for alpha chain variable domain of TCR clone 219792 (TRAV27, TRAJ52)
CAGAPAGGTTYGKLTF

SEQ ID NO: 439584 - protein, 12 aa, Homo sapiens
  CDR3 for beta chain variable domain of TCR clone 219792 (TRBV27, TRBJ2-1)
CASRGFYNEQFF

SEQ ID NO: 439585 - protein, 14 aa, Homo sapiens
  CDR3 for alpha chain variable domain of TCR clone 219793 (TRAV1-2, TRAJ16)
CAVNRFSDGQKLLF

SEQ ID NO: 439586 - protein, 13 aa, Homo sapiens
  CDR3 for beta chain variable domain of TCR clone 219793 (TRBV7-2, TRBJ2-2)
CASSVAVTGELFF

SEQ ID NO: 439587 - protein, 11 aa, Homo sapiens
  CDR3 for alpha chain variable domain of TCR clone 219794 (TRAV2, TRAJ13)
CASGGYQKVTF

SEQ ID NO: 439588 - protein, 12 aa, Homo sapiens
  CDR3 for beta chain variable domain of TCR clone 219794 (TRBV7-9, TRBJ1-1)
CASSLVRGEAFF

SEQ ID NO: 439589 - protein, 15 aa, Homo sapiens
  CDR3 for alpha chain variable domain of TCR clone 219795 (TRAV12-3, TRAJ10)
CASYILTGGGNKLTF

SEQ ID NO: 439590 - protein, 16 aa, Homo sapiens
  CDR3 for beta chain variable domain of TCR clone 219795 (TRBV7-2, TRBJ2-7)
CACSFPLAGGPLEQYF

SEQ ID NO: 439591 - protein, 14 aa, Homo sapiens
  CDR3 for alpha chain variable domain of TCR clone 219796 (TRAV1-2, TRAJ16)
CAVNRFSDGQKLLF

SEQ ID NO: 439592 - protein, 15 aa, Homo sapiens
  CDR3 for beta chain variable domain of TCR clone 219796 (TRBV27, TRBJ2-3)
CASRSLAGVIETQYF

SEQ ID NO: 439593 - protein, 17 aa, Homo sapiens
  CDR3 for alpha chain variable domain of TCR clone 219797 (TRAV16, TRAJ37)
CAFWPKTGSSNTGKLIF

SEQ ID NO: 439594 - protein, 17 aa, Homo sapiens
  CDR3 for beta chain variable domain of TCR clone 219797 (TRBV6-5, TRBJ2-7)
CASSYSFWGQGSYEQYF

SEQ ID NO: 439595 - protein, 14 aa, Homo sapiens
  CDR3 for alpha chain variable domain of TCR clone 219798 (TRAV3, TRAJ22)
CAVRDYGSARQLTF

SEQ ID NO: 439596 - protein, 14 aa, Homo sapiens
  CDR3 for beta chain variable domain of TCR clone 219798 (TRBV7-2, TRBJ1-1)
CASSFLTGTTEAFF

SEQ ID NO: 439597 - protein, 14 aa, Homo sapiens
  CDR3 for alpha chain variable domain of TCR clone 219799 (TRAV26-1, TRAJ52)
CIPAGGTSYGKLTF

SEQ ID NO: 439598 - protein, 16 aa, Homo sapiens
  CDR3 for beta chain variable domain of TCR clone 219799 (TRBV2, TRBJ2-1)
CASSVGGSLSYNEQFF

SEQ ID NO: 439599 - protein, 17 aa, Homo sapiens
  CDR3 for alpha chain variable domain of TCR clone 219800 (TRAV3, TRAJ6)
CAVSRRTDTGGSYIPTF

SEQ ID NO: 439600 - protein, 16 aa, Homo sapiens
  CDR3 for beta chain variable domain of TCR clone 219800 (TRBV5-1, TRBJ2-2)
CASSSRTGGRTGELFF

SEQ ID NO: 439601 - protein, 15 aa, Homo sapiens
  CDR3 for alpha chain variable domain of TCR clone 219801 (TRAV3, TRAJ22)
CAVRDRGGSARQLTF

SEQ ID NO: 439602 - protein, 16 aa, Homo sapiens
  CDR3 for beta chain variable domain of TCR clone 219801 (TRBV11-2, TRBJ2-1)
CASARGSDSHHNEQFF

SEQ ID NO: 439603 - protein, 13 aa, Homo sapiens
  CDR3 for alpha chain variable domain of TCR clone 219802 (TRAV4, TRAJ20)
CLVGSSNDYKLSF

SEQ ID NO: 439604 - protein, 13 aa, Homo sapiens
  CDR3 for beta chain variable domain of TCR clone 219802 (TRBV7-7, TRBJ2-2)
CASSLTSAGELFF

SEQ ID NO: 439605 - protein, 12 aa, Homo sapiens
  CDR3 for alpha chain variable domain of TCR clone 219803 (TRAV21, TRAJ3)
CCFYSSASKIIF

SEQ ID NO: 439606 - protein, 13 aa, Homo sapiens
  CDR3 for beta chain variable domain of TCR clone 219803 (TRBV7-3, TRBJ1-1)
CASSQDWGAEAFF

SEQ ID NO: 439607 - protein, 11 aa, Homo sapiens
  CDR3 for alpha chain variable domain of TCR clone 219804 (TRAV3, TRAJ49)
CAPITANQFYF

SEQ ID NO: 439608 - protein, 16 aa, Homo sapiens
  CDR3 for beta chain variable domain of TCR clone 219804 (TRBV5-1, TRBJ2-3)
CASSVFPMSSTDTQYF

SEQ ID NO: 439609 - protein, 14 aa, Homo sapiens
  CDR3 for alpha chain variable domain of TCR clone 219805 (TRAV26-1, TRAJ26)
CIVRATFLGQNFVF

SEQ ID NO: 439610 - protein, 14 aa, Homo sapiens
  CDR3 for beta chain variable domain of TCR clone 219805 (TRBV12-4, TRBJ2-5)
CASSLWQKQETQCF

SEQ ID NO: 439611 - protein, 16 aa, Homo sapiens
  CDR3 for alpha chain variable domain of TCR clone 219806 (TRAV3, TRAJ10)
CAVRDMRAGGGNKLTF

SEQ ID NO: 439612 - protein, 16 aa, Homo sapiens
  CDR3 for beta chain variable domain of TCR clone 219806 (TRBV12-4, TRBJ1-5)
CASSRPVGGSNQRQHF

SEQ ID NO: 439613 - protein, 14 aa, Homo sapiens
  CDR3 for alpha chain variable domain of TCR clone 219807 (TRAV26-1, TRAJ45)
CIEVTGGGADGLTF

SEQ ID NO: 439614 - protein, 15 aa, Homo sapiens
  CDR3 for beta chain variable domain of TCR clone 219807 (TRBV5-1, TRBJ2-3)
CASSYTSGSTDTQYF

SEQ ID NO: 439615 - protein, 14 aa, Homo sapiens
  CDR3 for alpha chain variable domain of TCR clone 219808 (TRAV13-1, TRAJ35)
CAASKGGFGNVLHC

SEQ ID NO: 439616 - protein, 13 aa, Homo sapiens
  CDR3 for beta chain variable domain of TCR clone 219808 (TRBV7-3, TRBJ1-1)
CASRPDWGAEAFF

SEQ ID NO: 439617 - protein, 15 aa, Homo sapiens
  CDR3 for alpha chain variable domain of TCR clone 219809 (TRAV12-1, TRAJ34)
CVVPPGGGNTDKLIF

SEQ ID NO: 439618 - protein, 16 aa, Homo sapiens
  CDR3 for beta chain variable domain of TCR clone 219809 (TRBV2, TRBJ2-3)
CASSTSVEGVTDTQYF

SEQ ID NO: 439619 - protein, 15 aa, Homo sapiens
  CDR3 for alpha chain variable domain of TCR clone 219810 (TRAV3, TRAJ22)
CAVRDRGGSARQLTF

SEQ ID NO: 439620 - protein, 14 aa, Homo sapiens
  CDR3 for beta chain variable domain of TCR clone 219810 (TRBV19, TRBJ2-1)
CDSSRLASINEQFF

SEQ ID NO: 439621 - protein, 23 aa, Homo sapiens
  CDR3 for alpha chain variable domain of TCR clone 219811 (TRAV30, TRAJ43)
CTLRPPSSVTQEPTSAALSDMRF

SEQ ID NO: 439622 - protein, 14 aa, Homo sapiens
  CDR3 for beta chain variable domain of TCR clone 219811 (TRBV7-6, TRBJ2-3)
CASSLGTVTDTQYF

SEQ ID NO: 439623 - protein, 14 aa, Homo sapiens
  CDR3 for alpha chain variable domain of TCR clone 219812 (TRAV2, TRAJ9)
CAVEDRSGGFKTIF

SEQ ID NO: 439624 - protein, 15 aa, Homo sapiens
  CDR3 for beta chain variable domain of TCR clone 219812 (TRBV12-4, TRBJ2-5)
CASSLSGAVQETQYF

SEQ ID NO: 439625 - protein, 17 aa, Homo sapiens
  CDR3 for alpha chain variable domain of TCR clone 219813 (TRAV8-6, TRAJ58)
CAVSSWVGETSGSRLTF

SEQ ID NO: 439626 - protein, 14 aa, Homo sapiens
  CDR3 for beta chain variable domain of TCR clone 219813 (TRBV4-1, TRBJ2-7)
CASRLTSGSYEQYF

SEQ ID NO: 439627 - protein, 14 aa, Homo sapiens
  CDR3 for alpha chain variable domain of TCR clone 219814 (TRAV1-2, TRAJ8)
CAVREDTGFQKIVF

SEQ ID NO: 439628 - protein, 19 aa, Homo sapiens
  CDR3 for beta chain variable domain of TCR clone 219814 (TRBV28, TRBJ2-1)
CASSFSIRGSGRTRYEQFF

SEQ ID NO: 439629 - protein, 10 aa, Homo sapiens
  CDR3 for alpha chain variable domain of TCR clone 219815 (TRAV13-1, TRAJ8)
CAAPFQKLVF

SEQ ID NO: 439630 - protein, 20 aa, Homo sapiens
  CDR3 for beta chain variable domain of TCR clone 219815 (TRBV3-1, TRBJ2-6)
CASSPRPALEGGAGANVLTF

SEQ ID NO: 439631 - protein, 13 aa, Homo sapiens
  CDR3 for alpha chain variable domain of TCR clone 219816 (TRAV3, TRAJ15)
CAVIDQAGTALIF

SEQ ID NO: 439632 - protein, 15 aa, Homo sapiens
  CDR3 for beta chain variable domain of TCR clone 219816 (TRBV11-1, TRBJ2-7)
CASSLNYGASYEQYF

SEQ ID NO: 439633 - protein, 16 aa, Homo sapiens
  CDR3 for alpha chain variable domain of TCR clone 219817 (TRAV3, TRAJ8)
CAVRDMYDTGFQKLVF

SEQ ID NO: 439634 - protein, 15 aa, Homo sapiens
  CDR3 for beta chain variable domain of TCR clone 219817 (TRBV20-1, TRBJ2-7)
CSARDRVSGMDEQYF

SEQ ID NO: 439635 - protein, 14 aa, Homo sapiens
  CDR3 for alpha chain variable domain of TCR clone 219818 (TRAV12-2, TRAJ40)
CAVKIPSGTYKYIF

SEQ ID NO: 439636 - protein, 15 aa, Homo sapiens
  CDR3 for beta chain variable domain of TCR clone 219818 (TRBV5-5, TRBJ1-5)
CASSSTPGSNQPQHF

SEQ ID NO: 439637 - protein, 16 aa, Homo sapiens
  CDR3 for alpha chain variable domain of TCR clone 219819 (TRAV12-3, TRAJ53)
CAMSPGSGSSNYKLTF

SEQ ID NO: 439638 - protein, 15 aa, Homo sapiens
  CDR3 for beta chain variable domain of TCR clone 219819 (TRBV7-9, TRBJ1-4)
CASSARTGGNEKLFF

SEQ ID NO: 439639 - protein, 14 aa, Homo sapiens
  CDR3 for alpha chain variable domain of TCR clone 219820 (TRAV27, TRAJ38)
CAGDRAGNNRKLIW

SEQ ID NO: 439640 - protein, 16 aa, Homo sapiens
  CDR3 for beta chain variable domain of TCR clone 219820 (TRBV25-1, TRBJ2-7)
CASSELTGGGIYEQYF

SEQ ID NO: 439641 - protein, 13 aa, Homo sapiens
  CDR3 for alpha chain variable domain of TCR clone 219821 (TRAV21, TRAJ27)
SAARPGNAGKSTF

SEQ ID NO: 439642 - protein, 13 aa, Homo sapiens
  CDR3 for beta chain variable domain of TCR clone 219821 (TRBV13, TRBJ2-1)
CASILGGRGEQFF

SEQ ID NO: 439643 - protein, 13 aa, Homo sapiens
  CDR3 for alpha chain variable domain of TCR clone 219822 (TRAV20, TRAJ37)
CAGCSSNTGKLIF

SEQ ID NO: 439644 - protein, 14 aa, Homo sapiens
  CDR3 for beta chain variable domain of TCR clone 219822 (TRBV19, TRBJ2-2)
CASSIAGAFGELFF

SEQ ID NO: 439645 - protein, 15 aa, Homo sapiens
  CDR3 for alpha chain variable domain of TCR clone 219823 (TRAV38-1, TRAJ58)
CAFMKHGTSGSRLTF

SEQ ID NO: 439646 - protein, 14 aa, Homo sapiens
  CDR3 for beta chain variable domain of TCR clone 219823 (TRBV2, TRBJ2-5)
CASSEGSYQETQYF

SEQ ID NO: 439647 - protein, 15 aa, Homo sapiens
  CDR3 for alpha chain variable domain of TCR clone 219824 (TRAV26-1, TRAJ29)
CIVRVEGSGNTPLVF

SEQ ID NO: 439648 - protein, 19 aa, Homo sapiens
  CDR3 for beta chain variable domain of TCR clone 219824 (TRBV28, TRBJ2-1)
CASSFSIRGSGRTRYEQFF

SEQ ID NO: 439649 - protein, 18 aa, Homo sapiens
  CDR3 for alpha chain variable domain of TCR clone 219825 (TRAV26-1, TRAJ52)
CIVRVAGAGGTSYGKVTF

SEQ ID NO: 439650 - protein, 13 aa, Homo sapiens
  CDR3 for beta chain variable domain of TCR clone 219825 (TRBV7-8, TRBJ1-2)
CASSAQSYYGYTS

SEQ ID NO: 439651 - protein, 13 aa, Homo sapiens
  CDR3 for alpha chain variable domain of TCR clone 219826 (TRAV27, TRAJ6)
CAGGTRGSYIPTF

SEQ ID NO: 439652 - protein, 12 aa, Homo sapiens
  CDR3 for beta chain variable domain of TCR clone 219826 (TRBV11-2, TRBJ2-2)
CASSLPTGELFF

SEQ ID NO: 439653 - protein, 14 aa, Homo sapiens
  CDR3 for alpha chain variable domain of TCR clone 219827 (TRAV12-1, TRAJ45)
CVVNENAGAYGLTF

SEQ ID NO: 439654 - protein, 15 aa, Homo sapiens
  CDR3 for beta chain variable domain of TCR clone 219827 (TRBV5-7, TRBJ2-7)
CASSLGPGRGHEQYF

SEQ ID NO: 439655 - protein, 13 aa, Homo sapiens
  CDR3 for alpha chain variable domain of TCR clone 219828 (TRAV27, TRAJ45)
CRSSGGGADGLTF

SEQ ID NO: 439656 - protein, 15 aa, Homo sapiens
  CDR3 for beta chain variable domain of TCR clone 219828 (TRBV9, TRBJ2-2)
CASSDFAGASGELFV

SEQ ID NO: 439657 - protein, 14 aa, Homo sapiens
  CDR3 for alpha chain variable domain of TCR clone 219829 (TRAV35, TRAJ22)
VAGLRPGSARQLTF

SEQ ID NO: 439658 - protein, 14 aa, Homo sapiens
  CDR3 for beta chain variable domain of TCR clone 219829 (TRBV4-1, TRBJ2-7)
CASSPVAGGDEQYF

SEQ ID NO: 439659 - protein, 15 aa, Homo sapiens
  CDR3 for alpha chain variable domain of TCR clone 219830 (TRAV8-3, TRAJ45)
CASSYSGGGADGLTF

SEQ ID NO: 439660 - protein, 19 aa, Homo sapiens
  CDR3 for beta chain variable domain of TCR clone 219830 (TRBV25-1, TRBJ2-2)
CAILVYRVDRGRKTGELFF

SEQ ID NO: 439661 - protein, 13 aa, Homo sapiens
  CDR3 for alpha chain variable domain of TCR clone 219831 (TRAV36/DV7, TRAJ7)
CAGTRYGNNRLAF

SEQ ID NO: 439662 - protein, 14 aa, Homo sapiens
  CDR3 for beta chain variable domain of TCR clone 219831 (TRBV11-3, TRBJ2-5)
CASRPLAGRETQYF

SEQ ID NO: 439663 - protein, 18 aa, Homo sapiens
  CDR3 for alpha chain variable domain of TCR clone 219832 (TRAV29/DV5, TRAJ52)
CAAGIRGAGGTSYGKLTF

SEQ ID NO: 439664 - protein, 16 aa, Homo sapiens
  CDR3 for beta chain variable domain of TCR clone 219832 (TRBV7-3, TRBJ2-2)
CASSLKRGTLSGELFF

SEQ ID NO: 439665 - protein, 17 aa, Homo sapiens
  CDR3 for alpha chain variable domain of TCR clone 219833 (TRAV12-3, TRAJ26)
CAMSGGRWDNYGQNIVF

SEQ ID NO: 439666 - protein, 12 aa, Homo sapiens
  CDR3 for beta chain variable domain of TCR clone 219833 (TRBV19, TRBJ1-1)
CASSTTGIEAFF

SEQ ID NO: 439667 - protein, 12 aa, Homo sapiens
  CDR3 for alpha chain variable domain of TCR clone 219834 (TRAV35, TRAJ39)
LAPNNAGNMLTF

SEQ ID NO: 439668 - protein, 12 aa, Homo sapiens
  CDR3 for beta chain variable domain of TCR clone 219834 (TRBV27, TRBJ2-1)
CASRGFYNEQFF

SEQ ID NO: 439669 - protein, 11 aa, Homo sapiens
  CDR3 for alpha chain variable domain of TCR clone 219835 (TRAV2, TRAJ33)
CAVESNYQLIC

SEQ ID NO: 439670 - protein, 15 aa, Homo sapiens
  CDR3 for beta chain variable domain of TCR clone 219835 (TRBV19, TRBJ1-1)
CASTSEQIQNTEAFF

SEQ ID NO: 439671 - protein, 11 aa, Homo sapiens
  CDR3 for alpha chain variable domain of TCR clone 219836 (TRAV21, TRAJ11)
CAVNGYSNLTF

SEQ ID NO: 439672 - protein, 16 aa, Homo sapiens
  CDR3 for beta chain variable domain of TCR clone 219836 (TRBV4-3, TRBJ2-2)
CASSHLQGSGTGELFF

SEQ ID NO: 439673 - protein, 13 aa, Homo sapiens
  CDR3 for alpha chain variable domain of TCR clone 219837 (TRAV27, TRAJ8)
CAGGPTGFQKLVF

SEQ ID NO: 439674 - protein, 16 aa, Homo sapiens
  CDR3 for beta chain variable domain of TCR clone 219837 (TRBV7-2, TRBJ1-1)
CASSLAAGRSLTEAFF

SEQ ID NO: 439675 - protein, 12 aa, Homo sapiens
  CDR3 for alpha chain variable domain of TCR clone 219838 (TRAV3, TRAJ31)
CAVRDGNARLMF

SEQ ID NO: 439676 - protein, 13 aa, Homo sapiens
  CDR3 for beta chain variable domain of TCR clone 219838 (TRBV7-2, TRBJ2-2)
CASSSVRAGELFF

SEQ ID NO: 439677 - protein, 13 aa, Homo sapiens
  CDR3 for alpha chain variable domain of TCR clone 219839 (TRAV20, TRAJ48)
CAVHLFGNEKLTF

SEQ ID NO: 439678 - protein, 15 aa, Homo sapiens
  CDR3 for beta chain variable domain of TCR clone 219839 (TRBV6-5, TRBJ2-6)
CASIQWEAGANVLTF

SEQ ID NO: 439679 - protein, 15 aa, Homo sapiens
  CDR3 for alpha chain variable domain of TCR clone 219840 (TRAV8-2, TRAJ16)
CVVSDGFSDGQKLLF

SEQ ID NO: 439680 - protein, 12 aa, Homo sapiens
  CDR3 for beta chain variable domain of TCR clone 219840 (TRBV12-4, TRBJ2-7)
CASSLGVYEQYF

SEQ ID NO: 439681 - protein, 11 aa, Homo sapiens
  CDR3 for alpha chain variable domain of TCR clone 219841 (TRAV17, TRAJ9)
CATTGGFKTIF

SEQ ID NO: 439682 - protein, 14 aa, Homo sapiens
  CDR3 for beta chain variable domain of TCR clone 219841 (TRBV7-9, TRBJ2-2)
CANSGLADTGDLFF

SEQ ID NO: 439683 - protein, 17 aa, Homo sapiens
  CDR3 for alpha chain variable domain of TCR clone 219842 (TRAV26-1, TRAJ28)
CIVRVPDSGAGSYQLTF

SEQ ID NO: 439684 - protein, 17 aa, Homo sapiens
  CDR3 for beta chain variable domain of TCR clone 219842 (TRBV28, TRBJ2-7)
CDSSPLPAGGKSYEQYF

SEQ ID NO: 439685 - protein, 13 aa, Homo sapiens
  CDR3 for alpha chain variable domain of TCR clone 219843 (TRAV12-1, TRAJ11)
CVVTRGGNSTLTF

SEQ ID NO: 439686 - protein, 13 aa, Homo sapiens
  CDR3 for beta chain variable domain of TCR clone 219843 (TRBV20-1, TRBJ1-2)
CSARDQGAYGYTF

SEQ ID NO: 439687 - protein, 14 aa, Homo sapiens
  CDR3 for alpha chain variable domain of TCR clone 219844 (TRAV1-2, TRAJ16)
CAVNRFSDGQKLLF

SEQ ID NO: 439688 - protein, 15 aa, Homo sapiens
  CDR3 for beta chain variable domain of TCR clone 219844 (TRBV6-1, TRBJ2-1)
CACSELRGQYNEQFF

SEQ ID NO: 439689 - protein, 13 aa, Homo sapiens
  CDR3 for alpha chain variable domain of TCR clone 219845 (TRAV12-2, TRAJ20)
CAVYPSNDYKLSF

SEQ ID NO: 439690 - protein, 14 aa, Homo sapiens
  CDR3 for beta chain variable domain of TCR clone 219845 (TRBV7-2, TRBJ2-7)
CASSLDPGPYEQYF

SEQ ID NO: 439691 - protein, 13 aa, Homo sapiens
  CDR3 for alpha chain variable domain of TCR clone 219846 (TRAV13-1, TRAJ21)
CAASIYNLNKFYF

SEQ ID NO: 439692 - protein, 13 aa, Homo sapiens
  CDR3 for beta chain variable domain of TCR clone 219846 (TRBV27, TRBJ1-4)
CASSLMGDERLFF

SEQ ID NO: 439693 - protein, 10 aa, Homo sapiens
  CDR3 for alpha chain variable domain of TCR clone 219847 (TRAV13-1, TRAJ30)
CAARDDKIIF

SEQ ID NO: 439694 - protein, 15 aa, Homo sapiens
  CDR3 for beta chain variable domain of TCR clone 219847 (TRBV6-5, TRBJ2-7)
CASSYSLDSSYEQYF

SEQ ID NO: 439695 - protein, 11 aa, Homo sapiens
  CDR3 for alpha chain variable domain of TCR clone 219848 (TRAV3, TRAJ21)
FAVGNFNKFYF

SEQ ID NO: 439696 - protein, 17 aa, Homo sapiens
  CDR3 for beta chain variable domain of TCR clone 219848 (TRBV5-1, TRBJ2-5)
CASAVIRQFGNKETQYF

SEQ ID NO: 439697 - protein, 13 aa, Homo sapiens
  CDR3 for alpha chain variable domain of TCR clone 219849 (TRAV17, TRAJ5)
CALRGTGRRALTF

SEQ ID NO: 439698 - protein, 13 aa, Homo sapiens
  CDR3 for beta chain variable domain of TCR clone 219849 (TRBV12-4, TRBJ2-7)
CASSPTGTYEQYF

SEQ ID NO: 439699 - protein, 15 aa, Homo sapiens
  CDR3 for alpha chain variable domain of TCR clone 219850 (TRAV17, TRAJ22)
CATVAPSGSARQLTF

SEQ ID NO: 439700 - protein, 16 aa, Homo sapiens
  CDR3 for beta chain variable domain of TCR clone 219850 (TRBV10-3, TRBJ2-7)
CAISADFADRPYEHYF

SEQ ID NO: 439701 - protein, 12 aa, Homo sapiens
  CDR3 for alpha chain variable domain of TCR clone 219851 (TRAV16, TRAJ10)
CSRTGGGNKLTF

SEQ ID NO: 439702 - protein, 15 aa, Homo sapiens
  CDR3 for beta chain variable domain of TCR clone 219851 (TRBV7-2, TRBJ2-3)
CASSLAGAFIDTQYF

SEQ ID NO: 439703 - protein, 11 aa, Homo sapiens
  CDR3 for alpha chain variable domain of TCR clone 219852 (TRAV1-2, TRAJ40)
CAVPGTYKYIF

SEQ ID NO: 439704 - protein, 14 aa, Homo sapiens
  CDR3 for beta chain variable domain of TCR clone 219852 (TRBV7-2, TRBJ2-7)
CASRSQGAAYEQYF

SEQ ID NO: 439705 - protein, 13 aa, Homo sapiens
  CDR3 for alpha chain variable domain of TCR clone 219853 (TRAV21, TRAJ27)
CAARPGNAGKSTF

SEQ ID NO: 439706 - protein, 15 aa, Homo sapiens
  CDR3 for beta chain variable domain of TCR clone 219853 (TRBV5-8, TRBJ2-2)
CASSLDRGATGELFF

SEQ ID NO: 439707 - protein, 14 aa, Homo sapiens
  CDR3 for alpha chain variable domain of TCR clone 219854 (TRAV1-2, TRAJ8)
CAVREDTGFQKLVF

SEQ ID NO: 439708 - protein, 14 aa, Homo sapiens
  CDR3 for beta chain variable domain of TCR clone 219854 (TRBV12-4, TRBJ2-5)
CASSFGASGGTQYF

SEQ ID NO: 439709 - protein, 15 aa, Homo sapiens
  CDR3 for alpha chain variable domain of TCR clone 219855 (TRAV2, TRAJ22)
CAVPSRGGSARQLTF

SEQ ID NO: 439710 - protein, 18 aa, Homo sapiens
  CDR3 for beta chain variable domain of TCR clone 219855 (TRBV11-2, TRBJ2-6)
CASSLNPFLGTGANVLAF

SEQ ID NO: 439711 - protein, 15 aa, Homo sapiens
  CDR3 for alpha chain variable domain of TCR clone 219856 (TRAV8-4, TRAJ29)
CAGSEDFRGNTPLVF

SEQ ID NO: 439712 - protein, 18 aa, Homo sapiens
  CDR3 for beta chain variable domain of TCR clone 219856 (TRBV20-1, TRBJ2-6)
CSARTLAGGPSGANVLTF

SEQ ID NO: 439713 - protein, 18 aa, Homo sapiens
  CDR3 for alpha chain variable domain of TCR clone 219857 (TRAV26-2, TRAJ45)
CLLRLWGYSGGGADGLTF

SEQ ID NO: 439714 - protein, 17 aa, Homo sapiens
  CDR3 for beta chain variable domain of TCR clone 219857 (TRBV28, TRBJ2-3)
CASSPTPAGGGVDTQYF

SEQ ID NO: 439715 - protein, 14 aa, Homo sapiens
  CDR3 for alpha chain variable domain of TCR clone 219858 (TRAV14/DV4, TRAJ54)
CAMTEAPGAQKLVF

SEQ ID NO: 439716 - protein, 15 aa, Homo sapiens
  CDR3 for beta chain variable domain of TCR clone 219858 (TRBV5-1, TRBJ2-7)
CASSLNGGPAREQYF

SEQ ID NO: 439717 - protein, 13 aa, Homo sapiens
  CDR3 for alpha chain variable domain of TCR clone 219859 (TRAV30, TRAJ24)
CGTVTDSWGKLQF

SEQ ID NO: 439718 - protein, 13 aa, Homo sapiens
  CDR3 for beta chain variable domain of TCR clone 219859 (TRBV12-4, TRBJ1-2)
CASSLRQGKGYTF

SEQ ID NO: 439719 - protein, 14 aa, Homo sapiens
  CDR3 for alpha chain variable domain of TCR clone 219860 (TRAV8-3, TRAJ36)
CAVGPITGSNNLFF

SEQ ID NO: 439720 - protein, 15 aa, Homo sapiens
  CDR3 for beta chain variable domain of TCR clone 219860 (TRBV4-1, TRBJ2-1)
CASSQDPGNYNEQFF

SEQ ID NO: 439721 - protein, 15 aa, Homo sapiens
  CDR3 for alpha chain variable domain of TCR clone 219861 (TRAV21, TRAJ56)
CAVTKYTGANSKLTF

SEQ ID NO: 439722 - protein, 14 aa, Homo sapiens
  CDR3 for beta chain variable domain of TCR clone 219861 (TRBV20-1, TRBJ2-3)
CSARVRGSTDTQYC

SEQ ID NO: 439723 - protein, 12 aa, Homo sapiens
  CDR3 for alpha chain variable domain of TCR clone 219862 (TRAV12-1, TRAJ40)
CVVPSGTYKYIF

SEQ ID NO: 439724 - protein, 15 aa, Homo sapiens
  CDR3 for beta chain variable domain of TCR clone 219862 (TRBV12-4, TRBJ2-1)
FASSPLSGRNSEQFF

SEQ ID NO: 439725 - protein, 14 aa, Homo sapiens
  CDR3 for alpha chain variable domain of TCR clone 219863 (TRAV12-2, TRAJ53)
CRERGGGSNYKLPF

SEQ ID NO: 439726 - protein, 17 aa, Homo sapiens
  CDR3 for beta chain variable domain of TCR clone 219863 (TRBV7-3, TRBJ2-3)
RASSLMKRMRGADTQYF

SEQ ID NO: 439727 - protein, 14 aa, Homo sapiens
  CDR3 for alpha chain variable domain of TCR clone 219864 (TRAV29/DV5, TRAJ36)
CAARRKTGANNLFF

SEQ ID NO: 439728 - protein, 16 aa, Homo sapiens
  CDR3 for beta chain variable domain of TCR clone 219864 (TRBV27, TRBJ2-5)
CASSYGPGGQKETQYF

SEQ ID NO: 439729 - protein, 13 aa, Homo sapiens
  CDR3 for alpha chain variable domain of TCR clone 219865 (TRAV21, TRAJ27)
CAARPGNAGKSTF

SEQ ID NO: 439730 - protein, 13 aa, Homo sapiens
  CDR3 for beta chain variable domain of TCR clone 219865 (TRBV7-3, TRBJ2-7)
CASRQAGGYEQYF

SEQ ID NO: 439731 - protein, 12 aa, Homo sapiens
  CDR3 for alpha chain variable domain of TCR clone 219866 (TRAV13-2, TRAJ8)
CAPWLGFQKLVF

SEQ ID NO: 439732 - protein, 14 aa, Homo sapiens
  CDR3 for beta chain variable domain of TCR clone 219866 (TRBV12-4, TRBJ1-1)
CASSLGTGGTEAFF

SEQ ID NO: 439733 - protein, 12 aa, Homo sapiens
  CDR3 for alpha chain variable domain of TCR clone 219867 (TRAV12-3, TRAJ17)
CVMTLTGNKLTF

SEQ ID NO: 439734 - protein, 15 aa, Homo sapiens
  CDR3 for beta chain variable domain of TCR clone 219867 (TRBV11-3, TRBJ2-3)
CASLKDGREGDTQYF

SEQ ID NO: 439735 - protein, 15 aa, Homo sapiens
  CDR3 for alpha chain variable domain of TCR clone 219868 (TRAV26-1, TRAJ44)
CIVRANTGTASKLTF

SEQ ID NO: 439736 - protein, 15 aa, Homo sapiens
  CDR3 for beta chain variable domain of TCR clone 219868 (TRBV11-3, TRBJ2-3)
CASLKDGREGDTQYF

SEQ ID NO: 439737 - protein, 14 aa, Homo sapiens
  CDR3 for alpha chain variable domain of TCR clone 219869 (TRAV13-1, TRAJ4)
CAATLPSGYNKLIF

SEQ ID NO: 439738 - protein, 15 aa, Homo sapiens
  CDR3 for beta chain variable domain of TCR clone 219869 (TRBV11-3, TRBJ2-3)
CASLKDGREGDTQYF

SEQ ID NO: 439739 - protein, 12 aa, Homo sapiens
  CDR3 for alpha chain variable domain of TCR clone 219870 (TRAV17, TRAJ20)
CATDSNDYKLSF

SEQ ID NO: 439740 - protein, 13 aa, Homo sapiens
  CDR3 for beta chain variable domain of TCR clone 219870 (TRBV13, TRBJ2-5)
CASSPEVGETQYF

SEQ ID NO: 439741 - protein, 15 aa, Homo sapiens
  CDR3 for alpha chain variable domain of TCR clone 219871 (TRAV3, TRAJ5)
CAVRDLDTGRRALTF

SEQ ID NO: 439742 - protein, 13 aa, Homo sapiens
  CDR3 for beta chain variable domain of TCR clone 219871 (TRBV12-3, TRBJ2-7)
CASSPRETYEQYF

SEQ ID NO: 439743 - protein, 14 aa, Homo sapiens
  CDR3 for alpha chain variable domain of TCR clone 219872 (TRAV26-1, TRAJ40)
CIANPYSGTYKYIF

SEQ ID NO: 439744 - protein, 11 aa, Homo sapiens
  CDR3 for beta chain variable domain of TCR clone 219872 (TRBV11-2, TRBJ1-1)
CASSINTEAFF

SEQ ID NO: 439745 - protein, 14 aa, Homo sapiens
  CDR3 for alpha chain variable domain of TCR clone 219873 (TRAV8-6, TRAJ5)
CAVSVDTGRRALTF

SEQ ID NO: 439746 - protein, 11 aa, Homo sapiens
  CDR3 for beta chain variable domain of TCR clone 219873 (TRBV7-3, TRBJ2-5)
CASSLSETKYF

SEQ ID NO: 439747 - protein, 14 aa, Homo sapiens
  CDR3 for alpha chain variable domain of TCR clone 219874 (TRAV8-6, TRAJ54)
CAVSPALGAQKPVF

SEQ ID NO: 439748 - protein, 15 aa, Homo sapiens
  CDR3 for beta chain variable domain of TCR clone 219874 (TRBV4-1, TRBJ1-6)
CASSAGQGYNSPLHF

SEQ ID NO: 439749 - protein, 11 aa, Homo sapiens
  CDR3 for alpha chain variable domain of TCR clone 219875 (TRAV2, TRAJ23)
CAVETRGKLIF

SEQ ID NO: 439750 - protein, 13 aa, Homo sapiens
  CDR3 for beta chain variable domain of TCR clone 219875 (TRBV7-3, TRBJ1-1)
CASSQDWGAEAFF

SEQ ID NO: 439751 - protein, 14 aa, Homo sapiens
  CDR3 for alpha chain variable domain of TCR clone 219876 (TRAV8-2, TRAJ6)
CVVISAGGSSIPTF

SEQ ID NO: 439752 - protein, 16 aa, Homo sapiens
  CDR3 for beta chain variable domain of TCR clone 219876 (TRBV7-6, TRBJ2-6)
CASSLPGLSGANDLTF

SEQ ID NO: 439753 - protein, 14 aa, Homo sapiens
  CDR3 for alpha chain variable domain of TCR clone 219877 (TRAV38-1, TRAJ40)
CALRPTSGSYKYIF

SEQ ID NO: 439754 - protein, 14 aa, Homo sapiens
  CDR3 for beta chain variable domain of TCR clone 219877 (TRBV25-1, TRBJ1-1)
CASTHLVGNTEAFF

SEQ ID NO: 439755 - protein, 14 aa, Homo sapiens
  CDR3 for alpha chain variable domain of TCR clone 219878 (TRAV2, TRAJ37)
CAVDFTSNTGKLIF

SEQ ID NO: 439756 - protein, 13 aa, Homo sapiens
  CDR3 for beta chain variable domain of TCR clone 219878 (TRBV10-2, TRBJ2-7)
CASGASGGYEQYF

SEQ ID NO: 439757 - protein, 17 aa, Homo sapiens
  CDR3 for alpha chain variable domain of TCR clone 219879 (TRAV13-1, TRAJ52)
CAASSGAGGTSYGKLTF

SEQ ID NO: 439758 - protein, 12 aa, Homo sapiens
  CDR3 for beta chain variable domain of TCR clone 219879 (TRBV7-9, TRBJ2-7)
CASSLEGYEQYF

SEQ ID NO: 439759 - protein, 15 aa, Homo sapiens
  CDR3 for alpha chain variable domain of TCR clone 219880 (TRAV38-2/DV8, TRAJ45)
CAYGDSGGGADGLTF

SEQ ID NO: 439760 - protein, 14 aa, Homo sapiens
  CDR3 for beta chain variable domain of TCR clone 219880 (TRBV7-2, TRBJ2-7)
CASRSQGAAYEQYF

SEQ ID NO: 439761 - protein, 13 aa, Homo sapiens
  CDR3 for alpha chain variable domain of TCR clone 219881 (TRAV8-3, TRAJ36)
CAVCATGANNLFF

SEQ ID NO: 439762 - protein, 17 aa, Homo sapiens
  CDR3 for beta chain variable domain of TCR clone 219881 (TRBV4-2, TRBJ1-1)
CASTQFGGGSGNTEAFF

SEQ ID NO: 439763 - protein, 13 aa, Homo sapiens
  CDR3 for alpha chain variable domain of TCR clone 219882 (TRAV27, TRAJ6)
CAGGTRGSYIPRF

SEQ ID NO: 439764 - protein, 16 aa, Homo sapiens
  CDR3 for beta chain variable domain of TCR clone 219882 (TRBV24-1, TRBJ2-3)
CATSDPGTGATDTQYF

SEQ ID NO: 439765 - protein, 11 aa, Homo sapiens
  CDR3 for alpha chain variable domain of TCR clone 219883 (TRAV3, TRAJ21)
CAVGNFNNFYF

SEQ ID NO: 439766 - protein, 13 aa, Homo sapiens
  CDR3 for beta chain variable domain of TCR clone 219883 (TRBV7-9, TRBJ1-2)
CASSLKQNYGDTF

SEQ ID NO: 439767 - protein, 18 aa, Homo sapiens
  CDR3 for alpha chain variable domain of TCR clone 219884 (TRAV21, TRAJ52)
CAVRPSPAGGTSYGKLTF

SEQ ID NO: 439768 - protein, 16 aa, Homo sapiens
  CDR3 for beta chain variable domain of TCR clone 219884 (TRBV7-3, TRBJ2-1)
CASSLEGYRSYNKQFF

SEQ ID NO: 439769 - protein, 11 aa, Homo sapiens
  CDR3 for alpha chain variable domain of TCR clone 219885 (TRAV21, TRAJ31)
CAVRNNARLMF

SEQ ID NO: 439770 - protein, 13 aa, Homo sapiens
  CDR3 for beta chain variable domain of TCR clone 219885 (TRBV6-1, TRBJ2-5)
CASSNLVGETQYF

SEQ ID NO: 439771 - protein, 11 aa, Homo sapiens
  CDR3 for alpha chain variable domain of TCR clone 219886 (TRAV27, TRAJ37)
CAGTHGGKLIF

SEQ ID NO: 439772 - protein, 13 aa, Homo sapiens
  CDR3 for beta chain variable domain of TCR clone 219886 (TRBV6-1, TRBJ2-1)
CASSETGVSEQFF

SEQ ID NO: 439773 - protein, 12 aa, Homo sapiens
  CDR3 for alpha chain variable domain of TCR clone 219887 (TRAV1-1, TRAJ20)
CAVREDDYKISF

SEQ ID NO: 439774 - protein, 15 aa, Homo sapiens
  CDR3 for beta chain variable domain of TCR clone 219887 (TRBV5-7, TRBJ2-7)
CASSLPGQVFYEQYF

SEQ ID NO: 439775 - protein, 13 aa, Homo sapiens
  CDR3 for alpha chain variable domain of TCR clone 219888 (TRAV1-2, TRAJ9)
CAVLNTGGFKTIF

SEQ ID NO: 439776 - protein, 14 aa, Homo sapiens
  CDR3 for beta chain variable domain of TCR clone 219888 (TRBV7-2, TRBJ2-7)
CASSLRWEVNEQYF

SEQ ID NO: 439777 - protein, 12 aa, Homo sapiens
  CDR3 for alpha chain variable domain of TCR clone 219889 (TRAV27, TRAJ37)
CADSGSTGKLLF

SEQ ID NO: 439778 - protein, 18 aa, Homo sapiens
  CDR3 for beta chain variable domain of TCR clone 219889 (TRBV7-9, TRBJ1-1)
CASSKPWDTMGMNTEAFF

SEQ ID NO: 439779 - protein, 15 aa, Homo sapiens
  CDR3 for alpha chain variable domain of TCR clone 219890 (TRAV14/DV4, TRAJ12)
CAMTPPVDISYKLIF

SEQ ID NO: 439780 - protein, 14 aa, Homo sapiens
  CDR3 for beta chain variable domain of TCR clone 219890 (TRBV19, TRBJ2-1)
CASSDNQGANEQFF

SEQ ID NO: 439781 - protein, 17 aa, Homo sapiens
  CDR3 for alpha chain variable domain of TCR clone 219891 (TRAV23/DV6, TRAJ58)
CAARLLRGETSGSRLTF

SEQ ID NO: 439782 - protein, 13 aa, Homo sapiens
  CDR3 for beta chain variable domain of TCR clone 219891 (TRBV20-1, TRBJ1-1)
CSARGGGNTEAFF

SEQ ID NO: 439783 - protein, 18 aa, Homo sapiens
  CDR3 for alpha chain variable domain of TCR clone 219892 (TRAV26-1, TRAJ52)
CIVRVAGAGGTSYGKLTF

SEQ ID NO: 439784 - protein, 13 aa, Homo sapiens
  CDR3 for beta chain variable domain of TCR clone 219892 (TRBV7-8, TRBJ1-2)
CASIAQSYYGYTF

SEQ ID NO: 439785 - protein, 12 aa, Homo sapiens
  CDR3 for alpha chain variable domain of TCR clone 219893 (TRAV24, TRAJ11)
CALNSGYSTLTF

SEQ ID NO: 439786 - protein, 16 aa, Homo sapiens
  CDR3 for beta chain variable domain of TCR clone 219893 (TRBV28, TRBJ2-7)
CASSLFFETGGPEQYF

SEQ ID NO: 439787 - protein, 13 aa, Homo sapiens
  CDR3 for alpha chain variable domain of TCR clone 219894 (TRAV8-3, TRAJ43)
CAVGPDNNNDMRF

SEQ ID NO: 439788 - protein, 15 aa, Homo sapiens
  CDR3 for beta chain variable domain of TCR clone 219894 (TRBV18, TRBJ2-1)
CASSPPSASYNEQFF

SEQ ID NO: 439789 - protein, 13 aa, Homo sapiens
  CDR3 for alpha chain variable domain of TCR clone 219895 (TRAV3, TRAJ20)
CAVRSLNDYKLSF

SEQ ID NO: 439790 - protein, 12 aa, Homo sapiens
  CDR3 for beta chain variable domain of TCR clone 219895 (TRBV7-8, TRBJ2-7)
CASSLGDREQYF

SEQ ID NO: 439791 - protein, 23 aa, Homo sapiens
  CDR3 for alpha chain variable domain of TCR clone 219896 (TRAV8-6, TRAJ36)
CAVSDWLGQTTSSLGLERDSTLF

SEQ ID NO: 439792 - protein, 15 aa, Homo sapiens
  CDR3 for beta chain variable domain of TCR clone 219896 (TRBV6-1, TRBJ2-3)
CASSERGGITDTQYF

SEQ ID NO: 439793 - protein, 12 aa, Homo sapiens
  CDR3 for alpha chain variable domain of TCR clone 219897 (TRAV12-3, TRAJ17)
CAMTLTGNKLTF

SEQ ID NO: 439794 - protein, 16 aa, Homo sapiens
  CDR3 for beta chain variable domain of TCR clone 219897 (TRBV5-4, TRBJ2-7)
CASSSKMTSGTYEQYF

SEQ ID NO: 439795 - protein, 17 aa, Homo sapiens
  CDR3 for alpha chain variable domain of TCR clone 219898 (TRAV26-1, TRAJ58)
CIVRVGAEETSGSRLTF

SEQ ID NO: 439796 - protein, 13 aa, Homo sapiens
  CDR3 for beta chain variable domain of TCR clone 219898 (TRBV12-5, TRBJ1-2)
CASGVRTGNGDTF

SEQ ID NO: 439797 - protein, 16 aa, Homo sapiens
  CDR3 for alpha chain variable domain of TCR clone 219899 (TRAV23/DV6, TRAJ9)
CAASIGGNTGCFKTIF

SEQ ID NO: 439798 - protein, 17 aa, Homo sapiens
  CDR3 for beta chain variable domain of TCR clone 219899 (TRBV13, TRBJ2-3)
CASSLSRVAGGRNTQYF

SEQ ID NO: 439799 - protein, 13 aa, Homo sapiens
  CDR3 for alpha chain variable domain of TCR clone 219900 (TRAV17, TRAJ5)
CALRGTGRRALTF

SEQ ID NO: 439800 - protein, 14 aa, Homo sapiens
  CDR3 for beta chain variable domain of TCR clone 219900 (TRBV12-5, TRBJ2-5)
CDSGSRTHQETQYF

SEQ ID NO: 439801 - protein, 13 aa, Homo sapiens
  CDR3 for alpha chain variable domain of TCR clone 219901 (TRAV27, TRAJ6)
CAGGTRGSYIPTF

SEQ ID NO: 439802 - protein, 14 aa, Homo sapiens
  CDR3 for beta chain variable domain of TCR clone 219901 (TRBV6-3, TRBJ1-1)
CASSYQRRDTAAFF

SEQ ID NO: 439803 - protein, 16 aa, Homo sapiens
  CDR3 for alpha chain variable domain of TCR clone 219902 (TRAV9-2, TRAJ10)
CALNEGLTGGGNKLTF

SEQ ID NO: 439804 - protein, 22 aa, Homo sapiens
  CDR3 for beta chain variable domain of TCR clone 219902 (TRBV7-3, TRBJ2-5)
CASARDRVILRPRDPVLRARHA

SEQ ID NO: 439805 - protein, 22 aa, Homo sapiens
  CDR3 for alpha chain variable domain of TCR clone 219903 (TRAV1-1, TRAJ30)
CAVRDQTEMTRSSLEKGHDFIF

SEQ ID NO: 439806 - protein, 12 aa, Homo sapiens
  CDR3 for beta chain variable domain of TCR clone 219903 (TRBV28, TRBJ2-6)
CAIQAGDNVLTF

SEQ ID NO: 439807 - protein, 11 aa, Homo sapiens
  CDR3 for alpha chain variable domain of TCR clone 219904 (TRAV2, TRAJ13)
CASGGSQKVTF

SEQ ID NO: 439808 - protein, 14 aa, Homo sapiens
  CDR3 for beta chain variable domain of TCR clone 219904 (TRBV18, TRBJ1-2)
CASSPDRVVYGYTF

SEQ ID NO: 439809 - protein, 11 aa, Homo sapiens
  CDR3 for alpha chain variable domain of TCR clone 219905 (TRAV4, TRAJ28)
NSVAGSYQLTF

SEQ ID NO: 439810 - protein, 13 aa, Homo sapiens
  CDR3 for beta chain variable domain of TCR clone 219905 (TRBV12-4, TRBJ2-6)
CASSGTGANVLTF

SEQ ID NO: 439811 - protein, 17 aa, Homo sapiens
  CDR3 for alpha chain variable domain of TCR clone 219906 (TRAV36/DV7, TRAJ52)
CAVAQRAGGTSYGKLTF

SEQ ID NO: 439812 - protein, 14 aa, Homo sapiens
  CDR3 for beta chain variable domain of TCR clone 219906 (TRBV6-1, TRBJ1-3)
CASVQGGGGNTICF

SEQ ID NO: 439813 - protein, 13 aa, Homo sapiens
  CDR3 for alpha chain variable domain of TCR clone 219907 (TRAV27, TRAJ6)
CAGGTRGSYIPRF

SEQ ID NO: 439814 - protein, 15 aa, Homo sapiens
  CDR3 for beta chain variable domain of TCR clone 219907 (TRBV5-5, TRBJ2-7)
CASSLAAPLSYEQYF

SEQ ID NO: 439815 - protein, 14 aa, Homo sapiens
  CDR3 for alpha chain variable domain of TCR clone 219908 (TRAV1-2, TRAJ8)
CAVREDTGFQKIVF

SEQ ID NO: 439816 - protein, 12 aa, Homo sapiens
  CDR3 for beta chain variable domain of TCR clone 219908 (TRBV14, TRBJ2-5)
CASSQLKETQYF

SEQ ID NO: 439817 - protein, 14 aa, Homo sapiens
  CDR3 for alpha chain variable domain of TCR clone 219909 (TRAV9-2, TRAJ39)
CALYIYNAGNMLTF

SEQ ID NO: 439818 - protein, 15 aa, Homo sapiens
  CDR3 for beta chain variable domain of TCR clone 219909 (TRBV6-4, TRBJ2-2)
CASSPGGGWTGELFF

SEQ ID NO: 439819 - protein, 15 aa, Homo sapiens
  CDR3 for alpha chain variable domain of TCR clone 219910 (TRAV26-1, TRAJ44)
CIARVPFGTASKLTF

SEQ ID NO: 439820 - protein, 17 aa, Homo sapiens
  CDR3 for beta chain variable domain of TCR clone 219910 (TRBV24-1, TRBJ2-4)
CATSDAEARGVRNIPYF

SEQ ID NO: 439821 - protein, 14 aa, Homo sapiens
  CDR3 for alpha chain variable domain of TCR clone 219911 (TRAV12-2, TRAJ13)
CAVKKTGGYQKVIF

SEQ ID NO: 439822 - protein, 16 aa, Homo sapiens
  CDR3 for beta chain variable domain of TCR clone 219911 (TRBV12-4, TRBJ2-5)
CASSFFVRGRQETQYF

SEQ ID NO: 439823 - protein, 14 aa, Homo sapiens
  CDR3 for alpha chain variable domain of TCR clone 219912 (TRAV19, TRAJ15)
CALSEDQAGTALIF

SEQ ID NO: 439824 - protein, 14 aa, Homo sapiens
  CDR3 for beta chain variable domain of TCR clone 219912 (TRBV19, TRBJ2-1)
CASPTFVLSGEQFF

SEQ ID NO: 439825 - protein, 13 aa, Homo sapiens
  CDR3 for alpha chain variable domain of TCR clone 219913 (TRAV13-2, TRAJ48)
CAEMDFGNEKLNF

SEQ ID NO: 439826 - protein, 14 aa, Homo sapiens
  CDR3 for beta chain variable domain of TCR clone 219913 (TRBV19, TRBJ2-7)
CASSMGQGAIEQYF

SEQ ID NO: 439827 - protein, 13 aa, Homo sapiens
  CDR3 for alpha chain variable domain of TCR clone 219914 (TRAV21, TRAJ27)
CAARPGNAVKSTF

SEQ ID NO: 439828 - protein, 14 aa, Homo sapiens
  CDR3 for beta chain variable domain of TCR clone 219914 (TRBV11-2, TRBJ2-7)
CASSLGAGAYEQYF

SEQ ID NO: 439829 - protein, 15 aa, Homo sapiens
  CDR3 for alpha chain variable domain of TCR clone 219915 (TRAV17, TRAJ4)
CATGTWSGGDNKLIF

SEQ ID NO: 439830 - protein, 15 aa, Homo sapiens
  CDR3 for beta chain variable domain of TCR clone 219915 (TRBV20-1, TRBJ2-7)
CSARDRVSGMDEQYF

SEQ ID NO: 439831 - protein, 12 aa, Homo sapiens
  CDR3 for alpha chain variable domain of TCR clone 219916 (TRAV23/DV6, TRAJ30)
CAASKGDEKITF

SEQ ID NO: 439832 - protein, 17 aa, Homo sapiens
  CDR3 for beta chain variable domain of TCR clone 219916 (TRBV13, TRBJ2-3)
CASSLSRVAGGRNTQYF

SEQ ID NO: 439833 - protein, 14 aa, Homo sapiens
  CDR3 for alpha chain variable domain of TCR clone 219917 (TRAV21, TRAJ45)
CAVVSGGSADGLTF

SEQ ID NO: 439834 - protein, 14 aa, Homo sapiens
  CDR3 for beta chain variable domain of TCR clone 219917 (TRBV20-1, TRBJ2-3)
CSALGLEGADTQYF

SEQ ID NO: 439835 - protein, 13 aa, Homo sapiens
  CDR3 for alpha chain variable domain of TCR clone 219918 (TRAV13-1, TRAJ21)
CSASIYNFNKFYF

SEQ ID NO: 439836 - protein, 20 aa, Homo sapiens
  CDR3 for beta chain variable domain of TCR clone 219918 (TRBV7-8, TRBJ2-2)
CASSHLFPGPTIHITGELFF

SEQ ID NO: 439837 - protein, 14 aa, Homo sapiens
  CDR3 for alpha chain variable domain of TCR clone 219919 (TRAV8-6, TRAJ13)
CAWGSSGGYQKVTF

SEQ ID NO: 439838 - protein, 15 aa, Homo sapiens
  CDR3 for beta chain variable domain of TCR clone 219919 (TRBV7-2, TRBJ2-7)
CASSLSGALTYEQYF

SEQ ID NO: 439839 - protein, 15 aa, Homo sapiens
  CDR3 for alpha chain variable domain of TCR clone 219920 (TRAV8-4, TRAJ6)
CAVSAPSGGSYIPTF

SEQ ID NO: 439840 - protein, 12 aa, Homo sapiens
  CDR3 for beta chain variable domain of TCR clone 219920 (TRBV11-2, TRBJ2-2)
CASSLGGGELFF

SEQ ID NO: 439841 - protein, 14 aa, Homo sapiens
  CDR3 for alpha chain variable domain of TCR clone 219921 (TRAV12-3, TRAJ28)
CAMWSGAGSYQLTF

SEQ ID NO: 439842 - protein, 14 aa, Homo sapiens
  CDR3 for beta chain variable domain of TCR clone 219921 (TRBV11-2, TRBJ1-2)
CASSLGTANYGYTF

SEQ ID NO: 439843 - protein, 14 aa, Homo sapiens
  CDR3 for alpha chain variable domain of TCR clone 219922 (TRAV21, TRAJ38)
CAVMGAGNNRKLIW

SEQ ID NO: 439844 - protein, 13 aa, Homo sapiens
  CDR3 for beta chain variable domain of TCR clone 219922 (TRBV12-4, TRBJ1-2)
CASSLRQGKGYTF

SEQ ID NO: 439845 - protein, 15 aa, Homo sapiens
  CDR3 for alpha chain variable domain of TCR clone 219923 (TRAV2, TRAJ45)
CAVDGTGGGADGLTF

SEQ ID NO: 439846 - protein, 17 aa, Homo sapiens
  CDR3 for beta chain variable domain of TCR clone 219923 (TRBV28, TRBJ2-5)
CASSTPEGDALQETQYF

SEQ ID NO: 439847 - protein, 14 aa, Homo sapiens
  CDR3 for alpha chain variable domain of TCR clone 219924 (TRAV1-2, TRAJ8)
CAVREDTGFQKLVF

SEQ ID NO: 439848 - protein, 15 aa, Homo sapiens
  CDR3 for beta chain variable domain of TCR clone 219924 (TRBV7-2, TRBJ1-2)
CASSLAPDRGLGYTF

SEQ ID NO: 439849 - protein, 17 aa, Homo sapiens
  CDR3 for alpha chain variable domain of TCR clone 219925 (TRAV13-1, TRAJ23)
CAARKRFHRLRKAYLRT

SEQ ID NO: 439850 - protein, 13 aa, Homo sapiens
  CDR3 for beta chain variable domain of TCR clone 219925 (TRBV11-2, TRBJ2-7)
CASSGTRPYEQYF

SEQ ID NO: 439851 - protein, 13 aa, Homo sapiens
  CDR3 for alpha chain variable domain of TCR clone 219926 (TRAV17, TRAJ53)
CATPRRGNYKLTF

SEQ ID NO: 439852 - protein, 16 aa, Homo sapiens
  CDR3 for beta chain variable domain of TCR clone 219926 (TRBV3-1, TRBJ2-7)
CASSQGATGVAYEQYF

SEQ ID NO: 439853 - protein, 14 aa, Homo sapiens
  CDR3 for alpha chain variable domain of TCR clone 219927 (TRAV26-2, TRAJ32)
CILFRGGATNKLIF

SEQ ID NO: 439854 - protein, 14 aa, Homo sapiens
  CDR3 for beta chain variable domain of TCR clone 219927 (TRBV2, TRBJ2-2)
CQQWVWGGDRELFF

SEQ ID NO: 439855 - protein, 12 aa, Homo sapiens
  CDR3 for alpha chain variable domain of TCR clone 219928 (TRAV8-3, TRAJ41)
CAVALSGYALNF

SEQ ID NO: 439856 - protein, 17 aa, Homo sapiens
  CDR3 for beta chain variable domain of TCR clone 219928 (TRBV7-3, TRBJ2-2)
CASSLSGTSEGTGELFF

SEQ ID NO: 439857 - protein, 20 aa, Homo sapiens
  CDR3 for alpha chain variable domain of TCR clone 219929 (TRAV12-2, TRAJ52)
SPVIQPPPSFRSTSYRTLTF

SEQ ID NO: 439858 - protein, 11 aa, Homo sapiens
  CDR3 for beta chain variable domain of TCR clone 219929 (TRBV11-2, TRBJ2-2)
CASSLPGELFF

SEQ ID NO: 439859 - protein, 14 aa, Homo sapiens
  CDR3 for alpha chain variable domain of TCR clone 219930 (TRAV17, TRAJ57)
CATDPQGGSEKLVF

SEQ ID NO: 439860 - protein, 17 aa, Homo sapiens
  CDR3 for beta chain variable domain of TCR clone 219930 (TRBV20-1, TRBJ2-1)
GSARDISGGAPLGEQFF

SEQ ID NO: 439861 - protein, 16 aa, Homo sapiens
  CDR3 for alpha chain variable domain of TCR clone 219931 (TRAV13-1, TRAJ45)
CAARGSRKGGADGLNF

SEQ ID NO: 439862 - protein, 13 aa, Homo sapiens
  CDR3 for beta chain variable domain of TCR clone 219931 (TRBV12-4, TRBJ2-5)
CASRKRGKETQYF

SEQ ID NO: 439863 - protein, 17 aa, Homo sapiens
  CDR3 for alpha chain variable domain of TCR clone 219932 (TRAV38-2/DV8, TRAJ23)
CALSRKLIFGQGTELSV

SEQ ID NO: 439864 - protein, 17 aa, Homo sapiens
  CDR3 for beta chain variable domain of TCR clone 219932 (TRBV11-2, TRBJ2-1)
CASSLYPPGVEYNEQFF

SEQ ID NO: 439865 - protein, 17 aa, Homo sapiens
  CDR3 for alpha chain variable domain of TCR clone 219933 (TRAV3, TRAJ6)
CAVRDGPRAGGSYITTF

SEQ ID NO: 439866 - protein, 14 aa, Homo sapiens
  CDR3 for beta chain variable domain of TCR clone 219933 (TRBV7-2, TRBJ2-7)
CASRPKTSFYEQYF

SEQ ID NO: 439867 - protein, 15 aa, Homo sapiens
  CDR3 for alpha chain variable domain of TCR clone 219934 (TRAV26-1, TRAJ48)
CIARWSWFGNEKLTF

SEQ ID NO: 439868 - protein, 12 aa, Homo sapiens
  CDR3 for beta chain variable domain of TCR clone 219934 (TRBV19, TRBJ2-5)
CASSISEGTQYF

SEQ ID NO: 439869 - protein, 15 aa, Homo sapiens
  CDR3 for alpha chain variable domain of TCR clone 219935 (TRAV38-1, TRAJ37)
CAFIFGSGNTGKLIF

SEQ ID NO: 439870 - protein, 13 aa, Homo sapiens
  CDR3 for beta chain variable domain of TCR clone 219935 (TRBV5-1, TRBJ2-1)
CASSLGSYNEQFF

SEQ ID NO: 439871 - protein, 14 aa, Homo sapiens
  CDR3 for alpha chain variable domain of TCR clone 219936 (TRAV12-2, TRAJ17)
CAVLFKAAVNKLTF

SEQ ID NO: 439872 - protein, 14 aa, Homo sapiens
  CDR3 for beta chain variable domain of TCR clone 219936 (TRBV15, TRBJ1-2)
CATSRDFDRVGYTF

SEQ ID NO: 439873 - protein, 14 aa, Homo sapiens
  CDR3 for alpha chain variable domain of TCR clone 219937 (TRAV8-3, TRAJ10)
CAVGNAGGGNKLTF

SEQ ID NO: 439874 - protein, 14 aa, Homo sapiens
  CDR3 for beta chain variable domain of TCR clone 219937 (TRBV20-1, TRBJ2-7)
CSAKRGRSSYEQYF

SEQ ID NO: 439875 - protein, 10 aa, Homo sapiens
  CDR3 for alpha chain variable domain of TCR clone 219938 (TRAV12-1, TRAJ20)
CVVNPRKLSF

SEQ ID NO: 439876 - protein, 15 aa, Homo sapiens
  CDR3 for beta chain variable domain of TCR clone 219938 (TRBV5-1, TRBJ2-7)
CASSPPRAPYNEQYF

SEQ ID NO: 439877 - protein, 17 aa, Homo sapiens
  CDR3 for alpha chain variable domain of TCR clone 219939 (TRAV21, TRAJ52)
CCEAFPSGCTSYGKLTF

SEQ ID NO: 439878 - protein, 13 aa, Homo sapiens
  CDR3 for beta chain variable domain of TCR clone 219939 (TRBV7-3, TRBJ1-1)
CASSQDWGAEAFF

SEQ ID NO: 439879 - protein, 15 aa, Homo sapiens
  CDR3 for alpha chain variable domain of TCR clone 219940 (TRAV26-1, TRAJ29)
CIVRVEGPGNTPLIF

SEQ ID NO: 439880 - protein, 14 aa, Homo sapiens
  CDR3 for beta chain variable domain of TCR clone 219940 (TRBV18, TRBJ2-5)
CASSPGVSQETQYF

SEQ ID NO: 439881 - protein, 15 aa, Homo sapiens
  CDR3 for alpha chain variable domain of TCR clone 219941 (TRAV2, TRAJ9)
CAVVDRGTGGFKTNF

SEQ ID NO: 439882 - protein, 14 aa, Homo sapiens
  CDR3 for beta chain variable domain of TCR clone 219941 (TRBV4-1, TRBJ2-2)
CASSQAVNTGELFF

SEQ ID NO: 439883 - protein, 14 aa, Homo sapiens
  CDR3 for alpha chain variable domain of TCR clone 219942 (TRAV1-2, TRAJ16)
CAVNRFSDGQKLLF

SEQ ID NO: 439884 - protein, 15 aa, Homo sapiens
  CDR3 for beta chain variable domain of TCR clone 219942 (TRBV5-1, TRBJ2-7)
CASSLNVGPAREQYF

SEQ ID NO: 439885 - protein, 12 aa, Homo sapiens
  CDR3 for alpha chain variable domain of TCR clone 219943 (TRAV12-3, TRAJ17)
CAMTLTGNKPTF

SEQ ID NO: 439886 - protein, 16 aa, Homo sapiens
  CDR3 for beta chain variable domain of TCR clone 219943 (TRBV5-1, TRBJ2-3)
CASSLGLAVYTDTQYF

SEQ ID NO: 439887 - protein, 13 aa, Homo sapiens
  CDR3 for alpha chain variable domain of TCR clone 219944 (TRAV20, TRAJ37)
CAGCSSNTGKLIF

SEQ ID NO: 439888 - protein, 19 aa, Homo sapiens
  CDR3 for beta chain variable domain of TCR clone 219944 (TRBV9, TRBJ1-3)
CASSSTLQGSGTLGNTIYF

SEQ ID NO: 439889 - protein, 13 aa, Homo sapiens
  CDR3 for alpha chain variable domain of TCR clone 219945 (TRAV13-1, TRAJ43)
CAASLSNNNEMRF

SEQ ID NO: 439890 - protein, 21 aa, Homo sapiens
  CDR3 for beta chain variable domain of TCR clone 219945 (TRBV5-1, TRBJ2-5)
RGSGCSVSAGCWGAGEKTQYF

SEQ ID NO: 439891 - protein, 13 aa, Homo sapiens
  CDR3 for alpha chain variable domain of TCR clone 219946 (TRAV12-1, TRAJ40)
CVVPTSGTYKYIF

SEQ ID NO: 439892 - protein, 16 aa, Homo sapiens
  CDR3 for beta chain variable domain of TCR clone 219946 (TRBV7-9, TRBJ1-2)
CASSLGFSSGEDGYTL

SEQ ID NO: 439893 - protein, 15 aa, Homo sapiens
  CDR3 for alpha chain variable domain of TCR clone 219947 (TRAV20, TRAJ53)
CAVQASGGSDYKLTF

SEQ ID NO: 439894 - protein, 12 aa, Homo sapiens
  CDR3 for beta chain variable domain of TCR clone 219947 (TRBV7-6, TRBJ2-5)
CASSLSQETQYF

SEQ ID NO: 439895 - protein, 16 aa, Homo sapiens
  CDR3 for alpha chain variable domain of TCR clone 219948 (TRAV21, TRAJ37)
CAVRTTGSSNTGKLIF

SEQ ID NO: 439896 - protein, 13 aa, Homo sapiens
  CDR3 for beta chain variable domain of TCR clone 219948 (TRBV7-9, TRBJ2-5)
CASLPSGRETEYF

SEQ ID NO: 439897 - protein, 16 aa, Homo sapiens
  CDR3 for alpha chain variable domain of TCR clone 219949 (TRAV4, TRAJ5)
CLVGPDHGHGQESTYF

SEQ ID NO: 439898 - protein, 13 aa, Homo sapiens
  CDR3 for beta chain variable domain of TCR clone 219949 (TRBV4-2, TRBJ1-2)
CSSSLSASGGYTF

SEQ ID NO: 439899 - protein, 15 aa, Homo sapiens
  CDR3 for alpha chain variable domain of TCR clone 219950 (TRAV2, TRAJ15)
CAVEDRGQAGTALIF

SEQ ID NO: 439900 - protein, 16 aa, Homo sapiens
  CDR3 for beta chain variable domain of TCR clone 219950 (TRBV2, TRBJ2-5)
CASSETQGVGEETQYF

SEQ ID NO: 439901 - protein, 13 aa, Homo sapiens
  CDR3 for alpha chain variable domain of TCR clone 219951 (TRAV12-3, TRAJ33)
CAMSVNSNYQLIW

SEQ ID NO: 439902 - protein, 14 aa, Homo sapiens
  CDR3 for beta chain variable domain of TCR clone 219951 (TRBV7-2, TRBJ2-7)
CACRSQGAAYEQYF

SEQ ID NO: 439903 - protein, 14 aa, Homo sapiens
  CDR3 for alpha chain variable domain of TCR clone 219952 (TRAV38-1, TRAJ35)
CAFLTIGFGNVLHC

SEQ ID NO: 439904 - protein, 12 aa, Homo sapiens
  CDR3 for beta chain variable domain of TCR clone 219952 (TRBV11-2, TRBJ2-2)
CASSLGGGELFF

SEQ ID NO: 439905 - protein, 13 aa, Homo sapiens
  CDR3 for alpha chain variable domain of TCR clone 219953 (TRAV3, TRAJ3)
CAVADSSASKIIF

SEQ ID NO: 439906 - protein, 15 aa, Homo sapiens
  CDR3 for beta chain variable domain of TCR clone 219953 (TRBV4-1, TRBJ2-5)
CASSQWDLYQETQYF

SEQ ID NO: 439907 - protein, 13 aa, Homo sapiens
  CDR3 for alpha chain variable domain of TCR clone 219954 (TRAV29/DV5, TRAJ29)
CAASAAGNTHLVF

SEQ ID NO: 439908 - protein, 14 aa, Homo sapiens
  CDR3 for beta chain variable domain of TCR clone 219954 (TRBV19, TRBJ2-3)
CASSAPRGTDTQYF

SEQ ID NO: 439909 - protein, 18 aa, Homo sapiens
  CDR3 for alpha chain variable domain of TCR clone 219955 (TRAV21, TRAJ52)
RAVRPAPAGGTSDGKLTF

SEQ ID NO: 439910 - protein, 13 aa, Homo sapiens
  CDR3 for beta chain variable domain of TCR clone 219955 (TRBV10-3, TRBJ2-7)
CASKLAVNYEQYF

SEQ ID NO: 439911 - protein, 14 aa, Homo sapiens
  CDR3 for alpha chain variable domain of TCR clone 219956 (TRAV12-2, TRAJ13)
CAVKKTGGYQKLTF

SEQ ID NO: 439912 - protein, 13 aa, Homo sapiens
  CDR3 for beta chain variable domain of TCR clone 219956 (TRBV9, TRBJ2-1)
CASSVGQGGEQFF

SEQ ID NO: 439913 - protein, 10 aa, Homo sapiens
  CDR3 for alpha chain variable domain of TCR clone 219957 (TRAV8-4, TRAJ43)
CAVSADDMCF

SEQ ID NO: 439914 - protein, 11 aa, Homo sapiens
  CDR3 for beta chain variable domain of TCR clone 219957 (TRBV12-4, TRBJ2-3)
CASTATDRQYF

SEQ ID NO: 439915 - protein, 17 aa, Homo sapiens
  CDR3 for alpha chain variable domain of TCR clone 219958 (TRAV13-1, TRAJ28)
CAASPPYSGAGSYQLTL

SEQ ID NO: 439916 - protein, 12 aa, Homo sapiens
  CDR3 for beta chain variable domain of TCR clone 219958 (TRBV11-2, TRBJ2-2)
CASSLPTGELSF

SEQ ID NO: 439917 - protein, 14 aa, Homo sapiens
  CDR3 for alpha chain variable domain of TCR clone 219959 (TRAV2, TRAJ9)
CAVEDRSGGFKTIF

SEQ ID NO: 439918 - protein, 16 aa, Homo sapiens
  CDR3 for beta chain variable domain of TCR clone 219959 (TRBV15, TRBJ2-7)
CVTSGDGGIPSYEQYF

SEQ ID NO: 439919 - protein, 16 aa, Homo sapiens
  CDR3 for alpha chain variable domain of TCR clone 219960 (TRAV8-3, TRAJ10)
CAVGPILTGGGNKLTI

SEQ ID NO: 439920 - protein, 16 aa, Homo sapiens
  CDR3 for beta chain variable domain of TCR clone 219960 (TRBV7-2, TRBJ2-5)
CASSSKWLSGQETQYF

SEQ ID NO: 439921 - protein, 13 aa, Homo sapiens
  CDR3 for alpha chain variable domain of TCR clone 219961 (TRAV3, TRAJ20)
CAVRDTGDYKLSF

SEQ ID NO: 439922 - protein, 12 aa, Homo sapiens
  CDR3 for beta chain variable domain of TCR clone 219961 (TRBV29-1, TRBJ2-3)
CSVTGGADTQYF

SEQ ID NO: 439923 - protein, 14 aa, Homo sapiens
  CDR3 for alpha chain variable domain of TCR clone 219962 (TRAV26-1, TRAJ38)
CIADHAGNNRKRIW

SEQ ID NO: 439924 - protein, 13 aa, Homo sapiens
  CDR3 for beta chain variable domain of TCR clone 219962 (TRBV20-1, TRBJ1-1)
CSARGGGNTEAFF

SEQ ID NO: 439925 - protein, 13 aa, Homo sapiens
  CDR3 for alpha chain variable domain of TCR clone 219963 (TRAV2, TRAJ40)
CAVVTSGTYKYIF

SEQ ID NO: 439926 - protein, 15 aa, Homo sapiens
  CDR3 for beta chain variable domain of TCR clone 219963 (TRBV10-2, TRBJ2-6)
CASSEQGTGANGLTF

SEQ ID NO: 439927 - protein, 12 aa, Homo sapiens
  CDR3 for alpha chain variable domain of TCR clone 219964 (TRAV13-2, TRAJ58)
CAERRLDSRLTF

SEQ ID NO: 439928 - protein, 15 aa, Homo sapiens
  CDR3 for beta chain variable domain of TCR clone 219964 (TRBV5-1, TRBJ2-5)
CASSSVREMVEIQYF

SEQ ID NO: 439929 - protein, 12 aa, Homo sapiens
  CDR3 for alpha chain variable domain of TCR clone 219965 (TRAV21, TRAJ49)
CAVTNTGNQFYF

SEQ ID NO: 439930 - protein, 16 aa, Homo sapiens
  CDR3 for beta chain variable domain of TCR clone 219965 (TRBV7-2, TRBJ2-7)
CASSLEAGGPWYEQYF

SEQ ID NO: 439931 - protein, 14 aa, Homo sapiens
  CDR3 for alpha chain variable domain of TCR clone 219966 (TRAV12-2, TRAJ5)
CAVNRSTGRRALTF

SEQ ID NO: 439932 - protein, 15 aa, Homo sapiens
  CDR3 for beta chain variable domain of TCR clone 219966 (TRBV11-2, TRBJ2-2)
CASSSDRVNAGELFF

SEQ ID NO: 439933 - protein, 14 aa, Homo sapiens
  CDR3 for alpha chain variable domain of TCR clone 219967 (TRAV8-1, TRAJ36)
CAVNSPTGANNLFF

SEQ ID NO: 439934 - protein, 15 aa, Homo sapiens
  CDR3 for beta chain variable domain of TCR clone 219967 (TRBV7-2, TRBJ2-3)
CASSLEQGGTDTRYF

SEQ ID NO: 439935 - protein, 13 aa, Homo sapiens
  CDR3 for alpha chain variable domain of TCR clone 219968 (TRAV13-2, TRAJ13)
CAERPGGYQKVTF

SEQ ID NO: 439936 - protein, 17 aa, Homo sapiens
  CDR3 for beta chain variable domain of TCR clone 219968 (TRBV5-1, TRBJ2-5)
CASSPVALGQNQETQYF

SEQ ID NO: 439937 - protein, 14 aa, Homo sapiens
  CDR3 for alpha chain variable domain of TCR clone 219969 (TRAV12-1, TRAJ30)
CVPTGTNRDDKIIF

SEQ ID NO: 439938 - protein, 14 aa, Homo sapiens
  CDR3 for beta chain variable domain of TCR clone 219969 (TRBV11-2, TRBJ1-2)
CASSLGTANYGYTF

SEQ ID NO: 439939 - protein, 16 aa, Homo sapiens
  CDR3 for alpha chain variable domain of TCR clone 219970 (TRAV21, TRAJ37)
CSVRTAGSGNTGKLIF

SEQ ID NO: 439940 - protein, 13 aa, Homo sapiens
  CDR3 for beta chain variable domain of TCR clone 219970 (TRBV7-9, TRBJ2-5)
CASLPSGRETQYF

SEQ ID NO: 439941 - protein, 12 aa, Homo sapiens
  CDR3 for alpha chain variable domain of TCR clone 219971 (TRAV27, TRAJ22)
CAGDSAGVEIWF

SEQ ID NO: 439942 - protein, 17 aa, Homo sapiens
  CDR3 for beta chain variable domain of TCR clone 219971 (TRBV5-5, TRBJ1-1)
CASSLRFRGLMNTEAFF

SEQ ID NO: 439943 - protein, 14 aa, Homo sapiens
  CDR3 for alpha chain variable domain of TCR clone 219972 (TRAV17, TRAJ54)
CATDVNQGAQKLVF

SEQ ID NO: 439944 - protein, 12 aa, Homo sapiens
  CDR3 for beta chain variable domain of TCR clone 219972 (TRBV6-3, TRBJ2-1)
CASSGSYNEQFF

SEQ ID NO: 439945 - protein, 13 aa, Homo sapiens
  CDR3 for alpha chain variable domain of TCR clone 219973 (TRAV21, TRAJ40)
CAVEASGTYKYIF

SEQ ID NO: 439946 - protein, 12 aa, Homo sapiens
  CDR3 for beta chain variable domain of TCR clone 219973 (TRBV19, TRBJ2-2)
CAINMDTGELFF

SEQ ID NO: 439947 - protein, 16 aa, Homo sapiens
  CDR3 for alpha chain variable domain of TCR clone 219974 (TRAV13-1, TRAJ45)
CAARGSRKGGADGLTF

SEQ ID NO: 439948 - protein, 13 aa, Homo sapiens
  CDR3 for beta chain variable domain of TCR clone 219974 (TRBV12-4, TRBJ2-5)
YASRKRGKETQYF

SEQ ID NO: 439949 - protein, 14 aa, Homo sapiens
  CDR3 for alpha chain variable domain of TCR clone 219975 (TRAV2, TRAJ9)
CAVEDRSGGVKTIF

SEQ ID NO: 439950 - protein, 12 aa, Homo sapiens
  CDR3 for beta chain variable domain of TCR clone 219975 (TRBV12-4, TRBJ2-4)
CASSSSGNIQFF

SEQ ID NO: 439951 - protein, 13 aa, Homo sapiens
  CDR3 for alpha chain variable domain of TCR clone 219976 (TRAV21, TRAJ20)
CAVGLRVDYKLSF

SEQ ID NO: 439952 - protein, 15 aa, Homo sapiens
  CDR3 for beta chain variable domain of TCR clone 219976 (TRBV9, TRBJ2-1)
CASSLAGSSYNEQFF

SEQ ID NO: 439953 - protein, 14 aa, Homo sapiens
  CDR3 for alpha chain variable domain of TCR clone 219977 (TRAV2, TRAJ39)
CAVEGDNAGNMLTL

SEQ ID NO: 439954 - protein, 14 aa, Homo sapiens
  CDR3 for beta chain variable domain of TCR clone 219977 (TRBV28, TRBJ2-4)
CASSPRARGNIQYF

SEQ ID NO: 439955 - protein, 11 aa, Homo sapiens
  CDR3 for alpha chain variable domain of TCR clone 219978 (TRAV20, TRAJ23)
CACNQGGKLIF

SEQ ID NO: 439956 - protein, 16 aa, Homo sapiens
  CDR3 for beta chain variable domain of TCR clone 219978 (TRBV7-8, TRBJ2-5)
WASSFGGQPAQETQYF

SEQ ID NO: 439957 - protein, 18 aa, Homo sapiens
  CDR3 for alpha chain variable domain of TCR clone 219979 (TRAV13-1, TRAJ52)
CAASKRSAGGTSYGKLTF

SEQ ID NO: 439958 - protein, 17 aa, Homo sapiens
  CDR3 for beta chain variable domain of TCR clone 219979 (TRBV19, TRBJ2-6)
CASSSHGGPSGANVLTF

SEQ ID NO: 439959 - protein, 15 aa, Homo sapiens
  CDR3 for alpha chain variable domain of TCR clone 219980 (TRAV2, TRAJ37)
CAVGDGSSNSGKLIF

SEQ ID NO: 439960 - protein, 13 aa, Homo sapiens
  CDR3 for beta chain variable domain of TCR clone 219980 (TRBV20-1, TRBJ2-7)
CSAQTGLSYEQYF

SEQ ID NO: 439961 - protein, 12 aa, Homo sapiens
  CDR3 for alpha chain variable domain of TCR clone 219981 (TRAV13-1, TRAJ17)
CAARTTGNKLTF

SEQ ID NO: 439962 - protein, 15 aa, Homo sapiens
  CDR3 for beta chain variable domain of TCR clone 219981 (TRBV7-6, TRBJ1-1)
CASSPQGGANTEAFF

SEQ ID NO: 439963 - protein, 13 aa, Homo sapiens
  CDR3 for alpha chain variable domain of TCR clone 219982 (TRAV21, TRAJ27)
CAARPGNAGKSTF

SEQ ID NO: 439964 - protein, 15 aa, Homo sapiens
  CDR3 for beta chain variable domain of TCR clone 219982 (TRBV7-2, TRBJ2-5)
CASSAARSLTETQYF

SEQ ID NO: 439965 - protein, 15 aa, Homo sapiens
  CDR3 for alpha chain variable domain of TCR clone 219983 (TRAV17, TRAJ54)
CGTTRSEQGAQKLVF

SEQ ID NO: 439966 - protein, 16 aa, Homo sapiens
  CDR3 for beta chain variable domain of TCR clone 219983 (TRBV12-4, TRBJ2-3)
CASSLRLAETTDTQYF

SEQ ID NO: 439967 - protein, 16 aa, Homo sapiens
  CDR3 for alpha chain variable domain of TCR clone 219984 (TRAV26-1, TRAJ45)
CIVEKYSGGGADGLTF

SEQ ID NO: 439968 - protein, 17 aa, Homo sapiens
  CDR3 for beta chain variable domain of TCR clone 219984 (TRBV7-2, TRBJ2-7)
CASSLVGAGGARNEQYF

SEQ ID NO: 439969 - protein, 19 aa, Homo sapiens
  CDR3 for alpha chain variable domain of TCR clone 219985 (TRAV8-3, TRAJ8)
CAVGPNEHRLSETCIWNLH

SEQ ID NO: 439970 - protein, 13 aa, Homo sapiens
  CDR3 for beta chain variable domain of TCR clone 219985 (TRBV10-2, TRBJ2-3)
CASSESGDHTQYF

SEQ ID NO: 439971 - protein, 15 aa, Homo sapiens
  CDR3 for alpha chain variable domain of TCR clone 219986 (TRAV8-3, TRAJ6)
CAVGEDRGGSYIPTC

SEQ ID NO: 439972 - protein, 14 aa, Homo sapiens
  CDR3 for beta chain variable domain of TCR clone 219986 (TRBV27, TRBJ2-2)
CASLRAPPGGELFF

SEQ ID NO: 439973 - protein, 13 aa, Homo sapiens
  CDR3 for alpha chain variable domain of TCR clone 219987 (TRAV3, TRAJ40)
CAVRGSGAYKYIF

SEQ ID NO: 439974 - protein, 12 aa, Homo sapiens
  CDR3 for beta chain variable domain of TCR clone 219987 (TRBV11-2, TRBJ2-2)
CASSLGGGELFF

SEQ ID NO: 439975 - protein, 13 aa, Homo sapiens
  CDR3 for alpha chain variable domain of TCR clone 219988 (TRAV24, TRAJ43)
CAFTRHNNNDMRF

SEQ ID NO: 439976 - protein, 15 aa, Homo sapiens
  CDR3 for beta chain variable domain of TCR clone 219988 (TRBV20-1, TRBJ2-7)
CSARDRVCGMDEQYF

SEQ ID NO: 439977 - protein, 14 aa, Homo sapiens
  CDR3 for alpha chain variable domain of TCR clone 219989 (TRAV4, TRAJ13)
CFVDYSGGYQKVTF

SEQ ID NO: 439978 - protein, 13 aa, Homo sapiens
  CDR3 for beta chain variable domain of TCR clone 219989 (TRBV18, TRBJ1-1)
CASSGGRNTEAFF

SEQ ID NO: 439979 - protein, 16 aa, Homo sapiens
  CDR3 for alpha chain variable domain of TCR clone 219990 (TRAV17, TRAJ52)
CATSNAGGTSYGKLTF

SEQ ID NO: 439980 - protein, 14 aa, Homo sapiens
  CDR3 for beta chain variable domain of TCR clone 219990 (TRBV2, TRBJ2-1)
CASSEALIYNEQFF

SEQ ID NO: 439981 - protein, 14 aa, Homo sapiens
  CDR3 for alpha chain variable domain of TCR clone 219991 (TRAV8-2, TRAJ4)
CVVSPSGGYNKLIF

SEQ ID NO: 439982 - protein, 15 aa, Homo sapiens
  CDR3 for beta chain variable domain of TCR clone 219991 (TRBV20-1, TRBJ1-1)
CSASRGVTGNTEAFF

SEQ ID NO: 439983 - protein, 14 aa, Homo sapiens
  CDR3 for alpha chain variable domain of TCR clone 219992 (TRAV12-2, TRAJ13)
CAVKKTGGYQKVTF

SEQ ID NO: 439984 - protein, 11 aa, Homo sapiens
  CDR3 for beta chain variable domain of TCR clone 219992 (TRBV11-2, TRBJ2-2)
CASSLPGELLF

SEQ ID NO: 439985 - protein, 14 aa, Homo sapiens
  CDR3 for alpha chain variable domain of TCR clone 219993 (TRAV2, TRAJ9)
CAVEDRSGGFKTIF

SEQ ID NO: 439986 - protein, 15 aa, Homo sapiens
  CDR3 for beta chain variable domain of TCR clone 219993 (TRBV7-3, TRBJ2-2)
CQQHTSGRCAGELFF

SEQ ID NO: 439987 - protein, 14 aa, Homo sapiens
  CDR3 for alpha chain variable domain of TCR clone 219994 (TRAV2, TRAJ37)
CAVDFTSNTGKLIF

SEQ ID NO: 439988 - protein, 13 aa, Homo sapiens
  CDR3 for beta chain variable domain of TCR clone 219994 (TRBV4-2, TRBJ1-1)
CASSQAGNTEAFS

SEQ ID NO: 439989 - protein, 13 aa, Homo sapiens
  CDR3 for alpha chain variable domain of TCR clone 219995 (TRAV8-3, TRAJ44)
CTVGPGTASKLTF

SEQ ID NO: 439990 - protein, 14 aa, Homo sapiens
  CDR3 for beta chain variable domain of TCR clone 219995 (TRBV11-2, TRBJ2-3)
CASSRLARTDTQYF

SEQ ID NO: 439991 - protein, 13 aa, Homo sapiens
  CDR3 for alpha chain variable domain of TCR clone 219996 (TRAV20, TRAJ20)
CAVRWVRDYKLSF

SEQ ID NO: 439992 - protein, 15 aa, Homo sapiens
  CDR3 for beta chain variable domain of TCR clone 219996 (TRBV5-1, TRBJ2-3)
CASSVTSGSTDTQYF

SEQ ID NO: 439993 - protein, 15 aa, Homo sapiens
  CDR3 for alpha chain variable domain of TCR clone 219997 (TRAV12-2, TRAJ43)
CAFDMRVGAGTRLTV

SEQ ID NO: 439994 - protein, 18 aa, Homo sapiens
  CDR3 for beta chain variable domain of TCR clone 219997 (TRBV20-1, TRBJ2-3)
CSASGLAGGPGTTDTQYF

SEQ ID NO: 439995 - protein, 17 aa, Homo sapiens
  CDR3 for alpha chain variable domain of TCR clone 219998 (TRAV16, TRAJ58)
CITVISNGETSGSRLTF

SEQ ID NO: 439996 - protein, 17 aa, Homo sapiens
  CDR3 for beta chain variable domain of TCR clone 219998 (TRBV18, TRBJ2-1)
CASSKGLSGGADNEQYF

SEQ ID NO: 439997 - protein, 11 aa, Homo sapiens
  CDR3 for alpha chain variable domain of TCR clone 219999 (TRAV20, TRAJ34)
CRTKGTDKLIF

SEQ ID NO: 439998 - protein, 12 aa, Homo sapiens
  CDR3 for beta chain variable domain of TCR clone 219999 (TRBV11-2, TRBJ2-2)
CASSLGGGELFF

SEQ ID NO: 439999 - protein, 14 aa, Homo sapiens
  CDR3 for alpha chain variable domain of TCR clone 220000 (TRAV12-2, TRAJ17)
CAALFKAAGNKLTF

SEQ ID NO: 440000 - protein, 16 aa, Homo sapiens
  CDR3 for beta chain variable domain of TCR clone 220000 (TRBV12-5, TRBJ2-5)
CASGPRTCGNQETQYF

SEQ ID NO: 440001 - protein, 13 aa, Homo sapiens
  CDR3 for alpha chain variable domain of TCR clone 220001 (TRAV29/DV5, TRAJ31)
CAASRNNNARLMF

SEQ ID NO: 440002 - protein, 12 aa, Homo sapiens
  CDR3 for beta chain variable domain of TCR clone 220001 (TRBV14, TRBJ2-7)
CASSRPKGEQYF

SEQ ID NO: 440003 - protein, 14 aa, Homo sapiens
  CDR3 for alpha chain variable domain of TCR clone 220002 (TRAV3, TRAJ37)
CAVKESGNTGKLIF

SEQ ID NO: 440004 - protein, 14 aa, Homo sapiens
  CDR3 for beta chain variable domain of TCR clone 220002 (TRBV19, TRBJ2-7)
CASSTTRSSYEQYF

SEQ ID NO: 440005 - protein, 14 aa, Homo sapiens
  CDR3 for alpha chain variable domain of TCR clone 220003 (TRAV12-2, TRAJ13)
CAVKKTGGYQKVNF

SEQ ID NO: 440006 - protein, 15 aa, Homo sapiens
  CDR3 for beta chain variable domain of TCR clone 220003 (TRBV27, TRBJ2-1)
CASSNGGGSSNEHFF

SEQ ID NO: 440007 - protein, 10 aa, Homo sapiens
  CDR3 for alpha chain variable domain of TCR clone 220004 (TRAV1-2, TRAJ31)
CVSEDARLMF

SEQ ID NO: 440008 - protein, 14 aa, Homo sapiens
  CDR3 for beta chain variable domain of TCR clone 220004 (TRBV19, TRBJ2-1)
CASPTVVLGGEQFF

SEQ ID NO: 440009 - protein, 10 aa, Homo sapiens
  CDR3 for alpha chain variable domain of TCR clone 220005 (TRAV12-3, TRAJ49)
CAMNDDQFYS

SEQ ID NO: 440010 - protein, 13 aa, Homo sapiens
  CDR3 for beta chain variable domain of TCR clone 220005 (TRBV7-2, TRBJ1-4)
CASSLAGLEKLFF

SEQ ID NO: 440011 - protein, 13 aa, Homo sapiens
  CDR3 for alpha chain variable domain of TCR clone 220006 (TRAV21, TRAJ3)
CCEPYSRASKISF

SEQ ID NO: 440012 - protein, 15 aa, Homo sapiens
  CDR3 for beta chain variable domain of TCR clone 220006 (TRBV7-3, TRBJ2-1)
CASSPTGGGEVEQFF

SEQ ID NO: 440013 - protein, 14 aa, Homo sapiens
  CDR3 for alpha chain variable domain of TCR clone 220007 (TRAV9-2, TRAJ36)
CALPWGTGANNLFF

SEQ ID NO: 440014 - protein, 14 aa, Homo sapiens
  CDR3 for beta chain variable domain of TCR clone 220007 (TRBV2, TRBJ1-2)
CASSELQVNYGYTF

SEQ ID NO: 440015 - protein, 15 aa, Homo sapiens
  CDR3 for alpha chain variable domain of TCR clone 220008 (TRAV21, TRAJ38)
CAVRQDAGNNRKLIW

SEQ ID NO: 440016 - protein, 14 aa, Homo sapiens
  CDR3 for beta chain variable domain of TCR clone 220008 (TRBV12-4, TRBJ1-3)
CASTLTGAGNTIYF

SEQ ID NO: 440017 - protein, 11 aa, Homo sapiens
  CDR3 for alpha chain variable domain of TCR clone 220009 (TRAV2, TRAJ13)
CASGGYQKVTF

SEQ ID NO: 440018 - protein, 16 aa, Homo sapiens
  CDR3 for beta chain variable domain of TCR clone 220009 (TRBV2, TRBJ2-1)
CASSVGRSLSYNEQFF

SEQ ID NO: 440019 - protein, 15 aa, Homo sapiens
  CDR3 for alpha chain variable domain of TCR clone 220010 (TRAV8-3, TRAJ6)
CAVGGEEATYLHLEE

SEQ ID NO: 440020 - protein, 14 aa, Homo sapiens
  CDR3 for beta chain variable domain of TCR clone 220010 (TRBV5-1, TRBJ2-7)
CASSRGGSLYEQYF

SEQ ID NO: 440021 - protein, 15 aa, Homo sapiens
  CDR3 for alpha chain variable domain of TCR clone 220011 (TRAV12-3, TRAJ10)
CASYILTGGGNKLTF

SEQ ID NO: 440022 - protein, 13 aa, Homo sapiens
  CDR3 for beta chain variable domain of TCR clone 220011 (TRBV12-4, TRBJ2-7)
CASSPTETYEQYF

SEQ ID NO: 440023 - protein, 13 aa, Homo sapiens
  CDR3 for alpha chain variable domain of TCR clone 220012 (TRAV13-2, TRAJ40)
CAELISGSYKYIF

SEQ ID NO: 440024 - protein, 14 aa, Homo sapiens
  CDR3 for beta chain variable domain of TCR clone 220012 (TRBV19, TRBJ1-5)
CASGTEVYNQPQHF

SEQ ID NO: 440025 - protein, 17 aa, Homo sapiens
  CDR3 for alpha chain variable domain of TCR clone 220013 (TRAV3, TRAJ42)
CAVRDRDYVGSQGNLIF

SEQ ID NO: 440026 - protein, 15 aa, Homo sapiens
  CDR3 for beta chain variable domain of TCR clone 220013 (TRBV2, TRBJ2-7)
CASSEGLARSYEQYF

SEQ ID NO: 440027 - protein, 11 aa, Homo sapiens
  CDR3 for alpha chain variable domain of TCR clone 220014 (TRAV13-1, TRAJ49)
CTRVGGNQFYF

SEQ ID NO: 440028 - protein, 16 aa, Homo sapiens
  CDR3 for beta chain variable domain of TCR clone 220014 (TRBV11-2, TRBJ2-2)
CASSRRTGNLIGELFF

SEQ ID NO: 440029 - protein, 17 aa, Homo sapiens
  CDR3 for alpha chain variable domain of TCR clone 220015 (TRAV12-2, TRAJ53)
CAPLTDSQEGSNYKLTS

SEQ ID NO: 440030 - protein, 12 aa, Homo sapiens
  CDR3 for beta chain variable domain of TCR clone 220015 (TRBV11-2, TRBJ2-2)
CASSLGGGELFF

SEQ ID NO: 440031 - protein, 12 aa, Homo sapiens
  CDR3 for alpha chain variable domain of TCR clone 220016 (TRAV13-1, TRAJ21)
CAAKEGFNKFYF

SEQ ID NO: 440032 - protein, 12 aa, Homo sapiens
  CDR3 for beta chain variable domain of TCR clone 220016 (TRBV5-4, TRBJ2-5)
CASSSTRETQYF

SEQ ID NO: 440033 - protein, 13 aa, Homo sapiens
  CDR3 for alpha chain variable domain of TCR clone 220017 (TRAV16, TRAJ10)
CAPAREEETNPPL

SEQ ID NO: 440034 - protein, 13 aa, Homo sapiens
  CDR3 for beta chain variable domain of TCR clone 220017 (TRBV7-3, TRBJ1-1)
CASSQDWGAEAFF

SEQ ID NO: 440035 - protein, 16 aa, Homo sapiens
  CDR3 for alpha chain variable domain of TCR clone 220018 (TRAV13-2, TRAJ37)
CAENIRGSSNTGKLIF

SEQ ID NO: 440036 - protein, 14 aa, Homo sapiens
  CDR3 for beta chain variable domain of TCR clone 220018 (TRBV5-4, TRBJ1-1)
CASSLDSRRDEAFF

SEQ ID NO: 440037 - protein, 13 aa, Homo sapiens
  CDR3 for alpha chain variable domain of TCR clone 220019 (TRAV12-1, TRAJ10)
PPHLTGGGNKLTF

SEQ ID NO: 440038 - protein, 13 aa, Homo sapiens
  CDR3 for beta chain variable domain of TCR clone 220019 (TRBV7-9, TRBJ1-2)
CASSLKQNYGYTF

SEQ ID NO: 440039 - protein, 14 aa, Homo sapiens
  CDR3 for alpha chain variable domain of TCR clone 220020 (TRAV20, TRAJ22)
CAVALGGSARQLTF

SEQ ID NO: 440040 - protein, 17 aa, Homo sapiens
  CDR3 for beta chain variable domain of TCR clone 220020 (TRBV13, TRBJ2-3)
CASSLSRVAGGRNTQYC

SEQ ID NO: 440041 - protein, 13 aa, Homo sapiens
  CDR3 for alpha chain variable domain of TCR clone 220021 (TRAV8-6, TRAJ49)
CAVITNTGKQVYF

SEQ ID NO: 440042 - protein, 12 aa, Homo sapiens
  CDR3 for beta chain variable domain of TCR clone 220021 (TRBV12-4, TRBJ2-7)
CASSLGGYEQYF

SEQ ID NO: 440043 - protein, 14 aa, Homo sapiens
  CDR3 for alpha chain variable domain of TCR clone 220022 (TRAV12-2, TRAJ44)
CAVNKAGTASKLTF

SEQ ID NO: 440044 - protein, 14 aa, Homo sapiens
  CDR3 for beta chain variable domain of TCR clone 220022 (TRBV12-4, TRBJ1-1)
CASSLGTGGTEAFF

SEQ ID NO: 440045 - protein, 18 aa, Homo sapiens
  CDR3 for alpha chain variable domain of TCR clone 220023 (TRAV21, TRAJ52)
CAVRPSPAGGTSYGKLTF

SEQ ID NO: 440046 - protein, 15 aa, Homo sapiens
  CDR3 for beta chain variable domain of TCR clone 220023 (TRBV4-1, TRBJ1-4)
CASSDTGGTNENLFF

SEQ ID NO: 440047 - protein, 16 aa, Homo sapiens
  CDR3 for alpha chain variable domain of TCR clone 220024 (TRAV17, TRAJ28)
CATASVSGAGSYQLTF

SEQ ID NO: 440048 - protein, 11 aa, Homo sapiens
  CDR3 for beta chain variable domain of TCR clone 220024 (TRBV7-9, TRBJ2-5)
CASNLGETQYF

SEQ ID NO: 440049 - protein, 13 aa, Homo sapiens
  CDR3 for alpha chain variable domain of TCR clone 220025 (TRAV12-1, TRAJ40)
CVVPTSGTYKYIF

SEQ ID NO: 440050 - protein, 18 aa, Homo sapiens
  CDR3 for beta chain variable domain of TCR clone 220025 (TRBV7-6, TRBJ2-1)
CASSTRTSGMSAYNEQFF

SEQ ID NO: 440051 - protein, 13 aa, Homo sapiens
  CDR3 for alpha chain variable domain of TCR clone 220026 (TRAV16, TRAJ20)
CALGPSNDYKLSF

SEQ ID NO: 440052 - protein, 13 aa, Homo sapiens
  CDR3 for beta chain variable domain of TCR clone 220026 (TRBV10-3, TRBJ2-1)
CAISEFSGREQFF

SEQ ID NO: 440053 - protein, 11 aa, Homo sapiens
  CDR3 for alpha chain variable domain of TCR clone 220027 (TRAV13-2, TRAJ43)
CAERGNNDMRF

SEQ ID NO: 440054 - protein, 15 aa, Homo sapiens
  CDR3 for beta chain variable domain of TCR clone 220027 (TRBV20-1, TRBJ1-4)
CSARREWGVNEKLFF

SEQ ID NO: 440055 - protein, 14 aa, Homo sapiens
  CDR3 for alpha chain variable domain of TCR clone 220028 (TRAV1-2, TRAJ16)
CAVNRFSVGQKLLF

SEQ ID NO: 440056 - protein, 14 aa, Homo sapiens
  CDR3 for beta chain variable domain of TCR clone 220028 (TRBV7-9, TRBJ2-3)
CASSLEDGTDTQYF

SEQ ID NO: 440057 - protein, 19 aa, Homo sapiens
  CDR3 for alpha chain variable domain of TCR clone 220029 (TRAV26-2, TRAJ52)
CILRTGFNAGGTSYGKLTF

SEQ ID NO: 440058 - protein, 16 aa, Homo sapiens
  CDR3 for beta chain variable domain of TCR clone 220029 (TRBV19, TRBJ2-2)
CASRSPGTGATGELFF

SEQ ID NO: 440059 - protein, 14 aa, Homo sapiens
  CDR3 for alpha chain variable domain of TCR clone 220030 (TRAV16, TRAJ17)
FALSGRAAGNKLTF

SEQ ID NO: 440060 - protein, 17 aa, Homo sapiens
  CDR3 for beta chain variable domain of TCR clone 220030 (TRBV18, TRBJ2-6)
CASSPRQGAVGANVLTF

SEQ ID NO: 440061 - protein, 23 aa, Homo sapiens
  CDR3 for alpha chain variable domain of TCR clone 220031 (TRAV26-1, TRAJ38)
CIADNAGNNHIQHPDPAVYQLSD

SEQ ID NO: 440062 - protein, 13 aa, Homo sapiens
  CDR3 for beta chain variable domain of TCR clone 220031 (TRBV20-1, TRBJ1-1)
CSARGGGNTEAFF

SEQ ID NO: 440063 - protein, 11 aa, Homo sapiens
  CDR3 for alpha chain variable domain of TCR clone 220032 (TRAV3, TRAJ21)
CAVGNFNKFYF

SEQ ID NO: 440064 - protein, 16 aa, Homo sapiens
  CDR3 for beta chain variable domain of TCR clone 220032 (TRBV7-6, TRBJ2-1)
CASSAPGPSSYNQQFF

SEQ ID NO: 440065 - protein, 14 aa, Homo sapiens
  CDR3 for alpha chain variable domain of TCR clone 220033 (TRAV8-3, TRAJ30)
CAVGDMNGDDKIIF

SEQ ID NO: 440066 - protein, 17 aa, Homo sapiens
  CDR3 for beta chain variable domain of TCR clone 220033 (TRBV19, TRBJ2-2)
CASSRNPGGFGTGELFF

SEQ ID NO: 440067 - protein, 14 aa, Homo sapiens
  CDR3 for alpha chain variable domain of TCR clone 220034 (TRAV2, TRAJ12)
CAVDAMDCSYKLIF

SEQ ID NO: 440068 - protein, 13 aa, Homo sapiens
  CDR3 for beta chain variable domain of TCR clone 220034 (TRBV19, TRBJ2-1)
CASKVGAGGEQFF

SEQ ID NO: 440069 - protein, 16 aa, Homo sapiens
  CDR3 for alpha chain variable domain of TCR clone 220035 (TRAV3, TRAJ37)
CAVRPHASGNTGKLIF

SEQ ID NO: 440070 - protein, 20 aa, Homo sapiens
  CDR3 for beta chain variable domain of TCR clone 220035 (TRBV7-8, TRBJ2-2)
CASSHLFPGPTIHITGELFF

SEQ ID NO: 440071 - protein, 14 aa, Homo sapiens
  CDR3 for alpha chain variable domain of TCR clone 220036 (TRAV17, TRAJ22)
CATSPSGSARQVTF

SEQ ID NO: 440072 - protein, 14 aa, Homo sapiens
  CDR3 for beta chain variable domain of TCR clone 220036 (TRBV7-2, TRBJ1-1)
YASSFLTGTTEAFF

SEQ ID NO: 440073 - protein, 14 aa, Homo sapiens
  CDR3 for alpha chain variable domain of TCR clone 220037 (TRAV17, TRAJ22)
CATSPSGSARQLTF

SEQ ID NO: 440074 - protein, 15 aa, Homo sapiens
  CDR3 for beta chain variable domain of TCR clone 220037 (TRBV12-4, TRBJ2-1)
CASSLLATGNNEQFF

SEQ ID NO: 440075 - protein, 12 aa, Homo sapiens
  CDR3 for alpha chain variable domain of TCR clone 220038 (TRAV8-3, TRAJ26)
CSGDNYGQNFVF

SEQ ID NO: 440076 - protein, 11 aa, Homo sapiens
  CDR3 for beta chain variable domain of TCR clone 220038 (TRBV19, TRBJ1-1)
CASSIGSEAFF

SEQ ID NO: 440077 - protein, 17 aa, Homo sapiens
  CDR3 for alpha chain variable domain of TCR clone 220039 (TRAV13-1, TRAJ28)
CATSPPYSGAGSYQLTL

SEQ ID NO: 440078 - protein, 14 aa, Homo sapiens
  CDR3 for beta chain variable domain of TCR clone 220039 (TRBV24-1, TRBJ1-1)
CATSIPRGDTEAFF

SEQ ID NO: 440079 - protein, 14 aa, Homo sapiens
  CDR3 for alpha chain variable domain of TCR clone 220040 (TRAV12-2, TRAJ13)
CAVKKNGGYQKVTF

SEQ ID NO: 440080 - protein, 15 aa, Homo sapiens
  CDR3 for beta chain variable domain of TCR clone 220040 (TRBV27, TRBJ2-1)
CASSNGGGSSNKQFF

SEQ ID NO: 440081 - protein, 16 aa, Homo sapiens
  CDR3 for alpha chain variable domain of TCR clone 220041 (TRAV17, TRAJ17)
CATALQEESAGNKLTF

SEQ ID NO: 440082 - protein, 12 aa, Homo sapiens
  CDR3 for beta chain variable domain of TCR clone 220041 (TRBV4-2, TRBJ2-5)
CASGGAQETQYF

SEQ ID NO: 440083 - protein, 14 aa, Homo sapiens
  CDR3 for alpha chain variable domain of TCR clone 220042 (TRAV38-1, TRAJ43)
CAFMKHNNNNDMRF

SEQ ID NO: 440084 - protein, 14 aa, Homo sapiens
  CDR3 for beta chain variable domain of TCR clone 220042 (TRBV5-4, TRBJ1-1)
CASSLDSRRDDAFF

SEQ ID NO: 440085 - protein, 13 aa, Homo sapiens
  CDR3 for alpha chain variable domain of TCR clone 220043 (TRAV23/DV6, TRAJ16)
CAASISDGQKLHF

SEQ ID NO: 440086 - protein, 15 aa, Homo sapiens
  CDR3 for beta chain variable domain of TCR clone 220043 (TRBV2, TRBJ2-2)
CASSRETVGTGELFF

SEQ ID NO: 440087 - protein, 12 aa, Homo sapiens
  CDR3 for alpha chain variable domain of TCR clone 220044 (TRAV1-2, TRAJ29)
CAVPSGNTPLVF

SEQ ID NO: 440088 - protein, 16 aa, Homo sapiens
  CDR3 for beta chain variable domain of TCR clone 220044 (TRBV4-2, TRBJ2-7)
CASSQEGLANSCEQYF

SEQ ID NO: 440089 - protein, 15 aa, Homo sapiens
  CDR3 for alpha chain variable domain of TCR clone 220045 (TRAV17, TRAJ13)
CATDAGSGGYQKVTF

SEQ ID NO: 440090 - protein, 14 aa, Homo sapiens
  CDR3 for beta chain variable domain of TCR clone 220045 (TRBV12-5, TRBJ2-5)
CASGSRTHQETQYF

SEQ ID NO: 440091 - protein, 16 aa, Homo sapiens
  CDR3 for alpha chain variable domain of TCR clone 220046 (TRAV30, TRAJ24)
CGTEIVDADSWGKFQF

SEQ ID NO: 440092 - protein, 16 aa, Homo sapiens
  CDR3 for beta chain variable domain of TCR clone 220046 (TRBV19, TRBJ2-1)
CASSIQAGGSYNEQFF

SEQ ID NO: 440093 - protein, 12 aa, Homo sapiens
  CDR3 for alpha chain variable domain of TCR clone 220047 (TRAV1-2, TRAJ24)
CAVGGSWGKSHF

SEQ ID NO: 440094 - protein, 15 aa, Homo sapiens
  CDR3 for beta chain variable domain of TCR clone 220047 (TRBV6-1, TRBJ2-7)
CASSEGVGNPYEQYF

SEQ ID NO: 440095 - protein, 11 aa, Homo sapiens
  CDR3 for alpha chain variable domain of TCR clone 220048 (TRAV2, TRAJ13)
CASGGYQKVTF

SEQ ID NO: 440096 - protein, 15 aa, Homo sapiens
  CDR3 for beta chain variable domain of TCR clone 220048 (TRBV5-1, TRBJ1-3)
CASSLEGGSGNTIYF

SEQ ID NO: 440097 - protein, 13 aa, Homo sapiens
  CDR3 for alpha chain variable domain of TCR clone 220049 (TRAV12-2, TRAJ12)
CAVNWDSSYKLIF

SEQ ID NO: 440098 - protein, 14 aa, Homo sapiens
  CDR3 for beta chain variable domain of TCR clone 220049 (TRBV7-8, TRBJ2-3)
CASSLEAGTDTQYF

SEQ ID NO: 440099 - protein, 12 aa, Homo sapiens
  CDR3 for alpha chain variable domain of TCR clone 220050 (TRAV2, TRAJ33)
CAFMDSNYQLIL

SEQ ID NO: 440100 - protein, 16 aa, Homo sapiens
  CDR3 for beta chain variable domain of TCR clone 220050 (TRBV2, TRBJ2-7)
CASSEPWTGPSYEQYF

SEQ ID NO: 440101 - protein, 16 aa, Homo sapiens
  CDR3 for alpha chain variable domain of TCR clone 220051 (TRAV30, TRAJ24)
CGTEIVDTDSWGKFQF

SEQ ID NO: 440102 - protein, 14 aa, Homo sapiens
  CDR3 for beta chain variable domain of TCR clone 220051 (TRBV12-5, TRBJ2-5)
SASGSRTHQETQYF

SEQ ID NO: 440103 - protein, 15 aa, Homo sapiens
  CDR3 for alpha chain variable domain of TCR clone 220052 (TRAV35, TRAJ52)
CAVPRGGTSYGKLTF

SEQ ID NO: 440104 - protein, 14 aa, Homo sapiens
  CDR3 for beta chain variable domain of TCR clone 220052 (TRBV20-1, TRBJ2-7)
CSAWTALSSYEQYF

SEQ ID NO: 440105 - protein, 14 aa, Homo sapiens
  CDR3 for alpha chain variable domain of TCR clone 220053 (TRAV29/DV5, TRAJ36)
CAARRKTGANNLLF

SEQ ID NO: 440106 - protein, 12 aa, Homo sapiens
  CDR3 for beta chain variable domain of TCR clone 220053 (TRBV12-4, TRBJ2-7)
CASSLGGYEQYF

SEQ ID NO: 440107 - protein, 12 aa, Homo sapiens
  CDR3 for alpha chain variable domain of TCR clone 220054 (TRAV1-2, TRAJ9)
CAGYTGGFKTIF

SEQ ID NO: 440108 - protein, 15 aa, Homo sapiens
  CDR3 for beta chain variable domain of TCR clone 220054 (TRBV11-2, TRBJ2-1)
CASSPAGQSLNEQSF

SEQ ID NO: 440109 - protein, 13 aa, Homo sapiens
  CDR3 for alpha chain variable domain of TCR clone 220055 (TRAV21, TRAJ27)
CAALNTNAGKSTF

SEQ ID NO: 440110 - protein, 15 aa, Homo sapiens
  CDR3 for beta chain variable domain of TCR clone 220055 (TRBV2, TRBJ2-7)
CASTLLGSGATEQYF

SEQ ID NO: 440111 - protein, 13 aa, Homo sapiens
  CDR3 for alpha chain variable domain of TCR clone 220056 (TRAV12-3, TRAJ33)
CAMSVNSNYQLIW

SEQ ID NO: 440112 - protein, 16 aa, Homo sapiens
  CDR3 for beta chain variable domain of TCR clone 220056 (TRBV13, TRBJ2-5)
CASSVRTGGSWDTQYF

SEQ ID NO: 440113 - protein, 13 aa, Homo sapiens
  CDR3 for alpha chain variable domain of TCR clone 220057 (TRAV12-3, TRAJ53)
CAMRGGSNYKLTF

SEQ ID NO: 440114 - protein, 15 aa, Homo sapiens
  CDR3 for beta chain variable domain of TCR clone 220057 (TRBV2, TRBJ2-1)
CATEARLVMIGEQFF

SEQ ID NO: 440115 - protein, 12 aa, Homo sapiens
  CDR3 for alpha chain variable domain of TCR clone 220058 (TRAV12-2, TRAJ45)
CASGGGADGLTF

SEQ ID NO: 440116 - protein, 16 aa, Homo sapiens
  CDR3 for beta chain variable domain of TCR clone 220058 (TRBV24-1, TRBJ2-3)
CATSDPGTGATDTQYF

SEQ ID NO: 440117 - protein, 13 aa, Homo sapiens
  CDR3 for alpha chain variable domain of TCR clone 220059 (TRAV17, TRAJ26)
CATVDNYGQNFVV

SEQ ID NO: 440118 - protein, 16 aa, Homo sapiens
  CDR3 for beta chain variable domain of TCR clone 220059 (TRBV2, TRBJ2-1)
CASSVGGSLSYNEQFF

SEQ ID NO: 440119 - protein, 14 aa, Homo sapiens
  CDR3 for alpha chain variable domain of TCR clone 220060 (TRAV12-1, TRAJ33)
CVVNPENSNYQLIW

SEQ ID NO: 440120 - protein, 11 aa, Homo sapiens
  CDR3 for beta chain variable domain of TCR clone 220060 (TRBV7-6, TRBJ2-1)
CASSNYGEQFF

SEQ ID NO: 440121 - protein, 12 aa, Homo sapiens
  CDR3 for alpha chain variable domain of TCR clone 220061 (TRAV20, TRAJ39)
CAVGNAGNMLTF

SEQ ID NO: 440122 - protein, 17 aa, Homo sapiens
  CDR3 for beta chain variable domain of TCR clone 220061 (TRBV4-1, TRBJ2-3)
CAISQGYVSGGTDTQYF

SEQ ID NO: 440123 - protein, 13 aa, Homo sapiens
  CDR3 for alpha chain variable domain of TCR clone 220062 (TRAV35, TRAJ36)
CAGPRIGANNLFF

SEQ ID NO: 440124 - protein, 13 aa, Homo sapiens
  CDR3 for beta chain variable domain of TCR clone 220062 (TRBV20-1, TRBJ1-2)
CSASDRGSRGYTF

SEQ ID NO: 440125 - protein, 13 aa, Homo sapiens
  CDR3 for alpha chain variable domain of TCR clone 220063 (TRAV35, TRAJ42)
CAGFPGSQGDLIF

SEQ ID NO: 440126 - protein, 14 aa, Homo sapiens
  CDR3 for beta chain variable domain of TCR clone 220063 (TRBV4-1, TRBJ2-2)
CASSQAVKTGELFF

SEQ ID NO: 440127 - protein, 14 aa, Homo sapiens
  CDR3 for alpha chain variable domain of TCR clone 220064 (TRAV13-2, TRAJ10)
CAETFTGGGTKLTF

SEQ ID NO: 440128 - protein, 16 aa, Homo sapiens
  CDR3 for beta chain variable domain of TCR clone 220064 (TRBV18, TRBJ2-7)
CASSPRSQGISYEQYF

SEQ ID NO: 440129 - protein, 15 aa, Homo sapiens
  CDR3 for alpha chain variable domain of TCR clone 220065 (TRAV29/DV5, TRAJ24)
CAASRATDSWGKFQF

SEQ ID NO: 440130 - protein, 12 aa, Homo sapiens
  CDR3 for beta chain variable domain of TCR clone 220065 (TRBV11-2, TRBJ2-2)
CASSLPTGELFF

SEQ ID NO: 440131 - protein, 15 aa, Homo sapiens
  CDR3 for alpha chain variable domain of TCR clone 220066 (TRAV17, TRAJ3)
CATDGPHSSASKIIF

SEQ ID NO: 440132 - protein, 13 aa, Homo sapiens
  CDR3 for beta chain variable domain of TCR clone 220066 (TRBV5-1, TRBJ1-1)
CASSKLGNTEAFF

SEQ ID NO: 440133 - protein, 21 aa, Homo sapiens
  CDR3 for alpha chain variable domain of TCR clone 220067 (TRAV3, TRAJ37)
CAVRGKGWQHRQTNLWARDNF

SEQ ID NO: 440134 - protein, 16 aa, Homo sapiens
  CDR3 for beta chain variable domain of TCR clone 220067 (TRBV28, TRBJ1-5)
CASSFRGGYSNQPQHF

SEQ ID NO: 440135 - protein, 14 aa, Homo sapiens
  CDR3 for alpha chain variable domain of TCR clone 220068 (TRAV1-2, TRAJ8)
CAVREDTGFQKLVV

SEQ ID NO: 440136 - protein, 11 aa, Homo sapiens
  CDR3 for beta chain variable domain of TCR clone 220068 (TRBV29-1, TRBJ1-4)
CSVSSGEKLFF

SEQ ID NO: 440137 - protein, 16 aa, Homo sapiens
  CDR3 for alpha chain variable domain of TCR clone 220069 (TRAV30, TRAJ24)
CGTEIVDADSWGKFQF

SEQ ID NO: 440138 - protein, 15 aa, Homo sapiens
  CDR3 for beta chain variable domain of TCR clone 220069 (TRBV27, TRBJ2-1)
CTSSNGGGSSNEQFF

SEQ ID NO: 440139 - protein, 13 aa, Homo sapiens
  CDR3 for alpha chain variable domain of TCR clone 220070 (TRAV26-1, TRAJ36)
CIVVGTGANNLFF

SEQ ID NO: 440140 - protein, 16 aa, Homo sapiens
  CDR3 for beta chain variable domain of TCR clone 220070 (TRBV4-3, TRBJ2-1)
CASSPALDRGVNEQFF

SEQ ID NO: 440141 - protein, 13 aa, Homo sapiens
  CDR3 for alpha chain variable domain of TCR clone 220071 (TRAV29/DV5, TRAJ47)
CAASGEIWKHTGL

SEQ ID NO: 440142 - protein, 15 aa, Homo sapiens
  CDR3 for beta chain variable domain of TCR clone 220071 (TRBV20-1, TRBJ2-7)
CSARDRVSGMDEQYF

SEQ ID NO: 440143 - protein, 14 aa, Homo sapiens
  CDR3 for alpha chain variable domain of TCR clone 220072 (TRAV13-1, TRAJ40)
CAARSTSGTYKYIF

SEQ ID NO: 440144 - protein, 15 aa, Homo sapiens
  CDR3 for beta chain variable domain of TCR clone 220072 (TRBV18, TRBJ1-5)
CASSGTGGNNQPQHF

SEQ ID NO: 440145 - protein, 18 aa, Homo sapiens
  CDR3 for alpha chain variable domain of TCR clone 220073 (TRAV12-2, )
CAVDDIQNPDPAVYQLRD

SEQ ID NO: 440146 - protein, 15 aa, Homo sapiens
  CDR3 for beta chain variable domain of TCR clone 220073 (TRBV6-5, TRBJ2-7)
CASSRTSGFSYEQYF

SEQ ID NO: 440147 - protein, 17 aa, Homo sapiens
  CDR3 for alpha chain variable domain of TCR clone 220074 (TRAV12-3, TRAJ26)
CAMSGGRWDNYGQNFVF

SEQ ID NO: 440148 - protein, 12 aa, Homo sapiens
  CDR3 for beta chain variable domain of TCR clone 220074 (TRBV7-9, TRBJ1-5)
CASSPQGQPQHF

SEQ ID NO: 440149 - protein, 17 aa, Homo sapiens
  CDR3 for alpha chain variable domain of TCR clone 220075 (TRAV17, TRAJ7)
CATLGRLAFGKGNQVVV

SEQ ID NO: 440150 - protein, 13 aa, Homo sapiens
  CDR3 for beta chain variable domain of TCR clone 220075 (TRBV12-4, TRBJ2-7)
CARSLERVREQYF

SEQ ID NO: 440151 - protein, 11 aa, Homo sapiens
  CDR3 for alpha chain variable domain of TCR clone 220076 (TRAV26-1, TRAJ37)
CIVRVGRKLIF

SEQ ID NO: 440152 - protein, 13 aa, Homo sapiens
  CDR3 for beta chain variable domain of TCR clone 220076 (TRBV14, TRBJ1-2)
CGSSEDRRYGYTF

SEQ ID NO: 440153 - protein, 12 aa, Homo sapiens
  CDR3 for alpha chain variable domain of TCR clone 220077 (TRAV12-1, TRAJ40)
CVVSSGTYKYIF

SEQ ID NO: 440154 - protein, 15 aa, Homo sapiens
  CDR3 for beta chain variable domain of TCR clone 220077 (TRBV19, TRBJ2-7)
CASSPAGSGEALRYF

SEQ ID NO: 440155 - protein, 13 aa, Homo sapiens
  CDR3 for alpha chain variable domain of TCR clone 220078 (TRAV8-1, TRAJ9)
CAVNSVGGFKTIF

SEQ ID NO: 440156 - protein, 15 aa, Homo sapiens
  CDR3 for beta chain variable domain of TCR clone 220078 (TRBV11-2, TRBJ2-3)
CASSGRDGLTDTQYL

SEQ ID NO: 440157 - protein, 16 aa, Homo sapiens
  CDR3 for alpha chain variable domain of TCR clone 220079 (TRAV12-3, TRAJ50)
CAMRDPMKTSYDKVIF

SEQ ID NO: 440158 - protein, 16 aa, Homo sapiens
  CDR3 for beta chain variable domain of TCR clone 220079 (TRBV13, TRBJ2-2)
CASSPRTGEHTGELFF

SEQ ID NO: 440159 - protein, 14 aa, Homo sapiens
  CDR3 for alpha chain variable domain of TCR clone 220080 (TRAV29/DV5, TRAJ45)
CAASFRGGADGLTF

SEQ ID NO: 440160 - protein, 14 aa, Homo sapiens
  CDR3 for beta chain variable domain of TCR clone 220080 (TRBV20-1, TRBJ1-1)
CSAQTRIGGTEAFF

SEQ ID NO: 440161 - protein, 15 aa, Homo sapiens
  CDR3 for alpha chain variable domain of TCR clone 220081 (TRAV35, TRAJ40)
CAGVPGASGTYKYIF

SEQ ID NO: 440162 - protein, 15 aa, Homo sapiens
  CDR3 for beta chain variable domain of TCR clone 220081 (TRBV6-3, TRBJ2-1)
CASTQRTFSYNEQFV

SEQ ID NO: 440163 - protein, 14 aa, Homo sapiens
  CDR3 for alpha chain variable domain of TCR clone 220082 (TRAV3, TRAJ33)
CAVRDMDSKYQLIW

SEQ ID NO: 440164 - protein, 19 aa, Homo sapiens
  CDR3 for beta chain variable domain of TCR clone 220082 (TRBV7-3, TRBJ1-2)
CASSFPQGNDGELWLHLRF

SEQ ID NO: 440165 - protein, 15 aa, Homo sapiens
  CDR3 for alpha chain variable domain of TCR clone 220083 (TRAV8-3, TRAJ11)
CAVGLLHSGYSTLTF

SEQ ID NO: 440166 - protein, 16 aa, Homo sapiens
  CDR3 for beta chain variable domain of TCR clone 220083 (TRBV7-9, TRBJ1-2)
CASSLGFPSGEDGYTF

SEQ ID NO: 440167 - protein, 17 aa, Homo sapiens
  CDR3 for alpha chain variable domain of TCR clone 220084 (TRAV3, TRAJ6)
CAVRDGPRAGGSYMPTI

SEQ ID NO: 440168 - protein, 14 aa, Homo sapiens
  CDR3 for beta chain variable domain of TCR clone 220084 (TRBV7-2, TRBJ2-7)
CASSPKTSFYEQYF

SEQ ID NO: 440169 - protein, 14 aa, Homo sapiens
  CDR3 for alpha chain variable domain of TCR clone 220085 (TRAV8-1, TRAJ5)
CAVRTDTGRRALTF

SEQ ID NO: 440170 - protein, 16 aa, Homo sapiens
  CDR3 for beta chain variable domain of TCR clone 220085 (TRBV28, TRBJ1-4)
CASSPPYRGRSEKLFF

SEQ ID NO: 440171 - protein, 18 aa, Homo sapiens
  CDR3 for alpha chain variable domain of TCR clone 220086 (TRAV26-1, TRAJ22)
CIVRVALISSGSARRLTF

SEQ ID NO: 440172 - protein, 13 aa, Homo sapiens
  CDR3 for beta chain variable domain of TCR clone 220086 (TRBV13, TRBJ2-5)
CASSPEVGETQYF

SEQ ID NO: 440173 - protein, 14 aa, Homo sapiens
  CDR3 for alpha chain variable domain of TCR clone 220087 (TRAV1-2, TRAJ16)
CAVNRFSDGQKLLF

SEQ ID NO: 440174 - protein, 13 aa, Homo sapiens
  CDR3 for beta chain variable domain of TCR clone 220087 (TRBV24-1, TRBJ2-2)
CATSDRSTGELFF

SEQ ID NO: 440175 - protein, 13 aa, Homo sapiens
  CDR3 for alpha chain variable domain of TCR clone 220088 (TRAV8-1, TRAJ47)
CSVGMEYGNKLVF

SEQ ID NO: 440176 - protein, 13 aa, Homo sapiens
  CDR3 for beta chain variable domain of TCR clone 220088 (TRBV20-1, TRBJ2-2)
CSARVANTGELFF

SEQ ID NO: 440177 - protein, 14 aa, Homo sapiens
  CDR3 for alpha chain variable domain of TCR clone 220089 (TRAV21, TRAJ28)
CAVGSGAGSYQLTF

SEQ ID NO: 440178 - protein, 14 aa, Homo sapiens
  CDR3 for beta chain variable domain of TCR clone 220089 (TRBV18, TRBJ1-4)
CASSPGPNGEKLFY

SEQ ID NO: 440179 - protein, 16 aa, Homo sapiens
  CDR3 for alpha chain variable domain of TCR clone 220090 (TRAV3, TRAJ37)
CAVRPHGSGNTGKLIF

SEQ ID NO: 440180 - protein, 14 aa, Homo sapiens
  CDR3 for beta chain variable domain of TCR clone 220090 (TRBV25-1, TRBJ1-1)
CASTPLGGNTEAFF

SEQ ID NO: 440181 - protein, 16 aa, Homo sapiens
  CDR3 for alpha chain variable domain of TCR clone 220091 (TRAV26-1, TRAJ23)
CIVRVERYNQGGELIF

SEQ ID NO: 440182 - protein, 16 aa, Homo sapiens
  CDR3 for beta chain variable domain of TCR clone 220091 (TRBV9, TRBJ1-2)
CASSVDKGGGNYGYTF

SEQ ID NO: 440183 - protein, 16 aa, Homo sapiens
  CDR3 for alpha chain variable domain of TCR clone 220092 (TRAV30, TRAJ24)
CGTEIVDADSWGKFQF

SEQ ID NO: 440184 - protein, 17 aa, Homo sapiens
  CDR3 for beta chain variable domain of TCR clone 220092 (TRBV20-1, TRBJ2-1)
CSASCSGLAGSYNEQFF

SEQ ID NO: 440185 - protein, 16 aa, Homo sapiens
  CDR3 for alpha chain variable domain of TCR clone 220093 (TRAV30, TRAJ24)
CGTEIVDADSWGKFQF

SEQ ID NO: 440186 - protein, 14 aa, Homo sapiens
  CDR3 for beta chain variable domain of TCR clone 220093 (TRBV13, TRBJ2-1)
CASSPRPRYNKQFF

SEQ ID NO: 440187 - protein, 12 aa, Homo sapiens
  CDR3 for alpha chain variable domain of TCR clone 220094 (TRAV21, TRAJ31)
CVLAGNNARLMF

SEQ ID NO: 440188 - protein, 16 aa, Homo sapiens
  CDR3 for beta chain variable domain of TCR clone 220094 (TRBV27, TRBJ2-5)
CASSFGPVGTKETQYF

SEQ ID NO: 440189 - protein, 12 aa, Homo sapiens
  CDR3 for alpha chain variable domain of TCR clone 220095 (TRAV2, TRAJ5)
CALDTGRRALTF

SEQ ID NO: 440190 - protein, 15 aa, Homo sapiens
  CDR3 for beta chain variable domain of TCR clone 220095 (TRBV7-2, TRBJ2-7)
CASSLGGAKSGEQYF

SEQ ID NO: 440191 - protein, 15 aa, Homo sapiens
  CDR3 for alpha chain variable domain of TCR clone 220096 (TRAV17, TRAJ23)
CATDAEDTQGGKLIF

SEQ ID NO: 440192 - protein, 12 aa, Homo sapiens
  CDR3 for beta chain variable domain of TCR clone 220096 (TRBV2, TRBJ2-1)
CAKREGYNEQFF

SEQ ID NO: 440193 - protein, 20 aa, Homo sapiens
  CDR3 for alpha chain variable domain of TCR clone 220097 (TRAV26-1, TRAJ42)
CCVLLRRQTYYGGSQGNLIF

SEQ ID NO: 440194 - protein, 16 aa, Homo sapiens
  CDR3 for beta chain variable domain of TCR clone 220097 (TRBV7-3, TRBJ2-2)
CASSIKRGTLSGELFF

SEQ ID NO: 440195 - protein, 13 aa, Homo sapiens
  CDR3 for alpha chain variable domain of TCR clone 220098 (TRAV20, TRAJ37)
CAGCSSITGKLIF

SEQ ID NO: 440196 - protein, 14 aa, Homo sapiens
  CDR3 for beta chain variable domain of TCR clone 220098 (TRBV20-1, TRBJ2-5)
CSARDGRAGETQYF

SEQ ID NO: 440197 - protein, 19 aa, Homo sapiens
  CDR3 for alpha chain variable domain of TCR clone 220099 (TRAV1-2, TRAJ26)
CLLPLCCERPDNYGQNFVF

SEQ ID NO: 440198 - protein, 13 aa, Homo sapiens
  CDR3 for beta chain variable domain of TCR clone 220099 (TRBV7-7, TRBJ2-2)
CASSLTSAGELFF

SEQ ID NO: 440199 - protein, 13 aa, Homo sapiens
  CDR3 for alpha chain variable domain of TCR clone 220100 (TRAV38-2/DV8, TRAJ34)
CAYRTWNTDKLIF

SEQ ID NO: 440200 - protein, 18 aa, Homo sapiens
  CDR3 for beta chain variable domain of TCR clone 220100 (TRBV6-6, TRBJ1-3)
CASSYSKWDSISGNTIHF

SEQ ID NO: 440201 - protein, 14 aa, Homo sapiens
  CDR3 for alpha chain variable domain of TCR clone 220101 (TRAV12-3, TRAJ47)
CAMSVREYGNKMVF

SEQ ID NO: 440202 - protein, 15 aa, Homo sapiens
  CDR3 for beta chain variable domain of TCR clone 220101 (TRBV20-1, TRBJ2-2)
CSARDTRLNTGELFF

SEQ ID NO: 440203 - protein, 13 aa, Homo sapiens
  CDR3 for alpha chain variable domain of TCR clone 220102 (TRAV2, TRAJ15)
CAVASQAGTALIF

SEQ ID NO: 440204 - protein, 14 aa, Homo sapiens
  CDR3 for beta chain variable domain of TCR clone 220102 (TRBV4-1, TRBJ2-2)
CASSLTENTGELFF

SEQ ID NO: 440205 - protein, 13 aa, Homo sapiens
  CDR3 for alpha chain variable domain of TCR clone 220103 (TRAV2, TRAJ21)
CAVEDLSFNKFYF

SEQ ID NO: 440206 - protein, 15 aa, Homo sapiens
  CDR3 for beta chain variable domain of TCR clone 220103 (TRBV5-1, TRBJ2-1)
CASSLVANSYNEQFF

SEQ ID NO: 440207 - protein, 17 aa, Homo sapiens
  CDR3 for alpha chain variable domain of TCR clone 220104 (TRAV13-1, TRAJ28)
CAASPPYPGAGSYQLTF

SEQ ID NO: 440208 - protein, 12 aa, Homo sapiens
  CDR3 for beta chain variable domain of TCR clone 220104 (TRBV11-2, TRBJ2-2)
CASSLPTGELFF

SEQ ID NO: 440209 - protein, 16 aa, Homo sapiens
  CDR3 for alpha chain variable domain of TCR clone 220105 (TRAV1-1, TRAJ29)
CAVRSTRNSGNTPLVF

SEQ ID NO: 440210 - protein, 16 aa, Homo sapiens
  CDR3 for beta chain variable domain of TCR clone 220105 (TRBV27, TRBJ1-1)
CASSSRGRAGYTEAFF

SEQ ID NO: 440211 - protein, 12 aa, Homo sapiens
  CDR3 for alpha chain variable domain of TCR clone 220106 (TRAV21, TRAJ33)
CAKMDSNYQLIL

SEQ ID NO: 440212 - protein, 17 aa, Homo sapiens
  CDR3 for beta chain variable domain of TCR clone 220106 (TRBV20-1, TRBJ2-2)
CSASGSGQGGLTGELFF

SEQ ID NO: 440213 - protein, 14 aa, Homo sapiens
  CDR3 for alpha chain variable domain of TCR clone 220107 (TRAV2, TRAJ37)
CAVDFTSNTGKLIF

SEQ ID NO: 440214 - protein, 13 aa, Homo sapiens
  CDR3 for beta chain variable domain of TCR clone 220107 (TRBV3-1, TRBJ2-5)
CASSPVLSETQYF

SEQ ID NO: 440215 - protein, 13 aa, Homo sapiens
  CDR3 for alpha chain variable domain of TCR clone 220108 (TRAV21, TRAJ36)
CAVREAGANNLFF

SEQ ID NO: 440216 - protein, 15 aa, Homo sapiens
  CDR3 for beta chain variable domain of TCR clone 220108 (TRBV9, TRBJ2-3)
WASSTGGGEGDTQYF

SEQ ID NO: 440217 - protein, 13 aa, Homo sapiens
  CDR3 for alpha chain variable domain of TCR clone 220109 (TRAV13-1, TRAJ20)
CAARVSNDYKLSF

SEQ ID NO: 440218 - protein, 20 aa, Homo sapiens
  CDR3 for beta chain variable domain of TCR clone 220109 (TRBV11-1, TRBJ1-1)
GHVSLWTNPRDRAFNTEAFF

SEQ ID NO: 440219 - protein, 17 aa, Homo sapiens
  CDR3 for alpha chain variable domain of TCR clone 220110 (TRAV3, TRAJ6)
CAVRDGPRAGGSYITTF

SEQ ID NO: 440220 - protein, 14 aa, Homo sapiens
  CDR3 for beta chain variable domain of TCR clone 220110 (TRBV11-2, TRBJ2-3)
CASSRLARTDTQYF

SEQ ID NO: 440221 - protein, 15 aa, Homo sapiens
  CDR3 for alpha chain variable domain of TCR clone 220111 (TRAV8-2, TRAJ24)
CVVSDRTDSWGKLQF

SEQ ID NO: 440222 - protein, 11 aa, Homo sapiens
  CDR3 for beta chain variable domain of TCR clone 220111 (TRBV20-1, TRBJ1-2)
CSVQGAGGDTF

SEQ ID NO: 440223 - protein, 13 aa, Homo sapiens
  CDR3 for alpha chain variable domain of TCR clone 220112 (TRAV13-1, TRAJ8)
CAASIRGFQKLVF

SEQ ID NO: 440224 - protein, 14 aa, Homo sapiens
  CDR3 for beta chain variable domain of TCR clone 220112 (TRBV7-2, TRBJ2-1)
CASSLVQGRNEQVF

SEQ ID NO: 440225 - protein, 17 aa, Homo sapiens
  CDR3 for alpha chain variable domain of TCR clone 220113 (TRAV13-1, TRAJ52)
CAASSGAGGTSYGKLTF

SEQ ID NO: 440226 - protein, 14 aa, Homo sapiens
  CDR3 for beta chain variable domain of TCR clone 220113 (TRBV5-7, TRBJ2-7)
CASSFKGATGEQYF

SEQ ID NO: 440227 - protein, 15 aa, Homo sapiens
  CDR3 for alpha chain variable domain of TCR clone 220114 (TRAV3, TRAJ32)
CAVRDPGGATNKLIF

SEQ ID NO: 440228 - protein, 12 aa, Homo sapiens
  CDR3 for beta chain variable domain of TCR clone 220114 (TRBV12-5, TRBJ2-5)
CASGQGVETQYF

SEQ ID NO: 440229 - protein, 14 aa, Homo sapiens
  CDR3 for alpha chain variable domain of TCR clone 220115 (TRAV17, TRAJ16)
CATADFSDGQKLLF

SEQ ID NO: 440230 - protein, 14 aa, Homo sapiens
  CDR3 for beta chain variable domain of TCR clone 220115 (TRBV18, TRBJ2-7)
CASSPRGGAYEQYF

SEQ ID NO: 440231 - protein, 14 aa, Homo sapiens
  CDR3 for alpha chain variable domain of TCR clone 220116 (TRAV8-6, TRAJ13)
CAVFSSGGYQKVTF

SEQ ID NO: 440232 - protein, 15 aa, Homo sapiens
  CDR3 for beta chain variable domain of TCR clone 220116 (TRBV6-3, TRBJ2-7)
CASSSPGTVFYEQYF

SEQ ID NO: 440233 - protein, 12 aa, Homo sapiens
  CDR3 for alpha chain variable domain of TCR clone 220117 (TRAV2, TRAJ33)
CAFMDSNYQLIW

SEQ ID NO: 440234 - protein, 16 aa, Homo sapiens
  CDR3 for beta chain variable domain of TCR clone 220117 (TRBV2, TRBJ2-7)
CASSQPWTGPSYEQYF

SEQ ID NO: 440235 - protein, 16 aa, Homo sapiens
  CDR3 for alpha chain variable domain of TCR clone 220118 (TRAV26-1, TRAJ32)
CIVRTNYGDATNKLIF

SEQ ID NO: 440236 - protein, 14 aa, Homo sapiens
  CDR3 for beta chain variable domain of TCR clone 220118 (TRBV27, TRBJ1-1)
CASSLLSGLSEAFF

SEQ ID NO: 440237 - protein, 14 aa, Homo sapiens
  CDR3 for alpha chain variable domain of TCR clone 220119 (TRAV12-2, TRAJ40)
CAVKIPSGTYKYIF

SEQ ID NO: 440238 - protein, 13 aa, Homo sapiens
  CDR3 for beta chain variable domain of TCR clone 220119 (TRBV6-1, TRBJ1-1)
CASSWTVDTEAFF

SEQ ID NO: 440239 - protein, 15 aa, Homo sapiens
  CDR3 for alpha chain variable domain of TCR clone 220120 (TRAV23/DV6, TRAJ38)
CAASGGAGNNPKLIW

SEQ ID NO: 440240 - protein, 13 aa, Homo sapiens
  CDR3 for beta chain variable domain of TCR clone 220120 (TRBV7-2, TRBJ1-2)
CASSLPGLYGYTF

SEQ ID NO: 440241 - protein, 12 aa, Homo sapiens
  CDR3 for alpha chain variable domain of TCR clone 220121 (TRAV21, TRAJ12)
CAVMDSSYKLIF

SEQ ID NO: 440242 - protein, 16 aa, Homo sapiens
  CDR3 for beta chain variable domain of TCR clone 220121 (TRBV7-9, TRBJ2-5)
CANRLEIGTRKETQYF

SEQ ID NO: 440243 - protein, 12 aa, Homo sapiens
  CDR3 for alpha chain variable domain of TCR clone 220122 (TRAV36/DV7, TRAJ54)
CAVVRGAQKLGF

SEQ ID NO: 440244 - protein, 14 aa, Homo sapiens
  CDR3 for beta chain variable domain of TCR clone 220122 (TRBV7-3, TRBJ1-1)
CASRLKGGNTEAFF

SEQ ID NO: 440245 - protein, 13 aa, Homo sapiens
  CDR3 for alpha chain variable domain of TCR clone 220123 (TRAV23/DV6, TRAJ10)
ASVLTGGGNKLTF

SEQ ID NO: 440246 - protein, 13 aa, Homo sapiens
  CDR3 for beta chain variable domain of TCR clone 220123 (TRBV11-1, TRBJ2-7)
CASVGSWGYGYTF

SEQ ID NO: 440247 - protein, 16 aa, Homo sapiens
  CDR3 for alpha chain variable domain of TCR clone 220124 (TRAV2, TRAJ4)
CAVEDRFSGVYDKLIF

SEQ ID NO: 440248 - protein, 13 aa, Homo sapiens
  CDR3 for beta chain variable domain of TCR clone 220124 (TRBV7-7, TRBJ2-5)
CASSRSGQETQYF

SEQ ID NO: 440249 - protein, 12 aa, Homo sapiens
  CDR3 for alpha chain variable domain of TCR clone 220125 (TRAV26-1, TRAJ43)
CIVRPRGDDMRF

SEQ ID NO: 440250 - protein, 14 aa, Homo sapiens
  CDR3 for beta chain variable domain of TCR clone 220125 (TRBV15, TRBJ2-5)
CATSGDRGQETQYF

SEQ ID NO: 440251 - protein, 14 aa, Homo sapiens
  CDR3 for alpha chain variable domain of TCR clone 220126 (TRAV12-1, TRAJ17)
CVVNYKAAGNKLTF

SEQ ID NO: 440252 - protein, 17 aa, Homo sapiens
  CDR3 for beta chain variable domain of TCR clone 220126 (TRBV11-2, TRBJ2-1)
WASSLYPPGVEYNEQFF

SEQ ID NO: 440253 - protein, 15 aa, Homo sapiens
  CDR3 for alpha chain variable domain of TCR clone 220127 (TRAV2, TRAJ9)
CAVEDRGTVGFKTIF

SEQ ID NO: 440254 - protein, 16 aa, Homo sapiens
  CDR3 for beta chain variable domain of TCR clone 220127 (TRBV19, TRBJ2-2)
CASRSPGTGATGELLF

SEQ ID NO: 440255 - protein, 15 aa, Homo sapiens
  CDR3 for alpha chain variable domain of TCR clone 220128 (TRAV3, TRAJ45)
CAVRTPWGGADGLTF

SEQ ID NO: 440256 - protein, 15 aa, Homo sapiens
  CDR3 for beta chain variable domain of TCR clone 220128 (TRBV7-2, TRBJ2-2)
CASRRPGQDTGELFF

SEQ ID NO: 440257 - protein, 18 aa, Homo sapiens
  CDR3 for alpha chain variable domain of TCR clone 220129 (TRAV12-3, TRAJ52)
CAMSVGGAGGTSYGKLTF

SEQ ID NO: 440258 - protein, 11 aa, Homo sapiens
  CDR3 for beta chain variable domain of TCR clone 220129 (TRBV10-3, TRBJ2-7)
CAISEGLEQYF

SEQ ID NO: 440259 - protein, 15 aa, Homo sapiens
  CDR3 for alpha chain variable domain of TCR clone 220130 (TRAV14/DV4, TRAJ46)
CAMREKKSSGDKLTF

SEQ ID NO: 440260 - protein, 13 aa, Homo sapiens
  CDR3 for beta chain variable domain of TCR clone 220130 (TRBV20-1, TRBJ2-5)
CSAREAFQETLYF

SEQ ID NO: 440261 - protein, 14 aa, Homo sapiens
  CDR3 for alpha chain variable domain of TCR clone 220131 (TRAV26-1, TRAJ38)
CIADNAGNNRNLIW

SEQ ID NO: 440262 - protein, 15 aa, Homo sapiens
  CDR3 for beta chain variable domain of TCR clone 220131 (TRBV20-1, TRBJ2-7)
CSARDRVSGMDEKYF

SEQ ID NO: 440263 - protein, 13 aa, Homo sapiens
  CDR3 for alpha chain variable domain of TCR clone 220132 (TRAV13-1, TRAJ39)
CSKYSNAGNMLTF

SEQ ID NO: 440264 - protein, 14 aa, Homo sapiens
  CDR3 for beta chain variable domain of TCR clone 220132 (TRBV13, TRBJ2-7)
CASSGLAGLYEQYF

SEQ ID NO: 440265 - protein, 14 aa, Homo sapiens
  CDR3 for alpha chain variable domain of TCR clone 220133 (TRAV36/DV7, TRAJ33)
CAGLPRDSNYQLIW

SEQ ID NO: 440266 - protein, 17 aa, Homo sapiens
  CDR3 for beta chain variable domain of TCR clone 220133 (TRBV23-1, TRBJ2-5)
CASSPTLNVIGVETQYF

SEQ ID NO: 440267 - protein, 14 aa, Homo sapiens
  CDR3 for alpha chain variable domain of TCR clone 220134 (TRAV1-2, TRAJ8)
CAVREDTGFQKLVF

SEQ ID NO: 440268 - protein, 15 aa, Homo sapiens
  CDR3 for beta chain variable domain of TCR clone 220134 (TRBV20-1, TRBJ1-5)
CSAKPPGQGPQPQHF

SEQ ID NO: 440269 - protein, 13 aa, Homo sapiens
  CDR3 for alpha chain variable domain of TCR clone 220135 (TRAV17, TRAJ39)
CATEDNADNMLTF

SEQ ID NO: 440270 - protein, 14 aa, Homo sapiens
  CDR3 for beta chain variable domain of TCR clone 220135 (TRBV19, TRBJ1-2)
CASSPTGGAGGYTF

SEQ ID NO: 440271 - protein, 14 aa, Homo sapiens
  CDR3 for alpha chain variable domain of TCR clone 220136 (TRAV13-2, TRAJ17)
CAENSKAAGNKLTF

SEQ ID NO: 440272 - protein, 16 aa, Homo sapiens
  CDR3 for beta chain variable domain of TCR clone 220136 (TRBV18, TRBJ1-5)
CASSPQGERGGQPQHF

SEQ ID NO: 440273 - protein, 12 aa, Homo sapiens
  CDR3 for alpha chain variable domain of TCR clone 220137 (TRAV17, TRAJ39)
CATGAAGNMLTF

SEQ ID NO: 440274 - protein, 12 aa, Homo sapiens
  CDR3 for beta chain variable domain of TCR clone 220137 (TRBV7-8, TRBJ2-7)
CASEGGPHGQHF

SEQ ID NO: 440275 - protein, 10 aa, Homo sapiens
  CDR3 for alpha chain variable domain of TCR clone 220138 (TRAV12-3, TRAJ49)
CAMNDDQFYF

SEQ ID NO: 440276 - protein, 13 aa, Homo sapiens
  CDR3 for beta chain variable domain of TCR clone 220138 (TRBV7-9, TRBJ2-7)
CASSFAGAYEQYF

SEQ ID NO: 440277 - protein, 13 aa, Homo sapiens
  CDR3 for alpha chain variable domain of TCR clone 220139 (TRAV2, TRAJ40)
CAVVTSGTYKYIF

SEQ ID NO: 440278 - protein, 12 aa, Homo sapiens
  CDR3 for beta chain variable domain of TCR clone 220139 (TRBV14, TRBJ1-1)
CASSQLKGLAFF

SEQ ID NO: 440279 - protein, 18 aa, Homo sapiens
  CDR3 for alpha chain variable domain of TCR clone 220140 (TRAV13-1, TRAJ52)
CAAKNPNAGGTSYGKLTF

SEQ ID NO: 440280 - protein, 11 aa, Homo sapiens
  CDR3 for beta chain variable domain of TCR clone 220140 (TRBV20-1, TRBJ2-7)
CSARLSYEQYF

SEQ ID NO: 440281 - protein, 14 aa, Homo sapiens
  CDR3 for alpha chain variable domain of TCR clone 220141 (TRAV12-3, TRAJ10)
SHLPLTGGGNKLTF

SEQ ID NO: 440282 - protein, 14 aa, Homo sapiens
  CDR3 for beta chain variable domain of TCR clone 220141 (TRBV7-7, TRBJ2-2)
CASSPQLATGELFF

SEQ ID NO: 440283 - protein, 16 aa, Homo sapiens
  CDR3 for alpha chain variable domain of TCR clone 220142 (TRAV4, TRAJ22)
CLVGDLYSGSARQLTF

SEQ ID NO: 440284 - protein, 16 aa, Homo sapiens
  CDR3 for beta chain variable domain of TCR clone 220142 (TRBV7-9, TRBJ2-7)
CASSDVAGGSYNEQYF

SEQ ID NO: 440285 - protein, 13 aa, Homo sapiens
  CDR3 for alpha chain variable domain of TCR clone 220143 (TRAV22, TRAJ29)
CAVGVSGNTPLVF

SEQ ID NO: 440286 - protein, 16 aa, Homo sapiens
  CDR3 for beta chain variable domain of TCR clone 220143 (TRBV10-3, TRBJ2-1)
CAIRGGGRGDYNEQFF

SEQ ID NO: 440287 - protein, 14 aa, Homo sapiens
  CDR3 for alpha chain variable domain of TCR clone 220144 (TRAV26-1, TRAJ39)
CIVFTNNAGNMLTF

SEQ ID NO: 440288 - protein, 15 aa, Homo sapiens
  CDR3 for beta chain variable domain of TCR clone 220144 (TRBV19, TRBJ2-4)
CASSLPGLTKNIQYF

SEQ ID NO: 440289 - protein, 13 aa, Homo sapiens
  CDR3 for alpha chain variable domain of TCR clone 220145 (TRAV8-4, TRAJ9)
CCGINTGGFKTIF

SEQ ID NO: 440290 - protein, 15 aa, Homo sapiens
  CDR3 for beta chain variable domain of TCR clone 220145 (TRBV10-2, TRBJ2-6)
CASSEQGTGANVLTF

SEQ ID NO: 440291 - protein, 11 aa, Homo sapiens
  CDR3 for alpha chain variable domain of TCR clone 220146 (TRAV1-1, TRAJ23)
CAVRQGGKLIF

SEQ ID NO: 440292 - protein, 14 aa, Homo sapiens
  CDR3 for beta chain variable domain of TCR clone 220146 (TRBV13, TRBJ2-5)
CASYRRLVEETQYF

SEQ ID NO: 440293 - protein, 14 aa, Homo sapiens
  CDR3 for alpha chain variable domain of TCR clone 220147 (TRAV3, TRAJ33)
CAVRDMDSNYQLIW

SEQ ID NO: 440294 - protein, 13 aa, Homo sapiens
  CDR3 for beta chain variable domain of TCR clone 220147 (TRBV2, TRBJ2-5)
CASSGQGVQTQYF

SEQ ID NO: 440295 - protein, 13 aa, Homo sapiens
  CDR3 for alpha chain variable domain of TCR clone 220148 (TRAV8-3, TRAJ28)
SAVGAVGSYQLTF

SEQ ID NO: 440296 - protein, 15 aa, Homo sapiens
  CDR3 for beta chain variable domain of TCR clone 220148 (TRBV7-9, TRBJ1-5)
CASSQGHQPNQPQHF

SEQ ID NO: 440297 - protein, 17 aa, Homo sapiens
  CDR3 for alpha chain variable domain of TCR clone 220149 (TRAV21, TRAJ52)
CAVGVNAGGTSYGKLTF

SEQ ID NO: 440298 - protein, 13 aa, Homo sapiens
  CDR3 for beta chain variable domain of TCR clone 220149 (TRBV5-1, TRBJ1-2)
CASSLKQNYGYTF

SEQ ID NO: 440299 - protein, 15 aa, Homo sapiens
  CDR3 for alpha chain variable domain of TCR clone 220150 (TRAV25, TRAJ53)
CPTSNSGGSNYKLTF

SEQ ID NO: 440300 - protein, 14 aa, Homo sapiens
  CDR3 for beta chain variable domain of TCR clone 220150 (TRBV11-2, TRBJ2-3)
CASSRLARTDTQCF

SEQ ID NO: 440301 - protein, 17 aa, Homo sapiens
  CDR3 for alpha chain variable domain of TCR clone 220151 (TRAV3, TRAJ6)
CAVRDGPRAGGSYIPTF

SEQ ID NO: 440302 - protein, 14 aa, Homo sapiens
  CDR3 for beta chain variable domain of TCR clone 220151 (TRBV7-2, TRBJ2-7)
CASSPKTSFYEQYF

SEQ ID NO: 440303 - protein, 16 aa, Homo sapiens
  CDR3 for alpha chain variable domain of TCR clone 220152 (TRAV12-1, TRAJ43)
CVVNPHRFGAGTRLTL

SEQ ID NO: 440304 - protein, 16 aa, Homo sapiens
  CDR3 for beta chain variable domain of TCR clone 220152 (TRBV27, TRBJ2-2)
CASSSTGGGDTGELFF

SEQ ID NO: 440305 - protein, 11 aa, Homo sapiens
  CDR3 for alpha chain variable domain of TCR clone 220153 (TRAV17, TRAJ9)
CATTGGFKTIF

SEQ ID NO: 440306 - protein, 13 aa, Homo sapiens
  CDR3 for beta chain variable domain of TCR clone 220153 (TRBV7-9, TRBJ2-7)
CASSFAGAYEQYF

SEQ ID NO: 440307 - protein, 21 aa, Homo sapiens
  CDR3 for alpha chain variable domain of TCR clone 220154 (TRAV3, TRAJ17)
CAVRARRGGRSGRQQANFCRR

SEQ ID NO: 440308 - protein, 14 aa, Homo sapiens
  CDR3 for beta chain variable domain of TCR clone 220154 (TRBV4-1, TRBJ2-2)
CASSQAVNTGELFF

SEQ ID NO: 440309 - protein, 15 aa, Homo sapiens
  CDR3 for alpha chain variable domain of TCR clone 220155 (TRAV26-2, TRAJ28)
CILVESGAGSSQLTF

SEQ ID NO: 440310 - protein, 16 aa, Homo sapiens
  CDR3 for beta chain variable domain of TCR clone 220155 (TRBV4-2, TRBJ1-2)
CASSQEIGGASYGYTF

SEQ ID NO: 440311 - protein, 13 aa, Homo sapiens
  CDR3 for alpha chain variable domain of TCR clone 220156 (TRAV12-1, TRAJ43)
CVVIHHNNNDMRF

SEQ ID NO: 440312 - protein, 13 aa, Homo sapiens
  CDR3 for beta chain variable domain of TCR clone 220156 (TRBV19, TRBJ2-7)
CDSSPRQSYEQYF

SEQ ID NO: 440313 - protein, 12 aa, Homo sapiens
  CDR3 for alpha chain variable domain of TCR clone 220157 (TRAV8-3, TRAJ20)
CAVGGGDYKLSF

SEQ ID NO: 440314 - protein, 12 aa, Homo sapiens
  CDR3 for beta chain variable domain of TCR clone 220157 (TRBV3-1, TRBJ2-7)
CASNQVRYEQYF

SEQ ID NO: 440315 - protein, 13 aa, Homo sapiens
  CDR3 for alpha chain variable domain of TCR clone 220158 (TRAV3, TRAJ27)
CAVRPLGAGKSTF

SEQ ID NO: 440316 - protein, 13 aa, Homo sapiens
  CDR3 for beta chain variable domain of TCR clone 220158 (TRBV24-1, TRBJ2-2)
CATSDWSTGELFF

SEQ ID NO: 440317 - protein, 14 aa, Homo sapiens
  CDR3 for alpha chain variable domain of TCR clone 220159 (TRAV12-2, TRAJ40)
CAVKIPSGTYKYIF

SEQ ID NO: 440318 - protein, 14 aa, Homo sapiens
  CDR3 for beta chain variable domain of TCR clone 220159 (TRBV20-1, TRBJ1-1)
CSAQTRSGGSEAFF

SEQ ID NO: 440319 - protein, 14 aa, Homo sapiens
  CDR3 for alpha chain variable domain of TCR clone 220160 (TRAV17, TRAJ15)
CATAPNQAGTALIF

SEQ ID NO: 440320 - protein, 15 aa, Homo sapiens
  CDR3 for beta chain variable domain of TCR clone 220160 (TRBV11-3, TRBJ2-3)
CASLKDGREGDTQYF

SEQ ID NO: 440321 - protein, 14 aa, Homo sapiens
  CDR3 for alpha chain variable domain of TCR clone 220161 (TRAV17, TRAJ22)
CATTPSGSARQLTF

SEQ ID NO: 440322 - protein, 15 aa, Homo sapiens
  CDR3 for beta chain variable domain of TCR clone 220161 (TRBV4-1, TRBJ2-5)
CASSQWDLYQESQYF

SEQ ID NO: 440323 - protein, 12 aa, Homo sapiens
  CDR3 for alpha chain variable domain of TCR clone 220162 (TRAV12-2, TRAJ21)
CAVRYNFNKFYF

SEQ ID NO: 440324 - protein, 12 aa, Homo sapiens
  CDR3 for beta chain variable domain of TCR clone 220162 (TRBV7-9, TRBJ2-7)
CASSLEGYELYF

SEQ ID NO: 440325 - protein, 13 aa, Homo sapiens
  CDR3 for alpha chain variable domain of TCR clone 220163 (TRAV17, TRAJ21)
CATHGNNFNKFYF

SEQ ID NO: 440326 - protein, 12 aa, Homo sapiens
  CDR3 for beta chain variable domain of TCR clone 220163 (TRBV20-1, TRBJ1-1)
CSARGGNTEAFF

SEQ ID NO: 440327 - protein, 14 aa, Homo sapiens
  CDR3 for alpha chain variable domain of TCR clone 220164 (TRAV9-2, TRAJ39)
CALYIYNAGNMLPF

SEQ ID NO: 440328 - protein, 15 aa, Homo sapiens
  CDR3 for beta chain variable domain of TCR clone 220164 (TRBV28, TRBJ1-3)
CASSMGWASGNTIYF

SEQ ID NO: 440329 - protein, 16 aa, Homo sapiens
  CDR3 for alpha chain variable domain of TCR clone 220165 (TRAV12-2, TRAJ18)
CAVTTDRGSTLGRLYF

SEQ ID NO: 440330 - protein, 13 aa, Homo sapiens
  CDR3 for beta chain variable domain of TCR clone 220165 (TRBV7-2, TRBJ2-7)
CASSSPSGSEQYF

SEQ ID NO: 440331 - protein, 14 aa, Homo sapiens
  CDR3 for alpha chain variable domain of TCR clone 220166 (TRAV8-6, TRAJ3)
CAVTWGSSASKIIF

SEQ ID NO: 440332 - protein, 15 aa, Homo sapiens
  CDR3 for beta chain variable domain of TCR clone 220166 (TRBV27, TRBJ2-1)
CASSNGGGSSNEQFF

SEQ ID NO: 440333 - protein, 14 aa, Homo sapiens
  CDR3 for alpha chain variable domain of TCR clone 220167 (TRAV35, TRAJ29)
CAGQLTSGNTPLVF

SEQ ID NO: 440334 - protein, 13 aa, Homo sapiens
  CDR3 for beta chain variable domain of TCR clone 220167 (TRBV11-2, TRBJ2-5)
CASGHGAKETQYF

SEQ ID NO: 440335 - protein, 14 aa, Homo sapiens
  CDR3 for alpha chain variable domain of TCR clone 220168 (TRAV26-1, TRAJ38)
CIADNAGNNRKLIW

SEQ ID NO: 440336 - protein, 15 aa, Homo sapiens
  CDR3 for beta chain variable domain of TCR clone 220168 (TRBV7-2, TRBJ2-1)
CASSLVAGRYDEQFF

SEQ ID NO: 440337 - protein, 14 aa, Homo sapiens
  CDR3 for alpha chain variable domain of TCR clone 220169 (TRAV12-3, TRAJ10)
SHLPLTGGGNKLTF

SEQ ID NO: 440338 - protein, 11 aa, Homo sapiens
  CDR3 for beta chain variable domain of TCR clone 220169 (TRBV19, TRBJ1-1)
CASSIVSEAFF

SEQ ID NO: 440339 - protein, 13 aa, Homo sapiens
  CDR3 for alpha chain variable domain of TCR clone 220170 (TRAV12-3, TRAJ33)
CAMSVNSNYQLIW

SEQ ID NO: 440340 - protein, 13 aa, Homo sapiens
  CDR3 for beta chain variable domain of TCR clone 220170 (TRBV4-1, TRBJ2-2)
CASSQANTGELFF

SEQ ID NO: 440341 - protein, 16 aa, Homo sapiens
  CDR3 for alpha chain variable domain of TCR clone 220171 (TRAV13-1, TRAJ18)
CAASRMRGSTLGRLYF

SEQ ID NO: 440342 - protein, 15 aa, Homo sapiens
  CDR3 for beta chain variable domain of TCR clone 220171 (TRBV7-9, TRBJ1-6)
CASSSPGRGNSPLHF

SEQ ID NO: 440343 - protein, 15 aa, Homo sapiens
  CDR3 for alpha chain variable domain of TCR clone 220172 (TRAV12-3, TRAJ52)
CNGGAGGTSYGKLTF

SEQ ID NO: 440344 - protein, 13 aa, Homo sapiens
  CDR3 for beta chain variable domain of TCR clone 220172 (TRBV20-1, TRBJ1-1)
CSAPPGGHTEAFF

SEQ ID NO: 440345 - protein, 11 aa, Homo sapiens
  CDR3 for alpha chain variable domain of TCR clone 220173 (TRAV2, TRAJ33)
CAVESNYQLIW

SEQ ID NO: 440346 - protein, 15 aa, Homo sapiens
  CDR3 for beta chain variable domain of TCR clone 220173 (TRBV28, TRBJ2-3)
CASSPPTGSTDTQYF

SEQ ID NO: 440347 - protein, 12 aa, Homo sapiens
  CDR3 for alpha chain variable domain of TCR clone 220174 (TRAV36/DV7, TRAJ54)
CSVVRGAQNLVF

SEQ ID NO: 440348 - protein, 14 aa, Homo sapiens
  CDR3 for beta chain variable domain of TCR clone 220174 (TRBV7-3, TRBJ1-1)
CASSLKGGNTEAFF

SEQ ID NO: 440349 - protein, 12 aa, Homo sapiens
  CDR3 for alpha chain variable domain of TCR clone 220175 (TRAV29/DV5, TRAJ49)
CAATDTGNQFYF

SEQ ID NO: 440350 - protein, 16 aa, Homo sapiens
  CDR3 for beta chain variable domain of TCR clone 220175 (TRBV7-3, TRBJ2-2)
CASSLKRGTLSGELFF

SEQ ID NO: 440351 - protein, 15 aa, Homo sapiens
  CDR3 for alpha chain variable domain of TCR clone 220176 (TRAV26-1, TRAJ29)
CIVRVEGSGDTPLVF

SEQ ID NO: 440352 - protein, 13 aa, Homo sapiens
  CDR3 for beta chain variable domain of TCR clone 220176 (TRBV18, TRBJ2-5)
CQLTWVSQETQYF

SEQ ID NO: 440353 - protein, 12 aa, Homo sapiens
  CDR3 for alpha chain variable domain of TCR clone 220177 (TRAV12-3, TRAJ21)
CAMFNNFNKFYL

SEQ ID NO: 440354 - protein, 16 aa, Homo sapiens
  CDR3 for beta chain variable domain of TCR clone 220177 (TRBV7-9, TRBJ1-2)
CASSLAPLRAAYGYTF

SEQ ID NO: 440355 - protein, 14 aa, Homo sapiens
  CDR3 for alpha chain variable domain of TCR clone 220178 (TRAV26-1, TRAJ34)
CIVRVVYNTDKLIF

SEQ ID NO: 440356 - protein, 15 aa, Homo sapiens
  CDR3 for beta chain variable domain of TCR clone 220178 (TRBV7-2, TRBJ2-1)
CASSSGLAGGNEQFF

SEQ ID NO: 440357 - protein, 13 aa, Homo sapiens
  CDR3 for alpha chain variable domain of TCR clone 220179 (TRAV12-2, TRAJ20)
CDVYPSNDYKLSF

SEQ ID NO: 440358 - protein, 15 aa, Homo sapiens
  CDR3 for beta chain variable domain of TCR clone 220179 (TRBV27, TRBJ2-5)
CASSLYPRGGDTQYF

SEQ ID NO: 440359 - protein, 17 aa, Homo sapiens
  CDR3 for alpha chain variable domain of TCR clone 220180 (TRAV26-2, TRAJ42)
CILRDVGYGGSKGNPIF

SEQ ID NO: 440360 - protein, 16 aa, Homo sapiens
  CDR3 for beta chain variable domain of TCR clone 220180 (TRBV12-4, TRBJ2-7)
CASSLIGGTGTYEQYF

SEQ ID NO: 440361 - protein, 13 aa, Homo sapiens
  CDR3 for alpha chain variable domain of TCR clone 220181 (TRAV3, TRAJ21)
CAVREPDFNKFYF

SEQ ID NO: 440362 - protein, 14 aa, Homo sapiens
  CDR3 for beta chain variable domain of TCR clone 220181 (TRBV4-1, TRBJ2-2)
RASSQAVNTGEPFF

SEQ ID NO: 440363 - protein, 10 aa, Homo sapiens
  CDR3 for alpha chain variable domain of TCR clone 220182 (TRAV30, TRAJ48)
CGIGNEKLTF

SEQ ID NO: 440364 - protein, 14 aa, Homo sapiens
  CDR3 for beta chain variable domain of TCR clone 220182 (TRBV7-6, TRBJ2-3)
CASSVAGGTDTQYL

SEQ ID NO: 440365 - protein, 12 aa, Homo sapiens
  CDR3 for alpha chain variable domain of TCR clone 220183 (TRAV35, TRAJ39)
LAPNNAGNMLTF

SEQ ID NO: 440366 - protein, 16 aa, Homo sapiens
  CDR3 for beta chain variable domain of TCR clone 220183 (TRBV4-1, TRBJ2-3)
CASSQSTGGAEDTQYF

SEQ ID NO: 440367 - protein, 14 aa, Homo sapiens
  CDR3 for alpha chain variable domain of TCR clone 220184 (TRAV30, TRAJ33)
CGTERRFSNYQLIW

SEQ ID NO: 440368 - protein, 16 aa, Homo sapiens
  CDR3 for beta chain variable domain of TCR clone 220184 (TRBV7-3, TRBJ2-2)
CASSLRRGTLSGELFF

SEQ ID NO: 440369 - protein, 13 aa, Homo sapiens
  CDR3 for alpha chain variable domain of TCR clone 220185 (TRAV20, TRAJ48)
CAVQGVGNEKLNF

SEQ ID NO: 440370 - protein, 14 aa, Homo sapiens
  CDR3 for beta chain variable domain of TCR clone 220185 (TRBV2, TRBJ2-2)
CASSQPGLAGGEHR

SEQ ID NO: 440371 - protein, 13 aa, Homo sapiens
  CDR3 for alpha chain variable domain of TCR clone 220186 (TRAV17, TRAJ5)
CAPMDTGRRALTF

SEQ ID NO: 440372 - protein, 14 aa, Homo sapiens
  CDR3 for beta chain variable domain of TCR clone 220186 (TRBV7-3, TRBJ2-1)
CASSLAGGTNEQLF

SEQ ID NO: 440373 - protein, 15 aa, Homo sapiens
  CDR3 for alpha chain variable domain of TCR clone 220187 (TRAV17, TRAJ37)
CATDHGSSDTGKPIF

SEQ ID NO: 440374 - protein, 14 aa, Homo sapiens
  CDR3 for beta chain variable domain of TCR clone 220187 (TRBV7-2, TRBJ2-3)
CASSRTSGADTQYF

SEQ ID NO: 440375 - protein, 12 aa, Homo sapiens
  CDR3 for alpha chain variable domain of TCR clone 220188 (TRAV1-1, TRAJ15)
CAFGQAGTALIF

SEQ ID NO: 440376 - protein, 16 aa, Homo sapiens
  CDR3 for beta chain variable domain of TCR clone 220188 (TRBV12-4, TRBJ2-7)
CASSPEGQGSSYEQYF

SEQ ID NO: 440377 - protein, 15 aa, Homo sapiens
  CDR3 for alpha chain variable domain of TCR clone 220189 (TRAV13-2, TRAJ40)
CAENRSRQGTYKYIF

SEQ ID NO: 440378 - protein, 15 aa, Homo sapiens
  CDR3 for beta chain variable domain of TCR clone 220189 (TRBV19, TRBJ2-1)
CASSMGSNSNNEQFF

SEQ ID NO: 440379 - protein, 11 aa, Homo sapiens
  CDR3 for alpha chain variable domain of TCR clone 220190 (TRAV1-2, TRAJ40)
CAVPGTYKYIF

SEQ ID NO: 440380 - protein, 16 aa, Homo sapiens
  CDR3 for beta chain variable domain of TCR clone 220190 (TRBV29-1, TRBJ2-7)
CSVEGVGTSGSYEQYC

SEQ ID NO: 440381 - protein, 18 aa, Homo sapiens
  CDR3 for alpha chain variable domain of TCR clone 220191 (TRAV12-3, TRAJ52)
CAMSRTNAGGTSYGKLTF

SEQ ID NO: 440382 - protein, 13 aa, Homo sapiens
  CDR3 for beta chain variable domain of TCR clone 220191 (TRBV20-1, TRBJ1-6)
CSTFREGNSPLHF

SEQ ID NO: 440383 - protein, 17 aa, Homo sapiens
  CDR3 for alpha chain variable domain of TCR clone 220192 (TRAV23/DV6, TRAJ57)
CAASSTLSQGGSENMVF

SEQ ID NO: 440384 - protein, 14 aa, Homo sapiens
  CDR3 for beta chain variable domain of TCR clone 220192 (TRBV25-1, TRBJ1-1)
CASTHLGGNTEAFF

SEQ ID NO: 440385 - protein, 14 aa, Homo sapiens
  CDR3 for alpha chain variable domain of TCR clone 220193 (TRAV1-2, TRAJ16)
CAVTRFSDGQKLLF

SEQ ID NO: 440386 - protein, 13 aa, Homo sapiens
  CDR3 for beta chain variable domain of TCR clone 220193 (TRBV7-3, TRBJ1-1)
CASSQDWGAEAFF

SEQ ID NO: 440387 - protein, 14 aa, Homo sapiens
  CDR3 for alpha chain variable domain of TCR clone 220194 (TRAV13-2, TRAJ43)
CAEIPTYNNNDMRF

SEQ ID NO: 440388 - protein, 13 aa, Homo sapiens
  CDR3 for beta chain variable domain of TCR clone 220194 (TRBV12-5, TRBJ2-3)
CANGDRQSDTQYF

SEQ ID NO: 440389 - protein, 14 aa, Homo sapiens
  CDR3 for alpha chain variable domain of TCR clone 220195 (TRAV1-2, TRAJ16)
CAVNRFSDGQKLLF

SEQ ID NO: 440390 - protein, 13 aa, Homo sapiens
  CDR3 for beta chain variable domain of TCR clone 220195 (TRBV12-4, TRBJ2-5)
CASSFGGSRTQYF

SEQ ID NO: 440391 - protein, 14 aa, Homo sapiens
  CDR3 for alpha chain variable domain of TCR clone 220196 (TRAV1-2, TRAJ15)
CAVRDRQAGTALIF

SEQ ID NO: 440392 - protein, 16 aa, Homo sapiens
  CDR3 for beta chain variable domain of TCR clone 220196 (TRBV7-9, TRBJ1-2)
CASSLGFSSGEDGYTF

SEQ ID NO: 440393 - protein, 12 aa, Homo sapiens
  CDR3 for alpha chain variable domain of TCR clone 220197 (TRAV12-2, TRAJ52)
IGGGTSYGKLTF

SEQ ID NO: 440394 - protein, 13 aa, Homo sapiens
  CDR3 for beta chain variable domain of TCR clone 220197 (TRBV12-4, TRBJ1-1)
CASSPGTGFGASF

SEQ ID NO: 440395 - protein, 13 aa, Homo sapiens
  CDR3 for alpha chain variable domain of TCR clone 220198 (TRAV12-2, TRAJ39)
CAVNNNAGNMLTF

SEQ ID NO: 440396 - protein, 18 aa, Homo sapiens
  CDR3 for beta chain variable domain of TCR clone 220198 (TRBV12-4, TRBJ1-2)
CASSPNPGQAGPYYGCTF

SEQ ID NO: 440397 - protein, 14 aa, Homo sapiens
  CDR3 for alpha chain variable domain of TCR clone 220199 (TRAV1-2, TRAJ16)
CAVNRFSDGQKRLF

SEQ ID NO: 440398 - protein, 13 aa, Homo sapiens
  CDR3 for beta chain variable domain of TCR clone 220199 (TRBV4-1, TRBJ1-1)
CASSRKMNTEAFF

SEQ ID NO: 440399 - protein, 13 aa, Homo sapiens
  CDR3 for alpha chain variable domain of TCR clone 220200 (TRAV1-2, TRAJ12)
CAVSMDSSYKLIF

SEQ ID NO: 440400 - protein, 15 aa, Homo sapiens
  CDR3 for beta chain variable domain of TCR clone 220200 (TRBV5-1, TRBJ2-1)
CASSPPRAPYNEQFF

SEQ ID NO: 440401 - protein, 19 aa, Homo sapiens
  CDR3 for alpha chain variable domain of TCR clone 220201 (TRAV38-1, TRAJ53)
CAFMKHGLESGGSNYKLTF

SEQ ID NO: 440402 - protein, 14 aa, Homo sapiens
  CDR3 for beta chain variable domain of TCR clone 220201 (TRBV25-1, TRBJ1-1)
CASTHLGGNTEAFF

SEQ ID NO: 440403 - protein, 13 aa, Homo sapiens
  CDR3 for alpha chain variable domain of TCR clone 220202 (TRAV16, TRAJ28)
CALTGAGSYQLTF

SEQ ID NO: 440404 - protein, 16 aa, Homo sapiens
  CDR3 for beta chain variable domain of TCR clone 220202 (TRBV15, TRBJ2-1)
CATSRDGGIPSYEQYF

SEQ ID NO: 440405 - protein, 18 aa, Homo sapiens
  CDR3 for alpha chain variable domain of TCR clone 220203 (TRAV13-1, TRAJ52)
CAAKNPNAGGTSYGKLTF

SEQ ID NO: 440406 - protein, 13 aa, Homo sapiens
  CDR3 for beta chain variable domain of TCR clone 220203 (TRBV11-2, TRBJ2-2)
CASGRDREEELFF

SEQ ID NO: 440407 - protein, 13 aa, Homo sapiens
  CDR3 for alpha chain variable domain of TCR clone 220204 (TRAV27, TRAJ11)
CAGARSGYSTLTF

SEQ ID NO: 440408 - protein, 14 aa, Homo sapiens
  CDR3 for beta chain variable domain of TCR clone 220204 (TRBV20-1, TRBJ1-1)
CSAQTRIGGTEAFF

SEQ ID NO: 440409 - protein, 14 aa, Homo sapiens
  CDR3 for alpha chain variable domain of TCR clone 220205 (TRAV35, TRAJ22)
CAGLRPGSARQLTF

SEQ ID NO: 440410 - protein, 15 aa, Homo sapiens
  CDR3 for beta chain variable domain of TCR clone 220205 (TRBV5-1, TRBJ2-7)
CASSLMTSGSNEQYF

SEQ ID NO: 440411 - protein, 13 aa, Homo sapiens
  CDR3 for alpha chain variable domain of TCR clone 220206 (TRAV8-2, TRAJ43)
CVVSDQGDNDMRF

SEQ ID NO: 440412 - protein, 15 aa, Homo sapiens
  CDR3 for beta chain variable domain of TCR clone 220206 (TRBV7-2, TRBJ2-7)
CASSLKGALTYEQYF

SEQ ID NO: 440413 - protein, 14 aa, Homo sapiens
  CDR3 for alpha chain variable domain of TCR clone 220207 (TRAV8-3, TRAJ39)
CAVGANNAGNMLTF

SEQ ID NO: 440414 - protein, 15 aa, Homo sapiens
  CDR3 for beta chain variable domain of TCR clone 220207 (TRBV28, TRBJ2-2)
CASSLPFMNTGELFF

SEQ ID NO: 440415 - protein, 16 aa, Homo sapiens
  CDR3 for alpha chain variable domain of TCR clone 220208 (TRAV4, TRAJ9)
CLVGDPNRPGGFKTIC

SEQ ID NO: 440416 - protein, 16 aa, Homo sapiens
  CDR3 for beta chain variable domain of TCR clone 220208 (TRBV28, TRBJ1-4)
CASSPPYRGRSEKLFF

SEQ ID NO: 440417 - protein, 17 aa, Homo sapiens
  CDR3 for alpha chain variable domain of TCR clone 220209 (TRAV21, TRAJ3)
CHLPLCCFYSSASKIIF

SEQ ID NO: 440418 - protein, 13 aa, Homo sapiens
  CDR3 for beta chain variable domain of TCR clone 220209 (TRBV19, TRBJ2-7)
CASSPRQSYEQYF

SEQ ID NO: 440419 - protein, 18 aa, Homo sapiens
  CDR3 for alpha chain variable domain of TCR clone 220210 (TRAV13-1, TRAJ52)
CAASKRSAGGTSYGKLTF

SEQ ID NO: 440420 - protein, 13 aa, Homo sapiens
  CDR3 for beta chain variable domain of TCR clone 220210 (TRBV7-2, TRBJ2-7)
CASSSPSGREQYF

SEQ ID NO: 440421 - protein, 12 aa, Homo sapiens
  CDR3 for alpha chain variable domain of TCR clone 220211 (TRAV17, TRAJ12)
CATLRSSYKLIF

SEQ ID NO: 440422 - protein, 13 aa, Homo sapiens
  CDR3 for beta chain variable domain of TCR clone 220211 (TRBV10-3, TRBJ2-7)
CAISEKGGYEQYF

SEQ ID NO: 440423 - protein, 12 aa, Homo sapiens
  CDR3 for alpha chain variable domain of TCR clone 220212 (TRAV12-3, TRAJ17)
CAMTLTGNKLTF

SEQ ID NO: 440424 - protein, 15 aa, Homo sapiens
  CDR3 for beta chain variable domain of TCR clone 220212 (TRBV5-1, TRBJ2-7)
CASSFELGLTGEQYF

SEQ ID NO: 440425 - protein, 12 aa, Homo sapiens
  CDR3 for alpha chain variable domain of TCR clone 220213 (TRAV12-2, TRAJ50)
CAVIVTSYKVIF

SEQ ID NO: 440426 - protein, 14 aa, Homo sapiens
  CDR3 for beta chain variable domain of TCR clone 220213 (TRBV9, TRBJ2-1)
CASSVDPRGKEQFF

SEQ ID NO: 440427 - protein, 10 aa, Homo sapiens
  CDR3 for alpha chain variable domain of TCR clone 220214 (TRAV23/DV6, TRAJ57)
CAASSTLSRG

SEQ ID NO: 440428 - protein, 14 aa, Homo sapiens
  CDR3 for beta chain variable domain of TCR clone 220214 (TRBV13, TRBJ2-5)
CASSLGQGKETQYF

SEQ ID NO: 440429 - protein, 14 aa, Homo sapiens
  CDR3 for alpha chain variable domain of TCR clone 220215 (TRAV12-3, TRAJ13)
CAMRNSGGYQKVTF

SEQ ID NO: 440430 - protein, 14 aa, Homo sapiens
  CDR3 for beta chain variable domain of TCR clone 220215 (TRBV4-1, TRBJ1-6)
CASSPGSDSSPLPF

SEQ ID NO: 440431 - protein, 17 aa, Homo sapiens
  CDR3 for alpha chain variable domain of TCR clone 220216 (TRAV1-2, TRAJ12)
CLLPCAVSMDSSYKLIF

SEQ ID NO: 440432 - protein, 15 aa, Homo sapiens
  CDR3 for beta chain variable domain of TCR clone 220216 (TRBV27, TRBJ2-5)
CASSLIPSGGETQYF

SEQ ID NO: 440433 - protein, 17 aa, Homo sapiens
  CDR3 for alpha chain variable domain of TCR clone 220217 (TRAV27, TRAJ18)
CAGLHRGRGSTLGRLYF

SEQ ID NO: 440434 - protein, 19 aa, Homo sapiens
  CDR3 for beta chain variable domain of TCR clone 220217 (TRBV11-3, TRBJ2-2)
CASSTRPGAKPTNTGELFF

SEQ ID NO: 440435 - protein, 12 aa, Homo sapiens
  CDR3 for alpha chain variable domain of TCR clone 220218 (TRAV12-3, TRAJ17)
CAMTLTGNKLTF

SEQ ID NO: 440436 - protein, 12 aa, Homo sapiens
  CDR3 for beta chain variable domain of TCR clone 220218 (TRBV11-2, TRBJ2-2)
CASSLGGGELVF

SEQ ID NO: 440437 - protein, 15 aa, Homo sapiens
  CDR3 for alpha chain variable domain of TCR clone 220219 (TRAV12-2, TRAJ53)
CAVNGGGGSNYELTF

SEQ ID NO: 440438 - protein, 17 aa, Homo sapiens
  CDR3 for beta chain variable domain of TCR clone 220219 (TRBV7-3, TRBJ2-3)
CASSLMKRMRGADTRYF

SEQ ID NO: 440439 - protein, 13 aa, Homo sapiens
  CDR3 for alpha chain variable domain of TCR clone 220220 (TRAV3, TRAJ21)
CAVREPDFNKFYF

SEQ ID NO: 440440 - protein, 14 aa, Homo sapiens
  CDR3 for beta chain variable domain of TCR clone 220220 (TRBV20-1, TRBJ2-3)
CSARGGTSTDTQYC

SEQ ID NO: 440441 - protein, 10 aa, Homo sapiens
  CDR3 for alpha chain variable domain of TCR clone 220221 (TRAV1-2, TRAJ31)
CVSEDARLMF

SEQ ID NO: 440442 - protein, 15 aa, Homo sapiens
  CDR3 for beta chain variable domain of TCR clone 220221 (TRBV19, TRBJ2-4)
CASRGPRRGENIQYF

SEQ ID NO: 440443 - protein, 16 aa, Homo sapiens
  CDR3 for alpha chain variable domain of TCR clone 220222 (TRAV20, TRAJ53)
CSVRRGSGGSNYKLTF

SEQ ID NO: 440444 - protein, 12 aa, Homo sapiens
  CDR3 for beta chain variable domain of TCR clone 220222 (TRBV29-1, TRBJ2-3)
CSVVLGADTQYF

SEQ ID NO: 440445 - protein, 13 aa, Homo sapiens
  CDR3 for alpha chain variable domain of TCR clone 220223 (TRAV8-3, TRAJ36)
CAVGATGANNLFF

SEQ ID NO: 440446 - protein, 13 aa, Homo sapiens
  CDR3 for beta chain variable domain of TCR clone 220223 (TRBV13, TRBJ2-2)
CASSGGNTGELFF

SEQ ID NO: 440447 - protein, 12 aa, Homo sapiens
  CDR3 for alpha chain variable domain of TCR clone 220224 (TRAV2, TRAJ33)
CAVPDSNYQLIW

SEQ ID NO: 440448 - protein, 17 aa, Homo sapiens
  CDR3 for beta chain variable domain of TCR clone 220224 (TRBV6-5, TRBJ2-3)
CASSYGTSLYKSDTHYF

SEQ ID NO: 440449 - protein, 13 aa, Homo sapiens
  CDR3 for alpha chain variable domain of TCR clone 220225 (TRAV16, TRAJ34)
CALTGYNTDKLIF

SEQ ID NO: 440450 - protein, 13 aa, Homo sapiens
  CDR3 for beta chain variable domain of TCR clone 220225 (TRBV6-1, TRBJ2-1)
CASREDGGMSSSS

SEQ ID NO: 440451 - protein, 18 aa, Homo sapiens
  CDR3 for alpha chain variable domain of TCR clone 220226 (TRAV26-2, TRAJ45)
CVLRLWGYSGGGADGLTF

SEQ ID NO: 440452 - protein, 17 aa, Homo sapiens
  CDR3 for beta chain variable domain of TCR clone 220226 (TRBV28, TRBJ2-3)
CASSPTPAGGRVDTQYF

SEQ ID NO: 440453 - protein, 16 aa, Homo sapiens
  CDR3 for alpha chain variable domain of TCR clone 220227 (TRAV27, TRAJ13)
CAGAKSDSGGYQKVTF

SEQ ID NO: 440454 - protein, 15 aa, Homo sapiens
  CDR3 for beta chain variable domain of TCR clone 220227 (TRBV29-1, TRBJ2-1)
CSVGRHALFYNEQYF

SEQ ID NO: 440455 - protein, 12 aa, Homo sapiens
  CDR3 for alpha chain variable domain of TCR clone 220228 (TRAV12-3, TRAJ17)
CAMTLTGNKLTF

SEQ ID NO: 440456 - protein, 15 aa, Homo sapiens
  CDR3 for beta chain variable domain of TCR clone 220228 (TRBV20-1, TRBJ2-7)
CSARDRVSGMEEQYL

SEQ ID NO: 440457 - protein, 16 aa, Homo sapiens
  CDR3 for alpha chain variable domain of TCR clone 220229 (TRAV38-1, TRAJ32)
CAFMKGGGGATNKLIF

SEQ ID NO: 440458 - protein, 14 aa, Homo sapiens
  CDR3 for beta chain variable domain of TCR clone 220229 (TRBV18, TRBJ1-5)
CASSPPEGDQPQHF

SEQ ID NO: 440459 - protein, 16 aa, Homo sapiens
  CDR3 for alpha chain variable domain of TCR clone 220230 (TRAV27, TRAJ13)
CAGAKSDSGGYQKVTF

SEQ ID NO: 440460 - protein, 15 aa, Homo sapiens
  CDR3 for beta chain variable domain of TCR clone 220230 (TRBV29-1, TRBJ2-7)
CSVGRHALFYNEQYF

SEQ ID NO: 440461 - protein, 13 aa, Homo sapiens
  CDR3 for alpha chain variable domain of TCR clone 220231 (TRAV12-3, TRAJ43)
CAMIRPNNNDMRF

SEQ ID NO: 440462 - protein, 16 aa, Homo sapiens
  CDR3 for beta chain variable domain of TCR clone 220231 (TRBV7-9, TRBJ2-1)
CASSDVAGGSYNEQFF

SEQ ID NO: 440463 - protein, 12 aa, Homo sapiens
  CDR3 for alpha chain variable domain of TCR clone 220232 (TRAV26-2, TRAJ48)
CILRKGNEKLTF

SEQ ID NO: 440464 - protein, 14 aa, Homo sapiens
  CDR3 for beta chain variable domain of TCR clone 220232 (TRBV28, TRBJ2-7)
CASSTLRGRFERYF

SEQ ID NO: 440465 - protein, 12 aa, Homo sapiens
  CDR3 for alpha chain variable domain of TCR clone 220233 (TRAV12-3, TRAJ17)
CAMTLTGNKLTF

SEQ ID NO: 440466 - protein, 16 aa, Homo sapiens
  CDR3 for beta chain variable domain of TCR clone 220233 (TRBV5-1, TRBJ2-5)
CASSLTTSLGKETQYF

SEQ ID NO: 440467 - protein, 14 aa, Homo sapiens
  CDR3 for alpha chain variable domain of TCR clone 220234 (TRAV23/DV6, TRAJ39)
CAASMRGAGNMLTF

SEQ ID NO: 440468 - protein, 15 aa, Homo sapiens
  CDR3 for beta chain variable domain of TCR clone 220234 (TRBV7-2, TRBJ2-3)
CASSLRGGSTDTQYF

SEQ ID NO: 440469 - protein, 12 aa, Homo sapiens
  CDR3 for alpha chain variable domain of TCR clone 220235 (TRAV13-2, TRAJ23)
CAERHRGGKLIF

SEQ ID NO: 440470 - protein, 14 aa, Homo sapiens
  CDR3 for beta chain variable domain of TCR clone 220235 (TRBV11-2, TRBJ2-7)
RASSLGAGAYEQYI

SEQ ID NO: 440471 - protein, 16 aa, Homo sapiens
  CDR3 for alpha chain variable domain of TCR clone 220236 (TRAV3, TRAJ4)
CAVRAFFSGGYNKLIF

SEQ ID NO: 440472 - protein, 16 aa, Homo sapiens
  CDR3 for beta chain variable domain of TCR clone 220236 (TRBV11-2, TRBJ2-2)
CASSTHRGSDTGELFF

SEQ ID NO: 440473 - protein, 12 aa, Homo sapiens
  CDR3 for alpha chain variable domain of TCR clone 220237 (TRAV8-3, TRAJ26)
CAGDNYGQNFVF

SEQ ID NO: 440474 - protein, 15 aa, Homo sapiens
  CDR3 for beta chain variable domain of TCR clone 220237 (TRBV20-1, TRBJ2-3)
CSARRGEARTDTQYF

SEQ ID NO: 440475 - protein, 11 aa, Homo sapiens
  CDR3 for alpha chain variable domain of TCR clone 220238 (TRAV35, TRAJ22)
CAGPGVGQLTF

SEQ ID NO: 440476 - protein, 13 aa, Homo sapiens
  CDR3 for beta chain variable domain of TCR clone 220238 (TRBV7-9, TRBJ1-2)
CASSLKQNYGYTF

SEQ ID NO: 440477 - protein, 12 aa, Homo sapiens
  CDR3 for alpha chain variable domain of TCR clone 220239 (TRAV8-3, TRAJ20)
CAVGANDYELSF

SEQ ID NO: 440478 - protein, 14 aa, Homo sapiens
  CDR3 for beta chain variable domain of TCR clone 220239 (TRBV20-1, TRBJ2-1)
CSAHPGLPYNEQFF

SEQ ID NO: 440479 - protein, 16 aa, Homo sapiens
  CDR3 for alpha chain variable domain of TCR clone 220240 (TRAV16, TRAJ37)
CSKWPDGSSNTGKLIF

SEQ ID NO: 440480 - protein, 13 aa, Homo sapiens
  CDR3 for beta chain variable domain of TCR clone 220240 (TRBV7-2, TRBJ2-2)
CAGSLAVTGELFF

SEQ ID NO: 440481 - protein, 14 aa, Homo sapiens
  CDR3 for alpha chain variable domain of TCR clone 220241 (TRAV1-2, TRAJ8)
CAVREDTGFQKLVF

SEQ ID NO: 440482 - protein, 12 aa, Homo sapiens
  CDR3 for beta chain variable domain of TCR clone 220241 (TRBV7-2, TRBJ2-5)
CASSLYQETQYF

SEQ ID NO: 440483 - protein, 14 aa, Homo sapiens
  CDR3 for alpha chain variable domain of TCR clone 220242 (TRAV27, TRAJ40)
CAGSLPRGTYKYIF

SEQ ID NO: 440484 - protein, 15 aa, Homo sapiens
  CDR3 for beta chain variable domain of TCR clone 220242 (TRBV6-3, TRBJ1-4)
CASSSPGQENEKLFF

SEQ ID NO: 440485 - protein, 15 aa, Homo sapiens
  CDR3 for alpha chain variable domain of TCR clone 220243 (TRAV27, TRAJ38)
CAARRNAGNNRKLIW

SEQ ID NO: 440486 - protein, 13 aa, Homo sapiens
  CDR3 for beta chain variable domain of TCR clone 220243 (TRBV19, TRBJ1-2)
CASSVPGQDGETF

SEQ ID NO: 440487 - protein, 13 aa, Homo sapiens
  CDR3 for alpha chain variable domain of TCR clone 220244 (TRAV12-2, TRAJ15)
CVVFNQAGTALIF

SEQ ID NO: 440488 - protein, 14 aa, Homo sapiens
  CDR3 for beta chain variable domain of TCR clone 220244 (TRBV7-8, TRBJ1-5)
CQQPGGGADQPQHF

SEQ ID NO: 440489 - protein, 12 aa, Homo sapiens
  CDR3 for alpha chain variable domain of TCR clone 220245 (TRAV8-3, TRAJ41)
CAVVRWGMHSTS

SEQ ID NO: 440490 - protein, 16 aa, Homo sapiens
  CDR3 for beta chain variable domain of TCR clone 220245 (TRBV7-6, TRBJ2-3)
CASSDSRGEGTDTQYF

SEQ ID NO: 440491 - protein, 14 aa, Homo sapiens
  CDR3 for alpha chain variable domain of TCR clone 220246 (TRAV12-3, TRAJ29)
CARILLSGNTPLVF

SEQ ID NO: 440492 - protein, 16 aa, Homo sapiens
  CDR3 for beta chain variable domain of TCR clone 220246 (TRBV28, TRBJ2-7)
CASSSGTSGRGYEQYF

SEQ ID NO: 440493 - protein, 16 aa, Homo sapiens
  CDR3 for alpha chain variable domain of TCR clone 220247 (TRAV30, TRAJ24)
CGTEIVDADSWGKSQF

SEQ ID NO: 440494 - protein, 13 aa, Homo sapiens
  CDR3 for beta chain variable domain of TCR clone 220247 (TRBV20-1, TRBJ1-1)
CSAPPGGHTETFF

SEQ ID NO: 440495 - protein, 12 aa, Homo sapiens
  CDR3 for alpha chain variable domain of TCR clone 220248 (TRAV35, TRAJ43)
CVGAYNNNDMRF

SEQ ID NO: 440496 - protein, 14 aa, Homo sapiens
  CDR3 for beta chain variable domain of TCR clone 220248 (TRBV2, TRBJ2-2)
CASSWQGATGELFF

SEQ ID NO: 440497 - protein, 18 aa, Homo sapiens
  CDR3 for alpha chain variable domain of TCR clone 220249 (TRAV12-2, )
CAVEDIQNPDPAVYQLRD

SEQ ID NO: 440498 - protein, 16 aa, Homo sapiens
  CDR3 for beta chain variable domain of TCR clone 220249 (TRBV6-1, TRBJ1-2)
CASSGAWQGRSHGYSF

SEQ ID NO: 440499 - protein, 17 aa, Homo sapiens
  CDR3 for alpha chain variable domain of TCR clone 220250 (TRAV27, TRAJ42)
CAERVVYYGGSQGNLIF

SEQ ID NO: 440500 - protein, 14 aa, Homo sapiens
  CDR3 for beta chain variable domain of TCR clone 220250 (TRBV6-6, TRBJ2-3)
CASRLQREADTQYF

SEQ ID NO: 440501 - protein, 14 aa, Homo sapiens
  CDR3 for alpha chain variable domain of TCR clone 220251 (TRAV3, TRAJ21)
CAVRDWDNFNKFYF

SEQ ID NO: 440502 - protein, 12 aa, Homo sapiens
  CDR3 for beta chain variable domain of TCR clone 220251 (TRBV13, TRBJ2-1)
CASSLGAQEQFF

SEQ ID NO: 440503 - protein, 16 aa, Homo sapiens
  CDR3 for alpha chain variable domain of TCR clone 220252 (TRAV12-1, TRAJ43)
CVVNPHRFGAGTRLPV

SEQ ID NO: 440504 - protein, 16 aa, Homo sapiens
  CDR3 for beta chain variable domain of TCR clone 220252 (TRBV27, TRBJ2-2)
CASSSTGGGDTGELFF

SEQ ID NO: 440505 - protein, 11 aa, Homo sapiens
  CDR3 for alpha chain variable domain of TCR clone 220253 (TRAV13-1, TRAJ6)
SATLGSYIPTF

SEQ ID NO: 440506 - protein, 12 aa, Homo sapiens
  CDR3 for beta chain variable domain of TCR clone 220253 (TRBV11-2, TRBJ2-1)
CASSPGNNEQFF

SEQ ID NO: 440507 - protein, 13 aa, Homo sapiens
  CDR3 for alpha chain variable domain of TCR clone 220254 (TRAV26-2, TRAJ43)
CILGAVNNNDMRF

SEQ ID NO: 440508 - protein, 15 aa, Homo sapiens
  CDR3 for beta chain variable domain of TCR clone 220254 (TRBV7-2, TRBJ2-1)
CASTHVTGVYNEQFF

SEQ ID NO: 440509 - protein, 16 aa, Homo sapiens
  CDR3 for alpha chain variable domain of TCR clone 220255 (TRAV3, TRAJ10)
CAVRDMRAGGGNKPTF

SEQ ID NO: 440510 - protein, 15 aa, Homo sapiens
  CDR3 for beta chain variable domain of TCR clone 220255 (TRBV11-2, TRBJ1-2)
CASSLEGVQRNGYTF

SEQ ID NO: 440511 - protein, 14 aa, Homo sapiens
  CDR3 for alpha chain variable domain of TCR clone 220256 (TRAV8-3, TRAJ39)
CAVGANNAGNMLTF

SEQ ID NO: 440512 - protein, 15 aa, Homo sapiens
  CDR3 for beta chain variable domain of TCR clone 220256 (TRBV20-1, TRBJ2-7)
CSAESGTSGAYEQYF

SEQ ID NO: 440513 - protein, 12 aa, Homo sapiens
  CDR3 for alpha chain variable domain of TCR clone 220257 (TRAV36/DV7, TRAJ54)
CAVVRGAQKLVF

SEQ ID NO: 440514 - protein, 13 aa, Homo sapiens
  CDR3 for beta chain variable domain of TCR clone 220257 (TRBV7-3, TRBJ1-1)
CASSLKGGNTEAF

SEQ ID NO: 440515 - protein, 15 aa, Homo sapiens
  CDR3 for alpha chain variable domain of TCR clone 220258 (TRAV4, TRAJ39)
CLVGPNNNAGNMLTF

SEQ ID NO: 440516 - protein, 14 aa, Homo sapiens
  CDR3 for beta chain variable domain of TCR clone 220258 (TRBV19, TRBJ2-1)
CASSTFVLSGEQFF

SEQ ID NO: 440517 - protein, 12 aa, Homo sapiens
  CDR3 for alpha chain variable domain of TCR clone 220259 (TRAV21, TRAJ23)
GAVMLQGGKLIF

SEQ ID NO: 440518 - protein, 14 aa, Homo sapiens
  CDR3 for beta chain variable domain of TCR clone 220259 (TRBV7-9, TRBJ1-4)
CAITEGEANEKLFF

SEQ ID NO: 440519 - protein, 13 aa, Homo sapiens
  CDR3 for alpha chain variable domain of TCR clone 220260 (TRAV12-1, TRAJ39)
CVALNNAGNMLTF

SEQ ID NO: 440520 - protein, 12 aa, Homo sapiens
  CDR3 for beta chain variable domain of TCR clone 220260 (TRBV19, TRBJ1-1)
CASSTTGIEAFF

SEQ ID NO: 440521 - protein, 15 aa, Homo sapiens
  CDR3 for alpha chain variable domain of TCR clone 220261 (TRAV26-1, TRAJ29)
CVVRVEGPGNTPLVF

SEQ ID NO: 440522 - protein, 15 aa, Homo sapiens
  CDR3 for beta chain variable domain of TCR clone 220261 (TRBV7-9, TRBJ1-5)
CASSQGHQPNQPQHF

SEQ ID NO: 440523 - protein, 15 aa, Homo sapiens
  CDR3 for alpha chain variable domain of TCR clone 220262 (TRAV4, TRAJ39)
CLVGPNNNAGNMLTI

SEQ ID NO: 440524 - protein, 13 aa, Homo sapiens
  CDR3 for beta chain variable domain of TCR clone 220262 (TRBV11-2, TRBJ2-5)
CASSATGEETQYF

SEQ ID NO: 440525 - protein, 14 aa, Homo sapiens
  CDR3 for alpha chain variable domain of TCR clone 220263 (TRAV8-6, TRAJ6)
CAVHASGGSYIPTF

SEQ ID NO: 440526 - protein, 14 aa, Homo sapiens
  CDR3 for beta chain variable domain of TCR clone 220263 (TRBV19, TRBJ2-3)
CASSAPRGTDTQYF

SEQ ID NO: 440527 - protein, 12 aa, Homo sapiens
  CDR3 for alpha chain variable domain of TCR clone 220264 (TRAV8-3, TRAJ26)
CAGDNYVQNFVF

SEQ ID NO: 440528 - protein, 15 aa, Homo sapiens
  CDR3 for beta chain variable domain of TCR clone 220264 (TRBV11-2, TRBJ2-1)
CASSLGTSGLNEQFF

SEQ ID NO: 440529 - protein, 15 aa, Homo sapiens
  CDR3 for alpha chain variable domain of TCR clone 220265 (TRAV16, TRAJ12)
CSKWPLRDSSYRLIF

SEQ ID NO: 440530 - protein, 14 aa, Homo sapiens
  CDR3 for beta chain variable domain of TCR clone 220265 (TRBV25-1, TRBJ1-2)
CASSEATGPYGYTF

SEQ ID NO: 440531 - protein, 13 aa, Homo sapiens
  CDR3 for alpha chain variable domain of TCR clone 220266 (TRAV2, TRAJ15)
CAVASQAGTALIF

SEQ ID NO: 440532 - protein, 12 aa, Homo sapiens
  CDR3 for beta chain variable domain of TCR clone 220266 (TRBV18, TRBJ2-7)
CASSLDSYEQYF

SEQ ID NO: 440533 - protein, 12 aa, Homo sapiens
  CDR3 for alpha chain variable domain of TCR clone 220267 (TRAV8-3, TRAJ20)
CAVDFNDYKLSF

SEQ ID NO: 440534 - protein, 13 aa, Homo sapiens
  CDR3 for beta chain variable domain of TCR clone 220267 (TRBV5-7, TRBJ2-3)
CASCLGRTDTQYF

SEQ ID NO: 440535 - protein, 14 aa, Homo sapiens
  CDR3 for alpha chain variable domain of TCR clone 220268 (TRAV1-2, TRAJ8)
CAVREDKGFQKLVF

SEQ ID NO: 440536 - protein, 15 aa, Homo sapiens
  CDR3 for beta chain variable domain of TCR clone 220268 (TRBV19, TRBJ2-1)
CASSTGTSSYNEQFF

SEQ ID NO: 440537 - protein, 15 aa, Homo sapiens
  CDR3 for alpha chain variable domain of TCR clone 220269 (TRAV27, TRAJ38)
CAARRNAGNNRELIW

SEQ ID NO: 440538 - protein, 13 aa, Homo sapiens
  CDR3 for beta chain variable domain of TCR clone 220269 (TRBV20-1, TRBJ1-1)
CSARAGGNTEAVF

SEQ ID NO: 440539 - protein, 13 aa, Homo sapiens
  CDR3 for alpha chain variable domain of TCR clone 220270 (TRAV35, TRAJ48)
CAVHEFGNEKLTF

SEQ ID NO: 440540 - protein, 16 aa, Homo sapiens
  CDR3 for beta chain variable domain of TCR clone 220270 (TRBV12-5, TRBJ2-5)
CASGPRTSGNQETQYF

SEQ ID NO: 440541 - protein, 16 aa, Homo sapiens
  CDR3 for alpha chain variable domain of TCR clone 220271 (TRAV30, TRAJ24)
CGTEIVDADSSGKFQF

SEQ ID NO: 440542 - protein, 13 aa, Homo sapiens
  CDR3 for beta chain variable domain of TCR clone 220271 (TRBV20-1, TRBJ1-1)
CSAPPGGHTEAFF

SEQ ID NO: 440543 - protein, 14 aa, Homo sapiens
  CDR3 for alpha chain variable domain of TCR clone 220272 (TRAV12-3, TRAJ6)
CAMSATGGSYIPTF

SEQ ID NO: 440544 - protein, 15 aa, Homo sapiens
  CDR3 for beta chain variable domain of TCR clone 220272 (TRBV20-1, TRBJ2-7)
CSARDRVSGMDEQYF

SEQ ID NO: 440545 - protein, 14 aa, Homo sapiens
  CDR3 for alpha chain variable domain of TCR clone 220273 (TRAV17, TRAJ57)
CATDPQGESEKLVF

SEQ ID NO: 440546 - protein, 15 aa, Homo sapiens
  CDR3 for beta chain variable domain of TCR clone 220273 (TRBV5-1, TRBJ2-7)
CASSLDLTSSYEQYF

SEQ ID NO: 440547 - protein, 11 aa, Homo sapiens
  CDR3 for alpha chain variable domain of TCR clone 220274 (TRAV9-2, TRAJ49)
CALSAGNQFYF

SEQ ID NO: 440548 - protein, 16 aa, Homo sapiens
  CDR3 for beta chain variable domain of TCR clone 220274 (TRBV2, TRBJ2-1)
CASSVGGSLSYNEQFF

SEQ ID NO: 440549 - protein, 15 aa, Homo sapiens
  CDR3 for alpha chain variable domain of TCR clone 220275 (TRAV12-2, TRAJ53)
CAVNGGGGSNYKLTF

SEQ ID NO: 440550 - protein, 13 aa, Homo sapiens
  CDR3 for beta chain variable domain of TCR clone 220275 (TRBV7-2, TRBJ1-2)
CASSSRGAYGYTF

SEQ ID NO: 440551 - protein, 11 aa, Homo sapiens
  CDR3 for alpha chain variable domain of TCR clone 220276 (TRAV23/DV6, TRAJ58)
CAARLLRGETS

SEQ ID NO: 440552 - protein, 15 aa, Homo sapiens
  CDR3 for beta chain variable domain of TCR clone 220276 (TRBV11-2, TRBJ2-1)
CASSLGPDSYNEQFF

SEQ ID NO: 440553 - protein, 16 aa, Homo sapiens
  CDR3 for alpha chain variable domain of TCR clone 220277 (TRAV8-3, TRAJ44)
CAVGAYNTGTASKLTF

SEQ ID NO: 440554 - protein, 14 aa, Homo sapiens
  CDR3 for beta chain variable domain of TCR clone 220277 (TRBV7-6, TRBJ2-3)
CASSLGTVTDTQYF

SEQ ID NO: 440555 - protein, 13 aa, Homo sapiens
  CDR3 for alpha chain variable domain of TCR clone 220278 (TRAV20, TRAJ54)
CAVQAGGAQKLVF

SEQ ID NO: 440556 - protein, 14 aa, Homo sapiens
  CDR3 for beta chain variable domain of TCR clone 220278 (TRBV20-1, TRBJ2-7)
GSAKTGTGGYEQYF

SEQ ID NO: 440557 - protein, 14 aa, Homo sapiens
  CDR3 for alpha chain variable domain of TCR clone 220279 (TRAV13-2, TRAJ10)
CAETFTGGGNKLTF

SEQ ID NO: 440558 - protein, 16 aa, Homo sapiens
  CDR3 for beta chain variable domain of TCR clone 220279 (TRBV18, TRBJ2-7)
GASSPRSQGISYEQYF

SEQ ID NO: 440559 - protein, 15 aa, Homo sapiens
  CDR3 for alpha chain variable domain of TCR clone 220280 (TRAV23/DV6, TRAJ13)
CAAWPGGGGDQKVTF

SEQ ID NO: 440560 - protein, 14 aa, Homo sapiens
  CDR3 for beta chain variable domain of TCR clone 220280 (TRBV6-1, TRBJ2-1)
CASAGGAIKNEQFF

SEQ ID NO: 440561 - protein, 14 aa, Homo sapiens
  CDR3 for alpha chain variable domain of TCR clone 220281 (TRAV12-2, TRAJ17)
CAVLFKAAGNKLTF

SEQ ID NO: 440562 - protein, 14 aa, Homo sapiens
  CDR3 for beta chain variable domain of TCR clone 220281 (TRBV9, TRBJ2-4)
CASSPSGTSGFQYF

SEQ ID NO: 440563 - protein, 13 aa, Homo sapiens
  CDR3 for alpha chain variable domain of TCR clone 220282 (TRAV1-2, TRAJ9)
CAALNTGGFKTIY

SEQ ID NO: 440564 - protein, 14 aa, Homo sapiens
  CDR3 for beta chain variable domain of TCR clone 220282 (TRBV4-2, TRBJ2-5)
CASSQDRGRETQYF

SEQ ID NO: 440565 - protein, 13 aa, Homo sapiens
  CDR3 for alpha chain variable domain of TCR clone 220283 (TRAV8-3, TRAJ48)
CGVVPFGNEKLTF

SEQ ID NO: 440566 - protein, 15 aa, Homo sapiens
  CDR3 for beta chain variable domain of TCR clone 220283 (TRBV11-2, TRBJ2-1)
CASSSPATRYNEQFF

SEQ ID NO: 440567 - protein, 18 aa, Homo sapiens
  CDR3 for alpha chain variable domain of TCR clone 220284 (TRAV21, TRAJ52)
CAVRPSPAGGTNYGKLTF

SEQ ID NO: 440568 - protein, 14 aa, Homo sapiens
  CDR3 for beta chain variable domain of TCR clone 220284 (TRBV18, TRBJ2-7)
CASSPRGGAYEQYF

SEQ ID NO: 440569 - protein, 18 aa, Homo sapiens
  CDR3 for alpha chain variable domain of TCR clone 220285 (TRAV21, TRAJ52)
CAVRPSPAGGTSYGMLTF

SEQ ID NO: 440570 - protein, 16 aa, Homo sapiens
  CDR3 for beta chain variable domain of TCR clone 220285 (TRBV13, TRBJ2-3)
CQQPLQGSGGRNTQYF

SEQ ID NO: 440571 - protein, 14 aa, Homo sapiens
  CDR3 for alpha chain variable domain of TCR clone 220286 (TRAV35, TRAJ46)
CAGPQKSSGDKLTF

SEQ ID NO: 440572 - protein, 12 aa, Homo sapiens
  CDR3 for beta chain variable domain of TCR clone 220286 (TRBV12-5, TRBJ2-5)
CASGQGVETQYF

SEQ ID NO: 440573 - protein, 15 aa, Homo sapiens
  CDR3 for alpha chain variable domain of TCR clone 220287 (TRAV12-1, TRAJ52)
CVGNAGGTSYGKLTF

SEQ ID NO: 440574 - protein, 13 aa, Homo sapiens
  CDR3 for beta chain variable domain of TCR clone 220287 (TRBV7-3, TRBJ1-1)
RASSQDWGAEAFF

SEQ ID NO: 440575 - protein, 12 aa, Homo sapiens
  CDR3 for alpha chain variable domain of TCR clone 220288 (TRAV25, TRAJ48)
CAGDFGNEKLTF

SEQ ID NO: 440576 - protein, 12 aa, Homo sapiens
  CDR3 for beta chain variable domain of TCR clone 220288 (TRBV2, TRBJ2-5)
CASKEHGETQYF

SEQ ID NO: 440577 - protein, 12 aa, Homo sapiens
  CDR3 for alpha chain variable domain of TCR clone 220289 (TRAV16, TRAJ27)
CAQNHQCRQINL

SEQ ID NO: 440578 - protein, 14 aa, Homo sapiens
  CDR3 for beta chain variable domain of TCR clone 220289 (TRBV11-2, TRBJ1-5)
CASSLDRGRQPQHF

SEQ ID NO: 440579 - protein, 14 aa, Homo sapiens
  CDR3 for alpha chain variable domain of TCR clone 220290 (TRAV1-2, TRAJ8)
CAVREDTGFQKLVF

SEQ ID NO: 440580 - protein, 12 aa, Homo sapiens
  CDR3 for beta chain variable domain of TCR clone 220290 (TRBV29-1, TRBJ2-7)
CSARARPYEQYF

SEQ ID NO: 440581 - protein, 13 aa, Homo sapiens
  CDR3 for alpha chain variable domain of TCR clone 220291 (TRAV1-1, TRAJ9)
CAAKNTGGFKTTF

SEQ ID NO: 440582 - protein, 16 aa, Homo sapiens
  CDR3 for beta chain variable domain of TCR clone 220291 (TRBV29-1, TRBJ2-7)
CSVEDAEDGTAYEQYF

SEQ ID NO: 440583 - protein, 12 aa, Homo sapiens
  CDR3 for alpha chain variable domain of TCR clone 220292 (TRAV12-1, TRAJ50)
CVGRTSYDKVIF

SEQ ID NO: 440584 - protein, 17 aa, Homo sapiens
  CDR3 for beta chain variable domain of TCR clone 220292 (TRBV7-8, TRBJ2-6)
CASSAGTGGAGANVLTF

SEQ ID NO: 440585 - protein, 14 aa, Homo sapiens
  CDR3 for alpha chain variable domain of TCR clone 220293 (TRAV12-2, TRAJ48)
CAVNALIGNEKLTF

SEQ ID NO: 440586 - protein, 13 aa, Homo sapiens
  CDR3 for beta chain variable domain of TCR clone 220293 (TRBV28, TRBJ2-7)
CAGAQQGLDEQYF

SEQ ID NO: 440587 - protein, 14 aa, Homo sapiens
  CDR3 for alpha chain variable domain of TCR clone 220294 (TRAV35, TRAJ34)
CAGRGTPTSPPLGL

SEQ ID NO: 440588 - protein, 12 aa, Homo sapiens
  CDR3 for beta chain variable domain of TCR clone 220294 (TRBV11-2, TRBJ2-2)
CASSLGGGELFF

SEQ ID NO: 440589 - protein, 14 aa, Homo sapiens
  CDR3 for alpha chain variable domain of TCR clone 220295 (TRAV12-2, TRAJ13)
CAVKKTGGYQKVTF

SEQ ID NO: 440590 - protein, 13 aa, Homo sapiens
  CDR3 for beta chain variable domain of TCR clone 220295 (TRBV12-4, TRBJ2-5)
CASSLGGSRTQYF

SEQ ID NO: 440591 - protein, 12 aa, Homo sapiens
  CDR3 for alpha chain variable domain of TCR clone 220296 (TRAV1-2, TRAJ11)
CAVRGGYSTFNF

SEQ ID NO: 440592 - protein, 16 aa, Homo sapiens
  CDR3 for beta chain variable domain of TCR clone 220296 (TRBV7-9, TRBJ2-1)
CASSSPQGTTRNEQFF

SEQ ID NO: 440593 - protein, 12 aa, Homo sapiens
  CDR3 for alpha chain variable domain of TCR clone 220297 (TRAV13-1, TRAJ17)
CAARTAGNKLTF

SEQ ID NO: 440594 - protein, 15 aa, Homo sapiens
  CDR3 for beta chain variable domain of TCR clone 220297 (TRBV7-6, TRBJ1-1)
CASSPQGGANSEAFF

SEQ ID NO: 440595 - protein, 14 aa, Homo sapiens
  CDR3 for alpha chain variable domain of TCR clone 220298 (TRAV12-3, TRAJ7)
CAMSEIGGNNRLAF

SEQ ID NO: 440596 - protein, 14 aa, Homo sapiens
  CDR3 for beta chain variable domain of TCR clone 220298 (TRBV2, TRBJ2-7)
CASSLTSGGYEQYF

SEQ ID NO: 440597 - protein, 12 aa, Homo sapiens
  CDR3 for alpha chain variable domain of TCR clone 220299 (TRAV21, TRAJ29)
CAVTSGNTPLVF

SEQ ID NO: 440598 - protein, 17 aa, Homo sapiens
  CDR3 for beta chain variable domain of TCR clone 220299 (TRBV20-1, TRBJ2-2)
CSASGSGQGGLTGELFF

SEQ ID NO: 440599 - protein, 15 aa, Homo sapiens
  CDR3 for alpha chain variable domain of TCR clone 220300 (TRAV21, TRAJ24)
CAARSSTDSWGSLQF

SEQ ID NO: 440600 - protein, 13 aa, Homo sapiens
  CDR3 for beta chain variable domain of TCR clone 220300 (TRBV11-2, TRBJ2-5)
CASSSTGEETQYF

SEQ ID NO: 440601 - protein, 13 aa, Homo sapiens
  CDR3 for alpha chain variable domain of TCR clone 220301 (TRAV8-3, TRAJ43)
CAVGIYNNNDMRF

SEQ ID NO: 440602 - protein, 16 aa, Homo sapiens
  CDR3 for beta chain variable domain of TCR clone 220301 (TRBV7-2, TRBJ2-5)
CASSLVLWTIQETQYF

SEQ ID NO: 440603 - protein, 15 aa, Homo sapiens
  CDR3 for alpha chain variable domain of TCR clone 220302 (TRAV19, TRAJ9)
CALSEARTGGFKNIF

SEQ ID NO: 440604 - protein, 17 aa, Homo sapiens
  CDR3 for beta chain variable domain of TCR clone 220302 (TRBV28, TRBJ2-5)
CASSTPEGEALQETQYF

SEQ ID NO: 440605 - protein, 13 aa, Homo sapiens
  CDR3 for alpha chain variable domain of TCR clone 220303 (TRAV12-1, TRAJ39)
CVVNYNAGNMLTF

SEQ ID NO: 440606 - protein, 13 aa, Homo sapiens
  CDR3 for beta chain variable domain of TCR clone 220303 (TRBV15, TRBJ2-5)
CATSQIGEETQYF

SEQ ID NO: 440607 - protein, 13 aa, Homo sapiens
  CDR3 for alpha chain variable domain of TCR clone 220304 (TRAV29/DV5, TRAJ29)
CAASAAGNTPLVF

SEQ ID NO: 440608 - protein, 14 aa, Homo sapiens
  CDR3 for beta chain variable domain of TCR clone 220304 (TRBV19, TRBJ2-3)
YASSAPRGTDTQYF

SEQ ID NO: 440609 - protein, 13 aa, Homo sapiens
  CDR3 for alpha chain variable domain of TCR clone 220305 (TRAV20, TRAJ37)
CAGCSSNTGKLIF

SEQ ID NO: 440610 - protein, 15 aa, Homo sapiens
  CDR3 for beta chain variable domain of TCR clone 220305 (TRBV7-2, TRBJ2-1)
CASSFEADEYNEQFF

SEQ ID NO: 440611 - protein, 11 aa, Homo sapiens
  CDR3 for alpha chain variable domain of TCR clone 220306 (TRAV2, TRAJ20)
CAVLNDYKLSF

SEQ ID NO: 440612 - protein, 17 aa, Homo sapiens
  CDR3 for beta chain variable domain of TCR clone 220306 (TRBV11-2, TRBJ2-1)
CASSLYPPGVEYNEQFF

SEQ ID NO: 440613 - protein, 12 aa, Homo sapiens
  CDR3 for alpha chain variable domain of TCR clone 220307 (TRAV2, TRAJ33)
CAVPDSNYQLIW

SEQ ID NO: 440614 - protein, 14 aa, Homo sapiens
  CDR3 for beta chain variable domain of TCR clone 220307 (TRBV12-4, TRBJ2-7)
CASSPRQELYEQYF

SEQ ID NO: 440615 - protein, 15 aa, Homo sapiens
  CDR3 for alpha chain variable domain of TCR clone 220308 (TRAV8-3, TRAJ27)
CAVGASKTNAGKSTF

SEQ ID NO: 440616 - protein, 14 aa, Homo sapiens
  CDR3 for beta chain variable domain of TCR clone 220308 (TRBV11-2, TRBJ2-3)
CASSRLARTDTQYF

SEQ ID NO: 440617 - protein, 13 aa, Homo sapiens
  CDR3 for alpha chain variable domain of TCR clone 220309 (TRAV13-2, TRAJ13)
CAERPWGYQKVTF

SEQ ID NO: 440618 - protein, 15 aa, Homo sapiens
  CDR3 for beta chain variable domain of TCR clone 220309 (TRBV4-1, TRBJ1-4)
CASSDTGGTNEKLFF

SEQ ID NO: 440619 - protein, 16 aa, Homo sapiens
  CDR3 for alpha chain variable domain of TCR clone 220310 (TRAV27, TRAJ52)
CAGAPAGGTSYGKLTF

SEQ ID NO: 440620 - protein, 12 aa, Homo sapiens
  CDR3 for beta chain variable domain of TCR clone 220310 (TRBV27, TRBJ2-1)
CASGGFYNEQFF

SEQ ID NO: 440621 - protein, 14 aa, Homo sapiens
  CDR3 for alpha chain variable domain of TCR clone 220311 (TRAV1-2, TRAJ8)
CAVREDTGFQKLVI

SEQ ID NO: 440622 - protein, 14 aa, Homo sapiens
  CDR3 for beta chain variable domain of TCR clone 220311 (TRBV20-1, TRBJ1-1)
CSARAVNGYTEAFF

SEQ ID NO: 440623 - protein, 16 aa, Homo sapiens
  CDR3 for alpha chain variable domain of TCR clone 220312 (TRAV3, TRAJ37)
CAVRGKESGNTGKLIF

SEQ ID NO: 440624 - protein, 17 aa, Homo sapiens
  CDR3 for beta chain variable domain of TCR clone 220312 (TRBV13, TRBJ2-3)
CASSLSRVAGGRNTQYF

SEQ ID NO: 440625 - protein, 14 aa, Homo sapiens
  CDR3 for alpha chain variable domain of TCR clone 220313 (TRAV13-1, TRAJ40)
CAASMTSGTYEYIF

SEQ ID NO: 440626 - protein, 15 aa, Homo sapiens
  CDR3 for beta chain variable domain of TCR clone 220313 (TRBV7-3, TRBJ2-1)
CASSPTGGGEVEQFF

SEQ ID NO: 440627 - protein, 18 aa, Homo sapiens
  CDR3 for alpha chain variable domain of TCR clone 220314 (TRAV21, TRAJ52)
CAVRPSPAGGTSYGKLTF

SEQ ID NO: 440628 - protein, 15 aa, Homo sapiens
  CDR3 for beta chain variable domain of TCR clone 220314 (TRBV7-3, TRBJ1-6)
CASSSPGRGNSPLHF

SEQ ID NO: 440629 - protein, 14 aa, Homo sapiens
  CDR3 for alpha chain variable domain of TCR clone 220315 (TRAV12-2, TRAJ13)
CAVKKTGGYQKVTL

SEQ ID NO: 440630 - protein, 15 aa, Homo sapiens
  CDR3 for beta chain variable domain of TCR clone 220315 (TRBV7-9, TRBJ2-7)
CASSPTGLRTYEQYF

SEQ ID NO: 440631 - protein, 15 aa, Homo sapiens
  CDR3 for alpha chain variable domain of TCR clone 220316 (TRAV13-1, TRAJ17)
CAASIERAAGHKLTF

SEQ ID NO: 440632 - protein, 12 aa, Homo sapiens
  CDR3 for beta chain variable domain of TCR clone 220316 (TRBV5-7, TRBJ1-1)
CASSLGRGKAFF

SEQ ID NO: 440633 - protein, 15 aa, Homo sapiens
  CDR3 for alpha chain variable domain of TCR clone 220317 (TRAV3, TRAJ11)
CAVRDRGSGYSTLTF

SEQ ID NO: 440634 - protein, 15 aa, Homo sapiens
  CDR3 for beta chain variable domain of TCR clone 220317 (TRBV20-1, TRBJ2-7)
CSARDRVSGMDEQYF

SEQ ID NO: 440635 - protein, 12 aa, Homo sapiens
  CDR3 for alpha chain variable domain of TCR clone 220318 (TRAV12-1, TRAJ40)
CVVKVRTYKYIF

SEQ ID NO: 440636 - protein, 14 aa, Homo sapiens
  CDR3 for beta chain variable domain of TCR clone 220318 (TRBV7-9, TRBJ1-2)
CASSFPLREYGYTF

SEQ ID NO: 440637 - protein, 11 aa, Homo sapiens
  CDR3 for alpha chain variable domain of TCR clone 220319 (TRAV16, TRAJ49)
CALRSGNQFYF

SEQ ID NO: 440638 - protein, 20 aa, Homo sapiens
  CDR3 for beta chain variable domain of TCR clone 220319 (TRBV28, TRBJ2-7)
CASSSGLAGVGTSSTSGQAP

SEQ ID NO: 440639 - protein, 14 aa, Homo sapiens
  CDR3 for alpha chain variable domain of TCR clone 220320 (TRAV26-1, TRAJ38)
CIADNAGNNRKLIW

SEQ ID NO: 440640 - protein, 17 aa, Homo sapiens
  CDR3 for beta chain variable domain of TCR clone 220320 (TRBV7-8, TRBJ2-1)
CASSPPTGTLAYNEQFF

SEQ ID NO: 440641 - protein, 16 aa, Homo sapiens
  CDR3 for alpha chain variable domain of TCR clone 220321 (TRAV26-1, TRAJ53)
CIVRVAMGGSNYKLTF

SEQ ID NO: 440642 - protein, 13 aa, Homo sapiens
  CDR3 for beta chain variable domain of TCR clone 220321 (TRBV7-9, TRBJ1-1)
CASSQDWGAEAFF

SEQ ID NO: 440643 - protein, 11 aa, Homo sapiens
  CDR3 for alpha chain variable domain of TCR clone 220322 (TRAV3, TRAJ21)
CAVGNSNKFYF

SEQ ID NO: 440644 - protein, 16 aa, Homo sapiens
  CDR3 for beta chain variable domain of TCR clone 220322 (TRBV7-3, TRBJ2-2)
CDSSLKRGTLSGELFF

SEQ ID NO: 440645 - protein, 15 aa, Homo sapiens
  CDR3 for alpha chain variable domain of TCR clone 220323 (TRAV3, TRAJ5)
CAVRDRKTGRRALTF

SEQ ID NO: 440646 - protein, 12 aa, Homo sapiens
  CDR3 for beta chain variable domain of TCR clone 220323 (TRBV27, TRBJ2-1)
CASRGFYNEQFF

SEQ ID NO: 440647 - protein, 11 aa, Homo sapiens
  CDR3 for alpha chain variable domain of TCR clone 220324 (TRAV2, TRAJ33)
CAVESNYQLIW

SEQ ID NO: 440648 - protein, 14 aa, Homo sapiens
  CDR3 for beta chain variable domain of TCR clone 220324 (TRBV15, TRBJ1-5)
CATSRGQSNQPQHF

SEQ ID NO: 440649 - protein, 16 aa, Homo sapiens
  CDR3 for alpha chain variable domain of TCR clone 220325 (TRAV30, TRAJ24)
CGTEIVDAESWGNFQF

SEQ ID NO: 440650 - protein, 13 aa, Homo sapiens
  CDR3 for beta chain variable domain of TCR clone 220325 (TRBV7-3, TRBJ1-1)
CASSQDWGAEAFF

SEQ ID NO: 440651 - protein, 13 aa, Homo sapiens
  CDR3 for alpha chain variable domain of TCR clone 220326 (TRAV21, TRAJ27)
CAARPGNAGKSTF

SEQ ID NO: 440652 - protein, 15 aa, Homo sapiens
  CDR3 for beta chain variable domain of TCR clone 220326 (TRBV7-2, TRBJ1-5)
CASSSGQGHAQPQHF

SEQ ID NO: 440653 - protein, 14 aa, Homo sapiens
  CDR3 for alpha chain variable domain of TCR clone 220327 (TRAV16, TRAJ26)
CALSSAYYDQNFVF

SEQ ID NO: 440654 - protein, 16 aa, Homo sapiens
  CDR3 for beta chain variable domain of TCR clone 220327 (TRBV20-1, TRBJ1-4)
CSAPGQGLLTNEKLFF

SEQ ID NO: 440655 - protein, 14 aa, Homo sapiens
  CDR3 for alpha chain variable domain of TCR clone 220328 (TRAV1-1, TRAJ23)
CAVSIYNQGGKLIF

SEQ ID NO: 440656 - protein, 12 aa, Homo sapiens
  CDR3 for beta chain variable domain of TCR clone 220328 (TRBV12-4, TRBJ1-3)
CASSFSGNTIYF

SEQ ID NO: 440657 - protein, 14 aa, Homo sapiens
  CDR3 for alpha chain variable domain of TCR clone 220329 (TRAV35, TRAJ53)
CAGNSGGSNYKLTF

SEQ ID NO: 440658 - protein, 11 aa, Homo sapiens
  CDR3 for beta chain variable domain of TCR clone 220329 (TRBV4-1, TRBJ1-4)
CASKENEELFF

SEQ ID NO: 440659 - protein, 15 aa, Homo sapiens
  CDR3 for alpha chain variable domain of TCR clone 220330 (TRAV29/DV5, TRAJ53)
CAVSSSGGSHYKLTF

SEQ ID NO: 440660 - protein, 17 aa, Homo sapiens
  CDR3 for beta chain variable domain of TCR clone 220330 (TRBV4-1, TRBJ1-6)
CASSQDRNRDYNSPLHF

SEQ ID NO: 440661 - protein, 16 aa, Homo sapiens
  CDR3 for alpha chain variable domain of TCR clone 220331 (TRAV12-1, TRAJ48)
CVVNMVSNFRNEKLTF

SEQ ID NO: 440662 - protein, 18 aa, Homo sapiens
  CDR3 for beta chain variable domain of TCR clone 220331 (TRBV11-2, TRBJ2-6)
CASSLNPFLGTGANVLTF

SEQ ID NO: 440663 - protein, 11 aa, Homo sapiens
  CDR3 for alpha chain variable domain of TCR clone 220332 (TRAV27, TRAJ20)
CAGADDYKLSF

SEQ ID NO: 440664 - protein, 11 aa, Homo sapiens
  CDR3 for beta chain variable domain of TCR clone 220332 (TRBV2, TRBJ1-1)
CHPIPWTEAFF

SEQ ID NO: 440665 - protein, 13 aa, Homo sapiens
  CDR3 for alpha chain variable domain of TCR clone 220333 (TRAV12-2, TRAJ42)
CAVKRGSQGNLIF

SEQ ID NO: 440666 - protein, 14 aa, Homo sapiens
  CDR3 for beta chain variable domain of TCR clone 220333 (TRBV25-1, TRBJ1-1)
YASTHLGGNTEAFF

SEQ ID NO: 440667 - protein, 15 aa, Homo sapiens
  CDR3 for alpha chain variable domain of TCR clone 220334 (TRAV3, TRAJ5)
CAVRDLDTGRRALTF

SEQ ID NO: 440668 - protein, 14 aa, Homo sapiens
  CDR3 for beta chain variable domain of TCR clone 220334 (TRBV12-4, TRBJ1-1)
CASRPGQGRTEAFF

SEQ ID NO: 440669 - protein, 12 aa, Homo sapiens
  CDR3 for alpha chain variable domain of TCR clone 220335 (TRAV3, TRAJ31)
CAVRDGNARLMS

SEQ ID NO: 440670 - protein, 18 aa, Homo sapiens
  CDR3 for beta chain variable domain of TCR clone 220335 (TRBV7-2, TRBJ2-3)
CASSLKREGSGITDTQYF

SEQ ID NO: 440671 - protein, 12 aa, Homo sapiens
  CDR3 for alpha chain variable domain of TCR clone 220336 (TRAV12-3, TRAJ21)
CAMFNNFNKFYF

SEQ ID NO: 440672 - protein, 13 aa, Homo sapiens
  CDR3 for beta chain variable domain of TCR clone 220336 (TRBV20-1, TRBJ1-1)
CSARGGGNTEAFF

SEQ ID NO: 440673 - protein, 14 aa, Homo sapiens
  CDR3 for alpha chain variable domain of TCR clone 220337 (TRAV12-2, TRAJ11)
CAVEGGSGYSTLTF

SEQ ID NO: 440674 - protein, 16 aa, Homo sapiens
  CDR3 for beta chain variable domain of TCR clone 220337 (TRBV19, TRBJ2-1)
CASSKAGPSSYNEQFF

SEQ ID NO: 440675 - protein, 13 aa, Homo sapiens
  CDR3 for alpha chain variable domain of TCR clone 220338 (TRAV13-1, TRAJ39)
CAAGIVMQATCSP

SEQ ID NO: 440676 - protein, 16 aa, Homo sapiens
  CDR3 for beta chain variable domain of TCR clone 220338 (TRBV20-1, TRBJ1-4)
CSAPGQGLLTNEKLFF

SEQ ID NO: 440677 - protein, 14 aa, Homo sapiens
  CDR3 for alpha chain variable domain of TCR clone 220339 (TRAV16, TRAJ33)
CAQSAMDSNYQLIW

SEQ ID NO: 440678 - protein, 12 aa, Homo sapiens
  CDR3 for beta chain variable domain of TCR clone 220339 (TRBV5-1, TRBJ1-2)
CASSQDTYGYTF

SEQ ID NO: 440679 - protein, 13 aa, Homo sapiens
  CDR3 for alpha chain variable domain of TCR clone 220340 (TRAV30, TRAJ26)
CGTEIPLGQNFVF

SEQ ID NO: 440680 - protein, 13 aa, Homo sapiens
  CDR3 for beta chain variable domain of TCR clone 220340 (TRBV7-3, TRBJ1-1)
CASSQDWGAEAFF

SEQ ID NO: 440681 - protein, 17 aa, Homo sapiens
  CDR3 for alpha chain variable domain of TCR clone 220341 (TRAV8-6, TRAJ58)
CAVSSWVGETSGSRLTF

SEQ ID NO: 440682 - protein, 14 aa, Homo sapiens
  CDR3 for beta chain variable domain of TCR clone 220341 (TRBV11-2, TRBJ2-5)
CASSRTGGIETQYF

SEQ ID NO: 440683 - protein, 12 aa, Homo sapiens
  CDR3 for alpha chain variable domain of TCR clone 220342 (TRAV12-3, TRAJ5)
CAMDTGRRALTF

SEQ ID NO: 440684 - protein, 13 aa, Homo sapiens
  CDR3 for beta chain variable domain of TCR clone 220342 (TRBV7-7, TRBJ2-2)
CASSLTSAGELFL

SEQ ID NO: 440685 - protein, 16 aa, Homo sapiens
  CDR3 for alpha chain variable domain of TCR clone 220343 (TRAV4, TRAJ22)
CLVGDLYSGSARQLTF

SEQ ID NO: 440686 - protein, 16 aa, Homo sapiens
  CDR3 for beta chain variable domain of TCR clone 220343 (TRBV4-1, TRBJ1-5)
CASSQGGHTTNQPQHF

SEQ ID NO: 440687 - protein, 13 aa, Homo sapiens
  CDR3 for alpha chain variable domain of TCR clone 220344 (TRAV8-6, TRAJ49)
CAVITNTGNQFYF

SEQ ID NO: 440688 - protein, 16 aa, Homo sapiens
  CDR3 for beta chain variable domain of TCR clone 220344 (TRBV11-2, TRBJ2-1)
CASARGSYSHHNEQFF

SEQ ID NO: 440689 - protein, 15 aa, Homo sapiens
  CDR3 for alpha chain variable domain of TCR clone 220345 (TRAV4, TRAJ27)
CLVGDEGTNAGKSTF

SEQ ID NO: 440690 - protein, 14 aa, Homo sapiens
  CDR3 for beta chain variable domain of TCR clone 220345 (TRBV7-2, TRBJ2-7)
CASSPKTSFYEQYF

SEQ ID NO: 440691 - protein, 13 aa, Homo sapiens
  CDR3 for alpha chain variable domain of TCR clone 220346 (TRAV21, TRAJ27)
CAARPGHAGQSTF

SEQ ID NO: 440692 - protein, 16 aa, Homo sapiens
  CDR3 for beta chain variable domain of TCR clone 220346 (TRBV6-1, TRBJ2-1)
CASILRQGSSYNEQFF

SEQ ID NO: 440693 - protein, 16 aa, Homo sapiens
  CDR3 for alpha chain variable domain of TCR clone 220347 (TRAV1-1, TRAJ29)
CAVRSTRNSGNTPLVF

SEQ ID NO: 440694 - protein, 18 aa, Homo sapiens
  CDR3 for beta chain variable domain of TCR clone 220347 (TRBV7-2, TRBJ2-3)
CASSLKREGSGITDTQYF

SEQ ID NO: 440695 - protein, 18 aa, Homo sapiens
  CDR3 for alpha chain variable domain of TCR clone 220348 (TRAV13-1, TRAJ52)
CEASKRSAGGTSYGKLTF

SEQ ID NO: 440696 - protein, 13 aa, Homo sapiens
  CDR3 for beta chain variable domain of TCR clone 220348 (TRBV12-4, TRBJ1-2)
CASSLRQGKGYTF

SEQ ID NO: 440697 - protein, 15 aa, Homo sapiens
  CDR3 for alpha chain variable domain of TCR clone 220349 (TRAV26-1, TRAJ22)
CIVRVSFWFCKATDL

SEQ ID NO: 440698 - protein, 11 aa, Homo sapiens
  CDR3 for beta chain variable domain of TCR clone 220349 (TRBV20-1, TRBJ2-7)
CSARTSYEQYF

SEQ ID NO: 440699 - protein, 15 aa, Homo sapiens
  CDR3 for alpha chain variable domain of TCR clone 220350 (TRAV3, TRAJ22)
CAVRDRGVSARQLTF

SEQ ID NO: 440700 - protein, 18 aa, Homo sapiens
  CDR3 for beta chain variable domain of TCR clone 220350 (TRBV28, TRBJ2-1)
CASSSTSGRANSYNEQFF

SEQ ID NO: 440701 - protein, 12 aa, Homo sapiens
  CDR3 for alpha chain variable domain of TCR clone 220351 (TRAV2, TRAJ5)
CALDTGRRALTF

SEQ ID NO: 440702 - protein, 15 aa, Homo sapiens
  CDR3 for beta chain variable domain of TCR clone 220351 (TRBV10-3, TRBJ2-1)
CAISDVQDRAYEHFF

SEQ ID NO: 440703 - protein, 16 aa, Homo sapiens
  CDR3 for alpha chain variable domain of TCR clone 220352 (TRAV14/DV4, TRAJ17)
CAMREAGRAAGNKLTF

SEQ ID NO: 440704 - protein, 17 aa, Homo sapiens
  CDR3 for beta chain variable domain of TCR clone 220352 (TRBV13, TRBJ2-3)
CASRLSRVAGGRNTQYF

SEQ ID NO: 440705 - protein, 16 aa, Homo sapiens
  CDR3 for alpha chain variable domain of TCR clone 220353 (TRAV30, TRAJ24)
CGTEIVDADSWGKFQF

SEQ ID NO: 440706 - protein, 14 aa, Homo sapiens
  CDR3 for beta chain variable domain of TCR clone 220353 (TRBV18, TRBJ2-7)
CASSPRGGSYEQYF

SEQ ID NO: 440707 - protein, 13 aa, Homo sapiens
  CDR3 for alpha chain variable domain of TCR clone 220354 (TRAV13-2, TRAJ13)
CAERPGGYQKVTF

SEQ ID NO: 440708 - protein, 13 aa, Homo sapiens
  CDR3 for beta chain variable domain of TCR clone 220354 (TRBV7-9, TRBJ2-3)
CASSPGSTDTQYF

SEQ ID NO: 440709 - protein, 13 aa, Homo sapiens
  CDR3 for alpha chain variable domain of TCR clone 220355 (TRAV29/DV5, TRAJ31)
CAASRNNNARLMI

SEQ ID NO: 440710 - protein, 16 aa, Homo sapiens
  CDR3 for beta chain variable domain of TCR clone 220355 (TRBV15, TRBJ1-2)
CATSRGPRTGGGGYTF

SEQ ID NO: 440711 - protein, 14 aa, Homo sapiens
  CDR3 for alpha chain variable domain of TCR clone 220356 (TRAV9-2, TRAJ39)
CALYIYNAGNMHTF

SEQ ID NO: 440712 - protein, 15 aa, Homo sapiens
  CDR3 for beta chain variable domain of TCR clone 220356 (TRBV20-1, TRBJ1-1)
CSASRGVTGNTEAFF

SEQ ID NO: 440713 - protein, 13 aa, Homo sapiens
  CDR3 for alpha chain variable domain of TCR clone 220357 (TRAV12-3, TRAJ7)
CAMTPYGNSRPAF

SEQ ID NO: 440714 - protein, 16 aa, Homo sapiens
  CDR3 for beta chain variable domain of TCR clone 220357 (TRBV20-1, TRBJ1-4)
CSARPYGGELNEKLFF

SEQ ID NO: 440715 - protein, 10 aa, Homo sapiens
  CDR3 for alpha chain variable domain of TCR clone 220358 (TRAV36/DV7, TRAJ49)
CALTGNQFYF

SEQ ID NO: 440716 - protein, 14 aa, Homo sapiens
  CDR3 for beta chain variable domain of TCR clone 220358 (TRBV7-9, TRBJ2-2)
CASSGLADTGELFF

SEQ ID NO: 440717 - protein, 14 aa, Homo sapiens
  CDR3 for alpha chain variable domain of TCR clone 220359 (TRAV12-2, TRAJ45)
CAVNKGGGADGLTF

SEQ ID NO: 440718 - protein, 13 aa, Homo sapiens
  CDR3 for beta chain variable domain of TCR clone 220359 (TRBV7-3, TRBJ1-1)
CASSQDWGAEAFF

SEQ ID NO: 440719 - protein, 17 aa, Homo sapiens
  CDR3 for alpha chain variable domain of TCR clone 220360 (TRAV12-1, TRAJ8)
CVVNPKRVNTGFQKLLF

SEQ ID NO: 440720 - protein, 14 aa, Homo sapiens
  CDR3 for beta chain variable domain of TCR clone 220360 (TRBV3-1, TRBJ2-7)
CASSRTSGKEEQYF

SEQ ID NO: 440721 - protein, 14 aa, Homo sapiens
  CDR3 for alpha chain variable domain of TCR clone 220361 (TRAV1-2, TRAJ8)
CAVRWDTGFQKLVF

SEQ ID NO: 440722 - protein, 16 aa, Homo sapiens
  CDR3 for beta chain variable domain of TCR clone 220361 (TRBV7-2, TRBJ2-5)
CASSLAVSGRGETQYF

SEQ ID NO: 440723 - protein, 16 aa, Homo sapiens
  CDR3 for alpha chain variable domain of TCR clone 220362 (TRAV38-1, TRAJ32)
CAFMPFLGGATNKLIV

SEQ ID NO: 440724 - protein, 13 aa, Homo sapiens
  CDR3 for beta chain variable domain of TCR clone 220362 (TRBV7-9, TRBJ2-7)
CASSFAGAYEQYF

SEQ ID NO: 440725 - protein, 13 aa, Homo sapiens
  CDR3 for alpha chain variable domain of TCR clone 220363 (TRAV14/DV4, TRAJ20)
CATRESNDYKLSF

SEQ ID NO: 440726 - protein, 15 aa, Homo sapiens
  CDR3 for beta chain variable domain of TCR clone 220363 (TRBV7-9, TRBJ1-1)
CASSRPGTANTEAFF

SEQ ID NO: 440727 - protein, 12 aa, Homo sapiens
  CDR3 for alpha chain variable domain of TCR clone 220364 (TRAV12-3, TRAJ20)
CAMVRGDYKLSF

SEQ ID NO: 440728 - protein, 18 aa, Homo sapiens
  CDR3 for beta chain variable domain of TCR clone 220364 (TRBV7-6, TRBJ2-1)
CASSPRTSGMSSYNEQFF

SEQ ID NO: 440729 - protein, 13 aa, Homo sapiens
  CDR3 for alpha chain variable domain of TCR clone 220365 (TRAV8-3, TRAJ44)
CAVVPGTASTLTF

SEQ ID NO: 440730 - protein, 13 aa, Homo sapiens
  CDR3 for beta chain variable domain of TCR clone 220365 (TRBV10-3, TRBJ2-7)
CASKLAVNYEQYF

SEQ ID NO: 440731 - protein, 15 aa, Homo sapiens
  CDR3 for alpha chain variable domain of TCR clone 220366 (TRAV17, TRAJ57)
CATGPSQGGSERLVF

SEQ ID NO: 440732 - protein, 15 aa, Homo sapiens
  CDR3 for beta chain variable domain of TCR clone 220366 (TRBV27, TRBJ1-6)
CASSFDRGLGSPPHF

SEQ ID NO: 440733 - protein, 14 aa, Homo sapiens
  CDR3 for alpha chain variable domain of TCR clone 220367 (TRAV17, TRAJ57)
CATDPQGGSEKLVF

SEQ ID NO: 440734 - protein, 11 aa, Homo sapiens
  CDR3 for beta chain variable domain of TCR clone 220367 (TRBV18, TRBJ2-5)
CASSPRETQYF

SEQ ID NO: 440735 - protein, 14 aa, Homo sapiens
  CDR3 for alpha chain variable domain of TCR clone 220368 (TRAV12-2, TRAJ45)
CAVYSGGGADGLTF

SEQ ID NO: 440736 - protein, 14 aa, Homo sapiens
  CDR3 for beta chain variable domain of TCR clone 220368 (TRBV7-9, TRBJ2-5)
CASSLDTAQETQYF

SEQ ID NO: 440737 - protein, 16 aa, Homo sapiens
  CDR3 for alpha chain variable domain of TCR clone 220369 (TRAV3, TRAJ37)
CAVRPHGSGNTGKLIF

SEQ ID NO: 440738 - protein, 16 aa, Homo sapiens
  CDR3 for beta chain variable domain of TCR clone 220369 (TRBV7-3, TRBJ2-2)
CASSYPPGDETGELFF

SEQ ID NO: 440739 - protein, 17 aa, Homo sapiens
  CDR3 for alpha chain variable domain of TCR clone 220370 (TRAV8-4, TRAJ11)
CAVSDRGENSGYSTLTF

SEQ ID NO: 440740 - protein, 17 aa, Homo sapiens
  CDR3 for beta chain variable domain of TCR clone 220370 (TRBV20-1, TRBJ2-1)
CSARSPSGGPPTMSSSS

SEQ ID NO: 440741 - protein, 13 aa, Homo sapiens
  CDR3 for alpha chain variable domain of TCR clone 220371 (TRAV3, TRAJ21)
CAVREPDVNKFYF

SEQ ID NO: 440742 - protein, 14 aa, Homo sapiens
  CDR3 for beta chain variable domain of TCR clone 220371 (TRBV4-1, TRBJ2-2)
CASSQAVNTGELFF

SEQ ID NO: 440743 - protein, 13 aa, Homo sapiens
  CDR3 for alpha chain variable domain of TCR clone 220372 (TRAV12-1, TRAJ4)
CVVSLGGYNKLIF

SEQ ID NO: 440744 - protein, 16 aa, Homo sapiens
  CDR3 for beta chain variable domain of TCR clone 220372 (TRBV12-4, TRBJ2-7)
CASSPEGQGSSYEQYF

SEQ ID NO: 440745 - protein, 11 aa, Homo sapiens
  CDR3 for alpha chain variable domain of TCR clone 220373 (TRAV3, TRAJ21)
CAVGNFNKFYF

SEQ ID NO: 440746 - protein, 14 aa, Homo sapiens
  CDR3 for beta chain variable domain of TCR clone 220373 (TRBV7-2, TRBJ2-2)
CASRGQGAAGELFF

SEQ ID NO: 440747 - protein, 14 aa, Homo sapiens
  CDR3 for alpha chain variable domain of TCR clone 220374 (TRAV12-2, TRAJ13)
CAVKKTGGYPKVTF

SEQ ID NO: 440748 - protein, 14 aa, Homo sapiens
  CDR3 for beta chain variable domain of TCR clone 220374 (TRBV19, TRBJ2-1)
CASPTFVLSGERFF

SEQ ID NO: 440749 - protein, 11 aa, Homo sapiens
  CDR3 for alpha chain variable domain of TCR clone 220375 (TRAV12-2, TRAJ33)
CAMTSNYQLIW

SEQ ID NO: 440750 - protein, 14 aa, Homo sapiens
  CDR3 for beta chain variable domain of TCR clone 220375 (TRBV28, TRBJ2-2)
CASRIRSGTGELFF

SEQ ID NO: 440751 - protein, 14 aa, Homo sapiens
  CDR3 for alpha chain variable domain of TCR clone 220376 (TRAV6, TRAJ6)
CALPTSGGSYIPTF

SEQ ID NO: 440752 - protein, 17 aa, Homo sapiens
  CDR3 for beta chain variable domain of TCR clone 220376 (TRBV20-1, TRBJ2-2)
CSASGSGQGGLTGELFF

SEQ ID NO: 440753 - protein, 17 aa, Homo sapiens
  CDR3 for alpha chain variable domain of TCR clone 220377 (TRAV35, TRAJ52)
CAGQLAAGGTSYGKLTF

SEQ ID NO: 440754 - protein, 12 aa, Homo sapiens
  CDR3 for beta chain variable domain of TCR clone 220377 (TRBV20-1, TRBJ2-7)
CSAGRRQGEQYF

SEQ ID NO: 440755 - protein, 14 aa, Homo sapiens
  CDR3 for alpha chain variable domain of TCR clone 220378 (TRAV1-2, TRAJ8)
CAVREDTGFQKLVF

SEQ ID NO: 440756 - protein, 19 aa, Homo sapiens
  CDR3 for beta chain variable domain of TCR clone 220378 (TRBV28, TRBJ2-1)
CASSFSIRSSGRTRYEQFF

SEQ ID NO: 440757 - protein, 14 aa, Homo sapiens
  CDR3 for alpha chain variable domain of TCR clone 220379 (TRAV12-2, TRAJ9)
CAVSFGTGGFKTIF

SEQ ID NO: 440758 - protein, 12 aa, Homo sapiens
  CDR3 for beta chain variable domain of TCR clone 220379 (TRBV19, TRBJ2-1)
CASSRQGAEQFF

SEQ ID NO: 440759 - protein, 12 aa, Homo sapiens
  CDR3 for alpha chain variable domain of TCR clone 220380 (TRAV1-2, TRAJ24)
CAVGGSWGKFQF

SEQ ID NO: 440760 - protein, 13 aa, Homo sapiens
  CDR3 for beta chain variable domain of TCR clone 220380 (TRBV20-1, TRBJ1-1)
CSASKRELTEAFF

SEQ ID NO: 440761 - protein, 13 aa, Homo sapiens
  CDR3 for alpha chain variable domain of TCR clone 220381 (TRAV8-1, TRAJ13)
CAVSKGGYQKVTF

SEQ ID NO: 440762 - protein, 18 aa, Homo sapiens
  CDR3 for beta chain variable domain of TCR clone 220381 (TRBV11-2, TRBJ2-7)
CASSWRTVKTGQSYEQYF

SEQ ID NO: 440763 - protein, 15 aa, Homo sapiens
  CDR3 for alpha chain variable domain of TCR clone 220382 (TRAV3, TRAJ22)
CAVRDRGGSARQLTF

SEQ ID NO: 440764 - protein, 15 aa, Homo sapiens
  CDR3 for beta chain variable domain of TCR clone 220382 (TRBV11-3, TRBJ2-7)
CASSPRDRNPYEQYF

SEQ ID NO: 440765 - protein, 17 aa, Homo sapiens
  CDR3 for alpha chain variable domain of TCR clone 220383 (TRAV20, TRAJ42)
CAVQAWGYAGSQGNLIF

SEQ ID NO: 440766 - protein, 16 aa, Homo sapiens
  CDR3 for beta chain variable domain of TCR clone 220383 (TRBV29-1, TRBJ2-5)
CSVEGLAGDYQETQYF

SEQ ID NO: 440767 - protein, 11 aa, Homo sapiens
  CDR3 for alpha chain variable domain of TCR clone 220384 (TRAV35, TRAJ30)
CAPGGDDKIIF

SEQ ID NO: 440768 - protein, 16 aa, Homo sapiens
  CDR3 for beta chain variable domain of TCR clone 220384 (TRBV9, TRBJ2-2)
CASSAMGKGNTGELFF

SEQ ID NO: 440769 - protein, 12 aa, Homo sapiens
  CDR3 for alpha chain variable domain of TCR clone 220385 (TRAV16, TRAJ10)
CSRTGGGNKLTL

SEQ ID NO: 440770 - protein, 17 aa, Homo sapiens
  CDR3 for beta chain variable domain of TCR clone 220385 (TRBV29-1, TRBJ2-1)
CSVEGPQGKSSYNEQFF

SEQ ID NO: 440771 - protein, 11 aa, Homo sapiens
  CDR3 for alpha chain variable domain of TCR clone 220386 (TRAV12-1, TRAJ8)
CVVTGFQKLVF

SEQ ID NO: 440772 - protein, 15 aa, Homo sapiens
  CDR3 for beta chain variable domain of TCR clone 220386 (TRBV10-2, TRBJ2-6)
CASSEQGTGANVLTF

SEQ ID NO: 440773 - protein, 13 aa, Homo sapiens
  CDR3 for alpha chain variable domain of TCR clone 220387 (TRAV12-1, TRAJ26)
SATYPYYGQNFVF

SEQ ID NO: 440774 - protein, 15 aa, Homo sapiens
  CDR3 for beta chain variable domain of TCR clone 220387 (TRBV5-1, TRBJ2-6)
CASSLDPSGANDLTF

SEQ ID NO: 440775 - protein, 13 aa, Homo sapiens
  CDR3 for alpha chain variable domain of TCR clone 220388 (TRAV29/DV5, TRAJ31)
CTASRNNNARLMF

SEQ ID NO: 440776 - protein, 13 aa, Homo sapiens
  CDR3 for beta chain variable domain of TCR clone 220388 (TRBV7-2, TRBJ2-4)
CASSREHANIQYF

SEQ ID NO: 440777 - protein, 12 aa, Homo sapiens
  CDR3 for alpha chain variable domain of TCR clone 220389 (TRAV12-3, TRAJ48)
CAMRIGNEKLTF

SEQ ID NO: 440778 - protein, 16 aa, Homo sapiens
  CDR3 for beta chain variable domain of TCR clone 220389 (TRBV6-1, TRBJ1-5)
CASSEVYRADNQPQHF

SEQ ID NO: 440779 - protein, 17 aa, Homo sapiens
  CDR3 for alpha chain variable domain of TCR clone 220390 (TRAV4, TRAJ31)
CLVVTMPDSCLEMELSW

SEQ ID NO: 440780 - protein, 16 aa, Homo sapiens
  CDR3 for beta chain variable domain of TCR clone 220390 (TRBV7-2, TRBJ2-5)
CASSSKWLSGQETQYF

SEQ ID NO: 440781 - protein, 11 aa, Homo sapiens
  CDR3 for alpha chain variable domain of TCR clone 220391 (TRAV2, TRAJ33)
CAVDSNYQLIW

SEQ ID NO: 440782 - protein, 13 aa, Homo sapiens
  CDR3 for beta chain variable domain of TCR clone 220391 (TRBV19, TRBJ2-7)
CASGPRQSYEQYF

SEQ ID NO: 440783 - protein, 12 aa, Homo sapiens
  CDR3 for alpha chain variable domain of TCR clone 220392 (TRAV12-3, TRAJ17)
CAMTLTGNKLTF

SEQ ID NO: 440784 - protein, 11 aa, Homo sapiens
  CDR3 for beta chain variable domain of TCR clone 220392 (TRBV24-1, TRBJ1-1)
CATSERFRAFF

SEQ ID NO: 440785 - protein, 12 aa, Homo sapiens
  CDR3 for alpha chain variable domain of TCR clone 220393 (TRAV12-1, TRAJ40)
CVVYSGTYKYIF

SEQ ID NO: 440786 - protein, 18 aa, Homo sapiens
  CDR3 for beta chain variable domain of TCR clone 220393 (TRBV11-2, TRBJ2-3)
CAGSLGEASRGAPNTQYF

SEQ ID NO: 440787 - protein, 11 aa, Homo sapiens
  CDR3 for alpha chain variable domain of TCR clone 220394 (TRAV8-3, TRAJ34)
CAIPGKLIFGT

SEQ ID NO: 440788 - protein, 15 aa, Homo sapiens
  CDR3 for beta chain variable domain of TCR clone 220394 (TRBV5-6, TRBJ2-1)
CASSRRLAGDNEQFF

SEQ ID NO: 440789 - protein, 13 aa, Homo sapiens
  CDR3 for alpha chain variable domain of TCR clone 220395 (TRAV26-2, TRAJ43)
CILRAVNNNDMRF

SEQ ID NO: 440790 - protein, 16 aa, Homo sapiens
  CDR3 for beta chain variable domain of TCR clone 220395 (TRBV7-6, TRBJ1-6)
CASSLSSRIGDSPLLF

SEQ ID NO: 440791 - protein, 12 aa, Homo sapiens
  CDR3 for alpha chain variable domain of TCR clone 220396 (TRAV12-2, TRAJ10)
WGVTGGGNKPTF

SEQ ID NO: 440792 - protein, 16 aa, Homo sapiens
  CDR3 for beta chain variable domain of TCR clone 220396 (TRBV24-1, TRBJ2-3)
CATSDRRQDLTDTQYF

SEQ ID NO: 440793 - protein, 15 aa, Homo sapiens
  CDR3 for alpha chain variable domain of TCR clone 220397 (TRAV27, TRAJ38)
CAARRNAGNNRKLIW

SEQ ID NO: 440794 - protein, 15 aa, Homo sapiens
  CDR3 for beta chain variable domain of TCR clone 220397 (TRBV12-4, TRBJ2-5)
CASSPPAGLQETQYF

SEQ ID NO: 440795 - protein, 14 aa, Homo sapiens
  CDR3 for alpha chain variable domain of TCR clone 220398 (TRAV20, TRAJ32)
CCGRYGGATNKLIF

SEQ ID NO: 440796 - protein, 11 aa, Homo sapiens
  CDR3 for beta chain variable domain of TCR clone 220398 (TRBV7-8, TRBJ2-7)
CASSLSLEQYF

SEQ ID NO: 440797 - protein, 16 aa, Homo sapiens
  CDR3 for alpha chain variable domain of TCR clone 220399 (TRAV30, TRAJ24)
CGTEIVDADSWGKFQF

SEQ ID NO: 440798 - protein, 11 aa, Homo sapiens
  CDR3 for beta chain variable domain of TCR clone 220399 (TRBV20-1, TRBJ2-7)
CSARTSYEQYF

SEQ ID NO: 440799 - protein, 15 aa, Homo sapiens
  CDR3 for alpha chain variable domain of TCR clone 220400 (TRAV26-1, TRAJ3)
CIVRSGYSSASKIIF

SEQ ID NO: 440800 - protein, 14 aa, Homo sapiens
  CDR3 for beta chain variable domain of TCR clone 220400 (TRBV13, TRBJ2-5)
CASYRRLADETQYF

SEQ ID NO: 440801 - protein, 17 aa, Homo sapiens
  CDR3 for alpha chain variable domain of TCR clone 220401 (TRAV16, TRAJ58)
CITVLSNGETSGSRLTF

SEQ ID NO: 440802 - protein, 14 aa, Homo sapiens
  CDR3 for beta chain variable domain of TCR clone 220401 (TRBV7-6, TRBJ2-3)
CASSLGTVTDTQYF

SEQ ID NO: 440803 - protein, 12 aa, Homo sapiens
  CDR3 for alpha chain variable domain of TCR clone 220402 (TRAV13-2, TRAJ23)
CAERHRGGKLVF

SEQ ID NO: 440804 - protein, 18 aa, Homo sapiens
  CDR3 for beta chain variable domain of TCR clone 220402 (TRBV11-2, TRBJ1-1)
CASSLRQGGDTRKLSLDK

SEQ ID NO: 440805 - protein, 17 aa, Homo sapiens
  CDR3 for alpha chain variable domain of TCR clone 220403 (TRAV3, TRAJ6)
CAVRDGPRAGGSYIPTF

SEQ ID NO: 440806 - protein, 11 aa, Homo sapiens
  CDR3 for beta chain variable domain of TCR clone 220403 (TRBV2, TRBJ1-1)
CASREGTEAFF

SEQ ID NO: 440807 - protein, 17 aa, Homo sapiens
  CDR3 for alpha chain variable domain of TCR clone 220404 (TRAV13-1, TRAJ28)
CAASPPYSGAGSYQLTF

SEQ ID NO: 440808 - protein, 15 aa, Homo sapiens
  CDR3 for beta chain variable domain of TCR clone 220404 (TRBV6-3, TRBJ2-2)
CASSFLAKLTGELFF

SEQ ID NO: 440809 - protein, 12 aa, Homo sapiens
  CDR3 for alpha chain variable domain of TCR clone 220405 (TRAV8-6, TRAJ22)
CAVNPGTRQLTF

SEQ ID NO: 440810 - protein, 16 aa, Homo sapiens
  CDR3 for beta chain variable domain of TCR clone 220405 (TRBV3-1, TRBJ2-7)
CASSQGATGVAYEQYF

SEQ ID NO: 440811 - protein, 15 aa, Homo sapiens
  CDR3 for alpha chain variable domain of TCR clone 220406 (TRAV3, TRAJ39)
CAVRDRYNAGNMLTF

SEQ ID NO: 440812 - protein, 17 aa, Homo sapiens
  CDR3 for beta chain variable domain of TCR clone 220406 (TRBV27, TRBJ2-7)
CASSCGPGTGRSYEQYF

SEQ ID NO: 440813 - protein, 12 aa, Homo sapiens
  CDR3 for alpha chain variable domain of TCR clone 220407 (TRAV2, TRAJ32)
CAVGGAANKLIF

SEQ ID NO: 440814 - protein, 15 aa, Homo sapiens
  CDR3 for beta chain variable domain of TCR clone 220407 (TRBV7-2, TRBJ2-1)
CASSSRTSREDEQFF

SEQ ID NO: 440815 - protein, 15 aa, Homo sapiens
  CDR3 for alpha chain variable domain of TCR clone 220408 (TRAV4, TRAJ39)
CLVGPNNSACNMLTF

SEQ ID NO: 440816 - protein, 16 aa, Homo sapiens
  CDR3 for beta chain variable domain of TCR clone 220408 (TRBV13, TRBJ2-2)
CASSPRTGEHTGELFF

SEQ ID NO: 440817 - protein, 12 aa, Homo sapiens
  CDR3 for alpha chain variable domain of TCR clone 220409 (TRAV12-1, TRAJ40)
CVVSSGTYKYIF

SEQ ID NO: 440818 - protein, 14 aa, Homo sapiens
  CDR3 for beta chain variable domain of TCR clone 220409 (TRBV20-1, TRBJ2-2)
CSAPDTANTGGLFF

SEQ ID NO: 440819 - protein, 14 aa, Homo sapiens
  CDR3 for alpha chain variable domain of TCR clone 220410 (TRAV26-1, TRAJ11)
CIVPLYSGYSTLTF

SEQ ID NO: 440820 - protein, 17 aa, Homo sapiens
  CDR3 for beta chain variable domain of TCR clone 220410 (TRBV11-2, TRBJ2-1)
CASSLYPPGVEYNEQFF

SEQ ID NO: 440821 - protein, 16 aa, Homo sapiens
  CDR3 for alpha chain variable domain of TCR clone 220411 (TRAV4, )
CIDIQNPDPAVYQLRD

SEQ ID NO: 440822 - protein, 19 aa, Homo sapiens
  CDR3 for beta chain variable domain of TCR clone 220411 (TRBV19, TRBJ2-5)
CASSIGQVTDFFLGETQYF

SEQ ID NO: 440823 - protein, 14 aa, Homo sapiens
  CDR3 for alpha chain variable domain of TCR clone 220412 (TRAV12-2, TRAJ40)
CAVKIPSGTYKYIF

SEQ ID NO: 440824 - protein, 14 aa, Homo sapiens
  CDR3 for beta chain variable domain of TCR clone 220412 (TRBV19, TRBJ2-1)
YASPTFVLSGEQFF

SEQ ID NO: 440825 - protein, 16 aa, Homo sapiens
  CDR3 for alpha chain variable domain of TCR clone 220413 (TRAV38-1, TRAJ54)
CAFMKHAVLGAQKLGF

SEQ ID NO: 440826 - protein, 12 aa, Homo sapiens
  CDR3 for beta chain variable domain of TCR clone 220413 (TRBV11-2, TRBJ2-2)
CASSLGGGELFF

SEQ ID NO: 440827 - protein, 17 aa, Homo sapiens
  CDR3 for alpha chain variable domain of TCR clone 220414 (TRAV3, TRAJ6)
CAVRGGPRAGGSYLPTF

SEQ ID NO: 440828 - protein, 14 aa, Homo sapiens
  CDR3 for beta chain variable domain of TCR clone 220414 (TRBV7-2, TRBJ2-7)
CASSPKTSFYEQYF

SEQ ID NO: 440829 - protein, 15 aa, Homo sapiens
  CDR3 for alpha chain variable domain of TCR clone 220415 (TRAV23/DV6, TRAJ13)
CAAWPGGGGYQKVTF

SEQ ID NO: 440830 - protein, 12 aa, Homo sapiens
  CDR3 for beta chain variable domain of TCR clone 220415 (TRBV2, TRBJ2-1)
CAYGPPGNEQFF

SEQ ID NO: 440831 - protein, 13 aa, Homo sapiens
  CDR3 for alpha chain variable domain of TCR clone 220416 (TRAV12-1, TRAJ33)
CGDAPDSNYQLIW

SEQ ID NO: 440832 - protein, 12 aa, Homo sapiens
  CDR3 for beta chain variable domain of TCR clone 220416 (TRBV11-2, TRBJ2-2)
CASRLGGGELFF

SEQ ID NO: 440833 - protein, 11 aa, Homo sapiens
  CDR3 for alpha chain variable domain of TCR clone 220417 (TRAV1-1, TRAJ20)
CAVFNDYKLSF

SEQ ID NO: 440834 - protein, 16 aa, Homo sapiens
  CDR3 for beta chain variable domain of TCR clone 220417 (TRBV29-1, TRBJ2-2)
CSVEKTSEGNTGEMFF

SEQ ID NO: 440835 - protein, 14 aa, Homo sapiens
  CDR3 for alpha chain variable domain of TCR clone 220418 (TRAV26-1, TRAJ21)
CIVRPPYNFNKFYF

SEQ ID NO: 440836 - protein, 15 aa, Homo sapiens
  CDR3 for beta chain variable domain of TCR clone 220418 (TRBV7-2, TRBJ2-1)
CASSLASGRVNEQFF

SEQ ID NO: 440837 - protein, 16 aa, Homo sapiens
  CDR3 for alpha chain variable domain of TCR clone 220419 (TRAV8-3, TRAJ52)
CAVQPAGGTSYGKLTF

SEQ ID NO: 440838 - protein, 15 aa, Homo sapiens
  CDR3 for beta chain variable domain of TCR clone 220419 (TRBV11-2, TRBJ2-7)
CASSLAGWVATEQYF

SEQ ID NO: 440839 - protein, 13 aa, Homo sapiens
  CDR3 for alpha chain variable domain of TCR clone 220420 (TRAV1-2, TRAJ12)
CAVSMDSSYKLIF

SEQ ID NO: 440840 - protein, 15 aa, Homo sapiens
  CDR3 for beta chain variable domain of TCR clone 220420 (TRBV27, TRBJ2-5)
CASSLIPSGVETRYF

SEQ ID NO: 440841 - protein, 10 aa, Homo sapiens
  CDR3 for alpha chain variable domain of TCR clone 220421 (TRAV30, TRAJ48)
SGIGNEKLTF

SEQ ID NO: 440842 - protein, 13 aa, Homo sapiens
  CDR3 for beta chain variable domain of TCR clone 220421 (TRBV29-1, TRBJ2-7)
CSVGPSGGYEQYF

SEQ ID NO: 440843 - protein, 12 aa, Homo sapiens
  CDR3 for alpha chain variable domain of TCR clone 220422 (TRAV3, TRAJ26)
CSVRDYGQNFVF

SEQ ID NO: 440844 - protein, 16 aa, Homo sapiens
  CDR3 for beta chain variable domain of TCR clone 220422 (TRBV11-2, TRBJ1-2)
SASSPSGREANYGYTF

SEQ ID NO: 440845 - protein, 18 aa, Homo sapiens
  CDR3 for alpha chain variable domain of TCR clone 220423 (TRAV13-1, TRAJ52)
CAAKNTNAVGTSYGKLTF

SEQ ID NO: 440846 - protein, 15 aa, Homo sapiens
  CDR3 for beta chain variable domain of TCR clone 220423 (TRBV6-1, TRBJ2-3)
CASSERGGITDTQYF

SEQ ID NO: 440847 - protein, 12 aa, Homo sapiens
  CDR3 for alpha chain variable domain of TCR clone 220424 (TRAV41, TRAJ34)
CAVVYNTDKLIF

SEQ ID NO: 440848 - protein, 13 aa, Homo sapiens
  CDR3 for beta chain variable domain of TCR clone 220424 (TRBV7-9, TRBJ2-1)
CASSWVSYNEQFF

SEQ ID NO: 440849 - protein, 14 aa, Homo sapiens
  CDR3 for alpha chain variable domain of TCR clone 220425 (TRAV16, TRAJ11)
CALSGLSGYSTLTF

SEQ ID NO: 440850 - protein, 14 aa, Homo sapiens
  CDR3 for beta chain variable domain of TCR clone 220425 (TRBV4-1, TRBJ2-2)
CASSQAVNTGELFF

SEQ ID NO: 440851 - protein, 12 aa, Homo sapiens
  CDR3 for alpha chain variable domain of TCR clone 220426 (TRAV2, TRAJ26)
CAGSPRRLWSEF

SEQ ID NO: 440852 - protein, 13 aa, Homo sapiens
  CDR3 for beta chain variable domain of TCR clone 220426 (TRBV7-9, TRBJ1-2)
CASSLKQNYGYTF

SEQ ID NO: 440853 - protein, 23 aa, Homo sapiens
  CDR3 for alpha chain variable domain of TCR clone 220427 (TRAV8-6, TRAJ38)
CAVRNAGNNHIQNPDPAVYQLRD

SEQ ID NO: 440854 - protein, 15 aa, Homo sapiens
  CDR3 for beta chain variable domain of TCR clone 220427 (TRBV4-1, TRBJ2-2)
CASSEGQGITGQLFF

SEQ ID NO: 440855 - protein, 14 aa, Homo sapiens
  CDR3 for alpha chain variable domain of TCR clone 220428 (TRAV21, TRAJ45)
CAVSSRGGADGLTF

SEQ ID NO: 440856 - protein, 13 aa, Homo sapiens
  CDR3 for beta chain variable domain of TCR clone 220428 (TRBV19, TRBJ1-3)
CASRLSLGNTIYF

SEQ ID NO: 440857 - protein, 14 aa, Homo sapiens
  CDR3 for alpha chain variable domain of TCR clone 220429 (TRAV3, TRAJ21)
CDVESQANFNKFYF

SEQ ID NO: 440858 - protein, 12 aa, Homo sapiens
  CDR3 for beta chain variable domain of TCR clone 220429 (TRBV6-3, TRBJ2-7)
CASSLTPYEQYF

SEQ ID NO: 440859 - protein, 11 aa, Homo sapiens
  CDR3 for alpha chain variable domain of TCR clone 220430 (TRAV21, TRAJ39)
FLVNAGNMLTF

SEQ ID NO: 440860 - protein, 12 aa, Homo sapiens
  CDR3 for beta chain variable domain of TCR clone 220430 (TRBV3-1, TRBJ2-1)
CASSQGSSGQFF

SEQ ID NO: 440861 - protein, 13 aa, Homo sapiens
  CDR3 for alpha chain variable domain of TCR clone 220431 (TRAV8-1, TRAJ9)
CAVNSVGVFKTIF

SEQ ID NO: 440862 - protein, 15 aa, Homo sapiens
  CDR3 for beta chain variable domain of TCR clone 220431 (TRBV11-2, TRBJ2-3)
CASSGRDGLTDTQYF

SEQ ID NO: 440863 - protein, 13 aa, Homo sapiens
  CDR3 for alpha chain variable domain of TCR clone 220432 (TRAV38-1, TRAJ42)
CARCGGSQGNLIF

SEQ ID NO: 440864 - protein, 15 aa, Homo sapiens
  CDR3 for beta chain variable domain of TCR clone 220432 (TRBV12-4, TRBJ2-5)
CASSPPTGLQETQYF

SEQ ID NO: 440865 - protein, 14 aa, Homo sapiens
  CDR3 for alpha chain variable domain of TCR clone 220433 (TRAV9-2, TRAJ39)
CALYIYNAGNMLTS

SEQ ID NO: 440866 - protein, 12 aa, Homo sapiens
  CDR3 for beta chain variable domain of TCR clone 220433 (TRBV11-2, TRBJ2-2)
CASSLGGGELFF

SEQ ID NO: 440867 - protein, 15 aa, Homo sapiens
  CDR3 for alpha chain variable domain of TCR clone 220434 (TRAV4, TRAJ36)
CLVGDRQTGANNLFF

SEQ ID NO: 440868 - protein, 15 aa, Homo sapiens
  CDR3 for beta chain variable domain of TCR clone 220434 (TRBV7-6, TRBJ2-1)
CASSSLEGEGNEQFF

SEQ ID NO: 440869 - protein, 13 aa, Homo sapiens
  CDR3 for alpha chain variable domain of TCR clone 220435 (TRAV36/DV7, TRAJ33)
CAVDMDSTYQLIW

SEQ ID NO: 440870 - protein, 16 aa, Homo sapiens
  CDR3 for beta chain variable domain of TCR clone 220435 (TRBV15, TRBJ2-3)
CATRLSGGRAPDTQYF

SEQ ID NO: 440871 - protein, 11 aa, Homo sapiens
  CDR3 for alpha chain variable domain of TCR clone 220436 (TRAV3, TRAJ13)
CAVTSYQKVTF

SEQ ID NO: 440872 - protein, 15 aa, Homo sapiens
  CDR3 for beta chain variable domain of TCR clone 220436 (TRBV4-1, TRBJ1-4)
CASSDTGGTNEKLFF

SEQ ID NO: 440873 - protein, 13 aa, Homo sapiens
  CDR3 for alpha chain variable domain of TCR clone 220437 (TRAV12-3, TRAJ9)
CAMRNNGGFKTIF

SEQ ID NO: 440874 - protein, 15 aa, Homo sapiens
  CDR3 for beta chain variable domain of TCR clone 220437 (TRBV20-1, TRBJ2-7)
CSARDRVSGMDEQYF

SEQ ID NO: 440875 - protein, 14 aa, Homo sapiens
  CDR3 for alpha chain variable domain of TCR clone 220438 (TRAV38-1, TRAJ40)
CALRPTSGTYKYIF

SEQ ID NO: 440876 - protein, 13 aa, Homo sapiens
  CDR3 for beta chain variable domain of TCR clone 220438 (TRBV7-2, TRBJ1-4)
CASSLAGLEKLFF

SEQ ID NO: 440877 - protein, 21 aa, Homo sapiens
  CDR3 for alpha chain variable domain of TCR clone 220439 (TRAV29/DV5, TRAJ52)
CIVLLCSKREAGGTSYGKLTF

SEQ ID NO: 440878 - protein, 15 aa, Homo sapiens
  CDR3 for beta chain variable domain of TCR clone 220439 (TRBV6-1, TRBJ2-1)
CASSELRGQYNEQFF

SEQ ID NO: 440879 - protein, 16 aa, Homo sapiens
  CDR3 for alpha chain variable domain of TCR clone 220440 (TRAV21, TRAJ37)
CAVRTAGSSNTGKLIF

SEQ ID NO: 440880 - protein, 16 aa, Homo sapiens
  CDR3 for beta chain variable domain of TCR clone 220440 (TRBV5-4, TRBJ2-3)
CASQQPGADGADTQYF

SEQ ID NO: 440881 - protein, 22 aa, Homo sapiens
  CDR3 for alpha chain variable domain of TCR clone 220441 (TRAV8-3, TRAJ6)
CAVAYQEEATYLHLEEEPALLF

SEQ ID NO: 440882 - protein, 18 aa, Homo sapiens
  CDR3 for beta chain variable domain of TCR clone 220441 (TRBV18, TRBJ2-3)
CASSYTSGAAGGTDTQYF

SEQ ID NO: 440883 - protein, 14 aa, Homo sapiens
  CDR3 for alpha chain variable domain of TCR clone 220442 (TRAV12-2, TRAJ13)
CAVKKTGGYQKVTF

SEQ ID NO: 440884 - protein, 16 aa, Homo sapiens
  CDR3 for beta chain variable domain of TCR clone 220442 (TRBV7-2, TRBJ2-5)
CASSPFPTGGEETQYF

SEQ ID NO: 440885 - protein, 11 aa, Homo sapiens
  CDR3 for alpha chain variable domain of TCR clone 220443 (TRAV8-4, TRAJ47)
DAAERGNKLVF

SEQ ID NO: 440886 - protein, 12 aa, Homo sapiens
  CDR3 for beta chain variable domain of TCR clone 220443 (TRBV28, TRBJ2-6)
CAIQAGANVLTF

SEQ ID NO: 440887 - protein, 13 aa, Homo sapiens
  CDR3 for alpha chain variable domain of TCR clone 220444 (TRAV16, TRAJ20)
CALGPFNDYKLSF

SEQ ID NO: 440888 - protein, 15 aa, Homo sapiens
  CDR3 for beta chain variable domain of TCR clone 220444 (TRBV5-1, TRBJ2-2)
CASSRVGSDTGELFF

SEQ ID NO: 440889 - protein, 10 aa, Homo sapiens
  CDR3 for alpha chain variable domain of TCR clone 220445 (TRAV23/DV6, TRAJ57)
CAASSTLSQG

SEQ ID NO: 440890 - protein, 14 aa, Homo sapiens
  CDR3 for beta chain variable domain of TCR clone 220445 (TRBV5-5, TRBJ1-5)
CASSGQGVDQPQHF

SEQ ID NO: 440891 - protein, 14 aa, Homo sapiens
  CDR3 for alpha chain variable domain of TCR clone 220446 (TRAV17, TRAJ35)
CATDRPGFGNVLHC

SEQ ID NO: 440892 - protein, 19 aa, Homo sapiens
  CDR3 for beta chain variable domain of TCR clone 220446 (TRBV11-3, TRBJ2-2)
CASSTRPGAKTTNTGELIF

SEQ ID NO: 440893 - protein, 14 aa, Homo sapiens
  CDR3 for alpha chain variable domain of TCR clone 220447 (TRAV1-2, TRAJ8)
CAVREDTGFQKLVF

SEQ ID NO: 440894 - protein, 16 aa, Homo sapiens
  CDR3 for beta chain variable domain of TCR clone 220447 (TRBV4-1, TRBJ2-7)
CASSRGDILNSYEQYF

SEQ ID NO: 440895 - protein, 11 aa, Homo sapiens
  CDR3 for alpha chain variable domain of TCR clone 220448 (TRAV3, TRAJ21)
CAVGNFNKFYF

SEQ ID NO: 440896 - protein, 14 aa, Homo sapiens
  CDR3 for beta chain variable domain of TCR clone 220448 (TRBV6-3, TRBJ1-1)
CASSNLLPGAEAFF

SEQ ID NO: 440897 - protein, 17 aa, Homo sapiens
  CDR3 for alpha chain variable domain of TCR clone 220449 (TRAV12-2, TRAJ22)
CAVNRIPFSGSARQLTF

SEQ ID NO: 440898 - protein, 15 aa, Homo sapiens
  CDR3 for beta chain variable domain of TCR clone 220449 (TRBV2, TRBJ2-1)
CASSVVGSSGNEQFF

SEQ ID NO: 440899 - protein, 14 aa, Homo sapiens
  CDR3 for alpha chain variable domain of TCR clone 220450 (TRAV12-1, TRAJ30)
FVPTGTNRDDKIIF

SEQ ID NO: 440900 - protein, 11 aa, Homo sapiens
  CDR3 for beta chain variable domain of TCR clone 220450 (TRBV4-1, TRBJ2-2)
CASEHTGELFF

SEQ ID NO: 440901 - protein, 12 aa, Homo sapiens
  CDR3 for alpha chain variable domain of TCR clone 220451 (TRAV27, TRAJ35)
CAGADFGNVLHC

SEQ ID NO: 440902 - protein, 15 aa, Homo sapiens
  CDR3 for beta chain variable domain of TCR clone 220451 (TRBV11-3, TRBJ2-3)
CASLKDGREGDTQYF

SEQ ID NO: 440903 - protein, 13 aa, Homo sapiens
  CDR3 for alpha chain variable domain of TCR clone 220452 (TRAV8-3, TRAJ43)
CAVVPYNNNDMRF

SEQ ID NO: 440904 - protein, 17 aa, Homo sapiens
  CDR3 for beta chain variable domain of TCR clone 220452 (TRBV7-7, TRBJ1-1)
CASIGDRTNLGVTEAFF

SEQ ID NO: 440905 - protein, 11 aa, Homo sapiens
  CDR3 for alpha chain variable domain of TCR clone 220453 (TRAV23/DV6, TRAJ48)
CEPRWGEELTF

SEQ ID NO: 440906 - protein, 13 aa, Homo sapiens
  CDR3 for beta chain variable domain of TCR clone 220453 (TRBV12-4, TRBJ2-5)
CASSPGTEETQYF

SEQ ID NO: 440907 - protein, 13 aa, Homo sapiens
  CDR3 for alpha chain variable domain of TCR clone 220454 (TRAV3, TRAJ20)
CAVRDTGGYKLSF

SEQ ID NO: 440908 - protein, 12 aa, Homo sapiens
  CDR3 for beta chain variable domain of TCR clone 220454 (TRBV29-1, TRBJ2-3)
CSVTGGADTQYF

SEQ ID NO: 440909 - protein, 14 aa, Homo sapiens
  CDR3 for alpha chain variable domain of TCR clone 220455 (TRAV12-2, TRAJ53)
CRERVGGGKYKLTF

SEQ ID NO: 440910 - protein, 17 aa, Homo sapiens
  CDR3 for beta chain variable domain of TCR clone 220455 (TRBV7-3, TRBJ2-3)
CASSLMKRMRGADTQYF

SEQ ID NO: 440911 - protein, 15 aa, Homo sapiens
  CDR3 for alpha chain variable domain of TCR clone 220456 (TRAV12-2, TRAJ9)
CAVNTLNTGGFKTIF

SEQ ID NO: 440912 - protein, 13 aa, Homo sapiens
  CDR3 for beta chain variable domain of TCR clone 220456 (TRBV10-3, TRBJ2-7)
CASKLAVNYEQYF

SEQ ID NO: 440913 - protein, 12 aa, Homo sapiens
  CDR3 for alpha chain variable domain of TCR clone 220457 (TRAV12-1, TRAJ20)
CVVNTDDYKLSF

SEQ ID NO: 440914 - protein, 12 aa, Homo sapiens
  CDR3 for beta chain variable domain of TCR clone 220457 (TRBV11-2, TRBJ2-2)
CASSLGGGELFF

SEQ ID NO: 440915 - protein, 14 aa, Homo sapiens
  CDR3 for alpha chain variable domain of TCR clone 220458 (TRAV1-2, TRAJ8)
CAVREDTGFQKLLF

SEQ ID NO: 440916 - protein, 13 aa, Homo sapiens
  CDR3 for beta chain variable domain of TCR clone 220458 (TRBV4-2, TRBJ1-1)
CASSQAGNTEAFF

SEQ ID NO: 440917 - protein, 14 aa, Homo sapiens
  CDR3 for alpha chain variable domain of TCR clone 220459 (TRAV14/DV4, TRAJ15)
CAMRRDQAGTALIF

SEQ ID NO: 440918 - protein, 16 aa, Homo sapiens
  CDR3 for beta chain variable domain of TCR clone 220459 (TRBV15, TRBJ2-3)
CATSRDLGIGTDTQYF

SEQ ID NO: 440919 - protein, 14 aa, Homo sapiens
  CDR3 for alpha chain variable domain of TCR clone 220460 (TRAV3, TRAJ34)
CAVRAPGNTDKLIF

SEQ ID NO: 440920 - protein, 14 aa, Homo sapiens
  CDR3 for beta chain variable domain of TCR clone 220460 (TRBV25-1, TRBJ1-1)
CASTHLGGNTEAFF

SEQ ID NO: 440921 - protein, 15 aa, Homo sapiens
  CDR3 for alpha chain variable domain of TCR clone 220461 (TRAV3, TRAJ4)
CAVRDGTGGCNKLIF

SEQ ID NO: 440922 - protein, 16 aa, Homo sapiens
  CDR3 for beta chain variable domain of TCR clone 220461 (TRBV27, TRBJ2-2)
CASSSSGVSNAGELFF

SEQ ID NO: 440923 - protein, 13 aa, Homo sapiens
  CDR3 for alpha chain variable domain of TCR clone 220462 (TRAV12-3, TRAJ13)
CAMTSGGYQKVTF

SEQ ID NO: 440924 - protein, 15 aa, Homo sapiens
  CDR3 for beta chain variable domain of TCR clone 220462 (TRBV7-3, TRBJ2-1)
CASSPTGGGEVEQFF

SEQ ID NO: 440925 - protein, 14 aa, Homo sapiens
  CDR3 for alpha chain variable domain of TCR clone 220463 (TRAV12-2, TRAJ24)
CAVTPADSWGKLQF

SEQ ID NO: 440926 - protein, 13 aa, Homo sapiens
  CDR3 for beta chain variable domain of TCR clone 220463 (TRBV7-9, TRBJ2-3)
CASSPGSTDTQYF

SEQ ID NO: 440927 - protein, 12 aa, Homo sapiens
  CDR3 for alpha chain variable domain of TCR clone 220464 (TRAV12-3, TRAJ42)
CAPGGSQGNLIF

SEQ ID NO: 440928 - protein, 13 aa, Homo sapiens
  CDR3 for beta chain variable domain of TCR clone 220464 (TRBV3-1, TRBJ2-2)
CASLARGSGELFF

SEQ ID NO: 440929 - protein, 14 aa, Homo sapiens
  CDR3 for alpha chain variable domain of TCR clone 220465 (TRAV1-2, TRAJ8)
CAVREDTGFQKLVF

SEQ ID NO: 440930 - protein, 15 aa, Homo sapiens
  CDR3 for beta chain variable domain of TCR clone 220465 (TRBV7-9, TRBJ2-6)
CASSHEGTGANVLTF

SEQ ID NO: 440931 - protein, 14 aa, Homo sapiens
  CDR3 for alpha chain variable domain of TCR clone 220466 (TRAV17, TRAJ22)
CATSPSGSARRLTF

SEQ ID NO: 440932 - protein, 20 aa, Homo sapiens
  CDR3 for beta chain variable domain of TCR clone 220466 (TRBV7-8, TRBJ2-2)
CASSHLFPGPTIHITGELFF

SEQ ID NO: 440933 - protein, 21 aa, Homo sapiens
  CDR3 for alpha chain variable domain of TCR clone 220467 (TRAV16, TRAJ31)
CALSGGVETMPDSCLEMELSW

SEQ ID NO: 440934 - protein, 13 aa, Homo sapiens
  CDR3 for beta chain variable domain of TCR clone 220467 (TRBV7-6, TRBJ1-2)
CASSLVADYGYTF

SEQ ID NO: 440935 - protein, 14 aa, Homo sapiens
  CDR3 for alpha chain variable domain of TCR clone 220468 (TRAV12-2, TRAJ6)
YAVIASGGSYIPTF

SEQ ID NO: 440936 - protein, 16 aa, Homo sapiens
  CDR3 for beta chain variable domain of TCR clone 220468 (TRBV7-2, TRBJ2-3)
CASSLAGAGSGDTQYF

SEQ ID NO: 440937 - protein, 13 aa, Homo sapiens
  CDR3 for alpha chain variable domain of TCR clone 220469 (TRAV8-6, TRAJ16)
CAVSSPDGQKLLF

SEQ ID NO: 440938 - protein, 16 aa, Homo sapiens
  CDR3 for beta chain variable domain of TCR clone 220469 (TRBV4-1, TRBJ2-7)
CASSQEWTSGPLEQYF

SEQ ID NO: 440939 - protein, 14 aa, Homo sapiens
  CDR3 for alpha chain variable domain of TCR clone 220470 (TRAV12-2, TRAJ36)
CAVKISTGADNLFF

SEQ ID NO: 440940 - protein, 14 aa, Homo sapiens
  CDR3 for beta chain variable domain of TCR clone 220470 (TRBV25-1, TRBJ1-2)
CASSDTTGVVSYTF

SEQ ID NO: 440941 - protein, 11 aa, Homo sapiens
  CDR3 for alpha chain variable domain of TCR clone 220471 (TRAV8-3, TRAJ15)
CAVGPGTALIL

SEQ ID NO: 440942 - protein, 15 aa, Homo sapiens
  CDR3 for beta chain variable domain of TCR clone 220471 (TRBV7-9, TRBJ2-7)
CASSLALAEAYEQYF

SEQ ID NO: 440943 - protein, 16 aa, Homo sapiens
  CDR3 for alpha chain variable domain of TCR clone 220472 (TRAV38-1, TRAJ32)
GAFMKGGGGATNKLIF

SEQ ID NO: 440944 - protein, 13 aa, Homo sapiens
  CDR3 for beta chain variable domain of TCR clone 220472 (TRBV20-1, TRBJ2-5)
CSAREAFQETQYF

SEQ ID NO: 440945 - protein, 14 aa, Homo sapiens
  CDR3 for alpha chain variable domain of TCR clone 220473 (TRAV12-2, TRAJ17)
CAVLFKAAGNKITF

SEQ ID NO: 440946 - protein, 12 aa, Homo sapiens
  CDR3 for beta chain variable domain of TCR clone 220473 (TRBV11-2, TRBJ2-2)
CASSLGGGELFF

SEQ ID NO: 440947 - protein, 21 aa, Homo sapiens
  CDR3 for alpha chain variable domain of TCR clone 220474 (TRAV2, TRAJ27)
ILQVREADAAVYSANAGKSTF

SEQ ID NO: 440948 - protein, 15 aa, Homo sapiens
  CDR3 for beta chain variable domain of TCR clone 220474 (TRBV2, TRBJ2-5)
CASSERGGYRETQYF

SEQ ID NO: 440949 - protein, 13 aa, Homo sapiens
  CDR3 for alpha chain variable domain of TCR clone 220475 (TRAV1-2, TRAJ9)
CAALNTGGFKTIF

SEQ ID NO: 440950 - protein, 11 aa, Homo sapiens
  CDR3 for beta chain variable domain of TCR clone 220475 (TRBV5-6, TRBJ2-5)
CASSLERTQYF

SEQ ID NO: 440951 - protein, 12 aa, Homo sapiens
  CDR3 for alpha chain variable domain of TCR clone 220476 (TRAV3, TRAJ31)
CAVRPRGPRLIF

SEQ ID NO: 440952 - protein, 17 aa, Homo sapiens
  CDR3 for beta chain variable domain of TCR clone 220476 (TRBV7-9, TRBJ1-5)
CASSASQGGYSNQPQHF

SEQ ID NO: 440953 - protein, 14 aa, Homo sapiens
  CDR3 for alpha chain variable domain of TCR clone 220477 (TRAV17, TRAJ34)
CATDSLEGTDKLIF

SEQ ID NO: 440954 - protein, 13 aa, Homo sapiens
  CDR3 for beta chain variable domain of TCR clone 220477 (TRBV11-2, TRBJ2-7)
CASSGTRPYEPSF

SEQ ID NO: 440955 - protein, 12 aa, Homo sapiens
  CDR3 for alpha chain variable domain of TCR clone 220478 (TRAV38-1, TRAJ32)
CAPSGATNKLIF

SEQ ID NO: 440956 - protein, 14 aa, Homo sapiens
  CDR3 for beta chain variable domain of TCR clone 220478 (TRBV29-1, TRBJ2-5)
CSVETSGSGETQYF

SEQ ID NO: 440957 - protein, 13 aa, Homo sapiens
  CDR3 for alpha chain variable domain of TCR clone 220479 (TRAV3, TRAJ20)
CAVRDTPRYTLSF

SEQ ID NO: 440958 - protein, 16 aa, Homo sapiens
  CDR3 for beta chain variable domain of TCR clone 220479 (TRBV20-1, TRBJ2-7)
CSARAPGLALSYEQYF

SEQ ID NO: 440959 - protein, 13 aa, Homo sapiens
  CDR3 for alpha chain variable domain of TCR clone 220480 (TRAV2, TRAJ29)
CAAQNSGNTPLVF

SEQ ID NO: 440960 - protein, 15 aa, Homo sapiens
  CDR3 for beta chain variable domain of TCR clone 220480 (TRBV7-2, TRBJ2-5)
CASSFLRGGEETQYF

SEQ ID NO: 440961 - protein, 12 aa, Homo sapiens
  CDR3 for alpha chain variable domain of TCR clone 220481 (TRAV17, TRAJ57)
CATEGGAEKLVF

SEQ ID NO: 440962 - protein, 13 aa, Homo sapiens
  CDR3 for beta chain variable domain of TCR clone 220481 (TRBV7-9, TRBJ2-7)
CASSFAGAYEQYF

SEQ ID NO: 440963 - protein, 11 aa, Homo sapiens
  CDR3 for alpha chain variable domain of TCR clone 220482 (TRAV4, TRAJ23)
CLVGRKAYLRT

SEQ ID NO: 440964 - protein, 14 aa, Homo sapiens
  CDR3 for beta chain variable domain of TCR clone 220482 (TRBV19, TRBJ2-1)
CASPTFVLSGEQFF

SEQ ID NO: 440965 - protein, 13 aa, Homo sapiens
  CDR3 for alpha chain variable domain of TCR clone 220483 (TRAV12-3, TRAJ33)
CAMSVNSNYQLIW

SEQ ID NO: 440966 - protein, 15 aa, Homo sapiens
  CDR3 for beta chain variable domain of TCR clone 220483 (TRBV7-9, TRBJ1-4)
CASSRTGGFNEKLFF

SEQ ID NO: 440967 - protein, 18 aa, Homo sapiens
  CDR3 for alpha chain variable domain of TCR clone 220484 (TRAV26-1, TRAJ37)
CIVRVDVHGSSNTGKLIF

SEQ ID NO: 440968 - protein, 15 aa, Homo sapiens
  CDR3 for beta chain variable domain of TCR clone 220484 (TRBV20-1, TRBJ2-7)
CSARVLASPLYEQYF

SEQ ID NO: 440969 - protein, 14 aa, Homo sapiens
  CDR3 for alpha chain variable domain of TCR clone 220485 (TRAV38-1, TRAJ45)
CASHSGGGADGLTF

SEQ ID NO: 440970 - protein, 16 aa, Homo sapiens
  CDR3 for beta chain variable domain of TCR clone 220485 (TRBV28, TRBJ2-7)
CASSLFFETGGPEQYF

SEQ ID NO: 440971 - protein, 13 aa, Homo sapiens
  CDR3 for alpha chain variable domain of TCR clone 220486 (TRAV27, TRAJ6)
CAGGTIGSYIPTF

SEQ ID NO: 440972 - protein, 15 aa, Homo sapiens
  CDR3 for beta chain variable domain of TCR clone 220486 (TRBV11-2, TRBJ1-3)
CASSLSPLVRDTIYF

SEQ ID NO: 440973 - protein, 16 aa, Homo sapiens
  CDR3 for alpha chain variable domain of TCR clone 220487 (TRAV1-1, TRAJ45)
CAVRAYSGGGADGVTF

SEQ ID NO: 440974 - protein, 13 aa, Homo sapiens
  CDR3 for beta chain variable domain of TCR clone 220487 (TRBV20-1, TRBJ1-2)
CSARGTADYGYTF

SEQ ID NO: 440975 - protein, 13 aa, Homo sapiens
  CDR3 for alpha chain variable domain of TCR clone 220488 (TRAV3, TRAJ15)
CAVRDQAVTALVF

SEQ ID NO: 440976 - protein, 15 aa, Homo sapiens
  CDR3 for beta chain variable domain of TCR clone 220488 (TRBV11-1, TRBJ2-7)
CASSLNYGASYEQYF

SEQ ID NO: 440977 - protein, 15 aa, Homo sapiens
  CDR3 for alpha chain variable domain of TCR clone 220489 (TRAV21, TRAJ53)
CATLNSGGSNYKLTF

SEQ ID NO: 440978 - protein, 12 aa, Homo sapiens
  CDR3 for beta chain variable domain of TCR clone 220489 (TRBV14, TRBJ2-4)
CSSSNLKSIQYF

SEQ ID NO: 440979 - protein, 14 aa, Homo sapiens
  CDR3 for alpha chain variable domain of TCR clone 220490 (TRAV1-2, TRAJ16)
CAVKRISDGQKLLF

SEQ ID NO: 440980 - protein, 15 aa, Homo sapiens
  CDR3 for beta chain variable domain of TCR clone 220490 (TRBV7-9, TRBJ1-6)
CASSSPGRGNSPLHF

SEQ ID NO: 440981 - protein, 15 aa, Homo sapiens
  CDR3 for alpha chain variable domain of TCR clone 220491 (TRAV12-3, TRAJ6)
CAMSPASGGSYIPTF

SEQ ID NO: 440982 - protein, 14 aa, Homo sapiens
  CDR3 for beta chain variable domain of TCR clone 220491 (TRBV7-2, TRBJ2-7)
CASSPKTSFYEQYF

SEQ ID NO: 440983 - protein, 15 aa, Homo sapiens
  CDR3 for alpha chain variable domain of TCR clone 220492 (TRAV8-2, TRAJ16)
GVVSDGFSDGQKLLF

SEQ ID NO: 440984 - protein, 14 aa, Homo sapiens
  CDR3 for beta chain variable domain of TCR clone 220492 (TRBV7-3, TRBJ1-1)
CASSLGTGYTEAFF

SEQ ID NO: 440985 - protein, 16 aa, Homo sapiens
  CDR3 for alpha chain variable domain of TCR clone 220493 (TRAV14/DV4, TRAJ54)
CAMREGRIQGAQKLVF

SEQ ID NO: 440986 - protein, 14 aa, Homo sapiens
  CDR3 for beta chain variable domain of TCR clone 220493 (TRBV7-2, TRBJ2-7)
CASSPKTSFYEQYF

SEQ ID NO: 440987 - protein, 10 aa, Homo sapiens
  CDR3 for alpha chain variable domain of TCR clone 220494 (TRAV12-1, TRAJ37)
ARGNTGKLIF

SEQ ID NO: 440988 - protein, 15 aa, Homo sapiens
  CDR3 for beta chain variable domain of TCR clone 220494 (TRBV7-2, TRBJ2-7)
CASSLAPAQGQEQYF

SEQ ID NO: 440989 - protein, 15 aa, Homo sapiens
  CDR3 for alpha chain variable domain of TCR clone 220495 (TRAV12-3, TRAJ49)
CAMSVTPNTGNPFYF

SEQ ID NO: 440990 - protein, 18 aa, Homo sapiens
  CDR3 for beta chain variable domain of TCR clone 220495 (TRBV4-1, TRBJ1-5)
CASSQDPRGQGLNQPQHF

SEQ ID NO: 440991 - protein, 13 aa, Homo sapiens
  CDR3 for alpha chain variable domain of TCR clone 220496 (TRAV1-1, TRAJ23)
CAVVANQGGKLIF

SEQ ID NO: 440992 - protein, 16 aa, Homo sapiens
  CDR3 for beta chain variable domain of TCR clone 220496 (TRBV5-5, TRBJ1-2)
CASSPTWGMGLYGYTF

SEQ ID NO: 440993 - protein, 14 aa, Homo sapiens
  CDR3 for alpha chain variable domain of TCR clone 220497 (TRAV23/DV6, TRAJ34)
CAASMVGNTDKLIF

SEQ ID NO: 440994 - protein, 14 aa, Homo sapiens
  CDR3 for beta chain variable domain of TCR clone 220497 (TRBV7-2, TRBJ2-1)
CASSLSRVDNEQFF

SEQ ID NO: 440995 - protein, 14 aa, Homo sapiens
  CDR3 for alpha chain variable domain of TCR clone 220498 (TRAV14/DV4, TRAJ15)
CAMRPDQAGTALIF

SEQ ID NO: 440996 - protein, 14 aa, Homo sapiens
  CDR3 for beta chain variable domain of TCR clone 220498 (TRBV28, TRBJ2-7)
CASRAAGLGYEQYF

SEQ ID NO: 440997 - protein, 13 aa, Homo sapiens
  CDR3 for alpha chain variable domain of TCR clone 220499 (TRAV1-2, TRAJ9)
CAALNTGGFKTIF

SEQ ID NO: 440998 - protein, 20 aa, Homo sapiens
  CDR3 for beta chain variable domain of TCR clone 220499 (TRBV28, TRBJ2-1)
CASTPIGRSPGLAGGNEHFF

SEQ ID NO: 440999 - protein, 12 aa, Homo sapiens
  CDR3 for alpha chain variable domain of TCR clone 220500 (TRAV1-2, TRAJ9)
CAGYTGGFKTIF

SEQ ID NO: 441000 - protein, 15 aa, Homo sapiens
  CDR3 for beta chain variable domain of TCR clone 220500 (TRBV11-2, TRBJ2-1)
CASSPAGQPLNEQFF

SEQ ID NO: 441001 - protein, 15 aa, Homo sapiens
  CDR3 for alpha chain variable domain of TCR clone 220501 (TRAV38-1, TRAJ37)
CAFIFGSGNTGKLIF

SEQ ID NO: 441002 - protein, 14 aa, Homo sapiens
  CDR3 for beta chain variable domain of TCR clone 220501 (TRBV4-2, TRBJ2-1)
CASGLDRAYNEQFF

SEQ ID NO: 441003 - protein, 13 aa, Homo sapiens
  CDR3 for alpha chain variable domain of TCR clone 220502 (TRAV8-4, TRAJ27)
CAVSPRNACKSTF

SEQ ID NO: 441004 - protein, 17 aa, Homo sapiens
  CDR3 for beta chain variable domain of TCR clone 220502 (TRBV19, TRBJ2-3)
CASSIDPAGGGTDTRYF

SEQ ID NO: 441005 - protein, 14 aa, Homo sapiens
  CDR3 for alpha chain variable domain of TCR clone 220503 (TRAV8-4, TRAJ4)
CAVSPSGGYNKLIF

SEQ ID NO: 441006 - protein, 15 aa, Homo sapiens
  CDR3 for beta chain variable domain of TCR clone 220503 (TRBV10-2, TRBJ2-5)
CASRGSGGPQEAQYF

SEQ ID NO: 441007 - protein, 13 aa, Homo sapiens
  CDR3 for alpha chain variable domain of TCR clone 220504 (TRAV12-2, TRAJ42)
CAVKRGSQGNLIF

SEQ ID NO: 441008 - protein, 12 aa, Homo sapiens
  CDR3 for beta chain variable domain of TCR clone 220504 (TRBV5-7, TRBJ1-2)
CASSLVQNGYTL

SEQ ID NO: 441009 - protein, 14 aa, Homo sapiens
  CDR3 for alpha chain variable domain of TCR clone 220505 (TRAV12-3, TRAJ10)
SHLPLTGGGNKLTF

SEQ ID NO: 441010 - protein, 12 aa, Homo sapiens
  CDR3 for beta chain variable domain of TCR clone 220505 (TRBV6-6, TRBJ2-3)
CAISSRGDTQYF

SEQ ID NO: 441011 - protein, 14 aa, Homo sapiens
  CDR3 for alpha chain variable domain of TCR clone 220506 (TRAV26-1, TRAJ38)
CIADNAGNNRKLIW

SEQ ID NO: 441012 - protein, 15 aa, Homo sapiens
  CDR3 for beta chain variable domain of TCR clone 220506 (TRBV7-2, TRBJ2-1)
CASTSASGDYNEQFF

SEQ ID NO: 441013 - protein, 14 aa, Homo sapiens
  CDR3 for alpha chain variable domain of TCR clone 220507 (TRAV13-1, TRAJ17)
LSSRSKAAGHKLTF

SEQ ID NO: 441014 - protein, 14 aa, Homo sapiens
  CDR3 for beta chain variable domain of TCR clone 220507 (TRBV7-9, TRBJ2-1)
CASSSMVGFGEQFF

SEQ ID NO: 441015 - protein, 12 aa, Homo sapiens
  CDR3 for alpha chain variable domain of TCR clone 220508 (TRAV8-6, TRAJ4)
CAVSDHPNKLIF

SEQ ID NO: 441016 - protein, 12 aa, Homo sapiens
  CDR3 for beta chain variable domain of TCR clone 220508 (TRBV11-2, TRBJ2-2)
CASSLGGGEPFF

SEQ ID NO: 441017 - protein, 14 aa, Homo sapiens
  CDR3 for alpha chain variable domain of TCR clone 220509 (TRAV29/DV5, TRAJ45)
CAPYSGGGADGVTF

SEQ ID NO: 441018 - protein, 13 aa, Homo sapiens
  CDR3 for beta chain variable domain of TCR clone 220509 (TRBV29-1, TRBJ2-3)
CSATRGGRDTQYF

SEQ ID NO: 441019 - protein, 14 aa, Homo sapiens
  CDR3 for alpha chain variable domain of TCR clone 220510 (TRAV17, TRAJ54)
WATDANQGAQKLVF

SEQ ID NO: 441020 - protein, 12 aa, Homo sapiens
  CDR3 for beta chain variable domain of TCR clone 220510 (TRBV6-3, TRBJ2-1)
CASSGSYNEQFF

SEQ ID NO: 441021 - protein, 17 aa, Homo sapiens
  CDR3 for alpha chain variable domain of TCR clone 220511 (TRAV3, TRAJ42)
CAVRDRDYGGSQGNLIF

SEQ ID NO: 441022 - protein, 13 aa, Homo sapiens
  CDR3 for beta chain variable domain of TCR clone 220511 (TRBV10-3, TRBJ2-7)
CASKLSVNYEQYF

SEQ ID NO: 441023 - protein, 14 aa, Homo sapiens
  CDR3 for alpha chain variable domain of TCR clone 220512 (TRAV12-2, TRAJ17)
CAVLFKAAGNKLTC

SEQ ID NO: 441024 - protein, 17 aa, Homo sapiens
  CDR3 for beta chain variable domain of TCR clone 220512 (TRBV20-1, TRBJ2-2)
CSASGSGQGGFTGELFF

SEQ ID NO: 441025 - protein, 14 aa, Homo sapiens
  CDR3 for alpha chain variable domain of TCR clone 220513 (TRAV38-1, TRAJ45)
CAYYSGGGADGLTF

SEQ ID NO: 441026 - protein, 15 aa, Homo sapiens
  CDR3 for beta chain variable domain of TCR clone 220513 (TRBV20-1, TRBJ2-7)
CSARDRVPGMDEQYF

SEQ ID NO: 441027 - protein, 13 aa, Homo sapiens
  CDR3 for alpha chain variable domain of TCR clone 220514 (TRAV12-1, TRAJ43)
CVVSHHNNNDMRF

SEQ ID NO: 441028 - protein, 15 aa, Homo sapiens
  CDR3 for beta chain variable domain of TCR clone 220514 (TRBV5-5, TRBJ1-5)
CASSLKGGGEQPQHF

SEQ ID NO: 441029 - protein, 14 aa, Homo sapiens
  CDR3 for alpha chain variable domain of TCR clone 220515 (TRAV1-2, TRAJ8)
CAVREDTGFQKLVF

SEQ ID NO: 441030 - protein, 16 aa, Homo sapiens
  CDR3 for beta chain variable domain of TCR clone 220515 (TRBV11-3, TRBJ2-7)
CASSPTTGGVSYEQYF

SEQ ID NO: 441031 - protein, 10 aa, Homo sapiens
  CDR3 for alpha chain variable domain of TCR clone 220516 (TRAV30, TRAJ48)
CGIGNEKLTF

SEQ ID NO: 441032 - protein, 15 aa, Homo sapiens
  CDR3 for beta chain variable domain of TCR clone 220516 (TRBV28, TRBJ2-5)
CASGPPWSYQETQYF

SEQ ID NO: 441033 - protein, 15 aa, Homo sapiens
  CDR3 for alpha chain variable domain of TCR clone 220517 (TRAV3, TRAJ3)
CCERPRYSSASKIIF

SEQ ID NO: 441034 - protein, 16 aa, Homo sapiens
  CDR3 for beta chain variable domain of TCR clone 220517 (TRBV19, TRBJ1-5)
CASSIDRGGTRQPQHF

SEQ ID NO: 441035 - protein, 14 aa, Homo sapiens
  CDR3 for alpha chain variable domain of TCR clone 220518 (TRAV8-6, TRAJ8)
CAVNENTGFQKLVF

SEQ ID NO: 441036 - protein, 20 aa, Homo sapiens
  CDR3 for beta chain variable domain of TCR clone 220518 (TRBV28, TRBJ2-1)
CASTPIGRSPGLAGGNEQFF

SEQ ID NO: 441037 - protein, 12 aa, Homo sapiens
  CDR3 for alpha chain variable domain of TCR clone 220519 (TRAV27, TRAJ33)
CAGEDSNYQLLW

SEQ ID NO: 441038 - protein, 17 aa, Homo sapiens
  CDR3 for beta chain variable domain of TCR clone 220519 (TRBV7-3, TRBJ1-3)
CASSPLGRGTPGNTIYF

SEQ ID NO: 441039 - protein, 14 aa, Homo sapiens
  CDR3 for alpha chain variable domain of TCR clone 220520 (TRAV13-1, TRAJ35)
CAASKGGFGNVLHC

SEQ ID NO: 441040 - protein, 14 aa, Homo sapiens
  CDR3 for beta chain variable domain of TCR clone 220520 (TRBV7-2, TRBJ2-5)
CASSPRGSSETQYS

SEQ ID NO: 441041 - protein, 18 aa, Homo sapiens
  CDR3 for alpha chain variable domain of TCR clone 220521 (TRAV12-1, TRAJ52)
CVVKLINAGGTSYGKLTF

SEQ ID NO: 441042 - protein, 16 aa, Homo sapiens
  CDR3 for beta chain variable domain of TCR clone 220521 (TRBV7-6, TRBJ2-7)
CASSGGTGARAYEQYF

SEQ ID NO: 441043 - protein, 10 aa, Homo sapiens
  CDR3 for alpha chain variable domain of TCR clone 220522 (TRAV17, TRAJ36)
CATVAGNLFF

SEQ ID NO: 441044 - protein, 15 aa, Homo sapiens
  CDR3 for beta chain variable domain of TCR clone 220522 (TRBV29-1, TRBJ2-1)
CSVPTGLALYNEQFF

SEQ ID NO: 441045 - protein, 11 aa, Homo sapiens
  CDR3 for alpha chain variable domain of TCR clone 220523 (TRAV1-1, TRAJ23)
CAVRQGGKLIF

SEQ ID NO: 441046 - protein, 13 aa, Homo sapiens
  CDR3 for beta chain variable domain of TCR clone 220523 (TRBV11-2, TRBJ2-1)
CASSLDLVNEQFF

SEQ ID NO: 441047 - protein, 15 aa, Homo sapiens
  CDR3 for alpha chain variable domain of TCR clone 220524 (TRAV16, TRAJ57)
CALSGGEGGSEKLVF

SEQ ID NO: 441048 - protein, 15 aa, Homo sapiens
  CDR3 for beta chain variable domain of TCR clone 220524 (TRBV5-1, TRBJ2-1)
CASSPPRAPYNEQFF

SEQ ID NO: 441049 - protein, 14 aa, Homo sapiens
  CDR3 for alpha chain variable domain of TCR clone 220525 (TRAV3, TRAJ37)
CVVKESGNTGKLIF

SEQ ID NO: 441050 - protein, 13 aa, Homo sapiens
  CDR3 for beta chain variable domain of TCR clone 220525 (TRBV2, TRBJ1-1)
CASSQDWGAEAFF

SEQ ID NO: 441051 - protein, 12 aa, Homo sapiens
  CDR3 for alpha chain variable domain of TCR clone 220526 (TRAV1-1, TRAJ30)
CAVRGRDDKIIC

SEQ ID NO: 441052 - protein, 14 aa, Homo sapiens
  CDR3 for beta chain variable domain of TCR clone 220526 (TRBV6-1, TRBJ1-3)
CASVQGGGGNTIYF

SEQ ID NO: 441053 - protein, 12 aa, Homo sapiens
  CDR3 for alpha chain variable domain of TCR clone 220527 (TRAV12-3, TRAJ17)
CAMTLTGNKLTF

SEQ ID NO: 441054 - protein, 15 aa, Homo sapiens
  CDR3 for beta chain variable domain of TCR clone 220527 (TRBV20-1, TRBJ2-7)
RSARDRVAGMDEQYF

SEQ ID NO: 441055 - protein, 17 aa, Homo sapiens
  CDR3 for alpha chain variable domain of TCR clone 220528 (TRAV3, TRAJ42)
CAVRDRDYGGSQGNLTF

SEQ ID NO: 441056 - protein, 14 aa, Homo sapiens
  CDR3 for beta chain variable domain of TCR clone 220528 (TRBV19, TRBJ2-2)
CTSSGQGIAGELFF

SEQ ID NO: 441057 - protein, 10 aa, Homo sapiens
  CDR3 for alpha chain variable domain of TCR clone 220529 (TRAV12-3, TRAJ49)
CAMSDDQFYF

SEQ ID NO: 441058 - protein, 13 aa, Homo sapiens
  CDR3 for beta chain variable domain of TCR clone 220529 (TRBV12-4, TRBJ1-1)
CASSPGTGFEAFF

SEQ ID NO: 441059 - protein, 12 aa, Homo sapiens
  CDR3 for alpha chain variable domain of TCR clone 220530 (TRAV35, TRAJ12)
CAGMDSSYKLIF

SEQ ID NO: 441060 - protein, 14 aa, Homo sapiens
  CDR3 for beta chain variable domain of TCR clone 220530 (TRBV28, TRBJ2-5)
CASSLYRGTETHFF

SEQ ID NO: 441061 - protein, 14 aa, Homo sapiens
  CDR3 for alpha chain variable domain of TCR clone 220531 (TRAV26-1, TRAJ45)
CIEVTGGGADGLTF

SEQ ID NO: 441062 - protein, 13 aa, Homo sapiens
  CDR3 for beta chain variable domain of TCR clone 220531 (TRBV7-6, TRBJ1-2)
CASSLGADYGYTF

SEQ ID NO: 441063 - protein, 15 aa, Homo sapiens
  CDR3 for alpha chain variable domain of TCR clone 220532 (TRAV2, TRAJ15)
CTVEDRGQAGTAPIF

SEQ ID NO: 441064 - protein, 13 aa, Homo sapiens
  CDR3 for beta chain variable domain of TCR clone 220532 (TRBV10-2, TRBJ2-7)
CASGASGGYEQYF

SEQ ID NO: 441065 - protein, 13 aa, Homo sapiens
  CDR3 for alpha chain variable domain of TCR clone 220533 (TRAV17, TRAJ39)
RAISTNAGNMLTF

SEQ ID NO: 441066 - protein, 18 aa, Homo sapiens
  CDR3 for beta chain variable domain of TCR clone 220533 (TRBV11-2, TRBJ2-3)
CASSLGGASRGAPNTQYF

SEQ ID NO: 441067 - protein, 14 aa, Homo sapiens
  CDR3 for alpha chain variable domain of TCR clone 220534 (TRAV1-1, TRAJ27)
CAVIYNTNAGKSTF

SEQ ID NO: 441068 - protein, 15 aa, Homo sapiens
  CDR3 for beta chain variable domain of TCR clone 220534 (TRBV6-3, TRBJ2-7)
CASSSPETVFYEQYF

SEQ ID NO: 441069 - protein, 16 aa, Homo sapiens
  CDR3 for alpha chain variable domain of TCR clone 220535 (TRAV3, TRAJ37)
CAVRGKGSGNTGKLIF

SEQ ID NO: 441070 - protein, 16 aa, Homo sapiens
  CDR3 for beta chain variable domain of TCR clone 220535 (TRBV12-5, TRBJ2-5)
CASGPRTSGSQETQYY

SEQ ID NO: 441071 - protein, 20 aa, Homo sapiens
  CDR3 for alpha chain variable domain of TCR clone 220536 (TRAV12-1, TRAJ42)
SSVIQPPTSVKGGSQGNLIF

SEQ ID NO: 441072 - protein, 15 aa, Homo sapiens
  CDR3 for beta chain variable domain of TCR clone 220536 (TRBV5-1, TRBJ2-7)
CASSLNGGPAREQYF

SEQ ID NO: 441073 - protein, 10 aa, Homo sapiens
  CDR3 for alpha chain variable domain of TCR clone 220537 (TRAV1-2, TRAJ18)
CAVRGEAQPW

SEQ ID NO: 441074 - protein, 14 aa, Homo sapiens
  CDR3 for beta chain variable domain of TCR clone 220537 (TRBV7-2, TRBJ2-7)
CASSFKGQAHEQYF

SEQ ID NO: 441075 - protein, 14 aa, Homo sapiens
  CDR3 for alpha chain variable domain of TCR clone 220538 (TRAV14/DV4, TRAJ49)
CAMREGVNGNQFDF

SEQ ID NO: 441076 - protein, 14 aa, Homo sapiens
  CDR3 for beta chain variable domain of TCR clone 220538 (TRBV5-5, TRBJ2-7)
CASSLGLAVYEQYF

SEQ ID NO: 441077 - protein, 14 aa, Homo sapiens
  CDR3 for alpha chain variable domain of TCR clone 220539 (TRAV17, TRAJ57)
CATDPQGGSEKLVL

SEQ ID NO: 441078 - protein, 13 aa, Homo sapiens
  CDR3 for beta chain variable domain of TCR clone 220539 (TRBV12-5, TRBJ2-3)
CASGDRQSDTQYF

SEQ ID NO: 441079 - protein, 15 aa, Homo sapiens
  CDR3 for alpha chain variable domain of TCR clone 220540 (TRAV8-6, TRAJ6)
CAVSGESGGSYIPTF

SEQ ID NO: 441080 - protein, 14 aa, Homo sapiens
  CDR3 for beta chain variable domain of TCR clone 220540 (TRBV7-9, TRBJ2-1)
CATSSMVGFGEQFF

SEQ ID NO: 441081 - protein, 14 aa, Homo sapiens
  CDR3 for alpha chain variable domain of TCR clone 220541 (TRAV8-4, TRAJ13)
CAVSGVRGYQKVTF

SEQ ID NO: 441082 - protein, 14 aa, Homo sapiens
  CDR3 for beta chain variable domain of TCR clone 220541 (TRBV7-3, TRBJ1-1)
CASSLKGGNTEAFF

SEQ ID NO: 441083 - protein, 15 aa, Homo sapiens
  CDR3 for alpha chain variable domain of TCR clone 220542 (TRAV12-1, TRAJ44)
CVVDTPQGTASKLTF

SEQ ID NO: 441084 - protein, 14 aa, Homo sapiens
  CDR3 for beta chain variable domain of TCR clone 220542 (TRBV7-9, TRBJ2-1)
CASSPRDSLYEQYF

SEQ ID NO: 441085 - protein, 15 aa, Homo sapiens
  CDR3 for alpha chain variable domain of TCR clone 220543 (TRAV3, TRAJ20)
CAVRDIKLSDYKLSF

SEQ ID NO: 441086 - protein, 14 aa, Homo sapiens
  CDR3 for beta chain variable domain of TCR clone 220543 (TRBV2, TRBJ2-5)
CASGRPGDQETQYF

SEQ ID NO: 441087 - protein, 17 aa, Homo sapiens
  CDR3 for alpha chain variable domain of TCR clone 220544 (TRAV2, TRAJ36)
CAVEDRGYWGKQPLLWD

SEQ ID NO: 441088 - protein, 14 aa, Homo sapiens
  CDR3 for beta chain variable domain of TCR clone 220544 (TRBV7-9, TRBJ2-5)
CASSLDTAQETQYF

SEQ ID NO: 441089 - protein, 18 aa, Homo sapiens
  CDR3 for alpha chain variable domain of TCR clone 220545 (TRAV21, TRAJ52)
CAVRPSPAGGTSYGEPTF

SEQ ID NO: 441090 - protein, 17 aa, Homo sapiens
  CDR3 for beta chain variable domain of TCR clone 220545 (TRBV13, TRBJ2-3)
CASSLSRVAGGRNTQDF

SEQ ID NO: 441091 - protein, 12 aa, Homo sapiens
  CDR3 for alpha chain variable domain of TCR clone 220546 (TRAV17, TRAJ20)
CATYSNDYKLSF

SEQ ID NO: 441092 - protein, 16 aa, Homo sapiens
  CDR3 for beta chain variable domain of TCR clone 220546 (TRBV2, TRBJ2-1)
CASSVGGSLSYNEQFF

SEQ ID NO: 441093 - protein, 11 aa, Homo sapiens
  CDR3 for alpha chain variable domain of TCR clone 220547 (TRAV1-2, TRAJ20)
GAVANDDKLSF

SEQ ID NO: 441094 - protein, 18 aa, Homo sapiens
  CDR3 for beta chain variable domain of TCR clone 220547 (TRBV20-1, TRBJ2-6)
CSAETTPTHGSGANVLTF

SEQ ID NO: 441095 - protein, 14 aa, Homo sapiens
  CDR3 for alpha chain variable domain of TCR clone 220548 (TRAV13-2, TRAJ17)
FAENSKAAVNKLTF

SEQ ID NO: 441096 - protein, 11 aa, Homo sapiens
  CDR3 for beta chain variable domain of TCR clone 220548 (TRBV6-3, TRBJ2-3)
CATGQADTQYF

SEQ ID NO: 441097 - protein, 16 aa, Homo sapiens
  CDR3 for alpha chain variable domain of TCR clone 220549 (TRAV3, TRAJ37)
CAGRGKGSGNTGKLIL

SEQ ID NO: 441098 - protein, 13 aa, Homo sapiens
  CDR3 for beta chain variable domain of TCR clone 220549 (TRBV14, TRBJ2-7)
CASSQDRRYEQYF

SEQ ID NO: 441099 - protein, 18 aa, Homo sapiens
  CDR3 for alpha chain variable domain of TCR clone 220550 (TRAV3, TRAJ6)
CAVRDGPRAGGSYIPTSE

SEQ ID NO: 441100 - protein, 14 aa, Homo sapiens
  CDR3 for beta chain variable domain of TCR clone 220550 (TRBV7-2, TRBJ2-7)
CASSPKTSFYEQYF

SEQ ID NO: 441101 - protein, 17 aa, Homo sapiens
  CDR3 for alpha chain variable domain of TCR clone 220551 (TRAV3, TRAJ6)
CAVRDGPRAGGSYIPPF

SEQ ID NO: 441102 - protein, 15 aa, Homo sapiens
  CDR3 for beta chain variable domain of TCR clone 220551 (TRBV20-1, TRBJ1-1)
CNASWDRFLNTEAFF

SEQ ID NO: 441103 - protein, 13 aa, Homo sapiens
  CDR3 for alpha chain variable domain of TCR clone 220552 (TRAV23/DV6, TRAJ45)
CAARRGGADGLPF

SEQ ID NO: 441104 - protein, 14 aa, Homo sapiens
  CDR3 for beta chain variable domain of TCR clone 220552 (TRBV7-2, TRBJ2-5)
CASSPARGTETQYF

SEQ ID NO: 441105 - protein, 12 aa, Homo sapiens
  CDR3 for alpha chain variable domain of TCR clone 220553 (TRAV13-2, TRAJ8)
CAPWLGFQKLVF

SEQ ID NO: 441106 - protein, 15 aa, Homo sapiens
  CDR3 for beta chain variable domain of TCR clone 220553 (TRBV5-1, TRBJ1-4)
FAPAAWKDGNEKLFF

SEQ ID NO: 441107 - protein, 19 aa, Homo sapiens
  CDR3 for alpha chain variable domain of TCR clone 220554 (TRAV2, TRAJ20)
ILQVREADAAVYRDCKLSF

SEQ ID NO: 441108 - protein, 16 aa, Homo sapiens
  CDR3 for beta chain variable domain of TCR clone 220554 (TRBV9, TRBJ2-2)
CASSPMGKGNTGELFF

SEQ ID NO: 441109 - protein, 19 aa, Homo sapiens
  CDR3 for alpha chain variable domain of TCR clone 220555 (TRAV1-1, TRAJ27)
CAGSEMTRSSLEKGHDFIF

SEQ ID NO: 441110 - protein, 14 aa, Homo sapiens
  CDR3 for beta chain variable domain of TCR clone 220555 (TRBV11-3, TRBJ1-6)
CASSFSGGDSRLHF

SEQ ID NO: 441111 - protein, 11 aa, Homo sapiens
  CDR3 for alpha chain variable domain of TCR clone 220556 (TRAV2, TRAJ13)
CASGCYQKVTF

SEQ ID NO: 441112 - protein, 16 aa, Homo sapiens
  CDR3 for beta chain variable domain of TCR clone 220556 (TRBV19, TRBJ2-1)
CASSKAGPSSYNEQFF

SEQ ID NO: 441113 - protein, 17 aa, Homo sapiens
  CDR3 for alpha chain variable domain of TCR clone 220557 (TRAV12-3, TRAJ6)
CAMSARGGAGGSYIPTF

SEQ ID NO: 441114 - protein, 12 aa, Homo sapiens
  CDR3 for beta chain variable domain of TCR clone 220557 (TRBV12-4, TRBJ2-3)
CASSTLPDMQYF

SEQ ID NO: 441115 - protein, 14 aa, Homo sapiens
  CDR3 for alpha chain variable domain of TCR clone 220558 (TRAV1-1, TRAJ35)
CAVRSIGFGNVLHC

SEQ ID NO: 441116 - protein, 14 aa, Homo sapiens
  CDR3 for beta chain variable domain of TCR clone 220558 (TRBV5-7, TRBJ2-7)
CASSGGLSSYEQCF

SEQ ID NO: 441117 - protein, 16 aa, Homo sapiens
  CDR3 for alpha chain variable domain of TCR clone 220559 (TRAV8-2, TRAJ48)
CVVSDVSNFGNEKLTF

SEQ ID NO: 441118 - protein, 16 aa, Homo sapiens
  CDR3 for beta chain variable domain of TCR clone 220559 (TRBV29-1, TRBJ2-7)
CSVEDAEDGTAYEQYF

SEQ ID NO: 441119 - protein, 16 aa, Homo sapiens
  CDR3 for alpha chain variable domain of TCR clone 220560 (TRAV8-3, TRAJ13)
CAVGAYPSGGYQKVTF

SEQ ID NO: 441120 - protein, 14 aa, Homo sapiens
  CDR3 for beta chain variable domain of TCR clone 220560 (TRBV18, TRBJ2-5)
CTSSPRASSETQYF

SEQ ID NO: 441121 - protein, 15 aa, Homo sapiens
  CDR3 for alpha chain variable domain of TCR clone 220561 (TRAV30, TRAJ32)
CGTEILGVATNKPIF

SEQ ID NO: 441122 - protein, 17 aa, Homo sapiens
  CDR3 for beta chain variable domain of TCR clone 220561 (TRBV5-4, TRBJ2-1)
CASSSAGGRGPYNEQFF

SEQ ID NO: 441123 - protein, 13 aa, Homo sapiens
  CDR3 for alpha chain variable domain of TCR clone 220562 (TRAV27, TRAJ54)
CAGAGQGAQKLVF

SEQ ID NO: 441124 - protein, 16 aa, Homo sapiens
  CDR3 for beta chain variable domain of TCR clone 220562 (TRBV4-2, TRBJ2-3)
CASSQELAGDTDTQYF

SEQ ID NO: 441125 - protein, 14 aa, Homo sapiens
  CDR3 for alpha chain variable domain of TCR clone 220563 (TRAV20, TRAJ44)
CAVQDTGTASKLTF

SEQ ID NO: 441126 - protein, 13 aa, Homo sapiens
  CDR3 for beta chain variable domain of TCR clone 220563 (TRBV29-1, TRBJ1-3)
CSAGTERGNTIYF

SEQ ID NO: 441127 - protein, 14 aa, Homo sapiens
  CDR3 for alpha chain variable domain of TCR clone 220564 (TRAV12-3, TRAJ10)
SHLPLTGGGSKLTF

SEQ ID NO: 441128 - protein, 14 aa, Homo sapiens
  CDR3 for beta chain variable domain of TCR clone 220564 (TRBV6-1, TRBJ1-3)
CASVQGGGGNTMYF

SEQ ID NO: 441129 - protein, 14 aa, Homo sapiens
  CDR3 for alpha chain variable domain of TCR clone 220565 (TRAV36/DV7, TRAJ40)
CAVETTAGTYKYIF

SEQ ID NO: 441130 - protein, 13 aa, Homo sapiens
  CDR3 for beta chain variable domain of TCR clone 220565 (TRBV10-3, TRBJ2-5)
CAMTSGAGETQYF

SEQ ID NO: 441131 - protein, 15 aa, Homo sapiens
  CDR3 for alpha chain variable domain of TCR clone 220566 (TRAV29/DV5, TRAJ48)
CAASLGGFGNEKLTF

SEQ ID NO: 441132 - protein, 11 aa, Homo sapiens
  CDR3 for beta chain variable domain of TCR clone 220566 (TRBV20-1, TRBJ2-3)
CGGTSSTTQYF

SEQ ID NO: 441133 - protein, 18 aa, Homo sapiens
  CDR3 for alpha chain variable domain of TCR clone 220567 (TRAV21, TRAJ53)
CSVKGGENSGGSNYKLTF

SEQ ID NO: 441134 - protein, 13 aa, Homo sapiens
  CDR3 for beta chain variable domain of TCR clone 220567 (TRBV9, TRBJ2-1)
CASSPSGGSEQFF

SEQ ID NO: 441135 - protein, 18 aa, Homo sapiens
  CDR3 for alpha chain variable domain of TCR clone 220568 (TRAV21, TRAJ52)
CAVRPSPAGGTSYGKLTF

SEQ ID NO: 441136 - protein, 15 aa, Homo sapiens
  CDR3 for beta chain variable domain of TCR clone 220568 (TRBV24-1, TRBJ2-5)
CATSETTGAVGAQYF

SEQ ID NO: 441137 - protein, 18 aa, Homo sapiens
  CDR3 for alpha chain variable domain of TCR clone 220569 (TRAV21, TRAJ52)
CAVRPSPAGGTSYGKLTF

SEQ ID NO: 441138 - protein, 16 aa, Homo sapiens
  CDR3 for beta chain variable domain of TCR clone 220569 (TRBV19, TRBJ2-2)
CASRSPGTGATGELFC

SEQ ID NO: 441139 - protein, 17 aa, Homo sapiens
  CDR3 for alpha chain variable domain of TCR clone 220570 (TRAV3, TRAJ6)
CAVRDGPRAGGSYIPTF

SEQ ID NO: 441140 - protein, 12 aa, Homo sapiens
  CDR3 for beta chain variable domain of TCR clone 220570 (TRBV7-2, TRBJ2-7)
CASSLGDRKQYF

SEQ ID NO: 441141 - protein, 12 aa, Homo sapiens
  CDR3 for alpha chain variable domain of TCR clone 220571 (TRAV25, TRAJ35)
CAGIGFGNVPHC

SEQ ID NO: 441142 - protein, 12 aa, Homo sapiens
  CDR3 for beta chain variable domain of TCR clone 220571 (TRBV6-3, TRBJ2-7)
CASSRQGYEQYF

SEQ ID NO: 441143 - protein, 14 aa, Homo sapiens
  CDR3 for alpha chain variable domain of TCR clone 220572 (TRAV13-1, TRAJ44)
CAAKATGTASKLPF

SEQ ID NO: 441144 - protein, 16 aa, Homo sapiens
  CDR3 for beta chain variable domain of TCR clone 220572 (TRBV19, TRBJ2-1)
CASSKAGPSSYNEQFF

SEQ ID NO: 441145 - protein, 16 aa, Homo sapiens
  CDR3 for alpha chain variable domain of TCR clone 220573 (TRAV26-2, TRAJ52)
CIRGPAGGTSYGKLTF

SEQ ID NO: 441146 - protein, 15 aa, Homo sapiens
  CDR3 for beta chain variable domain of TCR clone 220573 (TRBV5-1, TRBJ2-1)
CSSSWGPGPGGEQFF

SEQ ID NO: 441147 - protein, 12 aa, Homo sapiens
  CDR3 for alpha chain variable domain of TCR clone 220574 (TRAV2, TRAJ9)
CAVVAGGFKTIF

SEQ ID NO: 441148 - protein, 13 aa, Homo sapiens
  CDR3 for beta chain variable domain of TCR clone 220574 (TRBV12-4, TRBJ2-7)
CASSPTETYEQYF

SEQ ID NO: 441149 - protein, 15 aa, Homo sapiens
  CDR3 for alpha chain variable domain of TCR clone 220575 (TRAV8-3, TRAJ11)
CAVGLLNSGYSTLTF

SEQ ID NO: 441150 - protein, 15 aa, Homo sapiens
  CDR3 for beta chain variable domain of TCR clone 220575 (TRBV19, TRBJ1-5)
CASSILTGENQPQHF

SEQ ID NO: 441151 - protein, 10 aa, Homo sapiens
  CDR3 for alpha chain variable domain of TCR clone 220576 (TRAV12-1, TRAJ37)
ARAKTGKLIF

SEQ ID NO: 441152 - protein, 15 aa, Homo sapiens
  CDR3 for beta chain variable domain of TCR clone 220576 (TRBV7-2, TRBJ2-3)
CASSLEQGGTDTQYF

SEQ ID NO: 441153 - protein, 14 aa, Homo sapiens
  CDR3 for alpha chain variable domain of TCR clone 220577 (TRAV21, TRAJ35)
CAVTPIGFGNVLHC

SEQ ID NO: 441154 - protein, 12 aa, Homo sapiens
  CDR3 for beta chain variable domain of TCR clone 220577 (TRBV7-9, TRBJ2-7)
CASSIKREEQYL

SEQ ID NO: 441155 - protein, 15 aa, Homo sapiens
  CDR3 for alpha chain variable domain of TCR clone 220578 (TRAV13-2, TRAJ45)
CAEHHSGGGADGLTF

SEQ ID NO: 441156 - protein, 15 aa, Homo sapiens
  CDR3 for beta chain variable domain of TCR clone 220578 (TRBV6-6, TRBJ2-5)
CASSPGGGLEETQYF

SEQ ID NO: 441157 - protein, 11 aa, Homo sapiens
  CDR3 for alpha chain variable domain of TCR clone 220579 (TRAV3, TRAJ21)
CAVGNFNKYYF

SEQ ID NO: 441158 - protein, 14 aa, Homo sapiens
  CDR3 for beta chain variable domain of TCR clone 220579 (TRBV18, TRBJ2-5)
CASSPGVSQETQYF

SEQ ID NO: 441159 - protein, 15 aa, Homo sapiens
  CDR3 for alpha chain variable domain of TCR clone 220580 (TRAV8-2, TRAJ27)
CVVSDRGTNAGKSTF

SEQ ID NO: 441160 - protein, 20 aa, Homo sapiens
  CDR3 for beta chain variable domain of TCR clone 220580 (TRBV7-8, TRBJ2-2)
CASSHLFPGPTIHITGELFF

SEQ ID NO: 441161 - protein, 12 aa, Homo sapiens
  CDR3 for alpha chain variable domain of TCR clone 220581 (TRAV2, TRAJ9)
CAVGAGGFKTIF

SEQ ID NO: 441162 - protein, 14 aa, Homo sapiens
  CDR3 for beta chain variable domain of TCR clone 220581 (TRBV7-7, TRBJ2-2)
CATRQDSDTGELFV

SEQ ID NO: 441163 - protein, 13 aa, Homo sapiens
  CDR3 for alpha chain variable domain of TCR clone 220582 (TRAV1-1, TRAJ9)
CAAKNTGGFKTIF

SEQ ID NO: 441164 - protein, 11 aa, Homo sapiens
  CDR3 for beta chain variable domain of TCR clone 220582 (TRBV7-8, TRBJ2-7)
CASSLSLEQYF

SEQ ID NO: 441165 - protein, 12 aa, Homo sapiens
  CDR3 for alpha chain variable domain of TCR clone 220583 (TRAV3, TRAJ39)
CAVIEWSNMLTF

SEQ ID NO: 441166 - protein, 14 aa, Homo sapiens
  CDR3 for beta chain variable domain of TCR clone 220583 (TRBV7-8, TRBJ2-3)
CASSSPDGQDTQYF

SEQ ID NO: 441167 - protein, 16 aa, Homo sapiens
  CDR3 for alpha chain variable domain of TCR clone 220584 (TRAV3, TRAJ10)
CAVRDMRAGGGNKLTF

SEQ ID NO: 441168 - protein, 15 aa, Homo sapiens
  CDR3 for beta chain variable domain of TCR clone 220584 (TRBV7-9, TRBJ1-1)
CASSPELGGGTEAFF

SEQ ID NO: 441169 - protein, 13 aa, Homo sapiens
  CDR3 for alpha chain variable domain of TCR clone 220585 (TRAV8-6, TRAJ48)
CAGVNFGNEKLTF

SEQ ID NO: 441170 - protein, 16 aa, Homo sapiens
  CDR3 for beta chain variable domain of TCR clone 220585 (TRBV4-2, TRBJ2-6)
CASSQARSSGANDLTF

SEQ ID NO: 441171 - protein, 14 aa, Homo sapiens
  CDR3 for alpha chain variable domain of TCR clone 220586 (TRAV12-2, TRAJ13)
CAVKKTGGYQKVTF

SEQ ID NO: 441172 - protein, 14 aa, Homo sapiens
  CDR3 for beta chain variable domain of TCR clone 220586 (TRBV12-5, TRBJ2-7)
CASGSRTHQETQYF

SEQ ID NO: 441173 - protein, 16 aa, Homo sapiens
  CDR3 for alpha chain variable domain of TCR clone 220587 (TRAV1-2, TRAJ10)
CAVRGVLTGGGNKLTF

SEQ ID NO: 441174 - protein, 14 aa, Homo sapiens
  CDR3 for beta chain variable domain of TCR clone 220587 (TRBV25-1, TRBJ1-1)
CASTQLGGNTEAFF

SEQ ID NO: 441175 - protein, 12 aa, Homo sapiens
  CDR3 for alpha chain variable domain of TCR clone 220588 (TRAV13-2, TRAJ8)
CAPWLGFQKLVF

SEQ ID NO: 441176 - protein, 11 aa, Homo sapiens
  CDR3 for beta chain variable domain of TCR clone 220588 (TRBV6-5, TRBJ2-2)
CASSRTGELFF

SEQ ID NO: 441177 - protein, 11 aa, Homo sapiens
  CDR3 for alpha chain variable domain of TCR clone 220589 (TRAV4, TRAJ23)
CLVAPGGKLIF

SEQ ID NO: 441178 - protein, 15 aa, Homo sapiens
  CDR3 for beta chain variable domain of TCR clone 220589 (TRBV7-2, TRBJ2-7)
CASSLKGALTYEQYF

SEQ ID NO: 441179 - protein, 17 aa, Homo sapiens
  CDR3 for alpha chain variable domain of TCR clone 220590 (TRAV38-2/DV8, TRAJ23)
CALSRKLIFGQGTELSV

SEQ ID NO: 441180 - protein, 17 aa, Homo sapiens
  CDR3 for beta chain variable domain of TCR clone 220590 (TRBV20-1, TRBJ2-2)
CSASGSGQGGLTGELFF

SEQ ID NO: 441181 - protein, 15 aa, Homo sapiens
  CDR3 for alpha chain variable domain of TCR clone 220591 (TRAV12-2, TRAJ53)
CAVNGGGGSNDKLTF

SEQ ID NO: 441182 - protein, 16 aa, Homo sapiens
  CDR3 for beta chain variable domain of TCR clone 220591 (TRBV4-1, TRBJ1-2)
CASSQDAGQVLYGYTF

SEQ ID NO: 441183 - protein, 14 aa, Homo sapiens
  CDR3 for alpha chain variable domain of TCR clone 220592 (TRAV9-2, TRAJ39)
CALYIYNAGNMLTF

SEQ ID NO: 441184 - protein, 17 aa, Homo sapiens
  CDR3 for beta chain variable domain of TCR clone 220592 (TRBV18, TRBJ2-1)
CASSKGLSGGADNEQFF

SEQ ID NO: 441185 - protein, 19 aa, Homo sapiens
  CDR3 for alpha chain variable domain of TCR clone 220593 (TRAV40, )
CLPIPDIQNPDPAVYQLRD

SEQ ID NO: 441186 - protein, 15 aa, Homo sapiens
  CDR3 for beta chain variable domain of TCR clone 220593 (TRBV7-9, TRBJ2-7)
CASSLALAEAYEQYF

SEQ ID NO: 441187 - protein, 23 aa, Homo sapiens
  CDR3 for alpha chain variable domain of TCR clone 220594 (TRAV8-4, TRAJ38)
CARLNSGNNHNQNPDPAVYQLSY

SEQ ID NO: 441188 - protein, 14 aa, Homo sapiens
  CDR3 for beta chain variable domain of TCR clone 220594 (TRBV7-8, TRBJ2-3)
CASSLEAGTDTQYF

SEQ ID NO: 441189 - protein, 14 aa, Homo sapiens
  CDR3 for alpha chain variable domain of TCR clone 220595 (TRAV17, TRAJ37)
CATDGSSNTCKLIF

SEQ ID NO: 441190 - protein, 13 aa, Homo sapiens
  CDR3 for beta chain variable domain of TCR clone 220595 (TRBV12-5, TRBJ2-3)
CASGDRQSDTQYF

SEQ ID NO: 441191 - protein, 12 aa, Homo sapiens
  CDR3 for alpha chain variable domain of TCR clone 220596 (TRAV17, TRAJ49)
CATVTTGNQFYF

SEQ ID NO: 441192 - protein, 13 aa, Homo sapiens
  CDR3 for beta chain variable domain of TCR clone 220596 (TRBV19, TRBJ2-1)
CASSMYRVNEQFF

SEQ ID NO: 441193 - protein, 15 aa, Homo sapiens
  CDR3 for alpha chain variable domain of TCR clone 220597 (TRAV8-3, TRAJ40)
CAAPSLGSGTYKSIF

SEQ ID NO: 441194 - protein, 16 aa, Homo sapiens
  CDR3 for beta chain variable domain of TCR clone 220597 (TRBV7-3, TRBJ2-3)
CASSLSGYRPEDTQYL

SEQ ID NO: 441195 - protein, 10 aa, Homo sapiens
  CDR3 for alpha chain variable domain of TCR clone 220598 (TRAV13-1, TRAJ30)
CAAVDDKIIF

SEQ ID NO: 441196 - protein, 17 aa, Homo sapiens
  CDR3 for beta chain variable domain of TCR clone 220598 (TRBV7-8, TRBJ2-6)
CASSAGTGGAGANVLTF

SEQ ID NO: 441197 - protein, 15 aa, Homo sapiens
  CDR3 for alpha chain variable domain of TCR clone 220599 (TRAV12-1, TRAJ44)
CVVDTPQGTASKLTF

SEQ ID NO: 441198 - protein, 13 aa, Homo sapiens
  CDR3 for beta chain variable domain of TCR clone 220599 (TRBV27, TRBJ2-1)
CASSSRSYNEQFF

SEQ ID NO: 441199 - protein, 16 aa, Homo sapiens
  CDR3 for alpha chain variable domain of TCR clone 220600 (TRAV3, TRAJ21)
CAVRDIERGNFNKFYF

SEQ ID NO: 441200 - protein, 13 aa, Homo sapiens
  CDR3 for beta chain variable domain of TCR clone 220600 (TRBV29-1, TRBJ1-1)
CSVGDSRNTEAFF

SEQ ID NO: 441201 - protein, 14 aa, Homo sapiens
  CDR3 for alpha chain variable domain of TCR clone 220601 (TRAV17, TRAJ39)
CDTDPVRAGNMLTF

SEQ ID NO: 441202 - protein, 15 aa, Homo sapiens
  CDR3 for beta chain variable domain of TCR clone 220601 (TRBV13, TRBJ1-5)
CASSFGQGGVQPQHF

SEQ ID NO: 441203 - protein, 13 aa, Homo sapiens
  CDR3 for alpha chain variable domain of TCR clone 220602 (TRAV8-1, TRAJ28)
CAVSGAGSYQLTF

SEQ ID NO: 441204 - protein, 14 aa, Homo sapiens
  CDR3 for beta chain variable domain of TCR clone 220602 (TRBV7-2, TRBJ2-2)
CASRGQGAAWELFF

SEQ ID NO: 441205 - protein, 12 aa, Homo sapiens
  CDR3 for alpha chain variable domain of TCR clone 220603 (TRAV3, TRAJ20)
CAVRDPDYKLSF

SEQ ID NO: 441206 - protein, 15 aa, Homo sapiens
  CDR3 for beta chain variable domain of TCR clone 220603 (TRBV28, TRBJ2-7)
CASSVRQVSSYEQYF

SEQ ID NO: 441207 - protein, 14 aa, Homo sapiens
  CDR3 for alpha chain variable domain of TCR clone 220604 (TRAV35, TRAJ13)
CAGRSPGGYQKVTF

SEQ ID NO: 441208 - protein, 15 aa, Homo sapiens
  CDR3 for beta chain variable domain of TCR clone 220604 (TRBV11-2, TRBJ2-1)
CASSKNRGLIYEQFF

SEQ ID NO: 441209 - protein, 13 aa, Homo sapiens
  CDR3 for alpha chain variable domain of TCR clone 220605 (TRAV8-3, TRAJ31)
CAVGARNNARLMF

SEQ ID NO: 441210 - protein, 16 aa, Homo sapiens
  CDR3 for beta chain variable domain of TCR clone 220605 (TRBV18, TRBJ1-3)
CASSLGILNGESTVYF

SEQ ID NO: 441211 - protein, 14 aa, Homo sapiens
  CDR3 for alpha chain variable domain of TCR clone 220606 (TRAV1-2, TRAJ29)
CAVRTDSGNTPLVF

SEQ ID NO: 441212 - protein, 14 aa, Homo sapiens
  CDR3 for beta chain variable domain of TCR clone 220606 (TRBV7-2, TRBJ2-7)
CASSPKTSFYEQDF

SEQ ID NO: 441213 - protein, 15 aa, Homo sapiens
  CDR3 for alpha chain variable domain of TCR clone 220607 (TRAV26-2, TRAJ45)
CILRDRVDHEEVLTD

SEQ ID NO: 441214 - protein, 15 aa, Homo sapiens
  CDR3 for beta chain variable domain of TCR clone 220607 (TRBV7-6, TRBJ2-5)
CASSKPTGPQETQYF

SEQ ID NO: 441215 - protein, 16 aa, Homo sapiens
  CDR3 for alpha chain variable domain of TCR clone 220608 (TRAV14/DV4, TRAJ6)
CAMRDQISGGSYIPTF

SEQ ID NO: 441216 - protein, 15 aa, Homo sapiens
  CDR3 for beta chain variable domain of TCR clone 220608 (TRBV9, TRBJ1-6)
CASSVAGTGDSPLHF

SEQ ID NO: 441217 - protein, 15 aa, Homo sapiens
  CDR3 for alpha chain variable domain of TCR clone 220609 (TRAV12-2, TRAJ23)
CAVKPIYNQGGKLIF

SEQ ID NO: 441218 - protein, 14 aa, Homo sapiens
  CDR3 for beta chain variable domain of TCR clone 220609 (TRBV7-2, TRBJ2-7)
CASSPKASFYEQYF

SEQ ID NO: 441219 - protein, 14 aa, Homo sapiens
  CDR3 for alpha chain variable domain of TCR clone 220610 (TRAV1-2, TRAJ16)
CAVNRFSDGQKLLF

SEQ ID NO: 441220 - protein, 13 aa, Homo sapiens
  CDR3 for beta chain variable domain of TCR clone 220610 (TRBV19, TRBJ1-2)
CASSVPGQDGYTF

SEQ ID NO: 441221 - protein, 12 aa, Homo sapiens
  CDR3 for alpha chain variable domain of TCR clone 220611 (TRAV16, TRAJ10)
CSRTGGGNKLTF

SEQ ID NO: 441222 - protein, 12 aa, Homo sapiens
  CDR3 for beta chain variable domain of TCR clone 220611 (TRBV12-5, TRBJ2-3)
CASQASTDTQYF

SEQ ID NO: 441223 - protein, 13 aa, Homo sapiens
  CDR3 for alpha chain variable domain of TCR clone 220612 (TRAV21, TRAJ20)
CAVGLRVDYKLSF

SEQ ID NO: 441224 - protein, 18 aa, Homo sapiens
  CDR3 for beta chain variable domain of TCR clone 220612 (TRBV5-1, TRBJ1-6)
CASSVGGGYGERNSPLHF

SEQ ID NO: 441225 - protein, 13 aa, Homo sapiens
  CDR3 for alpha chain variable domain of TCR clone 220613 (TRAV3, TRAJ36)
CAVRDTGANNLFF

SEQ ID NO: 441226 - protein, 14 aa, Homo sapiens
  CDR3 for beta chain variable domain of TCR clone 220613 (TRBV18, TRBJ2-7)
CASSPRGGAYEQYF

SEQ ID NO: 441227 - protein, 12 aa, Homo sapiens
  CDR3 for alpha chain variable domain of TCR clone 220614 (TRAV17, TRAJ30)
CVPERRDDTLIF

SEQ ID NO: 441228 - protein, 14 aa, Homo sapiens
  CDR3 for beta chain variable domain of TCR clone 220614 (TRBV7-7, TRBJ2-2)
CASSRDRSTGELFF

SEQ ID NO: 441229 - protein, 12 aa, Homo sapiens
  CDR3 for alpha chain variable domain of TCR clone 220615 (TRAV16, TRAJ56)
CAPTGANSKLTF

SEQ ID NO: 441230 - protein, 17 aa, Homo sapiens
  CDR3 for beta chain variable domain of TCR clone 220615 (TRBV27, TRBJ2-6)
CAGSLRGFASGANVLTF

SEQ ID NO: 441231 - protein, 13 aa, Homo sapiens
  CDR3 for alpha chain variable domain of TCR clone 220616 (TRAV27, TRAJ45)
CRRSGGGGDGLTF

SEQ ID NO: 441232 - protein, 17 aa, Homo sapiens
  CDR3 for beta chain variable domain of TCR clone 220616 (TRBV11-2, TRBJ2-1)
CASSLYPPGVEYNEQFF

SEQ ID NO: 441233 - protein, 16 aa, Homo sapiens
  CDR3 for alpha chain variable domain of TCR clone 220617 (TRAV38-2/DV8, TRAJ45)
CAYTTTSGGGADGLTL

SEQ ID NO: 441234 - protein, 14 aa, Homo sapiens
  CDR3 for beta chain variable domain of TCR clone 220617 (TRBV7-9, TRBJ2-2)
CASSFGHRTGELFF

SEQ ID NO: 441235 - protein, 15 aa, Homo sapiens
  CDR3 for alpha chain variable domain of TCR clone 220618 (TRAV21, TRAJ53)
CATLNSGGSNYKLTF

SEQ ID NO: 441236 - protein, 13 aa, Homo sapiens
  CDR3 for beta chain variable domain of TCR clone 220618 (TRBV7-9, TRBJ2-3)
CASSPGSTDTQDF

SEQ ID NO: 441237 - protein, 12 aa, Homo sapiens
  CDR3 for alpha chain variable domain of TCR clone 220619 (TRAV8-3, TRAJ20)
GAVGANDYKLSF

SEQ ID NO: 441238 - protein, 16 aa, Homo sapiens
  CDR3 for beta chain variable domain of TCR clone 220619 (TRBV19, TRBJ2-2)
CASRSPGIGATGELFF

SEQ ID NO: 441239 - protein, 14 aa, Homo sapiens
  CDR3 for alpha chain variable domain of TCR clone 220620 (TRAV38-1, TRAJ29)
CAFITPSGNTPLVF

SEQ ID NO: 441240 - protein, 16 aa, Homo sapiens
  CDR3 for beta chain variable domain of TCR clone 220620 (TRBV12-4, TRBJ1-5)
CASSRPVGGSNQPQHF

SEQ ID NO: 441241 - protein, 14 aa, Homo sapiens
  CDR3 for alpha chain variable domain of TCR clone 220621 (TRAV17, TRAJ57)
CATDPQGGSEQLVF

SEQ ID NO: 441242 - protein, 15 aa, Homo sapiens
  CDR3 for beta chain variable domain of TCR clone 220621 (TRBV5-1, TRBJ2-7)
CASSLDLTSSYEQYF

SEQ ID NO: 441243 - protein, 13 aa, Homo sapiens
  CDR3 for alpha chain variable domain of TCR clone 220622 (TRAV21, TRAJ57)
CAVTQGGSEKLVF

SEQ ID NO: 441244 - protein, 16 aa, Homo sapiens
  CDR3 for beta chain variable domain of TCR clone 220622 (TRBV15, TRBJ1-2)
CATSRGPRTGGGGYTF

SEQ ID NO: 441245 - protein, 12 aa, Homo sapiens
  CDR3 for alpha chain variable domain of TCR clone 220623 (TRAV12-1, TRAJ20)
CVVNPDNYKLSF

SEQ ID NO: 441246 - protein, 15 aa, Homo sapiens
  CDR3 for beta chain variable domain of TCR clone 220623 (TRBV11-3, TRBJ2-2)
CASSLVGTGAGELFF

SEQ ID NO: 441247 - protein, 11 aa, Homo sapiens
  CDR3 for alpha chain variable domain of TCR clone 220624 (TRAV20, TRAJ23)
CACNPGGKLIF

SEQ ID NO: 441248 - protein, 16 aa, Homo sapiens
  CDR3 for beta chain variable domain of TCR clone 220624 (TRBV7-8, TRBJ2-5)
CASSFGGQPAQETQYF

SEQ ID NO: 441249 - protein, 13 aa, Homo sapiens
  CDR3 for alpha chain variable domain of TCR clone 220625 (TRAV26-1, TRAJ29)
CIVRRSGNTPLVF

SEQ ID NO: 441250 - protein, 18 aa, Homo sapiens
  CDR3 for beta chain variable domain of TCR clone 220625 (TRBV5-1, TRBJ1-6)
CASSVGGGYGERNSPLHF

SEQ ID NO: 441251 - protein, 13 aa, Homo sapiens
  CDR3 for alpha chain variable domain of TCR clone 220626 (TRAV25, TRAJ17)
CAGLRAAGNKLTF

SEQ ID NO: 441252 - protein, 15 aa, Homo sapiens
  CDR3 for beta chain variable domain of TCR clone 220626 (TRBV9, TRBJ2-1)
CASSPWGGLSDEQFF

SEQ ID NO: 441253 - protein, 17 aa, Homo sapiens
  CDR3 for alpha chain variable domain of TCR clone 220627 (TRAV3, TRAJ38)
CAVRDCLNAGNNRKLIW

SEQ ID NO: 441254 - protein, 14 aa, Homo sapiens
  CDR3 for beta chain variable domain of TCR clone 220627 (TRBV19, TRBJ2-1)
CASSSGRDYNEQFF

SEQ ID NO: 441255 - protein, 15 aa, Homo sapiens
  CDR3 for alpha chain variable domain of TCR clone 220628 (TRAV2, TRAJ15)
CAVEDRGQAGTALIF

SEQ ID NO: 441256 - protein, 15 aa, Homo sapiens
  CDR3 for beta chain variable domain of TCR clone 220628 (TRBV20-1, TRBJ1-5)
CSATSDRGLGKPQHF

SEQ ID NO: 441257 - protein, 14 aa, Homo sapiens
  CDR3 for alpha chain variable domain of TCR clone 220629 (TRAV16, TRAJ17)
CAPRIKAAGNKPTF

SEQ ID NO: 441258 - protein, 17 aa, Homo sapiens
  CDR3 for beta chain variable domain of TCR clone 220629 (TRBV7-2, TRBJ2-3)
CASSSYSGTRRADTQYF

SEQ ID NO: 441259 - protein, 15 aa, Homo sapiens
  CDR3 for alpha chain variable domain of TCR clone 220630 (TRAV8-4, TRAJ37)
RAVSRGSGNTGKLIF

SEQ ID NO: 441260 - protein, 15 aa, Homo sapiens
  CDR3 for beta chain variable domain of TCR clone 220630 (TRBV5-1, TRBJ2-7)
CASSLDLTSSYEQYF

SEQ ID NO: 441261 - protein, 16 aa, Homo sapiens
  CDR3 for alpha chain variable domain of TCR clone 220631 (TRAV13-1, TRAJ10)
CAAGYILTGGGNKLTF

SEQ ID NO: 441262 - protein, 15 aa, Homo sapiens
  CDR3 for beta chain variable domain of TCR clone 220631 (TRBV12-4, TRBJ2-7)
SASSQTGAISYEQYF

SEQ ID NO: 441263 - protein, 15 aa, Homo sapiens
  CDR3 for alpha chain variable domain of TCR clone 220632 (TRAV35, TRAJ23)
CAGPLENNQGGKLIF

SEQ ID NO: 441264 - protein, 14 aa, Homo sapiens
  CDR3 for beta chain variable domain of TCR clone 220632 (TRBV7-9, TRBJ1-1)
CASTPLQSYTEAFF

SEQ ID NO: 441265 - protein, 15 aa, Homo sapiens
  CDR3 for alpha chain variable domain of TCR clone 220633 (TRAV21, TRAJ40)
CAVRPQTSGTYKYIF

SEQ ID NO: 441266 - protein, 13 aa, Homo sapiens
  CDR3 for beta chain variable domain of TCR clone 220633 (TRBV7-2, TRBJ2-2)
CSSSAVRARELFF

SEQ ID NO: 441267 - protein, 16 aa, Homo sapiens
  CDR3 for alpha chain variable domain of TCR clone 220634 (TRAV30, TRAJ24)
CGTEIVYADSWGKFQF

SEQ ID NO: 441268 - protein, 18 aa, Homo sapiens
  CDR3 for beta chain variable domain of TCR clone 220634 (TRBV7-9, TRBJ2-7)
CASSLTTSGSRTWYEQYF

SEQ ID NO: 441269 - protein, 14 aa, Homo sapiens
  CDR3 for alpha chain variable domain of TCR clone 220635 (TRAV1-2, TRAJ8)
CAVREDKGFQKLVF

SEQ ID NO: 441270 - protein, 16 aa, Homo sapiens
  CDR3 for beta chain variable domain of TCR clone 220635 (TRBV7-3, TRBJ2-2)
CASSLKRGTLSGELFF

SEQ ID NO: 441271 - protein, 11 aa, Homo sapiens
  CDR3 for alpha chain variable domain of TCR clone 220636 (TRAV3, TRAJ21)
CAVGNFNKFYF

SEQ ID NO: 441272 - protein, 16 aa, Homo sapiens
  CDR3 for beta chain variable domain of TCR clone 220636 (TRBV27, TRBJ2-2)
CASSLRPGGAPGELFF

SEQ ID NO: 441273 - protein, 13 aa, Homo sapiens
  CDR3 for alpha chain variable domain of TCR clone 220637 (TRAV8-6, TRAJ49)
CAVITNTGNQFYF

SEQ ID NO: 441274 - protein, 14 aa, Homo sapiens
  CDR3 for beta chain variable domain of TCR clone 220637 (TRBV2, TRBJ2-2)
CASSLFGGNGELFF

SEQ ID NO: 441275 - protein, 14 aa, Homo sapiens
  CDR3 for alpha chain variable domain of TCR clone 220638 (TRAV12-2, TRAJ6)
CASKWGGGSYIPTF

SEQ ID NO: 441276 - protein, 15 aa, Homo sapiens
  CDR3 for beta chain variable domain of TCR clone 220638 (TRBV10-3, TRBJ2-3)
CAISLTSGGTDTQYF

SEQ ID NO: 441277 - protein, 23 aa, Homo sapiens
  CDR3 for alpha chain variable domain of TCR clone 220639 (TRAV26-1, TRAJ38)
CIADNAGNNHIQNPDPAGHQLRD

SEQ ID NO: 441278 - protein, 16 aa, Homo sapiens
  CDR3 for beta chain variable domain of TCR clone 220639 (TRBV7-9, TRBJ1-2)
CASSLGFSSGEDGYTF

SEQ ID NO: 441279 - protein, 14 aa, Homo sapiens
  CDR3 for alpha chain variable domain of TCR clone 220640 (TRAV2, TRAJ3)
CAVDRYSSASKIIF

SEQ ID NO: 441280 - protein, 15 aa, Homo sapiens
  CDR3 for beta chain variable domain of TCR clone 220640 (TRBV5-1, TRBJ2-3)
CASSVTSGSTDTQYF

SEQ ID NO: 441281 - protein, 14 aa, Homo sapiens
  CDR3 for alpha chain variable domain of TCR clone 220641 (TRAV26-2, TRAJ38)
CILYNAGNNHKLIW

SEQ ID NO: 441282 - protein, 14 aa, Homo sapiens
  CDR3 for beta chain variable domain of TCR clone 220641 (TRBV19, TRBJ2-1)
CASPTFVLSGEQFF

SEQ ID NO: 441283 - protein, 14 aa, Homo sapiens
  CDR3 for alpha chain variable domain of TCR clone 220642 (TRAV3, TRAJ6)
CAVRDWGGSYIPTF

SEQ ID NO: 441284 - protein, 15 aa, Homo sapiens
  CDR3 for beta chain variable domain of TCR clone 220642 (TRBV5-1, TRBJ2-1)
CASSPPRAPYNEQFF

SEQ ID NO: 441285 - protein, 11 aa, Homo sapiens
  CDR3 for alpha chain variable domain of TCR clone 220643 (TRAV3, TRAJ21)
CAVGNFNKFYF

SEQ ID NO: 441286 - protein, 16 aa, Homo sapiens
  CDR3 for beta chain variable domain of TCR clone 220643 (TRBV12-4, TRBJ1-5)
CASSRPSGGSNQPQHF

SEQ ID NO: 441287 - protein, 13 aa, Homo sapiens
  CDR3 for alpha chain variable domain of TCR clone 220644 (TRAV13-1, TRAJ5)
CAAEHTGRRAITF

SEQ ID NO: 441288 - protein, 13 aa, Homo sapiens
  CDR3 for beta chain variable domain of TCR clone 220644 (TRBV10-2, TRBJ2-1)
CASGASGDAKQFF

SEQ ID NO: 441289 - protein, 15 aa, Homo sapiens
  CDR3 for alpha chain variable domain of TCR clone 220645 (TRAV21, TRAJ24)
CAARSSTDSWGKLQF

SEQ ID NO: 441290 - protein, 11 aa, Homo sapiens
  CDR3 for beta chain variable domain of TCR clone 220645 (TRBV11-3, TRBJ2-2)
CASSLPGELFF

SEQ ID NO: 441291 - protein, 12 aa, Homo sapiens
  CDR3 for alpha chain variable domain of TCR clone 220646 (TRAV21, TRAJ20)
CAVRGNDYKLSF

SEQ ID NO: 441292 - protein, 14 aa, Homo sapiens
  CDR3 for beta chain variable domain of TCR clone 220646 (TRBV7-8, TRBJ2-7)
CASSETQGADEQYF

SEQ ID NO: 441293 - protein, 11 aa, Homo sapiens
  CDR3 for alpha chain variable domain of TCR clone 220647 (TRAV2, TRAJ13)
CASGGYQEVTF

SEQ ID NO: 441294 - protein, 16 aa, Homo sapiens
  CDR3 for beta chain variable domain of TCR clone 220647 (TRBV19, TRBJ2-1)
CASSKAGPSSYNEQFF

SEQ ID NO: 441295 - protein, 14 aa, Homo sapiens
  CDR3 for alpha chain variable domain of TCR clone 220648 (TRAV8-4, TRAJ15)
CAVIIREAGTALIF

SEQ ID NO: 441296 - protein, 13 aa, Homo sapiens
  CDR3 for beta chain variable domain of TCR clone 220648 (TRBV10-3, TRBJ2-7)
CAISEKGGYEQYF

SEQ ID NO: 441297 - protein, 15 aa, Homo sapiens
  CDR3 for alpha chain variable domain of TCR clone 220649 (TRAV3, TRAJ3)
CAVRDMSSSASKIIF

SEQ ID NO: 441298 - protein, 17 aa, Homo sapiens
  CDR3 for beta chain variable domain of TCR clone 220649 (TRBV24-1, TRBJ2-1)
CATSDVSTSGTHNEQFF

SEQ ID NO: 441299 - protein, 14 aa, Homo sapiens
  CDR3 for alpha chain variable domain of TCR clone 220650 (TRAV2, TRAJ29)
CAGPFQYGNTPLVF

SEQ ID NO: 441300 - protein, 11 aa, Homo sapiens
  CDR3 for beta chain variable domain of TCR clone 220650 (TRBV29-1, TRBJ2-5)
CSGDRTGTQYF

SEQ ID NO: 441301 - protein, 15 aa, Homo sapiens
  CDR3 for alpha chain variable domain of TCR clone 220651 (TRAV12-1, TRAJ42)
CVVTRDGGSQGNLIF

SEQ ID NO: 441302 - protein, 14 aa, Homo sapiens
  CDR3 for beta chain variable domain of TCR clone 220651 (TRBV11-2, TRBJ2-3)
CASSLGGGANTQYY

SEQ ID NO: 441303 - protein, 13 aa, Homo sapiens
  CDR3 for alpha chain variable domain of TCR clone 220652 (TRAV38-1, TRAJ42)
CARWGGSQGNLIF

SEQ ID NO: 441304 - protein, 14 aa, Homo sapiens
  CDR3 for beta chain variable domain of TCR clone 220652 (TRBV7-3, TRBJ2-1)
CASSLGTSANEQFF

SEQ ID NO: 441305 - protein, 16 aa, Homo sapiens
  CDR3 for alpha chain variable domain of TCR clone 220653 (TRAV23/DV6, TRAJ9)
CAASKGGNTGGFKTIF

SEQ ID NO: 441306 - protein, 13 aa, Homo sapiens
  CDR3 for beta chain variable domain of TCR clone 220653 (TRBV7-2, TRBJ2-7)
CASSSPSGSEQYF

SEQ ID NO: 441307 - protein, 14 aa, Homo sapiens
  CDR3 for alpha chain variable domain of TCR clone 220654 (TRAV1-2, TRAJ16)
CAVNRFSDGQKLLF

SEQ ID NO: 441308 - protein, 18 aa, Homo sapiens
  CDR3 for beta chain variable domain of TCR clone 220654 (TRBV12-4, TRBJ2-3)
CASRSRRRGLFRTDTQYF

SEQ ID NO: 441309 - protein, 11 aa, Homo sapiens
  CDR3 for alpha chain variable domain of TCR clone 220655 (TRAV12-2, TRAJ47)
CAVNNGNKLVF

SEQ ID NO: 441310 - protein, 13 aa, Homo sapiens
  CDR3 for beta chain variable domain of TCR clone 220655 (TRBV7-9, TRBJ1-2)
CASSLKQNYGYTF

SEQ ID NO: 441311 - protein, 12 aa, Homo sapiens
  CDR3 for alpha chain variable domain of TCR clone 220656 (TRAV12-2, TRAJ34)
CAVSYNTDKLIF

SEQ ID NO: 441312 - protein, 16 aa, Homo sapiens
  CDR3 for beta chain variable domain of TCR clone 220656 (TRBV27, TRBJ2-5)
WASSYGPGGQKETQYF

SEQ ID NO: 441313 - protein, 11 aa, Homo sapiens
  CDR3 for alpha chain variable domain of TCR clone 220657 (TRAV8-6, TRAJ23)
CAVISGGELIF

SEQ ID NO: 441314 - protein, 14 aa, Homo sapiens
  CDR3 for beta chain variable domain of TCR clone 220657 (TRBV12-5, TRBJ2-5)
CASGSRTHQETQYF

SEQ ID NO: 441315 - protein, 13 aa, Homo sapiens
  CDR3 for alpha chain variable domain of TCR clone 220658 (TRAV8-2, TRAJ49)
CVVSPSTGNQFYF

SEQ ID NO: 441316 - protein, 14 aa, Homo sapiens
  CDR3 for beta chain variable domain of TCR clone 220658 (TRBV11-2, TRBJ2-7)
CASIRSGGAGEQYF

SEQ ID NO: 441317 - protein, 12 aa, Homo sapiens
  CDR3 for alpha chain variable domain of TCR clone 220659 (TRAV9-2, TRAJ36)
CALKKGANNLFF

SEQ ID NO: 441318 - protein, 13 aa, Homo sapiens
  CDR3 for beta chain variable domain of TCR clone 220659 (TRBV27, TRBJ1-1)
CASSVSIGAEAFF

SEQ ID NO: 441319 - protein, 15 aa, Homo sapiens
  CDR3 for alpha chain variable domain of TCR clone 220660 (TRAV17, TRAJ13)
CATDAGSGGYQKVTF

SEQ ID NO: 441320 - protein, 18 aa, Homo sapiens
  CDR3 for beta chain variable domain of TCR clone 220660 (TRBV11-2, TRBJ2-6)
CASSLNPFLGTGANVLTF

SEQ ID NO: 441321 - protein, 14 aa, Homo sapiens
  CDR3 for alpha chain variable domain of TCR clone 220661 (TRAV35, TRAJ50)
CAGHRKTSYDKVIF

SEQ ID NO: 441322 - protein, 14 aa, Homo sapiens
  CDR3 for beta chain variable domain of TCR clone 220661 (TRBV5-4, TRBJ1-1)
CASSLDSRRDEAFF

SEQ ID NO: 441323 - protein, 14 aa, Homo sapiens
  CDR3 for alpha chain variable domain of TCR clone 220662 (TRAV12-2, TRAJ17)
CAVLFKAAGKKLTF

SEQ ID NO: 441324 - protein, 17 aa, Homo sapiens
  CDR3 for beta chain variable domain of TCR clone 220662 (TRBV11-2, TRBJ2-1)
CASSLYPPGVEYNEQFF

SEQ ID NO: 441325 - protein, 12 aa, Homo sapiens
  CDR3 for alpha chain variable domain of TCR clone 220663 (TRAV12-3, TRAJ5)
CAMDTGRRALTF

SEQ ID NO: 441326 - protein, 13 aa, Homo sapiens
  CDR3 for beta chain variable domain of TCR clone 220663 (TRBV7-7, TRBJ2-2)
CASSLTSAGEQFF

SEQ ID NO: 441327 - protein, 12 aa, Homo sapiens
  CDR3 for alpha chain variable domain of TCR clone 220664 (TRAV30, TRAJ43)
CGTEERGNDMRF

SEQ ID NO: 441328 - protein, 15 aa, Homo sapiens
  CDR3 for beta chain variable domain of TCR clone 220664 (TRBV29-1, TRBJ2-1)
CSVGRHALFYNEQFF

SEQ ID NO: 441329 - protein, 12 aa, Homo sapiens
  CDR3 for alpha chain variable domain of TCR clone 220665 (TRAV12-3, TRAJ17)
CAMTLTGNKLTF

SEQ ID NO: 441330 - protein, 12 aa, Homo sapiens
  CDR3 for beta chain variable domain of TCR clone 220665 (TRBV7-3, TRBJ1-3)
CASSLGGNTIYF

SEQ ID NO: 441331 - protein, 14 aa, Homo sapiens
  CDR3 for alpha chain variable domain of TCR clone 220666 (TRAV17, TRAJ57)
CATDPQGGSEKLVF

SEQ ID NO: 441332 - protein, 15 aa, Homo sapiens
  CDR3 for beta chain variable domain of TCR clone 220666 (TRBV5-5, TRBJ1-6)
CASSLVIVGNSPLHF

SEQ ID NO: 441333 - protein, 11 aa, Homo sapiens
  CDR3 for alpha chain variable domain of TCR clone 220667 (TRAV21, TRAJ34)
CAVTNTDKLIF

SEQ ID NO: 441334 - protein, 16 aa, Homo sapiens
  CDR3 for beta chain variable domain of TCR clone 220667 (TRBV6-1, TRBJ2-5)
CASSEALDRGAETQYF

SEQ ID NO: 441335 - protein, 16 aa, Homo sapiens
  CDR3 for alpha chain variable domain of TCR clone 220668 (TRAV3, TRAJ10)
CAVRDMRAGGGNKLTF

SEQ ID NO: 441336 - protein, 13 aa, Homo sapiens
  CDR3 for beta chain variable domain of TCR clone 220668 (TRBV10-3, TRBJ1-2)
CAISERDSYGYTF

SEQ ID NO: 441337 - protein, 15 aa, Homo sapiens
  CDR3 for alpha chain variable domain of TCR clone 220669 (TRAV16, TRAJ10)
FALEGLTGGGNKLTF

SEQ ID NO: 441338 - protein, 16 aa, Homo sapiens
  CDR3 for beta chain variable domain of TCR clone 220669 (TRBV5-7, TRBJ1-1)
CASSLVGPRGNTEAFF

SEQ ID NO: 441339 - protein, 15 aa, Homo sapiens
  CDR3 for alpha chain variable domain of TCR clone 220670 (TRAV8-6, TRAJ6)
CAVSGESGGSYIPTV

SEQ ID NO: 441340 - protein, 14 aa, Homo sapiens
  CDR3 for beta chain variable domain of TCR clone 220670 (TRBV7-9, TRBJ2-1)
CASSSMVGFGEQFF

SEQ ID NO: 441341 - protein, 13 aa, Homo sapiens
  CDR3 for alpha chain variable domain of TCR clone 220671 (TRAV8-6, TRAJ21)
CAVSPSSLNKFYF

SEQ ID NO: 441342 - protein, 14 aa, Homo sapiens
  CDR3 for beta chain variable domain of TCR clone 220671 (TRBV7-9, TRBJ2-5)
CASSLDTAQETQSF

SEQ ID NO: 441343 - protein, 16 aa, Homo sapiens
  CDR3 for alpha chain variable domain of TCR clone 220672 (TRAV13-1, TRAJ48)
CAAGIFGNFGNEKLTF

SEQ ID NO: 441344 - protein, 14 aa, Homo sapiens
  CDR3 for beta chain variable domain of TCR clone 220672 (TRBV24-1, TRBJ1-1)
CATSIPRGDTEAFF

SEQ ID NO: 441345 - protein, 14 aa, Homo sapiens
  CDR3 for alpha chain variable domain of TCR clone 220673 (TRAV36/DV7, TRAJ48)
CAQRRDFGNEKLTF

SEQ ID NO: 441346 - protein, 13 aa, Homo sapiens
  CDR3 for beta chain variable domain of TCR clone 220673 (TRBV28, TRBJ2-4)
CQHQVTGVNIQYF

SEQ ID NO: 441347 - protein, 14 aa, Homo sapiens
  CDR3 for alpha chain variable domain of TCR clone 220674 (TRAV1-2, TRAJ16)
CAVNRFSDGQKLLF

SEQ ID NO: 441348 - protein, 14 aa, Homo sapiens
  CDR3 for beta chain variable domain of TCR clone 220674 (TRBV5-1, TRBJ2-7)
CASSLTGSGYEQYF

SEQ ID NO: 441349 - protein, 17 aa, Homo sapiens
  CDR3 for alpha chain variable domain of TCR clone 220675 (TRAV3, TRAJ42)
CAVRDRDYGGSQGNLIF

SEQ ID NO: 441350 - protein, 15 aa, Homo sapiens
  CDR3 for beta chain variable domain of TCR clone 220675 (TRBV7-2, TRBJ2-7)
CASSLKGALTYEQYF

SEQ ID NO: 441351 - protein, 13 aa, Homo sapiens
  CDR3 for alpha chain variable domain of TCR clone 220676 (TRAV16, TRAJ22)
SAMLVGSARQLTF

SEQ ID NO: 441352 - protein, 18 aa, Homo sapiens
  CDR3 for beta chain variable domain of TCR clone 220676 (TRBV7-2, TRBJ2-3)
CASSLETSRGRKADTQYF

SEQ ID NO: 441353 - protein, 13 aa, Homo sapiens
  CDR3 for alpha chain variable domain of TCR clone 220677 (TRAV21, TRAJ20)
CAVGLRVDYKLSF

SEQ ID NO: 441354 - protein, 14 aa, Homo sapiens
  CDR3 for beta chain variable domain of TCR clone 220677 (TRBV7-6, TRBJ2-3)
CASNSGGDANTQYF

SEQ ID NO: 441355 - protein, 14 aa, Homo sapiens
  CDR3 for alpha chain variable domain of TCR clone 220678 (TRAV12-2, TRAJ13)
CAVKKTWGYQKVTF

SEQ ID NO: 441356 - protein, 13 aa, Homo sapiens
  CDR3 for beta chain variable domain of TCR clone 220678 (TRBV20-1, TRBJ1-1)
CSARGGGNTEAFF

SEQ ID NO: 441357 - protein, 15 aa, Homo sapiens
  CDR3 for alpha chain variable domain of TCR clone 220679 (TRAV17, TRAJ57)
CATGPSQGGSEKLVF

SEQ ID NO: 441358 - protein, 14 aa, Homo sapiens
  CDR3 for beta chain variable domain of TCR clone 220679 (TRBV7-9, TRBJ2-1)
CASSDNSGYNEQFF

SEQ ID NO: 441359 - protein, 17 aa, Homo sapiens
  CDR3 for alpha chain variable domain of TCR clone 220680 (TRAV1-1, TRAJ4)
CALYIKLIFGAGTRLAV

SEQ ID NO: 441360 - protein, 18 aa, Homo sapiens
  CDR3 for beta chain variable domain of TCR clone 220680 (TRBV27, TRBJ2-7)
CASRTGQFFPGARDEQYF

SEQ ID NO: 441361 - protein, 16 aa, Homo sapiens
  CDR3 for alpha chain variable domain of TCR clone 220681 (TRAV3, TRAJ37)
CAVRVRGSGNTGKLIF

SEQ ID NO: 441362 - protein, 15 aa, Homo sapiens
  CDR3 for beta chain variable domain of TCR clone 220681 (TRBV20-1, TRBJ2-1)
CSARGIGGTYNEQFF

SEQ ID NO: 441363 - protein, 21 aa, Homo sapiens
  CDR3 for alpha chain variable domain of TCR clone 220682 (TRAV21, TRAJ32)
CLGHLPLCCGDSGGATNKLIF

SEQ ID NO: 441364 - protein, 13 aa, Homo sapiens
  CDR3 for beta chain variable domain of TCR clone 220682 (TRBV2, TRBJ1-6)
CASGRGGISPLHF

SEQ ID NO: 441365 - protein, 11 aa, Homo sapiens
  CDR3 for alpha chain variable domain of TCR clone 220683 (TRAV3, TRAJ21)
CAVGNFNKFYL

SEQ ID NO: 441366 - protein, 15 aa, Homo sapiens
  CDR3 for beta chain variable domain of TCR clone 220683 (TRBV29-1, TRBJ2-1)
CSVEGGPASYNEQIF

SEQ ID NO: 441367 - protein, 13 aa, Homo sapiens
  CDR3 for alpha chain variable domain of TCR clone 220684 (TRAV12-1, TRAJ22)
CVVYSGSARQLTF

SEQ ID NO: 441368 - protein, 15 aa, Homo sapiens
  CDR3 for beta chain variable domain of TCR clone 220684 (TRBV20-1, TRBJ2-7)
CSARDRVSGMDEQYF

SEQ ID NO: 441369 - protein, 15 aa, Homo sapiens
  CDR3 for alpha chain variable domain of TCR clone 220685 (TRAV3, TRAJ22)
CAVSDRGGSARQLTF

SEQ ID NO: 441370 - protein, 17 aa, Homo sapiens
  CDR3 for beta chain variable domain of TCR clone 220685 (TRBV28, TRBJ2-5)
CASSTPEGDALQETQYF

SEQ ID NO: 441371 - protein, 13 aa, Homo sapiens
  CDR3 for alpha chain variable domain of TCR clone 220686 (TRAV6, TRAJ20)
CALAVSNDYKLSF

SEQ ID NO: 441372 - protein, 16 aa, Homo sapiens
  CDR3 for beta chain variable domain of TCR clone 220686 (TRBV7-9, TRBJ2-1)
CASSDVAGGSYNEHFF

SEQ ID NO: 441373 - protein, 13 aa, Homo sapiens
  CDR3 for alpha chain variable domain of TCR clone 220687 (TRAV16, TRAJ47)
CALSRGYGNKLVF

SEQ ID NO: 441374 - protein, 14 aa, Homo sapiens
  CDR3 for beta chain variable domain of TCR clone 220687 (TRBV7-3, TRBJ2-1)
CASSLAGGTNEQFF

SEQ ID NO: 441375 - protein, 15 aa, Homo sapiens
  CDR3 for alpha chain variable domain of TCR clone 220688 (TRAV1-1, TRAJ5)
CAVRHMDTGRRALTF

SEQ ID NO: 441376 - protein, 17 aa, Homo sapiens
  CDR3 for beta chain variable domain of TCR clone 220688 (TRBV28, TRBJ2-7)
CASSPGLAGGGSSEQYF

SEQ ID NO: 441377 - protein, 14 aa, Homo sapiens
  CDR3 for alpha chain variable domain of TCR clone 220689 (TRAV13-1, TRAJ40)
FAATMTSGTYKYIF

SEQ ID NO: 441378 - protein, 15 aa, Homo sapiens
  CDR3 for beta chain variable domain of TCR clone 220689 (TRBV7-3, TRBJ2-1)
CASSPTGGGEVEQFF

SEQ ID NO: 441379 - protein, 14 aa, Homo sapiens
  CDR3 for alpha chain variable domain of TCR clone 220690 (TRAV1-2, TRAJ8)
CAVREDTGFQKLVF

SEQ ID NO: 441380 - protein, 16 aa, Homo sapiens
  CDR3 for beta chain variable domain of TCR clone 220690 (TRBV19, TRBJ2-2)
CASSTARALNTGELFF

SEQ ID NO: 441381 - protein, 13 aa, Homo sapiens
  CDR3 for alpha chain variable domain of TCR clone 220691 (TRAV2, TRAJ21)
CAVEDLNFNKFYF

SEQ ID NO: 441382 - protein, 15 aa, Homo sapiens
  CDR3 for beta chain variable domain of TCR clone 220691 (TRBV28, TRBJ2-5)
CASSPGQGTIETQYF

SEQ ID NO: 441383 - protein, 12 aa, Homo sapiens
  CDR3 for alpha chain variable domain of TCR clone 220692 (TRAV20, TRAJ13)
CCVKRVYQKVTF

SEQ ID NO: 441384 - protein, 15 aa, Homo sapiens
  CDR3 for beta chain variable domain of TCR clone 220692 (TRBV3-1, TRBJ2-1)
CASSQDYTPRGEQFF

SEQ ID NO: 441385 - protein, 14 aa, Homo sapiens
  CDR3 for alpha chain variable domain of TCR clone 220693 (TRAV8-1, TRAJ5)
CAVMTDTGRRALTF

SEQ ID NO: 441386 - protein, 14 aa, Homo sapiens
  CDR3 for beta chain variable domain of TCR clone 220693 (TRBV7-8, TRBJ2-3)
CASSFPDGQDTQYF

SEQ ID NO: 441387 - protein, 11 aa, Homo sapiens
  CDR3 for alpha chain variable domain of TCR clone 220694 (TRAV13-1, TRAJ40)
CAVPGTYKYLF

SEQ ID NO: 441388 - protein, 13 aa, Homo sapiens
  CDR3 for beta chain variable domain of TCR clone 220694 (TRBV19, TRBJ1-5)
CASSIGGNQPQHF

SEQ ID NO: 441389 - protein, 15 aa, Homo sapiens
  CDR3 for alpha chain variable domain of TCR clone 220695 (TRAV8-2, TRAJ17)
CVVSPFKAAGNKLTL

SEQ ID NO: 441390 - protein, 18 aa, Homo sapiens
  CDR3 for beta chain variable domain of TCR clone 220695 (TRBV28, TRBJ2-5)
CASSFPNFGTGGGETQYF

SEQ ID NO: 441391 - protein, 10 aa, Homo sapiens
  CDR3 for alpha chain variable domain of TCR clone 220696 (TRAV1-2, TRAJ31)
CAFFDARLMF

SEQ ID NO: 441392 - protein, 14 aa, Homo sapiens
  CDR3 for beta chain variable domain of TCR clone 220696 (TRBV28, TRBJ2-4)
CASTQVTGVNIQYF

SEQ ID NO: 441393 - protein, 12 aa, Homo sapiens
  CDR3 for alpha chain variable domain of TCR clone 220697 (TRAV26-2, TRAJ47)
CIRVEYGNKLVF

SEQ ID NO: 441394 - protein, 16 aa, Homo sapiens
  CDR3 for beta chain variable domain of TCR clone 220697 (TRBV18, TRBJ1-4)
CASSPLVGDRAEKLFF

SEQ ID NO: 441395 - protein, 12 aa, Homo sapiens
  CDR3 for alpha chain variable domain of TCR clone 220698 (TRAV17, TRAJ30)
CATDARGDKIIF

SEQ ID NO: 441396 - protein, 16 aa, Homo sapiens
  CDR3 for beta chain variable domain of TCR clone 220698 (TRBV5-7, TRBJ2-7)
CASSPTSGRELDEQYF

SEQ ID NO: 441397 - protein, 12 aa, Homo sapiens
  CDR3 for alpha chain variable domain of TCR clone 220699 (TRAV12-2, TRAJ43)
CAVGYNNNDMRF

SEQ ID NO: 441398 - protein, 15 aa, Homo sapiens
  CDR3 for beta chain variable domain of TCR clone 220699 (TRBV11-2, TRBJ2-7)
CASRFPGTGGYEQYF

SEQ ID NO: 441399 - protein, 15 aa, Homo sapiens
  CDR3 for alpha chain variable domain of TCR clone 220700 (TRAV12-3, TRAJ49)
CAMAVTPNTGNQFYF

SEQ ID NO: 441400 - protein, 14 aa, Homo sapiens
  CDR3 for beta chain variable domain of TCR clone 220700 (TRBV7-8, TRBJ2-3)
CASSLDAGTDTQYF

SEQ ID NO: 441401 - protein, 13 aa, Homo sapiens
  CDR3 for alpha chain variable domain of TCR clone 220701 (TRAV13-2, TRAJ13)
CSERPGGYQKVTF

SEQ ID NO: 441402 - protein, 15 aa, Homo sapiens
  CDR3 for beta chain variable domain of TCR clone 220701 (TRBV11-3, TRBJ2-7)
CASSPGPASSYEQYF

SEQ ID NO: 441403 - protein, 14 aa, Homo sapiens
  CDR3 for alpha chain variable domain of TCR clone 220702 (TRAV12-2, TRAJ13)
CALKKTGGYQKVTF

SEQ ID NO: 441404 - protein, 11 aa, Homo sapiens
  CDR3 for beta chain variable domain of TCR clone 220702 (TRBV12-4, TRBJ2-3)
CASTATDTQYF

SEQ ID NO: 441405 - protein, 12 aa, Homo sapiens
  CDR3 for alpha chain variable domain of TCR clone 220703 (TRAV36/DV7, TRAJ54)
CAVVRGAQKLVF

SEQ ID NO: 441406 - protein, 12 aa, Homo sapiens
  CDR3 for beta chain variable domain of TCR clone 220703 (TRBV7-9, TRBJ2-7)
CASRTGFDEQYF

SEQ ID NO: 441407 - protein, 17 aa, Homo sapiens
  CDR3 for alpha chain variable domain of TCR clone 220704 (TRAV8-6, TRAJ58)
CAVSSWVGETSGARLTF

SEQ ID NO: 441408 - protein, 15 aa, Homo sapiens
  CDR3 for beta chain variable domain of TCR clone 220704 (TRBV20-1, TRBJ2-7)
CSARDRVSGMDEQYF

SEQ ID NO: 441409 - protein, 14 aa, Homo sapiens
  CDR3 for alpha chain variable domain of TCR clone 220705 (TRAV12-2, TRAJ40)
CAVKIPSGTYKYIF

SEQ ID NO: 441410 - protein, 14 aa, Homo sapiens
  CDR3 for beta chain variable domain of TCR clone 220705 (TRBV20-1, TRBJ1-1)
CSAHTRIGGNEAFF

SEQ ID NO: 441411 - protein, 13 aa, Homo sapiens
  CDR3 for alpha chain variable domain of TCR clone 220706 (TRAV38-1, TRAJ42)
CARWGGSQGNLIF

SEQ ID NO: 441412 - protein, 14 aa, Homo sapiens
  CDR3 for beta chain variable domain of TCR clone 220706 (TRBV12-4, TRBJ2-5)
CASSLWQKQETQYF

SEQ ID NO: 441413 - protein, 15 aa, Homo sapiens
  CDR3 for alpha chain variable domain of TCR clone 220707 (TRAV27, TRAJ38)
CAARRNAGNNRKRMW

SEQ ID NO: 441414 - protein, 13 aa, Homo sapiens
  CDR3 for beta chain variable domain of TCR clone 220707 (TRBV12-5, TRBJ2-3)
CASGDRQSDTQYF

SEQ ID NO: 441415 - protein, 17 aa, Homo sapiens
  CDR3 for alpha chain variable domain of TCR clone 220708 (TRAV8-3, TRAJ50)
CAVGAVDTETSYDKVIF

SEQ ID NO: 441416 - protein, 13 aa, Homo sapiens
  CDR3 for beta chain variable domain of TCR clone 220708 (TRBV7-9, TRBJ2-2)
CASSSAGTGELIF

SEQ ID NO: 441417 - protein, 13 aa, Homo sapiens
  CDR3 for alpha chain variable domain of TCR clone 220709 (TRAV8-3, TRAJ28)
CAVGAVGSYQLTF

SEQ ID NO: 441418 - protein, 13 aa, Homo sapiens
  CDR3 for beta chain variable domain of TCR clone 220709 (TRBV6-1, TRBJ1-1)
CASSRQGNTEAFF

SEQ ID NO: 441419 - protein, 16 aa, Homo sapiens
  CDR3 for alpha chain variable domain of TCR clone 220710 (TRAV12-3, TRAJ53)
CAMSPGSGGSNYKLTF

SEQ ID NO: 441420 - protein, 15 aa, Homo sapiens
  CDR3 for beta chain variable domain of TCR clone 220710 (TRBV20-1, TRBJ2-1)
CSASSAGSSYNEQFF

SEQ ID NO: 441421 - protein, 14 aa, Homo sapiens
  CDR3 for alpha chain variable domain of TCR clone 220711 (TRAV3, TRAJ21)
CAVRDAYNFNKFYF

SEQ ID NO: 441422 - protein, 17 aa, Homo sapiens
  CDR3 for beta chain variable domain of TCR clone 220711 (TRBV20-1, TRBJ1-6)
CSARGGYTFSYNSPLHY

SEQ ID NO: 441423 - protein, 11 aa, Homo sapiens
  CDR3 for alpha chain variable domain of TCR clone 220712 (TRAV21, TRAJ34)
CVHYNTDKLIF

SEQ ID NO: 441424 - protein, 13 aa, Homo sapiens
  CDR3 for beta chain variable domain of TCR clone 220712 (TRBV7-6, TRBJ1-2)
CASSLVADYGYTF

SEQ ID NO: 441425 - protein, 13 aa, Homo sapiens
  CDR3 for alpha chain variable domain of TCR clone 220713 (TRAV17, TRAJ20)
CAPLGVDDYKLSF

SEQ ID NO: 441426 - protein, 12 aa, Homo sapiens
  CDR3 for beta chain variable domain of TCR clone 220713 (TRBV29-1, TRBJ2-3)
RSVTGGADTQYF

SEQ ID NO: 441427 - protein, 14 aa, Homo sapiens
  CDR3 for alpha chain variable domain of TCR clone 220714 (TRAV1-2, TRAJ8)
CAVREDTGFQKLVF

SEQ ID NO: 441428 - protein, 14 aa, Homo sapiens
  CDR3 for beta chain variable domain of TCR clone 220714 (TRBV7-3, TRBJ2-3)
CASSSTGVADTQYF

SEQ ID NO: 441429 - protein, 18 aa, Homo sapiens
  CDR3 for alpha chain variable domain of TCR clone 220715 (TRAV21, TRAJ52)
CAVRPSPAGGTIYGKLTF

SEQ ID NO: 441430 - protein, 16 aa, Homo sapiens
  CDR3 for beta chain variable domain of TCR clone 220715 (TRBV7-3, TRBJ2-1)
CASSLEGYRSYNEQFF

SEQ ID NO: 441431 - protein, 17 aa, Homo sapiens
  CDR3 for alpha chain variable domain of TCR clone 220716 (TRAV23/DV6, TRAJ57)
CAASYTLSQGGSEKLVF

SEQ ID NO: 441432 - protein, 14 aa, Homo sapiens
  CDR3 for beta chain variable domain of TCR clone 220716 (TRBV25-1, TRBJ1-1)
CASTHLGGNTEALF

SEQ ID NO: 441433 - protein, 14 aa, Homo sapiens
  CDR3 for alpha chain variable domain of TCR clone 220717 (TRAV36/DV7, TRAJ40)
CAVEGASGTYKYIF

SEQ ID NO: 441434 - protein, 16 aa, Homo sapiens
  CDR3 for beta chain variable domain of TCR clone 220717 (TRBV13, TRBJ2-2)
CASSPRTGEHTGELFF

SEQ ID NO: 441435 - protein, 16 aa, Homo sapiens
  CDR3 for alpha chain variable domain of TCR clone 220718 (TRAV26-1, TRAJ53)
CIVRVAMGGSNYKLTF

SEQ ID NO: 441436 - protein, 17 aa, Homo sapiens
  CDR3 for beta chain variable domain of TCR clone 220718 (TRBV14, TRBJ2-1)
CASSQDRRVTSYNEQFF

SEQ ID NO: 441437 - protein, 14 aa, Homo sapiens
  CDR3 for alpha chain variable domain of TCR clone 220719 (TRAV1-2, TRAJ16)
CAVNRFSDGQKLLF

SEQ ID NO: 441438 - protein, 16 aa, Homo sapiens
  CDR3 for beta chain variable domain of TCR clone 220719 (TRBV29-1, TRBJ2-7)
CSVAVVGTSGSYEQYF

SEQ ID NO: 441439 - protein, 14 aa, Homo sapiens
  CDR3 for alpha chain variable domain of TCR clone 220720 (TRAV29/DV5, TRAJ45)
CAARFRGGADGLTF

SEQ ID NO: 441440 - protein, 15 aa, Homo sapiens
  CDR3 for beta chain variable domain of TCR clone 220720 (TRBV18, TRBJ2-1)
CASSPGTGGSGEQFF

SEQ ID NO: 441441 - protein, 18 aa, Homo sapiens
  CDR3 for alpha chain variable domain of TCR clone 220721 (TRAV26-1, TRAJ23)
CIVRVGLEVWNQGGKLIF

SEQ ID NO: 441442 - protein, 15 aa, Homo sapiens
  CDR3 for beta chain variable domain of TCR clone 220721 (TRBV9, TRBJ1-6)
CASSVAVTGDSPLHF

SEQ ID NO: 441443 - protein, 18 aa, Homo sapiens
  CDR3 for alpha chain variable domain of TCR clone 220722 (TRAV21, TRAJ52)
CDVRPSPAGGTSYGKLTF

SEQ ID NO: 441444 - protein, 15 aa, Homo sapiens
  CDR3 for beta chain variable domain of TCR clone 220722 (TRBV27, TRBJ1-4)
CASSAQQDLNEKLFF

SEQ ID NO: 441445 - protein, 12 aa, Homo sapiens
  CDR3 for alpha chain variable domain of TCR clone 220723 (TRAV12-3, TRAJ17)
CAMTLTGNKLTF

SEQ ID NO: 441446 - protein, 15 aa, Homo sapiens
  CDR3 for beta chain variable domain of TCR clone 220723 (TRBV9, TRBJ1-6)
CASSVAGTGDSPLHL

SEQ ID NO: 441447 - protein, 16 aa, Homo sapiens
  CDR3 for alpha chain variable domain of TCR clone 220724 (TRAV30, TRAJ32)
TASQLSYSGTYFCGIF

SEQ ID NO: 441448 - protein, 13 aa, Homo sapiens
  CDR3 for beta chain variable domain of TCR clone 220724 (TRBV7-2, TRBJ1-1)
CASSVQGYTEAFF

SEQ ID NO: 441449 - protein, 12 aa, Homo sapiens
  CDR3 for alpha chain variable domain of TCR clone 220725 (TRAV12-3, TRAJ17)
CAMTLTGSKLTF

SEQ ID NO: 441450 - protein, 15 aa, Homo sapiens
  CDR3 for beta chain variable domain of TCR clone 220725 (TRBV20-1, TRBJ2-7)
CSARDRVSGMYEQYF

SEQ ID NO: 441451 - protein, 12 aa, Homo sapiens
  CDR3 for alpha chain variable domain of TCR clone 220726 (TRAV13-2, TRAJ8)
CAPWLGFQKLVF

SEQ ID NO: 441452 - protein, 14 aa, Homo sapiens
  CDR3 for beta chain variable domain of TCR clone 220726 (TRBV18, TRBJ1-5)
CASSRQQRNEPQHF

SEQ ID NO: 441453 - protein, 14 aa, Homo sapiens
  CDR3 for alpha chain variable domain of TCR clone 220727 (TRAV22, TRAJ6)
CAGVGPGGSYIPTF

SEQ ID NO: 441454 - protein, 15 aa, Homo sapiens
  CDR3 for beta chain variable domain of TCR clone 220727 (TRBV7-9, TRBJ2-2)
CASGPLDTFPGELFF

SEQ ID NO: 441455 - protein, 11 aa, Homo sapiens
  CDR3 for alpha chain variable domain of TCR clone 220728 (TRAV12-2, TRAJ31)
CAILNNARLMF

SEQ ID NO: 441456 - protein, 15 aa, Homo sapiens
  CDR3 for beta chain variable domain of TCR clone 220728 (TRBV9, TRBJ1-6)
CASSVAGTGDSPLHF

SEQ ID NO: 441457 - protein, 12 aa, Homo sapiens
  CDR3 for alpha chain variable domain of TCR clone 220729 (TRAV17, TRAJ49)
CATVTTGNQFYF

SEQ ID NO: 441458 - protein, 17 aa, Homo sapiens
  CDR3 for beta chain variable domain of TCR clone 220729 (TRBV28, TRBJ2-5)
CASSTPEGDALQETQYF

SEQ ID NO: 441459 - protein, 12 aa, Homo sapiens
  CDR3 for alpha chain variable domain of TCR clone 220730 (TRAV8-6, TRAJ4)
CAVSDHPNKLIF

SEQ ID NO: 441460 - protein, 12 aa, Homo sapiens
  CDR3 for beta chain variable domain of TCR clone 220730 (TRBV11-2, TRBJ2-2)
CASSLGGGELFF

SEQ ID NO: 441461 - protein, 14 aa, Homo sapiens
  CDR3 for alpha chain variable domain of TCR clone 220731 (TRAV9-2, TRAJ39)
CALSIYNAGNMLTF

SEQ ID NO: 441462 - protein, 15 aa, Homo sapiens
  CDR3 for beta chain variable domain of TCR clone 220731 (TRBV28, TRBJ1-3)
CASSMGWASGNTIYF

SEQ ID NO: 441463 - protein, 14 aa, Homo sapiens
  CDR3 for alpha chain variable domain of TCR clone 220732 (TRAV13-2, TRAJ29)
FAEGTFETNTPLVF

SEQ ID NO: 441464 - protein, 13 aa, Homo sapiens
  CDR3 for beta chain variable domain of TCR clone 220732 (TRBV2, TRBJ1-1)
CASNLLRNTEAFF

SEQ ID NO: 441465 - protein, 17 aa, Homo sapiens
  CDR3 for alpha chain variable domain of TCR clone 220733 (TRAV3, TRAJ42)
CAVRDRDYVGSQGNLIY

SEQ ID NO: 441466 - protein, 13 aa, Homo sapiens
  CDR3 for beta chain variable domain of TCR clone 220733 (TRBV3-1, TRBJ1-1)
CASSPGVITEAFF

SEQ ID NO: 441467 - protein, 13 aa, Homo sapiens
  CDR3 for alpha chain variable domain of TCR clone 220734 (TRAV1-2, TRAJ31)
CAVRPNNNARLMF

SEQ ID NO: 441468 - protein, 15 aa, Homo sapiens
  CDR3 for beta chain variable domain of TCR clone 220734 (TRBV6-3, TRBJ2-7)
CASSSPGTVFYEQYF

SEQ ID NO: 441469 - protein, 14 aa, Homo sapiens
  CDR3 for alpha chain variable domain of TCR clone 220735 (TRAV12-2, TRAJ13)
CAVHVSGGYQKVTF

SEQ ID NO: 441470 - protein, 16 aa, Homo sapiens
  CDR3 for beta chain variable domain of TCR clone 220735 (TRBV12-5, TRBJ2-5)
CASGPRTSGNQETQYF

SEQ ID NO: 441471 - protein, 14 aa, Homo sapiens
  CDR3 for alpha chain variable domain of TCR clone 220736 (TRAV8-4, TRAJ48)
CAVSETFGNEKFTF

SEQ ID NO: 441472 - protein, 14 aa, Homo sapiens
  CDR3 for beta chain variable domain of TCR clone 220736 (TRBV13, TRBJ2-7)
CASSLKGASYERYF

SEQ ID NO: 441473 - protein, 15 aa, Homo sapiens
  CDR3 for alpha chain variable domain of TCR clone 220737 (TRAV21, TRAJ17)
CAVDEQKAAGNKLTF

SEQ ID NO: 441474 - protein, 15 aa, Homo sapiens
  CDR3 for beta chain variable domain of TCR clone 220737 (TRBV28, TRBJ2-7)
CASSPGGRGFYEQYF

SEQ ID NO: 441475 - protein, 14 aa, Homo sapiens
  CDR3 for alpha chain variable domain of TCR clone 220738 (TRAV1-2, TRAJ8)
CAVREGTGFQKLVF

SEQ ID NO: 441476 - protein, 14 aa, Homo sapiens
  CDR3 for beta chain variable domain of TCR clone 220738 (TRBV7-2, TRBJ1-1)
CASSFLTGTTEAFF

SEQ ID NO: 441477 - protein, 14 aa, Homo sapiens
  CDR3 for alpha chain variable domain of TCR clone 220739 (TRAV12-3, TRAJ10)
SRLPLTGGGNKLTF

SEQ ID NO: 441478 - protein, 11 aa, Homo sapiens
  CDR3 for beta chain variable domain of TCR clone 220739 (TRBV20-1, TRBJ2-5)
CSADRAETQYF

SEQ ID NO: 441479 - protein, 19 aa, Homo sapiens
  CDR3 for alpha chain variable domain of TCR clone 220740 (TRAV26-1, TRAJ28)
CIVRVAHAYSGAGSDQLTF

SEQ ID NO: 441480 - protein, 12 aa, Homo sapiens
  CDR3 for beta chain variable domain of TCR clone 220740 (TRBV27, TRBJ2-2)
CASKLFTGELFF

SEQ ID NO: 441481 - protein, 12 aa, Homo sapiens
  CDR3 for alpha chain variable domain of TCR clone 220741 (TRAV12-3, TRAJ17)
CAMTLTGNKLTF

SEQ ID NO: 441482 - protein, 17 aa, Homo sapiens
  CDR3 for beta chain variable domain of TCR clone 220741 (TRBV7-3, TRBJ2-3)
CASSLMKRMRGAVTQYF

SEQ ID NO: 441483 - protein, 12 aa, Homo sapiens
  CDR3 for alpha chain variable domain of TCR clone 220742 (TRAV12-3, TRAJ41)
CAMSYSVYALNF

SEQ ID NO: 441484 - protein, 13 aa, Homo sapiens
  CDR3 for beta chain variable domain of TCR clone 220742 (TRBV7-3, TRBJ2-1)
CASSLDSYNEQFF

SEQ ID NO: 441485 - protein, 15 aa, Homo sapiens
  CDR3 for alpha chain variable domain of TCR clone 220743 (TRAV13-1, TRAJ50)
CAAKGSETSYDKVIF

SEQ ID NO: 441486 - protein, 18 aa, Homo sapiens
  CDR3 for beta chain variable domain of TCR clone 220743 (TRBV10-3, TRBJ2-1)
CTSVPSVSLRGGVDEQFL

SEQ ID NO: 441487 - protein, 11 aa, Homo sapiens
  CDR3 for alpha chain variable domain of TCR clone 220744 (TRAV4, TRAJ23)
CLVAPGGKLIF

SEQ ID NO: 441488 - protein, 14 aa, Homo sapiens
  CDR3 for beta chain variable domain of TCR clone 220744 (TRBV18, TRBJ2-7)
CASSPRGGAYEQYF

SEQ ID NO: 441489 - protein, 15 aa, Homo sapiens
  CDR3 for alpha chain variable domain of TCR clone 220745 (TRAV12-3, TRAJ27)
CAMRAYNTNAGKSTF

SEQ ID NO: 441490 - protein, 13 aa, Homo sapiens
  CDR3 for beta chain variable domain of TCR clone 220745 (TRBV7-2, TRBJ2-2)
CASSLAVTGELFF

SEQ ID NO: 441491 - protein, 13 aa, Homo sapiens
  CDR3 for alpha chain variable domain of TCR clone 220746 (TRAV12-3, TRAJ9)
CAMRNTGGFKTIY

SEQ ID NO: 441492 - protein, 14 aa, Homo sapiens
  CDR3 for beta chain variable domain of TCR clone 220746 (TRBV11-2, TRBJ2-7)
CASSSTGEGYEQYF

SEQ ID NO: 441493 - protein, 13 aa, Homo sapiens
  CDR3 for alpha chain variable domain of TCR clone 220747 (TRAV36/DV7, TRAJ37)
CAAPFRNTGKLIF

SEQ ID NO: 441494 - protein, 13 aa, Homo sapiens
  CDR3 for beta chain variable domain of TCR clone 220747 (TRBV19, TRBJ1-1)
CASSPSNGGEAFF

SEQ ID NO: 441495 - protein, 14 aa, Homo sapiens
  CDR3 for alpha chain variable domain of TCR clone 220748 (TRAV12-2, TRAJ17)
CAVLFTAAGNKLTF

SEQ ID NO: 441496 - protein, 14 aa, Homo sapiens
  CDR3 for beta chain variable domain of TCR clone 220748 (TRBV4-1, TRBJ2-2)
CASSQAVNTGELFF

SEQ ID NO: 441497 - protein, 14 aa, Homo sapiens
  CDR3 for alpha chain variable domain of TCR clone 220749 (TRAV1-2, TRAJ16)
CAVNRFSDGQKLLF

SEQ ID NO: 441498 - protein, 12 aa, Homo sapiens
  CDR3 for beta chain variable domain of TCR clone 220749 (TRBV3-1, TRBJ2-2)
CASSLFTGELFF

SEQ ID NO: 441499 - protein, 12 aa, Homo sapiens
  CDR3 for alpha chain variable domain of TCR clone 220750 (TRAV12-1, TRAJ40)
CVVYSGTYKYIF

SEQ ID NO: 441500 - protein, 14 aa, Homo sapiens
  CDR3 for beta chain variable domain of TCR clone 220750 (TRBV6-1, TRBJ2-7)
CASNRARPDYEQYF

SEQ ID NO: 441501 - protein, 17 aa, Homo sapiens
  CDR3 for alpha chain variable domain of TCR clone 220751 (TRAV13-1, TRAJ31)
CAPRERLMFGDGTQLGV

SEQ ID NO: 441502 - protein, 12 aa, Homo sapiens
  CDR3 for beta chain variable domain of TCR clone 220751 (TRBV7-9, TRBJ2-7)
CASSLEGYEQYF

SEQ ID NO: 441503 - protein, 15 aa, Homo sapiens
  CDR3 for alpha chain variable domain of TCR clone 220752 (TRAV21, TRAJ53)
CATLNSGGSNYKLTF

SEQ ID NO: 441504 - protein, 16 aa, Homo sapiens
  CDR3 for beta chain variable domain of TCR clone 220752 (TRBV9, TRBJ2-1)
FASSVGGGGNYNEQFF

SEQ ID NO: 441505 - protein, 11 aa, Homo sapiens
  CDR3 for alpha chain variable domain of TCR clone 220753 (TRAV3, TRAJ33)
CAVRRNNQLIW

SEQ ID NO: 441506 - protein, 15 aa, Homo sapiens
  CDR3 for beta chain variable domain of TCR clone 220753 (TRBV28, TRBJ1-5)
CASSDQVYSNQPQHF

SEQ ID NO: 441507 - protein, 13 aa, Homo sapiens
  CDR3 for alpha chain variable domain of TCR clone 220754 (TRAV1-2, TRAJ9)
CAALTTGGFKTIF

SEQ ID NO: 441508 - protein, 13 aa, Homo sapiens
  CDR3 for beta chain variable domain of TCR clone 220754 (TRBV19, TRBJ1-2)
CASSVPGQDGYTS

SEQ ID NO: 441509 - protein, 11 aa, Homo sapiens
  CDR3 for alpha chain variable domain of TCR clone 220755 (TRAV20, TRAJ23)
CACNQGGKLIF

SEQ ID NO: 441510 - protein, 16 aa, Homo sapiens
  CDR3 for beta chain variable domain of TCR clone 220755 (TRBV12-5, TRBJ2-5)
CAGGPRTSGNQETQYF

SEQ ID NO: 441511 - protein, 13 aa, Homo sapiens
  CDR3 for alpha chain variable domain of TCR clone 220756 (TRAV27, TRAJ41)
CAGEGNSGYALNF

SEQ ID NO: 441512 - protein, 16 aa, Homo sapiens
  CDR3 for beta chain variable domain of TCR clone 220756 (TRBV29-1, TRBJ2-7)
CSVEVVGTSGSYEQYV

SEQ ID NO: 441513 - protein, 14 aa, Homo sapiens
  CDR3 for alpha chain variable domain of TCR clone 220757 (TRAV13-1, TRAJ44)
CAAKATGTASKLAF

SEQ ID NO: 441514 - protein, 17 aa, Homo sapiens
  CDR3 for beta chain variable domain of TCR clone 220757 (TRBV7-3, TRBJ2-3)
CASSLMKRMRGADTQYL

SEQ ID NO: 441515 - protein, 12 aa, Homo sapiens
  CDR3 for alpha chain variable domain of TCR clone 220758 (TRAV8-3, TRAJ4)
HAFYGGYNKLIF

SEQ ID NO: 441516 - protein, 13 aa, Homo sapiens
  CDR3 for beta chain variable domain of TCR clone 220758 (TRBV20-1, TRBJ1-3)
CSAGAYSGNTIYF

SEQ ID NO: 441517 - protein, 15 aa, Homo sapiens
  CDR3 for alpha chain variable domain of TCR clone 220759 (TRAV12-3, TRAJ11)
CAMSEENSGYSTLTF

SEQ ID NO: 441518 - protein, 14 aa, Homo sapiens
  CDR3 for beta chain variable domain of TCR clone 220759 (TRBV5-4, TRBJ1-1)
CASSLDSRRDEAFF

SEQ ID NO: 441519 - protein, 14 aa, Homo sapiens
  CDR3 for alpha chain variable domain of TCR clone 220760 (TRAV9-2, TRAJ39)
CALYIYNAGNVFTF

SEQ ID NO: 441520 - protein, 14 aa, Homo sapiens
  CDR3 for beta chain variable domain of TCR clone 220760 (TRBV6-1, TRBJ1-3)
CASVQGGGGNTIYF

SEQ ID NO: 441521 - protein, 14 aa, Homo sapiens
  CDR3 for alpha chain variable domain of TCR clone 220761 (TRAV30, TRAJ33)
CGTVAPRSNYQLIW

SEQ ID NO: 441522 - protein, 12 aa, Homo sapiens
  CDR3 for beta chain variable domain of TCR clone 220761 (TRBV2, TRBJ2-1)
CAYGPPGNEQFF

SEQ ID NO: 441523 - protein, 13 aa, Homo sapiens
  CDR3 for alpha chain variable domain of TCR clone 220762 (TRAV2, TRAJ29)
CAAQNSGNTPLVF

SEQ ID NO: 441524 - protein, 14 aa, Homo sapiens
  CDR3 for beta chain variable domain of TCR clone 220762 (TRBV19, TRBJ2-1)
CASKDPGLANEQFF

SEQ ID NO: 441525 - protein, 13 aa, Homo sapiens
  CDR3 for alpha chain variable domain of TCR clone 220763 (TRAV8-1, TRAJ23)
YAVTGGQGGKLIF

SEQ ID NO: 441526 - protein, 13 aa, Homo sapiens
  CDR3 for beta chain variable domain of TCR clone 220763 (TRBV20-1, TRBJ2-1)
CSASTGTSNEQFF

SEQ ID NO: 441527 - protein, 15 aa, Homo sapiens
  CDR3 for alpha chain variable domain of TCR clone 220764 (TRAV9-2, TRAJ57)
CALRPNQGGSEKLVF

SEQ ID NO: 441528 - protein, 17 aa, Homo sapiens
  CDR3 for beta chain variable domain of TCR clone 220764 (TRBV20-1, TRBJ2-1)
GSAPPRLAGTRYNEQFF

SEQ ID NO: 441529 - protein, 14 aa, Homo sapiens
  CDR3 for alpha chain variable domain of TCR clone 220765 (TRAV26-1, TRAJ38)
CIADNAGNNRKLIW

SEQ ID NO: 441530 - protein, 15 aa, Homo sapiens
  CDR3 for beta chain variable domain of TCR clone 220765 (TRBV20-1, TRBJ2-7)
RSARDRVSGMDEQYF

SEQ ID NO: 441531 - protein, 15 aa, Homo sapiens
  CDR3 for alpha chain variable domain of TCR clone 220766 (TRAV17, TRAJ10)
CATVLLTGGGNKLTF

SEQ ID NO: 441532 - protein, 14 aa, Homo sapiens
  CDR3 for beta chain variable domain of TCR clone 220766 (TRBV12-5, TRBJ2-7)
CASGQTRNSYEQYF

SEQ ID NO: 441533 - protein, 15 aa, Homo sapiens
  CDR3 for alpha chain variable domain of TCR clone 220767 (TRAV29/DV5, TRAJ24)
FAASGATDSWGKFHF

SEQ ID NO: 441534 - protein, 12 aa, Homo sapiens
  CDR3 for beta chain variable domain of TCR clone 220767 (TRBV11-2, TRBJ2-2)
CASSLPTGELFF

SEQ ID NO: 441535 - protein, 12 aa, Homo sapiens
  CDR3 for alpha chain variable domain of TCR clone 220768 (TRAV21, TRAJ24)
CRTTDSWGKLQF

SEQ ID NO: 441536 - protein, 15 aa, Homo sapiens
  CDR3 for beta chain variable domain of TCR clone 220768 (TRBV2, TRBJ2-1)
CASSELAGGHNEQFF

SEQ ID NO: 441537 - protein, 19 aa, Homo sapiens
  CDR3 for alpha chain variable domain of TCR clone 220769 (TRAV1-2, TRAJ26)
CLLPLCCERPDNYGQNFVF

SEQ ID NO: 441538 - protein, 13 aa, Homo sapiens
  CDR3 for beta chain variable domain of TCR clone 220769 (TRBV9, TRBJ2-1)
CASSVGQGGEQFF

SEQ ID NO: 441539 - protein, 12 aa, Homo sapiens
  CDR3 for alpha chain variable domain of TCR clone 220770 (TRAV27, TRAJ58)
CAGARDTSGLTF

SEQ ID NO: 441540 - protein, 14 aa, Homo sapiens
  CDR3 for beta chain variable domain of TCR clone 220770 (TRBV7-3, TRBJ2-1)
CASSLGTSANEQFF

SEQ ID NO: 441541 - protein, 16 aa, Homo sapiens
  CDR3 for alpha chain variable domain of TCR clone 220771 (TRAV12-3, TRAJ53)
CAMSPGSGGSNYKLTF

SEQ ID NO: 441542 - protein, 17 aa, Homo sapiens
  CDR3 for beta chain variable domain of TCR clone 220771 (TRBV20-1, TRBJ2-1)
CSASSSGLAGSYNEQFF

SEQ ID NO: 441543 - protein, 16 aa, Homo sapiens
  CDR3 for alpha chain variable domain of TCR clone 220772 (TRAV12-3, TRAJ53)
CAMSPGSGGSNYKLTF

SEQ ID NO: 441544 - protein, 13 aa, Homo sapiens
  CDR3 for beta chain variable domain of TCR clone 220772 (TRBV19, TRBJ1-2)
CAISVPGQDGYTF

SEQ ID NO: 441545 - protein, 16 aa, Homo sapiens
  CDR3 for alpha chain variable domain of TCR clone 220773 (TRAV12-3, TRAJ28)
CAMRANSGAGRYKLTF

SEQ ID NO: 441546 - protein, 13 aa, Homo sapiens
  CDR3 for beta chain variable domain of TCR clone 220773 (TRBV12-4, TRBJ1-2)
CASSLRQGKGYTF

SEQ ID NO: 441547 - protein, 13 aa, Homo sapiens
  CDR3 for alpha chain variable domain of TCR clone 220774 (TRAV17, TRAJ45)
CATDGRRCRRTHL

SEQ ID NO: 441548 - protein, 15 aa, Homo sapiens
  CDR3 for beta chain variable domain of TCR clone 220774 (TRBV5-7, TRBJ1-5)
CASSYGKLWDQPQHF

SEQ ID NO: 441549 - protein, 12 aa, Homo sapiens
  CDR3 for alpha chain variable domain of TCR clone 220775 (TRAV30, TRAJ43)
CGTEERGNDMRF

SEQ ID NO: 441550 - protein, 14 aa, Homo sapiens
  CDR3 for beta chain variable domain of TCR clone 220775 (TRBV7-2, TRBJ2-7)
CASSPKTSFYEQYC

SEQ ID NO: 441551 - protein, 14 aa, Homo sapiens
  CDR3 for alpha chain variable domain of TCR clone 220776 (TRAV12-1, TRAJ17)
CVVNYKAAGNKLPF

SEQ ID NO: 441552 - protein, 14 aa, Homo sapiens
  CDR3 for beta chain variable domain of TCR clone 220776 (TRBV7-8, TRBJ2-3)
CASSLEAGTDTQYF

SEQ ID NO: 441553 - protein, 14 aa, Homo sapiens
  CDR3 for alpha chain variable domain of TCR clone 220777 (TRAV1-2, TRAJ8)
CAVREDTGFQKLVF

SEQ ID NO: 441554 - protein, 15 aa, Homo sapiens
  CDR3 for beta chain variable domain of TCR clone 220777 (TRBV9, TRBJ1-2)
CASSVVGQANYGYTF

SEQ ID NO: 441555 - protein, 18 aa, Homo sapiens
  CDR3 for alpha chain variable domain of TCR clone 220778 (TRAV21, TRAJ53)
CAVKGGENSGGSNYKLTF

SEQ ID NO: 441556 - protein, 14 aa, Homo sapiens
  CDR3 for beta chain variable domain of TCR clone 220778 (TRBV11-3, TRBJ1-5)
LTGDRLYYNQHQHF

SEQ ID NO: 441557 - protein, 14 aa, Homo sapiens
  CDR3 for alpha chain variable domain of TCR clone 220779 (TRAV8-3, TRAJ4)
CAVGASGGYNKLIF

SEQ ID NO: 441558 - protein, 13 aa, Homo sapiens
  CDR3 for beta chain variable domain of TCR clone 220779 (TRBV6-3, TRBJ1-4)
CASSPGPGEKLFF

SEQ ID NO: 441559 - protein, 17 aa, Homo sapiens
  CDR3 for alpha chain variable domain of TCR clone 220780 (TRAV4, TRAJ13)
CLVGVQGPSGGYQKVTF

SEQ ID NO: 441560 - protein, 16 aa, Homo sapiens
  CDR3 for beta chain variable domain of TCR clone 220780 (TRBV28, TRBJ2-7)
CASSLFFETGGPEQYF

SEQ ID NO: 441561 - protein, 14 aa, Homo sapiens
  CDR3 for alpha chain variable domain of TCR clone 220781 (TRAV26-2, TRAJ27)
CILRDISDAGKSNF

SEQ ID NO: 441562 - protein, 15 aa, Homo sapiens
  CDR3 for beta chain variable domain of TCR clone 220781 (TRBV10-3, TRBJ2-7)
CATSEQGLRSYEQYF

SEQ ID NO: 441563 - protein, 12 aa, Homo sapiens
  CDR3 for alpha chain variable domain of TCR clone 220782 (TRAV3, TRAJ20)
CAVRDGDYKLSF

SEQ ID NO: 441564 - protein, 12 aa, Homo sapiens
  CDR3 for beta chain variable domain of TCR clone 220782 (TRBV28, TRBJ2-1)
CASKTSGNEQFF

SEQ ID NO: 441565 - protein, 15 aa, Homo sapiens
  CDR3 for alpha chain variable domain of TCR clone 220783 (TRAV17, TRAJ56)
CATDAISGANSKLTF

SEQ ID NO: 441566 - protein, 15 aa, Homo sapiens
  CDR3 for beta chain variable domain of TCR clone 220783 (TRBV6-3, TRBJ2-2)
CASSRFGGNTGELFF

SEQ ID NO: 441567 - protein, 12 aa, Homo sapiens
  CDR3 for alpha chain variable domain of TCR clone 220784 (TRAV12-2, TRAJ31)
CAVNTPDARLMY

SEQ ID NO: 441568 - protein, 17 aa, Homo sapiens
  CDR3 for beta chain variable domain of TCR clone 220784 (TRBV20-1, TRBJ1-6)
CSARGGYTFSYNSPLHF

SEQ ID NO: 441569 - protein, 19 aa, Homo sapiens
  CDR3 for alpha chain variable domain of TCR clone 220785 (TRAV26-1, TRAJ52)
CIARAHRNAGGISYGKLTF

SEQ ID NO: 441570 - protein, 15 aa, Homo sapiens
  CDR3 for beta chain variable domain of TCR clone 220785 (TRBV29-1, TRBJ2-1)
CSGRDRKSSYNEQFF

SEQ ID NO: 441571 - protein, 15 aa, Homo sapiens
  CDR3 for alpha chain variable domain of TCR clone 220786 (TRAV8-3, TRAJ15)
CAVGAPNQAGTALIF

SEQ ID NO: 441572 - protein, 14 aa, Homo sapiens
  CDR3 for beta chain variable domain of TCR clone 220786 (TRBV20-1, TRBJ2-1)
CSPNDEASYNAQFF

SEQ ID NO: 441573 - protein, 22 aa, Homo sapiens
  CDR3 for alpha chain variable domain of TCR clone 220787 (TRAV1-1, TRAJ30)
CAVRDQTEMTRSSLEKGHDFIF

SEQ ID NO: 441574 - protein, 12 aa, Homo sapiens
  CDR3 for beta chain variable domain of TCR clone 220787 (TRBV28, TRBJ2-6)
CAIQAGANDLTF

SEQ ID NO: 441575 - protein, 14 aa, Homo sapiens
  CDR3 for alpha chain variable domain of TCR clone 220788 (TRAV1-2, TRAJ16)
CAVNRFSDGQKLLF

SEQ ID NO: 441576 - protein, 12 aa, Homo sapiens
  CDR3 for beta chain variable domain of TCR clone 220788 (TRBV7-6, TRBJ2-7)
CASSLADSEQYL

SEQ ID NO: 441577 - protein, 15 aa, Homo sapiens
  CDR3 for alpha chain variable domain of TCR clone 220789 (TRAV13-1, TRAJ44)
CAASKGGGTASKLTF

SEQ ID NO: 441578 - protein, 16 aa, Homo sapiens
  CDR3 for beta chain variable domain of TCR clone 220789 (TRBV29-1, TRBJ2-7)
CSVEVVGTSGSYEQYF

SEQ ID NO: 441579 - protein, 12 aa, Homo sapiens
  CDR3 for alpha chain variable domain of TCR clone 220790 (TRAV21, TRAJ33)
CATMDSNYQLIW

SEQ ID NO: 441580 - protein, 12 aa, Homo sapiens
  CDR3 for beta chain variable domain of TCR clone 220790 (TRBV11-2, TRBJ2-2)
CASSLGGGELFF

SEQ ID NO: 441581 - protein, 13 aa, Homo sapiens
  CDR3 for alpha chain variable domain of TCR clone 220791 (TRAV36/DV7, TRAJ54)
CAVLIQGAQKLVF

SEQ ID NO: 441582 - protein, 13 aa, Homo sapiens
  CDR3 for beta chain variable domain of TCR clone 220791 (TRBV29-1, TRBJ2-4)
CSVGEGTKNIQYS

SEQ ID NO: 441583 - protein, 15 aa, Homo sapiens
  CDR3 for alpha chain variable domain of TCR clone 220792 (TRAV8-3, TRAJ27)
CAVGPSKTNAGKSTF

SEQ ID NO: 441584 - protein, 13 aa, Homo sapiens
  CDR3 for beta chain variable domain of TCR clone 220792 (TRBV20-1, TRBJ2-5)
CSARGDYQETQYF

SEQ ID NO: 441585 - protein, 13 aa, Homo sapiens
  CDR3 for alpha chain variable domain of TCR clone 220793 (TRAV25, TRAJ40)
CAWSASGTYKYIF

SEQ ID NO: 441586 - protein, 14 aa, Homo sapiens
  CDR3 for beta chain variable domain of TCR clone 220793 (TRBV7-2, TRBJ2-7)
CASRSQGAAYEQYF

SEQ ID NO: 441587 - protein, 13 aa, Homo sapiens
  CDR3 for alpha chain variable domain of TCR clone 220794 (TRAV12-1, TRAJ16)
CVVNGPDGQKLLF

SEQ ID NO: 441588 - protein, 13 aa, Homo sapiens
  CDR3 for beta chain variable domain of TCR clone 220794 (TRBV2, TRBJ1-2)
CASSVRGNYGYTF

SEQ ID NO: 441589 - protein, 18 aa, Homo sapiens
  CDR3 for alpha chain variable domain of TCR clone 220795 (TRAV29/DV5, TRAJ32)
CSVLLCSPYGGATNKLIF

SEQ ID NO: 441590 - protein, 15 aa, Homo sapiens
  CDR3 for beta chain variable domain of TCR clone 220795 (TRBV27, TRBJ2-7)
CASSTAGTGSYEQYF

SEQ ID NO: 441591 - protein, 13 aa, Homo sapiens
  CDR3 for alpha chain variable domain of TCR clone 220796 (TRAV27, TRAJ49)
CAPSPYTGNQFYF

SEQ ID NO: 441592 - protein, 16 aa, Homo sapiens
  CDR3 for beta chain variable domain of TCR clone 220796 (TRBV4-1, TRBJ1-2)
CASSHDAGQVLYGYTF

SEQ ID NO: 441593 - protein, 15 aa, Homo sapiens
  CDR3 for alpha chain variable domain of TCR clone 220797 (TRAV13-1, TRAJ11)
CAASNRNPGYSTPTF

SEQ ID NO: 441594 - protein, 13 aa, Homo sapiens
  CDR3 for beta chain variable domain of TCR clone 220797 (TRBV4-2, TRBJ1-1)
CASSQAGNTEAFF

SEQ ID NO: 441595 - protein, 13 aa, Homo sapiens
  CDR3 for alpha chain variable domain of TCR clone 220798 (TRAV2, TRAJ15)
CAVEAQAGTALIF

SEQ ID NO: 441596 - protein, 14 aa, Homo sapiens
  CDR3 for beta chain variable domain of TCR clone 220798 (TRBV6-5, TRBJ2-7)
CASVASGGADEQYF

SEQ ID NO: 441597 - protein, 17 aa, Homo sapiens
  CDR3 for alpha chain variable domain of TCR clone 220799 (TRAV3, TRAJ6)
CAVRDGPRAGGSYIPTF

SEQ ID NO: 441598 - protein, 16 aa, Homo sapiens
  CDR3 for beta chain variable domain of TCR clone 220799 (TRBV7-2, TRBJ1-2)
CASSSNQDRRGHGYTF

SEQ ID NO: 441599 - protein, 11 aa, Homo sapiens
  CDR3 for alpha chain variable domain of TCR clone 220800 (TRAV3, TRAJ21)
CAVGNFNKFYF

SEQ ID NO: 441600 - protein, 16 aa, Homo sapiens
  CDR3 for beta chain variable domain of TCR clone 220800 (TRBV5-1, TRBJ2-3)
CASSLQGRVGADTQYF

SEQ ID NO: 441601 - protein, 13 aa, Homo sapiens
  CDR3 for alpha chain variable domain of TCR clone 220801 (TRAV13-2, TRAJ48)
CAEMDFGNEKLTF

SEQ ID NO: 441602 - protein, 14 aa, Homo sapiens
  CDR3 for beta chain variable domain of TCR clone 220801 (TRBV11-2, TRBJ2-1)
CASTTGQGNNEQFF

SEQ ID NO: 441603 - protein, 22 aa, Homo sapiens
  CDR3 for alpha chain variable domain of TCR clone 220802 (TRAV2, TRAJ10)
ILQVREADAAVYYTGGGNKLTF

SEQ ID NO: 441604 - protein, 14 aa, Homo sapiens
  CDR3 for beta chain variable domain of TCR clone 220802 (TRBV7-9, TRBJ1-2)
CASSPLPRDGGYTF

SEQ ID NO: 441605 - protein, 16 aa, Homo sapiens
  CDR3 for alpha chain variable domain of TCR clone 220803 (TRAV30, TRAJ24)
CGPEIVDADCWGKFQF

SEQ ID NO: 441606 - protein, 15 aa, Homo sapiens
  CDR3 for beta chain variable domain of TCR clone 220803 (TRBV27, TRBJ2-1)
CASSNGGGSSNEQFF

SEQ ID NO: 441607 - protein, 10 aa, Homo sapiens
  CDR3 for alpha chain variable domain of TCR clone 220804 (TRAV25, TRAJ20)
CAVNDYKHSF

SEQ ID NO: 441608 - protein, 18 aa, Homo sapiens
  CDR3 for beta chain variable domain of TCR clone 220804 (TRBV20-1, TRBJ2-6)
CSAETTPTHGSGANVLTF

SEQ ID NO: 441609 - protein, 13 aa, Homo sapiens
  CDR3 for alpha chain variable domain of TCR clone 220805 (TRAV12-3, TRAJ4)
CAMTERGYNKLIF

SEQ ID NO: 441610 - protein, 17 aa, Homo sapiens
  CDR3 for beta chain variable domain of TCR clone 220805 (TRBV28, TRBJ2-3)
CASSRQVGPSSTDTQYF

SEQ ID NO: 441611 - protein, 13 aa, Homo sapiens
  CDR3 for alpha chain variable domain of TCR clone 220806 (TRAV3, TRAJ21)
CAVREPDFNKFYF

SEQ ID NO: 441612 - protein, 15 aa, Homo sapiens
  CDR3 for beta chain variable domain of TCR clone 220806 (TRBV24-1, TRBJ2-1)
CATSEPGQGYNEQFF

SEQ ID NO: 441613 - protein, 20 aa, Homo sapiens
  CDR3 for alpha chain variable domain of TCR clone 220807 (TRAV12-3, TRAJ41)
SLFIRDSQPSDSATPEALNF

SEQ ID NO: 441614 - protein, 15 aa, Homo sapiens
  CDR3 for beta chain variable domain of TCR clone 220807 (TRBV5-1, TRBJ2-7)
CASSLALTSSYEQYF

SEQ ID NO: 441615 - protein, 18 aa, Homo sapiens
  CDR3 for alpha chain variable domain of TCR clone 220808 (TRAV9-2, TRAJ13)
CQTQRCTEPSGGYQKVTF

SEQ ID NO: 441616 - protein, 13 aa, Homo sapiens
  CDR3 for beta chain variable domain of TCR clone 220808 (TRBV5-7, TRBJ2-5)
CASRSGGGGTQYF

SEQ ID NO: 441617 - protein, 14 aa, Homo sapiens
  CDR3 for alpha chain variable domain of TCR clone 220809 (TRAV1-2, TRAJ16)
CAVNRFSDGQKLLF

SEQ ID NO: 441618 - protein, 13 aa, Homo sapiens
  CDR3 for beta chain variable domain of TCR clone 220809 (TRBV7-9, TRBJ2-3)
CASSPGSTDTQDF

SEQ ID NO: 441619 - protein, 13 aa, Homo sapiens
  CDR3 for alpha chain variable domain of TCR clone 220810 (TRAV8-4, TRAJ44)
CAVCTGTASTLTF

SEQ ID NO: 441620 - protein, 15 aa, Homo sapiens
  CDR3 for beta chain variable domain of TCR clone 220810 (TRBV14, TRBJ2-1)
CASSQMGLHFNEQFF

SEQ ID NO: 441621 - protein, 14 aa, Homo sapiens
  CDR3 for alpha chain variable domain of TCR clone 220811 (TRAV35, TRAJ22)
CAGLRPGSARQLTF

SEQ ID NO: 441622 - protein, 15 aa, Homo sapiens
  CDR3 for beta chain variable domain of TCR clone 220811 (TRBV12-4, TRBJ2-2)
CASSPQPGSTGELVF

SEQ ID NO: 441623 - protein, 14 aa, Homo sapiens
  CDR3 for alpha chain variable domain of TCR clone 220812 (TRAV12-2, TRAJ53)
CRERGGGSKLKMTF

SEQ ID NO: 441624 - protein, 15 aa, Homo sapiens
  CDR3 for beta chain variable domain of TCR clone 220812 (TRBV9, TRBJ2-1)
CASSLAGSSYNEQFF

SEQ ID NO: 441625 - protein, 11 aa, Homo sapiens
  CDR3 for alpha chain variable domain of TCR clone 220813 (TRAV3, TRAJ21)
CAVGNFSKFHF

SEQ ID NO: 441626 - protein, 16 aa, Homo sapiens
  CDR3 for beta chain variable domain of TCR clone 220813 (TRBV19, TRBJ2-1)
CASSKGGPSSYNEQFF

SEQ ID NO: 441627 - protein, 13 aa, Homo sapiens
  CDR3 for alpha chain variable domain of TCR clone 220814 (TRAV12-3, TRAJ7)
CAMSASGNNRLAF

SEQ ID NO: 441628 - protein, 18 aa, Homo sapiens
  CDR3 for beta chain variable domain of TCR clone 220814 (TRBV13, TRBJ2-5)
CASSLGPRGETVLRARHA

SEQ ID NO: 441629 - protein, 11 aa, Homo sapiens
  CDR3 for alpha chain variable domain of TCR clone 220815 (TRAV1-1, TRAJ30)
CAQNRDDKIIF

SEQ ID NO: 441630 - protein, 13 aa, Homo sapiens
  CDR3 for beta chain variable domain of TCR clone 220815 (TRBV6-4, TRBJ1-5)
CASSADLNQPQHF

SEQ ID NO: 441631 - protein, 16 aa, Homo sapiens
  CDR3 for alpha chain variable domain of TCR clone 220816 (TRAV3, TRAJ18)
CALRDGRGSTLGRLYF

SEQ ID NO: 441632 - protein, 17 aa, Homo sapiens
  CDR3 for beta chain variable domain of TCR clone 220816 (TRBV5-1, TRBJ2-3)
CASSKIGLADRTDTQYF

SEQ ID NO: 441633 - protein, 17 aa, Homo sapiens
  CDR3 for alpha chain variable domain of TCR clone 220817 (TRAV3, TRAJ12)
CAVRDGGRMDSSYKLIF

SEQ ID NO: 441634 - protein, 12 aa, Homo sapiens
  CDR3 for beta chain variable domain of TCR clone 220817 (TRBV7-3, TRBJ2-1)
CASSFINNEQFF

SEQ ID NO: 441635 - protein, 14 aa, Homo sapiens
  CDR3 for alpha chain variable domain of TCR clone 220818 (TRAV3, TRAJ17)
CAVRDAAAGNKLTF

SEQ ID NO: 441636 - protein, 15 aa, Homo sapiens
  CDR3 for beta chain variable domain of TCR clone 220818 (TRBV4-1, TRBJ1-4)
CASSDTGGTSEKLFF

SEQ ID NO: 441637 - protein, 14 aa, Homo sapiens
  CDR3 for alpha chain variable domain of TCR clone 220819 (TRAV3, TRAJ7)
CAVREEEREQQTRF

SEQ ID NO: 441638 - protein, 11 aa, Homo sapiens
  CDR3 for beta chain variable domain of TCR clone 220819 (TRBV29-1, TRBJ2-5)
CSEDRTGTQYF

SEQ ID NO: 441639 - protein, 17 aa, Homo sapiens
  CDR3 for alpha chain variable domain of TCR clone 220820 (TRAV8-6, TRAJ58)
CAVSSWVGETSGSRLTF

SEQ ID NO: 441640 - protein, 14 aa, Homo sapiens
  CDR3 for beta chain variable domain of TCR clone 220820 (TRBV19, TRBJ2-1)
CASSPGLEPNEQFF

SEQ ID NO: 441641 - protein, 13 aa, Homo sapiens
  CDR3 for alpha chain variable domain of TCR clone 220821 (TRAV20, TRAJ31)
CAVQAIGGARLMF

SEQ ID NO: 441642 - protein, 16 aa, Homo sapiens
  CDR3 for beta chain variable domain of TCR clone 220821 (TRBV27, TRBJ2-7)
CASSKQGRGWAYEQYF

SEQ ID NO: 441643 - protein, 13 aa, Homo sapiens
  CDR3 for alpha chain variable domain of TCR clone 220822 (TRAV2, TRAJ15)
CAVASQAGPALIF

SEQ ID NO: 441644 - protein, 17 aa, Homo sapiens
  CDR3 for beta chain variable domain of TCR clone 220822 (TRBV20-1, TRBJ2-2)
CSASGSGQGGLTGELFF

SEQ ID NO: 441645 - protein, 14 aa, Homo sapiens
  CDR3 for alpha chain variable domain of TCR clone 220823 (TRAV13-2, TRAJ43)
CAEIPTYNNNDMRF

SEQ ID NO: 441646 - protein, 15 aa, Homo sapiens
  CDR3 for beta chain variable domain of TCR clone 220823 (TRBV7-9, TRBJ2-2)
CASEPLDTFPGELFF

SEQ ID NO: 441647 - protein, 17 aa, Homo sapiens
  CDR3 for alpha chain variable domain of TCR clone 220824 (TRAV3, TRAJ6)
CAVRDGPRAGGSYIPTF

SEQ ID NO: 441648 - protein, 15 aa, Homo sapiens
  CDR3 for beta chain variable domain of TCR clone 220824 (TRBV27, TRBJ1-5)
CASTFNRGSNQPQHF

SEQ ID NO: 441649 - protein, 14 aa, Homo sapiens
  CDR3 for alpha chain variable domain of TCR clone 220825 (TRAV8-2, TRAJ37)
CVVSIAGNTGKLIF

SEQ ID NO: 441650 - protein, 11 aa, Homo sapiens
  CDR3 for beta chain variable domain of TCR clone 220825 (TRBV12-4, TRBJ2-3)
CASTATDTQYF

SEQ ID NO: 441651 - protein, 18 aa, Homo sapiens
  CDR3 for alpha chain variable domain of TCR clone 220826 (TRAV26-2, TRAJ54)
CILRDVEVGIQGAQKLEF

SEQ ID NO: 441652 - protein, 17 aa, Homo sapiens
  CDR3 for beta chain variable domain of TCR clone 220826 (TRBV20-1, TRBJ1-5)
CSASLSPGQGGNQPQHF

SEQ ID NO: 441653 - protein, 15 aa, Homo sapiens
  CDR3 for alpha chain variable domain of TCR clone 220827 (TRAV8-3, TRAJ15)
CAVGAPNQAGTALIF

SEQ ID NO: 441654 - protein, 16 aa, Homo sapiens
  CDR3 for beta chain variable domain of TCR clone 220827 (TRBV18, TRBJ2-4)
CASSPPYSGAKNIQYF

SEQ ID NO: 441655 - protein, 16 aa, Homo sapiens
  CDR3 for alpha chain variable domain of TCR clone 220828 (TRAV26-1, TRAJ37)
CIVRGVGSGNTGKLIS

SEQ ID NO: 441656 - protein, 13 aa, Homo sapiens
  CDR3 for beta chain variable domain of TCR clone 220828 (TRBV4-1, TRBJ2-2)
CASSQENTGELFF

SEQ ID NO: 441657 - protein, 14 aa, Homo sapiens
  CDR3 for alpha chain variable domain of TCR clone 220829 (TRAV25, TRAJ20)
CAGKGRWDDYKLRF

SEQ ID NO: 441658 - protein, 12 aa, Homo sapiens
  CDR3 for beta chain variable domain of TCR clone 220829 (TRBV12-5, TRBJ2-3)
CASQASTDTQYF

SEQ ID NO: 441659 - protein, 16 aa, Homo sapiens
  CDR3 for alpha chain variable domain of TCR clone 220830 (TRAV12-1, TRAJ28)
CVVIAYSGAGSYQLTF

SEQ ID NO: 441660 - protein, 12 aa, Homo sapiens
  CDR3 for beta chain variable domain of TCR clone 220830 (TRBV11-2, TRBJ2-2)
CASSLPTGELFF

SEQ ID NO: 441661 - protein, 13 aa, Homo sapiens
  CDR3 for alpha chain variable domain of TCR clone 220831 (TRAV2, TRAJ38)
CAYGAGNNRKLSW

SEQ ID NO: 441662 - protein, 13 aa, Homo sapiens
  CDR3 for beta chain variable domain of TCR clone 220831 (TRBV6-1, TRBJ1-6)
CASSSSWDSPLHF

SEQ ID NO: 441663 - protein, 14 aa, Homo sapiens
  CDR3 for alpha chain variable domain of TCR clone 220832 (TRAV2, TRAJ9)
CAVEDRSGGFKTII

SEQ ID NO: 441664 - protein, 14 aa, Homo sapiens
  CDR3 for beta chain variable domain of TCR clone 220832 (TRBV4-1, TRBJ2-2)
CASSQAVNTGELFF

SEQ ID NO: 441665 - protein, 14 aa, Homo sapiens
  CDR3 for alpha chain variable domain of TCR clone 220833 (TRAV16, TRAJ33)
CALSAMDSNYQLIW

SEQ ID NO: 441666 - protein, 14 aa, Homo sapiens
  CDR3 for beta chain variable domain of TCR clone 220833 (TRBV7-9, TRBJ2-1)
CASSDNSGYNEQFF

SEQ ID NO: 441667 - protein, 14 aa, Homo sapiens
  CDR3 for alpha chain variable domain of TCR clone 220834 (TRAV1-2, TRAJ16)
CAVNRFSDGQKLLF

SEQ ID NO: 441668 - protein, 13 aa, Homo sapiens
  CDR3 for beta chain variable domain of TCR clone 220834 (TRBV7-2, TRBJ1-1)
CASNLKAAKVAFF

SEQ ID NO: 441669 - protein, 11 aa, Homo sapiens
  CDR3 for alpha chain variable domain of TCR clone 220835 (TRAV3, TRAJ21)
CAVSNFNKFYF

SEQ ID NO: 441670 - protein, 14 aa, Homo sapiens
  CDR3 for beta chain variable domain of TCR clone 220835 (TRBV6-1, TRBJ2-7)
CASTRTGDYYEQYF

SEQ ID NO: 441671 - protein, 14 aa, Homo sapiens
  CDR3 for alpha chain variable domain of TCR clone 220836 (TRAV35, TRAJ50)
CAGHRNTSYDKVIF

SEQ ID NO: 441672 - protein, 15 aa, Homo sapiens
  CDR3 for beta chain variable domain of TCR clone 220836 (TRBV6-3, TRBJ2-7)
CASSSPGTVFYEQYF

SEQ ID NO: 441673 - protein, 13 aa, Homo sapiens
  CDR3 for alpha chain variable domain of TCR clone 220837 (TRAV20, TRAJ37)
CAGCSSNTGKLIF

SEQ ID NO: 441674 - protein, 12 aa, Homo sapiens
  CDR3 for beta chain variable domain of TCR clone 220837 (TRBV12-4, TRBJ1-3)
CASSFSGNTIYL

SEQ ID NO: 441675 - protein, 12 aa, Homo sapiens
  CDR3 for alpha chain variable domain of TCR clone 220838 (TRAV12-1, TRAJ40)
CVVYSGTYKYIF

SEQ ID NO: 441676 - protein, 15 aa, Homo sapiens
  CDR3 for beta chain variable domain of TCR clone 220838 (TRBV11-3, TRBJ2-7)
CASSPGPASSYEQYF

SEQ ID NO: 441677 - protein, 15 aa, Homo sapiens
  CDR3 for alpha chain variable domain of TCR clone 220839 (TRAV21, TRAJ53)
CATLNRGGSNYKLTF

SEQ ID NO: 441678 - protein, 13 aa, Homo sapiens
  CDR3 for beta chain variable domain of TCR clone 220839 (TRBV4-1, TRBJ2-2)
CASSQENTGELFF

SEQ ID NO: 441679 - protein, 16 aa, Homo sapiens
  CDR3 for alpha chain variable domain of TCR clone 220840 (TRAV26-1, )
CIDIQNPDPAVYQLRD

SEQ ID NO: 441680 - protein, 17 aa, Homo sapiens
  CDR3 for beta chain variable domain of TCR clone 220840 (TRBV28, TRBJ2-5)
CASSRQGGLAGAETQYF

SEQ ID NO: 441681 - protein, 12 aa, Homo sapiens
  CDR3 for alpha chain variable domain of TCR clone 220841 (TRAV16, TRAJ10)
CSRTGGGNKLTF

SEQ ID NO: 441682 - protein, 14 aa, Homo sapiens
  CDR3 for beta chain variable domain of TCR clone 220841 (TRBV6-3, TRBJ2-7)
CASSPKTSFYEQYF

SEQ ID NO: 441683 - protein, 14 aa, Homo sapiens
  CDR3 for alpha chain variable domain of TCR clone 220842 (TRAV2, TRAJ37)
CAVDFTSNTGKLIF

SEQ ID NO: 441684 - protein, 15 aa, Homo sapiens
  CDR3 for beta chain variable domain of TCR clone 220842 (TRBV20-1, TRBJ1-1)
CSASRGVTAYTEAFF

SEQ ID NO: 441685 - protein, 17 aa, Homo sapiens
  CDR3 for alpha chain variable domain of TCR clone 220843 (TRAV38-2/DV8, TRAJ45)
CAYRSRYSGGGGDGLTF

SEQ ID NO: 441686 - protein, 15 aa, Homo sapiens
  CDR3 for beta chain variable domain of TCR clone 220843 (TRBV19, TRBJ2-1)
CASIKGRGPYNEQFF

SEQ ID NO: 441687 - protein, 13 aa, Homo sapiens
  CDR3 for alpha chain variable domain of TCR clone 220844 (TRAV20, TRAJ34)
CAVSSYNTDKLIF

SEQ ID NO: 441688 - protein, 15 aa, Homo sapiens
  CDR3 for beta chain variable domain of TCR clone 220844 (TRBV20-1, TRBJ1-2)
CSAAGEVARIYGYTF

SEQ ID NO: 441689 - protein, 17 aa, Homo sapiens
  CDR3 for alpha chain variable domain of TCR clone 220845 (TRAV8-3, TRAJ4)
CAVGARPDFKRSWWLQY

SEQ ID NO: 441690 - protein, 13 aa, Homo sapiens
  CDR3 for beta chain variable domain of TCR clone 220845 (TRBV20-1, TRBJ1-2)
CSATGIQGSGYTF

SEQ ID NO: 441691 - protein, 14 aa, Homo sapiens
  CDR3 for alpha chain variable domain of TCR clone 220846 (TRAV1-2, TRAJ8)
CAVREDTGFQKLVF

SEQ ID NO: 441692 - protein, 14 aa, Homo sapiens
  CDR3 for beta chain variable domain of TCR clone 220846 (TRBV7-2, TRBJ2-7)
CASSPKTSIYEQYF

SEQ ID NO: 441693 - protein, 13 aa, Homo sapiens
  CDR3 for alpha chain variable domain of TCR clone 220847 (TRAV26-1, TRAJ34)
CIVRPWINDKLIF

SEQ ID NO: 441694 - protein, 14 aa, Homo sapiens
  CDR3 for beta chain variable domain of TCR clone 220847 (TRBV7-2, TRBJ2-7)
CASRSQGAAYEQYF

SEQ ID NO: 441695 - protein, 15 aa, Homo sapiens
  CDR3 for alpha chain variable domain of TCR clone 220848 (TRAV8-3, TRAJ27)
CAVGPSKTNAGKSTF

SEQ ID NO: 441696 - protein, 15 aa, Homo sapiens
  CDR3 for beta chain variable domain of TCR clone 220848 (TRBV6-6, TRBJ2-1)
CQQLTVGQLLHEQFF

SEQ ID NO: 441697 - protein, 12 aa, Homo sapiens
  CDR3 for alpha chain variable domain of TCR clone 220849 (TRAV17, TRAJ20)
CATDSNDYKLSF

SEQ ID NO: 441698 - protein, 15 aa, Homo sapiens
  CDR3 for beta chain variable domain of TCR clone 220849 (TRBV19, TRBJ1-2)
CASSVGQVLNYGYTF

SEQ ID NO: 441699 - protein, 12 aa, Homo sapiens
  CDR3 for alpha chain variable domain of TCR clone 220850 (TRAV17, TRAJ12)
CAGGDSSYKLIF

SEQ ID NO: 441700 - protein, 15 aa, Homo sapiens
  CDR3 for beta chain variable domain of TCR clone 220850 (TRBV5-8, TRBJ2-2)
CASSLDRGATGELFF

SEQ ID NO: 441701 - protein, 12 aa, Homo sapiens
  CDR3 for alpha chain variable domain of TCR clone 220851 (TRAV13-1, TRAJ21)
CAAKEGFNKFYF

SEQ ID NO: 441702 - protein, 12 aa, Homo sapiens
  CDR3 for beta chain variable domain of TCR clone 220851 (TRBV11-2, TRBJ2-2)
CASSLGDGELFF

SEQ ID NO: 441703 - protein, 14 aa, Homo sapiens
  CDR3 for alpha chain variable domain of TCR clone 220852 (TRAV25, TRAJ27)
CAGPVNTNAGKSTF

SEQ ID NO: 441704 - protein, 16 aa, Homo sapiens
  CDR3 for beta chain variable domain of TCR clone 220852 (TRBV4-1, TRBJ2-6)
CASSQDGGPGANVLTF

SEQ ID NO: 441705 - protein, 10 aa, Homo sapiens
  CDR3 for alpha chain variable domain of TCR clone 220853 (TRAV30, TRAJ20)
CGTDDYKLSF

SEQ ID NO: 441706 - protein, 16 aa, Homo sapiens
  CDR3 for beta chain variable domain of TCR clone 220853 (TRBV20-1, TRBJ1-2)
CSASMGQGVANYGYTF

SEQ ID NO: 441707 - protein, 13 aa, Homo sapiens
  CDR3 for alpha chain variable domain of TCR clone 220854 (TRAV8-3, TRAJ21)
CAVGLDTFNKFYF

SEQ ID NO: 441708 - protein, 13 aa, Homo sapiens
  CDR3 for beta chain variable domain of TCR clone 220854 (TRBV11-2, TRBJ2-5)
CASGHGAKETQYF

SEQ ID NO: 441709 - protein, 13 aa, Homo sapiens
  CDR3 for alpha chain variable domain of TCR clone 220855 (TRAV23/DV6, TRAJ47)
CAASSQYGNKLVF

SEQ ID NO: 441710 - protein, 14 aa, Homo sapiens
  CDR3 for beta chain variable domain of TCR clone 220855 (TRBV7-3, TRBJ2-1)
CASSLAGGTNEQFF

SEQ ID NO: 441711 - protein, 16 aa, Homo sapiens
  CDR3 for alpha chain variable domain of TCR clone 220856 (TRAV12-2, TRAJ40)
CAVIRWGTSGTYKYIF

SEQ ID NO: 441712 - protein, 16 aa, Homo sapiens
  CDR3 for beta chain variable domain of TCR clone 220856 (TRBV7-9, TRBJ2-1)
CASSDVAGGSYNEQFF

SEQ ID NO: 441713 - protein, 13 aa, Homo sapiens
  CDR3 for alpha chain variable domain of TCR clone 220857 (TRAV21, TRAJ45)
CAVMGGGADGLTF

SEQ ID NO: 441714 - protein, 14 aa, Homo sapiens
  CDR3 for beta chain variable domain of TCR clone 220857 (TRBV4-3, TRBJ1-4)
CASSPLQRNENLFF

SEQ ID NO: 441715 - protein, 13 aa, Homo sapiens
  CDR3 for alpha chain variable domain of TCR clone 220858 (TRAV12-1, TRAJ34)
CVVTGYNTDKLIF

SEQ ID NO: 441716 - protein, 13 aa, Homo sapiens
  CDR3 for beta chain variable domain of TCR clone 220858 (TRBV28, TRBJ2-7)
CTSKAGGVYEQYF

SEQ ID NO: 441717 - protein, 16 aa, Homo sapiens
  CDR3 for alpha chain variable domain of TCR clone 220859 (TRAV26-1, TRAJ40)
CIVRGHPTSGTYKYIF

SEQ ID NO: 441718 - protein, 14 aa, Homo sapiens
  CDR3 for beta chain variable domain of TCR clone 220859 (TRBV5-1, TRBJ1-4)
CASSSGQGGEKLFF

SEQ ID NO: 441719 - protein, 15 aa, Homo sapiens
  CDR3 for alpha chain variable domain of TCR clone 220860 (TRAV27, TRAJ38)
CATRRNAGNNRKLIW

SEQ ID NO: 441720 - protein, 17 aa, Homo sapiens
  CDR3 for beta chain variable domain of TCR clone 220860 (TRBV20-1, TRBJ2-2)
CSASGSGQGGLTGELFF

SEQ ID NO: 441721 - protein, 14 aa, Homo sapiens
  CDR3 for alpha chain variable domain of TCR clone 220861 (TRAV8-1, TRAJ49)
CASSIANTGSQFYF

SEQ ID NO: 441722 - protein, 13 aa, Homo sapiens
  CDR3 for beta chain variable domain of TCR clone 220861 (TRBV11-2, TRBJ2-5)
CASSFSSQETQYF

SEQ ID NO: 441723 - protein, 17 aa, Homo sapiens
  CDR3 for alpha chain variable domain of TCR clone 220862 (TRAV3, TRAJ6)
CAVKDGPRAGGSYIPTF

SEQ ID NO: 441724 - protein, 18 aa, Homo sapiens
  CDR3 for beta chain variable domain of TCR clone 220862 (TRBV7-3, TRBJ2-3)
CASSSTGTYPGSTDTQYF

SEQ ID NO: 441725 - protein, 16 aa, Homo sapiens
  CDR3 for alpha chain variable domain of TCR clone 220863 (TRAV30, TRAJ24)
CGTEIVDADSWGKFQF

SEQ ID NO: 441726 - protein, 14 aa, Homo sapiens
  CDR3 for beta chain variable domain of TCR clone 220863 (TRBV13, TRBJ2-1)
CARSPRPRYNEQFF

SEQ ID NO: 441727 - protein, 16 aa, Homo sapiens
  CDR3 for alpha chain variable domain of TCR clone 220864 (TRAV22, TRAJ45)
CAVARGKRGGADGLTF

SEQ ID NO: 441728 - protein, 11 aa, Homo sapiens
  CDR3 for beta chain variable domain of TCR clone 220864 (TRBV29-1, TRBJ2-5)
CSEDRTGTQYF

SEQ ID NO: 441729 - protein, 18 aa, Homo sapiens
  CDR3 for alpha chain variable domain of TCR clone 220865 (TRAV26-2, TRAJ54)
CILRDVEVGIQGAQKLVF

SEQ ID NO: 441730 - protein, 16 aa, Homo sapiens
  CDR3 for beta chain variable domain of TCR clone 220865 (TRBV6-1, TRBJ2-5)
CASSGTLDRGSETQYF

SEQ ID NO: 441731 - protein, 17 aa, Homo sapiens
  CDR3 for alpha chain variable domain of TCR clone 220866 (TRAV3, TRAJ12)
CAVRDGGRGDSSYKLIF

SEQ ID NO: 441732 - protein, 15 aa, Homo sapiens
  CDR3 for beta chain variable domain of TCR clone 220866 (TRBV20-1, TRBJ2-5)
CSAEGTGGLQETQYF

SEQ ID NO: 441733 - protein, 13 aa, Homo sapiens
  CDR3 for alpha chain variable domain of TCR clone 220867 (TRAV21, TRAJ27)
CAARPGNAGKSTF

SEQ ID NO: 441734 - protein, 14 aa, Homo sapiens
  CDR3 for beta chain variable domain of TCR clone 220867 (TRBV5-1, TRBJ1-1)
CASSLVSINTEAFF

SEQ ID NO: 441735 - protein, 14 aa, Homo sapiens
  CDR3 for alpha chain variable domain of TCR clone 220868 (TRAV38-1, TRAJ40)
CALRPTSGTYSYIF

SEQ ID NO: 441736 - protein, 15 aa, Homo sapiens
  CDR3 for beta chain variable domain of TCR clone 220868 (TRBV20-1, TRBJ2-7)
CSARDRVSGMDEQYF

SEQ ID NO: 441737 - protein, 10 aa, Homo sapiens
  CDR3 for alpha chain variable domain of TCR clone 220869 (TRAV13-1, TRAJ24)
CAANWGKLQF

SEQ ID NO: 441738 - protein, 15 aa, Homo sapiens
  CDR3 for beta chain variable domain of TCR clone 220869 (TRBV7-9, TRBJ1-5)
CASSQGHQPNQPQHF

SEQ ID NO: 441739 - protein, 13 aa, Homo sapiens
  CDR3 for alpha chain variable domain of TCR clone 220870 (TRAV30, TRAJ49)
CGTESQPVTSSIL

SEQ ID NO: 441740 - protein, 17 aa, Homo sapiens
  CDR3 for beta chain variable domain of TCR clone 220870 (TRBV7-3, TRBJ2-5)
CASSLGSGRSGSETQYF

SEQ ID NO: 441741 - protein, 16 aa, Homo sapiens
  CDR3 for alpha chain variable domain of TCR clone 220871 (TRAV8-4, TRAJ28)
CAVSAYSGAGSYQLTF

SEQ ID NO: 441742 - protein, 15 aa, Homo sapiens
  CDR3 for beta chain variable domain of TCR clone 220871 (TRBV7-2, TRBJ1-1)
CASSFAGDRDTEAFF

SEQ ID NO: 441743 - protein, 16 aa, Homo sapiens
  CDR3 for alpha chain variable domain of TCR clone 220872 (TRAV30, TRAJ24)
CGPEIVDADSRGKFQF

SEQ ID NO: 441744 - protein, 14 aa, Homo sapiens
  CDR3 for beta chain variable domain of TCR clone 220872 (TRBV12-5, TRBJ2-5)
CASGSRTHQETQYF

SEQ ID NO: 441745 - protein, 14 aa, Homo sapiens
  CDR3 for alpha chain variable domain of TCR clone 220873 (TRAV1-2, TRAJ8)
CAVREEAGFQKLVF

SEQ ID NO: 441746 - protein, 15 aa, Homo sapiens
  CDR3 for beta chain variable domain of TCR clone 220873 (TRBV6-3, TRBJ2-7)
CASSSPGTVFYEQYF

SEQ ID NO: 441747 - protein, 12 aa, Homo sapiens
  CDR3 for alpha chain variable domain of TCR clone 220874 (TRAV13-1, TRAJ21)
CAAKEDFNKFYF

SEQ ID NO: 441748 - protein, 14 aa, Homo sapiens
  CDR3 for beta chain variable domain of TCR clone 220874 (TRBV5-4, TRBJ1-1)
CASSLDSRRDEAFF

SEQ ID NO: 441749 - protein, 23 aa, Homo sapiens
  CDR3 for alpha chain variable domain of TCR clone 220875 (TRAV26-1, TRAJ38)
CIADNAGNNHIQSPDPAVYQLRD

SEQ ID NO: 441750 - protein, 13 aa, Homo sapiens
  CDR3 for beta chain variable domain of TCR clone 220875 (TRBV10-3, TRBJ2-7)
CASKLAVNYEQYF

SEQ ID NO: 441751 - protein, 12 aa, Homo sapiens
  CDR3 for alpha chain variable domain of TCR clone 220876 (TRAV21, TRAJ33)
CAKTDSNYQLIW

SEQ ID NO: 441752 - protein, 15 aa, Homo sapiens
  CDR3 for beta chain variable domain of TCR clone 220876 (TRBV5-1, TRBJ2-5)
CASSFKGGDQENQYF

SEQ ID NO: 441753 - protein, 21 aa, Homo sapiens
  CDR3 for alpha chain variable domain of TCR clone 220877 (TRAV13-1, TRAJ26)
SLHITETQPEDSSVYFCAIVF

SEQ ID NO: 441754 - protein, 15 aa, Homo sapiens
  CDR3 for beta chain variable domain of TCR clone 220877 (TRBV12-4, TRBJ2-1)
CASSLLSRTYNEQFF

SEQ ID NO: 441755 - protein, 14 aa, Homo sapiens
  CDR3 for alpha chain variable domain of TCR clone 220878 (TRAV12-2, TRAJ6)
CASKWGGGSYIPTF

SEQ ID NO: 441756 - protein, 14 aa, Homo sapiens
  CDR3 for beta chain variable domain of TCR clone 220878 (TRBV7-8, TRBJ1-5)
CQQPGGGADQPQHF

SEQ ID NO: 441757 - protein, 14 aa, Homo sapiens
  CDR3 for alpha chain variable domain of TCR clone 220879 (TRAV12-3, TRAJ12)
CAMSRMDSSYKLIF

SEQ ID NO: 441758 - protein, 17 aa, Homo sapiens
  CDR3 for beta chain variable domain of TCR clone 220879 (TRBV20-1, TRBJ2-1)
CSASSSGLAGSYNEQFF

SEQ ID NO: 441759 - protein, 14 aa, Homo sapiens
  CDR3 for alpha chain variable domain of TCR clone 220880 (TRAV8-4, TRAJ3)
CAVIEYSSASKIIF

SEQ ID NO: 441760 - protein, 15 aa, Homo sapiens
  CDR3 for beta chain variable domain of TCR clone 220880 (TRBV10-2, TRBJ2-6)
CASSEQGTGANVLTF

SEQ ID NO: 441761 - protein, 16 aa, Homo sapiens
  CDR3 for alpha chain variable domain of TCR clone 220881 (TRAV12-3, TRAJ53)
CAMSPGSGGINFKLTF

SEQ ID NO: 441762 - protein, 11 aa, Homo sapiens
  CDR3 for beta chain variable domain of TCR clone 220881 (TRBV29-1, TRBJ2-5)
CSEDRTGTQYF

SEQ ID NO: 441763 - protein, 16 aa, Homo sapiens
  CDR3 for alpha chain variable domain of TCR clone 220882 (TRAV14/DV4, TRAJ53)
CAMREGGGGSNYKLTF

SEQ ID NO: 441764 - protein, 12 aa, Homo sapiens
  CDR3 for beta chain variable domain of TCR clone 220882 (TRBV16, TRBJ2-2)
CASSQSVGELFF

SEQ ID NO: 441765 - protein, 13 aa, Homo sapiens
  CDR3 for alpha chain variable domain of TCR clone 220883 (TRAV1-1, TRAJ33)
CASHMDSNYQLIC

SEQ ID NO: 441766 - protein, 18 aa, Homo sapiens
  CDR3 for beta chain variable domain of TCR clone 220883 (TRBV20-1, TRBJ2-2)
CSARVQTARPAGTGELFF

SEQ ID NO: 441767 - protein, 14 aa, Homo sapiens
  CDR3 for alpha chain variable domain of TCR clone 220884 (TRAV2, TRAJ9)
CAVVLNTGGFKTIF

SEQ ID NO: 441768 - protein, 13 aa, Homo sapiens
  CDR3 for beta chain variable domain of TCR clone 220884 (TRBV28, TRBJ2-7)
CASTPGLAGEQYF

SEQ ID NO: 441769 - protein, 16 aa, Homo sapiens
  CDR3 for alpha chain variable domain of TCR clone 220885 (TRAV16, TRAJ4)
CALSRMFSGGYNKLIF

SEQ ID NO: 441770 - protein, 14 aa, Homo sapiens
  CDR3 for beta chain variable domain of TCR clone 220885 (TRBV7-3, TRBJ1-1)
CASSLGTGYTEAFF

SEQ ID NO: 441771 - protein, 13 aa, Homo sapiens
  CDR3 for alpha chain variable domain of TCR clone 220886 (TRAV21, TRAJ27)
CAARPGNAGKSTF

SEQ ID NO: 441772 - protein, 12 aa, Homo sapiens
  CDR3 for beta chain variable domain of TCR clone 220886 (TRBV14, TRBJ2-7)
CASSSLKGEQYF

SEQ ID NO: 441773 - protein, 10 aa, Homo sapiens
  CDR3 for alpha chain variable domain of TCR clone 220887 (TRAV36/DV7, TRAJ48)
CAVGNEKLTF

SEQ ID NO: 441774 - protein, 13 aa, Homo sapiens
  CDR3 for beta chain variable domain of TCR clone 220887 (TRBV7-7, TRBJ1-1)
CASSLGANTEAFF

SEQ ID NO: 441775 - protein, 12 aa, Homo sapiens
  CDR3 for alpha chain variable domain of TCR clone 220888 (TRAV13-1, TRAJ21)
CAAKEGFNKFYF

SEQ ID NO: 441776 - protein, 19 aa, Homo sapiens
  CDR3 for beta chain variable domain of TCR clone 220888 (TRBV2, TRBJ2-7)
CASSDDDTSGRANDYEQYF

SEQ ID NO: 441777 - protein, 13 aa, Homo sapiens
  CDR3 for alpha chain variable domain of TCR clone 220889 (TRAV1-1, TRAJ31)
CASYLNNNARLMF

SEQ ID NO: 441778 - protein, 14 aa, Homo sapiens
  CDR3 for beta chain variable domain of TCR clone 220889 (TRBV4-1, TRBJ2-5)
CASSRSGSVETQYF

SEQ ID NO: 441779 - protein, 12 aa, Homo sapiens
  CDR3 for alpha chain variable domain of TCR clone 220890 (TRAV17, TRAJ20)
CAMLANDYKLSF

SEQ ID NO: 441780 - protein, 17 aa, Homo sapiens
  CDR3 for beta chain variable domain of TCR clone 220890 (TRBV7-3, TRBJ2-3)
CASSLMKRMRGADTQYF

SEQ ID NO: 441781 - protein, 14 aa, Homo sapiens
  CDR3 for alpha chain variable domain of TCR clone 220891 (TRAV1-1, TRAJ23)
CAVSIYNQGGKLIF

SEQ ID NO: 441782 - protein, 20 aa, Homo sapiens
  CDR3 for beta chain variable domain of TCR clone 220891 (TRBV6-4, TRBJ2-7)
WASSDSSVSGQVPTSYEQYF

SEQ ID NO: 441783 - protein, 13 aa, Homo sapiens
  CDR3 for alpha chain variable domain of TCR clone 220892 (TRAV8-6, TRAJ49)
CAVITNTGNQFYF

SEQ ID NO: 441784 - protein, 13 aa, Homo sapiens
  CDR3 for beta chain variable domain of TCR clone 220892 (TRBV10-3, TRBJ2-7)
CASKLAVNYEQYL

SEQ ID NO: 441785 - protein, 14 aa, Homo sapiens
  CDR3 for alpha chain variable domain of TCR clone 220893 (TRAV9-2, TRAJ39)
CALYIYNAGNMLTF

SEQ ID NO: 441786 - protein, 14 aa, Homo sapiens
  CDR3 for beta chain variable domain of TCR clone 220893 (TRBV7-6, TRBJ2-7)
CASSFRQGADEQYF

SEQ ID NO: 441787 - protein, 15 aa, Homo sapiens
  CDR3 for alpha chain variable domain of TCR clone 220894 (TRAV25, TRAJ53)
CAATGGGGSNYKLTF

SEQ ID NO: 441788 - protein, 13 aa, Homo sapiens
  CDR3 for beta chain variable domain of TCR clone 220894 (TRBV7-7, TRBJ2-3)
CASSLSRADTQYF

SEQ ID NO: 441789 - protein, 10 aa, Homo sapiens
  CDR3 for alpha chain variable domain of TCR clone 220895 (TRAV39, TRAJ49)
CAVAGNQVYF

SEQ ID NO: 441790 - protein, 14 aa, Homo sapiens
  CDR3 for beta chain variable domain of TCR clone 220895 (TRBV7-8, TRBJ2-7)
CASSPRDRVYEQYF

SEQ ID NO: 441791 - protein, 13 aa, Homo sapiens
  CDR3 for alpha chain variable domain of TCR clone 220896 (TRAV2, TRAJ15)
CAVASQAGTALIF

SEQ ID NO: 441792 - protein, 14 aa, Homo sapiens
  CDR3 for beta chain variable domain of TCR clone 220896 (TRBV19, TRBJ1-5)
CASSLGPGGEPQHF

SEQ ID NO: 441793 - protein, 14 aa, Homo sapiens
  CDR3 for alpha chain variable domain of TCR clone 220897 (TRAV2, TRAJ9)
CAVEDRRGGFKTIF

SEQ ID NO: 441794 - protein, 14 aa, Homo sapiens
  CDR3 for beta chain variable domain of TCR clone 220897 (TRBV7-6, TRBJ2-3)
CASSLGTVTDTQYF

SEQ ID NO: 441795 - protein, 13 aa, Homo sapiens
  CDR3 for alpha chain variable domain of TCR clone 220898 (TRAV23/DV6, TRAJ5)
CAARAAGRRALTF

SEQ ID NO: 441796 - protein, 14 aa, Homo sapiens
  CDR3 for beta chain variable domain of TCR clone 220898 (TRBV7-6, TRBJ2-3)
CASSLGTVTDTQYF

SEQ ID NO: 441797 - protein, 13 aa, Homo sapiens
  CDR3 for alpha chain variable domain of TCR clone 220899 (TRAV17, TRAJ26)
CATVDHYGQNFVF

SEQ ID NO: 441798 - protein, 14 aa, Homo sapiens
  CDR3 for beta chain variable domain of TCR clone 220899 (TRBV6-1, TRBJ1-3)
CASVQGGGGNTIYF

SEQ ID NO: 441799 - protein, 14 aa, Homo sapiens
  CDR3 for alpha chain variable domain of TCR clone 220900 (TRAV12-2, TRAJ40)
CAVKIPSGTYKYNF

SEQ ID NO: 441800 - protein, 14 aa, Homo sapiens
  CDR3 for beta chain variable domain of TCR clone 220900 (TRBV7-2, TRBJ1-5)
CASSTQGAGQPQHF

SEQ ID NO: 441801 - protein, 13 aa, Homo sapiens
  CDR3 for alpha chain variable domain of TCR clone 220901 (TRAV36/DV7, TRAJ41)
CAVEANSGYALNF

SEQ ID NO: 441802 - protein, 15 aa, Homo sapiens
  CDR3 for beta chain variable domain of TCR clone 220901 (TRBV11-2, TRBJ2-1)
CASSKNRGLIYEQFF

SEQ ID NO: 441803 - protein, 11 aa, Homo sapiens
  CDR3 for alpha chain variable domain of TCR clone 220902 (TRAV1-1, TRAJ22)
CLEGFCKATDL

SEQ ID NO: 441804 - protein, 14 aa, Homo sapiens
  CDR3 for beta chain variable domain of TCR clone 220902 (TRBV27, TRBJ2-7)
CASSLAGLSYEQYF

SEQ ID NO: 441805 - protein, 16 aa, Homo sapiens
  CDR3 for alpha chain variable domain of TCR clone 220903 (TRAV4, TRAJ22)
CLVGDLYSGSARQLTF

SEQ ID NO: 441806 - protein, 17 aa, Homo sapiens
  CDR3 for beta chain variable domain of TCR clone 220903 (TRBV7-8, TRBJ2-6)
CASSAGTGGAGANVLTF

SEQ ID NO: 441807 - protein, 14 aa, Homo sapiens
  CDR3 for alpha chain variable domain of TCR clone 220904 (TRAV1-2, TRAJ8)
CAVGGDTGFQKLVF

SEQ ID NO: 441808 - protein, 15 aa, Homo sapiens
  CDR3 for beta chain variable domain of TCR clone 220904 (TRBV4-1, TRBJ2-7)
CASSQNTGRLYEQYF

SEQ ID NO: 441809 - protein, 15 aa, Homo sapiens
  CDR3 for alpha chain variable domain of TCR clone 220905 (TRAV21, TRAJ53)
CATLNSGGSNYKLTF

SEQ ID NO: 441810 - protein, 16 aa, Homo sapiens
  CDR3 for beta chain variable domain of TCR clone 220905 (TRBV9, TRBJ2-1)
CASSVCGGGNYNEQFF

SEQ ID NO: 441811 - protein, 13 aa, Homo sapiens
  CDR3 for alpha chain variable domain of TCR clone 220906 (TRAV12-3, TRAJ6)
CANPSGGSYIPTF

SEQ ID NO: 441812 - protein, 14 aa, Homo sapiens
  CDR3 for beta chain variable domain of TCR clone 220906 (TRBV19, TRBJ1-1)
RASSRDRDATEAFF

SEQ ID NO: 441813 - protein, 13 aa, Homo sapiens
  CDR3 for alpha chain variable domain of TCR clone 220907 (TRAV3, TRAJ16)
CAVRDRNGQKLLF

SEQ ID NO: 441814 - protein, 15 aa, Homo sapiens
  CDR3 for beta chain variable domain of TCR clone 220907 (TRBV5-1, TRBJ2-1)
CASSPPRAPYNAQFF

SEQ ID NO: 441815 - protein, 14 aa, Homo sapiens
  CDR3 for alpha chain variable domain of TCR clone 220908 (TRAV1-2, TRAJ8)
CAVREDTCFQKLVF

SEQ ID NO: 441816 - protein, 22 aa, Homo sapiens
  CDR3 for beta chain variable domain of TCR clone 220908 (TRBV7-3, TRBJ2-2)
GGTQPCNSVPAAQEDTPGSCFF

SEQ ID NO: 441817 - protein, 16 aa, Homo sapiens
  CDR3 for alpha chain variable domain of TCR clone 220909 (TRAV3, TRAJ37)
CAVRPHGSGNTGKRIF

SEQ ID NO: 441818 - protein, 15 aa, Homo sapiens
  CDR3 for beta chain variable domain of TCR clone 220909 (TRBV10-3, TRBJ2-3)
CAISLTSGGTDTQYF

SEQ ID NO: 441819 - protein, 16 aa, Homo sapiens
  CDR3 for alpha chain variable domain of TCR clone 220910 (TRAV8-6, TRAJ32)
CAVSDPYGGATIKLIF

SEQ ID NO: 441820 - protein, 18 aa, Homo sapiens
  CDR3 for beta chain variable domain of TCR clone 220910 (TRBV4-2, TRBJ2-6)
CASSQLQGVLTGANVLTF

SEQ ID NO: 441821 - protein, 14 aa, Homo sapiens
  CDR3 for alpha chain variable domain of TCR clone 220911 (TRAV26-1, TRAJ38)
CIADNSGNNRKLIW

SEQ ID NO: 441822 - protein, 17 aa, Homo sapiens
  CDR3 for beta chain variable domain of TCR clone 220911 (TRBV13, TRBJ2-3)
CASSLSRVAGGRNTQYF

SEQ ID NO: 441823 - protein, 17 aa, Homo sapiens
  CDR3 for alpha chain variable domain of TCR clone 220912 (TRAV26-2, TRAJ42)
CILRDVGYGGIQGNLIF

SEQ ID NO: 441824 - protein, 16 aa, Homo sapiens
  CDR3 for beta chain variable domain of TCR clone 220912 (TRBV12-4, TRBJ2-7)
YASSLIGGTGTYEQYF

SEQ ID NO: 441825 - protein, 19 aa, Homo sapiens
  CDR3 for alpha chain variable domain of TCR clone 220913 (TRAV2, TRAJ20)
ILQVREADAAVYRDCKLRF

SEQ ID NO: 441826 - protein, 16 aa, Homo sapiens
  CDR3 for beta chain variable domain of TCR clone 220913 (TRBV20-1, TRBJ1-4)
CSAPGQGLLTNEKLFF

SEQ ID NO: 441827 - protein, 17 aa, Homo sapiens
  CDR3 for alpha chain variable domain of TCR clone 220914 (TRAV3, TRAJ38)
CAVRDCLNADNNRKLIW

SEQ ID NO: 441828 - protein, 16 aa, Homo sapiens
  CDR3 for beta chain variable domain of TCR clone 220914 (TRBV4-1, TRBJ2-3)
CASSQSTSGAEDTQYF

SEQ ID NO: 441829 - protein, 14 aa, Homo sapiens
  CDR3 for alpha chain variable domain of TCR clone 220915 (TRAV2, TRAJ9)
CAVEDRSGGFKTIF

SEQ ID NO: 441830 - protein, 13 aa, Homo sapiens
  CDR3 for beta chain variable domain of TCR clone 220915 (TRBV27, TRBJ1-1)
CASSLSVGAEAFF

SEQ ID NO: 441831 - protein, 16 aa, Homo sapiens
  CDR3 for alpha chain variable domain of TCR clone 220916 (TRAV16, TRAJ42)
CALSGLLGGSQGNLLF

SEQ ID NO: 441832 - protein, 15 aa, Homo sapiens
  CDR3 for beta chain variable domain of TCR clone 220916 (TRBV5-1, TRBJ2-1)
CASSPGGLAGNEQFF

SEQ ID NO: 441833 - protein, 14 aa, Homo sapiens
  CDR3 for alpha chain variable domain of TCR clone 220917 (TRAV26-1, TRAJ45)
CIEVTGGGADGLTF

SEQ ID NO: 441834 - protein, 14 aa, Homo sapiens
  CDR3 for beta chain variable domain of TCR clone 220917 (TRBV20-1, TRBJ2-1)
CSGTLAGGLGEQFF

SEQ ID NO: 441835 - protein, 15 aa, Homo sapiens
  CDR3 for alpha chain variable domain of TCR clone 220918 (TRAV25, TRAJ52)
CAGRPGGTSYGKLTF

SEQ ID NO: 441836 - protein, 14 aa, Homo sapiens
  CDR3 for beta chain variable domain of TCR clone 220918 (TRBV15, TRBJ2-7)
CATSRVARGYEQYF

SEQ ID NO: 441837 - protein, 15 aa, Homo sapiens
  CDR3 for alpha chain variable domain of TCR clone 220919 (TRAV10, TRAJ39)
CVVSASGNAGNMLTF

SEQ ID NO: 441838 - protein, 14 aa, Homo sapiens
  CDR3 for beta chain variable domain of TCR clone 220919 (TRBV4-1, TRBJ2-2)
CASSQAVNTGELFF

SEQ ID NO: 441839 - protein, 13 aa, Homo sapiens
  CDR3 for alpha chain variable domain of TCR clone 220920 (TRAV27, TRAJ45)
CGSSGGGADGLTF

SEQ ID NO: 441840 - protein, 17 aa, Homo sapiens
  CDR3 for beta chain variable domain of TCR clone 220920 (TRBV11-2, TRBJ2-1)
YASSLYPPGVEYNEQFF

SEQ ID NO: 441841 - protein, 15 aa, Homo sapiens
  CDR3 for alpha chain variable domain of TCR clone 220921 (TRAV4, TRAJ32)
CPVGEDGGATNKLIF

SEQ ID NO: 441842 - protein, 14 aa, Homo sapiens
  CDR3 for beta chain variable domain of TCR clone 220921 (TRBV7-2, TRBJ2-5)
CASSPRGSSETQYF

SEQ ID NO: 441843 - protein, 15 aa, Homo sapiens
  CDR3 for alpha chain variable domain of TCR clone 220922 (TRAV12-3, TRAJ11)
CAMSEENSGYSNLTF

SEQ ID NO: 441844 - protein, 16 aa, Homo sapiens
  CDR3 for beta chain variable domain of TCR clone 220922 (TRBV5-1, TRBJ2-7)
CASSLEGLAGLYEQYF

SEQ ID NO: 441845 - protein, 16 aa, Homo sapiens
  CDR3 for alpha chain variable domain of TCR clone 220923 (TRAV3, TRAJ42)
CAVRDIEGGSQGNLIF

SEQ ID NO: 441846 - protein, 15 aa, Homo sapiens
  CDR3 for beta chain variable domain of TCR clone 220923 (TRBV9, TRBJ2-2)
CASSDFAGAAGELFF

SEQ ID NO: 441847 - protein, 14 aa, Homo sapiens
  CDR3 for alpha chain variable domain of TCR clone 220924 (TRAV8-6, TRAJ10)
CAVTSTGGGNKLTF

SEQ ID NO: 441848 - protein, 12 aa, Homo sapiens
  CDR3 for beta chain variable domain of TCR clone 220924 (TRBV5-7, TRBJ2-5)
CQQIERGGTQYF

SEQ ID NO: 441849 - protein, 14 aa, Homo sapiens
  CDR3 for alpha chain variable domain of TCR clone 220925 (TRAV27, TRAJ44)
CAASFTGTASKLTF

SEQ ID NO: 441850 - protein, 13 aa, Homo sapiens
  CDR3 for beta chain variable domain of TCR clone 220925 (TRBV27, TRBJ2-3)
CATTRGGLYTQYF

SEQ ID NO: 441851 - protein, 18 aa, Homo sapiens
  CDR3 for alpha chain variable domain of TCR clone 220926 (TRAV21, TRAJ52)
CAVRPSPAGGTSYGELTF

SEQ ID NO: 441852 - protein, 14 aa, Homo sapiens
  CDR3 for beta chain variable domain of TCR clone 220926 (TRBV7-2, TRBJ2-7)
CASSPKTSFYEQYF

SEQ ID NO: 441853 - protein, 21 aa, Homo sapiens
  CDR3 for alpha chain variable domain of TCR clone 220927 (TRAV16, TRAJ22)
HLKKPFAQGEDSAMYLRQLTF

SEQ ID NO: 441854 - protein, 14 aa, Homo sapiens
  CDR3 for beta chain variable domain of TCR clone 220927 (TRBV7-8, TRBJ2-3)
CASSLEAGTDTQYF

SEQ ID NO: 441855 - protein, 12 aa, Homo sapiens
  CDR3 for alpha chain variable domain of TCR clone 220928 (TRAV17, TRAJ20)
CATQSNDYKLSF

SEQ ID NO: 441856 - protein, 15 aa, Homo sapiens
  CDR3 for beta chain variable domain of TCR clone 220928 (TRBV11-2, TRBJ2-2)
CASSSDRVNAGELFF

SEQ ID NO: 441857 - protein, 13 aa, Homo sapiens
  CDR3 for alpha chain variable domain of TCR clone 220929 (TRAV6, TRAJ4)
CALLRGGYIKLIF

SEQ ID NO: 441858 - protein, 12 aa, Homo sapiens
  CDR3 for beta chain variable domain of TCR clone 220929 (TRBV2, TRBJ2-1)
CAKREGYNEQFF

SEQ ID NO: 441859 - protein, 15 aa, Homo sapiens
  CDR3 for alpha chain variable domain of TCR clone 220930 (TRAV12-1, TRAJ44)
CVVDTPQGTASKLTF

SEQ ID NO: 441860 - protein, 14 aa, Homo sapiens
  CDR3 for beta chain variable domain of TCR clone 220930 (TRBV7-9, TRBJ2-1)
CASRPRDSLYEQFF

SEQ ID NO: 441861 - protein, 14 aa, Homo sapiens
  CDR3 for alpha chain variable domain of TCR clone 220931 (TRAV8-1, TRAJ22)
CAAPSSGSARQLTF

SEQ ID NO: 441862 - protein, 14 aa, Homo sapiens
  CDR3 for beta chain variable domain of TCR clone 220931 (TRBV9, TRBJ2-2)
CASSVGQGSGELFF

SEQ ID NO: 441863 - protein, 14 aa, Homo sapiens
  CDR3 for alpha chain variable domain of TCR clone 220932 (TRAV12-2, TRAJ17)
FAVLFKAAGNKLTF

SEQ ID NO: 441864 - protein, 12 aa, Homo sapiens
  CDR3 for beta chain variable domain of TCR clone 220932 (TRBV11-2, TRBJ2-2)
CASSLGGGELFF

SEQ ID NO: 441865 - protein, 13 aa, Homo sapiens
  CDR3 for alpha chain variable domain of TCR clone 220933 (TRAV13-1, TRAJ10)
CAATAGGGNKVTF

SEQ ID NO: 441866 - protein, 12 aa, Homo sapiens
  CDR3 for beta chain variable domain of TCR clone 220933 (TRBV7-3, TRBJ2-1)
CASSFQSGPQFF

SEQ ID NO: 441867 - protein, 14 aa, Homo sapiens
  CDR3 for alpha chain variable domain of TCR clone 220934 (TRAV26-2, TRAJ27)
CILRDISDAGKSTF

SEQ ID NO: 441868 - protein, 15 aa, Homo sapiens
  CDR3 for beta chain variable domain of TCR clone 220934 (TRBV10-3, TRBJ2-7)
CATREQGVRSYEQYF

SEQ ID NO: 441869 - protein, 11 aa, Homo sapiens
  CDR3 for alpha chain variable domain of TCR clone 220935 (TRAV1-1, TRAJ5)
CAVRVRRSLTF

SEQ ID NO: 441870 - protein, 14 aa, Homo sapiens
  CDR3 for beta chain variable domain of TCR clone 220935 (TRBV19, TRBJ2-1)
CASKDPSSYNEQFF

SEQ ID NO: 441871 - protein, 13 aa, Homo sapiens
  CDR3 for alpha chain variable domain of TCR clone 220936 (TRAV2, TRAJ15)
CAVASQAGTALIF

SEQ ID NO: 441872 - protein, 16 aa, Homo sapiens
  CDR3 for beta chain variable domain of TCR clone 220936 (TRBV28, TRBJ2-1)
CASSTRTSGRRNEQFF

SEQ ID NO: 441873 - protein, 14 aa, Homo sapiens
  CDR3 for alpha chain variable domain of TCR clone 220937 (TRAV41, TRAJ54)
CAVRSNQGAQKLVF

SEQ ID NO: 441874 - protein, 15 aa, Homo sapiens
  CDR3 for beta chain variable domain of TCR clone 220937 (TRBV20-1, TRBJ2-7)
CSAESGTSGACEQYF

SEQ ID NO: 441875 - protein, 14 aa, Homo sapiens
  CDR3 for alpha chain variable domain of TCR clone 220938 (TRAV1-2, TRAJ8)
CAVSEDTGFQKLVF

SEQ ID NO: 441876 - protein, 17 aa, Homo sapiens
  CDR3 for beta chain variable domain of TCR clone 220938 (TRBV9, TRBJ2-2)
CASSVGGQGTDTGELFF

SEQ ID NO: 441877 - protein, 16 aa, Homo sapiens
  CDR3 for alpha chain variable domain of TCR clone 220939 (TRAV38-2/DV8, TRAJ33)
CAYRPGLFDSNYQLIW

SEQ ID NO: 441878 - protein, 13 aa, Homo sapiens
  CDR3 for beta chain variable domain of TCR clone 220939 (TRBV27, TRBJ1-4)
CASSLMGDEKLFF

SEQ ID NO: 441879 - protein, 15 aa, Homo sapiens
  CDR3 for alpha chain variable domain of TCR clone 220940 (TRAV8-2, TRAJ16)
CVVSDGFSDGQKLLF

SEQ ID NO: 441880 - protein, 15 aa, Homo sapiens
  CDR3 for beta chain variable domain of TCR clone 220940 (TRBV6-3, TRBJ2-7)
CASSSPGTVFYEQYF

SEQ ID NO: 441881 - protein, 15 aa, Homo sapiens
  CDR3 for alpha chain variable domain of TCR clone 220941 (TRAV17, TRAJ22)
CATVAPSGSARQLTF

SEQ ID NO: 441882 - protein, 16 aa, Homo sapiens
  CDR3 for beta chain variable domain of TCR clone 220941 (TRBV10-3, TRBJ2-7)
CGISADVADRPYEQYF

SEQ ID NO: 441883 - protein, 14 aa, Homo sapiens
  CDR3 for alpha chain variable domain of TCR clone 220942 (TRAV8-2, TRAJ11)
CVVSEKSGYSTLTF

SEQ ID NO: 441884 - protein, 16 aa, Homo sapiens
  CDR3 for beta chain variable domain of TCR clone 220942 (TRBV11-2, TRBJ2-7)
CASSLAPTGVNYEQYF

SEQ ID NO: 441885 - protein, 13 aa, Homo sapiens
  CDR3 for alpha chain variable domain of TCR clone 220943 (TRAV8-6, TRAJ21)
CAVSPTSLNKFYF

SEQ ID NO: 441886 - protein, 14 aa, Homo sapiens
  CDR3 for beta chain variable domain of TCR clone 220943 (TRBV7-9, TRBJ2-5)
CASSLDKAQETQYF

SEQ ID NO: 441887 - protein, 16 aa, Homo sapiens
  CDR3 for alpha chain variable domain of TCR clone 220944 (TRAV30, TRAJ24)
CGTEIVDADSWGKFQF

SEQ ID NO: 441888 - protein, 17 aa, Homo sapiens
  CDR3 for beta chain variable domain of TCR clone 220944 (TRBV7-8, TRBJ2-6)
CASSAETGGAGANVLTF

SEQ ID NO: 441889 - protein, 13 aa, Homo sapiens
  CDR3 for alpha chain variable domain of TCR clone 220945 (TRAV13-2, TRAJ15)
CAGRPQAGTALIF

SEQ ID NO: 441890 - protein, 15 aa, Homo sapiens
  CDR3 for beta chain variable domain of TCR clone 220945 (TRBV11-2, TRBJ2-7)
CASRFPGTGGYEQYF

SEQ ID NO: 441891 - protein, 11 aa, Homo sapiens
  CDR3 for alpha chain variable domain of TCR clone 220946 (TRAV12-1, TRAJ30)
CVVKGQDKIIF

SEQ ID NO: 441892 - protein, 16 aa, Homo sapiens
  CDR3 for beta chain variable domain of TCR clone 220946 (TRBV24-1, TRBJ2-3)
CATSDAISGITDTQYF

SEQ ID NO: 441893 - protein, 14 aa, Homo sapiens
  CDR3 for alpha chain variable domain of TCR clone 220947 (TRAV12-2, TRAJ13)
CAVKKTGGYQNVTF

SEQ ID NO: 441894 - protein, 14 aa, Homo sapiens
  CDR3 for beta chain variable domain of TCR clone 220947 (TRBV7-3, TRBJ1-1)
CASSLGTGYTEAFF

SEQ ID NO: 441895 - protein, 14 aa, Homo sapiens
  CDR3 for alpha chain variable domain of TCR clone 220948 (TRAV38-2/DV8, TRAJ23)
CAYRSQNQGGKLIF

SEQ ID NO: 441896 - protein, 14 aa, Homo sapiens
  CDR3 for beta chain variable domain of TCR clone 220948 (TRBV7-9, TRBJ2-3)
CASSLEDGTDTQYF

SEQ ID NO: 441897 - protein, 13 aa, Homo sapiens
  CDR3 for alpha chain variable domain of TCR clone 220949 (TRAV30, TRAJ24)
CGTVTDSWGKLQF

SEQ ID NO: 441898 - protein, 12 aa, Homo sapiens
  CDR3 for beta chain variable domain of TCR clone 220949 (TRBV12-4, TRBJ2-1)
CASSPGRNEQFF

SEQ ID NO: 441899 - protein, 15 aa, Homo sapiens
  CDR3 for alpha chain variable domain of TCR clone 220950 (TRAV3, TRAJ22)
CAVRDRGGSARHMTF

SEQ ID NO: 441900 - protein, 15 aa, Homo sapiens
  CDR3 for beta chain variable domain of TCR clone 220950 (TRBV6-5, TRBJ2-1)
CASSYDAGAGNEQFF

SEQ ID NO: 441901 - protein, 16 aa, Homo sapiens
  CDR3 for alpha chain variable domain of TCR clone 220951 (TRAV3, TRAJ37)
CAVRPHGSGNTGKLVF

SEQ ID NO: 441902 - protein, 17 aa, Homo sapiens
  CDR3 for beta chain variable domain of TCR clone 220951 (TRBV20-1, TRBJ2-1)
CSASSSGLAGSYNEQFF

SEQ ID NO: 441903 - protein, 14 aa, Homo sapiens
  CDR3 for alpha chain variable domain of TCR clone 220952 (TRAV1-2, TRAJ8)
CAVREYTGFQKLVF

SEQ ID NO: 441904 - protein, 14 aa, Homo sapiens
  CDR3 for beta chain variable domain of TCR clone 220952 (TRBV6-1, TRBJ1-6)
CASSEGVGDSPLHF

SEQ ID NO: 441905 - protein, 13 aa, Homo sapiens
  CDR3 for alpha chain variable domain of TCR clone 220953 (TRAV12-2, TRAJ50)
CAVIVTSYDKVIF

SEQ ID NO: 441906 - protein, 15 aa, Homo sapiens
  CDR3 for beta chain variable domain of TCR clone 220953 (TRBV20-1, TRBJ2-7)
CSARVPAAYFYEQYF

SEQ ID NO: 441907 - protein, 14 aa, Homo sapiens
  CDR3 for alpha chain variable domain of TCR clone 220954 (TRAV1-2, TRAJ16)
CAVNRFSDVQKLLF

SEQ ID NO: 441908 - protein, 13 aa, Homo sapiens
  CDR3 for beta chain variable domain of TCR clone 220954 (TRBV20-1, TRBJ1-1)
CSAPLGGGTEAFF

SEQ ID NO: 441909 - protein, 15 aa, Homo sapiens
  CDR3 for alpha chain variable domain of TCR clone 220955 (TRAV8-3, TRAJ11)
CDVGLLNSGYSTLTF

SEQ ID NO: 441910 - protein, 16 aa, Homo sapiens
  CDR3 for beta chain variable domain of TCR clone 220955 (TRBV7-9, TRBJ1-2)
CASSLGFSSGEDGYTF

SEQ ID NO: 441911 - protein, 12 aa, Homo sapiens
  CDR3 for alpha chain variable domain of TCR clone 220956 (TRAV21, TRAJ13)
PGPSGGYQKVTF

SEQ ID NO: 441912 - protein, 16 aa, Homo sapiens
  CDR3 for beta chain variable domain of TCR clone 220956 (TRBV2, TRBJ2-3)
CASSTSVEGVTDTQYF

SEQ ID NO: 441913 - protein, 14 aa, Homo sapiens
  CDR3 for alpha chain variable domain of TCR clone 220957 (TRAV12-2, TRAJ3)
CAVSLYSSASKIIF

SEQ ID NO: 441914 - protein, 14 aa, Homo sapiens
  CDR3 for beta chain variable domain of TCR clone 220957 (TRBV7-6, TRBJ2-3)
CASSLGTVTDTQYF

SEQ ID NO: 441915 - protein, 12 aa, Homo sapiens
  CDR3 for alpha chain variable domain of TCR clone 220958 (TRAV8-3, TRAJ20)
WSVGANDYKLSF

SEQ ID NO: 441916 - protein, 16 aa, Homo sapiens
  CDR3 for beta chain variable domain of TCR clone 220958 (TRBV19, TRBJ2-2)
CASQSPGTGATGELFF

SEQ ID NO: 441917 - protein, 14 aa, Homo sapiens
  CDR3 for alpha chain variable domain of TCR clone 220959 (TRAV12-2, TRAJ13)
CAVKKTGGYQKVTF

SEQ ID NO: 441918 - protein, 20 aa, Homo sapiens
  CDR3 for beta chain variable domain of TCR clone 220959 (TRBV19, TRBJ2-1)
CASSISRTVTSTRLNDEQFF

SEQ ID NO: 441919 - protein, 14 aa, Homo sapiens
  CDR3 for alpha chain variable domain of TCR clone 220960 (TRAV27, TRAJ42)
CAGGDGGSQGNPIF

SEQ ID NO: 441920 - protein, 14 aa, Homo sapiens
  CDR3 for beta chain variable domain of TCR clone 220960 (TRBV19, TRBJ1-2)
CASSRQGSSIGYTF

SEQ ID NO: 441921 - protein, 13 aa, Homo sapiens
  CDR3 for alpha chain variable domain of TCR clone 220961 (TRAV8-4, TRAJ4)
WAVSDIGYNKLIF

SEQ ID NO: 441922 - protein, 13 aa, Homo sapiens
  CDR3 for beta chain variable domain of TCR clone 220961 (TRBV19, TRBJ1-2)
CASSQGQVYGYTF

SEQ ID NO: 441923 - protein, 12 aa, Homo sapiens
  CDR3 for alpha chain variable domain of TCR clone 220962 (TRAV12-3, TRAJ17)
CAMTLTGNKLTF

SEQ ID NO: 441924 - protein, 16 aa, Homo sapiens
  CDR3 for beta chain variable domain of TCR clone 220962 (TRBV5-1, TRBJ2-2)
CASSLWDTTNTGELFF

SEQ ID NO: 441925 - protein, 17 aa, Homo sapiens
  CDR3 for alpha chain variable domain of TCR clone 220963 (TRAV3, TRAJ6)
CAVRDGPRAGGSYIPTF

SEQ ID NO: 441926 - protein, 15 aa, Homo sapiens
  CDR3 for beta chain variable domain of TCR clone 220963 (TRBV9, TRBJ1-6)
CASSVAGAGDSTLHF

SEQ ID NO: 441927 - protein, 13 aa, Homo sapiens
  CDR3 for alpha chain variable domain of TCR clone 220964 (TRAV20, TRAJ20)
CAVRDFNDYKLSF

SEQ ID NO: 441928 - protein, 13 aa, Homo sapiens
  CDR3 for beta chain variable domain of TCR clone 220964 (TRBV20-1, TRBJ1-1)
CSARGGGNTEAFF

SEQ ID NO: 441929 - protein, 15 aa, Homo sapiens
  CDR3 for alpha chain variable domain of TCR clone 220965 (TRAV25, TRAJ52)
CAGRPGGTSYGKLTF

SEQ ID NO: 441930 - protein, 14 aa, Homo sapiens
  CDR3 for beta chain variable domain of TCR clone 220965 (TRBV7-2, TRBJ2-1)
CASSLGVGYNEQFF

SEQ ID NO: 441931 - protein, 14 aa, Homo sapiens
  CDR3 for alpha chain variable domain of TCR clone 220966 (TRAV26-1, TRAJ45)
CIEGTGGGADGLTF

SEQ ID NO: 441932 - protein, 15 aa, Homo sapiens
  CDR3 for beta chain variable domain of TCR clone 220966 (TRBV6-5, TRBJ2-1)
CASSYDAGAGNEQFF

SEQ ID NO: 441933 - protein, 14 aa, Homo sapiens
  CDR3 for alpha chain variable domain of TCR clone 220967 (TRAV21, TRAJ45)
CAVSSGGGADGLTF

SEQ ID NO: 441934 - protein, 15 aa, Homo sapiens
  CDR3 for beta chain variable domain of TCR clone 220967 (TRBV6-1, TRBJ2-4)
CASSEAVWTINTQYF

SEQ ID NO: 441935 - protein, 13 aa, Homo sapiens
  CDR3 for alpha chain variable domain of TCR clone 220968 (TRAV13-2, TRAJ13)
CAETAGGYKKVTF

SEQ ID NO: 441936 - protein, 15 aa, Homo sapiens
  CDR3 for beta chain variable domain of TCR clone 220968 (TRBV20-1, TRBJ1-5)
CSARVGRVVSQPQHF

SEQ ID NO: 441937 - protein, 16 aa, Homo sapiens
  CDR3 for alpha chain variable domain of TCR clone 220969 (TRAV1-2, TRAJ10)
CAVRGLLTGGGNKLTF

SEQ ID NO: 441938 - protein, 12 aa, Homo sapiens
  CDR3 for beta chain variable domain of TCR clone 220969 (TRBV12-4, TRBJ2-7)
CASSLGGYEQYF

SEQ ID NO: 441939 - protein, 15 aa, Homo sapiens
  CDR3 for alpha chain variable domain of TCR clone 220970 (TRAV26-1, TRAJ44)
CIVRANTGTDSKLTF

SEQ ID NO: 441940 - protein, 12 aa, Homo sapiens
  CDR3 for beta chain variable domain of TCR clone 220970 (TRBV28, TRBJ2-3)
CASSLYRDTQYF

SEQ ID NO: 441941 - protein, 15 aa, Homo sapiens
  CDR3 for alpha chain variable domain of TCR clone 220971 (TRAV17, TRAJ37)
CATDHGSSNTGKLIF

SEQ ID NO: 441942 - protein, 14 aa, Homo sapiens
  CDR3 for beta chain variable domain of TCR clone 220971 (TRBV7-2, TRBJ2-3)
CDSSRTSGADTQYF

SEQ ID NO: 441943 - protein, 13 aa, Homo sapiens
  CDR3 for alpha chain variable domain of TCR clone 220972 (TRAV36/DV7, TRAJ37)
CAVFSSNTGKLIF

SEQ ID NO: 441944 - protein, 17 aa, Homo sapiens
  CDR3 for beta chain variable domain of TCR clone 220972 (TRBV6-5, TRBJ2-1)
CASRKNPRTGGHNEQFF

SEQ ID NO: 441945 - protein, 17 aa, Homo sapiens
  CDR3 for alpha chain variable domain of TCR clone 220973 (TRAV3, TRAJ6)
CAVRDGPRAGGSYIPIF

SEQ ID NO: 441946 - protein, 17 aa, Homo sapiens
  CDR3 for beta chain variable domain of TCR clone 220973 (TRBV11-2, TRBJ2-1)
CASSLYPPGVEYNEQFF

SEQ ID NO: 441947 - protein, 16 aa, Homo sapiens
  CDR3 for alpha chain variable domain of TCR clone 220974 (TRAV26-1, )
CIDIQNPDPAVYQLRD

SEQ ID NO: 441948 - protein, 19 aa, Homo sapiens
  CDR3 for beta chain variable domain of TCR clone 220974 (TRBV19, TRBJ2-5)
CTSSIGQVTDFFLGETQYF

SEQ ID NO: 441949 - protein, 12 aa, Homo sapiens
  CDR3 for alpha chain variable domain of TCR clone 220975 (TRAV12-3, TRAJ32)
CAGGGATNKLIF

SEQ ID NO: 441950 - protein, 15 aa, Homo sapiens
  CDR3 for beta chain variable domain of TCR clone 220975 (TRBV4-3, TRBJ2-1)
CASSQESAIYNEQFL

SEQ ID NO: 441951 - protein, 15 aa, Homo sapiens
  CDR3 for alpha chain variable domain of TCR clone 220976 (TRAV1-2, TRAJ30)
CAVRPYGNRDDKIIF

SEQ ID NO: 441952 - protein, 13 aa, Homo sapiens
  CDR3 for beta chain variable domain of TCR clone 220976 (TRBV4-1, TRBJ2-7)
CASSQGQAYEQYF

SEQ ID NO: 441953 - protein, 16 aa, Homo sapiens
  CDR3 for alpha chain variable domain of TCR clone 220977 (TRAV16, TRAJ52)
CALSGVGGTSYGKLTF

SEQ ID NO: 441954 - protein, 16 aa, Homo sapiens
  CDR3 for beta chain variable domain of TCR clone 220977 (TRBV20-1, TRBJ2-1)
CSARDLKQGMNNEQFF

SEQ ID NO: 441955 - protein, 11 aa, Homo sapiens
  CDR3 for alpha chain variable domain of TCR clone 220978 (TRAV1-1, TRAJ23)
CAVRQGGKLIF

SEQ ID NO: 441956 - protein, 14 aa, Homo sapiens
  CDR3 for beta chain variable domain of TCR clone 220978 (TRBV2, TRBJ1-5)
CASSENRGGQPQHF

SEQ ID NO: 441957 - protein, 16 aa, Homo sapiens
  CDR3 for alpha chain variable domain of TCR clone 220979 (TRAV26-1, TRAJ32)
CIVRTNYGGATNKLIF

SEQ ID NO: 441958 - protein, 14 aa, Homo sapiens
  CDR3 for beta chain variable domain of TCR clone 220979 (TRBV27, TRBJ1-1)
CASSLLSGLSEDFF

SEQ ID NO: 441959 - protein, 14 aa, Homo sapiens
  CDR3 for alpha chain variable domain of TCR clone 220980 (TRAV12-2, TRAJ11)
CAVNMNSGYSTLTF

SEQ ID NO: 441960 - protein, 16 aa, Homo sapiens
  CDR3 for beta chain variable domain of TCR clone 220980 (TRBV13, TRBJ2-2)
CASSPRTGEHTGELFF

SEQ ID NO: 441961 - protein, 13 aa, Homo sapiens
  CDR3 for alpha chain variable domain of TCR clone 220981 (TRAV30, TRAJ39)
CGTEKNAGNMLTF

SEQ ID NO: 441962 - protein, 12 aa, Homo sapiens
  CDR3 for beta chain variable domain of TCR clone 220981 (TRBV12-4, TRBJ2-5)
GASSSAQETQYF

SEQ ID NO: 441963 - protein, 15 aa, Homo sapiens
  CDR3 for alpha chain variable domain of TCR clone 220982 (TRAV8-3, TRAJ37)
CAVGARASNTGKLIF

SEQ ID NO: 441964 - protein, 18 aa, Homo sapiens
  CDR3 for beta chain variable domain of TCR clone 220982 (TRBV11-2, TRBJ2-3)
CASSLGGASRGAPNTQYF

SEQ ID NO: 441965 - protein, 17 aa, Homo sapiens
  CDR3 for alpha chain variable domain of TCR clone 220983 (TRAV26-2, TRAJ28)
CILRPLLIVAGSYQLTF

SEQ ID NO: 441966 - protein, 11 aa, Homo sapiens
  CDR3 for beta chain variable domain of TCR clone 220983 (TRBV11-3, TRBJ2-7)
CASSRTYEQYF

SEQ ID NO: 441967 - protein, 16 aa, Homo sapiens
  CDR3 for alpha chain variable domain of TCR clone 220984 (TRAV30, TRAJ24)
RGTEIVDADSWGKFQF

SEQ ID NO: 441968 - protein, 18 aa, Homo sapiens
  CDR3 for beta chain variable domain of TCR clone 220984 (TRBV11-2, TRBJ2-3)
CASSFGGASRGAPNTQYF

SEQ ID NO: 441969 - protein, 21 aa, Homo sapiens
  CDR3 for alpha chain variable domain of TCR clone 220985 (TRAV12-1, TRAJ37)
CVVNVGLWQHRQTNLWARDNF

SEQ ID NO: 441970 - protein, 12 aa, Homo sapiens
  CDR3 for beta chain variable domain of TCR clone 220985 (TRBV20-1, TRBJ1-2)
CSAPGFNYGYTF

SEQ ID NO: 441971 - protein, 16 aa, Homo sapiens
  CDR3 for alpha chain variable domain of TCR clone 220986 (TRAV3, TRAJ37)
CAVRGRGPGNTGKLIF

SEQ ID NO: 441972 - protein, 13 aa, Homo sapiens
  CDR3 for beta chain variable domain of TCR clone 220986 (TRBV14, TRBJ2-7)
CASSQDRRGEQYF

SEQ ID NO: 441973 - protein, 15 aa, Homo sapiens
  CDR3 for alpha chain variable domain of TCR clone 220987 (TRAV30, TRAJ32)
CGTEILGGATNKLIF

SEQ ID NO: 441974 - protein, 17 aa, Homo sapiens
  CDR3 for beta chain variable domain of TCR clone 220987 (TRBV5-4, TRBJ2-1)
CARSSAGGRGPYNEQFF

SEQ ID NO: 441975 - protein, 14 aa, Homo sapiens
  CDR3 for alpha chain variable domain of TCR clone 220988 (TRAV21, TRAJ52)
CGRAGGTSYGKLTF

SEQ ID NO: 441976 - protein, 14 aa, Homo sapiens
  CDR3 for beta chain variable domain of TCR clone 220988 (TRBV19, TRBJ1-2)
CASSVLGYNYGYTL

SEQ ID NO: 441977 - protein, 16 aa, Homo sapiens
  CDR3 for alpha chain variable domain of TCR clone 220989 (TRAV22, TRAJ45)
CAVERGKRGGADRLTF

SEQ ID NO: 441978 - protein, 11 aa, Homo sapiens
  CDR3 for beta chain variable domain of TCR clone 220989 (TRBV29-1, TRBJ2-5)
CSEDRTGTQYF

SEQ ID NO: 441979 - protein, 13 aa, Homo sapiens
  CDR3 for alpha chain variable domain of TCR clone 220990 (TRAV13-1, TRAJ11)
CAAVLAGYSTLTF

SEQ ID NO: 441980 - protein, 13 aa, Homo sapiens
  CDR3 for beta chain variable domain of TCR clone 220990 (TRBV25-1, TRBJ2-7)
VTPVVFSSYEQYF

SEQ ID NO: 441981 - protein, 16 aa, Homo sapiens
  CDR3 for alpha chain variable domain of TCR clone 220991 (TRAV3, TRAJ12)
CERRDGTMDSSYKLIF

SEQ ID NO: 441982 - protein, 15 aa, Homo sapiens
  CDR3 for beta chain variable domain of TCR clone 220991 (TRBV5-5, TRBJ1-5)
CASSLKGGGEQPQHF

SEQ ID NO: 441983 - protein, 13 aa, Homo sapiens
  CDR3 for alpha chain variable domain of TCR clone 220992 (TRAV21, TRAJ57)
CAVTQGGSEKLAF

SEQ ID NO: 441984 - protein, 15 aa, Homo sapiens
  CDR3 for beta chain variable domain of TCR clone 220992 (TRBV4-1, TRBJ1-2)
CASSQGQGAAYGYTF

SEQ ID NO: 441985 - protein, 14 aa, Homo sapiens
  CDR3 for alpha chain variable domain of TCR clone 220993 (TRAV23/DV6, TRAJ11)
CPALIGGGYSTLTF

SEQ ID NO: 441986 - protein, 13 aa, Homo sapiens
  CDR3 for beta chain variable domain of TCR clone 220993 (TRBV11-3, TRBJ1-1)
CASSLGGNTEAFF

SEQ ID NO: 441987 - protein, 16 aa, Homo sapiens
  CDR3 for alpha chain variable domain of TCR clone 220994 (TRAV16, TRAJ4)
CALSRMFSGGYNKLIF

SEQ ID NO: 441988 - protein, 15 aa, Homo sapiens
  CDR3 for beta chain variable domain of TCR clone 220994 (TRBV12-5, TRBJ2-2)
CASGRLGGNTGELFF

SEQ ID NO: 441989 - protein, 17 aa, Homo sapiens
  CDR3 for alpha chain variable domain of TCR clone 220995 (TRAV12-2, TRAJ22)
CAVNRIPFSGSARQLTF

SEQ ID NO: 441990 - protein, 15 aa, Homo sapiens
  CDR3 for beta chain variable domain of TCR clone 220995 (TRBV7-9, TRBJ1-5)
CASSQGHQPNQPQHF

SEQ ID NO: 441991 - protein, 14 aa, Homo sapiens
  CDR3 for alpha chain variable domain of TCR clone 220996 (TRAV8-4, TRAJ48)
CAVKGNFGNEKLTF

SEQ ID NO: 441992 - protein, 16 aa, Homo sapiens
  CDR3 for beta chain variable domain of TCR clone 220996 (TRBV7-7, TRBJ2-1)
CASSLASGTSYNEQFF

SEQ ID NO: 441993 - protein, 15 aa, Homo sapiens
  CDR3 for alpha chain variable domain of TCR clone 220997 (TRAV2, TRAJ9)
CAVEDRGTGGFKTIF

SEQ ID NO: 441994 - protein, 14 aa, Homo sapiens
  CDR3 for beta chain variable domain of TCR clone 220997 (TRBV7-9, TRBJ2-3)
CASSLEDGTDTQYF

SEQ ID NO: 441995 - protein, 11 aa, Homo sapiens
  CDR3 for alpha chain variable domain of TCR clone 220998 (TRAV3, TRAJ21)
CAVGNFNKFYF

SEQ ID NO: 441996 - protein, 16 aa, Homo sapiens
  CDR3 for beta chain variable domain of TCR clone 220998 (TRBV3-1, TRBJ2-5)
CASSPGQLNGFGTQYF

SEQ ID NO: 441997 - protein, 11 aa, Homo sapiens
  CDR3 for alpha chain variable domain of TCR clone 220999 (TRAV3, TRAJ21)
CAVGNFNKFYF

SEQ ID NO: 441998 - protein, 16 aa, Homo sapiens
  CDR3 for beta chain variable domain of TCR clone 220999 (TRBV7-3, TRBJ2-5)
CASSLMGGASQETQYF

SEQ ID NO: 441999 - protein, 14 aa, Homo sapiens
  CDR3 for alpha chain variable domain of TCR clone 221000 (TRAV35, TRAJ22)
CAGPRPGSARQLTF

SEQ ID NO: 442000 - protein, 15 aa, Homo sapiens
  CDR3 for beta chain variable domain of TCR clone 221000 (TRBV12-4, TRBJ2-5)
CASSPPTGLQGTQYF

SEQ ID NO: 442001 - protein, 13 aa, Homo sapiens
  CDR3 for alpha chain variable domain of TCR clone 221001 (TRAV8-6, TRAJ49)
CAVITNTGNQFYF

SEQ ID NO: 442002 - protein, 12 aa, Homo sapiens
  CDR3 for beta chain variable domain of TCR clone 221001 (TRBV7-9, TRBJ2-3)
CASSHRTDTQYF

SEQ ID NO: 442003 - protein, 13 aa, Homo sapiens
  CDR3 for alpha chain variable domain of TCR clone 221002 (TRAV13-1, TRAJ37)
CAARSGNTGKLIC

SEQ ID NO: 442004 - protein, 14 aa, Homo sapiens
  CDR3 for beta chain variable domain of TCR clone 221002 (TRBV12-4, TRBJ2-3)
CASSLGQGTDTQYF

SEQ ID NO: 442005 - protein, 13 aa, Homo sapiens
  CDR3 for alpha chain variable domain of TCR clone 221003 (TRAV3, TRAJ21)
CAVREPDFNKFYF

SEQ ID NO: 442006 - protein, 13 aa, Homo sapiens
  CDR3 for beta chain variable domain of TCR clone 221003 (TRBV19, TRBJ1-2)
CASSQGQVYGYTF

SEQ ID NO: 442007 - protein, 13 aa, Homo sapiens
  CDR3 for alpha chain variable domain of TCR clone 221004 (TRAV12-1, TRAJ22)
CVVYSGSARQLTF

SEQ ID NO: 442008 - protein, 13 aa, Homo sapiens
  CDR3 for beta chain variable domain of TCR clone 221004 (TRBV4-2, TRBJ1-1)
CASSQAGNTEAFF

SEQ ID NO: 442009 - protein, 14 aa, Homo sapiens
  CDR3 for alpha chain variable domain of TCR clone 221005 (TRAV3, TRAJ36)
CAVRDGTGANNLFF

SEQ ID NO: 442010 - protein, 14 aa, Homo sapiens
  CDR3 for beta chain variable domain of TCR clone 221005 (TRBV7-2, TRBJ1-1)
CASSFLTGTTEAFF

SEQ ID NO: 442011 - protein, 14 aa, Homo sapiens
  CDR3 for alpha chain variable domain of TCR clone 221006 (TRAV29/DV5, TRAJ13)
CAASLSGGYQKVTF

SEQ ID NO: 442012 - protein, 16 aa, Homo sapiens
  CDR3 for beta chain variable domain of TCR clone 221006 (TRBV4-1, TRBJ2-1)
CASSQEAGQGSDEQFF

SEQ ID NO: 442013 - protein, 17 aa, Homo sapiens
  CDR3 for alpha chain variable domain of TCR clone 221007 (TRAV3, TRAJ6)
CAVRDGPRAGGSYTPTF

SEQ ID NO: 442014 - protein, 16 aa, Homo sapiens
  CDR3 for beta chain variable domain of TCR clone 221007 (TRBV7-3, TRBJ2-2)
CASSLKRGTLSGELFF

SEQ ID NO: 442015 - protein, 13 aa, Homo sapiens
  CDR3 for alpha chain variable domain of TCR clone 221008 (TRAV12-3, TRAJ41)
CAIAPNSGYALNF

SEQ ID NO: 442016 - protein, 15 aa, Homo sapiens
  CDR3 for beta chain variable domain of TCR clone 221008 (TRBV18, TRBJ2-1)
CASSPPSASYNEQFF

SEQ ID NO: 442017 - protein, 11 aa, Homo sapiens
  CDR3 for alpha chain variable domain of TCR clone 221009 (TRAV2, TRAJ33)
CAVDSNYRLIC

SEQ ID NO: 442018 - protein, 15 aa, Homo sapiens
  CDR3 for beta chain variable domain of TCR clone 221009 (TRBV19, TRBJ1-2)
CASSVGQVLNYGYTF

SEQ ID NO: 442019 - protein, 15 aa, Homo sapiens
  CDR3 for alpha chain variable domain of TCR clone 221010 (TRAV38-1, TRAJ37)
CAFIHGAGNTGKLIF

SEQ ID NO: 442020 - protein, 12 aa, Homo sapiens
  CDR3 for beta chain variable domain of TCR clone 221010 (TRBV7-9, TRBJ2-7)
CASSFGSYEQYF

SEQ ID NO: 442021 - protein, 12 aa, Homo sapiens
  CDR3 for alpha chain variable domain of TCR clone 221011 (TRAV1-1, TRAJ24)
CAARGGWGKFQF

SEQ ID NO: 442022 - protein, 16 aa, Homo sapiens
  CDR3 for beta chain variable domain of TCR clone 221011 (TRBV27, TRBJ2-2)
CASSFRGLVRTGELFF

SEQ ID NO: 442023 - protein, 14 aa, Homo sapiens
  CDR3 for alpha chain variable domain of TCR clone 221012 (TRAV26-1, TRAJ39)
CIVRGSRAGNMLPF

SEQ ID NO: 442024 - protein, 15 aa, Homo sapiens
  CDR3 for beta chain variable domain of TCR clone 221012 (TRBV7-9, TRBJ1-5)
CASSQGHQPNQTQHF

SEQ ID NO: 442025 - protein, 13 aa, Homo sapiens
  CDR3 for alpha chain variable domain of TCR clone 221013 (TRAV36/DV7, TRAJ37)
CAVFSSNTGILIF

SEQ ID NO: 442026 - protein, 15 aa, Homo sapiens
  CDR3 for beta chain variable domain of TCR clone 221013 (TRBV12-4, TRBJ2-5)
CQQFFVRGRQETQYF

SEQ ID NO: 442027 - protein, 13 aa, Homo sapiens
  CDR3 for alpha chain variable domain of TCR clone 221014 (TRAV13-1, TRAJ21)
CAASIYNFNKFYF

SEQ ID NO: 442028 - protein, 15 aa, Homo sapiens
  CDR3 for beta chain variable domain of TCR clone 221014 (TRBV5-5, TRBJ1-5)
CASSLKGGGEQTQHF

SEQ ID NO: 442029 - protein, 12 aa, Homo sapiens
  CDR3 for alpha chain variable domain of TCR clone 221015 (TRAV12-3, TRAJ17)
CAMTLTGNKLTF

SEQ ID NO: 442030 - protein, 13 aa, Homo sapiens
  CDR3 for beta chain variable domain of TCR clone 221015 (TRBV10-3, TRBJ1-2)
CAISERDSYGHTF

SEQ ID NO: 442031 - protein, 13 aa, Homo sapiens
  CDR3 for alpha chain variable domain of TCR clone 221016 (TRAV12-3, TRAJ31)
CAMSANNNARLMF

SEQ ID NO: 442032 - protein, 16 aa, Homo sapiens
  CDR3 for beta chain variable domain of TCR clone 221016 (TRBV7-9, TRBJ1-2)
CASSLGLFSGEDGYTF

SEQ ID NO: 442033 - protein, 15 aa, Homo sapiens
  CDR3 for alpha chain variable domain of TCR clone 221017 (TRAV3, TRAJ32)
CAVSSYGGATNKLIF

SEQ ID NO: 442034 - protein, 15 aa, Homo sapiens
  CDR3 for beta chain variable domain of TCR clone 221017 (TRBV19, TRBJ1-2)
CASSVGQVLNYGYTF

SEQ ID NO: 442035 - protein, 14 aa, Homo sapiens
  CDR3 for alpha chain variable domain of TCR clone 221018 (TRAV1-2, TRAJ16)
CAFNRFSDGQKLLF

SEQ ID NO: 442036 - protein, 16 aa, Homo sapiens
  CDR3 for beta chain variable domain of TCR clone 221018 (TRBV12-4, TRBJ2-5)
CASSFFVRGRQETQYF

SEQ ID NO: 442037 - protein, 15 aa, Homo sapiens
  CDR3 for alpha chain variable domain of TCR clone 221019 (TRAV27, TRAJ53)
CRAINSGGSNYKLTF

SEQ ID NO: 442038 - protein, 14 aa, Homo sapiens
  CDR3 for beta chain variable domain of TCR clone 221019 (TRBV7-3, TRBJ2-1)
CASSLAGGRNEQFF

SEQ ID NO: 442039 - protein, 13 aa, Homo sapiens
  CDR3 for alpha chain variable domain of TCR clone 221020 (TRAV17, TRAJ9)
CATDYTGGFKTIF

SEQ ID NO: 442040 - protein, 15 aa, Homo sapiens
  CDR3 for beta chain variable domain of TCR clone 221020 (TRBV10-3, TRBJ2-5)
CAISEFGRGQETQYF

SEQ ID NO: 442041 - protein, 14 aa, Homo sapiens
  CDR3 for alpha chain variable domain of TCR clone 221021 (TRAV21, TRAJ35)
CAVMPIGFGNVMHC

SEQ ID NO: 442042 - protein, 13 aa, Homo sapiens
  CDR3 for beta chain variable domain of TCR clone 221021 (TRBV23-1, TRBJ1-4)
CASRGKFNEKLFF

SEQ ID NO: 442043 - protein, 13 aa, Homo sapiens
  CDR3 for alpha chain variable domain of TCR clone 221022 (TRAV35, TRAJ37)
CAGSFGNTGKLIF

SEQ ID NO: 442044 - protein, 16 aa, Homo sapiens
  CDR3 for beta chain variable domain of TCR clone 221022 (TRBV10-3, TRBJ2-1)
CAISLTSGNAYNEQFF

SEQ ID NO: 442045 - protein, 15 aa, Homo sapiens
  CDR3 for alpha chain variable domain of TCR clone 221023 (TRAV8-4, TRAJ13)
CAVRDRGGGYKKVTF

SEQ ID NO: 442046 - protein, 16 aa, Homo sapiens
  CDR3 for beta chain variable domain of TCR clone 221023 (TRBV6-4, TRBJ1-2)
CASSEAVGDPNYGYTF

SEQ ID NO: 442047 - protein, 13 aa, Homo sapiens
  CDR3 for alpha chain variable domain of TCR clone 221024 (TRAV12-3, TRAJ9)
CAMRNTGGFKTIF

SEQ ID NO: 442048 - protein, 14 aa, Homo sapiens
  CDR3 for beta chain variable domain of TCR clone 221024 (TRBV11-2, TRBJ2-7)
CASSSTAEGYEQYF

SEQ ID NO: 442049 - protein, 14 aa, Homo sapiens
  CDR3 for alpha chain variable domain of TCR clone 221025 (TRAV4, TRAJ17)
CLVGDMAAGNKLTF

SEQ ID NO: 442050 - protein, 14 aa, Homo sapiens
  CDR3 for beta chain variable domain of TCR clone 221025 (TRBV4-1, TRBJ2-7)
CASSPVAGGHEQYF

SEQ ID NO: 442051 - protein, 10 aa, Homo sapiens
  CDR3 for alpha chain variable domain of TCR clone 221026 (TRAV26-1, TRAJ22)
CIVSLNFFWF

SEQ ID NO: 442052 - protein, 14 aa, Homo sapiens
  CDR3 for beta chain variable domain of TCR clone 221026 (TRBV7-2, TRBJ1-1)
CASRREGQGAEAFF

SEQ ID NO: 442053 - protein, 12 aa, Homo sapiens
  CDR3 for alpha chain variable domain of TCR clone 221027 (TRAV12-3, TRAJ17)
CAMTLTGNKLTF

SEQ ID NO: 442054 - protein, 17 aa, Homo sapiens
  CDR3 for beta chain variable domain of TCR clone 221027 (TRBV5-1, TRBJ2-6)
CASRSSTHISGANVLTF

SEQ ID NO: 442055 - protein, 15 aa, Homo sapiens
  CDR3 for alpha chain variable domain of TCR clone 221028 (TRAV27, TRAJ38)
CAARRNAGNNRKRLW

SEQ ID NO: 442056 - protein, 13 aa, Homo sapiens
  CDR3 for beta chain variable domain of TCR clone 221028 (TRBV12-5, TRBJ2-3)
CASGDRQSDTQYF

SEQ ID NO: 442057 - protein, 23 aa, Homo sapiens
  CDR3 for alpha chain variable domain of TCR clone 221029 (TRAV8-6, TRAJ38)
CAVRNAGNNHIQNPDPAVYQLRD

SEQ ID NO: 442058 - protein, 15 aa, Homo sapiens
  CDR3 for beta chain variable domain of TCR clone 221029 (TRBV4-1, TRBJ2-2)
CASSEGQGIPGELFF

SEQ ID NO: 442059 - protein, 13 aa, Homo sapiens
  CDR3 for alpha chain variable domain of TCR clone 221030 (TRAV13-2, TRAJ48)
CAEMDFGNEKLTF

SEQ ID NO: 442060 - protein, 15 aa, Homo sapiens
  CDR3 for beta chain variable domain of TCR clone 221030 (TRBV7-9, TRBJ1-6)
CASSSPGRGKSPLLF

SEQ ID NO: 442061 - protein, 16 aa, Homo sapiens
  CDR3 for alpha chain variable domain of TCR clone 221031 (TRAV8-3, TRAJ13)
CAVGLMNSGGYQKVTF

SEQ ID NO: 442062 - protein, 15 aa, Homo sapiens
  CDR3 for beta chain variable domain of TCR clone 221031 (TRBV5-4, TRBJ2-5)
CASSLAGGAKETQYF

SEQ ID NO: 442063 - protein, 16 aa, Homo sapiens
  CDR3 for alpha chain variable domain of TCR clone 221032 (TRAV35, TRAJ37)
CWAFLSGSSNTGKLIF

SEQ ID NO: 442064 - protein, 13 aa, Homo sapiens
  CDR3 for beta chain variable domain of TCR clone 221032 (TRBV2, TRBJ1-2)
CASSVRGNYGYTF

SEQ ID NO: 442065 - protein, 18 aa, Homo sapiens
  CDR3 for alpha chain variable domain of TCR clone 221033 (TRAV13-1, TRAJ52)
CAAKNPNAGGTSYGKLTF

SEQ ID NO: 442066 - protein, 15 aa, Homo sapiens
  CDR3 for beta chain variable domain of TCR clone 221033 (TRBV2, TRBJ2-2)
CASSSETVGTGELFL

SEQ ID NO: 442067 - protein, 11 aa, Homo sapiens
  CDR3 for alpha chain variable domain of TCR clone 221034 (TRAV12-3, TRAJ26)
CAMSHGQNFVF

SEQ ID NO: 442068 - protein, 14 aa, Homo sapiens
  CDR3 for beta chain variable domain of TCR clone 221034 (TRBV25-1, TRBJ1-1)
CASTHLGGNTEAFF

SEQ ID NO: 442069 - protein, 13 aa, Homo sapiens
  CDR3 for alpha chain variable domain of TCR clone 221035 (TRAV2, TRAJ15)
CAVASQAGTALIF

SEQ ID NO: 442070 - protein, 15 aa, Homo sapiens
  CDR3 for beta chain variable domain of TCR clone 221035 (TRBV27, TRBJ2-1)
CASSNGGWSSNEQFF

SEQ ID NO: 442071 - protein, 16 aa, Homo sapiens
  CDR3 for alpha chain variable domain of TCR clone 221036 (TRAV30, TRAJ24)
CGTEIVDADCWGKFQF

SEQ ID NO: 442072 - protein, 14 aa, Homo sapiens
  CDR3 for beta chain variable domain of TCR clone 221036 (TRBV12-5, TRBJ2-5)
CASGSRTHQETQYS

SEQ ID NO: 442073 - protein, 15 aa, Homo sapiens
  CDR3 for alpha chain variable domain of TCR clone 221037 (TRAV35, TRAJ40)
CAGQLGTSGTYKYIF

SEQ ID NO: 442074 - protein, 14 aa, Homo sapiens
  CDR3 for beta chain variable domain of TCR clone 221037 (TRBV7-3, TRBJ2-1)
CASSLAGGTNEQFF

SEQ ID NO: 442075 - protein, 14 aa, Homo sapiens
  CDR3 for alpha chain variable domain of TCR clone 221038 (TRAV12-1, TRAJ41)
CVVLNSNSGYALNF

SEQ ID NO: 442076 - protein, 14 aa, Homo sapiens
  CDR3 for beta chain variable domain of TCR clone 221038 (TRBV5-1, TRBJ2-7)
CASSRGEALYEQYF

SEQ ID NO: 442077 - protein, 14 aa, Homo sapiens
  CDR3 for alpha chain variable domain of TCR clone 221039 (TRAV12-3, TRAJ33)
CAMSEEDSNYQLIW

SEQ ID NO: 442078 - protein, 13 aa, Homo sapiens
  CDR3 for beta chain variable domain of TCR clone 221039 (TRBV4-1, TRBJ2-5)
CASSQEVQETQYF

SEQ ID NO: 442079 - protein, 13 aa, Homo sapiens
  CDR3 for alpha chain variable domain of TCR clone 221040 (TRAV26-2, TRAJ37)
CIRGSSNTGKLIF

SEQ ID NO: 442080 - protein, 13 aa, Homo sapiens
  CDR3 for beta chain variable domain of TCR clone 221040 (TRBV19, TRBJ1-2)
CASSVPGQDGYTF

SEQ ID NO: 442081 - protein, 12 aa, Homo sapiens
  CDR3 for alpha chain variable domain of TCR clone 221041 (TRAV12-3, TRAJ17)
CAMTLTGNELTF

SEQ ID NO: 442082 - protein, 15 aa, Homo sapiens
  CDR3 for beta chain variable domain of TCR clone 221041 (TRBV20-1, TRBJ1-1)
CSASRGVTGNTEAFF

SEQ ID NO: 442083 - protein, 16 aa, Homo sapiens
  CDR3 for alpha chain variable domain of TCR clone 221042 (TRAV12-3, TRAJ53)
CAMSVGSGGSNYKLTF

SEQ ID NO: 442084 - protein, 15 aa, Homo sapiens
  CDR3 for beta chain variable domain of TCR clone 221042 (TRBV19, TRBJ1-1)
YASTSGQIQNTEAFF

SEQ ID NO: 442085 - protein, 12 aa, Homo sapiens
  CDR3 for alpha chain variable domain of TCR clone 221043 (TRAV12-1, TRAJ40)
CVVYSGTYKYIF

SEQ ID NO: 442086 - protein, 14 aa, Homo sapiens
  CDR3 for beta chain variable domain of TCR clone 221043 (TRBV28, TRBJ2-1)
CASSLLQGTNEQFF

SEQ ID NO: 442087 - protein, 12 aa, Homo sapiens
  CDR3 for alpha chain variable domain of TCR clone 221044 (TRAV1-2, TRAJ33)
CAALDSNYQLLW

SEQ ID NO: 442088 - protein, 17 aa, Homo sapiens
  CDR3 for beta chain variable domain of TCR clone 221044 (TRBV25-1, TRBJ1-2)
CASSEFGSATTNYGYTF

SEQ ID NO: 442089 - protein, 16 aa, Homo sapiens
  CDR3 for alpha chain variable domain of TCR clone 221045 (TRAV38-1, TRAJ32)
CVFMKGGGGATNKLIF

SEQ ID NO: 442090 - protein, 13 aa, Homo sapiens
  CDR3 for beta chain variable domain of TCR clone 221045 (TRBV20-1, TRBJ2-5)
CSAREAFQETQYF

SEQ ID NO: 442091 - protein, 12 aa, Homo sapiens
  CDR3 for alpha chain variable domain of TCR clone 221046 (TRAV13-2, TRAJ23)
CAERHRGGKLVF

SEQ ID NO: 442092 - protein, 15 aa, Homo sapiens
  CDR3 for beta chain variable domain of TCR clone 221046 (TRBV12-4, TRBJ2-5)
CASSPPTGLQETQYF

SEQ ID NO: 442093 - protein, 13 aa, Homo sapiens
  CDR3 for alpha chain variable domain of TCR clone 221047 (TRAV13-1, TRAJ27)
CAASTHQCRQINL

SEQ ID NO: 442094 - protein, 16 aa, Homo sapiens
  CDR3 for beta chain variable domain of TCR clone 221047 (TRBV27, TRBJ2-2)
CASSLRGLVRTGELFF

SEQ ID NO: 442095 - protein, 12 aa, Homo sapiens
  CDR3 for alpha chain variable domain of TCR clone 221048 (TRAV12-3, TRAJ20)
CAMVRGDYKLSF

SEQ ID NO: 442096 - protein, 13 aa, Homo sapiens
  CDR3 for beta chain variable domain of TCR clone 221048 (TRBV7-9, TRBJ2-1)
CASSLDVGNEQFF

SEQ ID NO: 442097 - protein, 15 aa, Homo sapiens
  CDR3 for alpha chain variable domain of TCR clone 221049 (TRAV3, TRAJ5)
CAVRDRKTGRRALTF

SEQ ID NO: 442098 - protein, 15 aa, Homo sapiens
  CDR3 for beta chain variable domain of TCR clone 221049 (TRBV7-8, TRBJ2-1)
CASSLTDSLYNEQFF

SEQ ID NO: 442099 - protein, 14 aa, Homo sapiens
  CDR3 for alpha chain variable domain of TCR clone 221050 (TRAV1-2, TRAJ16)
CAVNRFSDGQKLLF

SEQ ID NO: 442100 - protein, 20 aa, Homo sapiens
  CDR3 for beta chain variable domain of TCR clone 221050 (TRBV12-5, TRBJ2-5)
CASGPRTSGNKRPSTSGQAR

SEQ ID NO: 442101 - protein, 14 aa, Homo sapiens
  CDR3 for alpha chain variable domain of TCR clone 221051 (TRAV8-1, TRAJ5)
CAVSMDTGRTALTF

SEQ ID NO: 442102 - protein, 15 aa, Homo sapiens
  CDR3 for beta chain variable domain of TCR clone 221051 (TRBV19, TRBJ2-4)
CASRGPRRGENIQYF

SEQ ID NO: 442103 - protein, 15 aa, Homo sapiens
  CDR3 for alpha chain variable domain of TCR clone 221052 (TRAV12-2, TRAJ8)
CAVREENTGFQKLVF

SEQ ID NO: 442104 - protein, 14 aa, Homo sapiens
  CDR3 for beta chain variable domain of TCR clone 221052 (TRBV11-2, TRBJ2-5)
CASSRTGGIETQYF

SEQ ID NO: 442105 - protein, 11 aa, Homo sapiens
  CDR3 for alpha chain variable domain of TCR clone 221053 (TRAV12-3, TRAJ43)
CAMSVSNDMRF

SEQ ID NO: 442106 - protein, 13 aa, Homo sapiens
  CDR3 for beta chain variable domain of TCR clone 221053 (TRBV7-2, TRBJ2-4)
CASSREHANIQYF

SEQ ID NO: 442107 - protein, 14 aa, Homo sapiens
  CDR3 for alpha chain variable domain of TCR clone 221054 (TRAV1-2, TRAJ8)
CAVRDDTGFQKLVF

SEQ ID NO: 442108 - protein, 12 aa, Homo sapiens
  CDR3 for beta chain variable domain of TCR clone 221054 (TRBV2, TRBJ2-1)
CAYGPPGNEQFF

SEQ ID NO: 442109 - protein, 10 aa, Homo sapiens
  CDR3 for alpha chain variable domain of TCR clone 221055 (TRAV2, TRAJ34)
CAVVNDKLIF

SEQ ID NO: 442110 - protein, 15 aa, Homo sapiens
  CDR3 for beta chain variable domain of TCR clone 221055 (TRBV3-1, TRBJ2-2)
CASSQDWTRAGEVFF

SEQ ID NO: 442111 - protein, 14 aa, Homo sapiens
  CDR3 for alpha chain variable domain of TCR clone 221056 (TRAV12-3, TRAJ29)
CAMILLSGNTPLVF

SEQ ID NO: 442112 - protein, 19 aa, Homo sapiens
  CDR3 for beta chain variable domain of TCR clone 221056 (TRBV12-4, TRBJ2-1)
CASTLAFDPRDKEANEQSF

SEQ ID NO: 442113 - protein, 16 aa, Homo sapiens
  CDR3 for alpha chain variable domain of TCR clone 221057 (TRAV8-3, TRAJ44)
CAVGASNTGTASKLTF

SEQ ID NO: 442114 - protein, 15 aa, Homo sapiens
  CDR3 for beta chain variable domain of TCR clone 221057 (TRBV27, TRBJ1-5)
CASTFNGGSNQPQHF

SEQ ID NO: 442115 - protein, 13 aa, Homo sapiens
  CDR3 for alpha chain variable domain of TCR clone 221058 (TRAV3, TRAJ36)
CAVTDTGANNLFF

SEQ ID NO: 442116 - protein, 15 aa, Homo sapiens
  CDR3 for beta chain variable domain of TCR clone 221058 (TRBV24-1, TRBJ2-1)
CATSGSGGFYNEQFF

SEQ ID NO: 442117 - protein, 15 aa, Homo sapiens
  CDR3 for alpha chain variable domain of TCR clone 221059 (TRAV3, TRAJ29)
CAVRDSISGNTPLVF

SEQ ID NO: 442118 - protein, 17 aa, Homo sapiens
  CDR3 for beta chain variable domain of TCR clone 221059 (TRBV28, TRBJ2-5)
CASSRQGGLAGAETQYF

SEQ ID NO: 442119 - protein, 13 aa, Homo sapiens
  CDR3 for alpha chain variable domain of TCR clone 221060 (TRAV25, TRAJ44)
LILGTGTASKLTF

SEQ ID NO: 442120 - protein, 16 aa, Homo sapiens
  CDR3 for beta chain variable domain of TCR clone 221060 (TRBV4-3, TRBJ2-3)
CASSLSGTGSTDTQYF

SEQ ID NO: 442121 - protein, 15 aa, Homo sapiens
  CDR3 for alpha chain variable domain of TCR clone 221061 (TRAV4, TRAJ42)
CLVGGYGGSQGNLIF

SEQ ID NO: 442122 - protein, 16 aa, Homo sapiens
  CDR3 for beta chain variable domain of TCR clone 221061 (TRBV27, TRBJ1-1)
CASSTRTGGAGTEAFF

SEQ ID NO: 442123 - protein, 12 aa, Homo sapiens
  CDR3 for alpha chain variable domain of TCR clone 221062 (TRAV35, TRAJ28)
GVEGAGSYQLTF

SEQ ID NO: 442124 - protein, 14 aa, Homo sapiens
  CDR3 for beta chain variable domain of TCR clone 221062 (TRBV20-1, TRBJ2-3)
CSARGGTSTDTQYF

SEQ ID NO: 442125 - protein, 12 aa, Homo sapiens
  CDR3 for alpha chain variable domain of TCR clone 221063 (TRAV2, TRAJ33)
CAVPDSNYQLIW

SEQ ID NO: 442126 - protein, 12 aa, Homo sapiens
  CDR3 for beta chain variable domain of TCR clone 221063 (TRBV7-8, TRBJ2-7)
CATSLGDREQYF

SEQ ID NO: 442127 - protein, 12 aa, Homo sapiens
  CDR3 for alpha chain variable domain of TCR clone 221064 (TRAV12-3, TRAJ17)
CAMTLTGKKLTF

SEQ ID NO: 442128 - protein, 15 aa, Homo sapiens
  CDR3 for beta chain variable domain of TCR clone 221064 (TRBV20-1, TRBJ2-7)
CGARDRVSGMDEQYF

SEQ ID NO: 442129 - protein, 13 aa, Homo sapiens
  CDR3 for alpha chain variable domain of TCR clone 221065 (TRAV35, TRAJ33)
CAGRHDSNYQLIW

SEQ ID NO: 442130 - protein, 19 aa, Homo sapiens
  CDR3 for beta chain variable domain of TCR clone 221065 (TRBV6-3, TRBJ2-1)
CASSYSWTSRRATYNEQFF

SEQ ID NO: 442131 - protein, 15 aa, Homo sapiens
  CDR3 for alpha chain variable domain of TCR clone 221066 (TRAV35, TRAJ40)
CAGQLWDSGTYKYIF

SEQ ID NO: 442132 - protein, 12 aa, Homo sapiens
  CDR3 for beta chain variable domain of TCR clone 221066 (TRBV7-8, TRBJ2-7)
CANSLAGYEQYF

SEQ ID NO: 442133 - protein, 10 aa, Homo sapiens
  CDR3 for alpha chain variable domain of TCR clone 221067 (TRAV5, TRAJ34)
CAEDTDKLIF

SEQ ID NO: 442134 - protein, 15 aa, Homo sapiens
  CDR3 for beta chain variable domain of TCR clone 221067 (TRBV2, TRBJ2-7)
CASSEGLARSYEQYF

SEQ ID NO: 442135 - protein, 12 aa, Homo sapiens
  CDR3 for alpha chain variable domain of TCR clone 221068 (TRAV13-1, TRAJ21)
CAAKEGFKKFYF

SEQ ID NO: 442136 - protein, 17 aa, Homo sapiens
  CDR3 for beta chain variable domain of TCR clone 221068 (TRBV19, TRBJ2-7)
CASSISFYDSYPYEQYF

SEQ ID NO: 442137 - protein, 15 aa, Homo sapiens
  CDR3 for alpha chain variable domain of TCR clone 221069 (TRAV21, TRAJ53)
CATLNSGGSNYKLKF

SEQ ID NO: 442138 - protein, 13 aa, Homo sapiens
  CDR3 for beta chain variable domain of TCR clone 221069 (TRBV4-1, TRBJ2-2)
CASSQENTGELFF

SEQ ID NO: 442139 - protein, 13 aa, Homo sapiens
  CDR3 for alpha chain variable domain of TCR clone 221070 (TRAV21, TRAJ27)
CAARPGNAGKSTF

SEQ ID NO: 442140 - protein, 13 aa, Homo sapiens
  CDR3 for beta chain variable domain of TCR clone 221070 (TRBV7-3, TRBJ2-7)
CAGSQAGGYEQYF

SEQ ID NO: 442141 - protein, 10 aa, Homo sapiens
  CDR3 for alpha chain variable domain of TCR clone 221071 (TRAV21, TRAJ31)
CAVDNARLMF

SEQ ID NO: 442142 - protein, 10 aa, Homo sapiens
  CDR3 for beta chain variable domain of TCR clone 221071 (TRBV10-3, TRBJ2-7)
CAATSNEQYF

SEQ ID NO: 442143 - protein, 17 aa, Homo sapiens
  CDR3 for alpha chain variable domain of TCR clone 221072 (TRAV3, TRAJ42)
CAVRDRDYGGSHGNLIF

SEQ ID NO: 442144 - protein, 14 aa, Homo sapiens
  CDR3 for beta chain variable domain of TCR clone 221072 (TRBV25-1, TRBJ1-1)
CASTHLGGNTEAVF

SEQ ID NO: 442145 - protein, 12 aa, Homo sapiens
  CDR3 for alpha chain variable domain of TCR clone 221073 (TRAV16, TRAJ10)
CSRTGGGNKLTF

SEQ ID NO: 442146 - protein, 17 aa, Homo sapiens
  CDR3 for beta chain variable domain of TCR clone 221073 (TRBV7-2, TRBJ2-3)
CASSARSSGSPTDTQYF

SEQ ID NO: 442147 - protein, 18 aa, Homo sapiens
  CDR3 for alpha chain variable domain of TCR clone 221074 (TRAV8-4, TRAJ52)
CAVTRANAGGTSYGKLTF

SEQ ID NO: 442148 - protein, 14 aa, Homo sapiens
  CDR3 for beta chain variable domain of TCR clone 221074 (TRBV12-5, TRBJ2-5)
CASGSRTHQETQYF

SEQ ID NO: 442149 - protein, 14 aa, Homo sapiens
  CDR3 for alpha chain variable domain of TCR clone 221075 (TRAV38-1, TRAJ40)
CALRPTSGTYKIIF

SEQ ID NO: 442150 - protein, 14 aa, Homo sapiens
  CDR3 for beta chain variable domain of TCR clone 221075 (TRBV25-1, TRBJ1-1)
CASTHLGANTEAFF

SEQ ID NO: 442151 - protein, 14 aa, Homo sapiens
  CDR3 for alpha chain variable domain of TCR clone 221076 (TRAV12-2, TRAJ29)
CAVRRNSGNTPLVF

SEQ ID NO: 442152 - protein, 13 aa, Homo sapiens
  CDR3 for beta chain variable domain of TCR clone 221076 (TRBV12-4, TRBJ2-1)
CASSHYTDNEQFS

SEQ ID NO: 442153 - protein, 14 aa, Homo sapiens
  CDR3 for alpha chain variable domain of TCR clone 221077 (TRAV12-2, TRAJ13)
CAVKKTGGYKKVTF

SEQ ID NO: 442154 - protein, 15 aa, Homo sapiens
  CDR3 for beta chain variable domain of TCR clone 221077 (TRBV27, TRBJ2-1)
CASSNGGGPSNEQFF

SEQ ID NO: 442155 - protein, 15 aa, Homo sapiens
  CDR3 for alpha chain variable domain of TCR clone 221078 (TRAV1-2, TRAJ16)
RAVRARFSDGQKLLF

SEQ ID NO: 442156 - protein, 19 aa, Homo sapiens
  CDR3 for beta chain variable domain of TCR clone 221078 (TRBV11-3, TRBJ2-3)
CASGFGTSGGPRGGGTQYF

SEQ ID NO: 442157 - protein, 16 aa, Homo sapiens
  CDR3 for alpha chain variable domain of TCR clone 221079 (TRAV30, TRAJ24)
CCTEIVDADSWGKFQF

SEQ ID NO: 442158 - protein, 14 aa, Homo sapiens
  CDR3 for beta chain variable domain of TCR clone 221079 (TRBV12-5, TRBJ2-5)
CASGSRTHKETQYF

SEQ ID NO: 442159 - protein, 15 aa, Homo sapiens
  CDR3 for alpha chain variable domain of TCR clone 221080 (TRAV17, TRAJ42)
CATDHFGGSQGNLIF

SEQ ID NO: 442160 - protein, 15 aa, Homo sapiens
  CDR3 for beta chain variable domain of TCR clone 221080 (TRBV5-1, TRBJ2-2)
CASSSQGGNTGELFF

SEQ ID NO: 442161 - protein, 16 aa, Homo sapiens
  CDR3 for alpha chain variable domain of TCR clone 221081 (TRAV20, TRAJ22)
CAVQASSSGSSRQLTF

SEQ ID NO: 442162 - protein, 16 aa, Homo sapiens
  CDR3 for beta chain variable domain of TCR clone 221081 (TRBV20-1, TRBJ1-5)
CSASRGTGYSNQPQHF

SEQ ID NO: 442163 - protein, 14 aa, Homo sapiens
  CDR3 for alpha chain variable domain of TCR clone 221082 (TRAV12-2, TRAJ13)
CAVKKTGGYHKVTF

SEQ ID NO: 442164 - protein, 14 aa, Homo sapiens
  CDR3 for beta chain variable domain of TCR clone 221082 (TRBV19, TRBJ2-1)
CASPTFVLSGEQFF

SEQ ID NO: 442165 - protein, 14 aa, Homo sapiens
  CDR3 for alpha chain variable domain of TCR clone 221083 (TRAV13-2, TRAJ10)
CAETLPGGGNKLTF

SEQ ID NO: 442166 - protein, 12 aa, Homo sapiens
  CDR3 for beta chain variable domain of TCR clone 221083 (TRBV10-3, TRBJ1-1)
CATMDRPPEAFF

SEQ ID NO: 442167 - protein, 14 aa, Homo sapiens
  CDR3 for alpha chain variable domain of TCR clone 221084 (TRAV26-1, TRAJ45)
CIEVTGGGADGLTF

SEQ ID NO: 442168 - protein, 11 aa, Homo sapiens
  CDR3 for beta chain variable domain of TCR clone 221084 (TRBV7-9, TRBJ2-5)
CASSLSATQYF

SEQ ID NO: 442169 - protein, 13 aa, Homo sapiens
  CDR3 for alpha chain variable domain of TCR clone 221085 (TRAV2, TRAJ15)
CAVDAQAGTALIF

SEQ ID NO: 442170 - protein, 15 aa, Homo sapiens
  CDR3 for beta chain variable domain of TCR clone 221085 (TRBV9, TRBJ1-6)
CASSVAGTGDSPLHF

SEQ ID NO: 442171 - protein, 13 aa, Homo sapiens
  CDR3 for alpha chain variable domain of TCR clone 221086 (TRAV24, TRAJ42)
CAFSTGSQGNLIF

SEQ ID NO: 442172 - protein, 17 aa, Homo sapiens
  CDR3 for beta chain variable domain of TCR clone 221086 (TRBV13, TRBJ2-3)
CASSLSRVAGGRNTQYF

SEQ ID NO: 442173 - protein, 14 aa, Homo sapiens
  CDR3 for alpha chain variable domain of TCR clone 221087 (TRAV35, TRAJ33)
CWPRGRDSNYQLIW

SEQ ID NO: 442174 - protein, 17 aa, Homo sapiens
  CDR3 for beta chain variable domain of TCR clone 221087 (TRBV5-1, TRBJ2-5)
CASSLLGLAANQETQYF

SEQ ID NO: 442175 - protein, 14 aa, Homo sapiens
  CDR3 for alpha chain variable domain of TCR clone 221088 (TRAV12-3, TRAJ10)
CAMSGTGGGNKLTF

SEQ ID NO: 442176 - protein, 16 aa, Homo sapiens
  CDR3 for beta chain variable domain of TCR clone 221088 (TRBV12-4, TRBJ2-1)
CASSAVGQGNGDEQFF

SEQ ID NO: 442177 - protein, 15 aa, Homo sapiens
  CDR3 for alpha chain variable domain of TCR clone 221089 (TRAV26-1, TRAJ29)
CIVRAEGSGNTPLFF

SEQ ID NO: 442178 - protein, 14 aa, Homo sapiens
  CDR3 for beta chain variable domain of TCR clone 221089 (TRBV18, TRBJ2-5)
CASSPGVSQETQYF

SEQ ID NO: 442179 - protein, 14 aa, Homo sapiens
  CDR3 for alpha chain variable domain of TCR clone 221090 (TRAV8-3, TRAJ39)
CAVARGDAGNMLTS

SEQ ID NO: 442180 - protein, 14 aa, Homo sapiens
  CDR3 for beta chain variable domain of TCR clone 221090 (TRBV7-2, TRBJ1-1)
CASSFLTGTTEAFF

SEQ ID NO: 442181 - protein, 14 aa, Homo sapiens
  CDR3 for alpha chain variable domain of TCR clone 221091 (TRAV1-2, TRAJ16)
CAVNRFSDGQKLLF

SEQ ID NO: 442182 - protein, 11 aa, Homo sapiens
  CDR3 for beta chain variable domain of TCR clone 221091 (TRBV29-1, TRBJ2-5)
CSEARTGTQFF

SEQ ID NO: 442183 - protein, 14 aa, Homo sapiens
  CDR3 for alpha chain variable domain of TCR clone 221092 (TRAV12-2, TRAJ13)
CAVKKTGGYQKVTF

SEQ ID NO: 442184 - protein, 13 aa, Homo sapiens
  CDR3 for beta chain variable domain of TCR clone 221092 (TRBV28, TRBJ2-7)
CASKAGGVYEQNF

SEQ ID NO: 442185 - protein, 14 aa, Homo sapiens
  CDR3 for alpha chain variable domain of TCR clone 221093 (TRAV23/DV6, TRAJ6)
CAASRSGGSYIPTF

SEQ ID NO: 442186 - protein, 17 aa, Homo sapiens
  CDR3 for beta chain variable domain of TCR clone 221093 (TRBV20-1, TRBJ2-1)
CRASASGLAGSYNEQFF

SEQ ID NO: 442187 - protein, 14 aa, Homo sapiens
  CDR3 for alpha chain variable domain of TCR clone 221094 (TRAV17, TRAJ16)
CATADFSDGQKLLF

SEQ ID NO: 442188 - protein, 13 aa, Homo sapiens
  CDR3 for beta chain variable domain of TCR clone 221094 (TRBV12-4, TRBJ2-7)
CASSLERVREQYF

SEQ ID NO: 442189 - protein, 13 aa, Homo sapiens
  CDR3 for alpha chain variable domain of TCR clone 221095 (TRAV9-2, TRAJ49)
CALIQIGGNPFYF

SEQ ID NO: 442190 - protein, 13 aa, Homo sapiens
  CDR3 for beta chain variable domain of TCR clone 221095 (TRBV20-1, TRBJ1-1)
CSARGGGNTETFF

SEQ ID NO: 442191 - protein, 14 aa, Homo sapiens
  CDR3 for alpha chain variable domain of TCR clone 221096 (TRAV8-1, TRAJ23)
CAVGTYNQGGKLIF

SEQ ID NO: 442192 - protein, 12 aa, Homo sapiens
  CDR3 for beta chain variable domain of TCR clone 221096 (TRBV11-2, TRBJ2-1)
CASSPGNNEQFF

SEQ ID NO: 442193 - protein, 23 aa, Homo sapiens
  CDR3 for alpha chain variable domain of TCR clone 221097 (TRAV8-1, TRAJ6)
CAVNTPPEEAKYLHLEEEHALLF

SEQ ID NO: 442194 - protein, 15 aa, Homo sapiens
  CDR3 for beta chain variable domain of TCR clone 221097 (TRBV11-2, TRBJ2-2)
CASSSDRVNAGELFF

SEQ ID NO: 442195 - protein, 17 aa, Homo sapiens
  CDR3 for alpha chain variable domain of TCR clone 221098 (TRAV2, TRAJ10)
CAVEDQRSREEETNLAL

SEQ ID NO: 442196 - protein, 16 aa, Homo sapiens
  CDR3 for beta chain variable domain of TCR clone 221098 (TRBV18, TRBJ1-5)
CASSPSTGNSDQPQHF

SEQ ID NO: 442197 - protein, 16 aa, Homo sapiens
  CDR3 for alpha chain variable domain of TCR clone 221099 (TRAV20, TRAJ54)
CAVQRVLIQGAQKLVF

SEQ ID NO: 442198 - protein, 16 aa, Homo sapiens
  CDR3 for beta chain variable domain of TCR clone 221099 (TRBV7-3, TRBJ2-2)
CASSLKRGTLSGELFF

SEQ ID NO: 442199 - protein, 15 aa, Homo sapiens
  CDR3 for alpha chain variable domain of TCR clone 221100 (TRAV35, TRAJ58)
CAGRRQETSGSRLTF

SEQ ID NO: 442200 - protein, 16 aa, Homo sapiens
  CDR3 for beta chain variable domain of TCR clone 221100 (TRBV2, TRBJ2-1)
FASSVGGSLSYNEQFF

SEQ ID NO: 442201 - protein, 12 aa, Homo sapiens
  CDR3 for alpha chain variable domain of TCR clone 221101 (TRAV13-1, TRAJ21)
CAAKEGFNKFYF

SEQ ID NO: 442202 - protein, 12 aa, Homo sapiens
  CDR3 for beta chain variable domain of TCR clone 221101 (TRBV7-3, TRBJ2-1)
CASSLGFNEQFF

SEQ ID NO: 442203 - protein, 16 aa, Homo sapiens
  CDR3 for alpha chain variable domain of TCR clone 221102 (TRAV14/DV4, TRAJ54)
CAMREGRIQGAQKLVF

SEQ ID NO: 442204 - protein, 14 aa, Homo sapiens
  CDR3 for beta chain variable domain of TCR clone 221102 (TRBV7-3, TRBJ2-1)
CASSLTGGANEQFI

SEQ ID NO: 442205 - protein, 13 aa, Homo sapiens
  CDR3 for alpha chain variable domain of TCR clone 221103 (TRAV27, TRAJ37)
CAGGPSNTGKLIF

SEQ ID NO: 442206 - protein, 15 aa, Homo sapiens
  CDR3 for beta chain variable domain of TCR clone 221103 (TRBV7-3, TRBJ2-3)
CASSLTSGETDTQYF

SEQ ID NO: 442207 - protein, 14 aa, Homo sapiens
  CDR3 for alpha chain variable domain of TCR clone 221104 (TRAV12-1, TRAJ30)
CVVNIGNRDDKNIF

SEQ ID NO: 442208 - protein, 14 aa, Homo sapiens
  CDR3 for beta chain variable domain of TCR clone 221104 (TRBV7-9, TRBJ2-5)
CASSPRPSGETQYF

SEQ ID NO: 442209 - protein, 14 aa, Homo sapiens
  CDR3 for alpha chain variable domain of TCR clone 221105 (TRAV1-2, TRAJ8)
CAVREDTGFQKLVF

SEQ ID NO: 442210 - protein, 12 aa, Homo sapiens
  CDR3 for beta chain variable domain of TCR clone 221105 (TRBV29-1, TRBJ2-3)
CSVTGGADTQYV

SEQ ID NO: 442211 - protein, 16 aa, Homo sapiens
  CDR3 for alpha chain variable domain of TCR clone 221106 (TRAV8-3, TRAJ44)
CAVGTLMTGTASKLTF

SEQ ID NO: 442212 - protein, 13 aa, Homo sapiens
  CDR3 for beta chain variable domain of TCR clone 221106 (TRBV11-2, TRBJ2-1)
CASSLRLTDEQFF

SEQ ID NO: 442213 - protein, 15 aa, Homo sapiens
  CDR3 for alpha chain variable domain of TCR clone 221107 (TRAV3, TRAJ4)
CAVRDGTGGYNKLIF

SEQ ID NO: 442214 - protein, 15 aa, Homo sapiens
  CDR3 for beta chain variable domain of TCR clone 221107 (TRBV18, TRBJ2-6)
CASSPSYAGANVLTF

SEQ ID NO: 442215 - protein, 11 aa, Homo sapiens
  CDR3 for alpha chain variable domain of TCR clone 221108 (TRAV8-4, TRAJ20)
CAVSNVLTTTS

SEQ ID NO: 442216 - protein, 16 aa, Homo sapiens
  CDR3 for beta chain variable domain of TCR clone 221108 (TRBV6-1, TRBJ1-2)
CASSGAWQGRSHGYTF

SEQ ID NO: 442217 - protein, 15 aa, Homo sapiens
  CDR3 for alpha chain variable domain of TCR clone 221109 (TRAV38-1, TRAJ57)
CAFMDSQGGSEKLVC

SEQ ID NO: 442218 - protein, 16 aa, Homo sapiens
  CDR3 for beta chain variable domain of TCR clone 221109 (TRBV10-3, TRBJ2-1)
CAIRGGGRGDYNEQFF

SEQ ID NO: 442219 - protein, 11 aa, Homo sapiens
  CDR3 for alpha chain variable domain of TCR clone 221110 (TRAV12-3, TRAJ49)
CAANTGNQFYF

SEQ ID NO: 442220 - protein, 17 aa, Homo sapiens
  CDR3 for beta chain variable domain of TCR clone 221110 (TRBV11-2, TRBJ2-1)
CDSSLYPPGVEYNEQFF

SEQ ID NO: 442221 - protein, 16 aa, Homo sapiens
  CDR3 for alpha chain variable domain of TCR clone 221111 (TRAV12-3, TRAJ53)
CAISPGSGGSNDKLTF

SEQ ID NO: 442222 - protein, 11 aa, Homo sapiens
  CDR3 for beta chain variable domain of TCR clone 221111 (TRBV29-1, TRBJ2-5)
CSEDRTGTQYF

SEQ ID NO: 442223 - protein, 14 aa, Homo sapiens
  CDR3 for alpha chain variable domain of TCR clone 221112 (TRAV26-1, TRAJ45)
CIEVTGGGAGGLTF

SEQ ID NO: 442224 - protein, 19 aa, Homo sapiens
  CDR3 for beta chain variable domain of TCR clone 221112 (TRBV19, TRBJ2-2)
CASTRPGLAGGRVTGELFF

SEQ ID NO: 442225 - protein, 14 aa, Homo sapiens
  CDR3 for alpha chain variable domain of TCR clone 221113 (TRAV38-2/DV8, TRAJ49)
CAYRSAMAGNQFYF

SEQ ID NO: 442226 - protein, 12 aa, Homo sapiens
  CDR3 for beta chain variable domain of TCR clone 221113 (TRBV19, TRBJ1-5)
CASSIAQQPQHF

SEQ ID NO: 442227 - protein, 14 aa, Homo sapiens
  CDR3 for alpha chain variable domain of TCR clone 221114 (TRAV2, TRAJ23)
CAVRIYNQGGKLIF

SEQ ID NO: 442228 - protein, 14 aa, Homo sapiens
  CDR3 for beta chain variable domain of TCR clone 221114 (TRBV7-9, TRBJ2-5)
CASSLDTAQETQYF

SEQ ID NO: 442229 - protein, 21 aa, Homo sapiens
  CDR3 for alpha chain variable domain of TCR clone 221115 (TRAV1-1, TRAJ30)
CLLLLRCEREGGENRDDKIIF

SEQ ID NO: 442230 - protein, 13 aa, Homo sapiens
  CDR3 for beta chain variable domain of TCR clone 221115 (TRBV7-3, TRBJ1-1)
CASSQDWGAEAFF

SEQ ID NO: 442231 - protein, 12 aa, Homo sapiens
  CDR3 for alpha chain variable domain of TCR clone 221116 (TRAV3, TRAJ43)
CAVRDPNNDMSF

SEQ ID NO: 442232 - protein, 15 aa, Homo sapiens
  CDR3 for beta chain variable domain of TCR clone 221116 (TRBV27, TRBJ1-5)
CASSLGTGSDQPQHF

SEQ ID NO: 442233 - protein, 14 aa, Homo sapiens
  CDR3 for alpha chain variable domain of TCR clone 221117 (TRAV23/DV6, TRAJ13)
CAASDSGGYQKVTF

SEQ ID NO: 442234 - protein, 13 aa, Homo sapiens
  CDR3 for beta chain variable domain of TCR clone 221117 (TRBV15, TRBJ2-7)
CATSTTGHYEQYF

SEQ ID NO: 442235 - protein, 11 aa, Homo sapiens
  CDR3 for alpha chain variable domain of TCR clone 221118 (TRAV26-1, TRAJ27)
FIDPNAGTSTF

SEQ ID NO: 442236 - protein, 18 aa, Homo sapiens
  CDR3 for beta chain variable domain of TCR clone 221118 (TRBV7-9, TRBJ2-6)
CASSFPGAGISGANVLTF

SEQ ID NO: 442237 - protein, 16 aa, Homo sapiens
  CDR3 for alpha chain variable domain of TCR clone 221119 (TRAV3, TRAJ32)
CAVRDVEGGATNKLIL

SEQ ID NO: 442238 - protein, 17 aa, Homo sapiens
  CDR3 for beta chain variable domain of TCR clone 221119 (TRBV20-1, TRBJ2-2)
CSASGSGQGGLTGELFF

SEQ ID NO: 442239 - protein, 15 aa, Homo sapiens
  CDR3 for alpha chain variable domain of TCR clone 221120 (TRAV23/DV6, TRAJ9)
CSKHRGKYWRLQTIF

SEQ ID NO: 442240 - protein, 14 aa, Homo sapiens
  CDR3 for beta chain variable domain of TCR clone 221120 (TRBV9, TRBJ2-7)
CASSVGVGSYEQYF

SEQ ID NO: 442241 - protein, 15 aa, Homo sapiens
  CDR3 for alpha chain variable domain of TCR clone 221121 (TRAV25, TRAJ52)
CAGRPAGTSYGKLTF

SEQ ID NO: 442242 - protein, 17 aa, Homo sapiens
  CDR3 for beta chain variable domain of TCR clone 221121 (TRBV7-8, TRBJ2-6)
CASSAGTGGAGANVLTF

SEQ ID NO: 442243 - protein, 15 aa, Homo sapiens
  CDR3 for alpha chain variable domain of TCR clone 221122 (TRAV8-6, TRAJ9)
CAVSDRDSGGFKTIF

SEQ ID NO: 442244 - protein, 16 aa, Homo sapiens
  CDR3 for beta chain variable domain of TCR clone 221122 (TRBV19, TRBJ2-3)
CASSPEWDRGTDTQYF

SEQ ID NO: 442245 - protein, 13 aa, Homo sapiens
  CDR3 for alpha chain variable domain of TCR clone 221123 (TRAV12-1, TRAJ6)
CVVFPGGSYITTF

SEQ ID NO: 442246 - protein, 14 aa, Homo sapiens
  CDR3 for beta chain variable domain of TCR clone 221123 (TRBV20-1, TRBJ1-3)
CSASPTGAGNTIYF

SEQ ID NO: 442247 - protein, 14 aa, Homo sapiens
  CDR3 for alpha chain variable domain of TCR clone 221124 (TRAV1-2, TRAJ16)
CAVSRFSDGLKLLF

SEQ ID NO: 442248 - protein, 15 aa, Homo sapiens
  CDR3 for beta chain variable domain of TCR clone 221124 (TRBV6-3, TRBJ2-7)
CASSSPGTVFYEQYF

SEQ ID NO: 442249 - protein, 11 aa, Homo sapiens
  CDR3 for alpha chain variable domain of TCR clone 221125 (TRAV2, TRAJ33)
CAVDSNYQLIW

SEQ ID NO: 442250 - protein, 15 aa, Homo sapiens
  CDR3 for beta chain variable domain of TCR clone 221125 (TRBV19, TRBJ2-2)
CASSPRTGWTGELFF

SEQ ID NO: 442251 - protein, 12 aa, Homo sapiens
  CDR3 for alpha chain variable domain of TCR clone 221126 (TRAV12-1, TRAJ17)
WVSKAAGNKLTF

SEQ ID NO: 442252 - protein, 17 aa, Homo sapiens
  CDR3 for beta chain variable domain of TCR clone 221126 (TRBV4-1, TRBJ2-5)
CASSQDPSGGPQETQYF

SEQ ID NO: 442253 - protein, 14 aa, Homo sapiens
  CDR3 for alpha chain variable domain of TCR clone 221127 (TRAV26-1, TRAJ39)
CIVRGSRAGTMLTF

SEQ ID NO: 442254 - protein, 15 aa, Homo sapiens
  CDR3 for beta chain variable domain of TCR clone 221127 (TRBV7-9, TRBJ1-5)
CASSHGHQPNQPQHF

SEQ ID NO: 442255 - protein, 11 aa, Homo sapiens
  CDR3 for alpha chain variable domain of TCR clone 221128 (TRAV17, TRAJ43)
CATPRSNDMRF

SEQ ID NO: 442256 - protein, 15 aa, Homo sapiens
  CDR3 for beta chain variable domain of TCR clone 221128 (TRBV28, TRBJ2-4)
CASSIQGARGDIQYF

SEQ ID NO: 442257 - protein, 13 aa, Homo sapiens
  CDR3 for alpha chain variable domain of TCR clone 221129 (TRAV12-1, TRAJ40)
CVVPTSGTYKYIF

SEQ ID NO: 442258 - protein, 15 aa, Homo sapiens
  CDR3 for beta chain variable domain of TCR clone 221129 (TRBV7-2, TRBJ1-2)
CSSSNQDRRGHGYTF

SEQ ID NO: 442259 - protein, 11 aa, Homo sapiens
  CDR3 for alpha chain variable domain of TCR clone 221130 (TRAV12-1, TRAJ43)
CVEYDNNDMRC

SEQ ID NO: 442260 - protein, 14 aa, Homo sapiens
  CDR3 for beta chain variable domain of TCR clone 221130 (TRBV10-2, TRBJ2-1)
CASSEGTSEDEQFF

SEQ ID NO: 442261 - protein, 14 aa, Homo sapiens
  CDR3 for alpha chain variable domain of TCR clone 221131 (TRAV12-2, TRAJ24)
CAVTPADSWGKLQF

SEQ ID NO: 442262 - protein, 16 aa, Homo sapiens
  CDR3 for beta chain variable domain of TCR clone 221131 (TRBV19, TRBJ2-1)
CASSMGGGSSYNEQFF

SEQ ID NO: 442263 - protein, 11 aa, Homo sapiens
  CDR3 for alpha chain variable domain of TCR clone 221132 (TRAV2, TRAJ20)
CAVGGDYKLSF

SEQ ID NO: 442264 - protein, 13 aa, Homo sapiens
  CDR3 for beta chain variable domain of TCR clone 221132 (TRBV19, TRBJ2-5)
CASSIHSQETQYF

SEQ ID NO: 442265 - protein, 14 aa, Homo sapiens
  CDR3 for alpha chain variable domain of TCR clone 221133 (TRAV13-1, TRAJ20)
CAARPGSNAYKLRF

SEQ ID NO: 442266 - protein, 15 aa, Homo sapiens
  CDR3 for beta chain variable domain of TCR clone 221133 (TRBV4-1, TRBJ2-7)
CASSQQGQGFDEQYF

SEQ ID NO: 442267 - protein, 14 aa, Homo sapiens
  CDR3 for alpha chain variable domain of TCR clone 221134 (TRAV4, TRAJ37)
CLVVVAGNTGKLIF

SEQ ID NO: 442268 - protein, 14 aa, Homo sapiens
  CDR3 for beta chain variable domain of TCR clone 221134 (TRBV5-1, TRBJ2-3)
CASSLFGPTDTQYF

SEQ ID NO: 442269 - protein, 14 aa, Homo sapiens
  CDR3 for alpha chain variable domain of TCR clone 221135 (TRAV8-4, TRAJ9)
CAVSDRNGGFKTIF

SEQ ID NO: 442270 - protein, 13 aa, Homo sapiens
  CDR3 for beta chain variable domain of TCR clone 221135 (TRBV11-2, TRBJ2-7)
CASSLGDSYEQYF

SEQ ID NO: 442271 - protein, 20 aa, Homo sapiens
  CDR3 for alpha chain variable domain of TCR clone 221136 (TRAV25, TRAJ33)
TATQTTDVGTSRGSNYQLIW

SEQ ID NO: 442272 - protein, 15 aa, Homo sapiens
  CDR3 for beta chain variable domain of TCR clone 221136 (TRBV20-1, TRBJ2-7)
CSAESGTSGAYEQYF

SEQ ID NO: 442273 - protein, 15 aa, Homo sapiens
  CDR3 for alpha chain variable domain of TCR clone 221137 (TRAV26-1, TRAJ40)
CIVRAVPPGTYKYIF

SEQ ID NO: 442274 - protein, 14 aa, Homo sapiens
  CDR3 for beta chain variable domain of TCR clone 221137 (TRBV19, TRBJ2-1)
CASKDQGLANEQFF

SEQ ID NO: 442275 - protein, 16 aa, Homo sapiens
  CDR3 for alpha chain variable domain of TCR clone 221138 (TRAV30, TRAJ24)
CGTEIVDADSWGKFQF

SEQ ID NO: 442276 - protein, 14 aa, Homo sapiens
  CDR3 for beta chain variable domain of TCR clone 221138 (TRBV7-9, TRBJ2-4)
CASSLAMGGNTQYF

SEQ ID NO: 442277 - protein, 13 aa, Homo sapiens
  CDR3 for alpha chain variable domain of TCR clone 221139 (TRAV12-2, TRAJ52)
CAVSGTSYGRLTF

SEQ ID NO: 442278 - protein, 16 aa, Homo sapiens
  CDR3 for beta chain variable domain of TCR clone 221139 (TRBV11-2, TRBJ1-2)
CASSLDRGGNNYGYTF

SEQ ID NO: 442279 - protein, 13 aa, Homo sapiens
  CDR3 for alpha chain variable domain of TCR clone 221140 (TRAV3, TRAJ15)
CAVRDQAGTALIV

SEQ ID NO: 442280 - protein, 15 aa, Homo sapiens
  CDR3 for beta chain variable domain of TCR clone 221140 (TRBV11-1, TRBJ2-7)
CASSLNYGASYEQYS

SEQ ID NO: 442281 - protein, 14 aa, Homo sapiens
  CDR3 for alpha chain variable domain of TCR clone 221141 (TRAV8-3, TRAJ4)
CAVGAAGGYNKLIF

SEQ ID NO: 442282 - protein, 13 aa, Homo sapiens
  CDR3 for beta chain variable domain of TCR clone 221141 (TRBV7-7, TRBJ2-3)
CASSLSRADTQYF

SEQ ID NO: 442283 - protein, 14 aa, Homo sapiens
  CDR3 for alpha chain variable domain of TCR clone 221142 (TRAV2, TRAJ9)
CAVEDRSGGFKTIF

SEQ ID NO: 442284 - protein, 15 aa, Homo sapiens
  CDR3 for beta chain variable domain of TCR clone 221142 (TRBV10-3, TRBJ2-6)
CATPAAASGANVLTF

SEQ ID NO: 442285 - protein, 14 aa, Homo sapiens
  CDR3 for alpha chain variable domain of TCR clone 221143 (TRAV13-1, TRAJ9)
CAASALTGGFKTIF

SEQ ID NO: 442286 - protein, 16 aa, Homo sapiens
  CDR3 for beta chain variable domain of TCR clone 221143 (TRBV12-4, TRBJ2-3)
CASSFGTGGISETQYF

SEQ ID NO: 442287 - protein, 14 aa, Homo sapiens
  CDR3 for alpha chain variable domain of TCR clone 221144 (TRAV12-1, TRAJ5)
CVVNERTGRRALTF

SEQ ID NO: 442288 - protein, 15 aa, Homo sapiens
  CDR3 for beta chain variable domain of TCR clone 221144 (TRBV18, TRBJ2-7)
CASSPAATPNYEQYF

SEQ ID NO: 442289 - protein, 13 aa, Homo sapiens
  CDR3 for alpha chain variable domain of TCR clone 221145 (TRAV12-1, TRAJ26)
CVVIDNYGQNFVF

SEQ ID NO: 442290 - protein, 14 aa, Homo sapiens
  CDR3 for beta chain variable domain of TCR clone 221145 (TRBV3-1, TRBJ1-5)
CASSQGLSNQPQHF

SEQ ID NO: 442291 - protein, 13 aa, Homo sapiens
  CDR3 for alpha chain variable domain of TCR clone 221146 (TRAV26-1, TRAJ29)
CIVRRSGNTPLVF

SEQ ID NO: 442292 - protein, 11 aa, Homo sapiens
  CDR3 for beta chain variable domain of TCR clone 221146 (TRBV11-2, TRBJ2-2)
CASSLPGELFF

SEQ ID NO: 442293 - protein, 14 aa, Homo sapiens
  CDR3 for alpha chain variable domain of TCR clone 221147 (TRAV23/DV6, TRAJ24)
CAASLSDSWGKLQF

SEQ ID NO: 442294 - protein, 16 aa, Homo sapiens
  CDR3 for beta chain variable domain of TCR clone 221147 (TRBV4-2, TRBJ2-3)
CASSQELAGDTETQYF

SEQ ID NO: 442295 - protein, 14 aa, Homo sapiens
  CDR3 for alpha chain variable domain of TCR clone 221148 (TRAV16, TRAJ33)
CALSAMVSNYQLIW

SEQ ID NO: 442296 - protein, 16 aa, Homo sapiens
  CDR3 for beta chain variable domain of TCR clone 221148 (TRBV25-1, TRBJ2-7)
CASSELTGGGIYEQYF

SEQ ID NO: 442297 - protein, 16 aa, Homo sapiens
  CDR3 for alpha chain variable domain of TCR clone 221149 (TRAV26-1, TRAJ23)
CIVRPHGNNQGGKLIC

SEQ ID NO: 442298 - protein, 13 aa, Homo sapiens
  CDR3 for beta chain variable domain of TCR clone 221149 (TRBV27, TRBJ2-7)
CASSLTTGYEQYF

SEQ ID NO: 442299 - protein, 12 aa, Homo sapiens
  CDR3 for alpha chain variable domain of TCR clone 221150 (TRAV12-2, TRAJ52)
IGGGTNYGKLTF

SEQ ID NO: 442300 - protein, 13 aa, Homo sapiens
  CDR3 for beta chain variable domain of TCR clone 221150 (TRBV15, TRBJ2-7)
CATSTTGHYEQYF

SEQ ID NO: 442301 - protein, 16 aa, Homo sapiens
  CDR3 for alpha chain variable domain of TCR clone 221151 (TRAV3, TRAJ37)
SAVRPHGSGNTGKLIF

SEQ ID NO: 442302 - protein, 19 aa, Homo sapiens
  CDR3 for beta chain variable domain of TCR clone 221151 (TRBV25-1, TRBJ2-2)
CAILVYRVDRGRKTGELFF

SEQ ID NO: 442303 - protein, 14 aa, Homo sapiens
  CDR3 for alpha chain variable domain of TCR clone 221152 (TRAV8-6, TRAJ52)
CAVIGGTSYRKLTF

SEQ ID NO: 442304 - protein, 15 aa, Homo sapiens
  CDR3 for beta chain variable domain of TCR clone 221152 (TRBV11-2, TRBJ2-5)
CASSLGAGGVETQYF

SEQ ID NO: 442305 - protein, 23 aa, Homo sapiens
  CDR3 for alpha chain variable domain of TCR clone 221153 (TRAV26-1, TRAJ38)
CIADNAGNNHIQNPDPAVYQLRD

SEQ ID NO: 442306 - protein, 17 aa, Homo sapiens
  CDR3 for beta chain variable domain of TCR clone 221153 (TRBV11-2, TRBJ2-6)
CASSQRDIFPGANVLTF

SEQ ID NO: 442307 - protein, 12 aa, Homo sapiens
  CDR3 for alpha chain variable domain of TCR clone 221154 (TRAV12-2, TRAJ10)
WVVTGGGNKLTF

SEQ ID NO: 442308 - protein, 12 aa, Homo sapiens
  CDR3 for beta chain variable domain of TCR clone 221154 (TRBV5-4, TRBJ2-2)
CASIDQGGELLF

SEQ ID NO: 442309 - protein, 16 aa, Homo sapiens
  CDR3 for alpha chain variable domain of TCR clone 221155 (TRAV8-3, TRAJ8)
CAVPRDWNTGFQKLVF

SEQ ID NO: 442310 - protein, 15 aa, Homo sapiens
  CDR3 for beta chain variable domain of TCR clone 221155 (TRBV6-1, TRBJ2-6)
CASSSRPAGANVLTF

SEQ ID NO: 442311 - protein, 13 aa, Homo sapiens
  CDR3 for alpha chain variable domain of TCR clone 221156 (TRAV1-2, TRAJ9)
CAALNTGGFKTIF

SEQ ID NO: 442312 - protein, 15 aa, Homo sapiens
  CDR3 for beta chain variable domain of TCR clone 221156 (TRBV6-6, TRBJ1-5)
CASSSIQGTNQPQHF

SEQ ID NO: 442313 - protein, 15 aa, Homo sapiens
  CDR3 for alpha chain variable domain of TCR clone 221157 (TRAV8-4, TRAJ47)
GAVSDLLGYGNKLVF

SEQ ID NO: 442314 - protein, 16 aa, Homo sapiens
  CDR3 for beta chain variable domain of TCR clone 221157 (TRBV19, TRBJ2-2)
CASSPSGGLNTGELFF

SEQ ID NO: 442315 - protein, 14 aa, Homo sapiens
  CDR3 for alpha chain variable domain of TCR clone 221158 (TRAV1-2, TRAJ16)
CAVNRFSDGQKLLF

SEQ ID NO: 442316 - protein, 20 aa, Homo sapiens
  CDR3 for beta chain variable domain of TCR clone 221158 (TRBV12-5, TRBJ2-5)
CASGPRTSGNQETSTSGQAR

SEQ ID NO: 442317 - protein, 16 aa, Homo sapiens
  CDR3 for alpha chain variable domain of TCR clone 221159 (TRAV21, TRAJ52)
CAVIDAGGTSYGKLTF

SEQ ID NO: 442318 - protein, 13 aa, Homo sapiens
  CDR3 for beta chain variable domain of TCR clone 221159 (TRBV7-3, TRBJ2-5)
CASSFRGSQTQYF

SEQ ID NO: 442319 - protein, 13 aa, Homo sapiens
  CDR3 for alpha chain variable domain of TCR clone 221160 (TRAV12-2, TRAJ42)
CAVKRGSQGNPIF

SEQ ID NO: 442320 - protein, 12 aa, Homo sapiens
  CDR3 for beta chain variable domain of TCR clone 221160 (TRBV5-7, TRBJ1-2)
CASSLVQDGYTF

SEQ ID NO: 442321 - protein, 14 aa, Homo sapiens
  CDR3 for alpha chain variable domain of TCR clone 221161 (TRAV12-1, TRAJ30)
CVPTGTNRDDKIIF

SEQ ID NO: 442322 - protein, 14 aa, Homo sapiens
  CDR3 for beta chain variable domain of TCR clone 221161 (TRBV7-8, TRBJ2-3)
CASSLEAGTDTQYF

SEQ ID NO: 442323 - protein, 15 aa, Homo sapiens
  CDR3 for alpha chain variable domain of TCR clone 221162 (TRAV12-2, TRAJ50)
CAVNGLETSYDKVIF

SEQ ID NO: 442324 - protein, 15 aa, Homo sapiens
  CDR3 for beta chain variable domain of TCR clone 221162 (TRBV3-1, TRBJ2-1)
CASSQQPSGGNEQFF

SEQ ID NO: 442325 - protein, 12 aa, Homo sapiens
  CDR3 for alpha chain variable domain of TCR clone 221163 (TRAV26-1, TRAJ36)
CIVRVRADNLFF

SEQ ID NO: 442326 - protein, 14 aa, Homo sapiens
  CDR3 for beta chain variable domain of TCR clone 221163 (TRBV10-3, TRBJ2-1)
CAISSDLAYNEQFF

SEQ ID NO: 442327 - protein, 15 aa, Homo sapiens
  CDR3 for alpha chain variable domain of TCR clone 221164 (TRAV23/DV6, TRAJ32)
CAASKMGGATNKLIF

SEQ ID NO: 442328 - protein, 14 aa, Homo sapiens
  CDR3 for beta chain variable domain of TCR clone 221164 (TRBV7-3, TRBJ2-2)
CASSSGGYTGELFF

SEQ ID NO: 442329 - protein, 16 aa, Homo sapiens
  CDR3 for alpha chain variable domain of TCR clone 221165 (TRAV30, TRAJ24)
CCTEIVDADSWGQFQF

SEQ ID NO: 442330 - protein, 14 aa, Homo sapiens
  CDR3 for beta chain variable domain of TCR clone 221165 (TRBV12-5, TRBJ2-5)
CASGSRTHQETQYF

SEQ ID NO: 442331 - protein, 14 aa, Homo sapiens
  CDR3 for alpha chain variable domain of TCR clone 221166 (TRAV13-2, TRAJ5)
CAENMDTGRRALTF

SEQ ID NO: 442332 - protein, 14 aa, Homo sapiens
  CDR3 for beta chain variable domain of TCR clone 221166 (TRBV19, TRBJ1-5)
CASRAPDSFLSQHF

SEQ ID NO: 442333 - protein, 11 aa, Homo sapiens
  CDR3 for alpha chain variable domain of TCR clone 221167 (TRAV3, TRAJ21)
CAVGNFNKFYF

SEQ ID NO: 442334 - protein, 15 aa, Homo sapiens
  CDR3 for beta chain variable domain of TCR clone 221167 (TRBV7-3, TRBJ2-1)
CASSSRSSGRNEQFF

SEQ ID NO: 442335 - protein, 11 aa, Homo sapiens
  CDR3 for alpha chain variable domain of TCR clone 221168 (TRAV16, TRAJ31)
CALFNNARLMF

SEQ ID NO: 442336 - protein, 15 aa, Homo sapiens
  CDR3 for beta chain variable domain of TCR clone 221168 (TRBV18, TRBJ1-1)
CASSPRQGENTGAFF

SEQ ID NO: 442337 - protein, 10 aa, Homo sapiens
  CDR3 for alpha chain variable domain of TCR clone 221169 (TRAV36/DV7, TRAJ48)
CAVGNEKLTF

SEQ ID NO: 442338 - protein, 16 aa, Homo sapiens
  CDR3 for beta chain variable domain of TCR clone 221169 (TRBV19, TRBJ1-6)
CASSVALVAGNSPLHF

SEQ ID NO: 442339 - protein, 23 aa, Homo sapiens
  CDR3 for alpha chain variable domain of TCR clone 221170 (TRAV21, TRAJ38)
CAVANAGNNHIQNPDPAVYQLRD

SEQ ID NO: 442340 - protein, 14 aa, Homo sapiens
  CDR3 for beta chain variable domain of TCR clone 221170 (TRBV20-1, TRBJ2-4)
CSASGRVGENIQYF

SEQ ID NO: 442341 - protein, 14 aa, Homo sapiens
  CDR3 for alpha chain variable domain of TCR clone 221171 (TRAV17, TRAJ45)
CATASGGGAGGLPF

SEQ ID NO: 442342 - protein, 15 aa, Homo sapiens
  CDR3 for beta chain variable domain of TCR clone 221171 (TRBV11-2, TRBJ2-1)
CASSRNRGLMYEQFF

SEQ ID NO: 442343 - protein, 16 aa, Homo sapiens
  CDR3 for alpha chain variable domain of TCR clone 221172 (TRAV3, TRAJ37)
CAVRGKGSGNTGKLIF

SEQ ID NO: 442344 - protein, 15 aa, Homo sapiens
  CDR3 for beta chain variable domain of TCR clone 221172 (TRBV19, TRBJ1-5)
CASSIVWADNQPQHF

SEQ ID NO: 442345 - protein, 14 aa, Homo sapiens
  CDR3 for alpha chain variable domain of TCR clone 221173 (TRAV35, TRAJ38)
CAGSNAGNNRKLIW

SEQ ID NO: 442346 - protein, 17 aa, Homo sapiens
  CDR3 for beta chain variable domain of TCR clone 221173 (TRBV15, TRBJ1-4)
CATSRYGTGDPNEKLFF

SEQ ID NO: 442347 - protein, 13 aa, Homo sapiens
  CDR3 for alpha chain variable domain of TCR clone 221174 (TRAV12-1, TRAJ26)
CVVRRNYGQNFVF

SEQ ID NO: 442348 - protein, 15 aa, Homo sapiens
  CDR3 for beta chain variable domain of TCR clone 221174 (TRBV7-9, TRBJ2-7)
CASSPGGGLTYEQYF

SEQ ID NO: 442349 - protein, 15 aa, Homo sapiens
  CDR3 for alpha chain variable domain of TCR clone 221175 (TRAV2, TRAJ15)
CAVEDREQAGTALFF

SEQ ID NO: 442350 - protein, 13 aa, Homo sapiens
  CDR3 for beta chain variable domain of TCR clone 221175 (TRBV10-2, TRBJ2-3)
CASSESGDHTQYF

SEQ ID NO: 442351 - protein, 12 aa, Homo sapiens
  CDR3 for alpha chain variable domain of TCR clone 221176 (TRAV8-6, TRAJ43)
CAVRYNNNDMRF

SEQ ID NO: 442352 - protein, 15 aa, Homo sapiens
  CDR3 for beta chain variable domain of TCR clone 221176 (TRBV5-1, TRBJ1-1)
CASSSTTGTNTEAFF

SEQ ID NO: 442353 - protein, 12 aa, Homo sapiens
  CDR3 for alpha chain variable domain of TCR clone 221177 (TRAV16, TRAJ26)
CALRSYGQNFVF

SEQ ID NO: 442354 - protein, 12 aa, Homo sapiens
  CDR3 for beta chain variable domain of TCR clone 221177 (TRBV28, TRBJ2-6)
CAIQAGANVLTF

SEQ ID NO: 442355 - protein, 14 aa, Homo sapiens
  CDR3 for alpha chain variable domain of TCR clone 221178 (TRAV26-1, TRAJ45)
CIEVTGGGADGPTF

SEQ ID NO: 442356 - protein, 16 aa, Homo sapiens
  CDR3 for beta chain variable domain of TCR clone 221178 (TRBV2, TRBJ2-3)
CASSTSVEGVTDTQYF

SEQ ID NO: 442357 - protein, 16 aa, Homo sapiens
  CDR3 for alpha chain variable domain of TCR clone 221179 (TRAV3, TRAJ10)
CAVRDMRAGGGNKPTF

SEQ ID NO: 442358 - protein, 20 aa, Homo sapiens
  CDR3 for beta chain variable domain of TCR clone 221179 (TRBV28, TRBJ2-1)
CASTPIGRSPGLAGGNEQFF

SEQ ID NO: 442359 - protein, 17 aa, Homo sapiens
  CDR3 for alpha chain variable domain of TCR clone 221180 (TRAV38-1, TRAJ28)
CAFMKPTSGAGSYQPTF

SEQ ID NO: 442360 - protein, 20 aa, Homo sapiens
  CDR3 for beta chain variable domain of TCR clone 221180 (TRBV28, TRBJ2-1)
CASTPIGRSPGLAGGNEQFF

SEQ ID NO: 442361 - protein, 15 aa, Homo sapiens
  CDR3 for alpha chain variable domain of TCR clone 221181 (TRAV2, TRAJ37)
CAVGGGSSNTGKLIF

SEQ ID NO: 442362 - protein, 13 aa, Homo sapiens
  CDR3 for beta chain variable domain of TCR clone 221181 (TRBV20-1, TRBJ2-7)
CSAQTGLSYEQYF

SEQ ID NO: 442363 - protein, 14 aa, Homo sapiens
  CDR3 for alpha chain variable domain of TCR clone 221182 (TRAV3, TRAJ9)
CAVRLNTGGFKTIF

SEQ ID NO: 442364 - protein, 13 aa, Homo sapiens
  CDR3 for beta chain variable domain of TCR clone 221182 (TRBV12-4, TRBJ1-2)
CASSSGPNYGYTF

SEQ ID NO: 442365 - protein, 12 aa, Homo sapiens
  CDR3 for alpha chain variable domain of TCR clone 221183 (TRAV17, TRAJ57)
CATDGGSEKLVF

SEQ ID NO: 442366 - protein, 16 aa, Homo sapiens
  CDR3 for beta chain variable domain of TCR clone 221183 (TRBV7-9, TRBJ2-5)
CASSETLDRGAETQYF

SEQ ID NO: 442367 - protein, 13 aa, Homo sapiens
  CDR3 for alpha chain variable domain of TCR clone 221184 (TRAV12-3, TRAJ7)
CAMSASGNNRLAF

SEQ ID NO: 442368 - protein, 16 aa, Homo sapiens
  CDR3 for beta chain variable domain of TCR clone 221184 (TRBV7-2, TRBJ2-3)
CASSESGPTGTDTQYF

SEQ ID NO: 442369 - protein, 11 aa, Homo sapiens
  CDR3 for alpha chain variable domain of TCR clone 221185 (TRAV3, TRAJ21)
CAVGNFNKIYF

SEQ ID NO: 442370 - protein, 17 aa, Homo sapiens
  CDR3 for beta chain variable domain of TCR clone 221185 (TRBV24-1, TRBJ2-1)
CATSDVSTSGTYNEQFF

SEQ ID NO: 442371 - protein, 13 aa, Homo sapiens
  CDR3 for alpha chain variable domain of TCR clone 221186 (TRAV17, TRAJ4)
CATQSGGYNKLIF

SEQ ID NO: 442372 - protein, 14 aa, Homo sapiens
  CDR3 for beta chain variable domain of TCR clone 221186 (TRBV20-1, TRBJ1-5)
CSARDNRGNQPQHF

SEQ ID NO: 442373 - protein, 15 aa, Homo sapiens
  CDR3 for alpha chain variable domain of TCR clone 221187 (TRAV8-3, TRAJ34)
CAVAPHGGNTDKLIF

SEQ ID NO: 442374 - protein, 15 aa, Homo sapiens
  CDR3 for beta chain variable domain of TCR clone 221187 (TRBV20-1, TRBJ1-1)
CSASRGVTGNTEAFF

SEQ ID NO: 442375 - protein, 14 aa, Homo sapiens
  CDR3 for alpha chain variable domain of TCR clone 221188 (TRAV3, TRAJ6)
CAVRDPWGSYIPTF

SEQ ID NO: 442376 - protein, 13 aa, Homo sapiens
  CDR3 for beta chain variable domain of TCR clone 221188 (TRBV4-2, TRBJ1-1)
CASSQAGNTEAFF

SEQ ID NO: 442377 - protein, 14 aa, Homo sapiens
  CDR3 for alpha chain variable domain of TCR clone 221189 (TRAV10, TRAJ32)
CGEPRGVATNKRIF

SEQ ID NO: 442378 - protein, 14 aa, Homo sapiens
  CDR3 for beta chain variable domain of TCR clone 221189 (TRBV5-4, TRBJ2-2)
CASRLDGGTGELFF

SEQ ID NO: 442379 - protein, 11 aa, Homo sapiens
  CDR3 for alpha chain variable domain of TCR clone 221190 (TRAV1-1, TRAJ23)
CAVRQGGKLIF

SEQ ID NO: 442380 - protein, 20 aa, Homo sapiens
  CDR3 for beta chain variable domain of TCR clone 221190 (TRBV7-8, TRBJ2-2)
CASSHLFPGPTVRITGELFF

SEQ ID NO: 442381 - protein, 12 aa, Homo sapiens
  CDR3 for alpha chain variable domain of TCR clone 221191 (TRAV16, TRAJ10)
CTRTGGGNKPTF

SEQ ID NO: 442382 - protein, 15 aa, Homo sapiens
  CDR3 for beta chain variable domain of TCR clone 221191 (TRBV6-3, TRBJ2-7)
CASSSPGTVFYEQYF

SEQ ID NO: 442383 - protein, 14 aa, Homo sapiens
  CDR3 for alpha chain variable domain of TCR clone 221192 (TRAV26-1, TRAJ26)
CIVRVASYGQNFVF

SEQ ID NO: 442384 - protein, 14 aa, Homo sapiens
  CDR3 for beta chain variable domain of TCR clone 221192 (TRBV25-1, TRBJ1-1)
CASTHLGGNTEAFF

SEQ ID NO: 442385 - protein, 14 aa, Homo sapiens
  CDR3 for alpha chain variable domain of TCR clone 221193 (TRAV12-1, TRAJ30)
CVVNIGWRGDKIIF

SEQ ID NO: 442386 - protein, 14 aa, Homo sapiens
  CDR3 for beta chain variable domain of TCR clone 221193 (TRBV7-6, TRBJ2-3)
CVSSLGTVTDTQYF

SEQ ID NO: 442387 - protein, 19 aa, Homo sapiens
  CDR3 for alpha chain variable domain of TCR clone 221194 (TRAV1-2, TRAJ26)
CLLPLCCERPDNYGQNFFF

SEQ ID NO: 442388 - protein, 13 aa, Homo sapiens
  CDR3 for beta chain variable domain of TCR clone 221194 (TRBV19, TRBJ1-2)
CASSQGQVYGYTF

SEQ ID NO: 442389 - protein, 12 aa, Homo sapiens
  CDR3 for alpha chain variable domain of TCR clone 221195 (TRAV12-3, TRAJ17)
CAMTLTGNKLTF

SEQ ID NO: 442390 - protein, 15 aa, Homo sapiens
  CDR3 for beta chain variable domain of TCR clone 221195 (TRBV20-1, TRBJ2-7)
CSARDRVAGMEEQYF

SEQ ID NO: 442391 - protein, 10 aa, Homo sapiens
  CDR3 for alpha chain variable domain of TCR clone 221196 (TRAV8-4, TRAJ43)
CAVSADDMRF

SEQ ID NO: 442392 - protein, 15 aa, Homo sapiens
  CDR3 for beta chain variable domain of TCR clone 221196 (TRBV6-1, TRBJ2-3)
CASSERGGITDTQYF

SEQ ID NO: 442393 - protein, 12 aa, Homo sapiens
  CDR3 for alpha chain variable domain of TCR clone 221197 (TRAV1-2, TRAJ29)
CAVPSGNTTLVF

SEQ ID NO: 442394 - protein, 12 aa, Homo sapiens
  CDR3 for beta chain variable domain of TCR clone 221197 (TRBV7-9, TRBJ2-7)
CASSFGSYEKYF

SEQ ID NO: 442395 - protein, 13 aa, Homo sapiens
  CDR3 for alpha chain variable domain of TCR clone 221198 (TRAV12-1, TRAJ34)
CGEPLRNTDKLIF

SEQ ID NO: 442396 - protein, 20 aa, Homo sapiens
  CDR3 for beta chain variable domain of TCR clone 221198 (TRBV19, TRBJ2-1)
CARSISRTVTSTRLNNEQFF

SEQ ID NO: 442397 - protein, 13 aa, Homo sapiens
  CDR3 for alpha chain variable domain of TCR clone 221199 (TRAV13-2, TRAJ48)
CAEMDFGNEKLTF

SEQ ID NO: 442398 - protein, 14 aa, Homo sapiens
  CDR3 for beta chain variable domain of TCR clone 221199 (TRBV7-9, TRBJ2-5)
CASSLAFGQETQYF

SEQ ID NO: 442399 - protein, 13 aa, Homo sapiens
  CDR3 for alpha chain variable domain of TCR clone 221200 (TRAV1-2, TRAJ31)
CAVRPNNNARLMF

SEQ ID NO: 442400 - protein, 16 aa, Homo sapiens
  CDR3 for beta chain variable domain of TCR clone 221200 (TRBV28, TRBJ2-1)
CASSSSYSGSLNEQFF

SEQ ID NO: 442401 - protein, 12 aa, Homo sapiens
  CDR3 for alpha chain variable domain of TCR clone 221201 (TRAV12-3, TRAJ17)
CAMTLTGNKLNF

SEQ ID NO: 442402 - protein, 16 aa, Homo sapiens
  CDR3 for beta chain variable domain of TCR clone 221201 (TRBV15, TRBJ2-3)
CATSRDLGIVTDTQYF

SEQ ID NO: 442403 - protein, 14 aa, Homo sapiens
  CDR3 for alpha chain variable domain of TCR clone 221202 (TRAV16, TRAJ3)
CALSQYSSASKIIF

SEQ ID NO: 442404 - protein, 14 aa, Homo sapiens
  CDR3 for beta chain variable domain of TCR clone 221202 (TRBV6-3, TRBJ2-1)
CASLHSADYNEQFF

SEQ ID NO: 442405 - protein, 12 aa, Homo sapiens
  CDR3 for alpha chain variable domain of TCR clone 221203 (TRAV16, TRAJ9)
CALSSGGFKTIF

SEQ ID NO: 442406 - protein, 15 aa, Homo sapiens
  CDR3 for beta chain variable domain of TCR clone 221203 (TRBV10-2, TRBJ2-6)
CASSEQGTGANVLTF

SEQ ID NO: 442407 - protein, 15 aa, Homo sapiens
  CDR3 for alpha chain variable domain of TCR clone 221204 (TRAV8-2, TRAJ24)
CVVSDRADSWGKLQF

SEQ ID NO: 442408 - protein, 11 aa, Homo sapiens
  CDR3 for beta chain variable domain of TCR clone 221204 (TRBV20-1, TRBJ1-2)
CSVQGAGGDTF

SEQ ID NO: 442409 - protein, 14 aa, Homo sapiens
  CDR3 for alpha chain variable domain of TCR clone 221205 (TRAV4, TRAJ17)
CLVGDMAAGNKLTF

SEQ ID NO: 442410 - protein, 17 aa, Homo sapiens
  CDR3 for beta chain variable domain of TCR clone 221205 (TRBV20-1, TRBJ2-2)
CSASGSGQGGLTGELFF

SEQ ID NO: 442411 - protein, 17 aa, Homo sapiens
  CDR3 for alpha chain variable domain of TCR clone 221206 (TRAV8-2, )
CVVNIQNPDPAVYPLRD

SEQ ID NO: 442412 - protein, 14 aa, Homo sapiens
  CDR3 for beta chain variable domain of TCR clone 221206 (TRBV7-9, TRBJ2-5)
CASSLVGGEETQYF

SEQ ID NO: 442413 - protein, 13 aa, Homo sapiens
  CDR3 for alpha chain variable domain of TCR clone 221207 (TRAV26-2, TRAJ45)
CIPYRRRCGRTHL

SEQ ID NO: 442414 - protein, 20 aa, Homo sapiens
  CDR3 for beta chain variable domain of TCR clone 221207 (TRBV28, TRBJ2-1)
CASTPIGRSPGLAGGNEQFF

SEQ ID NO: 442415 - protein, 14 aa, Homo sapiens
  CDR3 for alpha chain variable domain of TCR clone 221208 (TRAV2, TRAJ34)
CAVPLSYNTDKLIF

SEQ ID NO: 442416 - protein, 16 aa, Homo sapiens
  CDR3 for beta chain variable domain of TCR clone 221208 (TRBV4-1, TRBJ1-1)
CASSSMSERPNTEAFF

SEQ ID NO: 442417 - protein, 14 aa, Homo sapiens
  CDR3 for alpha chain variable domain of TCR clone 221209 (TRAV16, TRAJ33)
CALSAMDSNYQLIW

SEQ ID NO: 442418 - protein, 16 aa, Homo sapiens
  CDR3 for beta chain variable domain of TCR clone 221209 (TRBV25-1, TRBJ2-7)
CASSEFTGGGIYEQYF

SEQ ID NO: 442419 - protein, 14 aa, Homo sapiens
  CDR3 for alpha chain variable domain of TCR clone 221210 (TRAV13-1, TRAJ35)
CSASKGGFGNVLHG

SEQ ID NO: 442420 - protein, 13 aa, Homo sapiens
  CDR3 for beta chain variable domain of TCR clone 221210 (TRBV7-3, TRBJ1-1)
CASSQDWGAEAFF

SEQ ID NO: 442421 - protein, 15 aa, Homo sapiens
  CDR3 for alpha chain variable domain of TCR clone 221211 (TRAV8-3, TRAJ6)
CAVGEDRGGSYIPTF

SEQ ID NO: 442422 - protein, 12 aa, Homo sapiens
  CDR3 for beta chain variable domain of TCR clone 221211 (TRBV11-2, TRBJ2-2)
CASSLGGGELFF

SEQ ID NO: 442423 - protein, 14 aa, Homo sapiens
  CDR3 for alpha chain variable domain of TCR clone 221212 (TRAV1-2, TRAJ16)
CAVNRFSDGQKLLF

SEQ ID NO: 442424 - protein, 15 aa, Homo sapiens
  CDR3 for beta chain variable domain of TCR clone 221212 (TRBV5-8, TRBJ1-5)
CASSPRGHGDQPQHF

SEQ ID NO: 442425 - protein, 14 aa, Homo sapiens
  CDR3 for alpha chain variable domain of TCR clone 221213 (TRAV1-2, TRAJ16)
CAVNRFSDGQKLLF

SEQ ID NO: 442426 - protein, 15 aa, Homo sapiens
  CDR3 for beta chain variable domain of TCR clone 221213 (TRBV7-2, TRBJ2-2)
CASSSRTGYTGELFF

SEQ ID NO: 442427 - protein, 20 aa, Homo sapiens
  CDR3 for alpha chain variable domain of TCR clone 221214 (TRAV26-1, TRAJ42)
CCVLLHRQTYYGGSQGNLIF

SEQ ID NO: 442428 - protein, 16 aa, Homo sapiens
  CDR3 for beta chain variable domain of TCR clone 221214 (TRBV7-3, TRBJ2-2)
CASSLKRETLSGELFF

SEQ ID NO: 442429 - protein, 13 aa, Homo sapiens
  CDR3 for alpha chain variable domain of TCR clone 221215 (TRAV29/DV5, TRAJ31)
CAASRNNNASLIF

SEQ ID NO: 442430 - protein, 12 aa, Homo sapiens
  CDR3 for beta chain variable domain of TCR clone 221215 (TRBV14, TRBJ2-5)
CASSHLKETQYF

SEQ ID NO: 442431 - protein, 12 aa, Homo sapiens
  CDR3 for alpha chain variable domain of TCR clone 221216 (TRAV8-3, TRAJ26)
CAVGAGGQNFVF

SEQ ID NO: 442432 - protein, 14 aa, Homo sapiens
  CDR3 for beta chain variable domain of TCR clone 221216 (TRBV5-1, TRBJ1-5)
CASSLGQGAQAQHF

SEQ ID NO: 442433 - protein, 21 aa, Homo sapiens
  CDR3 for alpha chain variable domain of TCR clone 221217 (TRAV30, TRAJ43)
GLPAQLLRNLLPIIELNDMRF

SEQ ID NO: 442434 - protein, 17 aa, Homo sapiens
  CDR3 for beta chain variable domain of TCR clone 221217 (TRBV11-2, TRBJ2-1)
CASNLYPPGVEYNEQFF

SEQ ID NO: 442435 - protein, 15 aa, Homo sapiens
  CDR3 for alpha chain variable domain of TCR clone 221218 (TRAV21, TRAJ24)
CAARSSTDSWGNCRL

SEQ ID NO: 442436 - protein, 13 aa, Homo sapiens
  CDR3 for beta chain variable domain of TCR clone 221218 (TRBV11-2, TRBJ2-5)
CASSSTGEETQYF

SEQ ID NO: 442437 - protein, 14 aa, Homo sapiens
  CDR3 for alpha chain variable domain of TCR clone 221219 (TRAV12-3, TRAJ22)
CAMSLFGSARQLTF

SEQ ID NO: 442438 - protein, 13 aa, Homo sapiens
  CDR3 for beta chain variable domain of TCR clone 221219 (TRBV12-4, TRBJ2-2)
CTSVPAAPPGSCF

SEQ ID NO: 442439 - protein, 11 aa, Homo sapiens
  CDR3 for alpha chain variable domain of TCR clone 221220 (TRAV16, TRAJ20)
CALGEGFKAAL

SEQ ID NO: 442440 - protein, 13 aa, Homo sapiens
  CDR3 for beta chain variable domain of TCR clone 221220 (TRBV7-3, TRBJ2-1)
CASSLDSYNEQFF

SEQ ID NO: 442441 - protein, 14 aa, Homo sapiens
  CDR3 for alpha chain variable domain of TCR clone 221221 (TRAV16, TRAJ22)
CSLSGQGSARQLTF

SEQ ID NO: 442442 - protein, 15 aa, Homo sapiens
  CDR3 for beta chain variable domain of TCR clone 221221 (TRBV6-3, TRBJ2-7)
CASSSPGTVFYEQYF

SEQ ID NO: 442443 - protein, 14 aa, Homo sapiens
  CDR3 for alpha chain variable domain of TCR clone 221222 (TRAV1-2, TRAJ6)
CAVSLTGGSYIPTF

SEQ ID NO: 442444 - protein, 15 aa, Homo sapiens
  CDR3 for beta chain variable domain of TCR clone 221222 (TRBV7-9, TRBJ2-7)
CASSPGGGLTYEQYF

SEQ ID NO: 442445 - protein, 18 aa, Homo sapiens
  CDR3 for alpha chain variable domain of TCR clone 221223 (TRAV13-1, TRAJ52)
CSASKRSAGGTSNGKLTF

SEQ ID NO: 442446 - protein, 13 aa, Homo sapiens
  CDR3 for beta chain variable domain of TCR clone 221223 (TRBV12-4, TRBJ1-2)
CASSLRQGKGYTF

SEQ ID NO: 442447 - protein, 16 aa, Homo sapiens
  CDR3 for alpha chain variable domain of TCR clone 221224 (TRAV3, TRAJ37)
CAVIGKWSGNTGKLIF

SEQ ID NO: 442448 - protein, 13 aa, Homo sapiens
  CDR3 for beta chain variable domain of TCR clone 221224 (TRBV19, TRBJ1-2)
CASSVPGQDGYTF

SEQ ID NO: 442449 - protein, 11 aa, Homo sapiens
  CDR3 for alpha chain variable domain of TCR clone 221225 (TRAV2, TRAJ13)
CASGGYQKVTF

SEQ ID NO: 442450 - protein, 17 aa, Homo sapiens
  CDR3 for beta chain variable domain of TCR clone 221225 (TRBV5-8, TRBJ2-3)
CASSLRTSGASTDTQYF

SEQ ID NO: 442451 - protein, 18 aa, Homo sapiens
  CDR3 for alpha chain variable domain of TCR clone 221226 (TRAV26-1, TRAJ23)
CIVRVGLEVLNQGGKLIF

SEQ ID NO: 442452 - protein, 15 aa, Homo sapiens
  CDR3 for beta chain variable domain of TCR clone 221226 (TRBV10-3, TRBJ2-3)
CAISDWDRDTDTQYF

SEQ ID NO: 442453 - protein, 17 aa, Homo sapiens
  CDR3 for alpha chain variable domain of TCR clone 221227 (TRAV12-2, TRAJ52)
CAVNKGAGGTSYGKLTF

SEQ ID NO: 442454 - protein, 14 aa, Homo sapiens
  CDR3 for beta chain variable domain of TCR clone 221227 (TRBV19, TRBJ2-1)
CASPTFVLSGEQFF

SEQ ID NO: 442455 - protein, 12 aa, Homo sapiens
  CDR3 for alpha chain variable domain of TCR clone 221228 (TRAV21, TRAJ23)
CAVGPQGGKLSF

SEQ ID NO: 442456 - protein, 13 aa, Homo sapiens
  CDR3 for beta chain variable domain of TCR clone 221228 (TRBV20-1, TRBJ2-7)
CSARTGAGYEQYF

SEQ ID NO: 442457 - protein, 13 aa, Homo sapiens
  CDR3 for alpha chain variable domain of TCR clone 221229 (TRAV9-2, TRAJ43)
CALSGNNNNDMRF

SEQ ID NO: 442458 - protein, 16 aa, Homo sapiens
  CDR3 for beta chain variable domain of TCR clone 221229 (TRBV19, TRBJ1-2)
CASSIVPARGSYGYTF

SEQ ID NO: 442459 - protein, 12 aa, Homo sapiens
  CDR3 for alpha chain variable domain of TCR clone 221230 (TRAV3, TRAJ43)
CAVRDPNNDMRF

SEQ ID NO: 442460 - protein, 13 aa, Homo sapiens
  CDR3 for beta chain variable domain of TCR clone 221230 (TRBV19, TRBJ1-2)
CASGVPGQDGCTF

SEQ ID NO: 442461 - protein, 14 aa, Homo sapiens
  CDR3 for alpha chain variable domain of TCR clone 221231 (TRAV17, TRAJ32)
CATDPGGAANKLIF

SEQ ID NO: 442462 - protein, 14 aa, Homo sapiens
  CDR3 for beta chain variable domain of TCR clone 221231 (TRBV2, TRBJ1-5)
CASSENRGGQAHHF

SEQ ID NO: 442463 - protein, 15 aa, Homo sapiens
  CDR3 for alpha chain variable domain of TCR clone 221232 (TRAV29/DV5, TRAJ29)
CAASERSSGNTPLVF

SEQ ID NO: 442464 - protein, 17 aa, Homo sapiens
  CDR3 for beta chain variable domain of TCR clone 221232 (TRBV4-1, TRBJ1-4)
CASCQEGPRGVEEKLFF

SEQ ID NO: 442465 - protein, 13 aa, Homo sapiens
  CDR3 for alpha chain variable domain of TCR clone 221233 (TRAV2, TRAJ15)
CAVASRAGTALIF

SEQ ID NO: 442466 - protein, 16 aa, Homo sapiens
  CDR3 for beta chain variable domain of TCR clone 221233 (TRBV7-8, TRBJ2-4)
CASSAERTLAKNIQYV

SEQ ID NO: 442467 - protein, 16 aa, Homo sapiens
  CDR3 for alpha chain variable domain of TCR clone 221234 (TRAV3, TRAJ10)
CAVRDMRAGGGNKLTL

SEQ ID NO: 442468 - protein, 12 aa, Homo sapiens
  CDR3 for beta chain variable domain of TCR clone 221234 (TRBV20-1, TRBJ2-7)
CSAGLKMGEQYF

SEQ ID NO: 442469 - protein, 11 aa, Homo sapiens
  CDR3 for alpha chain variable domain of TCR clone 221235 (TRAV2, TRAJ33)
CAVDSNYQLIW

SEQ ID NO: 442470 - protein, 17 aa, Homo sapiens
  CDR3 for beta chain variable domain of TCR clone 221235 (TRBV20-1, TRBJ2-2)
CSASGSGQGGLTGELFF

SEQ ID NO: 442471 - protein, 15 aa, Homo sapiens
  CDR3 for alpha chain variable domain of TCR clone 221236 (TRAV3, TRAJ27)
SAVRDPLTNAGKSTF

SEQ ID NO: 442472 - protein, 15 aa, Homo sapiens
  CDR3 for beta chain variable domain of TCR clone 221236 (TRBV28, TRBJ2-1)
CASSIIAGGRSEQFF

SEQ ID NO: 442473 - protein, 11 aa, Homo sapiens
  CDR3 for alpha chain variable domain of TCR clone 221237 (TRAV1-2, TRAJ40)
CAVPGTYKYIF

SEQ ID NO: 442474 - protein, 13 aa, Homo sapiens
  CDR3 for beta chain variable domain of TCR clone 221237 (TRBV11-2, TRBJ2-7)
RASSPLGSYEQYF

SEQ ID NO: 442475 - protein, 15 aa, Homo sapiens
  CDR3 for alpha chain variable domain of TCR clone 221238 (TRAV17, TRAJ37)
CATDGGSSNTGKLIF

SEQ ID NO: 442476 - protein, 15 aa, Homo sapiens
  CDR3 for beta chain variable domain of TCR clone 221238 (TRBV28, TRBJ2-5)
CASSSGQTIQETQYF

SEQ ID NO: 442477 - protein, 14 aa, Homo sapiens
  CDR3 for alpha chain variable domain of TCR clone 221239 (TRAV2, TRAJ9)
CAVEDRSGGCKTIF

SEQ ID NO: 442478 - protein, 16 aa, Homo sapiens
  CDR3 for beta chain variable domain of TCR clone 221239 (TRBV7-3, TRBJ2-1)
CASSLEGYRSYNEQFF

SEQ ID NO: 442479 - protein, 18 aa, Homo sapiens
  CDR3 for alpha chain variable domain of TCR clone 221240 (TRAV21, TRAJ53)
CAVKGGENSGGSNYKLTF

SEQ ID NO: 442480 - protein, 13 aa, Homo sapiens
  CDR3 for beta chain variable domain of TCR clone 221240 (TRBV7-3, TRBJ1-1)
CASSQDWGAEAFF

SEQ ID NO: 442481 - protein, 14 aa, Homo sapiens
  CDR3 for alpha chain variable domain of TCR clone 221241 (TRAV8-3, TRAJ42)
CAVGAWGSQGNPIF

SEQ ID NO: 442482 - protein, 15 aa, Homo sapiens
  CDR3 for beta chain variable domain of TCR clone 221241 (TRBV29-1, TRBJ1-2)
CSVVLEAGSNYGYTF

SEQ ID NO: 442483 - protein, 12 aa, Homo sapiens
  CDR3 for alpha chain variable domain of TCR clone 221242 (TRAV2, TRAJ5)
CALDTGRRALTF

SEQ ID NO: 442484 - protein, 15 aa, Homo sapiens
  CDR3 for beta chain variable domain of TCR clone 221242 (TRBV10-3, TRBJ2-1)
CAISDAQDRAYEQFF

SEQ ID NO: 442485 - protein, 14 aa, Homo sapiens
  CDR3 for alpha chain variable domain of TCR clone 221243 (TRAV16, TRAJ54)
CALSLIQGAQKLVF

SEQ ID NO: 442486 - protein, 18 aa, Homo sapiens
  CDR3 for beta chain variable domain of TCR clone 221243 (TRBV6-6, TRBJ1-3)
CASSYSKWDSISGDTIYF

SEQ ID NO: 442487 - protein, 12 aa, Homo sapiens
  CDR3 for alpha chain variable domain of TCR clone 221244 (TRAV12-2, TRAJ47)
CAVAEYGSKLVF

SEQ ID NO: 442488 - protein, 14 aa, Homo sapiens
  CDR3 for beta chain variable domain of TCR clone 221244 (TRBV20-1, TRBJ1-1)
CSAMGGIANTEAFF

SEQ ID NO: 442489 - protein, 17 aa, Homo sapiens
  CDR3 for alpha chain variable domain of TCR clone 221245 (TRAV3, TRAJ42)
CAVRDRDYGGSQGNLIF

SEQ ID NO: 442490 - protein, 14 aa, Homo sapiens
  CDR3 for beta chain variable domain of TCR clone 221245 (TRBV20-1, TRBJ2-3)
CSARGGTSTDTQYF

SEQ ID NO: 442491 - protein, 22 aa, Homo sapiens
  CDR3 for alpha chain variable domain of TCR clone 221246 (TRAV27, TRAJ41)
CAVRTQIPDIQNPDPAVYQLRD

SEQ ID NO: 442492 - protein, 16 aa, Homo sapiens
  CDR3 for beta chain variable domain of TCR clone 221246 (TRBV5-1, TRBJ2-3)
CASSWGLAVYTDTQYF

SEQ ID NO: 442493 - protein, 14 aa, Homo sapiens
  CDR3 for alpha chain variable domain of TCR clone 221247 (TRAV3, TRAJ27)
CAVRDDTNAGKSTF

SEQ ID NO: 442494 - protein, 15 aa, Homo sapiens
  CDR3 for beta chain variable domain of TCR clone 221247 (TRBV7-7, TRBJ2-2)
CATSKLAKNTGGLFF

SEQ ID NO: 442495 - protein, 11 aa, Homo sapiens
  CDR3 for alpha chain variable domain of TCR clone 221248 (TRAV2, TRAJ33)
CAVESNYQLIW

SEQ ID NO: 442496 - protein, 18 aa, Homo sapiens
  CDR3 for beta chain variable domain of TCR clone 221248 (TRBV3-1, TRBJ2-5)
CASSQAGTSGGGRETQYF

SEQ ID NO: 442497 - protein, 13 aa, Homo sapiens
  CDR3 for alpha chain variable domain of TCR clone 221249 (TRAV20, TRAJ20)
CAVRWVGDYKLSF

SEQ ID NO: 442498 - protein, 14 aa, Homo sapiens
  CDR3 for beta chain variable domain of TCR clone 221249 (TRBV19, TRBJ2-2)
CASTVTANTGELFF

SEQ ID NO: 442499 - protein, 13 aa, Homo sapiens
  CDR3 for alpha chain variable domain of TCR clone 221250 (TRAV24, TRAJ42)
CAFSTGSQGNLIF

SEQ ID NO: 442500 - protein, 18 aa, Homo sapiens
  CDR3 for beta chain variable domain of TCR clone 221250 (TRBV2, TRBJ2-1)
CASRGLAGGPRTYNEQFF

SEQ ID NO: 442501 - protein, 18 aa, Homo sapiens
  CDR3 for alpha chain variable domain of TCR clone 221251 (TRAV12-3, TRAJ52)
CAMSVGGAGGTSYGKLTF

SEQ ID NO: 442502 - protein, 12 aa, Homo sapiens
  CDR3 for beta chain variable domain of TCR clone 221251 (TRBV5-1, TRBJ2-7)
CASSLDSYEQYF

SEQ ID NO: 442503 - protein, 12 aa, Homo sapiens
  CDR3 for alpha chain variable domain of TCR clone 221252 (TRAV12-3, TRAJ17)
CAMTLTGNKLTF

SEQ ID NO: 442504 - protein, 14 aa, Homo sapiens
  CDR3 for beta chain variable domain of TCR clone 221252 (TRBV7-8, TRBJ1-3)
CASSSDRVRNTIYF

SEQ ID NO: 442505 - protein, 15 aa, Homo sapiens
  CDR3 for alpha chain variable domain of TCR clone 221253 (TRAV12-3, TRAJ13)
CAMSARSGGYQKVTF

SEQ ID NO: 442506 - protein, 14 aa, Homo sapiens
  CDR3 for beta chain variable domain of TCR clone 221253 (TRBV7-9, TRBJ2-5)
CASSLDTAQETQYF

SEQ ID NO: 442507 - protein, 12 aa, Homo sapiens
  CDR3 for alpha chain variable domain of TCR clone 221254 (TRAV13-1, TRAJ42)
LPTGGSQGNLIF

SEQ ID NO: 442508 - protein, 14 aa, Homo sapiens
  CDR3 for beta chain variable domain of TCR clone 221254 (TRBV18, TRBJ2-7)
CASSPRGGAYEQYF

SEQ ID NO: 442509 - protein, 13 aa, Homo sapiens
  CDR3 for alpha chain variable domain of TCR clone 221255 (TRAV12-3, TRAJ33)
CAMSVNSNYQLIW

SEQ ID NO: 442510 - protein, 15 aa, Homo sapiens
  CDR3 for beta chain variable domain of TCR clone 221255 (TRBV6-4, TRBJ2-1)
CASSDSTGGYNEQFF

SEQ ID NO: 442511 - protein, 14 aa, Homo sapiens
  CDR3 for alpha chain variable domain of TCR clone 221256 (TRAV12-2, TRAJ53)
CAVKGGGSNYKLTF

SEQ ID NO: 442512 - protein, 15 aa, Homo sapiens
  CDR3 for beta chain variable domain of TCR clone 221256 (TRBV4-1, TRBJ1-2)
CASSQGQGAAYGYTF

SEQ ID NO: 442513 - protein, 12 aa, Homo sapiens
  CDR3 for alpha chain variable domain of TCR clone 221257 (TRAV13-1, TRAJ21)
CAAKEGFNKFYL

SEQ ID NO: 442514 - protein, 14 aa, Homo sapiens
  CDR3 for beta chain variable domain of TCR clone 221257 (TRBV5-1, TRBJ2-7)
CASSRGESLYEQYF

SEQ ID NO: 442515 - protein, 17 aa, Homo sapiens
  CDR3 for alpha chain variable domain of TCR clone 221258 (TRAV3, TRAJ6)
CAVRYGPRAGGSYIPTS

SEQ ID NO: 442516 - protein, 14 aa, Homo sapiens
  CDR3 for beta chain variable domain of TCR clone 221258 (TRBV7-2, TRBJ2-7)
CASSPKTSFYEQYF

SEQ ID NO: 442517 - protein, 14 aa, Homo sapiens
  CDR3 for alpha chain variable domain of TCR clone 221259 (TRAV1-2, TRAJ16)
CAVNRFSDGQKLLF

SEQ ID NO: 442518 - protein, 15 aa, Homo sapiens
  CDR3 for beta chain variable domain of TCR clone 221259 (TRBV5-1, TRBJ2-3)
CASCVTSGSTDTQYF

SEQ ID NO: 442519 - protein, 14 aa, Homo sapiens
  CDR3 for alpha chain variable domain of TCR clone 221260 (TRAV12-1, TRAJ30)
CVPTGTNRDDTIIF

SEQ ID NO: 442520 - protein, 11 aa, Homo sapiens
  CDR3 for beta chain variable domain of TCR clone 221260 (TRBV4-1, TRBJ2-2)
CASEHTGELFF

SEQ ID NO: 442521 - protein, 13 aa, Homo sapiens
  CDR3 for alpha chain variable domain of TCR clone 221261 (TRAV12-3, TRAJ7)
CAMTPYGNNRLAF

SEQ ID NO: 442522 - protein, 13 aa, Homo sapiens
  CDR3 for beta chain variable domain of TCR clone 221261 (TRBV10-2, TRBJ1-1)
CASNDQMNTEAFF

SEQ ID NO: 442523 - protein, 18 aa, Homo sapiens
  CDR3 for alpha chain variable domain of TCR clone 221262 (TRAV3, TRAJ17)
CAVRARRGGRSCRQQANF

SEQ ID NO: 442524 - protein, 14 aa, Homo sapiens
  CDR3 for beta chain variable domain of TCR clone 221262 (TRBV4-1, TRBJ2-2)
CASSQAVNTGELFS

SEQ ID NO: 442525 - protein, 13 aa, Homo sapiens
  CDR3 for alpha chain variable domain of TCR clone 221263 (TRAV8-3, TRAJ21)
FAVGAYNFNKFYF

SEQ ID NO: 442526 - protein, 16 aa, Homo sapiens
  CDR3 for beta chain variable domain of TCR clone 221263 (TRBV19, TRBJ2-1)
CASSMGGGSSYNEQFF

SEQ ID NO: 442527 - protein, 15 aa, Homo sapiens
  CDR3 for alpha chain variable domain of TCR clone 221264 (TRAV12-2, TRAJ53)
CAVNGGGGSNYKLTF

SEQ ID NO: 442528 - protein, 16 aa, Homo sapiens
  CDR3 for beta chain variable domain of TCR clone 221264 (TRBV29-1, TRBJ2-7)
CSVEVVGTSGSYEQYF

SEQ ID NO: 442529 - protein, 16 aa, Homo sapiens
  CDR3 for alpha chain variable domain of TCR clone 221265 (TRAV30, TRAJ24)
CGTEIVDADSWGKFQF

SEQ ID NO: 442530 - protein, 13 aa, Homo sapiens
  CDR3 for beta chain variable domain of TCR clone 221265 (TRBV20-1, TRBJ1-1)
SSARGGGNTEAFF

SEQ ID NO: 442531 - protein, 13 aa, Homo sapiens
  CDR3 for alpha chain variable domain of TCR clone 221266 (TRAV8-3, TRAJ28)
CAVGAVGSYQLTF

SEQ ID NO: 442532 - protein, 19 aa, Homo sapiens
  CDR3 for beta chain variable domain of TCR clone 221266 (TRBV28, TRBJ2-5)
CASSLYLRLAGELQETQYF

SEQ ID NO: 442533 - protein, 17 aa, Homo sapiens
  CDR3 for alpha chain variable domain of TCR clone 221267 (TRAV3, TRAJ6)
CAVRDGPRAGGSYIPTF

SEQ ID NO: 442534 - protein, 14 aa, Homo sapiens
  CDR3 for beta chain variable domain of TCR clone 221267 (TRBV25-1, TRBJ1-1)
CASTHLGGNTEASF

SEQ ID NO: 442535 - protein, 15 aa, Homo sapiens
  CDR3 for alpha chain variable domain of TCR clone 221268 (TRAV8-4, TRAJ13)
CAVSDWSGGYQKVTF

SEQ ID NO: 442536 - protein, 14 aa, Homo sapiens
  CDR3 for beta chain variable domain of TCR clone 221268 (TRBV19, TRBJ2-1)
CASPTFVLSGEQFF

SEQ ID NO: 442537 - protein, 14 aa, Homo sapiens
  CDR3 for alpha chain variable domain of TCR clone 221269 (TRAV4, TRAJ9)
CLVVSGTGGFKTIF

SEQ ID NO: 442538 - protein, 15 aa, Homo sapiens
  CDR3 for beta chain variable domain of TCR clone 221269 (TRBV7-2, TRBJ2-1)
CASSLASGRVNEQFF

SEQ ID NO: 442539 - protein, 14 aa, Homo sapiens
  CDR3 for alpha chain variable domain of TCR clone 221270 (TRAV8-4, TRAJ48)
CAVSETFGNEKFNL

SEQ ID NO: 442540 - protein, 14 aa, Homo sapiens
  CDR3 for beta chain variable domain of TCR clone 221270 (TRBV13, TRBJ2-7)
CASSLKGASYEQYF

SEQ ID NO: 442541 - protein, 13 aa, Homo sapiens
  CDR3 for alpha chain variable domain of TCR clone 221271 (TRAV21, TRAJ36)
CAVIKTGAHNRFF

SEQ ID NO: 442542 - protein, 13 aa, Homo sapiens
  CDR3 for beta chain variable domain of TCR clone 221271 (TRBV29-1, TRBJ2-3)
CSATRGGRDTQYF

SEQ ID NO: 442543 - protein, 18 aa, Homo sapiens
  CDR3 for alpha chain variable domain of TCR clone 221272 (TRAV26-2, TRAJ54)
CILRDVEVGIQGAQKLVF

SEQ ID NO: 442544 - protein, 13 aa, Homo sapiens
  CDR3 for beta chain variable domain of TCR clone 221272 (TRBV12-4, TRBJ2-2)
CASSITGSGELFF

SEQ ID NO: 442545 - protein, 11 aa, Homo sapiens
  CDR3 for alpha chain variable domain of TCR clone 221273 (TRAV17, TRAJ9)
CGFTGGFKTIF

SEQ ID NO: 442546 - protein, 16 aa, Homo sapiens
  CDR3 for beta chain variable domain of TCR clone 221273 (TRBV12-4, TRBJ1-5)
CASSSGPRGSNQPQHF

SEQ ID NO: 442547 - protein, 15 aa, Homo sapiens
  CDR3 for alpha chain variable domain of TCR clone 221274 (TRAV12-3, TRAJ10)
CASYILTGGGNKLTF

SEQ ID NO: 442548 - protein, 14 aa, Homo sapiens
  CDR3 for beta chain variable domain of TCR clone 221274 (TRBV20-1, TRBJ1-1)
CSAQTRIGGTEAFF

SEQ ID NO: 442549 - protein, 14 aa, Homo sapiens
  CDR3 for alpha chain variable domain of TCR clone 221275 (TRAV3, TRAJ34)
CAVRDINNTDKLIF

SEQ ID NO: 442550 - protein, 14 aa, Homo sapiens
  CDR3 for beta chain variable domain of TCR clone 221275 (TRBV7-2, TRBJ2-2)
CASSLGQNTGELFL

SEQ ID NO: 442551 - protein, 17 aa, Homo sapiens
  CDR3 for alpha chain variable domain of TCR clone 221276 (TRAV13-1, TRAJ28)
CAASPPYSGAGSYQLTF

SEQ ID NO: 442552 - protein, 15 aa, Homo sapiens
  CDR3 for beta chain variable domain of TCR clone 221276 (TRBV5-1, TRBJ1-1)
CASSLGEGENTEAFF

SEQ ID NO: 442553 - protein, 11 aa, Homo sapiens
  CDR3 for alpha chain variable domain of TCR clone 221277 (TRAV22, TRAJ20)
CAPLHDYKLSF

SEQ ID NO: 442554 - protein, 16 aa, Homo sapiens
  CDR3 for beta chain variable domain of TCR clone 221277 (TRBV11-2, TRBJ2-2)
CASSRRTGNLIGELFF

SEQ ID NO: 442555 - protein, 20 aa, Homo sapiens
  CDR3 for alpha chain variable domain of TCR clone 221278 (TRAV8-3, TRAJ44)
LSTSVLWVRLYTGTASKLTF

SEQ ID NO: 442556 - protein, 16 aa, Homo sapiens
  CDR3 for beta chain variable domain of TCR clone 221278 (TRBV6-4, TRBJ1-2)
CASSEAVGDPNYGYAF

SEQ ID NO: 442557 - protein, 14 aa, Homo sapiens
  CDR3 for alpha chain variable domain of TCR clone 221279 (TRAV8-3, TRAJ10)
CAVGNAGGGNKLTF

SEQ ID NO: 442558 - protein, 16 aa, Homo sapiens
  CDR3 for beta chain variable domain of TCR clone 221279 (TRBV11-2, TRBJ1-2)
CASSLDTGGADYGYTL

SEQ ID NO: 442559 - protein, 13 aa, Homo sapiens
  CDR3 for alpha chain variable domain of TCR clone 221280 (TRAV3, TRAJ17)
CAVRRGCRQQANF

SEQ ID NO: 442560 - protein, 15 aa, Homo sapiens
  CDR3 for beta chain variable domain of TCR clone 221280 (TRBV9, TRBJ1-6)
RASSVAGTGDSPLHF

SEQ ID NO: 442561 - protein, 14 aa, Homo sapiens
  CDR3 for alpha chain variable domain of TCR clone 221281 (TRAV17, TRAJ57)
CATDPQGGSEKLVF

SEQ ID NO: 442562 - protein, 16 aa, Homo sapiens
  CDR3 for beta chain variable domain of TCR clone 221281 (TRBV11-2, TRBJ2-7)
CASSTVTAPKTYEQYF

SEQ ID NO: 442563 - protein, 14 aa, Homo sapiens
  CDR3 for alpha chain variable domain of TCR clone 221282 (TRAV8-3, TRAJ31)
CAVGRGLNNARLMF

SEQ ID NO: 442564 - protein, 15 aa, Homo sapiens
  CDR3 for beta chain variable domain of TCR clone 221282 (TRBV7-2, TRBJ2-2)
CASSLAGGLTGELFV

SEQ ID NO: 442565 - protein, 13 aa, Homo sapiens
  CDR3 for alpha chain variable domain of TCR clone 221283 (TRAV13-2, TRAJ29)
CAEGTFETNTPVF

SEQ ID NO: 442566 - protein, 13 aa, Homo sapiens
  CDR3 for beta chain variable domain of TCR clone 221283 (TRBV2, TRBJ1-1)
CASNLLRNTEAFF

SEQ ID NO: 442567 - protein, 16 aa, Homo sapiens
  CDR3 for alpha chain variable domain of TCR clone 221284 (TRAV30, TRAJ24)
CGTEIVDADSWGKLQF

SEQ ID NO: 442568 - protein, 14 aa, Homo sapiens
  CDR3 for beta chain variable domain of TCR clone 221284 (TRBV7-2, TRBJ1-2)
CASSQTGSTYGYTF

SEQ ID NO: 442569 - protein, 20 aa, Homo sapiens
  CDR3 for alpha chain variable domain of TCR clone 221285 (TRAV25, TRAJ21)
TATQTTDVGTYPLSFNKFYF

SEQ ID NO: 442570 - protein, 14 aa, Homo sapiens
  CDR3 for beta chain variable domain of TCR clone 221285 (TRBV6-1, TRBJ2-1)
CASAKDGFYNEQFS

SEQ ID NO: 442571 - protein, 12 aa, Homo sapiens
  CDR3 for alpha chain variable domain of TCR clone 221286 (TRAV3, TRAJ27)
CAVRDKAGKSTV

SEQ ID NO: 442572 - protein, 14 aa, Homo sapiens
  CDR3 for beta chain variable domain of TCR clone 221286 (TRBV5-1, TRBJ1-2)
CASSVDSTNYGYTF

SEQ ID NO: 442573 - protein, 14 aa, Homo sapiens
  CDR3 for alpha chain variable domain of TCR clone 221287 (TRAV1-2, TRAJ16)
CAVNRLSAGQKLLF

SEQ ID NO: 442574 - protein, 15 aa, Homo sapiens
  CDR3 for beta chain variable domain of TCR clone 221287 (TRBV9, TRBJ1-6)
CASSVAGTGDSPLHF

SEQ ID NO: 442575 - protein, 17 aa, Homo sapiens
  CDR3 for alpha chain variable domain of TCR clone 221288 (TRAV3, TRAJ28)
CAVREAYSGAGSYQLTF

SEQ ID NO: 442576 - protein, 18 aa, Homo sapiens
  CDR3 for beta chain variable domain of TCR clone 221288 (TRBV27, TRBJ2-1)
CASGNRAVGVGSKMSSSS

SEQ ID NO: 442577 - protein, 17 aa, Homo sapiens
  CDR3 for alpha chain variable domain of TCR clone 221289 (TRAV3, TRAJ6)
CAVRAGPRAGGSYIPTF

SEQ ID NO: 442578 - protein, 14 aa, Homo sapiens
  CDR3 for beta chain variable domain of TCR clone 221289 (TRBV7-2, TRBJ2-7)
CASSPKTSFYEQYL

SEQ ID NO: 442579 - protein, 15 aa, Homo sapiens
  CDR3 for alpha chain variable domain of TCR clone 221290 (TRAV8-3, TRAJ45)
CASSYSGGGADGLTF

SEQ ID NO: 442580 - protein, 12 aa, Homo sapiens
  CDR3 for beta chain variable domain of TCR clone 221290 (TRBV7-9, TRBJ1-6)
CASSLMTSPLHF

SEQ ID NO: 442581 - protein, 15 aa, Homo sapiens
  CDR3 for alpha chain variable domain of TCR clone 221291 (TRAV26-1, TRAJ42)
FIVRVTGGSQGNLIF

SEQ ID NO: 442582 - protein, 14 aa, Homo sapiens
  CDR3 for beta chain variable domain of TCR clone 221291 (TRBV19, TRBJ2-2)
CATTGHANTGELFF

SEQ ID NO: 442583 - protein, 16 aa, Homo sapiens
  CDR3 for alpha chain variable domain of TCR clone 221292 (TRAV12-3, TRAJ53)
CAMSPGSGGSNYKLPF

SEQ ID NO: 442584 - protein, 12 aa, Homo sapiens
  CDR3 for beta chain variable domain of TCR clone 221292 (TRBV11-2, TRBJ2-2)
CASSLGGGELFF

SEQ ID NO: 442585 - protein, 10 aa, Homo sapiens
  CDR3 for alpha chain variable domain of TCR clone 221293 (TRAV8-4, TRAJ43)
CAVGADDMRF

SEQ ID NO: 442586 - protein, 11 aa, Homo sapiens
  CDR3 for beta chain variable domain of TCR clone 221293 (TRBV12-4, TRBJ2-3)
CASTATDTQYF

SEQ ID NO: 442587 - protein, 16 aa, Homo sapiens
  CDR3 for alpha chain variable domain of TCR clone 221294 (TRAV26-1, TRAJ45)
CIVEKYSGGGADGLTF

SEQ ID NO: 442588 - protein, 16 aa, Homo sapiens
  CDR3 for beta chain variable domain of TCR clone 221294 (TRBV10-3, TRBJ1-6)
CAISERRGQGNSHLHF

SEQ ID NO: 442589 - protein, 16 aa, Homo sapiens
  CDR3 for alpha chain variable domain of TCR clone 221295 (TRAV27, TRAJ52)
CTGAPAGGTSYGKLTF

SEQ ID NO: 442590 - protein, 12 aa, Homo sapiens
  CDR3 for beta chain variable domain of TCR clone 221295 (TRBV27, TRBJ2-1)
CASRGFYNEQFF

SEQ ID NO: 442591 - protein, 14 aa, Homo sapiens
  CDR3 for alpha chain variable domain of TCR clone 221296 (TRAV16, TRAJ40)
CALHESYYLRNLQI

SEQ ID NO: 442592 - protein, 12 aa, Homo sapiens
  CDR3 for beta chain variable domain of TCR clone 221296 (TRBV7-3, TRBJ2-3)
CDSSSLTDTQYF

SEQ ID NO: 442593 - protein, 13 aa, Homo sapiens
  CDR3 for alpha chain variable domain of TCR clone 221297 (TRAV13-2, TRAJ48)
CAEMDFGNEKLTF

SEQ ID NO: 442594 - protein, 15 aa, Homo sapiens
  CDR3 for beta chain variable domain of TCR clone 221297 (TRBV7-9, TRBJ1-6)
LASSSPGRGNSPLHF

SEQ ID NO: 442595 - protein, 12 aa, Homo sapiens
  CDR3 for alpha chain variable domain of TCR clone 221298 (TRAV12-1, TRAJ40)
CVVYSGTYKYIF

SEQ ID NO: 442596 - protein, 15 aa, Homo sapiens
  CDR3 for beta chain variable domain of TCR clone 221298 (TRBV6-1, TRBJ2-4)
CASSEAVWTINIQYF

SEQ ID NO: 442597 - protein, 12 aa, Homo sapiens
  CDR3 for alpha chain variable domain of TCR clone 221299 (TRAV12-1, TRAJ50)
CVGPTSYDKVIF

SEQ ID NO: 442598 - protein, 12 aa, Homo sapiens
  CDR3 for beta chain variable domain of TCR clone 221299 (TRBV5-7, TRBJ1-1)
CASSLVGTEAFF

SEQ ID NO: 442599 - protein, 10 aa, Homo sapiens
  CDR3 for alpha chain variable domain of TCR clone 221300 (TRAV1-2, TRAJ34)
FAVNTDKLIF

SEQ ID NO: 442600 - protein, 18 aa, Homo sapiens
  CDR3 for beta chain variable domain of TCR clone 221300 (TRBV7-9, TRBJ2-7)
CASSLTTSGSRTWYEQYF

SEQ ID NO: 442601 - protein, 14 aa, Homo sapiens
  CDR3 for alpha chain variable domain of TCR clone 221301 (TRAV17, TRAJ33)
CATDAQRSNYQLIW

SEQ ID NO: 442602 - protein, 14 aa, Homo sapiens
  CDR3 for beta chain variable domain of TCR clone 221301 (TRBV25-1, TRBJ1-4)
SASSGGGQPEKLFF

SEQ ID NO: 442603 - protein, 13 aa, Homo sapiens
  CDR3 for alpha chain variable domain of TCR clone 221302 (TRAV8-4, TRAJ10)
CAAFTGGGNKLTF

SEQ ID NO: 442604 - protein, 15 aa, Homo sapiens
  CDR3 for beta chain variable domain of TCR clone 221302 (TRBV5-1, TRBJ1-1)
CASSSTTGTNTEAFF

SEQ ID NO: 442605 - protein, 12 aa, Homo sapiens
  CDR3 for alpha chain variable domain of TCR clone 221303 (TRAV26-1, TRAJ36)
CIVRVRADNLFF

SEQ ID NO: 442606 - protein, 15 aa, Homo sapiens
  CDR3 for beta chain variable domain of TCR clone 221303 (TRBV6-3, TRBJ2-7)
CASSSPGAVFYEQYF

SEQ ID NO: 442607 - protein, 16 aa, Homo sapiens
  CDR3 for alpha chain variable domain of TCR clone 221304 (TRAV26-2, TRAJ45)
CTTASPIGGGADGLTF

SEQ ID NO: 442608 - protein, 20 aa, Homo sapiens
  CDR3 for beta chain variable domain of TCR clone 221304 (TRBV28, TRBJ2-1)
CASTPIGRSPGLAGVNEQFF

SEQ ID NO: 442609 - protein, 14 aa, Homo sapiens
  CDR3 for alpha chain variable domain of TCR clone 221305 (TRAV26-2, TRAJ27)
CSLRDISDAGKSTF

SEQ ID NO: 442610 - protein, 15 aa, Homo sapiens
  CDR3 for beta chain variable domain of TCR clone 221305 (TRBV10-3, TRBJ2-7)
CATREQGLRSYEQYF

SEQ ID NO: 442611 - protein, 14 aa, Homo sapiens
  CDR3 for alpha chain variable domain of TCR clone 221306 (TRAV17, TRAJ37)
CATDAFSNTGKLIF

SEQ ID NO: 442612 - protein, 19 aa, Homo sapiens
  CDR3 for beta chain variable domain of TCR clone 221306 (TRBV13, TRBJ2-4)
CAIIDQKHPVLRRRDPALS

SEQ ID NO: 442613 - protein, 18 aa, Homo sapiens
  CDR3 for alpha chain variable domain of TCR clone 221307 (TRAV21, TRAJ52)
CAVRPSPAGGTSYGRLTF

SEQ ID NO: 442614 - protein, 17 aa, Homo sapiens
  CDR3 for beta chain variable domain of TCR clone 221307 (TRBV24-1, TRBJ2-1)
CATSDVSTSGTYNEQFF

SEQ ID NO: 442615 - protein, 14 aa, Homo sapiens
  CDR3 for alpha chain variable domain of TCR clone 221308 (TRAV29/DV5, TRAJ28)
CAARAGAGSYQLTF

SEQ ID NO: 442616 - protein, 13 aa, Homo sapiens
  CDR3 for beta chain variable domain of TCR clone 221308 (TRBV6-5, TRBJ2-5)
CASSPQGGETQYF

SEQ ID NO: 442617 - protein, 13 aa, Homo sapiens
  CDR3 for alpha chain variable domain of TCR clone 221309 (TRAV21, TRAJ27)
CAARPGNAGKSTF

SEQ ID NO: 442618 - protein, 15 aa, Homo sapiens
  CDR3 for beta chain variable domain of TCR clone 221309 (TRBV5-1, TRBJ1-1)
CASSLSDLGGTEAFF

SEQ ID NO: 442619 - protein, 16 aa, Homo sapiens
  CDR3 for alpha chain variable domain of TCR clone 221310 (TRAV12-2, TRAJ32)
CAVTLGQGGATTKLIF

SEQ ID NO: 442620 - protein, 15 aa, Homo sapiens
  CDR3 for beta chain variable domain of TCR clone 221310 (TRBV20-1, TRBJ2-7)
CSARGPLAGGREQYF

SEQ ID NO: 442621 - protein, 15 aa, Homo sapiens
  CDR3 for alpha chain variable domain of TCR clone 221311 (TRAV27, TRAJ38)
CAGRFNAGNNRKLIW

SEQ ID NO: 442622 - protein, 13 aa, Homo sapiens
  CDR3 for beta chain variable domain of TCR clone 221311 (TRBV12-5, TRBJ2-3)
CASQTRCTDTQYF

SEQ ID NO: 442623 - protein, 12 aa, Homo sapiens
  CDR3 for alpha chain variable domain of TCR clone 221312 (TRAV12-1, TRAJ23)
CVVNDQGGKLIF

SEQ ID NO: 442624 - protein, 15 aa, Homo sapiens
  CDR3 for beta chain variable domain of TCR clone 221312 (TRBV7-6, TRBJ1-5)
CASSQSSGINQPQHF

SEQ ID NO: 442625 - protein, 13 aa, Homo sapiens
  CDR3 for alpha chain variable domain of TCR clone 221313 (TRAV30, TRAJ24)
CGTVTDSCGKLQF

SEQ ID NO: 442626 - protein, 12 aa, Homo sapiens
  CDR3 for beta chain variable domain of TCR clone 221313 (TRBV11-2, TRBJ2-2)
CASSLGGGELFF

SEQ ID NO: 442627 - protein, 15 aa, Homo sapiens
  CDR3 for alpha chain variable domain of TCR clone 221314 (TRAV25, TRAJ48)
CAGGYPNFGNEKLTF

SEQ ID NO: 442628 - protein, 13 aa, Homo sapiens
  CDR3 for beta chain variable domain of TCR clone 221314 (TRBV7-3, TRBJ1-1)
CASSQDWGAEAFF

SEQ ID NO: 442629 - protein, 11 aa, Homo sapiens
  CDR3 for alpha chain variable domain of TCR clone 221315 (TRAV3, TRAJ21)
CAVGNFNKFYF

SEQ ID NO: 442630 - protein, 14 aa, Homo sapiens
  CDR3 for beta chain variable domain of TCR clone 221315 (TRBV20-1, TRBJ2-7)
CSAPELAGVGEQYF

SEQ ID NO: 442631 - protein, 12 aa, Homo sapiens
  CDR3 for alpha chain variable domain of TCR clone 221316 (TRAV17, TRAJ57)
GATDGGSEKLVF

SEQ ID NO: 442632 - protein, 13 aa, Homo sapiens
  CDR3 for beta chain variable domain of TCR clone 221316 (TRBV7-9, TRBJ2-7)
CASSFAGAYEQYF

SEQ ID NO: 442633 - protein, 16 aa, Homo sapiens
  CDR3 for alpha chain variable domain of TCR clone 221317 (TRAV26-1, TRAJ11)
CIVRVAKNSGYSTLTF

SEQ ID NO: 442634 - protein, 20 aa, Homo sapiens
  CDR3 for beta chain variable domain of TCR clone 221317 (TRBV11-2, TRBJ1-6)
CASSLVVATGGSVHPSTLGT

SEQ ID NO: 442635 - protein, 12 aa, Homo sapiens
  CDR3 for alpha chain variable domain of TCR clone 221318 (TRAV13-2, TRAJ23)
CAERHRGGRLIL

SEQ ID NO: 442636 - protein, 15 aa, Homo sapiens
  CDR3 for beta chain variable domain of TCR clone 221318 (TRBV9, TRBJ1-6)
CASSVAGTGDSPLHF

SEQ ID NO: 442637 - protein, 13 aa, Homo sapiens
  CDR3 for alpha chain variable domain of TCR clone 221319 (TRAV12-1, TRAJ6)
CVVYPGGSYIPTF

SEQ ID NO: 442638 - protein, 15 aa, Homo sapiens
  CDR3 for beta chain variable domain of TCR clone 221319 (TRBV5-1, TRBJ2-1)
CASSLEGLAANEQFF

SEQ ID NO: 442639 - protein, 13 aa, Homo sapiens
  CDR3 for alpha chain variable domain of TCR clone 221320 (TRAV12-3, TRAJ5)
CAMRPTGRRALTF

SEQ ID NO: 442640 - protein, 13 aa, Homo sapiens
  CDR3 for beta chain variable domain of TCR clone 221320 (TRBV2, TRBJ2-7)
CASSGVEAYEQYF

SEQ ID NO: 442641 - protein, 13 aa, Homo sapiens
  CDR3 for alpha chain variable domain of TCR clone 221321 (TRAV12-1, TRAJ26)
CVVRRSYGQNFVF

SEQ ID NO: 442642 - protein, 15 aa, Homo sapiens
  CDR3 for beta chain variable domain of TCR clone 221321 (TRBV20-1, TRBJ2-7)
CSARDRVSGMDEQYF

SEQ ID NO: 442643 - protein, 15 aa, Homo sapiens
  CDR3 for alpha chain variable domain of TCR clone 221322 (TRAV25, TRAJ52)
CAGRPGGTSYGKLTF

SEQ ID NO: 442644 - protein, 16 aa, Homo sapiens
  CDR3 for beta chain variable domain of TCR clone 221322 (TRBV7-9, TRBJ2-3)
CASSPWREVGTDTQYF

SEQ ID NO: 442645 - protein, 14 aa, Homo sapiens
  CDR3 for alpha chain variable domain of TCR clone 221323 (TRAV8-4, TRAJ48)
CAVSEAFGNEKLTF

SEQ ID NO: 442646 - protein, 15 aa, Homo sapiens
  CDR3 for beta chain variable domain of TCR clone 221323 (TRBV6-1, TRBJ2-4)
CASSEAVWTINIQYF

SEQ ID NO: 442647 - protein, 14 aa, Homo sapiens
  CDR3 for alpha chain variable domain of TCR clone 221324 (TRAV24, TRAJ42)
CAQNYGGSQGNLIF

SEQ ID NO: 442648 - protein, 17 aa, Homo sapiens
  CDR3 for beta chain variable domain of TCR clone 221324 (TRBV19, TRBJ1-5)
CASSTPGARDRPSILVM

SEQ ID NO: 442649 - protein, 18 aa, Homo sapiens
  CDR3 for alpha chain variable domain of TCR clone 221325 (TRAV13-1, TRAJ52)
CAASKRSAGGTRDGKLTF

SEQ ID NO: 442650 - protein, 13 aa, Homo sapiens
  CDR3 for beta chain variable domain of TCR clone 221325 (TRBV12-4, TRBJ1-2)
CASSLRQGKGYTF

SEQ ID NO: 442651 - protein, 14 aa, Homo sapiens
  CDR3 for alpha chain variable domain of TCR clone 221326 (TRAV12-3, TRAJ29)
CVMSPYSGNTPLVF

SEQ ID NO: 442652 - protein, 11 aa, Homo sapiens
  CDR3 for beta chain variable domain of TCR clone 221326 (TRBV19, TRBJ1-1)
CASSIGSEAFF

SEQ ID NO: 442653 - protein, 14 aa, Homo sapiens
  CDR3 for alpha chain variable domain of TCR clone 221327 (TRAV21, TRAJ35)
CAVMPIGFWNVLHC

SEQ ID NO: 442654 - protein, 12 aa, Homo sapiens
  CDR3 for beta chain variable domain of TCR clone 221327 (TRBV7-9, TRBJ2-7)
CASNIKREEQYF

SEQ ID NO: 442655 - protein, 12 aa, Homo sapiens
  CDR3 for alpha chain variable domain of TCR clone 221328 (TRAV8-3, TRAJ27)
CAVGAEAGKSTF

SEQ ID NO: 442656 - protein, 14 aa, Homo sapiens
  CDR3 for beta chain variable domain of TCR clone 221328 (TRBV2, TRBJ2-1)
CASRLIVGHDSSSS

SEQ ID NO: 442657 - protein, 15 aa, Homo sapiens
  CDR3 for alpha chain variable domain of TCR clone 221329 (TRAV8-4, TRAJ47)
CAVSDPEEYGTKLVF

SEQ ID NO: 442658 - protein, 15 aa, Homo sapiens
  CDR3 for beta chain variable domain of TCR clone 221329 (TRBV11-2, TRBJ2-1)
CASSLGPDSYNEQFF

SEQ ID NO: 442659 - protein, 12 aa, Homo sapiens
  CDR3 for alpha chain variable domain of TCR clone 221330 (TRAV2, TRAJ9)
CAVGAGGFKTIF

SEQ ID NO: 442660 - protein, 17 aa, Homo sapiens
  CDR3 for beta chain variable domain of TCR clone 221330 (TRBV19, TRBJ2-3)
CASSIDPAGGGTDTQYF

SEQ ID NO: 442661 - protein, 12 aa, Homo sapiens
  CDR3 for alpha chain variable domain of TCR clone 221331 (TRAV12-3, TRAJ20)
CAMVRGDYKLSF

SEQ ID NO: 442662 - protein, 17 aa, Homo sapiens
  CDR3 for beta chain variable domain of TCR clone 221331 (TRBV7-9, TRBJ2-1)
RASSLVASYPSYNEQFF

SEQ ID NO: 442663 - protein, 11 aa, Homo sapiens
  CDR3 for alpha chain variable domain of TCR clone 221332 (TRAV1-2, TRAJ31)
CAVNNNARLLF

SEQ ID NO: 442664 - protein, 16 aa, Homo sapiens
  CDR3 for beta chain variable domain of TCR clone 221332 (TRBV10-3, TRBJ2-2)
CAISASGGANTGELFF

SEQ ID NO: 442665 - protein, 19 aa, Homo sapiens
  CDR3 for alpha chain variable domain of TCR clone 221333 (TRAV2, TRAJ20)
ILQVREADAAVYRDCKLSF

SEQ ID NO: 442666 - protein, 14 aa, Homo sapiens
  CDR3 for beta chain variable domain of TCR clone 221333 (TRBV11-2, TRBJ2-1)
CASTTGQGNNEQFF

SEQ ID NO: 442667 - protein, 12 aa, Homo sapiens
  CDR3 for alpha chain variable domain of TCR clone 221334 (TRAV12-1, TRAJ23)
CVVNNQGGKLIF

SEQ ID NO: 442668 - protein, 16 aa, Homo sapiens
  CDR3 for beta chain variable domain of TCR clone 221334 (TRBV11-1, TRBJ2-7)
CASSAHTGTLSYEQYF

SEQ ID NO: 442669 - protein, 14 aa, Homo sapiens
  CDR3 for alpha chain variable domain of TCR clone 221335 (TRAV26-1, TRAJ38)
CIADNAGNNRKLIW

SEQ ID NO: 442670 - protein, 14 aa, Homo sapiens
  CDR3 for beta chain variable domain of TCR clone 221335 (TRBV7-2, TRBJ2-1)
CASSPGLAGNEQFF

SEQ ID NO: 442671 - protein, 11 aa, Homo sapiens
  CDR3 for alpha chain variable domain of TCR clone 221336 (TRAV17, TRAJ9)
CGFTGGFKPIF

SEQ ID NO: 442672 - protein, 14 aa, Homo sapiens
  CDR3 for beta chain variable domain of TCR clone 221336 (TRBV7-9, TRBJ2-2)
CASSLVQDTGELLF

SEQ ID NO: 442673 - protein, 12 aa, Homo sapiens
  CDR3 for alpha chain variable domain of TCR clone 221337 (TRAV16, TRAJ49)
CALNEGGNQFYF

SEQ ID NO: 442674 - protein, 14 aa, Homo sapiens
  CDR3 for beta chain variable domain of TCR clone 221337 (TRBV19, TRBJ2-1)
CASPTFVLSGEQFF

SEQ ID NO: 442675 - protein, 12 aa, Homo sapiens
  CDR3 for alpha chain variable domain of TCR clone 221338 (TRAV13-1, TRAJ21)
CAAKEGFKKFYF

SEQ ID NO: 442676 - protein, 18 aa, Homo sapiens
  CDR3 for beta chain variable domain of TCR clone 221338 (TRBV20-1, TRBJ2-6)
CSAETTPTHGSGANVLTF

SEQ ID NO: 442677 - protein, 12 aa, Homo sapiens
  CDR3 for alpha chain variable domain of TCR clone 221339 (TRAV2, TRAJ37)
CAVTMNTGKLIF

SEQ ID NO: 442678 - protein, 15 aa, Homo sapiens
  CDR3 for beta chain variable domain of TCR clone 221339 (TRBV5-1, TRBJ2-5)
CASGFGGPPQETQYF

SEQ ID NO: 442679 - protein, 10 aa, Homo sapiens
  CDR3 for alpha chain variable domain of TCR clone 221340 (TRAV13-1, TRAJ27)
CSPLARQINL

SEQ ID NO: 442680 - protein, 13 aa, Homo sapiens
  CDR3 for beta chain variable domain of TCR clone 221340 (TRBV7-3, TRBJ1-1)
CASSQDWGAEPFF

SEQ ID NO: 442681 - protein, 16 aa, Homo sapiens
  CDR3 for alpha chain variable domain of TCR clone 221341 (TRAV8-6, TRAJ28)
CAVTSKPGAGSYQLTF

SEQ ID NO: 442682 - protein, 16 aa, Homo sapiens
  CDR3 for beta chain variable domain of TCR clone 221341 (TRBV7-3, TRBJ2-2)
CASSLKRGTLSGELFF

SEQ ID NO: 442683 - protein, 13 aa, Homo sapiens
  CDR3 for alpha chain variable domain of TCR clone 221342 (TRAV21, TRAJ20)
CAVGLRVDYKLSF

SEQ ID NO: 442684 - protein, 13 aa, Homo sapiens
  CDR3 for beta chain variable domain of TCR clone 221342 (TRBV6-1, TRBJ1-1)
CASSRQGNTGDFF

SEQ ID NO: 442685 - protein, 13 aa, Homo sapiens
  CDR3 for alpha chain variable domain of TCR clone 221343 (TRAV2, TRAJ40)
CAVVTSGTYKYIF

SEQ ID NO: 442686 - protein, 15 aa, Homo sapiens
  CDR3 for beta chain variable domain of TCR clone 221343 (TRBV6-1, TRBJ2-1)
CASSEAAYSYNEQFF

SEQ ID NO: 442687 - protein, 12 aa, Homo sapiens
  CDR3 for alpha chain variable domain of TCR clone 221344 (TRAV13-1, TRAJ21)
CAAKEGFNKFYF

SEQ ID NO: 442688 - protein, 13 aa, Homo sapiens
  CDR3 for beta chain variable domain of TCR clone 221344 (TRBV23-1, TRBJ2-5)
ASSFLRSQETQYF

SEQ ID NO: 442689 - protein, 12 aa, Homo sapiens
  CDR3 for alpha chain variable domain of TCR clone 221345 (TRAV12-2, TRAJ42)
CAVGGSHGNLIF

SEQ ID NO: 442690 - protein, 15 aa, Homo sapiens
  CDR3 for beta chain variable domain of TCR clone 221345 (TRBV9, TRBJ1-6)
CASSVAGTGDSPLHF

SEQ ID NO: 442691 - protein, 14 aa, Homo sapiens
  CDR3 for alpha chain variable domain of TCR clone 221346 (TRAV12-2, TRAJ53)
CRERGGGSNYKLTF

SEQ ID NO: 442692 - protein, 17 aa, Homo sapiens
  CDR3 for beta chain variable domain of TCR clone 221346 (TRBV7-3, TRBJ2-3)
CASSLMKRKRGADTQYF

SEQ ID NO: 442693 - protein, 15 aa, Homo sapiens
  CDR3 for alpha chain variable domain of TCR clone 221347 (TRAV12-3, TRAJ6)
CAMSATTGGSYIPTF

SEQ ID NO: 442694 - protein, 15 aa, Homo sapiens
  CDR3 for beta chain variable domain of TCR clone 221347 (TRBV19, TRBJ1-2)
CASSVGQVLNYGYTF

SEQ ID NO: 442695 - protein, 15 aa, Homo sapiens
  CDR3 for alpha chain variable domain of TCR clone 221348 (TRAV38-1, TRAJ44)
CAFAGNNGTASKLTF

SEQ ID NO: 442696 - protein, 14 aa, Homo sapiens
  CDR3 for beta chain variable domain of TCR clone 221348 (TRBV20-1, TRBJ1-6)
CSARQGRDNSPLHF

SEQ ID NO: 442697 - protein, 17 aa, Homo sapiens
  CDR3 for alpha chain variable domain of TCR clone 221349 (TRAV3, TRAJ6)
CAVRDGPRAGGSYIPTF

SEQ ID NO: 442698 - protein, 15 aa, Homo sapiens
  CDR3 for beta chain variable domain of TCR clone 221349 (TRBV7-2, TRBJ2-3)
CASSLNLRDTDTQYF

SEQ ID NO: 442699 - protein, 14 aa, Homo sapiens
  CDR3 for alpha chain variable domain of TCR clone 221350 (TRAV9-2, TRAJ39)
CALYIYNAGNMLIF

SEQ ID NO: 442700 - protein, 14 aa, Homo sapiens
  CDR3 for beta chain variable domain of TCR clone 221350 (TRBV19, TRBJ2-5)
CASSMTGQQETQYF

SEQ ID NO: 442701 - protein, 14 aa, Homo sapiens
  CDR3 for alpha chain variable domain of TCR clone 221351 (TRAV35, TRAJ33)
CWARGRDSNYQLIW

SEQ ID NO: 442702 - protein, 11 aa, Homo sapiens
  CDR3 for beta chain variable domain of TCR clone 221351 (TRBV10-3, TRBJ2-7)
CAISEGLEQYF

SEQ ID NO: 442703 - protein, 14 aa, Homo sapiens
  CDR3 for alpha chain variable domain of TCR clone 221352 (TRAV1-2, TRAJ16)
CAVNRFSDGQKLLF

SEQ ID NO: 442704 - protein, 14 aa, Homo sapiens
  CDR3 for beta chain variable domain of TCR clone 221352 (TRBV20-1, TRBJ2-4)
CSASGRVGENRQYF

SEQ ID NO: 442705 - protein, 13 aa, Homo sapiens
  CDR3 for alpha chain variable domain of TCR clone 221353 (TRAV1-2, TRAJ12)
CAVSMDSSYKLIF

SEQ ID NO: 442706 - protein, 13 aa, Homo sapiens
  CDR3 for beta chain variable domain of TCR clone 221353 (TRBV5-7, TRBJ2-3)
CASSLGRTDTRYF

SEQ ID NO: 442707 - protein, 13 aa, Homo sapiens
  CDR3 for alpha chain variable domain of TCR clone 221354 (TRAV13-1, TRAJ29)
CAASIGLNTPLVF

SEQ ID NO: 442708 - protein, 14 aa, Homo sapiens
  CDR3 for beta chain variable domain of TCR clone 221354 (TRBV4-1, TRBJ2-2)
CASSQAVNTGELFF

SEQ ID NO: 442709 - protein, 13 aa, Homo sapiens
  CDR3 for alpha chain variable domain of TCR clone 221355 (TRAV3, TRAJ21)
CAVREPDFNKFYF

SEQ ID NO: 442710 - protein, 13 aa, Homo sapiens
  CDR3 for beta chain variable domain of TCR clone 221355 (TRBV19, TRBJ1-5)
CASSIGGEQPQHF

SEQ ID NO: 442711 - protein, 12 aa, Homo sapiens
  CDR3 for alpha chain variable domain of TCR clone 221356 (TRAV2, TRAJ10)
CASTGGGNNLTF

SEQ ID NO: 442712 - protein, 14 aa, Homo sapiens
  CDR3 for beta chain variable domain of TCR clone 221356 (TRBV7-2, TRBJ2-2)
CASRGQGAAGELFF

SEQ ID NO: 442713 - protein, 14 aa, Homo sapiens
  CDR3 for alpha chain variable domain of TCR clone 221357 (TRAV12-1, TRAJ4)
CVGDFSGGYNKLIF

SEQ ID NO: 442714 - protein, 20 aa, Homo sapiens
  CDR3 for beta chain variable domain of TCR clone 221357 (TRBV28, TRBJ2-1)
CASTPIGRSPGLAGGNEQFF

SEQ ID NO: 442715 - protein, 13 aa, Homo sapiens
  CDR3 for alpha chain variable domain of TCR clone 221358 (TRAV21, TRAJ56)
CAVRTGANSKLTF

SEQ ID NO: 442716 - protein, 14 aa, Homo sapiens
  CDR3 for beta chain variable domain of TCR clone 221358 (TRBV7-9, TRBJ2-1)
CASSPRDSLYEQFF

SEQ ID NO: 442717 - protein, 13 aa, Homo sapiens
  CDR3 for alpha chain variable domain of TCR clone 221359 (TRAV20, TRAJ54)
CAVQAGGAQKLVL

SEQ ID NO: 442718 - protein, 14 aa, Homo sapiens
  CDR3 for beta chain variable domain of TCR clone 221359 (TRBV4-1, TRBJ2-2)
CASSQAVNTGELFF

SEQ ID NO: 442719 - protein, 11 aa, Homo sapiens
  CDR3 for alpha chain variable domain of TCR clone 221360 (TRAV8-3, TRAJ20)
CAVAQENKLSF

SEQ ID NO: 442720 - protein, 11 aa, Homo sapiens
  CDR3 for beta chain variable domain of TCR clone 221360 (TRBV7-9, TRBJ2-3)
CASSPPDTQYF

SEQ ID NO: 442721 - protein, 12 aa, Homo sapiens
  CDR3 for alpha chain variable domain of TCR clone 221361 (TRAV13-1, TRAJ15)
CAANQAGTALIF

SEQ ID NO: 442722 - protein, 14 aa, Homo sapiens
  CDR3 for beta chain variable domain of TCR clone 221361 (TRBV20-1, TRBJ2-5)
CSARYRGLQETQYV

SEQ ID NO: 442723 - protein, 13 aa, Homo sapiens
  CDR3 for alpha chain variable domain of TCR clone 221362 (TRAV12-3, TRAJ33)
CAMSVNSNYQLIW

SEQ ID NO: 442724 - protein, 13 aa, Homo sapiens
  CDR3 for beta chain variable domain of TCR clone 221362 (TRBV7-2, TRBJ2-2)
CASSLAGTGELFL

SEQ ID NO: 442725 - protein, 18 aa, Homo sapiens
  CDR3 for alpha chain variable domain of TCR clone 221363 (TRAV13-1, TRAJ52)
CAASKRSAGGTSYGKLTF

SEQ ID NO: 442726 - protein, 13 aa, Homo sapiens
  CDR3 for beta chain variable domain of TCR clone 221363 (TRBV11-3, TRBJ2-7)
CASSLDKLYEQYF

SEQ ID NO: 442727 - protein, 16 aa, Homo sapiens
  CDR3 for alpha chain variable domain of TCR clone 221364 (TRAV3, TRAJ10)
CAVRDMRAGGGNKLTF

SEQ ID NO: 442728 - protein, 17 aa, Homo sapiens
  CDR3 for beta chain variable domain of TCR clone 221364 (TRBV28, TRBJ2-5)
CASSTAEGDALQETQYF

SEQ ID NO: 442729 - protein, 14 aa, Homo sapiens
  CDR3 for alpha chain variable domain of TCR clone 221365 (TRAV1-2, TRAJ8)
CAVREDTGFQKLIF

SEQ ID NO: 442730 - protein, 14 aa, Homo sapiens
  CDR3 for beta chain variable domain of TCR clone 221365 (TRBV7-3, TRBJ2-1)
CASSLAGGTNEQFF

SEQ ID NO: 442731 - protein, 10 aa, Homo sapiens
  CDR3 for alpha chain variable domain of TCR clone 221366 (TRAV2, TRAJ15)
RGQAGTALIF

SEQ ID NO: 442732 - protein, 15 aa, Homo sapiens
  CDR3 for beta chain variable domain of TCR clone 221366 (TRBV5-1, TRBJ2-1)
CASSWGPGPGGEQFF

SEQ ID NO: 442733 - protein, 14 aa, Homo sapiens
  CDR3 for alpha chain variable domain of TCR clone 221367 (TRAV12-2, TRAJ24)
CAVTPADSWGKLQF

SEQ ID NO: 442734 - protein, 12 aa, Homo sapiens
  CDR3 for beta chain variable domain of TCR clone 221367 (TRBV3-1, TRBJ2-1)
CASSQGSSGQFC

SEQ ID NO: 442735 - protein, 14 aa, Homo sapiens
  CDR3 for alpha chain variable domain of TCR clone 221368 (TRAV23/DV6, TRAJ40)
CAASLTSGTYKYIF

SEQ ID NO: 442736 - protein, 14 aa, Homo sapiens
  CDR3 for beta chain variable domain of TCR clone 221368 (TRBV5-1, TRBJ2-3)
CASSRGQGGGKQYF

SEQ ID NO: 442737 - protein, 14 aa, Homo sapiens
  CDR3 for alpha chain variable domain of TCR clone 221369 (TRAV3, TRAJ28)
CCEGPLAGSYQLTF

SEQ ID NO: 442738 - protein, 13 aa, Homo sapiens
  CDR3 for beta chain variable domain of TCR clone 221369 (TRBV20-1, TRBJ2-7)
CSARGDTQDEQYF

SEQ ID NO: 442739 - protein, 14 aa, Homo sapiens
  CDR3 for alpha chain variable domain of TCR clone 221370 (TRAV1-2, TRAJ16)
CVVNRFSDGQKLLF

SEQ ID NO: 442740 - protein, 13 aa, Homo sapiens
  CDR3 for beta chain variable domain of TCR clone 221370 (TRBV20-1, TRBJ1-1)
CSARGGGNTEAFF

SEQ ID NO: 442741 - protein, 12 aa, Homo sapiens
  CDR3 for alpha chain variable domain of TCR clone 221371 (TRAV26-1, TRAJ36)
CIVRVRADNLFL

SEQ ID NO: 442742 - protein, 16 aa, Homo sapiens
  CDR3 for beta chain variable domain of TCR clone 221371 (TRBV12-5, TRBJ2-5)
CASGPRTSGNQETQYF

SEQ ID NO: 442743 - protein, 14 aa, Homo sapiens
  CDR3 for alpha chain variable domain of TCR clone 221372 (TRAV2, TRAJ37)
CAVDFTSNTGKLIF

SEQ ID NO: 442744 - protein, 15 aa, Homo sapiens
  CDR3 for beta chain variable domain of TCR clone 221372 (TRBV19, TRBJ2-3)
CASSIEAGEADTQYF

SEQ ID NO: 442745 - protein, 15 aa, Homo sapiens
  CDR3 for alpha chain variable domain of TCR clone 221373 (TRAV21, TRAJ53)
CATLNSGGSNYKLTL

SEQ ID NO: 442746 - protein, 13 aa, Homo sapiens
  CDR3 for beta chain variable domain of TCR clone 221373 (TRBV11-2, TRBJ2-5)
CASSSTGEETQYF

SEQ ID NO: 442747 - protein, 13 aa, Homo sapiens
  CDR3 for alpha chain variable domain of TCR clone 221374 (TRAV3, TRAJ41)
CAVSSNSGYALNF

SEQ ID NO: 442748 - protein, 15 aa, Homo sapiens
  CDR3 for beta chain variable domain of TCR clone 221374 (TRBV5-1, TRBJ2-7)
CASSLGDFTTYEQYF

SEQ ID NO: 442749 - protein, 14 aa, Homo sapiens
  CDR3 for alpha chain variable domain of TCR clone 221375 (TRAV1-2, TRAJ16)
CAVNRFSDGLKLLF

SEQ ID NO: 442750 - protein, 15 aa, Homo sapiens
  CDR3 for beta chain variable domain of TCR clone 221375 (TRBV20-1, TRBJ2-7)
CSARKGLAESYEQYF

SEQ ID NO: 442751 - protein, 12 aa, Homo sapiens
  CDR3 for alpha chain variable domain of TCR clone 221376 (TRAV8-3, TRAJ26)
CAGDNYGQNFVF

SEQ ID NO: 442752 - protein, 15 aa, Homo sapiens
  CDR3 for beta chain variable domain of TCR clone 221376 (TRBV19, TRBJ2-1)
CASSTGTSSYNEQFF

SEQ ID NO: 442753 - protein, 13 aa, Homo sapiens
  CDR3 for alpha chain variable domain of TCR clone 221377 (TRAV29/DV5, TRAJ31)
CAASRNNNARLMF

SEQ ID NO: 442754 - protein, 15 aa, Homo sapiens
  CDR3 for beta chain variable domain of TCR clone 221377 (TRBV7-9, TRBJ1-4)
CASSARTGGNEKLFF

SEQ ID NO: 442755 - protein, 13 aa, Homo sapiens
  CDR3 for alpha chain variable domain of TCR clone 221378 (TRAV12-3, TRAJ7)
CAMTPYGNNRLAF

SEQ ID NO: 442756 - protein, 13 aa, Homo sapiens
  CDR3 for beta chain variable domain of TCR clone 221378 (TRBV5-7, TRBJ2-2)
CASTNIDTGELFF

SEQ ID NO: 442757 - protein, 13 aa, Homo sapiens
  CDR3 for alpha chain variable domain of TCR clone 221379 (TRAV17, TRAJ5)
CAPMDTGRRALTF

SEQ ID NO: 442758 - protein, 15 aa, Homo sapiens
  CDR3 for beta chain variable domain of TCR clone 221379 (TRBV11-1, TRBJ2-7)
CASSLNYGASYEQYF

SEQ ID NO: 442759 - protein, 18 aa, Homo sapiens
  CDR3 for alpha chain variable domain of TCR clone 221380 (TRAV21, TRAJ52)
CAVRPSPAGGISYGKLTF

SEQ ID NO: 442760 - protein, 15 aa, Homo sapiens
  CDR3 for beta chain variable domain of TCR clone 221380 (TRBV5-6, TRBJ2-7)
CASSLGPGRGHEQYF

SEQ ID NO: 442761 - protein, 12 aa, Homo sapiens
  CDR3 for alpha chain variable domain of TCR clone 221381 (TRAV2, TRAJ9)
CAVGAGRFKTIF

SEQ ID NO: 442762 - protein, 16 aa, Homo sapiens
  CDR3 for beta chain variable domain of TCR clone 221381 (TRBV13, TRBJ2-2)
CASSPRTGEHTGELFF

SEQ ID NO: 442763 - protein, 18 aa, Homo sapiens
  CDR3 for alpha chain variable domain of TCR clone 221382 (TRAV29/DV5, TRAJ52)
CAAGFRGVGGTSYGKLTF

SEQ ID NO: 442764 - protein, 16 aa, Homo sapiens
  CDR3 for beta chain variable domain of TCR clone 221382 (TRBV7-3, TRBJ2-2)
CASGLKRGTLSGELFF

SEQ ID NO: 442765 - protein, 12 aa, Homo sapiens
  CDR3 for alpha chain variable domain of TCR clone 221383 (TRAV2, TRAJ9)
CAVGAGGFKTIF

SEQ ID NO: 442766 - protein, 16 aa, Homo sapiens
  CDR3 for beta chain variable domain of TCR clone 221383 (TRBV13, TRBJ2-2)
CASSPRTGEHTAELFF

SEQ ID NO: 442767 - protein, 12 aa, Homo sapiens
  CDR3 for alpha chain variable domain of TCR clone 221384 (TRAV12-3, TRAJ17)
CAMTLTGNKLTF

SEQ ID NO: 442768 - protein, 16 aa, Homo sapiens
  CDR3 for beta chain variable domain of TCR clone 221384 (TRBV19, TRBJ1-2)
CASSKFRDTTNYGYTF

SEQ ID NO: 442769 - protein, 14 aa, Homo sapiens
  CDR3 for alpha chain variable domain of TCR clone 221385 (TRAV1-2, TRAJ16)
CAVNRISDGQKLLF

SEQ ID NO: 442770 - protein, 19 aa, Homo sapiens
  CDR3 for beta chain variable domain of TCR clone 221385 (TRBV7-2, TRBJ2-3)
CASSFLSRNWGGGTDTQYF

SEQ ID NO: 442771 - protein, 13 aa, Homo sapiens
  CDR3 for alpha chain variable domain of TCR clone 221386 (TRAV26-2, TRAJ43)
CILRAVNNSDMPF

SEQ ID NO: 442772 - protein, 15 aa, Homo sapiens
  CDR3 for beta chain variable domain of TCR clone 221386 (TRBV7-2, TRBJ2-1)
CASTHGTGIYNEQFF

SEQ ID NO: 442773 - protein, 12 aa, Homo sapiens
  CDR3 for alpha chain variable domain of TCR clone 221387 (TRAV21, TRAJ49)
CAVNDGGNQFYF

SEQ ID NO: 442774 - protein, 15 aa, Homo sapiens
  CDR3 for beta chain variable domain of TCR clone 221387 (TRBV4-1, TRBJ2-7)
CASSQQGQGFDEQYF

SEQ ID NO: 442775 - protein, 13 aa, Homo sapiens
  CDR3 for alpha chain variable domain of TCR clone 221388 (TRAV36/DV7, TRAJ37)
CAVFSSNTGKLIF

SEQ ID NO: 442776 - protein, 17 aa, Homo sapiens
  CDR3 for beta chain variable domain of TCR clone 221388 (TRBV7-9, TRBJ2-3)
CASSPTVAGDLTDTQYF

SEQ ID NO: 442777 - protein, 12 aa, Homo sapiens
  CDR3 for alpha chain variable domain of TCR clone 221389 (TRAV8-3, TRAJ26)
CAGDNYGQNFVF

SEQ ID NO: 442778 - protein, 12 aa, Homo sapiens
  CDR3 for beta chain variable domain of TCR clone 221389 (TRBV7-6, TRBJ2-3)
CASSTGTDTQYF

SEQ ID NO: 442779 - protein, 15 aa, Homo sapiens
  CDR3 for alpha chain variable domain of TCR clone 221390 (TRAV8-3, TRAJ41)
CAVGSNSNSGYALNF

SEQ ID NO: 442780 - protein, 17 aa, Homo sapiens
  CDR3 for beta chain variable domain of TCR clone 221390 (TRBV25-1, TRBJ2-1)
CASSAYGQGPGVYEQFF

SEQ ID NO: 442781 - protein, 16 aa, Homo sapiens
  CDR3 for alpha chain variable domain of TCR clone 221391 (TRAV30, TRAJ24)
CGTEIVDADSWGKFQF

SEQ ID NO: 442782 - protein, 14 aa, Homo sapiens
  CDR3 for beta chain variable domain of TCR clone 221391 (TRBV12-5, TRBJ2-5)
CASGSRIHQGTQYF

SEQ ID NO: 442783 - protein, 15 aa, Homo sapiens
  CDR3 for alpha chain variable domain of TCR clone 221392 (TRAV20, TRAJ6)
CAVLLQSGGSYIPTF

SEQ ID NO: 442784 - protein, 14 aa, Homo sapiens
  CDR3 for beta chain variable domain of TCR clone 221392 (TRBV12-4, TRBJ2-7)
CASSASGGWYEQYF

SEQ ID NO: 442785 - protein, 12 aa, Homo sapiens
  CDR3 for alpha chain variable domain of TCR clone 221393 (TRAV17, TRAJ49)
CATVTTGNQFYF

SEQ ID NO: 442786 - protein, 12 aa, Homo sapiens
  CDR3 for beta chain variable domain of TCR clone 221393 (TRBV5-5, TRBJ2-5)
CASSYFGETQYF

SEQ ID NO: 442787 - protein, 14 aa, Homo sapiens
  CDR3 for alpha chain variable domain of TCR clone 221394 (TRAV1-2, TRAJ16)
CAVNRFSDGQKLLF

SEQ ID NO: 442788 - protein, 15 aa, Homo sapiens
  CDR3 for beta chain variable domain of TCR clone 221394 (TRBV6-1, TRBJ2-3)
CASSERGGFTDTQYF

SEQ ID NO: 442789 - protein, 13 aa, Homo sapiens
  CDR3 for alpha chain variable domain of TCR clone 221395 (TRAV8-4, TRAJ10)
CAAFTGGGNKLTF

SEQ ID NO: 442790 - protein, 12 aa, Homo sapiens
  CDR3 for beta chain variable domain of TCR clone 221395 (TRBV3-1, TRBJ2-1)
CASSQGSSEQFF

SEQ ID NO: 442791 - protein, 13 aa, Homo sapiens
  CDR3 for alpha chain variable domain of TCR clone 221396 (TRAV20, TRAJ49)
CAVQARTGNQFYF

SEQ ID NO: 442792 - protein, 14 aa, Homo sapiens
  CDR3 for beta chain variable domain of TCR clone 221396 (TRBV5-1, TRBJ1-1)
CASSLQGASTEACF

SEQ ID NO: 442793 - protein, 14 aa, Homo sapiens
  CDR3 for alpha chain variable domain of TCR clone 221397 (TRAV9-2, TRAJ39)
CALYIYNACNMLTF

SEQ ID NO: 442794 - protein, 15 aa, Homo sapiens
  CDR3 for beta chain variable domain of TCR clone 221397 (TRBV6-5, TRBJ2-1)
CASSYDAGAGNEQFF

SEQ ID NO: 442795 - protein, 11 aa, Homo sapiens
  CDR3 for alpha chain variable domain of TCR clone 221398 (TRAV2, TRAJ33)
GAVDSNYQLIW

SEQ ID NO: 442796 - protein, 14 aa, Homo sapiens
  CDR3 for beta chain variable domain of TCR clone 221398 (TRBV11-2, TRBJ2-3)
CASSRLARTDTQYF

SEQ ID NO: 442797 - protein, 13 aa, Homo sapiens
  CDR3 for alpha chain variable domain of TCR clone 221399 (TRAV13-1, TRAJ33)
CAASRAGNYQLIW

SEQ ID NO: 442798 - protein, 13 aa, Homo sapiens
  CDR3 for beta chain variable domain of TCR clone 221399 (TRBV7-3, TRBJ1-1)
CASSQDWGAEAFF

SEQ ID NO: 442799 - protein, 16 aa, Homo sapiens
  CDR3 for alpha chain variable domain of TCR clone 221400 (TRAV26-1, TRAJ53)
CIVRVAMGGSNYKLTF

SEQ ID NO: 442800 - protein, 11 aa, Homo sapiens
  CDR3 for beta chain variable domain of TCR clone 221400 (TRBV5-1, TRBJ2-2)
CASSLWTPRTP

SEQ ID NO: 442801 - protein, 11 aa, Homo sapiens
  CDR3 for alpha chain variable domain of TCR clone 221401 (TRAV12-1, TRAJ15)
CVINAGTALIF

SEQ ID NO: 442802 - protein, 16 aa, Homo sapiens
  CDR3 for beta chain variable domain of TCR clone 221401 (TRBV28, TRBJ2-1)
CASSSRVRDSYNEQFF

SEQ ID NO: 442803 - protein, 15 aa, Homo sapiens
  CDR3 for alpha chain variable domain of TCR clone 221402 (TRAV3, TRAJ5)
RAVRDRKTGRRALTF

SEQ ID NO: 442804 - protein, 11 aa, Homo sapiens
  CDR3 for beta chain variable domain of TCR clone 221402 (TRBV11-2, TRBJ1-1)
CASSINTEAFF

SEQ ID NO: 442805 - protein, 13 aa, Homo sapiens
  CDR3 for alpha chain variable domain of TCR clone 221403 (TRAV8-6, TRAJ49)
CAVITNTGNQFYF

SEQ ID NO: 442806 - protein, 14 aa, Homo sapiens
  CDR3 for beta chain variable domain of TCR clone 221403 (TRBV28, TRBJ2-7)
CAIVGQGDLYEQYF

SEQ ID NO: 442807 - protein, 16 aa, Homo sapiens
  CDR3 for alpha chain variable domain of TCR clone 221404 (TRAV30, TRAJ24)
CGTEIVDADSWGKFQF

SEQ ID NO: 442808 - protein, 15 aa, Homo sapiens
  CDR3 for beta chain variable domain of TCR clone 221404 (TRBV5-1, TRBJ1-1)
CASSLTTGTNTEAFF

SEQ ID NO: 442809 - protein, 10 aa, Homo sapiens
  CDR3 for alpha chain variable domain of TCR clone 221405 (TRAV1-2, TRAJ23)
CAGQGGKLIF

SEQ ID NO: 442810 - protein, 15 aa, Homo sapiens
  CDR3 for beta chain variable domain of TCR clone 221405 (TRBV7-3, TRBJ2-1)
CASSLDGNSYNEQFF

SEQ ID NO: 442811 - protein, 19 aa, Homo sapiens
  CDR3 for alpha chain variable domain of TCR clone 221406 (TRAV3, TRAJ6)
CAVRERNPSRSGGRYIPTF

SEQ ID NO: 442812 - protein, 15 aa, Homo sapiens
  CDR3 for beta chain variable domain of TCR clone 221406 (TRBV18, TRBJ2-7)
CASSPTFMDSYEQYF

SEQ ID NO: 442813 - protein, 14 aa, Homo sapiens
  CDR3 for alpha chain variable domain of TCR clone 221407 (TRAV36/DV7, TRAJ44)
CCGANTGTASKLTF

SEQ ID NO: 442814 - protein, 16 aa, Homo sapiens
  CDR3 for beta chain variable domain of TCR clone 221407 (TRBV19, TRBJ2-1)
CASSKAGPSSYNEQFF

SEQ ID NO: 442815 - protein, 11 aa, Homo sapiens
  CDR3 for alpha chain variable domain of TCR clone 221408 (TRAV16, TRAJ31)
CALFNNARLMF

SEQ ID NO: 442816 - protein, 12 aa, Homo sapiens
  CDR3 for beta chain variable domain of TCR clone 221408 (TRBV11-3, TRBJ2-2)
CASSLGGGELFF

SEQ ID NO: 442817 - protein, 13 aa, Homo sapiens
  CDR3 for alpha chain variable domain of TCR clone 221409 (TRAV8-6, TRAJ8)
CAFMNTGFQILVF

SEQ ID NO: 442818 - protein, 15 aa, Homo sapiens
  CDR3 for beta chain variable domain of TCR clone 221409 (TRBV28, TRBJ2-5)
CASSSGRVIQETQYF

SEQ ID NO: 442819 - protein, 18 aa, Homo sapiens
  CDR3 for alpha chain variable domain of TCR clone 221410 (TRAV26-1, TRAJ58)
CCVLLHRQSSTSGSRLTF

SEQ ID NO: 442820 - protein, 16 aa, Homo sapiens
  CDR3 for beta chain variable domain of TCR clone 221410 (TRBV6-1, TRBJ2-5)
CASGETLDRGAETQYF

SEQ ID NO: 442821 - protein, 14 aa, Homo sapiens
  CDR3 for alpha chain variable domain of TCR clone 221411 (TRAV12-1, TRAJ23)
CVVMIYNQGGQLIF

SEQ ID NO: 442822 - protein, 23 aa, Homo sapiens
  CDR3 for beta chain variable domain of TCR clone 221411 (TRBV7-3, TRBJ1-6)
CASSLTSRDEASDPSSYNSPLHF

SEQ ID NO: 442823 - protein, 11 aa, Homo sapiens
  CDR3 for alpha chain variable domain of TCR clone 221412 (TRAV12-3, TRAJ11)
CAMKGYSTLTF

SEQ ID NO: 442824 - protein, 13 aa, Homo sapiens
  CDR3 for beta chain variable domain of TCR clone 221412 (TRBV7-9, TRBJ1-2)
CASSLKQNYGYTF

SEQ ID NO: 442825 - protein, 13 aa, Homo sapiens
  CDR3 for alpha chain variable domain of TCR clone 221413 (TRAV12-1, TRAJ29)
CVVNGPGNTPLVF

SEQ ID NO: 442826 - protein, 13 aa, Homo sapiens
  CDR3 for beta chain variable domain of TCR clone 221413 (TRBV10-3, TRBJ2-7)
CASKLAVNYEQYF

SEQ ID NO: 442827 - protein, 14 aa, Homo sapiens
  CDR3 for alpha chain variable domain of TCR clone 221414 (TRAV2, TRAJ9)
CAVEDRSGGFKTIF

SEQ ID NO: 442828 - protein, 17 aa, Homo sapiens
  CDR3 for beta chain variable domain of TCR clone 221414 (TRBV11-3, TRBJ2-5)
CASSLPGVRGGKETQYF

SEQ ID NO: 442829 - protein, 14 aa, Homo sapiens
  CDR3 for alpha chain variable domain of TCR clone 221415 (TRAV12-2, TRAJ11)
CAVEGGSGYSTLTF

SEQ ID NO: 442830 - protein, 16 aa, Homo sapiens
  CDR3 for beta chain variable domain of TCR clone 221415 (TRBV5-1, TRBJ2-3)
CASSLGLAVYTDTQYF

SEQ ID NO: 442831 - protein, 15 aa, Homo sapiens
  CDR3 for alpha chain variable domain of TCR clone 221416 (TRAV3, TRAJ22)
CAVRDRGGSARQLTF

SEQ ID NO: 442832 - protein, 14 aa, Homo sapiens
  CDR3 for beta chain variable domain of TCR clone 221416 (TRBV12-5, TRBJ2-5)
CASGLRTHQETQYF

SEQ ID NO: 442833 - protein, 15 aa, Homo sapiens
  CDR3 for alpha chain variable domain of TCR clone 221417 (TRAV23/DV6, TRAJ18)
CAARYRGSTLGRLYF

SEQ ID NO: 442834 - protein, 12 aa, Homo sapiens
  CDR3 for beta chain variable domain of TCR clone 221417 (TRBV12-4, TRBJ2-7)
CASSLGGYEQYF

SEQ ID NO: 442835 - protein, 15 aa, Homo sapiens
  CDR3 for alpha chain variable domain of TCR clone 221418 (TRAV27, TRAJ38)
CAARRNAGNNRKLIW

SEQ ID NO: 442836 - protein, 15 aa, Homo sapiens
  CDR3 for beta chain variable domain of TCR clone 221418 (TRBV29-1, TRBJ2-6)
CSFTGGRSGANVLTF

SEQ ID NO: 442837 - protein, 13 aa, Homo sapiens
  CDR3 for alpha chain variable domain of TCR clone 221419 (TRAV8-4, TRAJ48)
CAVSLFGNKKLTF

SEQ ID NO: 442838 - protein, 15 aa, Homo sapiens
  CDR3 for beta chain variable domain of TCR clone 221419 (TRBV20-1, TRBJ2-7)
CSARKGLAESYEQYF

SEQ ID NO: 442839 - protein, 15 aa, Homo sapiens
  CDR3 for alpha chain variable domain of TCR clone 221420 (TRAV26-1, TRAJ29)
CIVRVEGSGNTPLVF

SEQ ID NO: 442840 - protein, 18 aa, Homo sapiens
  CDR3 for beta chain variable domain of TCR clone 221420 (TRBV18, TRBJ2-5)
CASSPGVPRDPVLRARHA

SEQ ID NO: 442841 - protein, 14 aa, Homo sapiens
  CDR3 for alpha chain variable domain of TCR clone 221421 (TRAV21, TRAJ21)
CAVGVEDNSNKFYF

SEQ ID NO: 442842 - protein, 17 aa, Homo sapiens
  CDR3 for beta chain variable domain of TCR clone 221421 (TRBV20-1, TRBJ2-2)
CSASGSGQGGLTGELVF

SEQ ID NO: 442843 - protein, 14 aa, Homo sapiens
  CDR3 for alpha chain variable domain of TCR clone 221422 (TRAV12-2, TRAJ52)
CSCAGGTSHGKLTF

SEQ ID NO: 442844 - protein, 13 aa, Homo sapiens
  CDR3 for beta chain variable domain of TCR clone 221422 (TRBV11-2, TRBJ2-1)
CASSLRLTHEQFF

SEQ ID NO: 442845 - protein, 16 aa, Homo sapiens
  CDR3 for alpha chain variable domain of TCR clone 221423 (TRAV3, TRAJ37)
CAVRVRGSGNKGKLIF

SEQ ID NO: 442846 - protein, 11 aa, Homo sapiens
  CDR3 for beta chain variable domain of TCR clone 221423 (TRBV11-2, TRBJ2-2)
CASSLPGELFF

SEQ ID NO: 442847 - protein, 16 aa, Homo sapiens
  CDR3 for alpha chain variable domain of TCR clone 221424 (TRAV3, TRAJ21)
CAVRDIERGNFNKFYF

SEQ ID NO: 442848 - protein, 15 aa, Homo sapiens
  CDR3 for beta chain variable domain of TCR clone 221424 (TRBV19, TRBJ2-2)
CASSPRTGWTGELFF

SEQ ID NO: 442849 - protein, 20 aa, Homo sapiens
  CDR3 for alpha chain variable domain of TCR clone 221425 (TRAV8-3, TRAJ45)
LSTSVLWGSYSGGGADGLTF

SEQ ID NO: 442850 - protein, 11 aa, Homo sapiens
  CDR3 for beta chain variable domain of TCR clone 221425 (TRBV20-1, TRBJ2-5)
CIADRAETQYF

SEQ ID NO: 442851 - protein, 14 aa, Homo sapiens
  CDR3 for alpha chain variable domain of TCR clone 221426 (TRAV13-1, TRAJ53)
CAASISGSNYKLTF

SEQ ID NO: 442852 - protein, 15 aa, Homo sapiens
  CDR3 for beta chain variable domain of TCR clone 221426 (TRBV4-1, TRBJ1-4)
CASSGTRGTNEKLFF

SEQ ID NO: 442853 - protein, 11 aa, Homo sapiens
  CDR3 for alpha chain variable domain of TCR clone 221427 (TRAV3, TRAJ17)
CAEAAGHKLPF

SEQ ID NO: 442854 - protein, 15 aa, Homo sapiens
  CDR3 for beta chain variable domain of TCR clone 221427 (TRBV12-4, TRBJ2-7)
CASSLGSGGPYEQYF

SEQ ID NO: 442855 - protein, 15 aa, Homo sapiens
  CDR3 for alpha chain variable domain of TCR clone 221428 (TRAV12-3, TRAJ49)
CAMAVTPHTGNQFYF

SEQ ID NO: 442856 - protein, 18 aa, Homo sapiens
  CDR3 for beta chain variable domain of TCR clone 221428 (TRBV4-1, TRBJ1-5)
CASSQDPRGQGLNQPQHF

SEQ ID NO: 442857 - protein, 12 aa, Homo sapiens
  CDR3 for alpha chain variable domain of TCR clone 221429 (TRAV23/DV6, TRAJ16)
CAATGTGQKLLF

SEQ ID NO: 442858 - protein, 14 aa, Homo sapiens
  CDR3 for beta chain variable domain of TCR clone 221429 (TRBV7-2, TRBJ1-1)
CASSFLTGTTEAFF

SEQ ID NO: 442859 - protein, 15 aa, Homo sapiens
  CDR3 for alpha chain variable domain of TCR clone 221430 (TRAV12-3, TRAJ6)
CAMSATSGGSYIPTF

SEQ ID NO: 442860 - protein, 16 aa, Homo sapiens
  CDR3 for beta chain variable domain of TCR clone 221430 (TRBV2, TRBJ2-5)
CVSSARGLGGRETQYF

SEQ ID NO: 442861 - protein, 10 aa, Homo sapiens
  CDR3 for alpha chain variable domain of TCR clone 221431 (TRAV21, TRAJ31)
CAVDNARLMF

SEQ ID NO: 442862 - protein, 15 aa, Homo sapiens
  CDR3 for beta chain variable domain of TCR clone 221431 (TRBV6-1, TRBJ2-4)
CASSEAVWTINIQYF

SEQ ID NO: 442863 - protein, 14 aa, Homo sapiens
  CDR3 for alpha chain variable domain of TCR clone 221432 (TRAV16, TRAJ33)
CALSAMDSNYQSIR

SEQ ID NO: 442864 - protein, 12 aa, Homo sapiens
  CDR3 for beta chain variable domain of TCR clone 221432 (TRBV5-1, TRBJ1-2)
CASSQGTYGYTF

SEQ ID NO: 442865 - protein, 16 aa, Homo sapiens
  CDR3 for alpha chain variable domain of TCR clone 221433 (TRAV26-1, TRAJ48)
CIVRVGANFGNEKLTF

SEQ ID NO: 442866 - protein, 15 aa, Homo sapiens
  CDR3 for beta chain variable domain of TCR clone 221433 (TRBV9, TRBJ1-6)
CASSVAGTGDSALHF

SEQ ID NO: 442867 - protein, 14 aa, Homo sapiens
  CDR3 for alpha chain variable domain of TCR clone 221434 (TRAV17, TRAJ34)
CATDSLEGTDKLIF

SEQ ID NO: 442868 - protein, 16 aa, Homo sapiens
  CDR3 for beta chain variable domain of TCR clone 221434 (TRBV12-5, TRBJ2-5)
CASGPRTSGNQETQYF

SEQ ID NO: 442869 - protein, 14 aa, Homo sapiens
  CDR3 for alpha chain variable domain of TCR clone 221435 (TRAV16, TRAJ39)
CALSKNNAGNMLTF

SEQ ID NO: 442870 - protein, 12 aa, Homo sapiens
  CDR3 for beta chain variable domain of TCR clone 221435 (TRBV11-2, TRBJ2-2)
CASSLGGGELFF

SEQ ID NO: 442871 - protein, 14 aa, Homo sapiens
  CDR3 for alpha chain variable domain of TCR clone 221436 (TRAV12-1, TRAJ8)
CVVNSNTGFQKLVF

SEQ ID NO: 442872 - protein, 14 aa, Homo sapiens
  CDR3 for beta chain variable domain of TCR clone 221436 (TRBV7-2, TRBJ2-7)
CASSLPPGQGPQYF

SEQ ID NO: 442873 - protein, 15 aa, Homo sapiens
  CDR3 for alpha chain variable domain of TCR clone 221437 (TRAV21, TRAJ24)
CAARSSTDSWGKMQF

SEQ ID NO: 442874 - protein, 13 aa, Homo sapiens
  CDR3 for beta chain variable domain of TCR clone 221437 (TRBV11-2, TRBJ2-5)
CASSSTGEETQYF

SEQ ID NO: 442875 - protein, 14 aa, Homo sapiens
  CDR3 for alpha chain variable domain of TCR clone 221438 (TRAV8-4, TRAJ13)
CAVTLSGGYQKVTF

SEQ ID NO: 442876 - protein, 17 aa, Homo sapiens
  CDR3 for beta chain variable domain of TCR clone 221438 (TRBV3-1, TRBJ2-3)
CASSQLLDRGHTDTQYF

SEQ ID NO: 442877 - protein, 12 aa, Homo sapiens
  CDR3 for alpha chain variable domain of TCR clone 221439 (TRAV12-2, TRAJ21)
CAVNRNFNKFYF

SEQ ID NO: 442878 - protein, 13 aa, Homo sapiens
  CDR3 for beta chain variable domain of TCR clone 221439 (TRBV19, TRBJ2-7)
CASSPRQSYEQYF

SEQ ID NO: 442879 - protein, 10 aa, Homo sapiens
  CDR3 for alpha chain variable domain of TCR clone 221440 (TRAV5, TRAJ34)
CAEDTDTLIF

SEQ ID NO: 442880 - protein, 15 aa, Homo sapiens
  CDR3 for beta chain variable domain of TCR clone 221440 (TRBV20-1, TRBJ2-5)
CSASGTSGGGETQYF

SEQ ID NO: 442881 - protein, 14 aa, Homo sapiens
  CDR3 for alpha chain variable domain of TCR clone 221441 (TRAV8-3, TRAJ4)
CAVGAAGGYNKLIF

SEQ ID NO: 442882 - protein, 18 aa, Homo sapiens
  CDR3 for beta chain variable domain of TCR clone 221441 (TRBV6-6, TRBJ1-3)
CASSYSKWDSISGNTIYF

SEQ ID NO: 442883 - protein, 11 aa, Homo sapiens
  CDR3 for alpha chain variable domain of TCR clone 221442 (TRAV1-2, TRAJ20)
CAVSNDYKLSF

SEQ ID NO: 442884 - protein, 15 aa, Homo sapiens
  CDR3 for beta chain variable domain of TCR clone 221442 (TRBV25-1, TRBJ1-2)
CASSETGGPSYGYTF

SEQ ID NO: 442885 - protein, 17 aa, Homo sapiens
  CDR3 for alpha chain variable domain of TCR clone 221443 (TRAV4, TRAJ18)
CLVGERSVDSTLGRLYF

SEQ ID NO: 442886 - protein, 14 aa, Homo sapiens
  CDR3 for beta chain variable domain of TCR clone 221443 (TRBV6-5, TRBJ1-2)
CASSYDGTGGGYTF

SEQ ID NO: 442887 - protein, 14 aa, Homo sapiens
  CDR3 for alpha chain variable domain of TCR clone 221444 (TRAV12-2, TRAJ17)
CAVNIKAAGNKLTF

SEQ ID NO: 442888 - protein, 16 aa, Homo sapiens
  CDR3 for beta chain variable domain of TCR clone 221444 (TRBV12-5, TRBJ2-5)
CASGPRTSGNQETQYF

SEQ ID NO: 442889 - protein, 16 aa, Homo sapiens
  CDR3 for alpha chain variable domain of TCR clone 221445 (TRAV30, TRAJ24)
CGTEIVDADSWGKFQF

SEQ ID NO: 442890 - protein, 15 aa, Homo sapiens
  CDR3 for beta chain variable domain of TCR clone 221445 (TRBV29-1, TRBJ2-1)
CSVGRHALFYNEQFF

SEQ ID NO: 442891 - protein, 16 aa, Homo sapiens
  CDR3 for alpha chain variable domain of TCR clone 221446 (TRAV30, TRAJ24)
CGTEIVDADSWGKFQF

SEQ ID NO: 442892 - protein, 14 aa, Homo sapiens
  CDR3 for beta chain variable domain of TCR clone 221446 (TRBV12-5, TRBJ2-5)
CASGSRTHQDAQYF

SEQ ID NO: 442893 - protein, 15 aa, Homo sapiens
  CDR3 for alpha chain variable domain of TCR clone 221447 (TRAV12-1, TRAJ44)
CVVDTPQGTASKLTF

SEQ ID NO: 442894 - protein, 13 aa, Homo sapiens
  CDR3 for beta chain variable domain of TCR clone 221447 (TRBV27, TRBJ2-1)
CASSSGSYNQQFF

SEQ ID NO: 442895 - protein, 14 aa, Homo sapiens
  CDR3 for alpha chain variable domain of TCR clone 221448 (TRAV12-2, TRAJ49)
CAVTLGLYGNQFYF

SEQ ID NO: 442896 - protein, 15 aa, Homo sapiens
  CDR3 for beta chain variable domain of TCR clone 221448 (TRBV7-9, TRBJ1-6)
CASSSPGRGNSPLHF

SEQ ID NO: 442897 - protein, 14 aa, Homo sapiens
  CDR3 for alpha chain variable domain of TCR clone 221449 (TRAV2, TRAJ9)
CAVEDRSGGCKTIF

SEQ ID NO: 442898 - protein, 18 aa, Homo sapiens
  CDR3 for beta chain variable domain of TCR clone 221449 (TRBV11-2, TRBJ2-3)
CASSLGGASRGAPNTQYF

SEQ ID NO: 442899 - protein, 14 aa, Homo sapiens
  CDR3 for alpha chain variable domain of TCR clone 221450 (TRAV3, TRAJ6)
CAVRDSRRKLHTSI

SEQ ID NO: 442900 - protein, 15 aa, Homo sapiens
  CDR3 for beta chain variable domain of TCR clone 221450 (TRBV18, TRBJ2-7)
CASSPLQGRTYEQYF

SEQ ID NO: 442901 - protein, 13 aa, Homo sapiens
  CDR3 for alpha chain variable domain of TCR clone 221451 (TRAV3, TRAJ36)
CAVRDTGANNLFF

SEQ ID NO: 442902 - protein, 15 aa, Homo sapiens
  CDR3 for beta chain variable domain of TCR clone 221451 (TRBV24-1, TRBJ2-1)
CATSDPGGSTMSSSS

SEQ ID NO: 442903 - protein, 14 aa, Homo sapiens
  CDR3 for alpha chain variable domain of TCR clone 221452 (TRAV12-1, TRAJ17)
CVVNYKAAGNKLTF

SEQ ID NO: 442904 - protein, 15 aa, Homo sapiens
  CDR3 for beta chain variable domain of TCR clone 221452 (TRBV10-2, TRBJ2-6)
CASSEQGTGANVLPF

SEQ ID NO: 442905 - protein, 18 aa, Homo sapiens
  CDR3 for alpha chain variable domain of TCR clone 221453 (TRAV21, TRAJ52)
CAVRPSPAGGTSYGKLTF

SEQ ID NO: 442906 - protein, 17 aa, Homo sapiens
  CDR3 for beta chain variable domain of TCR clone 221453 (TRBV13, TRBJ2-3)
CASGPSRVAGGRNTQYF

SEQ ID NO: 442907 - protein, 14 aa, Homo sapiens
  CDR3 for alpha chain variable domain of TCR clone 221454 (TRAV12-2, TRAJ40)
CAVKIPSGTYKYIF

SEQ ID NO: 442908 - protein, 12 aa, Homo sapiens
  CDR3 for beta chain variable domain of TCR clone 221454 (TRBV11-2, TRBJ2-2)
CASSPGGGELFF

SEQ ID NO: 442909 - protein, 16 aa, Homo sapiens
  CDR3 for alpha chain variable domain of TCR clone 221455 (TRAV30, TRAJ24)
CGTEIVDADSWGKSKF

SEQ ID NO: 442910 - protein, 14 aa, Homo sapiens
  CDR3 for beta chain variable domain of TCR clone 221455 (TRBV7-2, TRBJ1-2)
CASSQTGSTYGYTF

SEQ ID NO: 442911 - protein, 16 aa, Homo sapiens
  CDR3 for alpha chain variable domain of TCR clone 221456 (TRAV8-3, TRAJ28)
CAVGATLGLGVTNLLS

SEQ ID NO: 442912 - protein, 14 aa, Homo sapiens
  CDR3 for beta chain variable domain of TCR clone 221456 (TRBV7-2, TRBJ2-1)
CASSLGVGYNEQFF

SEQ ID NO: 442913 - protein, 12 aa, Homo sapiens
  CDR3 for alpha chain variable domain of TCR clone 221457 (TRAV13-2, TRAJ23)
CAERHRGGKLIF

SEQ ID NO: 442914 - protein, 15 aa, Homo sapiens
  CDR3 for beta chain variable domain of TCR clone 221457 (TRBV15, TRBJ2-3)
CATSRDPRGTDTQYF

SEQ ID NO: 442915 - protein, 16 aa, Homo sapiens
  CDR3 for alpha chain variable domain of TCR clone 221458 (TRAV3, TRAJ37)
CAVRGKGSGNTGKLIF

SEQ ID NO: 442916 - protein, 15 aa, Homo sapiens
  CDR3 for beta chain variable domain of TCR clone 221458 (TRBV12-4, TRBJ2-5)
CASSPPTGLQETQYF

SEQ ID NO: 442917 - protein, 15 aa, Homo sapiens
  CDR3 for alpha chain variable domain of TCR clone 221459 (TRAV12-1, TRAJ40)
CVVNRDTSGTYKYIF

SEQ ID NO: 442918 - protein, 12 aa, Homo sapiens
  CDR3 for beta chain variable domain of TCR clone 221459 (TRBV3-1, TRBJ2-1)
CASSQGSSGQFF

SEQ ID NO: 442919 - protein, 12 aa, Homo sapiens
  CDR3 for alpha chain variable domain of TCR clone 221460 (TRAV13-2, TRAJ23)
CVESQRGGRLIF

SEQ ID NO: 442920 - protein, 14 aa, Homo sapiens
  CDR3 for beta chain variable domain of TCR clone 221460 (TRBV20-1, TRBJ2-4)
CSASGRVGENIQYF

SEQ ID NO: 442921 - protein, 15 aa, Homo sapiens
  CDR3 for alpha chain variable domain of TCR clone 221461 (TRAV3, TRAJ36)
CAVRASQTGANNLFF

SEQ ID NO: 442922 - protein, 17 aa, Homo sapiens
  CDR3 for beta chain variable domain of TCR clone 221461 (TRBV18, TRBJ2-1)
CASSKGLSGGADNEQFF

SEQ ID NO: 442923 - protein, 10 aa, Homo sapiens
  CDR3 for alpha chain variable domain of TCR clone 221462 (TRAV1-2, TRAJ34)
CAVNTDKLIF

SEQ ID NO: 442924 - protein, 13 aa, Homo sapiens
  CDR3 for beta chain variable domain of TCR clone 221462 (TRBV7-2, TRBJ2-2)
CASSLAVTGELFF

SEQ ID NO: 442925 - protein, 14 aa, Homo sapiens
  CDR3 for alpha chain variable domain of TCR clone 221463 (TRAV3, TRAJ20)
CAVPPAPNDYKLSF

SEQ ID NO: 442926 - protein, 13 aa, Homo sapiens
  CDR3 for beta chain variable domain of TCR clone 221463 (TRBV15, TRBJ1-2)
CAASRVDARSPVF

SEQ ID NO: 442927 - protein, 12 aa, Homo sapiens
  CDR3 for alpha chain variable domain of TCR clone 221464 (TRAV26-1, TRAJ26)
CIVFIYGQNFVF

SEQ ID NO: 442928 - protein, 16 aa, Homo sapiens
  CDR3 for beta chain variable domain of TCR clone 221464 (TRBV28, TRBJ2-1)
CASSSPEYPRDNEQFF

SEQ ID NO: 442929 - protein, 15 aa, Homo sapiens
  CDR3 for alpha chain variable domain of TCR clone 221465 (TRAV27, TRAJ38)
CAGRFNAGNNRKLSW

SEQ ID NO: 442930 - protein, 13 aa, Homo sapiens
  CDR3 for beta chain variable domain of TCR clone 221465 (TRBV20-1, TRBJ2-1)
TSGALPPGNEQFF

SEQ ID NO: 442931 - protein, 15 aa, Homo sapiens
  CDR3 for alpha chain variable domain of TCR clone 221466 (TRAV8-4, TRAJ29)
CAVSEDFRGNTPLVF

SEQ ID NO: 442932 - protein, 12 aa, Homo sapiens
  CDR3 for beta chain variable domain of TCR clone 221466 (TRBV14, TRBJ2-7)
CASSYLKGEQYI

SEQ ID NO: 442933 - protein, 14 aa, Homo sapiens
  CDR3 for alpha chain variable domain of TCR clone 221467 (TRAV1-2, TRAJ16)
CAVNRFSDGQKLLF

SEQ ID NO: 442934 - protein, 15 aa, Homo sapiens
  CDR3 for beta chain variable domain of TCR clone 221467 (TRBV2, TRBJ2-1)
CASSEARSAYNEQFF

SEQ ID NO: 442935 - protein, 13 aa, Homo sapiens
  CDR3 for alpha chain variable domain of TCR clone 221468 (TRAV3, TRAJ21)
CAVREPDFNKFYF

SEQ ID NO: 442936 - protein, 15 aa, Homo sapiens
  CDR3 for beta chain variable domain of TCR clone 221468 (TRBV7-2, TRBJ2-1)
CASSFQADEYNEQFF

SEQ ID NO: 442937 - protein, 16 aa, Homo sapiens
  CDR3 for alpha chain variable domain of TCR clone 221469 (TRAV9-2, TRAJ10)
CALSEGGTGGGNKLTF

SEQ ID NO: 442938 - protein, 16 aa, Homo sapiens
  CDR3 for beta chain variable domain of TCR clone 221469 (TRBV7-2, TRBJ1-4)
CASSPVGGFDREKLFF

SEQ ID NO: 442939 - protein, 16 aa, Homo sapiens
  CDR3 for alpha chain variable domain of TCR clone 221470 (TRAV30, TRAJ24)
CGTEIVDADSWGKFQF

SEQ ID NO: 442940 - protein, 18 aa, Homo sapiens
  CDR3 for beta chain variable domain of TCR clone 221470 (TRBV3-1, TRBJ2-1)
CASSQDLPGRPLFDEQFF

SEQ ID NO: 442941 - protein, 11 aa, Homo sapiens
  CDR3 for alpha chain variable domain of TCR clone 221471 (TRAV21, TRAJ11)
CAVNGYSTLTF

SEQ ID NO: 442942 - protein, 15 aa, Homo sapiens
  CDR3 for beta chain variable domain of TCR clone 221471 (TRBV2, TRBJ2-3)
CASSDFEKATDTQYF

SEQ ID NO: 442943 - protein, 14 aa, Homo sapiens
  CDR3 for alpha chain variable domain of TCR clone 221472 (TRAV16, TRAJ54)
CALRLIQGAQKLVF

SEQ ID NO: 442944 - protein, 17 aa, Homo sapiens
  CDR3 for beta chain variable domain of TCR clone 221472 (TRBV11-2, TRBJ2-4)
CASSSVGPGGHRNIQYF

SEQ ID NO: 442945 - protein, 12 aa, Homo sapiens
  CDR3 for alpha chain variable domain of TCR clone 221473 (TRAV21, TRAJ33)
CAKMDSNYQLIW

SEQ ID NO: 442946 - protein, 14 aa, Homo sapiens
  CDR3 for beta chain variable domain of TCR clone 221473 (TRBV2, TRBJ2-7)
CAISLTAGGYEQYF

SEQ ID NO: 442947 - protein, 15 aa, Homo sapiens
  CDR3 for alpha chain variable domain of TCR clone 221474 (TRAV8-6, TRAJ38)
CTVSSNAGNNRKLIW

SEQ ID NO: 442948 - protein, 14 aa, Homo sapiens
  CDR3 for beta chain variable domain of TCR clone 221474 (TRBV14, TRBJ2-1)
CASSQVQGRGEQFF

SEQ ID NO: 442949 - protein, 16 aa, Homo sapiens
  CDR3 for alpha chain variable domain of TCR clone 221475 (TRAV14/DV4, TRAJ54)
CAMREGRIQGAQKLVF

SEQ ID NO: 442950 - protein, 15 aa, Homo sapiens
  CDR3 for beta chain variable domain of TCR clone 221475 (TRBV5-7, TRBJ1-5)
CASSYGKLWDQPQHF

SEQ ID NO: 442951 - protein, 14 aa, Homo sapiens
  CDR3 for alpha chain variable domain of TCR clone 221476 (TRAV12-2, TRAJ13)
CAVKKTGGYQKVNF

SEQ ID NO: 442952 - protein, 13 aa, Homo sapiens
  CDR3 for beta chain variable domain of TCR clone 221476 (TRBV28, TRBJ2-3)
CASSLPQVDTQYF

SEQ ID NO: 442953 - protein, 14 aa, Homo sapiens
  CDR3 for alpha chain variable domain of TCR clone 221477 (TRAV17, TRAJ35)
CATDRPGFGNVLHC

SEQ ID NO: 442954 - protein, 17 aa, Homo sapiens
  CDR3 for beta chain variable domain of TCR clone 221477 (TRBV7-3, TRBJ2-5)
CASSLGSGRSGSETQYF

SEQ ID NO: 442955 - protein, 14 aa, Homo sapiens
  CDR3 for alpha chain variable domain of TCR clone 221478 (TRAV3, TRAJ40)
CSVRDRRGTYKYIF

SEQ ID NO: 442956 - protein, 15 aa, Homo sapiens
  CDR3 for beta chain variable domain of TCR clone 221478 (TRBV11-1, TRBJ1-3)
CASTDPRAFGNTIYF

SEQ ID NO: 442957 - protein, 15 aa, Homo sapiens
  CDR3 for alpha chain variable domain of TCR clone 221479 (TRAV8-3, TRAJ45)
CASSYSGGGADGLTL

SEQ ID NO: 442958 - protein, 16 aa, Homo sapiens
  CDR3 for beta chain variable domain of TCR clone 221479 (TRBV5-1, TRBJ1-1)
CASSSEGNSLNTEAFF

SEQ ID NO: 442959 - protein, 12 aa, Homo sapiens
  CDR3 for alpha chain variable domain of TCR clone 221480 (TRAV35, TRAJ39)
LAPNNAGNMLTF

SEQ ID NO: 442960 - protein, 13 aa, Homo sapiens
  CDR3 for beta chain variable domain of TCR clone 221480 (TRBV9, TRBJ2-1)
CASSVGQGGEQFF

SEQ ID NO: 442961 - protein, 15 aa, Homo sapiens
  CDR3 for alpha chain variable domain of TCR clone 221481 (TRAV3, TRAJ22)
CAVRDRGGYARQMPF

SEQ ID NO: 442962 - protein, 13 aa, Homo sapiens
  CDR3 for beta chain variable domain of TCR clone 221481 (TRBV2, TRBJ1-5)
CATAGPGNQPQHF

SEQ ID NO: 442963 - protein, 14 aa, Homo sapiens
  CDR3 for alpha chain variable domain of TCR clone 221482 (TRAV8-2, TRAJ24)
CVSDRTDSWGKLQF

SEQ ID NO: 442964 - protein, 11 aa, Homo sapiens
  CDR3 for beta chain variable domain of TCR clone 221482 (TRBV20-1, TRBJ1-2)
CSVQGAGGYTF

SEQ ID NO: 442965 - protein, 11 aa, Homo sapiens
  CDR3 for alpha chain variable domain of TCR clone 221483 (TRAV21, TRAJ34)
CAHYNTDKLIF

SEQ ID NO: 442966 - protein, 12 aa, Homo sapiens
  CDR3 for beta chain variable domain of TCR clone 221483 (TRBV7-6, TRBJ1-2)
CGSLVADYGYTF

SEQ ID NO: 442967 - protein, 15 aa, Homo sapiens
  CDR3 for alpha chain variable domain of TCR clone 221484 (TRAV21, TRAJ24)
CAARSSTDSRGKLQV

SEQ ID NO: 442968 - protein, 13 aa, Homo sapiens
  CDR3 for beta chain variable domain of TCR clone 221484 (TRBV11-2, TRBJ2-5)
CASSSTGEETQYF

SEQ ID NO: 442969 - protein, 14 aa, Homo sapiens
  CDR3 for alpha chain variable domain of TCR clone 221485 (TRAV29/DV5, TRAJ11)
CAAISNSGYSTLTF

SEQ ID NO: 442970 - protein, 15 aa, Homo sapiens
  CDR3 for beta chain variable domain of TCR clone 221485 (TRBV28, TRBJ2-1)
CPSSLSGQGFDEQFF

SEQ ID NO: 442971 - protein, 11 aa, Homo sapiens
  CDR3 for alpha chain variable domain of TCR clone 221486 (TRAV2, TRAJ33)
CAVDSNYQLIW

SEQ ID NO: 442972 - protein, 14 aa, Homo sapiens
  CDR3 for beta chain variable domain of TCR clone 221486 (TRBV12-4, TRBJ1-1)
CASRPGQGRTEAFF

SEQ ID NO: 442973 - protein, 13 aa, Homo sapiens
  CDR3 for alpha chain variable domain of TCR clone 221487 (TRAV39, TRAJ33)
CAANPDSNYQLIW

SEQ ID NO: 442974 - protein, 15 aa, Homo sapiens
  CDR3 for beta chain variable domain of TCR clone 221487 (TRBV6-3, TRBJ2-7)
CASSSPGTVFYEQYF

SEQ ID NO: 442975 - protein, 14 aa, Homo sapiens
  CDR3 for alpha chain variable domain of TCR clone 221488 (TRAV1-2, TRAJ16)
CAVNRFSDGQMLLF

SEQ ID NO: 442976 - protein, 12 aa, Homo sapiens
  CDR3 for beta chain variable domain of TCR clone 221488 (TRBV7-9, TRBJ2-7)
CASSLEGYEQYF

SEQ ID NO: 442977 - protein, 23 aa, Homo sapiens
  CDR3 for alpha chain variable domain of TCR clone 221489 (TRAV26-1, )
CIADNAGNEHIQNPDPAVYQLRD

SEQ ID NO: 442978 - protein, 13 aa, Homo sapiens
  CDR3 for beta chain variable domain of TCR clone 221489 (TRBV20-1, TRBJ1-1)
CSARGVGNTEAFF

SEQ ID NO: 442979 - protein, 13 aa, Homo sapiens
  CDR3 for alpha chain variable domain of TCR clone 221490 (TRAV2, TRAJ15)
CAVPSQAGTALIF

SEQ ID NO: 442980 - protein, 17 aa, Homo sapiens
  CDR3 for beta chain variable domain of TCR clone 221490 (TRBV20-1, TRBJ2-2)
CSASGSGQGGLTGELFF

SEQ ID NO: 442981 - protein, 10 aa, Homo sapiens
  CDR3 for alpha chain variable domain of TCR clone 221491 (TRAV36/DV7, TRAJ49)
CALTGNQFYF

SEQ ID NO: 442982 - protein, 13 aa, Homo sapiens
  CDR3 for beta chain variable domain of TCR clone 221491 (TRBV11-2, TRBJ2-5)
CASSFSSQETQYF

SEQ ID NO: 442983 - protein, 13 aa, Homo sapiens
  CDR3 for alpha chain variable domain of TCR clone 221492 (TRAV12-1, TRAJ34)
CVVTGYNTDKLIF

SEQ ID NO: 442984 - protein, 17 aa, Homo sapiens
  CDR3 for beta chain variable domain of TCR clone 221492 (TRBV7-8, TRBJ2-6)
CASSAGTGGAGANVLTF

SEQ ID NO: 442985 - protein, 12 aa, Homo sapiens
  CDR3 for alpha chain variable domain of TCR clone 221493 (TRAV13-2, TRAJ23)
CAERHRGRKLIF

SEQ ID NO: 442986 - protein, 18 aa, Homo sapiens
  CDR3 for beta chain variable domain of TCR clone 221493 (TRBV11-2, TRBJ2-3)
CASSLGGASRGAPNTQYF

SEQ ID NO: 442987 - protein, 14 aa, Homo sapiens
  CDR3 for alpha chain variable domain of TCR clone 221494 (TRAV26-1, TRAJ34)
CIVRVAYNTDNLIF

SEQ ID NO: 442988 - protein, 14 aa, Homo sapiens
  CDR3 for beta chain variable domain of TCR clone 221494 (TRBV12-5, TRBJ2-5)
CASGSRTHQETQYF

SEQ ID NO: 442989 - protein, 14 aa, Homo sapiens
  CDR3 for alpha chain variable domain of TCR clone 221495 (TRAV26-1, TRAJ38)
CIADNAGNNRKLIW

SEQ ID NO: 442990 - protein, 17 aa, Homo sapiens
  CDR3 for beta chain variable domain of TCR clone 221495 (TRBV13, TRBJ2-3)
CASSPSRVAGGRNTQYF

SEQ ID NO: 442991 - protein, 12 aa, Homo sapiens
  CDR3 for alpha chain variable domain of TCR clone 221496 (TRAV13-2, TRAJ23)
CAERHRGGKLIF

SEQ ID NO: 442992 - protein, 14 aa, Homo sapiens
  CDR3 for beta chain variable domain of TCR clone 221496 (TRBV19, TRBJ2-1)
CASPTVVLSGEQFF

SEQ ID NO: 442993 - protein, 15 aa, Homo sapiens
  CDR3 for alpha chain variable domain of TCR clone 221497 (TRAV12-2, TRAJ53)
CAVNGGGGSSHKLTF

SEQ ID NO: 442994 - protein, 13 aa, Homo sapiens
  CDR3 for beta chain variable domain of TCR clone 221497 (TRBV3-1, TRBJ1-1)
CASSPGVITEAFF

SEQ ID NO: 442995 - protein, 11 aa, Homo sapiens
  CDR3 for alpha chain variable domain of TCR clone 221498 (TRAV12-3, TRAJ41)
CAMNAREALNF

SEQ ID NO: 442996 - protein, 13 aa, Homo sapiens
  CDR3 for beta chain variable domain of TCR clone 221498 (TRBV4-1, TRBJ1-1)
CASSRKMNTEAFF

SEQ ID NO: 442997 - protein, 14 aa, Homo sapiens
  CDR3 for alpha chain variable domain of TCR clone 221499 (TRAV17, TRAJ39)
CATDPVRAGNMLTF

SEQ ID NO: 442998 - protein, 13 aa, Homo sapiens
  CDR3 for beta chain variable domain of TCR clone 221499 (TRBV7-9, TRBJ2-3)
CASSPGSTGTQYF

SEQ ID NO: 442999 - protein, 14 aa, Homo sapiens
  CDR3 for alpha chain variable domain of TCR clone 221500 (TRAV1-2, TRAJ8)
CAVREDTGFQKLEF

SEQ ID NO: 443000 - protein, 14 aa, Homo sapiens
  CDR3 for beta chain variable domain of TCR clone 221500 (TRBV5-4, TRBJ1-1)
CASSLDSRRDEAFF

SEQ ID NO: 443001 - protein, 13 aa, Homo sapiens
  CDR3 for alpha chain variable domain of TCR clone 221501 (TRAV3, TRAJ29)
CAVRDIIDTPLVF

SEQ ID NO: 443002 - protein, 16 aa, Homo sapiens
  CDR3 for beta chain variable domain of TCR clone 221501 (TRBV5-1, TRBJ2-3)
CASSLGLAVYTDTQYF

SEQ ID NO: 443003 - protein, 14 aa, Homo sapiens
  CDR3 for alpha chain variable domain of TCR clone 221502 (TRAV12-2, TRAJ17)
CAVLFKAAGNKLTF

SEQ ID NO: 443004 - protein, 14 aa, Homo sapiens
  CDR3 for beta chain variable domain of TCR clone 221502 (TRBV19, TRBJ2-1)
CARPTFVLSGEQFF

SEQ ID NO: 443005 - protein, 17 aa, Homo sapiens
  CDR3 for alpha chain variable domain of TCR clone 221503 (TRAV8-3, TRAJ42)
CAVGNPEERGSQGNLIF

SEQ ID NO: 443006 - protein, 19 aa, Homo sapiens
  CDR3 for beta chain variable domain of TCR clone 221503 (TRBV7-9, TRBJ2-6)
CASSLESATVLSGANVLTF

SEQ ID NO: 443007 - protein, 17 aa, Homo sapiens
  CDR3 for alpha chain variable domain of TCR clone 221504 (TRAV8-6, TRAJ8)
CAVKEGIESTGFQKLVF

SEQ ID NO: 443008 - protein, 12 aa, Homo sapiens
  CDR3 for beta chain variable domain of TCR clone 221504 (TRBV19, TRBJ1-4)
CASKDWPGGLFF

SEQ ID NO: 443009 - protein, 12 aa, Homo sapiens
  CDR3 for alpha chain variable domain of TCR clone 221505 (TRAV30, TRAJ43)
CGPEERGNDMRF

SEQ ID NO: 443010 - protein, 14 aa, Homo sapiens
  CDR3 for beta chain variable domain of TCR clone 221505 (TRBV12-5, TRBJ2-5)
CASGSRTHQETQYF

SEQ ID NO: 443011 - protein, 15 aa, Homo sapiens
  CDR3 for alpha chain variable domain of TCR clone 221506 (TRAV25, TRAJ52)
CAGRPGGTSYGKLTF

SEQ ID NO: 443012 - protein, 17 aa, Homo sapiens
  CDR3 for beta chain variable domain of TCR clone 221506 (TRBV7-8, TRBJ2-6)
CASSSGTGGAGANVLTF

SEQ ID NO: 443013 - protein, 16 aa, Homo sapiens
  CDR3 for alpha chain variable domain of TCR clone 221507 (TRAV30, TRAJ24)
CGTEIVDVDSWGKFQF

SEQ ID NO: 443014 - protein, 16 aa, Homo sapiens
  CDR3 for beta chain variable domain of TCR clone 221507 (TRBV20-1, TRBJ1-1)
CSARALTQGMNTEAFF

SEQ ID NO: 443015 - protein, 13 aa, Homo sapiens
  CDR3 for alpha chain variable domain of TCR clone 221508 (TRAV8-3, TRAJ36)
CAVGATGANNLFF

SEQ ID NO: 443016 - protein, 14 aa, Homo sapiens
  CDR3 for beta chain variable domain of TCR clone 221508 (TRBV12-4, TRBJ1-2)
CASSPLGTVGGYTF

SEQ ID NO: 443017 - protein, 18 aa, Homo sapiens
  CDR3 for alpha chain variable domain of TCR clone 221509 (TRAV21, TRAJ52)
CAVRPSPAGGTSYGKLTF

SEQ ID NO: 443018 - protein, 14 aa, Homo sapiens
  CDR3 for beta chain variable domain of TCR clone 221509 (TRBV2, TRBJ1-6)
CASSESRNNSPLHF

SEQ ID NO: 443019 - protein, 12 aa, Homo sapiens
  CDR3 for alpha chain variable domain of TCR clone 221510 (TRAV12-2, TRAJ10)
WGVTGGGNKLTF

SEQ ID NO: 443020 - protein, 16 aa, Homo sapiens
  CDR3 for beta chain variable domain of TCR clone 221510 (TRBV12-4, TRBJ1-5)
CASSRPVGGSNQPQHF

SEQ ID NO: 443021 - protein, 16 aa, Homo sapiens
  CDR3 for alpha chain variable domain of TCR clone 221511 (TRAV12-3, TRAJ53)
CAMSPGSGGGNYKLTF

SEQ ID NO: 443022 - protein, 12 aa, Homo sapiens
  CDR3 for beta chain variable domain of TCR clone 221511 (TRBV11-2, TRBJ2-2)
CASSLGGGELFF

SEQ ID NO: 443023 - protein, 13 aa, Homo sapiens
  CDR3 for alpha chain variable domain of TCR clone 221512 (TRAV2, TRAJ40)
CAVVTSGTYNYNF

SEQ ID NO: 443024 - protein, 14 aa, Homo sapiens
  CDR3 for beta chain variable domain of TCR clone 221512 (TRBV19, TRBJ2-1)
CASPTFVLSGEQFF

SEQ ID NO: 443025 - protein, 14 aa, Homo sapiens
  CDR3 for alpha chain variable domain of TCR clone 221513 (TRAV1-2, TRAJ16)
CAVNRFSDCQKLLF

SEQ ID NO: 443026 - protein, 14 aa, Homo sapiens
  CDR3 for beta chain variable domain of TCR clone 221513 (TRBV7-2, TRBJ2-7)
CASSLYPGRYEQYF

SEQ ID NO: 443027 - protein, 17 aa, Homo sapiens
  CDR3 for alpha chain variable domain of TCR clone 221514 (TRAV13-1, TRAJ31)
CAPRDRLMFGDGTQLVV

SEQ ID NO: 443028 - protein, 14 aa, Homo sapiens
  CDR3 for beta chain variable domain of TCR clone 221514 (TRBV20-1, TRBJ2-7)
CSAKRGRSSYEQYF

SEQ ID NO: 443029 - protein, 17 aa, Homo sapiens
  CDR3 for alpha chain variable domain of TCR clone 221515 (TRAV3, TRAJ38)
CAVRDCLNAGNNRKLIW

SEQ ID NO: 443030 - protein, 14 aa, Homo sapiens
  CDR3 for beta chain variable domain of TCR clone 221515 (TRBV12-5, TRBJ2-5)
CASGSRTHQETQCF

SEQ ID NO: 443031 - protein, 13 aa, Homo sapiens
  CDR3 for alpha chain variable domain of TCR clone 221516 (TRAV16, TRAJ58)
CALSIPSGPRLTF

SEQ ID NO: 443032 - protein, 13 aa, Homo sapiens
  CDR3 for beta chain variable domain of TCR clone 221516 (TRBV4-2, TRBJ1-1)
CASSQAGNTEAFF

SEQ ID NO: 443033 - protein, 16 aa, Homo sapiens
  CDR3 for alpha chain variable domain of TCR clone 221517 (TRAV30, TRAJ24)
CGTEIVDADSWGKFQF

SEQ ID NO: 443034 - protein, 18 aa, Homo sapiens
  CDR3 for beta chain variable domain of TCR clone 221517 (TRBV7-2, TRBJ2-7)
CASSLAQGLRDSSYEQYF

SEQ ID NO: 443035 - protein, 13 aa, Homo sapiens
  CDR3 for alpha chain variable domain of TCR clone 221518 (TRAV13-2, TRAJ22)
CLGWISSARPLTF

SEQ ID NO: 443036 - protein, 15 aa, Homo sapiens
  CDR3 for beta chain variable domain of TCR clone 221518 (TRBV7-2, TRBJ2-3)
CASSSTGLETDTQYF

SEQ ID NO: 443037 - protein, 14 aa, Homo sapiens
  CDR3 for alpha chain variable domain of TCR clone 221519 (TRAV1-2, TRAJ16)
CAVNRFSDGQKLLF

SEQ ID NO: 443038 - protein, 15 aa, Homo sapiens
  CDR3 for beta chain variable domain of TCR clone 221519 (TRBV4-2, TRBJ1-1)
CASSQRGAGDTEAFF

SEQ ID NO: 443039 - protein, 22 aa, Homo sapiens
  CDR3 for alpha chain variable domain of TCR clone 221520 (TRAV27, )
CAARRNDGNNHIQNPDPAVYQL

SEQ ID NO: 443040 - protein, 12 aa, Homo sapiens
  CDR3 for beta chain variable domain of TCR clone 221520 (TRBV11-2, TRBJ2-2)
CASSLGGGELFF

SEQ ID NO: 443041 - protein, 12 aa, Homo sapiens
  CDR3 for alpha chain variable domain of TCR clone 221521 (TRAV38-1, TRAJ28)
CGSGAGCYQLTF

SEQ ID NO: 443042 - protein, 17 aa, Homo sapiens
  CDR3 for beta chain variable domain of TCR clone 221521 (TRBV7-8, TRBJ1-5)
CASSRRDRAPLGQPQHF

SEQ ID NO: 443043 - protein, 20 aa, Homo sapiens
  CDR3 for alpha chain variable domain of TCR clone 221522 (TRAV27, TRAJ41)
CAVRTQIPDIQNPDPAAYQL

SEQ ID NO: 443044 - protein, 16 aa, Homo sapiens
  CDR3 for beta chain variable domain of TCR clone 221522 (TRBV5-1, TRBJ2-3)
CASSLGLAVYTDTQYF

SEQ ID NO: 443045 - protein, 13 aa, Homo sapiens
  CDR3 for alpha chain variable domain of TCR clone 221523 (TRAV8-3, TRAJ36)
CAVGATGANNLFF

SEQ ID NO: 443046 - protein, 17 aa, Homo sapiens
  CDR3 for beta chain variable domain of TCR clone 221523 (TRBV13, TRBJ2-3)
CASSLSRVAWGRNTQYF

SEQ ID NO: 443047 - protein, 14 aa, Homo sapiens
  CDR3 for alpha chain variable domain of TCR clone 221524 (TRAV8-1, TRAJ34)
CAVNPPYNTDKLIF

SEQ ID NO: 443048 - protein, 15 aa, Homo sapiens
  CDR3 for beta chain variable domain of TCR clone 221524 (TRBV7-9, TRBJ2-7)
CASSPGGGLTYEQYF

SEQ ID NO: 443049 - protein, 17 aa, Homo sapiens
  CDR3 for alpha chain variable domain of TCR clone 221525 (TRAV3, TRAJ42)
CAVRDRDYGGSQGNLIF

SEQ ID NO: 443050 - protein, 14 aa, Homo sapiens
  CDR3 for beta chain variable domain of TCR clone 221525 (TRBV20-1, TRBJ1-1)
CSAQTRIGGTEAFF

SEQ ID NO: 443051 - protein, 11 aa, Homo sapiens
  CDR3 for alpha chain variable domain of TCR clone 221526 (TRAV21, TRAJ34)
CAVTNTDKLIF

SEQ ID NO: 443052 - protein, 16 aa, Homo sapiens
  CDR3 for beta chain variable domain of TCR clone 221526 (TRBV12-5, TRBJ2-5)
CASGPWTSGNQETQYF

SEQ ID NO: 443053 - protein, 14 aa, Homo sapiens
  CDR3 for alpha chain variable domain of TCR clone 221527 (TRAV38-1, TRAJ40)
CALRPNSGTYKYIF

SEQ ID NO: 443054 - protein, 15 aa, Homo sapiens
  CDR3 for beta chain variable domain of TCR clone 221527 (TRBV20-1, TRBJ2-7)
CSARDRVSGMDEQYF

SEQ ID NO: 443055 - protein, 15 aa, Homo sapiens
  CDR3 for alpha chain variable domain of TCR clone 221528 (TRAV12-3, TRAJ6)
CAMSATTGGSYIPPF

SEQ ID NO: 443056 - protein, 16 aa, Homo sapiens
  CDR3 for beta chain variable domain of TCR clone 221528 (TRBV20-1, TRBJ1-2)
CSASMGQGVANYGYNF

SEQ ID NO: 443057 - protein, 14 aa, Homo sapiens
  CDR3 for alpha chain variable domain of TCR clone 221529 (TRAV14/DV4, TRAJ54)
CAMREPPGAQKLVF

SEQ ID NO: 443058 - protein, 15 aa, Homo sapiens
  CDR3 for beta chain variable domain of TCR clone 221529 (TRBV5-1, TRBJ2-7)
CASSLNGGPAREQYF

SEQ ID NO: 443059 - protein, 14 aa, Homo sapiens
  CDR3 for alpha chain variable domain of TCR clone 221530 (TRAV12-2, TRAJ45)
CALPERGGADGLTF

SEQ ID NO: 443060 - protein, 13 aa, Homo sapiens
  CDR3 for beta chain variable domain of TCR clone 221530 (TRBV7-9, TRBJ2-1)
CASSLDVGNEQFF

SEQ ID NO: 443061 - protein, 13 aa, Homo sapiens
  CDR3 for alpha chain variable domain of TCR clone 221531 (TRAV2, TRAJ40)
CAVVTSGTYKYIF

SEQ ID NO: 443062 - protein, 16 aa, Homo sapiens
  CDR3 for beta chain variable domain of TCR clone 221531 (TRBV7-9, TRBJ1-3)
CASSSGAGSSGNTIYF

SEQ ID NO: 443063 - protein, 14 aa, Homo sapiens
  CDR3 for alpha chain variable domain of TCR clone 221532 (TRAV26-1, TRAJ15)
CIVRANQAGTALIF

SEQ ID NO: 443064 - protein, 16 aa, Homo sapiens
  CDR3 for beta chain variable domain of TCR clone 221532 (TRBV20-1, TRBJ1-4)
CSAIGGPRGANEELFF

SEQ ID NO: 443065 - protein, 13 aa, Homo sapiens
  CDR3 for alpha chain variable domain of TCR clone 221533 (TRAV8-3, TRAJ28)
CAEGAVGSYKLTF

SEQ ID NO: 443066 - protein, 14 aa, Homo sapiens
  CDR3 for beta chain variable domain of TCR clone 221533 (TRBV7-2, TRBJ2-7)
CASRSQGAAYEQYF

SEQ ID NO: 443067 - protein, 12 aa, Homo sapiens
  CDR3 for alpha chain variable domain of TCR clone 221534 (TRAV12-1, TRAJ26)
CALWSEFCLCSR

SEQ ID NO: 443068 - protein, 14 aa, Homo sapiens
  CDR3 for beta chain variable domain of TCR clone 221534 (TRBV5-4, TRBJ2-1)
CASSLAQGLNEQFF

SEQ ID NO: 443069 - protein, 14 aa, Homo sapiens
  CDR3 for alpha chain variable domain of TCR clone 221535 (TRAV12-2, TRAJ44)
CAVNKAGTASKLTF

SEQ ID NO: 443070 - protein, 14 aa, Homo sapiens
  CDR3 for beta chain variable domain of TCR clone 221535 (TRBV4-1, TRBJ2-7)
CASSQEGKGYEQYF

SEQ ID NO: 443071 - protein, 17 aa, Homo sapiens
  CDR3 for alpha chain variable domain of TCR clone 221536 (TRAV1-2, TRAJ27)
CAVRDKTGDTNAGKSTF

SEQ ID NO: 443072 - protein, 16 aa, Homo sapiens
  CDR3 for beta chain variable domain of TCR clone 221536 (TRBV4-1, TRBJ2-3)
CASSQSTSGAEDTQYF

SEQ ID NO: 443073 - protein, 14 aa, Homo sapiens
  CDR3 for alpha chain variable domain of TCR clone 221537 (TRAV35, TRAJ33)
CWPRGRDSNYQLIW

SEQ ID NO: 443074 - protein, 16 aa, Homo sapiens
  CDR3 for beta chain variable domain of TCR clone 221537 (TRBV28, TRBJ1-4)
CASSPPYRGRSEKLFF

SEQ ID NO: 443075 - protein, 14 aa, Homo sapiens
  CDR3 for alpha chain variable domain of TCR clone 221538 (TRAV12-2, TRAJ17)
CAVRFKAAGNKLTF

SEQ ID NO: 443076 - protein, 14 aa, Homo sapiens
  CDR3 for beta chain variable domain of TCR clone 221538 (TRBV7-7, TRBJ2-2)
CATRQDSDTGELFF

SEQ ID NO: 443077 - protein, 16 aa, Homo sapiens
  CDR3 for alpha chain variable domain of TCR clone 221539 (TRAV38-1, TRAJ32)
CAFMKGGGGATNKLIF

SEQ ID NO: 443078 - protein, 13 aa, Homo sapiens
  CDR3 for beta chain variable domain of TCR clone 221539 (TRBV20-1, TRBJ2-5)
CSAREAFQETQYC

SEQ ID NO: 443079 - protein, 14 aa, Homo sapiens
  CDR3 for alpha chain variable domain of TCR clone 221540 (TRAV3, TRAJ40)
CAVRDRRGTYKYIF

SEQ ID NO: 443080 - protein, 10 aa, Homo sapiens
  CDR3 for beta chain variable domain of TCR clone 221540 (TRBV2, TRBJ2-5)
CASSAATQYF

SEQ ID NO: 443081 - protein, 16 aa, Homo sapiens
  CDR3 for alpha chain variable domain of TCR clone 221541 (TRAV1-2, TRAJ10)
CAVRGVLTVGGNKLTF

SEQ ID NO: 443082 - protein, 12 aa, Homo sapiens
  CDR3 for beta chain variable domain of TCR clone 221541 (TRBV7-8, TRBJ2-7)
FASSLGDREQYF

SEQ ID NO: 443083 - protein, 15 aa, Homo sapiens
  CDR3 for alpha chain variable domain of TCR clone 221542 (TRAV20, TRAJ53)
CAVQASGGSNYKLTF

SEQ ID NO: 443084 - protein, 15 aa, Homo sapiens
  CDR3 for beta chain variable domain of TCR clone 221542 (TRBV6-6, TRBJ2-7)
CASSYSYGGSYEQYF

SEQ ID NO: 443085 - protein, 10 aa, Homo sapiens
  CDR3 for alpha chain variable domain of TCR clone 221543 (TRAV39, TRAJ49)
CAVAGNQFYF

SEQ ID NO: 443086 - protein, 13 aa, Homo sapiens
  CDR3 for beta chain variable domain of TCR clone 221543 (TRBV20-1, TRBJ1-1)
CSAPLGGGTEAFF

SEQ ID NO: 443087 - protein, 13 aa, Homo sapiens
  CDR3 for alpha chain variable domain of TCR clone 221544 (TRAV1-2, TRAJ9)
CAALNTGGLKTIF

SEQ ID NO: 443088 - protein, 13 aa, Homo sapiens
  CDR3 for beta chain variable domain of TCR clone 221544 (TRBV19, TRBJ1-2)
CASSVPGQDGYAF

SEQ ID NO: 443089 - protein, 18 aa, Homo sapiens
  CDR3 for alpha chain variable domain of TCR clone 221545 (TRAV21, TRAJ52)
CAVRPSPAGGTSYGKLTF

SEQ ID NO: 443090 - protein, 15 aa, Homo sapiens
  CDR3 for beta chain variable domain of TCR clone 221545 (TRBV5-1, TRBJ1-1)
CASSWTVPRNTEAFF

SEQ ID NO: 443091 - protein, 14 aa, Homo sapiens
  CDR3 for alpha chain variable domain of TCR clone 221546 (TRAV12-3, TRAJ10)
SHLPLTGGGNKLTF

SEQ ID NO: 443092 - protein, 15 aa, Homo sapiens
  CDR3 for beta chain variable domain of TCR clone 221546 (TRBV10-3, TRBJ1-3)
CAISDSQGDGNTIYF

SEQ ID NO: 443093 - protein, 14 aa, Homo sapiens
  CDR3 for alpha chain variable domain of TCR clone 221547 (TRAV29/DV5, TRAJ49)
CAASLSNTGNQFYF

SEQ ID NO: 443094 - protein, 13 aa, Homo sapiens
  CDR3 for beta chain variable domain of TCR clone 221547 (TRBV7-3, TRBJ1-1)
CASSQDWGAEAFF

SEQ ID NO: 443095 - protein, 13 aa, Homo sapiens
  CDR3 for alpha chain variable domain of TCR clone 221548 (TRAV13-1, TRAJ5)
CAASDTGRRALTF

SEQ ID NO: 443096 - protein, 13 aa, Homo sapiens
  CDR3 for beta chain variable domain of TCR clone 221548 (TRBV14, TRBJ1-1)
CASSREFGTEALF

SEQ ID NO: 443097 - protein, 15 aa, Homo sapiens
  CDR3 for alpha chain variable domain of TCR clone 221549 (TRAV8-4, TRAJ47)
CAVSDPEEYGNKLVF

SEQ ID NO: 443098 - protein, 16 aa, Homo sapiens
  CDR3 for beta chain variable domain of TCR clone 221549 (TRBV19, TRBJ2-1)
CASSKAGPSSYNEQFF

SEQ ID NO: 443099 - protein, 13 aa, Homo sapiens
  CDR3 for alpha chain variable domain of TCR clone 221550 (TRAV8-6, TRAJ49)
CAVITNTGNQFYF

SEQ ID NO: 443100 - protein, 18 aa, Homo sapiens
  CDR3 for beta chain variable domain of TCR clone 221550 (TRBV6-6, TRBJ1-3)
CASSYSKWDSISGNTIYF

SEQ ID NO: 443101 - protein, 15 aa, Homo sapiens
  CDR3 for alpha chain variable domain of TCR clone 221551 (TRAV13-1, TRAJ10)
CAATILTGGGNKLTF

SEQ ID NO: 443102 - protein, 14 aa, Homo sapiens
  CDR3 for beta chain variable domain of TCR clone 221551 (TRBV12-4, TRBJ1-4)
CASRITGRSEKLFF

SEQ ID NO: 443103 - protein, 16 aa, Homo sapiens
  CDR3 for alpha chain variable domain of TCR clone 221552 (TRAV12-2, TRAJ5)
CAVTRGSGTGRRALTF

SEQ ID NO: 443104 - protein, 15 aa, Homo sapiens
  CDR3 for beta chain variable domain of TCR clone 221552 (TRBV9, TRBJ2-1)
CASSVGTGELDEQFF

SEQ ID NO: 443105 - protein, 14 aa, Homo sapiens
  CDR3 for alpha chain variable domain of TCR clone 221553 (TRAV8-3, TRAJ4)
CAVGAAGGDNKLIF

SEQ ID NO: 443106 - protein, 16 aa, Homo sapiens
  CDR3 for beta chain variable domain of TCR clone 221553 (TRBV7-2, TRBJ1-2)
CASSRQGGGANYGYTF

SEQ ID NO: 443107 - protein, 13 aa, Homo sapiens
  CDR3 for alpha chain variable domain of TCR clone 221554 (TRAV8-4, TRAJ27)
CAVSPRNAGKSTF

SEQ ID NO: 443108 - protein, 13 aa, Homo sapiens
  CDR3 for beta chain variable domain of TCR clone 221554 (TRBV12-4, TRBJ1-2)
CASSLRQGKGYTF

SEQ ID NO: 443109 - protein, 13 aa, Homo sapiens
  CDR3 for alpha chain variable domain of TCR clone 221555 (TRAV8-3, TRAJ44)
CAVVPGTASKLTF

SEQ ID NO: 443110 - protein, 18 aa, Homo sapiens
  CDR3 for beta chain variable domain of TCR clone 221555 (TRBV4-1, TRBJ1-5)
CASSQDPRGQGLNQPQHF

SEQ ID NO: 443111 - protein, 18 aa, Homo sapiens
  CDR3 for alpha chain variable domain of TCR clone 221556 (TRAV21, TRAJ52)
CSVRPSPAGGTSYGKLTF

SEQ ID NO: 443112 - protein, 16 aa, Homo sapiens
  CDR3 for beta chain variable domain of TCR clone 221556 (TRBV13, TRBJ2-2)
CASSPRTGEHTGELFF

SEQ ID NO: 443113 - protein, 14 aa, Homo sapiens
  CDR3 for alpha chain variable domain of TCR clone 221557 (TRAV13-1, TRAJ35)
CAASKGGFGNGRHC

SEQ ID NO: 443114 - protein, 13 aa, Homo sapiens
  CDR3 for beta chain variable domain of TCR clone 221557 (TRBV7-3, TRBJ1-1)
CASSQDWGAEAFF

SEQ ID NO: 443115 - protein, 14 aa, Homo sapiens
  CDR3 for alpha chain variable domain of TCR clone 221558 (TRAV1-2, TRAJ8)
CAVREDTGFQKLVF

SEQ ID NO: 443116 - protein, 14 aa, Homo sapiens
  CDR3 for beta chain variable domain of TCR clone 221558 (TRBV29-1, TRBJ2-3)
CSAVAGVGADTQYF

SEQ ID NO: 443117 - protein, 11 aa, Homo sapiens
  CDR3 for alpha chain variable domain of TCR clone 221559 (TRAV16, TRAJ33)
CALHSNYQLIW

SEQ ID NO: 443118 - protein, 16 aa, Homo sapiens
  CDR3 for beta chain variable domain of TCR clone 221559 (TRBV2, TRBJ2-1)
CASRPRSGGPYGEQFF

SEQ ID NO: 443119 - protein, 15 aa, Homo sapiens
  CDR3 for alpha chain variable domain of TCR clone 221560 (TRAV8-4, TRAJ37)
CAVSRGSGTTGKLIF

SEQ ID NO: 443120 - protein, 15 aa, Homo sapiens
  CDR3 for beta chain variable domain of TCR clone 221560 (TRBV5-1, TRBJ2-7)
CASSLDLTSSYEQYF

SEQ ID NO: 443121 - protein, 15 aa, Homo sapiens
  CDR3 for alpha chain variable domain of TCR clone 221561 (TRAV26-1, TRAJ37)
CIVRVADGNTGKLIF

SEQ ID NO: 443122 - protein, 16 aa, Homo sapiens
  CDR3 for beta chain variable domain of TCR clone 221561 (TRBV15, TRBJ2-1)
CATSRDRTGGYNEQFF

SEQ ID NO: 443123 - protein, 12 aa, Homo sapiens
  CDR3 for alpha chain variable domain of TCR clone 221562 (TRAV35, TRAJ12)
CAGMGSSYKLIF

SEQ ID NO: 443124 - protein, 14 aa, Homo sapiens
  CDR3 for beta chain variable domain of TCR clone 221562 (TRBV28, TRBJ2-5)
CASSLYRGTETQYF

SEQ ID NO: 443125 - protein, 15 aa, Homo sapiens
  CDR3 for alpha chain variable domain of TCR clone 221563 (TRAV8-4, TRAJ37)
CAVTYGASNTGKLIF

SEQ ID NO: 443126 - protein, 13 aa, Homo sapiens
  CDR3 for beta chain variable domain of TCR clone 221563 (TRBV12-4, TRBJ2-5)
CASSSGGSRTQYF

SEQ ID NO: 443127 - protein, 16 aa, Homo sapiens
  CDR3 for alpha chain variable domain of TCR clone 221564 (TRAV26-1, TRAJ38)
CIVRPLNAGNNRKLLW

SEQ ID NO: 443128 - protein, 13 aa, Homo sapiens
  CDR3 for beta chain variable domain of TCR clone 221564 (TRBV18, TRBJ1-1)
CASSPNGDTEAFF

SEQ ID NO: 443129 - protein, 13 aa, Homo sapiens
  CDR3 for alpha chain variable domain of TCR clone 221565 (TRAV8-3, TRAJ36)
CAMGATGANNLFF

SEQ ID NO: 443130 - protein, 15 aa, Homo sapiens
  CDR3 for beta chain variable domain of TCR clone 221565 (TRBV7-2, TRBJ1-2)
CASSPRAGWNYGYTF

SEQ ID NO: 443131 - protein, 15 aa, Homo sapiens
  CDR3 for alpha chain variable domain of TCR clone 221566 (TRAV13-1, TRAJ4)
CAASLISGGYNKLMF

SEQ ID NO: 443132 - protein, 15 aa, Homo sapiens
  CDR3 for beta chain variable domain of TCR clone 221566 (TRBV28, TRBJ2-3)
CASTPRGENTDTQYF

SEQ ID NO: 443133 - protein, 12 aa, Homo sapiens
  CDR3 for alpha chain variable domain of TCR clone 221567 (TRAV2, TRAJ33)
CAIPDSNYQLIW

SEQ ID NO: 443134 - protein, 17 aa, Homo sapiens
  CDR3 for beta chain variable domain of TCR clone 221567 (TRBV6-5, TRBJ2-3)
CASSYGTSLYKSVTQYF

SEQ ID NO: 443135 - protein, 17 aa, Homo sapiens
  CDR3 for alpha chain variable domain of TCR clone 221568 (TRAV3, TRAJ38)
CAVRDCLNAGNNRKLIW

SEQ ID NO: 443136 - protein, 15 aa, Homo sapiens
  CDR3 for beta chain variable domain of TCR clone 221568 (TRBV23-1, TRBJ1-4)
CARGGSLMKNCFLAV

SEQ ID NO: 443137 - protein, 16 aa, Homo sapiens
  CDR3 for alpha chain variable domain of TCR clone 221569 (TRAV12-3, TRAJ53)
CAMSPRSGGSNYKLTF

SEQ ID NO: 443138 - protein, 15 aa, Homo sapiens
  CDR3 for beta chain variable domain of TCR clone 221569 (TRBV4-3, TRBJ2-7)
CASSQGGRGIYEQYF

SEQ ID NO: 443139 - protein, 12 aa, Homo sapiens
  CDR3 for alpha chain variable domain of TCR clone 221570 (TRAV2, TRAJ9)
CAVGAGGFKTFF

SEQ ID NO: 443140 - protein, 16 aa, Homo sapiens
  CDR3 for beta chain variable domain of TCR clone 221570 (TRBV13, TRBJ2-2)
CASSPRTGEHTGELFF

SEQ ID NO: 443141 - protein, 14 aa, Homo sapiens
  CDR3 for alpha chain variable domain of TCR clone 221571 (TRAV12-1, TRAJ3)
CGAARYSSASKIIF

SEQ ID NO: 443142 - protein, 15 aa, Homo sapiens
  CDR3 for beta chain variable domain of TCR clone 221571 (TRBV7-2, TRBJ2-1)
CASRKTGSSYNEQFF

SEQ ID NO: 443143 - protein, 17 aa, Homo sapiens
  CDR3 for alpha chain variable domain of TCR clone 221572 (TRAV38-1, TRAJ54)
CAFMKPTGLQGAQKLVF

SEQ ID NO: 443144 - protein, 17 aa, Homo sapiens
  CDR3 for beta chain variable domain of TCR clone 221572 (TRBV13, TRBJ2-3)
CASSLSRVAGGRNTQYF

SEQ ID NO: 443145 - protein, 15 aa, Homo sapiens
  CDR3 for alpha chain variable domain of TCR clone 221573 (TRAV8-3, TRAJ41)
CALGANSNSGYALNF

SEQ ID NO: 443146 - protein, 17 aa, Homo sapiens
  CDR3 for beta chain variable domain of TCR clone 221573 (TRBV25-1, TRBJ2-1)
CASSAYGQGRGVYEQFF

SEQ ID NO: 443147 - protein, 14 aa, Homo sapiens
  CDR3 for alpha chain variable domain of TCR clone 221574 (TRAV13-2, TRAJ17)
CAENGKAAGNKLTF

SEQ ID NO: 443148 - protein, 16 aa, Homo sapiens
  CDR3 for beta chain variable domain of TCR clone 221574 (TRBV5-1, TRBJ1-1)
CASSSGGNSLNTEAFF

SEQ ID NO: 443149 - protein, 14 aa, Homo sapiens
  CDR3 for alpha chain variable domain of TCR clone 221575 (TRAV12-2, TRAJ13)
CAVKKTGGYQKVTF

SEQ ID NO: 443150 - protein, 13 aa, Homo sapiens
  CDR3 for beta chain variable domain of TCR clone 221575 (TRBV18, TRBJ2-5)
CASSLQGQETQYF

SEQ ID NO: 443151 - protein, 15 aa, Homo sapiens
  CDR3 for alpha chain variable domain of TCR clone 221576 (TRAV12-1, TRAJ45)
CVVLSGGGGAYGLTF

SEQ ID NO: 443152 - protein, 11 aa, Homo sapiens
  CDR3 for beta chain variable domain of TCR clone 221576 (TRBV11-2, TRBJ2-2)
CASSLPGELFF

SEQ ID NO: 443153 - protein, 14 aa, Homo sapiens
  CDR3 for alpha chain variable domain of TCR clone 221577 (TRAV17, TRAJ22)
CATSPSGSARQLTF

SEQ ID NO: 443154 - protein, 15 aa, Homo sapiens
  CDR3 for beta chain variable domain of TCR clone 221577 (TRBV4-1, TRBJ2-5)
CASSQWDLYQETQDV

SEQ ID NO: 443155 - protein, 10 aa, Homo sapiens
  CDR3 for alpha chain variable domain of TCR clone 221578 (TRAV36/DV7, TRAJ48)
CAVGNEKLTF

SEQ ID NO: 443156 - protein, 16 aa, Homo sapiens
  CDR3 for beta chain variable domain of TCR clone 221578 (TRBV15, TRBJ2-3)
CATRLSGGRAPDKQYF

SEQ ID NO: 443157 - protein, 11 aa, Homo sapiens
  CDR3 for alpha chain variable domain of TCR clone 221579 (TRAV21, TRAJ11)
CAVNGYSTLTF

SEQ ID NO: 443158 - protein, 16 aa, Homo sapiens
  CDR3 for beta chain variable domain of TCR clone 221579 (TRBV4-3, TRBJ2-2)
CASSHLQGSGTGELCF

SEQ ID NO: 443159 - protein, 11 aa, Homo sapiens
  CDR3 for alpha chain variable domain of TCR clone 221580 (TRAV35, TRAJ34)
CWARNTDKLVF

SEQ ID NO: 443160 - protein, 16 aa, Homo sapiens
  CDR3 for beta chain variable domain of TCR clone 221580 (TRBV12-5, TRBJ2-5)
CASGPRTSGNQETQYF

SEQ ID NO: 443161 - protein, 11 aa, Homo sapiens
  CDR3 for alpha chain variable domain of TCR clone 221581 (TRAV1-1, TRAJ23)
CAVRQGGKLVF

SEQ ID NO: 443162 - protein, 12 aa, Homo sapiens
  CDR3 for beta chain variable domain of TCR clone 221581 (TRBV19, TRBJ1-5)
CASSIAQQPQHF

SEQ ID NO: 443163 - protein, 13 aa, Homo sapiens
  CDR3 for alpha chain variable domain of TCR clone 221582 (TRAV12-2, TRAJ20)
CAVYPSNDYKLSF

SEQ ID NO: 443164 - protein, 19 aa, Homo sapiens
  CDR3 for beta chain variable domain of TCR clone 221582 (TRBV28, TRBJ2-4)
CASSFQPGGPAHSKNIQYF

SEQ ID NO: 443165 - protein, 11 aa, Homo sapiens
  CDR3 for alpha chain variable domain of TCR clone 221583 (TRAV12-1, TRAJ3)
CVVSSASKIIF

SEQ ID NO: 443166 - protein, 16 aa, Homo sapiens
  CDR3 for beta chain variable domain of TCR clone 221583 (TRBV20-1, TRBJ2-5)
SAVLGGLGGGGETQYF

SEQ ID NO: 443167 - protein, 12 aa, Homo sapiens
  CDR3 for alpha chain variable domain of TCR clone 221584 (TRAV21, TRAJ6)
CAVKGGSYIPTF

SEQ ID NO: 443168 - protein, 13 aa, Homo sapiens
  CDR3 for beta chain variable domain of TCR clone 221584 (TRBV11-2, TRBJ1-1)
CASSFTEDTEAFF

SEQ ID NO: 443169 - protein, 19 aa, Homo sapiens
  CDR3 for alpha chain variable domain of TCR clone 221585 (TRAV13-1, TRAJ52)
CAASPYQNAGGTSYGKLTF

SEQ ID NO: 443170 - protein, 15 aa, Homo sapiens
  CDR3 for beta chain variable domain of TCR clone 221585 (TRBV20-1, TRBJ2-7)
CSARDRVSGMDEQYF

SEQ ID NO: 443171 - protein, 15 aa, Homo sapiens
  CDR3 for alpha chain variable domain of TCR clone 221586 (TRAV8-4, TRAJ10)
CAVSDQMGGGNKLTF

SEQ ID NO: 443172 - protein, 12 aa, Homo sapiens
  CDR3 for beta chain variable domain of TCR clone 221586 (TRBV7-9, TRBJ2-7)
CASSFGSYEQYF

SEQ ID NO: 443173 - protein, 18 aa, Homo sapiens
  CDR3 for alpha chain variable domain of TCR clone 221587 (TRAV13-1, TRAJ52)
CAAKNPNAGGTSYGKLTF

SEQ ID NO: 443174 - protein, 14 aa, Homo sapiens
  CDR3 for beta chain variable domain of TCR clone 221587 (TRBV7-2, TRBJ2-3)
CASRRGLAADTQYF

SEQ ID NO: 443175 - protein, 14 aa, Homo sapiens
  CDR3 for alpha chain variable domain of TCR clone 221588 (TRAV9-2, TRAJ39)
CTLYIYNAGNMLTF

SEQ ID NO: 443176 - protein, 14 aa, Homo sapiens
  CDR3 for beta chain variable domain of TCR clone 221588 (TRBV19, TRBJ2-1)
CASPTFVLSGEQFF

SEQ ID NO: 443177 - protein, 15 aa, Homo sapiens
  CDR3 for alpha chain variable domain of TCR clone 221589 (TRAV26-1, TRAJ15)
CIVRAANQAGTALIF

SEQ ID NO: 443178 - protein, 12 aa, Homo sapiens
  CDR3 for beta chain variable domain of TCR clone 221589 (TRBV12-4, TRBJ2-1)
CASSPGRNEQFF

SEQ ID NO: 443179 - protein, 15 aa, Homo sapiens
  CDR3 for alpha chain variable domain of TCR clone 221590 (TRAV21, TRAJ32)
CAVNSYGGATNKLIF

SEQ ID NO: 443180 - protein, 18 aa, Homo sapiens
  CDR3 for beta chain variable domain of TCR clone 221590 (TRBV7-9, TRBJ2-1)
CASSTGLAEGCSYNEQFF

SEQ ID NO: 443181 - protein, 14 aa, Homo sapiens
  CDR3 for alpha chain variable domain of TCR clone 221591 (TRAV1-2, TRAJ16)
CAVNRFSDGQKLLF

SEQ ID NO: 443182 - protein, 15 aa, Homo sapiens
  CDR3 for beta chain variable domain of TCR clone 221591 (TRBV5-1, TRBJ2-1)
CASSPPRAPYNERFF

SEQ ID NO: 443183 - protein, 14 aa, Homo sapiens
  CDR3 for alpha chain variable domain of TCR clone 221592 (TRAV16, TRAJ31)
CALRGMNNNARLMF

SEQ ID NO: 443184 - protein, 12 aa, Homo sapiens
  CDR3 for beta chain variable domain of TCR clone 221592 (TRBV11-2, TRBJ1-2)
CASSREGDGYTF

SEQ ID NO: 443185 - protein, 15 aa, Homo sapiens
  CDR3 for alpha chain variable domain of TCR clone 221593 (TRAV36/DV7, TRAJ53)
CAVEGSGGSNYKLTF

SEQ ID NO: 443186 - protein, 16 aa, Homo sapiens
  CDR3 for beta chain variable domain of TCR clone 221593 (TRBV27, TRBJ2-5)
CASSYGPGGQKETQYF

SEQ ID NO: 443187 - protein, 11 aa, Homo sapiens
  CDR3 for alpha chain variable domain of TCR clone 221594 (TRAV14/DV4, )
CAMREISRTLT

SEQ ID NO: 443188 - protein, 14 aa, Homo sapiens
  CDR3 for beta chain variable domain of TCR clone 221594 (TRBV2, TRBJ2-1)
CASSDRAYYNEHFF

SEQ ID NO: 443189 - protein, 14 aa, Homo sapiens
  CDR3 for alpha chain variable domain of TCR clone 221595 (TRAV8-4, TRAJ54)
CAVSEVLGAQKLVF

SEQ ID NO: 443190 - protein, 13 aa, Homo sapiens
  CDR3 for beta chain variable domain of TCR clone 221595 (TRBV27, TRBJ2-7)
CASSFISSYEQYF

SEQ ID NO: 443191 - protein, 20 aa, Homo sapiens
  CDR3 for alpha chain variable domain of TCR clone 221596 (TRAV4, TRAJ29)
CCVLLPRGCVPFSGNTPLVF

SEQ ID NO: 443192 - protein, 17 aa, Homo sapiens
  CDR3 for beta chain variable domain of TCR clone 221596 (TRBV25-1, TRBJ2-7)
CASSDARVVFASYEQYF

SEQ ID NO: 443193 - protein, 14 aa, Homo sapiens
  CDR3 for alpha chain variable domain of TCR clone 221597 (TRAV1-2, TRAJ8)
CAVREDTGFQKLVF

SEQ ID NO: 443194 - protein, 15 aa, Homo sapiens
  CDR3 for beta chain variable domain of TCR clone 221597 (TRBV12-4, TRBJ2-5)
CASSGTGQAQETQYF

SEQ ID NO: 443195 - protein, 16 aa, Homo sapiens
  CDR3 for alpha chain variable domain of TCR clone 221598 (TRAV21, TRAJ37)
CAVRTAGSSNTGKIIF

SEQ ID NO: 443196 - protein, 13 aa, Homo sapiens
  CDR3 for beta chain variable domain of TCR clone 221598 (TRBV7-9, TRBJ2-5)
CVSLPSGRETQYF

SEQ ID NO: 443197 - protein, 11 aa, Homo sapiens
  CDR3 for alpha chain variable domain of TCR clone 221599 (TRAV1-1, TRAJ23)
CAVRQGGKRIF

SEQ ID NO: 443198 - protein, 20 aa, Homo sapiens
  CDR3 for beta chain variable domain of TCR clone 221599 (TRBV7-8, TRBJ2-2)
CASSHLFPGPTLHITGELFF

SEQ ID NO: 443199 - protein, 16 aa, Homo sapiens
  CDR3 for alpha chain variable domain of TCR clone 221600 (TRAV30, TRAJ24)
CGTEIVDADSWGKFQF

SEQ ID NO: 443200 - protein, 15 aa, Homo sapiens
  CDR3 for beta chain variable domain of TCR clone 221600 (TRBV28, TRBJ2-1)
CAGSIIAGGRSEQFC

SEQ ID NO: 443201 - protein, 12 aa, Homo sapiens
  CDR3 for alpha chain variable domain of TCR clone 221601 (TRAV26-1, TRAJ48)
CIVSGGNEKLTF

SEQ ID NO: 443202 - protein, 13 aa, Homo sapiens
  CDR3 for beta chain variable domain of TCR clone 221601 (TRBV18, TRBJ2-7)
CASFRDSAYQQYF

SEQ ID NO: 443203 - protein, 12 aa, Homo sapiens
  CDR3 for alpha chain variable domain of TCR clone 221602 (TRAV39, TRAJ49)
CAVAMTGNQFYF

SEQ ID NO: 443204 - protein, 13 aa, Homo sapiens
  CDR3 for beta chain variable domain of TCR clone 221602 (TRBV10-3, TRBJ2-7)
CASKLAVNYEQYF

SEQ ID NO: 443205 - protein, 14 aa, Homo sapiens
  CDR3 for alpha chain variable domain of TCR clone 221603 (TRAV14/DV4, TRAJ58)
CSMRARTSGSRLTF

SEQ ID NO: 443206 - protein, 18 aa, Homo sapiens
  CDR3 for beta chain variable domain of TCR clone 221603 (TRBV12-4, TRBJ1-5)
CASSLFLVGVGAYQPQHF

SEQ ID NO: 443207 - protein, 14 aa, Homo sapiens
  CDR3 for alpha chain variable domain of TCR clone 221604 (TRAV13-1, TRAJ20)
CAARPGSNDYKLSF

SEQ ID NO: 443208 - protein, 15 aa, Homo sapiens
  CDR3 for beta chain variable domain of TCR clone 221604 (TRBV6-3, TRBJ2-7)
CASSSPGTVFYEQYF

SEQ ID NO: 443209 - protein, 12 aa, Homo sapiens
  CDR3 for alpha chain variable domain of TCR clone 221605 (TRAV8-3, TRAJ41)
CAVAFSGYALNF

SEQ ID NO: 443210 - protein, 16 aa, Homo sapiens
  CDR3 for beta chain variable domain of TCR clone 221605 (TRBV27, TRBJ2-7)
CASSSERRDSAYEQYF

SEQ ID NO: 443211 - protein, 13 aa, Homo sapiens
  CDR3 for alpha chain variable domain of TCR clone 221606 (TRAV21, TRAJ27)
CAARPGNAGKSTL

SEQ ID NO: 443212 - protein, 14 aa, Homo sapiens
  CDR3 for beta chain variable domain of TCR clone 221606 (TRBV7-9, TRBJ2-5)
CASSLDTAQETQYF

SEQ ID NO: 443213 - protein, 14 aa, Homo sapiens
  CDR3 for alpha chain variable domain of TCR clone 221607 (TRAV13-1, TRAJ10)
CAAKEPGGGNKLTF

SEQ ID NO: 443214 - protein, 15 aa, Homo sapiens
  CDR3 for beta chain variable domain of TCR clone 221607 (TRBV13, TRBJ2-1)
CASSLLSGLNNEQFF

SEQ ID NO: 443215 - protein, 16 aa, Homo sapiens
  CDR3 for alpha chain variable domain of TCR clone 221608 (TRAV12-3, TRAJ53)
CAMSPGRGGSKYKLTF

SEQ ID NO: 443216 - protein, 17 aa, Homo sapiens
  CDR3 for beta chain variable domain of TCR clone 221608 (TRBV11-2, TRBJ2-1)
CASSLYPTGVEYDEQFF

SEQ ID NO: 443217 - protein, 23 aa, Homo sapiens
  CDR3 for alpha chain variable domain of TCR clone 221609 (TRAV8-2, TRAJ23)
CVVSPLITREESLSSDRERSYLR

SEQ ID NO: 443218 - protein, 16 aa, Homo sapiens
  CDR3 for beta chain variable domain of TCR clone 221609 (TRBV20-1, TRBJ2-1)
CSARDHLAGGRGEQFF

SEQ ID NO: 443219 - protein, 15 aa, Homo sapiens
  CDR3 for alpha chain variable domain of TCR clone 221610 (TRAV8-6, TRAJ23)
CAVRLIYNQGGKLIF

SEQ ID NO: 443220 - protein, 15 aa, Homo sapiens
  CDR3 for beta chain variable domain of TCR clone 221610 (TRBV4-1, TRBJ2-7)
CASSQQGQGFDEQYF

SEQ ID NO: 443221 - protein, 13 aa, Homo sapiens
  CDR3 for alpha chain variable domain of TCR clone 221611 (TRAV12-1, TRAJ33)
CVVKGGSNYQLIW

SEQ ID NO: 443222 - protein, 12 aa, Homo sapiens
  CDR3 for beta chain variable domain of TCR clone 221611 (TRBV11-3, TRBJ1-1)
CASSHRQGEAFF

SEQ ID NO: 443223 - protein, 14 aa, Homo sapiens
  CDR3 for alpha chain variable domain of TCR clone 221612 (TRAV1-1, TRAJ28)
CAAPSGAGSYQLTF

SEQ ID NO: 443224 - protein, 13 aa, Homo sapiens
  CDR3 for beta chain variable domain of TCR clone 221612 (TRBV7-2, TRBJ2-2)
CASSLAVTGELFF

SEQ ID NO: 443225 - protein, 16 aa, Homo sapiens
  CDR3 for alpha chain variable domain of TCR clone 221613 (TRAV8-3, TRAJ8)
CAVPRDGNTGFQKLVC

SEQ ID NO: 443226 - protein, 15 aa, Homo sapiens
  CDR3 for beta chain variable domain of TCR clone 221613 (TRBV6-1, TRBJ2-6)
CASSSRPSGANGLTF

SEQ ID NO: 443227 - protein, 13 aa, Homo sapiens
  CDR3 for alpha chain variable domain of TCR clone 221614 (TRAV36/DV7, TRAJ54)
CAVHIQGAQKLVF

SEQ ID NO: 443228 - protein, 14 aa, Homo sapiens
  CDR3 for beta chain variable domain of TCR clone 221614 (TRBV19, TRBJ2-7)
CASNFRDTFTGMYF

SEQ ID NO: 443229 - protein, 17 aa, Homo sapiens
  CDR3 for alpha chain variable domain of TCR clone 221615 (TRAV3, TRAJ4)
CAVRDIMFSGGYNNLIF

SEQ ID NO: 443230 - protein, 13 aa, Homo sapiens
  CDR3 for beta chain variable domain of TCR clone 221615 (TRBV28, TRBJ2-1)
CASSLIGRDEQFF

SEQ ID NO: 443231 - protein, 16 aa, Homo sapiens
  CDR3 for alpha chain variable domain of TCR clone 221616 (TRAV22, TRAJ45)
CAVERCKRGGADGLTF

SEQ ID NO: 443232 - protein, 13 aa, Homo sapiens
  CDR3 for beta chain variable domain of TCR clone 221616 (TRBV27, TRBJ1-1)
CASSLSIGAEAFF

SEQ ID NO: 443233 - protein, 13 aa, Homo sapiens
  CDR3 for alpha chain variable domain of TCR clone 221617 (TRAV21, TRAJ20)
CAVGLRVDYKLSF

SEQ ID NO: 443234 - protein, 14 aa, Homo sapiens
  CDR3 for beta chain variable domain of TCR clone 221617 (TRBV20-1, TRBJ2-1)
CSAQIGGSANEQFF

SEQ ID NO: 443235 - protein, 15 aa, Homo sapiens
  CDR3 for alpha chain variable domain of TCR clone 221618 (TRAV21, TRAJ53)
CATLNSGGSTHKLTF

SEQ ID NO: 443236 - protein, 15 aa, Homo sapiens
  CDR3 for beta chain variable domain of TCR clone 221618 (TRBV20-1, TRBJ2-7)
CSARDRVSGMDEQYF

SEQ ID NO: 443237 - protein, 13 aa, Homo sapiens
  CDR3 for alpha chain variable domain of TCR clone 221619 (TRAV13-2, TRAJ48)
CAEMDFGNEKLTF

SEQ ID NO: 443238 - protein, 13 aa, Homo sapiens
  CDR3 for beta chain variable domain of TCR clone 221619 (TRBV7-9, TRBJ1-2)
CASSLKQNYGYTV

SEQ ID NO: 443239 - protein, 15 aa, Homo sapiens
  CDR3 for alpha chain variable domain of TCR clone 221620 (TRAV2, TRAJ15)
CAVADRNQAGTALIF

SEQ ID NO: 443240 - protein, 13 aa, Homo sapiens
  CDR3 for beta chain variable domain of TCR clone 221620 (TRBV10-2, TRBJ2-1)
CASGASGDAKQFF

SEQ ID NO: 443241 - protein, 15 aa, Homo sapiens
  CDR3 for alpha chain variable domain of TCR clone 221621 (TRAV8-3, TRAJ45)
CASSYSGGGADGLTF

SEQ ID NO: 443242 - protein, 15 aa, Homo sapiens
  CDR3 for beta chain variable domain of TCR clone 221621 (TRBV7-9, TRBJ2-7)
CASSPTGLRTYEQYF

SEQ ID NO: 443243 - protein, 15 aa, Homo sapiens
  CDR3 for alpha chain variable domain of TCR clone 221622 (TRAV3, TRAJ3)
CAVSDGHSSASKIIF

SEQ ID NO: 443244 - protein, 13 aa, Homo sapiens
  CDR3 for beta chain variable domain of TCR clone 221622 (TRBV18, TRBJ2-5)
CASSLQGQETQYF

SEQ ID NO: 443245 - protein, 15 aa, Homo sapiens
  CDR3 for alpha chain variable domain of TCR clone 221623 (TRAV3, TRAJ5)
CALRDLDTGRRALTF

SEQ ID NO: 443246 - protein, 16 aa, Homo sapiens
  CDR3 for beta chain variable domain of TCR clone 221623 (TRBV3-1, TRBJ2-2)
CASSHYSGRSTGELFF

SEQ ID NO: 443247 - protein, 13 aa, Homo sapiens
  CDR3 for alpha chain variable domain of TCR clone 221624 (TRAV12-3, TRAJ29)
CAMTLSGNTPLVF

SEQ ID NO: 443248 - protein, 18 aa, Homo sapiens
  CDR3 for beta chain variable domain of TCR clone 221624 (TRBV11-2, TRBJ2-3)
CASSLGGASRGAPNTQYF

SEQ ID NO: 443249 - protein, 13 aa, Homo sapiens
  CDR3 for alpha chain variable domain of TCR clone 221625 (TRAV12-3, TRAJ6)
CANPSAGSYIPTF

SEQ ID NO: 443250 - protein, 14 aa, Homo sapiens
  CDR3 for beta chain variable domain of TCR clone 221625 (TRBV19, TRBJ1-1)
CASSRDRDATEAFF

SEQ ID NO: 443251 - protein, 12 aa, Homo sapiens
  CDR3 for alpha chain variable domain of TCR clone 221626 (TRAV12-3, TRAJ17)
CAMTLTGNKPTF

SEQ ID NO: 443252 - protein, 13 aa, Homo sapiens
  CDR3 for beta chain variable domain of TCR clone 221626 (TRBV7-2, TRBJ2-1)
CASSLGVYNEQFF

SEQ ID NO: 443253 - protein, 15 aa, Homo sapiens
  CDR3 for alpha chain variable domain of TCR clone 221627 (TRAV1-2, TRAJ31)
CAFFRCQTHVWRLNS

SEQ ID NO: 443254 - protein, 13 aa, Homo sapiens
  CDR3 for beta chain variable domain of TCR clone 221627 (TRBV7-9, TRBJ1-2)
CASSSKQNYGYTF

SEQ ID NO: 443255 - protein, 15 aa, Homo sapiens
  CDR3 for alpha chain variable domain of TCR clone 221628 (TRAV26-2, TRAJ13)
CILRDLSGGYQKVTF

SEQ ID NO: 443256 - protein, 11 aa, Homo sapiens
  CDR3 for beta chain variable domain of TCR clone 221628 (TRBV11-2, TRBJ2-2)
CASSLPGELFF

SEQ ID NO: 443257 - protein, 14 aa, Homo sapiens
  CDR3 for alpha chain variable domain of TCR clone 221629 (TRAV12-1, TRAJ12)
CVVTRMDSRYKLIF

SEQ ID NO: 443258 - protein, 13 aa, Homo sapiens
  CDR3 for beta chain variable domain of TCR clone 221629 (TRBV20-1, TRBJ1-1)
CSARGVGNTEAFF

SEQ ID NO: 443259 - protein, 15 aa, Homo sapiens
  CDR3 for alpha chain variable domain of TCR clone 221630 (TRAV8-3, TRAJ27)
CAVGPSKTNAGKSTF

SEQ ID NO: 443260 - protein, 15 aa, Homo sapiens
  CDR3 for beta chain variable domain of TCR clone 221630 (TRBV27, TRBJ2-1)
CASSNGGGSSNEQVF

SEQ ID NO: 443261 - protein, 12 aa, Homo sapiens
  CDR3 for alpha chain variable domain of TCR clone 221631 (TRAV12-1, TRAJ9)
CVVNPASFKTIF

SEQ ID NO: 443262 - protein, 17 aa, Homo sapiens
  CDR3 for beta chain variable domain of TCR clone 221631 (TRBV13, TRBJ2-3)
CASSLSRVAGGRNTQYF

SEQ ID NO: 443263 - protein, 14 aa, Homo sapiens
  CDR3 for alpha chain variable domain of TCR clone 221632 (TRAV12-3, TRAJ54)
CALRGIQGAQTLVF

SEQ ID NO: 443264 - protein, 13 aa, Homo sapiens
  CDR3 for beta chain variable domain of TCR clone 221632 (TRBV19, TRBJ1-1)
CASSPSNGGEAFF

SEQ ID NO: 443265 - protein, 14 aa, Homo sapiens
  CDR3 for alpha chain variable domain of TCR clone 221633 (TRAV38-1, TRAJ45)
CASYSGGGADGLTF

SEQ ID NO: 443266 - protein, 14 aa, Homo sapiens
  CDR3 for beta chain variable domain of TCR clone 221633 (TRBV20-1, TRBJ1-1)
CSAQTRIGGTEAFF

SEQ ID NO: 443267 - protein, 14 aa, Homo sapiens
  CDR3 for alpha chain variable domain of TCR clone 221634 (TRAV2, TRAJ21)
CAVEDLNNFNKFYF

SEQ ID NO: 443268 - protein, 13 aa, Homo sapiens
  CDR3 for beta chain variable domain of TCR clone 221634 (TRBV19, TRBJ1-5)
CASSMRGYQPQHF

SEQ ID NO: 443269 - protein, 15 aa, Homo sapiens
  CDR3 for alpha chain variable domain of TCR clone 221635 (TRAV17, TRAJ37)
CATDHGSSNTGKLIF

SEQ ID NO: 443270 - protein, 18 aa, Homo sapiens
  CDR3 for beta chain variable domain of TCR clone 221635 (TRBV11-2, TRBJ2-6)
CASSLNPFLGTGANVLTF

SEQ ID NO: 443271 - protein, 13 aa, Homo sapiens
  CDR3 for alpha chain variable domain of TCR clone 221636 (TRAV20, TRAJ54)
CAVQAGGAPKLVF

SEQ ID NO: 443272 - protein, 14 aa, Homo sapiens
  CDR3 for beta chain variable domain of TCR clone 221636 (TRBV4-1, TRBJ2-2)
CASSQAVNTGELFF

SEQ ID NO: 443273 - protein, 13 aa, Homo sapiens
  CDR3 for alpha chain variable domain of TCR clone 221637 (TRAV2, TRAJ40)
CAVVTSGTYKYIF

SEQ ID NO: 443274 - protein, 16 aa, Homo sapiens
  CDR3 for beta chain variable domain of TCR clone 221637 (TRBV29-1, TRBJ2-6)
CSVEDITDSGANVLTF

SEQ ID NO: 443275 - protein, 12 aa, Homo sapiens
  CDR3 for alpha chain variable domain of TCR clone 221638 (TRAV13-1, TRAJ43)
CAAGRFNNAMRF

SEQ ID NO: 443276 - protein, 15 aa, Homo sapiens
  CDR3 for beta chain variable domain of TCR clone 221638 (TRBV29-1, TRBJ2-7)
CSVEFCDRGSYEQYF

SEQ ID NO: 443277 - protein, 13 aa, Homo sapiens
  CDR3 for alpha chain variable domain of TCR clone 221639 (TRAV12-3, TRAJ33)
CAMSVNSNYQLIW

SEQ ID NO: 443278 - protein, 16 aa, Homo sapiens
  CDR3 for beta chain variable domain of TCR clone 221639 (TRBV7-3, TRBJ2-1)
CASSPNSGSSYNEQFF

SEQ ID NO: 443279 - protein, 16 aa, Homo sapiens
  CDR3 for alpha chain variable domain of TCR clone 221640 (TRAV3, TRAJ5)
CAVRNLMDTGRRALTF

SEQ ID NO: 443280 - protein, 15 aa, Homo sapiens
  CDR3 for beta chain variable domain of TCR clone 221640 (TRBV5-7, TRBJ2-7)
CASSLPGQVFYEQYF

SEQ ID NO: 443281 - protein, 14 aa, Homo sapiens
  CDR3 for alpha chain variable domain of TCR clone 221641 (TRAV23/DV6, TRAJ4)
RAAPSSGGYNKLIF

SEQ ID NO: 443282 - protein, 15 aa, Homo sapiens
  CDR3 for beta chain variable domain of TCR clone 221641 (TRBV7-2, TRBJ2-1)
CASSSGLAGGNEQFF

SEQ ID NO: 443283 - protein, 11 aa, Homo sapiens
  CDR3 for alpha chain variable domain of TCR clone 221642 (TRAV12-2, TRAJ49)
CAVHTGHQFYF

SEQ ID NO: 443284 - protein, 15 aa, Homo sapiens
  CDR3 for beta chain variable domain of TCR clone 221642 (TRBV4-2, TRBJ1-1)
CASSQQGAGDTEAFF

SEQ ID NO: 443285 - protein, 17 aa, Homo sapiens
  CDR3 for alpha chain variable domain of TCR clone 221643 (TRAV12-2, TRAJ4)
CAVNVWPVSGGYNKLIF

SEQ ID NO: 443286 - protein, 17 aa, Homo sapiens
  CDR3 for beta chain variable domain of TCR clone 221643 (TRBV6-3, TRBJ2-1)
CASSYSSGTRGLDEQFF

SEQ ID NO: 443287 - protein, 13 aa, Homo sapiens
  CDR3 for alpha chain variable domain of TCR clone 221644 (TRAV13-2, TRAJ11)
CAENYSGYSTLTF

SEQ ID NO: 443288 - protein, 13 aa, Homo sapiens
  CDR3 for beta chain variable domain of TCR clone 221644 (TRBV12-4, TRBJ1-4)
CASAIGHNEKLFF

SEQ ID NO: 443289 - protein, 14 aa, Homo sapiens
  CDR3 for alpha chain variable domain of TCR clone 221645 (TRAV8-3, TRAJ39)
CAVGANHAGNMLTF

SEQ ID NO: 443290 - protein, 15 aa, Homo sapiens
  CDR3 for beta chain variable domain of TCR clone 221645 (TRBV4-3, TRBJ1-1)
CASSQELGRGTEAFF

SEQ ID NO: 443291 - protein, 12 aa, Homo sapiens
  CDR3 for alpha chain variable domain of TCR clone 221646 (TRAV38-1, TRAJ47)
CAFVTYGNKLVF

SEQ ID NO: 443292 - protein, 13 aa, Homo sapiens
  CDR3 for beta chain variable domain of TCR clone 221646 (TRBV4-2, TRBJ1-1)
CASSQAGNTEAFF

SEQ ID NO: 443293 - protein, 15 aa, Homo sapiens
  CDR3 for alpha chain variable domain of TCR clone 221647 (TRAV26-1, TRAJ29)
CIVRVKGSGNTLLVF

SEQ ID NO: 443294 - protein, 14 aa, Homo sapiens
  CDR3 for beta chain variable domain of TCR clone 221647 (TRBV18, TRBJ2-5)
CASSPGVSQETQYF

SEQ ID NO: 443295 - protein, 15 aa, Homo sapiens
  CDR3 for alpha chain variable domain of TCR clone 221648 (TRAV12-3, TRAJ42)
CAMIISVGSQGNLIF

SEQ ID NO: 443296 - protein, 13 aa, Homo sapiens
  CDR3 for beta chain variable domain of TCR clone 221648 (TRBV25-1, TRBJ2-6)
CASRGPGANVLTF

SEQ ID NO: 443297 - protein, 12 aa, Homo sapiens
  CDR3 for alpha chain variable domain of TCR clone 221649 (TRAV12-3, TRAJ20)
CAMVRGDYKLSF

SEQ ID NO: 443298 - protein, 15 aa, Homo sapiens
  CDR3 for beta chain variable domain of TCR clone 221649 (TRBV19, TRBJ1-6)
CASSTQGAVGSPLHF

SEQ ID NO: 443299 - protein, 12 aa, Homo sapiens
  CDR3 for alpha chain variable domain of TCR clone 221650 (TRAV2, TRAJ37)
CAVTMNTGKLIF

SEQ ID NO: 443300 - protein, 15 aa, Homo sapiens
  CDR3 for beta chain variable domain of TCR clone 221650 (TRBV5-1, TRBJ2-5)
FASSFGGPPQETQYF

SEQ ID NO: 443301 - protein, 17 aa, Homo sapiens
  CDR3 for alpha chain variable domain of TCR clone 221651 (TRAV3, TRAJ6)
GAVRDGPRAGGSYIPTI

SEQ ID NO: 443302 - protein, 14 aa, Homo sapiens
  CDR3 for beta chain variable domain of TCR clone 221651 (TRBV7-2, TRBJ2-7)
CASSPKTSFYEQYF

SEQ ID NO: 443303 - protein, 15 aa, Homo sapiens
  CDR3 for alpha chain variable domain of TCR clone 221652 (TRAV29/DV5, TRAJ24)
CAASGATDSWVKFQF

SEQ ID NO: 443304 - protein, 20 aa, Homo sapiens
  CDR3 for beta chain variable domain of TCR clone 221652 (TRBV11-2, TRBJ2-2)
LRTRPCISVPAASLPGSCFF

SEQ ID NO: 443305 - protein, 16 aa, Homo sapiens
  CDR3 for alpha chain variable domain of TCR clone 221653 (TRAV30, TRAJ24)
CGTEIVDADSWGKFQS

SEQ ID NO: 443306 - protein, 16 aa, Homo sapiens
  CDR3 for beta chain variable domain of TCR clone 221653 (TRBV28, TRBJ2-7)
CASSLFFETGGPEQYF

SEQ ID NO: 443307 - protein, 15 aa, Homo sapiens
  CDR3 for alpha chain variable domain of TCR clone 221654 (TRAV41, TRAJ45)
CAASYSGGGADGLTF

SEQ ID NO: 443308 - protein, 16 aa, Homo sapiens
  CDR3 for beta chain variable domain of TCR clone 221654 (TRBV7-3, TRBJ2-2)
CASSLKRGTLSGELFF

SEQ ID NO: 443309 - protein, 16 aa, Homo sapiens
  CDR3 for alpha chain variable domain of TCR clone 221655 (TRAV23/DV6, TRAJ9)
RAASIGGNTGGFTTIF

SEQ ID NO: 443310 - protein, 12 aa, Homo sapiens
  CDR3 for beta chain variable domain of TCR clone 221655 (TRBV11-2, TRBJ2-1)
CASSVQREGQFF

SEQ ID NO: 443311 - protein, 14 aa, Homo sapiens
  CDR3 for alpha chain variable domain of TCR clone 221656 (TRAV12-3, TRAJ10)
SHLPLTGGGNKLTF

SEQ ID NO: 443312 - protein, 13 aa, Homo sapiens
  CDR3 for beta chain variable domain of TCR clone 221656 (TRBV4-1, TRBJ2-2)
CASSQENSGELFF

SEQ ID NO: 443313 - protein, 12 aa, Homo sapiens
  CDR3 for alpha chain variable domain of TCR clone 221657 (TRAV17, TRAJ20)
CATLANDYKLSF

SEQ ID NO: 443314 - protein, 12 aa, Homo sapiens
  CDR3 for beta chain variable domain of TCR clone 221657 (TRBV11-2, TRBJ2-2)
CASSLPTGELFF

SEQ ID NO: 443315 - protein, 14 aa, Homo sapiens
  CDR3 for alpha chain variable domain of TCR clone 221658 (TRAV9-2, TRAJ39)
CALYIYNAGNMLTF

SEQ ID NO: 443316 - protein, 16 aa, Homo sapiens
  CDR3 for beta chain variable domain of TCR clone 221658 (TRBV5-1, TRBJ2-2)
CASSSRPGGRTGELFF

SEQ ID NO: 443317 - protein, 12 aa, Homo sapiens
  CDR3 for alpha chain variable domain of TCR clone 221659 (TRAV26-1, TRAJ20)
CIVTSNDYKLSF

SEQ ID NO: 443318 - protein, 13 aa, Homo sapiens
  CDR3 for beta chain variable domain of TCR clone 221659 (TRBV7-7, TRBJ2-3)
CASSLSRADTQYF

SEQ ID NO: 443319 - protein, 17 aa, Homo sapiens
  CDR3 for alpha chain variable domain of TCR clone 221660 (TRAV38-2/DV8, TRAJ28)
CAFLTLYYGAGSYQLTF

SEQ ID NO: 443320 - protein, 14 aa, Homo sapiens
  CDR3 for beta chain variable domain of TCR clone 221660 (TRBV7-2, TRBJ2-5)
CASSLSGGGETQYF

SEQ ID NO: 443321 - protein, 16 aa, Homo sapiens
  CDR3 for alpha chain variable domain of TCR clone 221661 (TRAV12-2, TRAJ10)
CAVNRVLTGGGNKRAF

SEQ ID NO: 443322 - protein, 12 aa, Homo sapiens
  CDR3 for beta chain variable domain of TCR clone 221661 (TRBV28, TRBJ2-7)
CASSFSSYEQYF

SEQ ID NO: 443323 - protein, 13 aa, Homo sapiens
  CDR3 for alpha chain variable domain of TCR clone 221662 (TRAV12-2, TRAJ6)
CAVNVSRKLHTYI

SEQ ID NO: 443324 - protein, 18 aa, Homo sapiens
  CDR3 for beta chain variable domain of TCR clone 221662 (TRBV7-7, TRBJ2-1)
CASSLALTSGRSYNEQFF

SEQ ID NO: 443325 - protein, 16 aa, Homo sapiens
  CDR3 for alpha chain variable domain of TCR clone 221663 (TRAV3, TRAJ38)
CAVRDCLNAGNNHLQN

SEQ ID NO: 443326 - protein, 15 aa, Homo sapiens
  CDR3 for beta chain variable domain of TCR clone 221663 (TRBV6-5, TRBJ2-1)
CASSYDAGAGNEQFF

SEQ ID NO: 443327 - protein, 13 aa, Homo sapiens
  CDR3 for alpha chain variable domain of TCR clone 221664 (TRAV12-1, TRAJ6)
CVVYPGVSYIPTF

SEQ ID NO: 443328 - protein, 13 aa, Homo sapiens
  CDR3 for beta chain variable domain of TCR clone 221664 (TRBV20-1, TRBJ1-3)
CSAGAYSGNTIYF

SEQ ID NO: 443329 - protein, 13 aa, Homo sapiens
  CDR3 for alpha chain variable domain of TCR clone 221665 (TRAV12-2, TRAJ10)
CAVPTGGGNKLTF

SEQ ID NO: 443330 - protein, 16 aa, Homo sapiens
  CDR3 for beta chain variable domain of TCR clone 221665 (TRBV19, TRBJ2-1)
CASSKAGPSSYNEQFF

SEQ ID NO: 443331 - protein, 11 aa, Homo sapiens
  CDR3 for alpha chain variable domain of TCR clone 221666 (TRAV12-2, TRAJ31)
CALLNNARLMF

SEQ ID NO: 443332 - protein, 13 aa, Homo sapiens
  CDR3 for beta chain variable domain of TCR clone 221666 (TRBV20-1, TRBJ1-1)
CSARLGQGTEAFF

SEQ ID NO: 443333 - protein, 14 aa, Homo sapiens
  CDR3 for alpha chain variable domain of TCR clone 221667 (TRAV12-2, TRAJ33)
YAVKRARSNYQLIW

SEQ ID NO: 443334 - protein, 12 aa, Homo sapiens
  CDR3 for beta chain variable domain of TCR clone 221667 (TRBV24-1, TRBJ2-3)
CATSDSTDTQYF

SEQ ID NO: 443335 - protein, 16 aa, Homo sapiens
  CDR3 for alpha chain variable domain of TCR clone 221668 (TRAV14/DV4, TRAJ53)
CAMREGGGGSNYKLTF

SEQ ID NO: 443336 - protein, 13 aa, Homo sapiens
  CDR3 for beta chain variable domain of TCR clone 221668 (TRBV20-1, TRBJ2-7)
CSASRSSSYEQYF

SEQ ID NO: 443337 - protein, 13 aa, Homo sapiens
  CDR3 for alpha chain variable domain of TCR clone 221669 (TRAV27, TRAJ3)
ASLRGSSASKIIF

SEQ ID NO: 443338 - protein, 15 aa, Homo sapiens
  CDR3 for beta chain variable domain of TCR clone 221669 (TRBV28, TRBJ1-3)
CASIMGWASGNTIYF

SEQ ID NO: 443339 - protein, 14 aa, Homo sapiens
  CDR3 for alpha chain variable domain of TCR clone 221670 (TRAV13-2, TRAJ17)
CAENSKAAGNKLTL

SEQ ID NO: 443340 - protein, 11 aa, Homo sapiens
  CDR3 for beta chain variable domain of TCR clone 221670 (TRBV6-3, TRBJ2-3)
CATRQADTQYF

SEQ ID NO: 443341 - protein, 14 aa, Homo sapiens
  CDR3 for alpha chain variable domain of TCR clone 221671 (TRAV12-2, TRAJ4)
CAEDLSGGYNKLIF

SEQ ID NO: 443342 - protein, 12 aa, Homo sapiens
  CDR3 for beta chain variable domain of TCR clone 221671 (TRBV7-9, TRBJ2-7)
CASSFGSYEQYF

SEQ ID NO: 443343 - protein, 12 aa, Homo sapiens
  CDR3 for alpha chain variable domain of TCR clone 221672 (TRAV12-3, TRAJ17)
CAMTLTGNKLTF

SEQ ID NO: 443344 - protein, 13 aa, Homo sapiens
  CDR3 for beta chain variable domain of TCR clone 221672 (TRBV4-1, TRBJ1-1)
CASSQLGTGEAFF

SEQ ID NO: 443345 - protein, 15 aa, Homo sapiens
  CDR3 for alpha chain variable domain of TCR clone 221673 (TRAV12-2, TRAJ53)
CAGNGGGGSNYKLTF

SEQ ID NO: 443346 - protein, 14 aa, Homo sapiens
  CDR3 for beta chain variable domain of TCR clone 221673 (TRBV7-6, TRBJ2-3)
CASSLGTVTDTQYF

SEQ ID NO: 443347 - protein, 15 aa, Homo sapiens
  CDR3 for alpha chain variable domain of TCR clone 221674 (TRAV13-1, TRAJ45)
QVGRYSGGGADGLTF

SEQ ID NO: 443348 - protein, 15 aa, Homo sapiens
  CDR3 for beta chain variable domain of TCR clone 221674 (TRBV27, TRBJ2-1)
CASSNEGGSSNEQFF

SEQ ID NO: 443349 - protein, 14 aa, Homo sapiens
  CDR3 for alpha chain variable domain of TCR clone 221675 (TRAV12-2, TRAJ44)
CAVNPACTASKLTF

SEQ ID NO: 443350 - protein, 13 aa, Homo sapiens
  CDR3 for beta chain variable domain of TCR clone 221675 (TRBV20-1, TRBJ1-6)
CSAPLGVGSPLHF

SEQ ID NO: 443351 - protein, 14 aa, Homo sapiens
  CDR3 for alpha chain variable domain of TCR clone 221676 (TRAV2, TRAJ9)
CAVEDRSGGFKTIF

SEQ ID NO: 443352 - protein, 16 aa, Homo sapiens
  CDR3 for beta chain variable domain of TCR clone 221676 (TRBV7-2, TRBJ1-4)
CASSLAPGRRDEKLFF

SEQ ID NO: 443353 - protein, 18 aa, Homo sapiens
  CDR3 for alpha chain variable domain of TCR clone 221677 (TRAV21, TRAJ52)
CAVRPSPAGGTRYGKLTF

SEQ ID NO: 443354 - protein, 11 aa, Homo sapiens
  CDR3 for beta chain variable domain of TCR clone 221677 (TRBV11-2, TRBJ2-2)
CASSLPGELFF

SEQ ID NO: 443355 - protein, 14 aa, Homo sapiens
  CDR3 for alpha chain variable domain of TCR clone 221678 (TRAV12-2, TRAJ40)
CAVKIPSGTYKYIF

SEQ ID NO: 443356 - protein, 14 aa, Homo sapiens
  CDR3 for beta chain variable domain of TCR clone 221678 (TRBV7-9, TRBJ1-2)
CARSRQGANYGYTF

SEQ ID NO: 443357 - protein, 12 aa, Homo sapiens
  CDR3 for alpha chain variable domain of TCR clone 221679 (TRAV12-3, TRAJ17)
CAMTLTGNELTL

SEQ ID NO: 443358 - protein, 15 aa, Homo sapiens
  CDR3 for beta chain variable domain of TCR clone 221679 (TRBV20-1, TRBJ2-7)
CSARDRVSGMDEQYF

SEQ ID NO: 443359 - protein, 13 aa, Homo sapiens
  CDR3 for alpha chain variable domain of TCR clone 221680 (TRAV21, TRAJ27)
CAARPGMAGKSTF

SEQ ID NO: 443360 - protein, 14 aa, Homo sapiens
  CDR3 for beta chain variable domain of TCR clone 221680 (TRBV7-6, TRBJ2-3)
CASSLGTVTDTQYF

SEQ ID NO: 443361 - protein, 14 aa, Homo sapiens
  CDR3 for alpha chain variable domain of TCR clone 221681 (TRAV1-2, TRAJ16)
CAVNRFSDGKKLLF

SEQ ID NO: 443362 - protein, 15 aa, Homo sapiens
  CDR3 for beta chain variable domain of TCR clone 221681 (TRBV5-1, TRBJ2-1)
CASSPPRAPYNEQFF

SEQ ID NO: 443363 - protein, 16 aa, Homo sapiens
  CDR3 for alpha chain variable domain of TCR clone 221682 (TRAV1-2, TRAJ10)
CAVRGVLTGGGNKPTF

SEQ ID NO: 443364 - protein, 16 aa, Homo sapiens
  CDR3 for beta chain variable domain of TCR clone 221682 (TRBV12-5, TRBJ2-5)
CASGPRTSGNQETQYF

SEQ ID NO: 443365 - protein, 15 aa, Homo sapiens
  CDR3 for alpha chain variable domain of TCR clone 221683 (TRAV38-1, TRAJ48)
CAFMKHAGGNEKLTF

SEQ ID NO: 443366 - protein, 14 aa, Homo sapiens
  CDR3 for beta chain variable domain of TCR clone 221683 (TRBV6-1, TRBJ1-3)
CASVQGGGGNTIYF

SEQ ID NO: 443367 - protein, 14 aa, Homo sapiens
  CDR3 for alpha chain variable domain of TCR clone 221684 (TRAV36/DV7, TRAJ58)
CARTGETSGSRLTF

SEQ ID NO: 443368 - protein, 18 aa, Homo sapiens
  CDR3 for beta chain variable domain of TCR clone 221684 (TRBV11-2, TRBJ2-6)
CASSLNPFLGTGANVLTF

SEQ ID NO: 443369 - protein, 16 aa, Homo sapiens
  CDR3 for alpha chain variable domain of TCR clone 221685 (TRAV12-2, TRAJ43)
CAGDDMRFGAGTRLTV

SEQ ID NO: 443370 - protein, 16 aa, Homo sapiens
  CDR3 for beta chain variable domain of TCR clone 221685 (TRBV2, TRBJ2-4)
CASSEAPGGELNIQYF

SEQ ID NO: 443371 - protein, 14 aa, Homo sapiens
  CDR3 for alpha chain variable domain of TCR clone 221686 (TRAV3, TRAJ9)
CAVRGNTGGFKTIF

SEQ ID NO: 443372 - protein, 14 aa, Homo sapiens
  CDR3 for beta chain variable domain of TCR clone 221686 (TRBV15, TRBJ2-1)
CATSGVEDYNEQFL

SEQ ID NO: 443373 - protein, 13 aa, Homo sapiens
  CDR3 for alpha chain variable domain of TCR clone 221687 (TRAV12-2, TRAJ18)
CAVRGSTLGRLYF

SEQ ID NO: 443374 - protein, 14 aa, Homo sapiens
  CDR3 for beta chain variable domain of TCR clone 221687 (TRBV7-9, TRBJ2-1)
CASSSMVGFGEQFF

SEQ ID NO: 443375 - protein, 13 aa, Homo sapiens
  CDR3 for alpha chain variable domain of TCR clone 221688 (TRAV13-1, TRAJ21)
CAASIYNFNKFYF

SEQ ID NO: 443376 - protein, 13 aa, Homo sapiens
  CDR3 for beta chain variable domain of TCR clone 221688 (TRBV7-2, TRBJ2-4)
CASSREHANIQYF

SEQ ID NO: 443377 - protein, 15 aa, Homo sapiens
  CDR3 for alpha chain variable domain of TCR clone 221689 (TRAV29/DV5, TRAJ24)
CAASGATDSWGKFQF

SEQ ID NO: 443378 - protein, 13 aa, Homo sapiens
  CDR3 for beta chain variable domain of TCR clone 221689 (TRBV11-2, TRBJ2-5)
CASSSTGEETQYF

SEQ ID NO: 443379 - protein, 16 aa, Homo sapiens
  CDR3 for alpha chain variable domain of TCR clone 221690 (TRAV8-3, TRAJ44)
CAVGASNTGTASKLTF

SEQ ID NO: 443380 - protein, 16 aa, Homo sapiens
  CDR3 for beta chain variable domain of TCR clone 221690 (TRBV7-6, TRBJ2-3)
CASSSWREMGPDTQYF

SEQ ID NO: 443381 - protein, 15 aa, Homo sapiens
  CDR3 for alpha chain variable domain of TCR clone 221691 (TRAV27, TRAJ38)
CAARRNAGNNRKLIW

SEQ ID NO: 443382 - protein, 13 aa, Homo sapiens
  CDR3 for beta chain variable domain of TCR clone 221691 (TRBV12-5, TRBJ2-3)
FASGDRQSDTQYF

SEQ ID NO: 443383 - protein, 14 aa, Homo sapiens
  CDR3 for alpha chain variable domain of TCR clone 221692 (TRAV13-1, TRAJ44)
CAAKATGTASKLTF

SEQ ID NO: 443384 - protein, 15 aa, Homo sapiens
  CDR3 for beta chain variable domain of TCR clone 221692 (TRBV5-5, TRBJ1-2)
CISVPAASGGEDYTF

SEQ ID NO: 443385 - protein, 13 aa, Homo sapiens
  CDR3 for alpha chain variable domain of TCR clone 221693 (TRAV17, TRAJ5)
CALRVTGRRALTF

SEQ ID NO: 443386 - protein, 13 aa, Homo sapiens
  CDR3 for beta chain variable domain of TCR clone 221693 (TRBV4-2, TRBJ1-1)
CASSQAGNTEAFF

SEQ ID NO: 443387 - protein, 15 aa, Homo sapiens
  CDR3 for alpha chain variable domain of TCR clone 221694 (TRAV16, TRAJ10)
CALEGLTGGGNKPTF

SEQ ID NO: 443388 - protein, 14 aa, Homo sapiens
  CDR3 for beta chain variable domain of TCR clone 221694 (TRBV7-6, TRBJ2-3)
CASSLGTVTDTQYF

SEQ ID NO: 443389 - protein, 14 aa, Homo sapiens
  CDR3 for alpha chain variable domain of TCR clone 221695 (TRAV34, TRAJ44)
CGADGTGTDSKLTF

SEQ ID NO: 443390 - protein, 12 aa, Homo sapiens
  CDR3 for beta chain variable domain of TCR clone 221695 (TRBV6-3, TRBJ2-7)
CASSRQGYEQYF

SEQ ID NO: 443391 - protein, 12 aa, Homo sapiens
  CDR3 for alpha chain variable domain of TCR clone 221696 (TRAV13-1, TRAJ21)
CAAKEGFNKFYF

SEQ ID NO: 443392 - protein, 14 aa, Homo sapiens
  CDR3 for beta chain variable domain of TCR clone 221696 (TRBV5-8, TRBJ2-7)
CASKKGPSSYEQYF

SEQ ID NO: 443393 - protein, 12 aa, Homo sapiens
  CDR3 for alpha chain variable domain of TCR clone 221697 (TRAV12-3, TRAJ17)
CAMTLTGNKLTF

SEQ ID NO: 443394 - protein, 16 aa, Homo sapiens
  CDR3 for beta chain variable domain of TCR clone 221697 (TRBV24-1, TRBJ2-1)
CATSGVTGANYNEQFF

SEQ ID NO: 443395 - protein, 11 aa, Homo sapiens
  CDR3 for alpha chain variable domain of TCR clone 221698 (TRAV23/DV6, TRAJ58)
CAARLLRGETS

SEQ ID NO: 443396 - protein, 15 aa, Homo sapiens
  CDR3 for beta chain variable domain of TCR clone 221698 (TRBV7-2, TRBJ2-1)
CASSSGLAGGNEQFF

SEQ ID NO: 443397 - protein, 12 aa, Homo sapiens
  CDR3 for alpha chain variable domain of TCR clone 221699 (TRAV3, TRAJ43)
CAVRDPNNDMRF

SEQ ID NO: 443398 - protein, 13 aa, Homo sapiens
  CDR3 for beta chain variable domain of TCR clone 221699 (TRBV2, TRBJ2-7)
CASKAGSSYEQYF

SEQ ID NO: 443399 - protein, 13 aa, Homo sapiens
  CDR3 for alpha chain variable domain of TCR clone 221700 (TRAV13-1, TRAJ37)
CSARSGNTGRLIF

SEQ ID NO: 443400 - protein, 14 aa, Homo sapiens
  CDR3 for beta chain variable domain of TCR clone 221700 (TRBV12-4, TRBJ2-3)
CASSLGQGTDTQYF

SEQ ID NO: 443401 - protein, 17 aa, Homo sapiens
  CDR3 for alpha chain variable domain of TCR clone 221701 (TRAV26-2, TRAJ42)
CILRDVGYGGSQGNLIF

SEQ ID NO: 443402 - protein, 16 aa, Homo sapiens
  CDR3 for beta chain variable domain of TCR clone 221701 (TRBV12-4, TRBJ2-7)
CASSVIGGTGTYEQDF

SEQ ID NO: 443403 - protein, 21 aa, Homo sapiens
  CDR3 for alpha chain variable domain of TCR clone 221702 (TRAV8-3, TRAJ6)
CAVGGEEATYLHLEEEPALLF

SEQ ID NO: 443404 - protein, 17 aa, Homo sapiens
  CDR3 for beta chain variable domain of TCR clone 221702 (TRBV7-2, TRBJ2-3)
CASSLAGGLAGTAGQYV

SEQ ID NO: 443405 - protein, 14 aa, Homo sapiens
  CDR3 for alpha chain variable domain of TCR clone 221703 (TRAV6, TRAJ18)
CAPHRGSTLGRLYF

SEQ ID NO: 443406 - protein, 14 aa, Homo sapiens
  CDR3 for beta chain variable domain of TCR clone 221703 (TRBV4-1, TRBJ2-2)
CASSQYPDTGELFF

SEQ ID NO: 443407 - protein, 11 aa, Homo sapiens
  CDR3 for alpha chain variable domain of TCR clone 221704 (TRAV26-1, TRAJ37)
CIVRVGRKLIF

SEQ ID NO: 443408 - protein, 14 aa, Homo sapiens
  CDR3 for beta chain variable domain of TCR clone 221704 (TRBV19, TRBJ2-2)
CASSTLHRSGELFF

SEQ ID NO: 443409 - protein, 13 aa, Homo sapiens
  CDR3 for alpha chain variable domain of TCR clone 221705 (TRAV1-2, TRAJ9)
CAALNTGGFKTIF

SEQ ID NO: 443410 - protein, 17 aa, Homo sapiens
  CDR3 for beta chain variable domain of TCR clone 221705 (TRBV13, TRBJ2-3)
RASSLSRVAGGRNTQYF

SEQ ID NO: 443411 - protein, 14 aa, Homo sapiens
  CDR3 for alpha chain variable domain of TCR clone 221706 (TRAV38-1, TRAJ39)
CAFAYNNAGNMLTF

SEQ ID NO: 443412 - protein, 15 aa, Homo sapiens
  CDR3 for beta chain variable domain of TCR clone 221706 (TRBV19, TRBJ2-6)
CASSIGPSGDNVLTF

SEQ ID NO: 443413 - protein, 15 aa, Homo sapiens
  CDR3 for alpha chain variable domain of TCR clone 221707 (TRAV3, TRAJ5)
CAVRDLDTGRIALTF

SEQ ID NO: 443414 - protein, 15 aa, Homo sapiens
  CDR3 for beta chain variable domain of TCR clone 221707 (TRBV20-1, TRBJ2-1)
CSARSPGGPGNEQFF

SEQ ID NO: 443415 - protein, 12 aa, Homo sapiens
  CDR3 for alpha chain variable domain of TCR clone 221708 (TRAV27, TRAJ41)
CAGRNSGYALNF

SEQ ID NO: 443416 - protein, 13 aa, Homo sapiens
  CDR3 for beta chain variable domain of TCR clone 221708 (TRBV7-3, TRBJ1-1)
CASSQDWGAEAFF

SEQ ID NO: 443417 - protein, 13 aa, Homo sapiens
  CDR3 for alpha chain variable domain of TCR clone 221709 (TRAV27, TRAJ6)
CAGGTRGSYIPTF

SEQ ID NO: 443418 - protein, 14 aa, Homo sapiens
  CDR3 for beta chain variable domain of TCR clone 221709 (TRBV6-1, TRBJ1-3)
CAGVQGGGGNTIYF

SEQ ID NO: 443419 - protein, 17 aa, Homo sapiens
  CDR3 for alpha chain variable domain of TCR clone 221710 (TRAV26-1, TRAJ53)
CIVRVDDSGGTNYKMTF

SEQ ID NO: 443420 - protein, 15 aa, Homo sapiens
  CDR3 for beta chain variable domain of TCR clone 221710 (TRBV20-1, TRBJ2-7)
CSARVPAAYFYEQYF

SEQ ID NO: 443421 - protein, 16 aa, Homo sapiens
  CDR3 for alpha chain variable domain of TCR clone 221711 (TRAV8-3, TRAJ18)
CAVALDRGSTLGRLYV

SEQ ID NO: 443422 - protein, 11 aa, Homo sapiens
  CDR3 for beta chain variable domain of TCR clone 221711 (TRBV29-1, TRBJ1-1)
CSVEILTEAFF

SEQ ID NO: 443423 - protein, 16 aa, Homo sapiens
  CDR3 for alpha chain variable domain of TCR clone 221712 (TRAV8-3, TRAJ13)
CAVGAYPSGGYQKVTF

SEQ ID NO: 443424 - protein, 15 aa, Homo sapiens
  CDR3 for beta chain variable domain of TCR clone 221712 (TRBV7-2, TRBJ2-1)
CASTHGTGIYNEQFF

SEQ ID NO: 443425 - protein, 13 aa, Homo sapiens
  CDR3 for alpha chain variable domain of TCR clone 221713 (TRAV21, TRAJ15)
CDVCSQAGTALIF

SEQ ID NO: 443426 - protein, 16 aa, Homo sapiens
  CDR3 for beta chain variable domain of TCR clone 221713 (TRBV12-4, TRBJ1-5)
CASSRPVGGSNQPQHF

SEQ ID NO: 443427 - protein, 14 aa, Homo sapiens
  CDR3 for alpha chain variable domain of TCR clone 221714 (TRAV12-3, TRAJ28)
CAMWAGAGSYQLTF

SEQ ID NO: 443428 - protein, 14 aa, Homo sapiens
  CDR3 for beta chain variable domain of TCR clone 221714 (TRBV19, TRBJ1-5)
CASSLSGGSQPQHF

SEQ ID NO: 443429 - protein, 16 aa, Homo sapiens
  CDR3 for alpha chain variable domain of TCR clone 221715 (TRAV3, TRAJ4)
CAVSAFFSGGYNTLIF

SEQ ID NO: 443430 - protein, 16 aa, Homo sapiens
  CDR3 for beta chain variable domain of TCR clone 221715 (TRBV6-1, TRBJ1-6)
CASSERGGSGNSPLHF

SEQ ID NO: 443431 - protein, 13 aa, Homo sapiens
  CDR3 for alpha chain variable domain of TCR clone 221716 (TRAV8-6, TRAJ13)
CAVRDGGYQKVTF

SEQ ID NO: 443432 - protein, 14 aa, Homo sapiens
  CDR3 for beta chain variable domain of TCR clone 221716 (TRBV4-1, TRBJ2-2)
CVSSQAVNTGELFF

SEQ ID NO: 443433 - protein, 13 aa, Homo sapiens
  CDR3 for alpha chain variable domain of TCR clone 221717 (TRAV30, TRAJ31)
CGTETRNNARLMF

SEQ ID NO: 443434 - protein, 14 aa, Homo sapiens
  CDR3 for beta chain variable domain of TCR clone 221717 (TRBV11-2, TRBJ2-3)
CASSLGGGANTQYF

SEQ ID NO: 443435 - protein, 10 aa, Homo sapiens
  CDR3 for alpha chain variable domain of TCR clone 221718 (TRAV1-2, TRAJ18)
CAVRGEAQPW

SEQ ID NO: 443436 - protein, 13 aa, Homo sapiens
  CDR3 for beta chain variable domain of TCR clone 221718 (TRBV19, TRBJ1-5)
CASSIGGEQPQHF

SEQ ID NO: 443437 - protein, 14 aa, Homo sapiens
  CDR3 for alpha chain variable domain of TCR clone 221719 (TRAV23/DV6, TRAJ45)
CAASWGGGADGLTF

SEQ ID NO: 443438 - protein, 15 aa, Homo sapiens
  CDR3 for beta chain variable domain of TCR clone 221719 (TRBV4-2, TRBJ1-2)
CASSRNTGAGYGYPF

SEQ ID NO: 443439 - protein, 13 aa, Homo sapiens
  CDR3 for alpha chain variable domain of TCR clone 221720 (TRAV5, TRAJ30)
YAETANRDDKIIF

SEQ ID NO: 443440 - protein, 14 aa, Homo sapiens
  CDR3 for beta chain variable domain of TCR clone 221720 (TRBV4-1, TRBJ2-2)
CASSQAVNTGELFF

SEQ ID NO: 443441 - protein, 12 aa, Homo sapiens
  CDR3 for alpha chain variable domain of TCR clone 221721 (TRAV21, TRAJ39)
CAADNAGNMLTF

SEQ ID NO: 443442 - protein, 15 aa, Homo sapiens
  CDR3 for beta chain variable domain of TCR clone 221721 (TRBV5-1, TRBJ2-1)
CASSPPRAPYNEQFF

SEQ ID NO: 443443 - protein, 14 aa, Homo sapiens
  CDR3 for alpha chain variable domain of TCR clone 221722 (TRAV1-2, TRAJ8)
CAVREDTGFQKLVF

SEQ ID NO: 443444 - protein, 16 aa, Homo sapiens
  CDR3 for beta chain variable domain of TCR clone 221722 (TRBV20-1, TRBJ1-4)
CSAPGQGLLTNEKLFC

SEQ ID NO: 443445 - protein, 12 aa, Homo sapiens
  CDR3 for alpha chain variable domain of TCR clone 221723 (TRAV8-3, TRAJ20)
CAVDFNDYKLSF

SEQ ID NO: 443446 - protein, 14 aa, Homo sapiens
  CDR3 for beta chain variable domain of TCR clone 221723 (TRBV12-4, TRBJ1-1)
CASSLGTGGTEAFF

SEQ ID NO: 443447 - protein, 19 aa, Homo sapiens
  CDR3 for alpha chain variable domain of TCR clone 221724 (TRAV26-1, TRAJ52)
CIVRAHRNAGGTSYEKLTF

SEQ ID NO: 443448 - protein, 15 aa, Homo sapiens
  CDR3 for beta chain variable domain of TCR clone 221724 (TRBV29-1, TRBJ2-1)
CSGRDKKSSYNEQFF

SEQ ID NO: 443449 - protein, 18 aa, Homo sapiens
  CDR3 for alpha chain variable domain of TCR clone 221725 (TRAV21, TRAJ52)
CAVRPSPAGGTSYGKLTF

SEQ ID NO: 443450 - protein, 15 aa, Homo sapiens
  CDR3 for beta chain variable domain of TCR clone 221725 (TRBV7-6, TRBJ2-7)
CASSGRRDTFGEQYF

SEQ ID NO: 443451 - protein, 10 aa, Homo sapiens
  CDR3 for alpha chain variable domain of TCR clone 221726 (TRAV23/DV6, TRAJ31)
CARGGARLMF

SEQ ID NO: 443452 - protein, 13 aa, Homo sapiens
  CDR3 for beta chain variable domain of TCR clone 221726 (TRBV7-9, TRBJ2-7)
CASSFAGAYEQYF

SEQ ID NO: 443453 - protein, 18 aa, Homo sapiens
  CDR3 for alpha chain variable domain of TCR clone 221727 (TRAV26-2, TRAJ32)
CILRAPLNYGVATNKLIF

SEQ ID NO: 443454 - protein, 13 aa, Homo sapiens
  CDR3 for beta chain variable domain of TCR clone 221727 (TRBV7-3, TRBJ2-1)
CASSLWPYNEQFF

SEQ ID NO: 443455 - protein, 17 aa, Homo sapiens
  CDR3 for alpha chain variable domain of TCR clone 221728 (TRAV3, TRAJ12)
CAVRDGGRMDSSYKLIF

SEQ ID NO: 443456 - protein, 15 aa, Homo sapiens
  CDR3 for beta chain variable domain of TCR clone 221728 (TRBV6-1, TRBJ2-3)
CASSERGGITDTQYF

SEQ ID NO: 443457 - protein, 13 aa, Homo sapiens
  CDR3 for alpha chain variable domain of TCR clone 221729 (TRAV14/DV4, TRAJ22)
CAMRDLSARQLTF

SEQ ID NO: 443458 - protein, 18 aa, Homo sapiens
  CDR3 for beta chain variable domain of TCR clone 221729 (TRBV19, TRBJ1-5)
CASSKGQVSIHSNQPQQF

SEQ ID NO: 443459 - protein, 16 aa, Homo sapiens
  CDR3 for alpha chain variable domain of TCR clone 221730 (TRAV3, TRAJ37)
CAVRPHGSGNPGKLIF

SEQ ID NO: 443460 - protein, 15 aa, Homo sapiens
  CDR3 for beta chain variable domain of TCR clone 221730 (TRBV20-1, TRBJ2-7)
CSARDRVSGMDEQYF

SEQ ID NO: 443461 - protein, 14 aa, Homo sapiens
  CDR3 for alpha chain variable domain of TCR clone 221731 (TRAV1-2, TRAJ16)
CAVNRFSDGQKLLF

SEQ ID NO: 443462 - protein, 13 aa, Homo sapiens
  CDR3 for beta chain variable domain of TCR clone 221731 (TRBV20-1, TRBJ2-7)
CSARPSTNYEQYF

SEQ ID NO: 443463 - protein, 16 aa, Homo sapiens
  CDR3 for alpha chain variable domain of TCR clone 221732 (TRAV27, TRAJ53)
WAAPEGSGGSNYKLTF

SEQ ID NO: 443464 - protein, 14 aa, Homo sapiens
  CDR3 for beta chain variable domain of TCR clone 221732 (TRBV4-3, TRBJ1-5)
CASSQGGQGWPQHF

SEQ ID NO: 443465 - protein, 16 aa, Homo sapiens
  CDR3 for alpha chain variable domain of TCR clone 221733 (TRAV30, TRAJ24)
CGTEIVDADSWGKFQF

SEQ ID NO: 443466 - protein, 17 aa, Homo sapiens
  CDR3 for beta chain variable domain of TCR clone 221733 (TRBV20-1, TRBJ2-2)
SSASGSGQGGLTGELFF

SEQ ID NO: 443467 - protein, 17 aa, Homo sapiens
  CDR3 for alpha chain variable domain of TCR clone 221734 (TRAV27, TRAJ18)
CAGLHRGRGSTLGRLYF

SEQ ID NO: 443468 - protein, 17 aa, Homo sapiens
  CDR3 for beta chain variable domain of TCR clone 221734 (TRBV7-8, TRBJ2-6)
CASSAGTGGAGANVLTF

SEQ ID NO: 443469 - protein, 18 aa, Homo sapiens
  CDR3 for alpha chain variable domain of TCR clone 221735 (TRAV21, TRAJ52)
CAVRPSPAGGTSYGKLTF

SEQ ID NO: 443470 - protein, 17 aa, Homo sapiens
  CDR3 for beta chain variable domain of TCR clone 221735 (TRBV11-2, TRBJ2-1)
CASGLYPPGVEYNEQFF

SEQ ID NO: 443471 - protein, 23 aa, Homo sapiens
  CDR3 for alpha chain variable domain of TCR clone 221736 (TRAV26-1, )
CIADNAGNNNIQNTDPAVYQLRD

SEQ ID NO: 443472 - protein, 13 aa, Homo sapiens
  CDR3 for beta chain variable domain of TCR clone 221736 (TRBV20-1, TRBJ1-1)
CSARGGGNTEAFF

SEQ ID NO: 443473 - protein, 13 aa, Homo sapiens
  CDR3 for alpha chain variable domain of TCR clone 221737 (TRAV20, TRAJ34)
CAGGSYNTDKLIF

SEQ ID NO: 443474 - protein, 14 aa, Homo sapiens
  CDR3 for beta chain variable domain of TCR clone 221737 (TRBV5-1, TRBJ2-7)
CASSRGESLYEQYF

SEQ ID NO: 443475 - protein, 14 aa, Homo sapiens
  CDR3 for alpha chain variable domain of TCR clone 221738 (TRAV13-1, TRAJ35)
CAASKGGFGNVLHC

SEQ ID NO: 443476 - protein, 15 aa, Homo sapiens
  CDR3 for beta chain variable domain of TCR clone 221738 (TRBV13, TRBJ1-2)
CASSLGRQPGYGYTF

SEQ ID NO: 443477 - protein, 14 aa, Homo sapiens
  CDR3 for alpha chain variable domain of TCR clone 221739 (TRAV8-6, TRAJ36)
CAVSEKDGANNLFF

SEQ ID NO: 443478 - protein, 16 aa, Homo sapiens
  CDR3 for beta chain variable domain of TCR clone 221739 (TRBV20-1, TRBJ1-4)
CSAPGQGLLTNEKLFF

SEQ ID NO: 443479 - protein, 17 aa, Homo sapiens
  CDR3 for alpha chain variable domain of TCR clone 221740 (TRAV12-2, TRAJ36)
CAVKDNLFFGTGTRLTA

SEQ ID NO: 443480 - protein, 15 aa, Homo sapiens
  CDR3 for beta chain variable domain of TCR clone 221740 (TRBV28, TRBJ2-2)
CASTVAGANTGELFF

SEQ ID NO: 443481 - protein, 16 aa, Homo sapiens
  CDR3 for alpha chain variable domain of TCR clone 221741 (TRAV14/DV4, TRAJ53)
CAMREGGGGSNYKLTF

SEQ ID NO: 443482 - protein, 13 aa, Homo sapiens
  CDR3 for beta chain variable domain of TCR clone 221741 (TRBV2, TRBJ2-3)
CASILAGGQGQYF

SEQ ID NO: 443483 - protein, 16 aa, Homo sapiens
  CDR3 for alpha chain variable domain of TCR clone 221742 (TRAV4, TRAJ22)
CLVGDLYSVSARQLTF

SEQ ID NO: 443484 - protein, 16 aa, Homo sapiens
  CDR3 for beta chain variable domain of TCR clone 221742 (TRBV7-9, TRBJ2-3)
CASSPWREVGTDTQYF

SEQ ID NO: 443485 - protein, 12 aa, Homo sapiens
  CDR3 for alpha chain variable domain of TCR clone 221743 (TRAV6, TRAJ34)
CALHRGTDKLIF

SEQ ID NO: 443486 - protein, 14 aa, Homo sapiens
  CDR3 for beta chain variable domain of TCR clone 221743 (TRBV7-9, TRBJ2-2)
CASSGLADTGELFF

SEQ ID NO: 443487 - protein, 14 aa, Homo sapiens
  CDR3 for alpha chain variable domain of TCR clone 221744 (TRAV3, TRAJ9)
CAVRLNTGGFKTIF

SEQ ID NO: 443488 - protein, 15 aa, Homo sapiens
  CDR3 for beta chain variable domain of TCR clone 221744 (TRBV7-2, TRBJ2-1)
CASSLASSRVNEQFF

SEQ ID NO: 443489 - protein, 12 aa, Homo sapiens
  CDR3 for alpha chain variable domain of TCR clone 221745 (TRAV21, TRAJ43)
CAVSWNNNDMRF

SEQ ID NO: 443490 - protein, 15 aa, Homo sapiens
  CDR3 for beta chain variable domain of TCR clone 221745 (TRBV20-1, TRBJ2-1)
CSASAPSGGYNEQFF

SEQ ID NO: 443491 - protein, 15 aa, Homo sapiens
  CDR3 for alpha chain variable domain of TCR clone 221746 (TRAV4, TRAJ39)
CLVGPNNNSGNMLTF

SEQ ID NO: 443492 - protein, 15 aa, Homo sapiens
  CDR3 for beta chain variable domain of TCR clone 221746 (TRBV7-9, TRBJ1-6)
CASSSPGRGNSPLHF

SEQ ID NO: 443493 - protein, 14 aa, Homo sapiens
  CDR3 for alpha chain variable domain of TCR clone 221747 (TRAV12-1, TRAJ26)
CVVKGSNYGQNFVF

SEQ ID NO: 443494 - protein, 16 aa, Homo sapiens
  CDR3 for beta chain variable domain of TCR clone 221747 (TRBV4-1, TRBJ2-3)
CASSQSTSGAEDTQYF

SEQ ID NO: 443495 - protein, 14 aa, Homo sapiens
  CDR3 for alpha chain variable domain of TCR clone 221748 (TRAV12-1, TRAJ8)
FVVDSNTGFQKLVF

SEQ ID NO: 443496 - protein, 16 aa, Homo sapiens
  CDR3 for beta chain variable domain of TCR clone 221748 (TRBV20-1, TRBJ2-2)
CSARDDRVGLTGELFF

SEQ ID NO: 443497 - protein, 16 aa, Homo sapiens
  CDR3 for alpha chain variable domain of TCR clone 221749 (TRAV35, TRAJ28)
CAGQRYSGAGSYQLTF

SEQ ID NO: 443498 - protein, 13 aa, Homo sapiens
  CDR3 for beta chain variable domain of TCR clone 221749 (TRBV7-9, TRBJ1-2)
CASSLKQNYGYTF

SEQ ID NO: 443499 - protein, 14 aa, Homo sapiens
  CDR3 for alpha chain variable domain of TCR clone 221750 (TRAV1-2, TRAJ16)
CAVNLFSDGQKLLF

SEQ ID NO: 443500 - protein, 15 aa, Homo sapiens
  CDR3 for beta chain variable domain of TCR clone 221750 (TRBV7-9, TRBJ1-6)
CASSSPGRGNSALHF

SEQ ID NO: 443501 - protein, 15 aa, Homo sapiens
  CDR3 for alpha chain variable domain of TCR clone 221751 (TRAV3, TRAJ20)
CAVRDIKLSDYKLSF

SEQ ID NO: 443502 - protein, 15 aa, Homo sapiens
  CDR3 for beta chain variable domain of TCR clone 221751 (TRBV7-9, TRBJ1-6)
CASSSPGRGNSPLQF

SEQ ID NO: 443503 - protein, 13 aa, Homo sapiens
  CDR3 for alpha chain variable domain of TCR clone 221752 (TRAV3, TRAJ21)
CAVREPDFIKFYF

SEQ ID NO: 443504 - protein, 16 aa, Homo sapiens
  CDR3 for beta chain variable domain of TCR clone 221752 (TRBV7-2, TRBJ2-6)
CASSLAGRSGANVLTF

SEQ ID NO: 443505 - protein, 12 aa, Homo sapiens
  CDR3 for alpha chain variable domain of TCR clone 221753 (TRAV35, TRAJ12)
CAGMDSSYQLIF

SEQ ID NO: 443506 - protein, 14 aa, Homo sapiens
  CDR3 for beta chain variable domain of TCR clone 221753 (TRBV28, TRBJ2-5)
CASSLYRGTETQYF

SEQ ID NO: 443507 - protein, 13 aa, Homo sapiens
  CDR3 for alpha chain variable domain of TCR clone 221754 (TRAV26-1, TRAJ40)
CIVRVEGTHKYIF

SEQ ID NO: 443508 - protein, 15 aa, Homo sapiens
  CDR3 for beta chain variable domain of TCR clone 221754 (TRBV12-4, TRBJ1-2)
CASSLAHRDGQAYTF

SEQ ID NO: 443509 - protein, 12 aa, Homo sapiens
  CDR3 for alpha chain variable domain of TCR clone 221755 (TRAV12-2, TRAJ21)
CAPSDNFNKFYF

SEQ ID NO: 443510 - protein, 16 aa, Homo sapiens
  CDR3 for beta chain variable domain of TCR clone 221755 (TRBV7-3, TRBJ2-2)
CASSLKRGTLSGELFF

SEQ ID NO: 443511 - protein, 13 aa, Homo sapiens
  CDR3 for alpha chain variable domain of TCR clone 221756 (TRAV2, TRAJ15)
CAVASQAGTALIF

SEQ ID NO: 443512 - protein, 15 aa, Homo sapiens
  CDR3 for beta chain variable domain of TCR clone 221756 (TRBV6-1, TRBJ2-2)
CASSRLRGDTGELFF

SEQ ID NO: 443513 - protein, 16 aa, Homo sapiens
  CDR3 for alpha chain variable domain of TCR clone 221757 (TRAV13-2, TRAJ23)
CAETRRFYNQGGKLNF

SEQ ID NO: 443514 - protein, 15 aa, Homo sapiens
  CDR3 for beta chain variable domain of TCR clone 221757 (TRBV3-1, TRBJ1-2)
CASSHPGTPGYGYTF

SEQ ID NO: 443515 - protein, 14 aa, Homo sapiens
  CDR3 for alpha chain variable domain of TCR clone 221758 (TRAV35, TRAJ33)
CRPRGRDSNYQLIW

SEQ ID NO: 443516 - protein, 11 aa, Homo sapiens
  CDR3 for beta chain variable domain of TCR clone 221758 (TRBV10-3, TRBJ2-7)
CAISEGLEQYF

SEQ ID NO: 443517 - protein, 13 aa, Homo sapiens
  CDR3 for alpha chain variable domain of TCR clone 221759 (TRAV16, TRAJ34)
CITVLSHTDKLIF

SEQ ID NO: 443518 - protein, 15 aa, Homo sapiens
  CDR3 for beta chain variable domain of TCR clone 221759 (TRBV11-3, TRBJ2-2)
CASSSDRVNAGELFF

SEQ ID NO: 443519 - protein, 12 aa, Homo sapiens
  CDR3 for alpha chain variable domain of TCR clone 221760 (TRAV8-3, TRAJ26)
CAGDNYGQNFVF

SEQ ID NO: 443520 - protein, 12 aa, Homo sapiens
  CDR3 for beta chain variable domain of TCR clone 221760 (TRBV11-2, TRBJ2-2)
CATSLGGGELFF

SEQ ID NO: 443521 - protein, 14 aa, Homo sapiens
  CDR3 for alpha chain variable domain of TCR clone 221761 (TRAV29/DV5, TRAJ36)
CAARRKTGANNLFF

SEQ ID NO: 443522 - protein, 16 aa, Homo sapiens
  CDR3 for beta chain variable domain of TCR clone 221761 (TRBV5-4, TRBJ2-2)
CASSRVKDRVTGELFF

SEQ ID NO: 443523 - protein, 16 aa, Homo sapiens
  CDR3 for alpha chain variable domain of TCR clone 221762 (TRAV26-1, TRAJ23)
CIVRVHPYNQGGKLIF

SEQ ID NO: 443524 - protein, 15 aa, Homo sapiens
  CDR3 for beta chain variable domain of TCR clone 221762 (TRBV20-1, TRBJ2-5)
CSASPLAGGQETQYF

SEQ ID NO: 443525 - protein, 14 aa, Homo sapiens
  CDR3 for alpha chain variable domain of TCR clone 221763 (TRAV1-1, TRAJ23)
CAVKAYNQGGKLIF

SEQ ID NO: 443526 - protein, 16 aa, Homo sapiens
  CDR3 for beta chain variable domain of TCR clone 221763 (TRBV7-2, TRBJ2-7)
CASTSQAASGGYEQYF

SEQ ID NO: 443527 - protein, 17 aa, Homo sapiens
  CDR3 for alpha chain variable domain of TCR clone 221764 (TRAV35, TRAJ28)
CAGLQVYSGAGSYQLTS

SEQ ID NO: 443528 - protein, 15 aa, Homo sapiens
  CDR3 for beta chain variable domain of TCR clone 221764 (TRBV2, TRBJ1-2)
CASSEIGGANYGYTF

SEQ ID NO: 443529 - protein, 12 aa, Homo sapiens
  CDR3 for alpha chain variable domain of TCR clone 221765 (TRAV25, TRAJ38)
CAGTGNNRKLIC

SEQ ID NO: 443530 - protein, 14 aa, Homo sapiens
  CDR3 for beta chain variable domain of TCR clone 221765 (TRBV5-4, TRBJ1-1)
CASSLDSRRDEAFL

SEQ ID NO: 443531 - protein, 13 aa, Homo sapiens
  CDR3 for alpha chain variable domain of TCR clone 221766 (TRAV38-1, TRAJ42)
CARWGRSQGNLIF

SEQ ID NO: 443532 - protein, 13 aa, Homo sapiens
  CDR3 for beta chain variable domain of TCR clone 221766 (TRBV19, TRBJ1-2)
CASSQGQVYGYTF

SEQ ID NO: 443533 - protein, 14 aa, Homo sapiens
  CDR3 for alpha chain variable domain of TCR clone 221767 (TRAV12-3, TRAJ57)
CAMSAWGGSEKLVF

SEQ ID NO: 443534 - protein, 15 aa, Homo sapiens
  CDR3 for beta chain variable domain of TCR clone 221767 (TRBV11-3, TRBJ2-7)
CASSLLSGSSYEQYF

SEQ ID NO: 443535 - protein, 11 aa, Homo sapiens
  CDR3 for alpha chain variable domain of TCR clone 221768 (TRAV12-1, TRAJ30)
CVVNGQDKIIF

SEQ ID NO: 443536 - protein, 13 aa, Homo sapiens
  CDR3 for beta chain variable domain of TCR clone 221768 (TRBV2, TRBJ2-5)
CASSGQGEQTQYF

SEQ ID NO: 443537 - protein, 13 aa, Homo sapiens
  CDR3 for alpha chain variable domain of TCR clone 221769 (TRAV4, TRAJ34)
CLVGDYNTDKLIF

SEQ ID NO: 443538 - protein, 23 aa, Homo sapiens
  CDR3 for beta chain variable domain of TCR clone 221769 (TRBV4-2, TRBJ2-3)
CASSQDPPRASSISGGEGRYAVF

SEQ ID NO: 443539 - protein, 14 aa, Homo sapiens
  CDR3 for alpha chain variable domain of TCR clone 221770 (TRAV16, TRAJ39)
CALSKNNAGNMLTF

SEQ ID NO: 443540 - protein, 17 aa, Homo sapiens
  CDR3 for beta chain variable domain of TCR clone 221770 (TRBV27, TRBJ2-6)
CASSLTGFASGANVLSF

SEQ ID NO: 443541 - protein, 14 aa, Homo sapiens
  CDR3 for alpha chain variable domain of TCR clone 221771 (TRAV1-2, TRAJ16)
CAVNRFSDGQKLLF

SEQ ID NO: 443542 - protein, 15 aa, Homo sapiens
  CDR3 for beta chain variable domain of TCR clone 221771 (TRBV4-3, TRBJ2-1)
CASSQESAIYNEQFF

SEQ ID NO: 443543 - protein, 15 aa, Homo sapiens
  CDR3 for alpha chain variable domain of TCR clone 221772 (TRAV8-3, TRAJ45)
CASSYSGGGADGLTF

SEQ ID NO: 443544 - protein, 13 aa, Homo sapiens
  CDR3 for beta chain variable domain of TCR clone 221772 (TRBV11-2, TRBJ2-1)
CASSLGLAGGRFF

SEQ ID NO: 443545 - protein, 17 aa, Homo sapiens
  CDR3 for alpha chain variable domain of TCR clone 221773 (TRAV26-1, TRAJ28)
CIVRVPDSGAGSYQLTF

SEQ ID NO: 443546 - protein, 17 aa, Homo sapiens
  CDR3 for beta chain variable domain of TCR clone 221773 (TRBV28, TRBJ2-7)
CASCPLPAGGKCYEQYF

SEQ ID NO: 443547 - protein, 14 aa, Homo sapiens
  CDR3 for alpha chain variable domain of TCR clone 221774 (TRAV27, TRAJ22)
CAGVVPGSARQLTF

SEQ ID NO: 443548 - protein, 16 aa, Homo sapiens
  CDR3 for beta chain variable domain of TCR clone 221774 (TRBV9, TRBJ2-7)
CASSVGLGGGTYEQSF

SEQ ID NO: 443549 - protein, 13 aa, Homo sapiens
  CDR3 for alpha chain variable domain of TCR clone 221775 (TRAV12-3, TRAJ43)
CAMIRPNNNDMRF

SEQ ID NO: 443550 - protein, 12 aa, Homo sapiens
  CDR3 for beta chain variable domain of TCR clone 221775 (TRBV11-2, TRBJ2-7)
CASSLGQETQYF

SEQ ID NO: 443551 - protein, 13 aa, Homo sapiens
  CDR3 for alpha chain variable domain of TCR clone 221776 (TRAV3, TRAJ21)
CAVREPDFNKLYF

SEQ ID NO: 443552 - protein, 15 aa, Homo sapiens
  CDR3 for beta chain variable domain of TCR clone 221776 (TRBV9, TRBJ1-6)
CASSVAGTGDSPLHF

SEQ ID NO: 443553 - protein, 14 aa, Homo sapiens
  CDR3 for alpha chain variable domain of TCR clone 221777 (TRAV12-3, TRAJ6)
CAMSATGGSYIPTF

SEQ ID NO: 443554 - protein, 16 aa, Homo sapiens
  CDR3 for beta chain variable domain of TCR clone 221777 (TRBV4-2, TRBJ2-1)
CASSPRAGKGANEQFF

SEQ ID NO: 443555 - protein, 14 aa, Homo sapiens
  CDR3 for alpha chain variable domain of TCR clone 221778 (TRAV8-4, TRAJ27)
CAVSKGTNAGKSNF

SEQ ID NO: 443556 - protein, 16 aa, Homo sapiens
  CDR3 for beta chain variable domain of TCR clone 221778 (TRBV2, TRBJ2-7)
CASSSTRRGSSYEQYF

SEQ ID NO: 443557 - protein, 12 aa, Homo sapiens
  CDR3 for alpha chain variable domain of TCR clone 221779 (TRAV26-1, TRAJ26)
CIVYNYGQNFVF

SEQ ID NO: 443558 - protein, 15 aa, Homo sapiens
  CDR3 for beta chain variable domain of TCR clone 221779 (TRBV7-2, TRBJ2-3)
CASSLLGGSTDTQYF

SEQ ID NO: 443559 - protein, 11 aa, Homo sapiens
  CDR3 for alpha chain variable domain of TCR clone 221780 (TRAV14/DV4, )
CAMREISRTLT

SEQ ID NO: 443560 - protein, 14 aa, Homo sapiens
  CDR3 for beta chain variable domain of TCR clone 221780 (TRBV2, TRBJ2-1)
CASSDRAYYNEQLF

SEQ ID NO: 443561 - protein, 19 aa, Homo sapiens
  CDR3 for alpha chain variable domain of TCR clone 221781 (TRAV1-2, TRAJ26)
CLLPLCCERPDNYGQNFVF

SEQ ID NO: 443562 - protein, 17 aa, Homo sapiens
  CDR3 for beta chain variable domain of TCR clone 221781 (TRBV5-1, TRBJ2-5)
CASSLLGLAANQETQYF

SEQ ID NO: 443563 - protein, 14 aa, Homo sapiens
  CDR3 for alpha chain variable domain of TCR clone 221782 (TRAV12-2, TRAJ40)
CAVKIPSGTYKYIF

SEQ ID NO: 443564 - protein, 15 aa, Homo sapiens
  CDR3 for beta chain variable domain of TCR clone 221782 (TRBV11-3, TRBJ2-3)
CASSAGTVVTNTQYF

SEQ ID NO: 443565 - protein, 16 aa, Homo sapiens
  CDR3 for alpha chain variable domain of TCR clone 221783 (TRAV26-1, TRAJ23)
CIVRVHPYNQGGKLIF

SEQ ID NO: 443566 - protein, 15 aa, Homo sapiens
  CDR3 for beta chain variable domain of TCR clone 221783 (TRBV5-7, TRBJ2-7)
CAISPYFEGSYEQYF

SEQ ID NO: 443567 - protein, 15 aa, Homo sapiens
  CDR3 for alpha chain variable domain of TCR clone 221784 (TRAV13-2, TRAJ50)
CAAEPLKTSYDKVIF

SEQ ID NO: 443568 - protein, 15 aa, Homo sapiens
  CDR3 for beta chain variable domain of TCR clone 221784 (TRBV20-1, TRBJ1-5)
CSARGSVDSNQPQHF

SEQ ID NO: 443569 - protein, 15 aa, Homo sapiens
  CDR3 for alpha chain variable domain of TCR clone 221785 (TRAV13-2, TRAJ16)
CAENDRFSDGQKLLF

SEQ ID NO: 443570 - protein, 15 aa, Homo sapiens
  CDR3 for beta chain variable domain of TCR clone 221785 (TRBV2, TRBJ2-3)
CASSGGQGAADTQYF

SEQ ID NO: 443571 - protein, 11 aa, Homo sapiens
  CDR3 for alpha chain variable domain of TCR clone 221786 (TRAV21, TRAJ34)
CAHYNTDKLIF

SEQ ID NO: 443572 - protein, 16 aa, Homo sapiens
  CDR3 for beta chain variable domain of TCR clone 221786 (TRBV5-4, TRBJ2-5)
CASSLGLAGGRETQYF

SEQ ID NO: 443573 - protein, 17 aa, Homo sapiens
  CDR3 for alpha chain variable domain of TCR clone 221787 (TRAV13-1, TRAJ52)
CAAGRNAGGTSYGKLTF

SEQ ID NO: 443574 - protein, 15 aa, Homo sapiens
  CDR3 for beta chain variable domain of TCR clone 221787 (TRBV6-3, TRBJ2-7)
CASSSPGTVVYEQYF

SEQ ID NO: 443575 - protein, 14 aa, Homo sapiens
  CDR3 for alpha chain variable domain of TCR clone 221788 (TRAV1-2, TRAJ16)
CAVNRFSDGQNLLF

SEQ ID NO: 443576 - protein, 14 aa, Homo sapiens
  CDR3 for beta chain variable domain of TCR clone 221788 (TRBV7-9, TRBJ1-2)
CASSRQGANYGYTC

SEQ ID NO: 443577 - protein, 15 aa, Homo sapiens
  CDR3 for alpha chain variable domain of TCR clone 221789 (TRAV3, TRAJ42)
CAVRGGTGSQGNLIF

SEQ ID NO: 443578 - protein, 14 aa, Homo sapiens
  CDR3 for beta chain variable domain of TCR clone 221789 (TRBV7-3, TRBJ2-1)
CASSLAGGTNEQFF

SEQ ID NO: 443579 - protein, 16 aa, Homo sapiens
  CDR3 for alpha chain variable domain of TCR clone 221790 (TRAV35, TRAJ23)
CAGQLKEPGRKAYLRT

SEQ ID NO: 443580 - protein, 14 aa, Homo sapiens
  CDR3 for beta chain variable domain of TCR clone 221790 (TRBV11-2, TRBJ2-5)
CASSRTGGIETQYF

SEQ ID NO: 443581 - protein, 12 aa, Homo sapiens
  CDR3 for alpha chain variable domain of TCR clone 221791 (TRAV12-3, TRAJ17)
CAMTLTRNKLTF

SEQ ID NO: 443582 - protein, 16 aa, Homo sapiens
  CDR3 for beta chain variable domain of TCR clone 221791 (TRBV12-4, TRBJ2-5)
CASSWRPSGDLETQYF

SEQ ID NO: 443583 - protein, 13 aa, Homo sapiens
  CDR3 for alpha chain variable domain of TCR clone 221792 (TRAV29/DV5, TRAJ30)
CAASPNRDDKIIF

SEQ ID NO: 443584 - protein, 17 aa, Homo sapiens
  CDR3 for beta chain variable domain of TCR clone 221792 (TRBV20-1, TRBJ2-2)
CSASGSGQGGLTGELFF

SEQ ID NO: 443585 - protein, 12 aa, Homo sapiens
  CDR3 for alpha chain variable domain of TCR clone 221793 (TRAV12-3, TRAJ17)
CAMTLKGNTLTF

SEQ ID NO: 443586 - protein, 15 aa, Homo sapiens
  CDR3 for beta chain variable domain of TCR clone 221793 (TRBV20-1, TRBJ2-7)
CSARDRVSGMDEQYF

SEQ ID NO: 443587 - protein, 14 aa, Homo sapiens
  CDR3 for alpha chain variable domain of TCR clone 221794 (TRAV1-2, TRAJ24)
CAVLTTDSWGKFQF

SEQ ID NO: 443588 - protein, 15 aa, Homo sapiens
  CDR3 for beta chain variable domain of TCR clone 221794 (TRBV6-6, TRBJ2-7)
CASSYPYGGSYEQYF

SEQ ID NO: 443589 - protein, 13 aa, Homo sapiens
  CDR3 for alpha chain variable domain of TCR clone 221795 (TRAV3, TRAJ27)
CAVRPLGAGKSTF

SEQ ID NO: 443590 - protein, 13 aa, Homo sapiens
  CDR3 for beta chain variable domain of TCR clone 221795 (TRBV27, TRBJ1-1)
CASSLSIGAEAFF

SEQ ID NO: 443591 - protein, 15 aa, Homo sapiens
  CDR3 for alpha chain variable domain of TCR clone 221796 (TRAV12-1, TRAJ15)
CVVTRANQAGTALIF

SEQ ID NO: 443592 - protein, 14 aa, Homo sapiens
  CDR3 for beta chain variable domain of TCR clone 221796 (TRBV5-1, TRBJ1-1)
CASSLVSINTESFF

SEQ ID NO: 443593 - protein, 13 aa, Homo sapiens
  CDR3 for alpha chain variable domain of TCR clone 221797 (TRAV2, TRAJ20)
CAVEDPSEYKLSF

SEQ ID NO: 443594 - protein, 16 aa, Homo sapiens
  CDR3 for beta chain variable domain of TCR clone 221797 (TRBV25-1, TRBJ2-7)
CASSELTGGGIYEQYV

SEQ ID NO: 443595 - protein, 16 aa, Homo sapiens
  CDR3 for alpha chain variable domain of TCR clone 221798 (TRAV17, TRAJ53)
CATDALSGGSNYKLTF

SEQ ID NO: 443596 - protein, 12 aa, Homo sapiens
  CDR3 for beta chain variable domain of TCR clone 221798 (TRBV5-1, TRBJ2-7)
CASSFRGCEQYF

SEQ ID NO: 443597 - protein, 14 aa, Homo sapiens
  CDR3 for alpha chain variable domain of TCR clone 221799 (TRAV1-2, TRAJ16)
CAVNRFSDGQKLLF

SEQ ID NO: 443598 - protein, 13 aa, Homo sapiens
  CDR3 for beta chain variable domain of TCR clone 221799 (TRBV28, TRBJ2-2)
CDSIRESTGELFF

SEQ ID NO: 443599 - protein, 12 aa, Homo sapiens
  CDR3 for alpha chain variable domain of TCR clone 221800 (TRAV12-1, TRAJ34)
CVVAGATDKLIF

SEQ ID NO: 443600 - protein, 16 aa, Homo sapiens
  CDR3 for beta chain variable domain of TCR clone 221800 (TRBV7-2, TRBJ1-2)
CACSSNQDRRGHGYTF

SEQ ID NO: 443601 - protein, 12 aa, Homo sapiens
  CDR3 for alpha chain variable domain of TCR clone 221801 (TRAV12-3, TRAJ17)
CAMTLTGNKLNF

SEQ ID NO: 443602 - protein, 15 aa, Homo sapiens
  CDR3 for beta chain variable domain of TCR clone 221801 (TRBV20-1, TRBJ2-7)
RSARDRVSGMDEQYF

SEQ ID NO: 443603 - protein, 13 aa, Homo sapiens
  CDR3 for alpha chain variable domain of TCR clone 221802 (TRAV13-1, TRAJ41)
CAEPQIPGMHSTS

SEQ ID NO: 443604 - protein, 13 aa, Homo sapiens
  CDR3 for beta chain variable domain of TCR clone 221802 (TRBV19, TRBJ2-7)
CASEGTTTYEQYF

SEQ ID NO: 443605 - protein, 12 aa, Homo sapiens
  CDR3 for alpha chain variable domain of TCR clone 221803 (TRAV12-1, TRAJ40)
CVFYSGTYKYIF

SEQ ID NO: 443606 - protein, 16 aa, Homo sapiens
  CDR3 for beta chain variable domain of TCR clone 221803 (TRBV4-3, TRBJ2-1)
CASSPALERGVNEQFF

SEQ ID NO: 443607 - protein, 13 aa, Homo sapiens
  CDR3 for alpha chain variable domain of TCR clone 221804 (TRAV17, TRAJ5)
CAPMDTGRRARTF

SEQ ID NO: 443608 - protein, 15 aa, Homo sapiens
  CDR3 for beta chain variable domain of TCR clone 221804 (TRBV6-6, TRBJ2-5)
CASSPGGGLEETQYF

SEQ ID NO: 443609 - protein, 12 aa, Homo sapiens
  CDR3 for alpha chain variable domain of TCR clone 221805 (TRAV13-1, TRAJ53)
AASGGSNYKLTL

SEQ ID NO: 443610 - protein, 12 aa, Homo sapiens
  CDR3 for beta chain variable domain of TCR clone 221805 (TRBV18, TRBJ1-4)
CASSPSREKLFF

SEQ ID NO: 443611 - protein, 15 aa, Homo sapiens
  CDR3 for alpha chain variable domain of TCR clone 221806 (TRAV8-2, TRAJ15)
CVVTMGNQAGNALIF

SEQ ID NO: 443612 - protein, 14 aa, Homo sapiens
  CDR3 for beta chain variable domain of TCR clone 221806 (TRBV12-5, TRBJ2-5)
CASGSRTHQETQYF

SEQ ID NO: 443613 - protein, 15 aa, Homo sapiens
  CDR3 for alpha chain variable domain of TCR clone 221807 (TRAV29/DV5, TRAJ18)
CAARYRGSTLGRLYF

SEQ ID NO: 443614 - protein, 13 aa, Homo sapiens
  CDR3 for beta chain variable domain of TCR clone 221807 (TRBV7-2, TRBJ2-7)
CASSSPSGSEQYF

SEQ ID NO: 443615 - protein, 15 aa, Homo sapiens
  CDR3 for alpha chain variable domain of TCR clone 221808 (TRAV12-3, TRAJ42)
CAMITSVGSQGNLIF

SEQ ID NO: 443616 - protein, 13 aa, Homo sapiens
  CDR3 for beta chain variable domain of TCR clone 221808 (TRBV19, TRBJ1-2)
CASSVPGQDGYTF

SEQ ID NO: 443617 - protein, 14 aa, Homo sapiens
  CDR3 for alpha chain variable domain of TCR clone 221809 (TRAV8-2, TRAJ37)
CVVSGSGNTGQLIF

SEQ ID NO: 443618 - protein, 15 aa, Homo sapiens
  CDR3 for beta chain variable domain of TCR clone 221809 (TRBV18, TRBJ2-7)
CASSPTVTPNYEQYF

SEQ ID NO: 443619 - protein, 11 aa, Homo sapiens
  CDR3 for alpha chain variable domain of TCR clone 221810 (TRAV17, TRAJ29)
CYVATDTPLVF

SEQ ID NO: 443620 - protein, 12 aa, Homo sapiens
  CDR3 for beta chain variable domain of TCR clone 221810 (TRBV7-9, TRBJ2-7)
CARSIKREEQYF

SEQ ID NO: 443621 - protein, 13 aa, Homo sapiens
  CDR3 for alpha chain variable domain of TCR clone 221811 (TRAV23/DV6, TRAJ58)
CAASEIGGSRLTF

SEQ ID NO: 443622 - protein, 14 aa, Homo sapiens
  CDR3 for beta chain variable domain of TCR clone 221811 (TRBV18, TRBJ2-5)
CASSPGVSQETQYF

SEQ ID NO: 443623 - protein, 14 aa, Homo sapiens
  CDR3 for alpha chain variable domain of TCR clone 221812 (TRAV13-1, TRAJ35)
CAASKGGFGNVLHC

SEQ ID NO: 443624 - protein, 14 aa, Homo sapiens
  CDR3 for beta chain variable domain of TCR clone 221812 (TRBV12-4, TRBJ2-5)
CASSLWQKQETQYF

SEQ ID NO: 443625 - protein, 15 aa, Homo sapiens
  CDR3 for alpha chain variable domain of TCR clone 221813 (TRAV21, TRAJ57)
CAAIITQGGSEKLVF

SEQ ID NO: 443626 - protein, 14 aa, Homo sapiens
  CDR3 for beta chain variable domain of TCR clone 221813 (TRBV5-1, TRBJ2-2)
CASSLIWIPGELFF

SEQ ID NO: 443627 - protein, 21 aa, Homo sapiens
  CDR3 for alpha chain variable domain of TCR clone 221814 (TRAV1-1, TRAJ6)
CLLLLRCERLERTGGSYIPTF

SEQ ID NO: 443628 - protein, 16 aa, Homo sapiens
  CDR3 for beta chain variable domain of TCR clone 221814 (TRBV19, TRBJ2-1)
CASSKAGPSSYNEQFF

SEQ ID NO: 443629 - protein, 12 aa, Homo sapiens
  CDR3 for alpha chain variable domain of TCR clone 221815 (TRAV2, TRAJ37)
CAVAGNTGKLIL

SEQ ID NO: 443630 - protein, 14 aa, Homo sapiens
  CDR3 for beta chain variable domain of TCR clone 221815 (TRBV7-2, TRBJ2-7)
CASSLDPGPYEQYF

SEQ ID NO: 443631 - protein, 12 aa, Homo sapiens
  CDR3 for alpha chain variable domain of TCR clone 221816 (TRAV35, TRAJ39)
LAPNNGGNMLTF

SEQ ID NO: 443632 - protein, 16 aa, Homo sapiens
  CDR3 for beta chain variable domain of TCR clone 221816 (TRBV2, TRBJ2-3)
CASSTSVEGVTDTQYF

SEQ ID NO: 443633 - protein, 16 aa, Homo sapiens
  CDR3 for alpha chain variable domain of TCR clone 221817 (TRAV30, TRAJ24)
CGTEIVDADSWGKFQF

SEQ ID NO: 443634 - protein, 12 aa, Homo sapiens
  CDR3 for beta chain variable domain of TCR clone 221817 (TRBV11-2, TRBJ2-2)
CASSHGGGELFF

SEQ ID NO: 443635 - protein, 12 aa, Homo sapiens
  CDR3 for alpha chain variable domain of TCR clone 221818 (TRAV35, TRAJ39)
LAPNNAGNMLTF

SEQ ID NO: 443636 - protein, 16 aa, Homo sapiens
  CDR3 for beta chain variable domain of TCR clone 221818 (TRBV2, TRBJ2-3)
CASSTSVEGVTDTQYS

SEQ ID NO: 443637 - protein, 17 aa, Homo sapiens
  CDR3 for alpha chain variable domain of TCR clone 221819 (TRAV26-1, TRAJ28)
CIVRVPDSGAGSYQLTF

SEQ ID NO: 443638 - protein, 16 aa, Homo sapiens
  CDR3 for beta chain variable domain of TCR clone 221819 (TRBV20-1, TRBJ2-7)
CSASTSGRLSSYEQYF

SEQ ID NO: 443639 - protein, 11 aa, Homo sapiens
  CDR3 for alpha chain variable domain of TCR clone 221820 (TRAV13-1, TRAJ23)
CAASSRGKLIS

SEQ ID NO: 443640 - protein, 13 aa, Homo sapiens
  CDR3 for beta chain variable domain of TCR clone 221820 (TRBV7-3, TRBJ2-5)
CASSFRGGETQYF

SEQ ID NO: 443641 - protein, 13 aa, Homo sapiens
  CDR3 for alpha chain variable domain of TCR clone 221821 (TRAV20, TRAJ48)
CAVHLFGNEKLTF

SEQ ID NO: 443642 - protein, 12 aa, Homo sapiens
  CDR3 for beta chain variable domain of TCR clone 221821 (TRBV10-2, TRBJ2-3)
CASSPESDTQYF

SEQ ID NO: 443643 - protein, 11 aa, Homo sapiens
  CDR3 for alpha chain variable domain of TCR clone 221822 (TRAV12-2, TRAJ49)
CAVNTGNQFYF

SEQ ID NO: 443644 - protein, 12 aa, Homo sapiens
  CDR3 for beta chain variable domain of TCR clone 221822 (TRBV2, TRBJ2-3)
CASSGRFDTQNF

SEQ ID NO: 443645 - protein, 14 aa, Homo sapiens
  CDR3 for alpha chain variable domain of TCR clone 221823 (TRAV13-2, TRAJ22)
FADGTLGSARQLTF

SEQ ID NO: 443646 - protein, 15 aa, Homo sapiens
  CDR3 for beta chain variable domain of TCR clone 221823 (TRBV6-3, TRBJ2-7)
CASSSPGTVFYEQYF

SEQ ID NO: 443647 - protein, 16 aa, Homo sapiens
  CDR3 for alpha chain variable domain of TCR clone 221824 (TRAV1-1, TRAJ29)
CAVRSTRNSGNTPLVF

SEQ ID NO: 443648 - protein, 13 aa, Homo sapiens
  CDR3 for beta chain variable domain of TCR clone 221824 (TRBV4-2, TRBJ1-1)
CASSQAGNTEAFF

SEQ ID NO: 443649 - protein, 16 aa, Homo sapiens
  CDR3 for alpha chain variable domain of TCR clone 221825 (TRAV13-1, TRAJ15)
CAANGGPVRAGTALIF

SEQ ID NO: 443650 - protein, 12 aa, Homo sapiens
  CDR3 for beta chain variable domain of TCR clone 221825 (TRBV11-2, TRBJ2-2)
CASSLGGGELFF

SEQ ID NO: 443651 - protein, 23 aa, Homo sapiens
  CDR3 for alpha chain variable domain of TCR clone 221826 (TRAV17, TRAJ36)
CAPTGANNLSLGLERDSPLFPIS

SEQ ID NO: 443652 - protein, 13 aa, Homo sapiens
  CDR3 for beta chain variable domain of TCR clone 221826 (TRBV20-1, TRBJ1-1)
CSAPPGGHTEAFF

SEQ ID NO: 443653 - protein, 18 aa, Homo sapiens
  CDR3 for alpha chain variable domain of TCR clone 221827 (TRAV13-1, TRAJ52)
CAASKRSAGGTSYGKLTF

SEQ ID NO: 443654 - protein, 17 aa, Homo sapiens
  CDR3 for beta chain variable domain of TCR clone 221827 (TRBV7-9, TRBJ2-1)
CASSLVASYPSYNEQFF

SEQ ID NO: 443655 - protein, 13 aa, Homo sapiens
  CDR3 for alpha chain variable domain of TCR clone 221828 (TRAV35, TRAJ37)
CAGSSGNTGKLIF

SEQ ID NO: 443656 - protein, 16 aa, Homo sapiens
  CDR3 for beta chain variable domain of TCR clone 221828 (TRBV10-3, TRBJ2-1)
CAVSLTSGNAYNEQFF

SEQ ID NO: 443657 - protein, 14 aa, Homo sapiens
  CDR3 for alpha chain variable domain of TCR clone 221829 (TRAV8-6, TRAJ12)
CAVKAADSSYKLIF

SEQ ID NO: 443658 - protein, 14 aa, Homo sapiens
  CDR3 for beta chain variable domain of TCR clone 221829 (TRBV7-9, TRBJ2-5)
CASSLDTAQETQYF

SEQ ID NO: 443659 - protein, 11 aa, Homo sapiens
  CDR3 for alpha chain variable domain of TCR clone 221830 (TRAV4, TRAJ31)
CLVGDNARRMF

SEQ ID NO: 443660 - protein, 16 aa, Homo sapiens
  CDR3 for beta chain variable domain of TCR clone 221830 (TRBV7-2, TRBJ2-5)
CASSSKWLSGQETQYS

SEQ ID NO: 443661 - protein, 14 aa, Homo sapiens
  CDR3 for alpha chain variable domain of TCR clone 221831 (TRAV12-3, TRAJ41)
CAMSAGNSGYALNF

SEQ ID NO: 443662 - protein, 11 aa, Homo sapiens
  CDR3 for beta chain variable domain of TCR clone 221831 (TRBV7-2, TRBJ2-3)
CASSSADTQYF

SEQ ID NO: 443663 - protein, 18 aa, Homo sapiens
  CDR3 for alpha chain variable domain of TCR clone 221832 (TRAV21, TRAJ52)
CAVRPSPAGGTSYGKLTF

SEQ ID NO: 443664 - protein, 17 aa, Homo sapiens
  CDR3 for beta chain variable domain of TCR clone 221832 (TRBV14, TRBJ2-3)
CASSHEPSGLSTDTQYF

SEQ ID NO: 443665 - protein, 18 aa, Homo sapiens
  CDR3 for alpha chain variable domain of TCR clone 221833 (TRAV13-1, TRAJ52)
CAASKRSAGGTSYGKLTF

SEQ ID NO: 443666 - protein, 13 aa, Homo sapiens
  CDR3 for beta chain variable domain of TCR clone 221833 (TRBV7-3, TRBJ2-1)
CASSLDSYNEQFF

SEQ ID NO: 443667 - protein, 14 aa, Homo sapiens
  CDR3 for alpha chain variable domain of TCR clone 221834 (TRAV14/DV4, TRAJ42)
CPRGSLRSQGNLIF

SEQ ID NO: 443668 - protein, 15 aa, Homo sapiens
  CDR3 for beta chain variable domain of TCR clone 221834 (TRBV7-9, TRBJ1-5)
CASSQGHQPNQPQHF

SEQ ID NO: 443669 - protein, 14 aa, Homo sapiens
  CDR3 for alpha chain variable domain of TCR clone 221835 (TRAV2, TRAJ9)
CAVEDRGTGFKTIF

SEQ ID NO: 443670 - protein, 16 aa, Homo sapiens
  CDR3 for beta chain variable domain of TCR clone 221835 (TRBV24-1, TRBJ2-3)
CATSDPGTGATDTQYF

SEQ ID NO: 443671 - protein, 13 aa, Homo sapiens
  CDR3 for alpha chain variable domain of TCR clone 221836 (TRAV36/DV7, TRAJ37)
CAVFSSSTGKLIF

SEQ ID NO: 443672 - protein, 16 aa, Homo sapiens
  CDR3 for beta chain variable domain of TCR clone 221836 (TRBV19, TRBJ2-1)
CASSKAGPSSYNEQFF

SEQ ID NO: 443673 - protein, 18 aa, Homo sapiens
  CDR3 for alpha chain variable domain of TCR clone 221837 (TRAV12-3, TRAJ52)
CAMSRTNAGGTSYGELTF

SEQ ID NO: 443674 - protein, 17 aa, Homo sapiens
  CDR3 for beta chain variable domain of TCR clone 221837 (TRBV7-3, TRBJ2-3)
CASSLMKRMRGADTQYF

SEQ ID NO: 443675 - protein, 14 aa, Homo sapiens
  CDR3 for alpha chain variable domain of TCR clone 221838 (TRAV12-2, TRAJ13)
CAVKKTGGYRKVTF

SEQ ID NO: 443676 - protein, 15 aa, Homo sapiens
  CDR3 for beta chain variable domain of TCR clone 221838 (TRBV12-4, TRBJ2-5)
CASSPPTGLQETQYC

SEQ ID NO: 443677 - protein, 12 aa, Homo sapiens
  CDR3 for alpha chain variable domain of TCR clone 221839 (TRAV17, TRAJ12)
CATLRSSYKLIF

SEQ ID NO: 443678 - protein, 16 aa, Homo sapiens
  CDR3 for beta chain variable domain of TCR clone 221839 (TRBV28, TRBJ2-7)
CASSLLFETGGHEQYF

SEQ ID NO: 443679 - protein, 15 aa, Homo sapiens
  CDR3 for alpha chain variable domain of TCR clone 221840 (TRAV3, TRAJ4)
CAVGDGTGGDNKLIF

SEQ ID NO: 443680 - protein, 16 aa, Homo sapiens
  CDR3 for beta chain variable domain of TCR clone 221840 (TRBV27, TRBJ2-2)
CASSSSGVSNTGELFF

SEQ ID NO: 443681 - protein, 12 aa, Homo sapiens
  CDR3 for alpha chain variable domain of TCR clone 221841 (TRAV12-2, TRAJ42)
CAVGGSHGNLIF

SEQ ID NO: 443682 - protein, 16 aa, Homo sapiens
  CDR3 for beta chain variable domain of TCR clone 221841 (TRBV7-3, TRBJ2-2)
CASSLKRGTLSGELFF

SEQ ID NO: 443683 - protein, 11 aa, Homo sapiens
  CDR3 for alpha chain variable domain of TCR clone 221842 (TRAV25, TRAJ49)
CAGNTGNQFYF

SEQ ID NO: 443684 - protein, 16 aa, Homo sapiens
  CDR3 for beta chain variable domain of TCR clone 221842 (TRBV11-3, TRBJ2-5)
CASSSVVAGSTETQYF

SEQ ID NO: 443685 - protein, 13 aa, Homo sapiens
  CDR3 for alpha chain variable domain of TCR clone 221843 (TRAV35, TRAJ57)
CAGSQGGSEKLVF

SEQ ID NO: 443686 - protein, 14 aa, Homo sapiens
  CDR3 for beta chain variable domain of TCR clone 221843 (TRBV25-1, TRBJ1-1)
CASTHLGGNTEAFS

SEQ ID NO: 443687 - protein, 15 aa, Homo sapiens
  CDR3 for alpha chain variable domain of TCR clone 221844 (TRAV23/DV6, TRAJ18)
CAARYRGSTLGRLYF

SEQ ID NO: 443688 - protein, 13 aa, Homo sapiens
  CDR3 for beta chain variable domain of TCR clone 221844 (TRBV7-2, TRBJ2-7)
CASSSPSGSEQHF

SEQ ID NO: 443689 - protein, 14 aa, Homo sapiens
  CDR3 for alpha chain variable domain of TCR clone 221845 (TRAV4, TRAJ26)
CLVGPHNYGQNFVF

SEQ ID NO: 443690 - protein, 15 aa, Homo sapiens
  CDR3 for beta chain variable domain of TCR clone 221845 (TRBV5-1, TRBJ2-5)
CASSFKGGDQETQYF

SEQ ID NO: 443691 - protein, 13 aa, Homo sapiens
  CDR3 for alpha chain variable domain of TCR clone 221846 (TRAV12-2, TRAJ9)
CAVRNTGGFKTIF

SEQ ID NO: 443692 - protein, 14 aa, Homo sapiens
  CDR3 for beta chain variable domain of TCR clone 221846 (TRBV7-2, TRBJ2-7)
CASRSQGAAYEQYF

SEQ ID NO: 443693 - protein, 18 aa, Homo sapiens
  CDR3 for alpha chain variable domain of TCR clone 221847 (TRAV21, TRAJ52)
CAVRPSPAGGTSYGKLTF

SEQ ID NO: 443694 - protein, 15 aa, Homo sapiens
  CDR3 for beta chain variable domain of TCR clone 221847 (TRBV20-1, TRBJ2-7)
CSARDRVSGMDKQYF

SEQ ID NO: 443695 - protein, 15 aa, Homo sapiens
  CDR3 for alpha chain variable domain of TCR clone 221848 (TRAV25, TRAJ23)
CALAPNYNRGGKLIF

SEQ ID NO: 443696 - protein, 14 aa, Homo sapiens
  CDR3 for beta chain variable domain of TCR clone 221848 (TRBV7-3, TRBJ2-2)
CASSSGGYTGELFF

SEQ ID NO: 443697 - protein, 13 aa, Homo sapiens
  CDR3 for alpha chain variable domain of TCR clone 221849 (TRAV13-1, TRAJ6)
CAASSGGSYIPTF

SEQ ID NO: 443698 - protein, 15 aa, Homo sapiens
  CDR3 for beta chain variable domain of TCR clone 221849 (TRBV28, TRBJ2-1)
CASSIIAGGRSEQFF

SEQ ID NO: 443699 - protein, 15 aa, Homo sapiens
  CDR3 for alpha chain variable domain of TCR clone 221850 (TRAV12-3, TRAJ49)
CAMAVTPNTGNQFYF

SEQ ID NO: 443700 - protein, 18 aa, Homo sapiens
  CDR3 for beta chain variable domain of TCR clone 221850 (TRBV4-1, TRBJ1-5)
CASRQDPWGQGLNQPQHF

SEQ ID NO: 443701 - protein, 12 aa, Homo sapiens
  CDR3 for alpha chain variable domain of TCR clone 221851 (TRAV26-1, TRAJ48)
CIAVFGNEKLTF

SEQ ID NO: 443702 - protein, 17 aa, Homo sapiens
  CDR3 for beta chain variable domain of TCR clone 221851 (TRBV7-6, TRBJ2-1)
CASSFGLAGGTYNAQFC

SEQ ID NO: 443703 - protein, 15 aa, Homo sapiens
  CDR3 for alpha chain variable domain of TCR clone 221852 (TRAV2, TRAJ28)
CAVPYSGAGSYQLTF

SEQ ID NO: 443704 - protein, 15 aa, Homo sapiens
  CDR3 for beta chain variable domain of TCR clone 221852 (TRBV9, TRBJ1-6)
CASSVAGTGDSPLHF

SEQ ID NO: 443705 - protein, 15 aa, Homo sapiens
  CDR3 for alpha chain variable domain of TCR clone 221853 (TRAV8-6, TRAJ10)
CAVSDQAGGGNKLTF

SEQ ID NO: 443706 - protein, 15 aa, Homo sapiens
  CDR3 for beta chain variable domain of TCR clone 221853 (TRBV7-9, TRBJ1-6)
CASSSPGRGNSPLHF

SEQ ID NO: 443707 - protein, 16 aa, Homo sapiens
  CDR3 for alpha chain variable domain of TCR clone 221854 (TRAV3, TRAJ23)
CAVNIGIYNQGGKLIF

SEQ ID NO: 443708 - protein, 16 aa, Homo sapiens
  CDR3 for beta chain variable domain of TCR clone 221854 (TRBV7-6, TRBJ2-3)
CASSARTSRGTDTQYF

SEQ ID NO: 443709 - protein, 17 aa, Homo sapiens
  CDR3 for alpha chain variable domain of TCR clone 221855 (TRAV3, TRAJ6)
CAVRDGPRAGGSYIPTS

SEQ ID NO: 443710 - protein, 20 aa, Homo sapiens
  CDR3 for beta chain variable domain of TCR clone 221855 (TRBV28, TRBJ2-1)
CASTHTGRSPGLAGGNEQFF

SEQ ID NO: 443711 - protein, 16 aa, Homo sapiens
  CDR3 for alpha chain variable domain of TCR clone 221856 (TRAV14/DV4, TRAJ21)
CAMREGPENNFNKFYF

SEQ ID NO: 443712 - protein, 14 aa, Homo sapiens
  CDR3 for beta chain variable domain of TCR clone 221856 (TRBV12-4, TRBJ1-1)
CASSLGTGGTEAFF

SEQ ID NO: 443713 - protein, 17 aa, Homo sapiens
  CDR3 for alpha chain variable domain of TCR clone 221857 (TRAV13-1, TRAJ52)
CAASSGAGGTSYGKLPF

SEQ ID NO: 443714 - protein, 13 aa, Homo sapiens
  CDR3 for beta chain variable domain of TCR clone 221857 (TRBV7-9, TRBJ1-2)
CASSLKQNYGYTF

SEQ ID NO: 443715 - protein, 13 aa, Homo sapiens
  CDR3 for alpha chain variable domain of TCR clone 221858 (TRAV2, TRAJ15)
CSVASQAGTALIF

SEQ ID NO: 443716 - protein, 14 aa, Homo sapiens
  CDR3 for beta chain variable domain of TCR clone 221858 (TRBV11-3, TRBJ2-7)
CASSPAVPPYEQYF

SEQ ID NO: 443717 - protein, 14 aa, Homo sapiens
  CDR3 for alpha chain variable domain of TCR clone 221859 (TRAV20, TRAJ42)
CCAADGGSQGNPIF

SEQ ID NO: 443718 - protein, 15 aa, Homo sapiens
  CDR3 for beta chain variable domain of TCR clone 221859 (TRBV12-4, TRBJ1-3)
CASTPGRRSGNTIYF

SEQ ID NO: 443719 - protein, 16 aa, Homo sapiens
  CDR3 for alpha chain variable domain of TCR clone 221860 (TRAV3, TRAJ37)
CAVRPHGSGNTGKLIF

SEQ ID NO: 443720 - protein, 12 aa, Homo sapiens
  CDR3 for beta chain variable domain of TCR clone 221860 (TRBV7-9, TRBJ1-2)
CASSLGGYGYTF

SEQ ID NO: 443721 - protein, 15 aa, Homo sapiens
  CDR3 for alpha chain variable domain of TCR clone 221861 (TRAV21, TRAJ53)
CATLNSGGNNYKLTF

SEQ ID NO: 443722 - protein, 12 aa, Homo sapiens
  CDR3 for beta chain variable domain of TCR clone 221861 (TRBV5-4, TRBJ2-7)
CASSLEAYEQYF

SEQ ID NO: 443723 - protein, 13 aa, Homo sapiens
  CDR3 for alpha chain variable domain of TCR clone 221862 (TRAV16, TRAJ58)
CALRWASGSRLNF

SEQ ID NO: 443724 - protein, 16 aa, Homo sapiens
  CDR3 for beta chain variable domain of TCR clone 221862 (TRBV18, TRBJ2-2)
CASSPPRTANTGELFF

SEQ ID NO: 443725 - protein, 12 aa, Homo sapiens
  CDR3 for alpha chain variable domain of TCR clone 221863 (TRAV21, TRAJ39)
CAADNAGNMLTF

SEQ ID NO: 443726 - protein, 14 aa, Homo sapiens
  CDR3 for beta chain variable domain of TCR clone 221863 (TRBV18, TRBJ2-5)
CASSPGVSQETQYF

SEQ ID NO: 443727 - protein, 13 aa, Homo sapiens
  CDR3 for alpha chain variable domain of TCR clone 221864 (TRAV8-3, TRAJ36)
CAVGATGANNLFF

SEQ ID NO: 443728 - protein, 16 aa, Homo sapiens
  CDR3 for beta chain variable domain of TCR clone 221864 (TRBV20-1, TRBJ1-4)
CSAPGQGLLTNEELFF

SEQ ID NO: 443729 - protein, 16 aa, Homo sapiens
  CDR3 for alpha chain variable domain of TCR clone 221865 (TRAV1-2, TRAJ10)
CAVGGVLTGGGNKLTF

SEQ ID NO: 443730 - protein, 12 aa, Homo sapiens
  CDR3 for beta chain variable domain of TCR clone 221865 (TRBV7-8, TRBJ2-7)
CASSLVDREQYF

SEQ ID NO: 443731 - protein, 12 aa, Homo sapiens
  CDR3 for alpha chain variable domain of TCR clone 221866 (TRAV12-3, TRAJ3)
CAIDSSASKIIF

SEQ ID NO: 443732 - protein, 15 aa, Homo sapiens
  CDR3 for beta chain variable domain of TCR clone 221866 (TRBV6-5, TRBJ2-7)
CASSYSSSGSYEQYF

SEQ ID NO: 443733 - protein, 14 aa, Homo sapiens
  CDR3 for alpha chain variable domain of TCR clone 221867 (TRAV26-1, TRAJ48)
CIVRVPFGNEKLTF

SEQ ID NO: 443734 - protein, 15 aa, Homo sapiens
  CDR3 for beta chain variable domain of TCR clone 221867 (TRBV6-3, TRBJ2-7)
CASSSPGTVFYEQYF

SEQ ID NO: 443735 - protein, 19 aa, Homo sapiens
  CDR3 for alpha chain variable domain of TCR clone 221868 (TRAV2, TRAJ20)
ILQVREADAAVYRDCKLSF

SEQ ID NO: 443736 - protein, 13 aa, Homo sapiens
  CDR3 for beta chain variable domain of TCR clone 221868 (TRBV15, TRBJ1-6)
CATSGGLNSALLF

SEQ ID NO: 443737 - protein, 13 aa, Homo sapiens
  CDR3 for alpha chain variable domain of TCR clone 221869 (TRAV12-3, TRAJ54)
CAMTLHGAQKLVF

SEQ ID NO: 443738 - protein, 14 aa, Homo sapiens
  CDR3 for beta chain variable domain of TCR clone 221869 (TRBV4-1, TRBJ2-2)
CASSQAVNTGELFF

SEQ ID NO: 443739 - protein, 10 aa, Homo sapiens
  CDR3 for alpha chain variable domain of TCR clone 221870 (TRAV1-2, TRAJ18)
CAVRGEAQPW

SEQ ID NO: 443740 - protein, 13 aa, Homo sapiens
  CDR3 for beta chain variable domain of TCR clone 221870 (TRBV20-1, TRBJ1-1)
CSARVGGNTEAFV

SEQ ID NO: 443741 - protein, 12 aa, Homo sapiens
  CDR3 for alpha chain variable domain of TCR clone 221871 (TRAV8-3, TRAJ26)
CAGDNYGQNFVF

SEQ ID NO: 443742 - protein, 17 aa, Homo sapiens
  CDR3 for beta chain variable domain of TCR clone 221871 (TRBV7-8, TRBJ2-6)
CASSAGTGGAGANVLTV

SEQ ID NO: 443743 - protein, 13 aa, Homo sapiens
  CDR3 for alpha chain variable domain of TCR clone 221872 (TRAV21, TRAJ27)
CAQWGGNAGKSTF

SEQ ID NO: 443744 - protein, 14 aa, Homo sapiens
  CDR3 for beta chain variable domain of TCR clone 221872 (TRBV7-2, TRBJ2-7)
CASSPKTSFYEQYF

SEQ ID NO: 443745 - protein, 12 aa, Homo sapiens
  CDR3 for alpha chain variable domain of TCR clone 221873 (TRAV13-2, TRAJ23)
CAERHRGGKLIF

SEQ ID NO: 443746 - protein, 16 aa, Homo sapiens
  CDR3 for beta chain variable domain of TCR clone 221873 (TRBV20-1, TRBJ1-4)
CSAPGQGLLTNVKLFF

SEQ ID NO: 443747 - protein, 15 aa, Homo sapiens
  CDR3 for alpha chain variable domain of TCR clone 221874 (TRAV8-3, TRAJ27)
CAAGPSKTNAVKSTF

SEQ ID NO: 443748 - protein, 15 aa, Homo sapiens
  CDR3 for beta chain variable domain of TCR clone 221874 (TRBV7-2, TRBJ2-1)
CASSSGLAGGNEQFF

SEQ ID NO: 443749 - protein, 12 aa, Homo sapiens
  CDR3 for alpha chain variable domain of TCR clone 221875 (TRAV8-3, TRAJ26)
CAGDNYGKNFVF

SEQ ID NO: 443750 - protein, 14 aa, Homo sapiens
  CDR3 for beta chain variable domain of TCR clone 221875 (TRBV6-1, TRBJ1-3)
CASVQGGGGNTIYF

SEQ ID NO: 443751 - protein, 13 aa, Homo sapiens
  CDR3 for alpha chain variable domain of TCR clone 221876 (TRAV20, TRAJ26)
FAVPTSYGQNFVF

SEQ ID NO: 443752 - protein, 16 aa, Homo sapiens
  CDR3 for beta chain variable domain of TCR clone 221876 (TRBV28, TRBJ2-7)
CASSSPQGRDFYEQYF

SEQ ID NO: 443753 - protein, 15 aa, Homo sapiens
  CDR3 for alpha chain variable domain of TCR clone 221877 (TRAV26-1, TRAJ22)
CIVRVSFWFCKAPDL

SEQ ID NO: 443754 - protein, 13 aa, Homo sapiens
  CDR3 for beta chain variable domain of TCR clone 221877 (TRBV7-9, TRBJ1-2)
CASSLKQNYGYTF

SEQ ID NO: 443755 - protein, 12 aa, Homo sapiens
  CDR3 for alpha chain variable domain of TCR clone 221878 (TRAV1-2, TRAJ17)
CAVRAAGNKLTF

SEQ ID NO: 443756 - protein, 12 aa, Homo sapiens
  CDR3 for beta chain variable domain of TCR clone 221878 (TRBV11-2, TRBJ2-1)
CAISPGNNEQFF

SEQ ID NO: 443757 - protein, 12 aa, Homo sapiens
  CDR3 for alpha chain variable domain of TCR clone 221879 (TRAV29/DV5, TRAJ49)
CAATDTGNQFYF

SEQ ID NO: 443758 - protein, 19 aa, Homo sapiens
  CDR3 for beta chain variable domain of TCR clone 221879 (TRBV25-1, TRBJ2-2)
CAILVYRVDRGRKSGELFF

SEQ ID NO: 443759 - protein, 16 aa, Homo sapiens
  CDR3 for alpha chain variable domain of TCR clone 221880 (TRAV23/DV6, TRAJ9)
CAATIGGNTGGFKTIF

SEQ ID NO: 443760 - protein, 13 aa, Homo sapiens
  CDR3 for beta chain variable domain of TCR clone 221880 (TRBV12-4, TRBJ1-1)
CASSPGTGFEAFF

SEQ ID NO: 443761 - protein, 13 aa, Homo sapiens
  CDR3 for alpha chain variable domain of TCR clone 221881 (TRAV35, TRAJ13)
CAGPPRGYQKVTF

SEQ ID NO: 443762 - protein, 13 aa, Homo sapiens
  CDR3 for beta chain variable domain of TCR clone 221881 (TRBV7-6, TRBJ2-7)
CASSLDHTHEQYF

SEQ ID NO: 443763 - protein, 13 aa, Homo sapiens
  CDR3 for alpha chain variable domain of TCR clone 221882 (TRAV12-3, TRAJ40)
CAMSDSGTYKYIF

SEQ ID NO: 443764 - protein, 14 aa, Homo sapiens
  CDR3 for beta chain variable domain of TCR clone 221882 (TRBV7-2, TRBJ1-5)
CASSTQGAGQPHHF

SEQ ID NO: 443765 - protein, 13 aa, Homo sapiens
  CDR3 for alpha chain variable domain of TCR clone 221883 (TRAV12-2, TRAJ18)
CAVRGSTLGRLYF

SEQ ID NO: 443766 - protein, 14 aa, Homo sapiens
  CDR3 for beta chain variable domain of TCR clone 221883 (TRBV19, TRBJ2-1)
CASPTFVLSGEQFF

SEQ ID NO: 443767 - protein, 11 aa, Homo sapiens
  CDR3 for alpha chain variable domain of TCR clone 221884 (TRAV8-4, TRAJ26)
CAGGEGQNFFF

SEQ ID NO: 443768 - protein, 17 aa, Homo sapiens
  CDR3 for beta chain variable domain of TCR clone 221884 (TRBV7-9, TRBJ2-3)
CASSPTVAGDLTDTQYF

SEQ ID NO: 443769 - protein, 13 aa, Homo sapiens
  CDR3 for alpha chain variable domain of TCR clone 221885 (TRAV3, TRAJ20)
CAVRDIGDYKLSF

SEQ ID NO: 443770 - protein, 13 aa, Homo sapiens
  CDR3 for beta chain variable domain of TCR clone 221885 (TRBV29-1, TRBJ2-2)
CSTTGVNTGELFF

SEQ ID NO: 443771 - protein, 11 aa, Homo sapiens
  CDR3 for alpha chain variable domain of TCR clone 221886 (TRAV35, TRAJ30)
CAPGGDDKITF

SEQ ID NO: 443772 - protein, 21 aa, Homo sapiens
  CDR3 for beta chain variable domain of TCR clone 221886 (TRBV7-6, TRBJ2-1)
SGTRPGIAVPAAWGGSDEQFF

SEQ ID NO: 443773 - protein, 11 aa, Homo sapiens
  CDR3 for alpha chain variable domain of TCR clone 221887 (TRAV12-1, TRAJ33)
CVVMPRIATIS

SEQ ID NO: 443774 - protein, 15 aa, Homo sapiens
  CDR3 for beta chain variable domain of TCR clone 221887 (TRBV27, TRBJ2-1)
CASSNGGGSSNEQFL

SEQ ID NO: 443775 - protein, 12 aa, Homo sapiens
  CDR3 for alpha chain variable domain of TCR clone 221888 (TRAV9-2, TRAJ20)
CALSDGDYKLSF

SEQ ID NO: 443776 - protein, 13 aa, Homo sapiens
  CDR3 for beta chain variable domain of TCR clone 221888 (TRBV11-2, TRBJ1-6)
CASSLAGVSPLHF

SEQ ID NO: 443777 - protein, 18 aa, Homo sapiens
  CDR3 for alpha chain variable domain of TCR clone 221889 (TRAV26-1, TRAJ23)
CIVRVGLEVWNQGGKLIF

SEQ ID NO: 443778 - protein, 15 aa, Homo sapiens
  CDR3 for beta chain variable domain of TCR clone 221889 (TRBV7-8, TRBJ2-1)
CASSLADSLYNEQFF

SEQ ID NO: 443779 - protein, 11 aa, Homo sapiens
  CDR3 for alpha chain variable domain of TCR clone 221890 (TRAV21, TRAJ33)
CAALSNYQLIW

SEQ ID NO: 443780 - protein, 15 aa, Homo sapiens
  CDR3 for beta chain variable domain of TCR clone 221890 (TRBV11-2, TRBJ2-7)
CASSLMVGGSYEQYF

SEQ ID NO: 443781 - protein, 14 aa, Homo sapiens
  CDR3 for alpha chain variable domain of TCR clone 221891 (TRAV12-1, TRAJ4)
CGEQRSGGYNKLIF

SEQ ID NO: 443782 - protein, 13 aa, Homo sapiens
  CDR3 for beta chain variable domain of TCR clone 221891 (TRBV20-1, TRBJ2-5)
CSARGDYQETQYF

SEQ ID NO: 443783 - protein, 14 aa, Homo sapiens
  CDR3 for alpha chain variable domain of TCR clone 221892 (TRAV26-1, TRAJ54)
CIVRVPQGAQKLVF

SEQ ID NO: 443784 - protein, 12 aa, Homo sapiens
  CDR3 for beta chain variable domain of TCR clone 221892 (TRBV14, TRBJ2-5)
CASSQLKETQYF

SEQ ID NO: 443785 - protein, 13 aa, Homo sapiens
  CDR3 for alpha chain variable domain of TCR clone 221893 (TRAV23/DV6, TRAJ43)
CAASMGGNNGMRF

SEQ ID NO: 443786 - protein, 16 aa, Homo sapiens
  CDR3 for beta chain variable domain of TCR clone 221893 (TRBV7-9, TRBJ1-2)
CASSLGFSSGEDGYTF

SEQ ID NO: 443787 - protein, 14 aa, Homo sapiens
  CDR3 for alpha chain variable domain of TCR clone 221894 (TRAV1-1, TRAJ30)
CAVRSLNRDDKIIF

SEQ ID NO: 443788 - protein, 15 aa, Homo sapiens
  CDR3 for beta chain variable domain of TCR clone 221894 (TRBV27, TRBJ1-4)
CASSAQQDLNEKLVF

SEQ ID NO: 443789 - protein, 15 aa, Homo sapiens
  CDR3 for alpha chain variable domain of TCR clone 221895 (TRAV35, TRAJ23)
CAGQRGYNQGGKLIF

SEQ ID NO: 443790 - protein, 16 aa, Homo sapiens
  CDR3 for beta chain variable domain of TCR clone 221895 (TRBV27, TRBJ2-1)
CASSARLAGNYNEQFF

SEQ ID NO: 443791 - protein, 12 aa, Homo sapiens
  CDR3 for alpha chain variable domain of TCR clone 221896 (TRAV12-1, TRAJ40)
CVVYSGTYKYIF

SEQ ID NO: 443792 - protein, 15 aa, Homo sapiens
  CDR3 for beta chain variable domain of TCR clone 221896 (TRBV5-1, TRBJ2-3)
CASSVTSGSTDTQYF

SEQ ID NO: 443793 - protein, 14 aa, Homo sapiens
  CDR3 for alpha chain variable domain of TCR clone 221897 (TRAV38-1, TRAJ45)
CAYYSGGGADGLTF

SEQ ID NO: 443794 - protein, 15 aa, Homo sapiens
  CDR3 for beta chain variable domain of TCR clone 221897 (TRBV7-9, TRBJ2-2)
CASGPLDTFPGELFF

SEQ ID NO: 443795 - protein, 13 aa, Homo sapiens
  CDR3 for alpha chain variable domain of TCR clone 221898 (TRAV1-2, TRAJ12)
CAVSMDSSYQLIF

SEQ ID NO: 443796 - protein, 15 aa, Homo sapiens
  CDR3 for beta chain variable domain of TCR clone 221898 (TRBV27, TRBJ2-5)
CASSLIPSRGETQYF

SEQ ID NO: 443797 - protein, 15 aa, Homo sapiens
  CDR3 for alpha chain variable domain of TCR clone 221899 (TRAV17, TRAJ54)
CATDHPIQGAQKLVF

SEQ ID NO: 443798 - protein, 15 aa, Homo sapiens
  CDR3 for beta chain variable domain of TCR clone 221899 (TRBV29-1, TRBJ2-5)
CSVEDGGLVSETQYF

SEQ ID NO: 443799 - protein, 13 aa, Homo sapiens
  CDR3 for alpha chain variable domain of TCR clone 221900 (TRAV12-2, TRAJ50)
CAVIVTSYDKVIF

SEQ ID NO: 443800 - protein, 15 aa, Homo sapiens
  CDR3 for beta chain variable domain of TCR clone 221900 (TRBV19, TRBJ1-1)
CASTAGQIQNTEAFF

SEQ ID NO: 443801 - protein, 17 aa, Homo sapiens
  CDR3 for alpha chain variable domain of TCR clone 221901 (TRAV1-1, TRAJ4)
CALYNRLIFGAGTRLAV

SEQ ID NO: 443802 - protein, 16 aa, Homo sapiens
  CDR3 for beta chain variable domain of TCR clone 221901 (TRBV7-3, TRBJ2-2)
CASSLKRGTLSGELFF

SEQ ID NO: 443803 - protein, 17 aa, Homo sapiens
  CDR3 for alpha chain variable domain of TCR clone 221902 (TRAV3, TRAJ42)
CAVRDRDYGGSQGNLIF

SEQ ID NO: 443804 - protein, 13 aa, Homo sapiens
  CDR3 for beta chain variable domain of TCR clone 221902 (TRBV11-3, TRBJ2-5)
CASSSGLQETQYF

SEQ ID NO: 443805 - protein, 12 aa, Homo sapiens
  CDR3 for alpha chain variable domain of TCR clone 221903 (TRAV21, TRAJ31)
CAVWGNNARLMF

SEQ ID NO: 443806 - protein, 12 aa, Homo sapiens
  CDR3 for beta chain variable domain of TCR clone 221903 (TRBV11-2, TRBJ2-5)
CASSLGQETQYF

SEQ ID NO: 443807 - protein, 14 aa, Homo sapiens
  CDR3 for alpha chain variable domain of TCR clone 221904 (TRAV1-2, TRAJ16)
CAFNRFSDGQRLLF

SEQ ID NO: 443808 - protein, 15 aa, Homo sapiens
  CDR3 for beta chain variable domain of TCR clone 221904 (TRBV9, TRBJ1-6)
CASSVAGTGDSPLHF

SEQ ID NO: 443809 - protein, 15 aa, Homo sapiens
  CDR3 for alpha chain variable domain of TCR clone 221905 (TRAV26-1, TRAJ29)
CIVRVEGSGNTPLGF

SEQ ID NO: 443810 - protein, 18 aa, Homo sapiens
  CDR3 for beta chain variable domain of TCR clone 221905 (TRBV5-5, TRBJ1-5)
CASSLRQVKGSSNQPQHF

SEQ ID NO: 443811 - protein, 13 aa, Homo sapiens
  CDR3 for alpha chain variable domain of TCR clone 221906 (TRAV8-3, TRAJ43)
CAVGPDNNNDMRF

SEQ ID NO: 443812 - protein, 15 aa, Homo sapiens
  CDR3 for beta chain variable domain of TCR clone 221906 (TRBV19, TRBJ2-3)
CASRETMGSRNTQNF

SEQ ID NO: 443813 - protein, 14 aa, Homo sapiens
  CDR3 for alpha chain variable domain of TCR clone 221907 (TRAV25, TRAJ27)
CAGPGNTNAGKSNF

SEQ ID NO: 443814 - protein, 16 aa, Homo sapiens
  CDR3 for beta chain variable domain of TCR clone 221907 (TRBV4-1, TRBJ2-6)
CASSQDGGPRANVLTF

SEQ ID NO: 443815 - protein, 11 aa, Homo sapiens
  CDR3 for alpha chain variable domain of TCR clone 221908 (TRAV12-1, TRAJ33)
CVVNMNYQLIC

SEQ ID NO: 443816 - protein, 11 aa, Homo sapiens
  CDR3 for beta chain variable domain of TCR clone 221908 (TRBV10-1, TRBJ2-3)
CASSDSDTQYF

SEQ ID NO: 443817 - protein, 13 aa, Homo sapiens
  CDR3 for alpha chain variable domain of TCR clone 221909 (TRAV27, TRAJ45)
CRSSGGGADGLTF

SEQ ID NO: 443818 - protein, 17 aa, Homo sapiens
  CDR3 for beta chain variable domain of TCR clone 221909 (TRBV11-2, TRBJ2-1)
CASSLYRPGVEYNEQFF

SEQ ID NO: 443819 - protein, 14 aa, Homo sapiens
  CDR3 for alpha chain variable domain of TCR clone 221910 (TRAV12-3, TRAJ13)
CAMKNSGGYQKVTF

SEQ ID NO: 443820 - protein, 18 aa, Homo sapiens
  CDR3 for beta chain variable domain of TCR clone 221910 (TRBV12-4, TRBJ2-2)
CASSRSGGAIPNTGELFF

SEQ ID NO: 443821 - protein, 14 aa, Homo sapiens
  CDR3 for alpha chain variable domain of TCR clone 221911 (TRAV8-1, TRAJ5)
CAVRTDTGRRELTF

SEQ ID NO: 443822 - protein, 14 aa, Homo sapiens
  CDR3 for beta chain variable domain of TCR clone 221911 (TRBV19, TRBJ2-1)
CASPTFVLSGEQFF

SEQ ID NO: 443823 - protein, 15 aa, Homo sapiens
  CDR3 for alpha chain variable domain of TCR clone 221912 (TRAV12-3, TRAJ27)
CAMRAYNTNAGKSTF

SEQ ID NO: 443824 - protein, 16 aa, Homo sapiens
  CDR3 for beta chain variable domain of TCR clone 221912 (TRBV5-1, TRBJ2-3)
CASSLALAVVSDTQYF

SEQ ID NO: 443825 - protein, 14 aa, Homo sapiens
  CDR3 for alpha chain variable domain of TCR clone 221913 (TRAV29/DV5, TRAJ20)
CAASAPIEDYKLSF

SEQ ID NO: 443826 - protein, 16 aa, Homo sapiens
  CDR3 for beta chain variable domain of TCR clone 221913 (TRBV19, TRBJ2-2)
CASRSPGTGATGELFF

SEQ ID NO: 443827 - protein, 12 aa, Homo sapiens
  CDR3 for alpha chain variable domain of TCR clone 221914 (TRAV12-3, TRAJ17)
CAMTLTGNKLTF

SEQ ID NO: 443828 - protein, 11 aa, Homo sapiens
  CDR3 for beta chain variable domain of TCR clone 221914 (TRBV11-3, TRBJ2-2)
CASSVPGELFF

SEQ ID NO: 443829 - protein, 12 aa, Homo sapiens
  CDR3 for alpha chain variable domain of TCR clone 221915 (TRAV2, TRAJ36)
CAELTGANNFFF

SEQ ID NO: 443830 - protein, 14 aa, Homo sapiens
  CDR3 for beta chain variable domain of TCR clone 221915 (TRBV18, TRBJ2-7)
CASSPRGGAYEQYF

SEQ ID NO: 443831 - protein, 14 aa, Homo sapiens
  CDR3 for alpha chain variable domain of TCR clone 221916 (TRAV12-2, TRAJ17)
CAVLFKAAGNKLTF

SEQ ID NO: 443832 - protein, 14 aa, Homo sapiens
  CDR3 for beta chain variable domain of TCR clone 221916 (TRBV13, TRBJ2-5)
CASSLGPRGETQYF

SEQ ID NO: 443833 - protein, 11 aa, Homo sapiens
  CDR3 for alpha chain variable domain of TCR clone 221917 (TRAV17, TRAJ9)
CATTGGFKTIF

SEQ ID NO: 443834 - protein, 15 aa, Homo sapiens
  CDR3 for beta chain variable domain of TCR clone 221917 (TRBV7-9, TRBJ2-1)
CASSQRGGAHIEQFF

SEQ ID NO: 443835 - protein, 12 aa, Homo sapiens
  CDR3 for alpha chain variable domain of TCR clone 221918 (TRAV12-3, TRAJ17)
CAMTLTGKKLTF

SEQ ID NO: 443836 - protein, 14 aa, Homo sapiens
  CDR3 for beta chain variable domain of TCR clone 221918 (TRBV12-4, TRBJ1-1)
CASSLGTGGTEAFF

SEQ ID NO: 443837 - protein, 14 aa, Homo sapiens
  CDR3 for alpha chain variable domain of TCR clone 221919 (TRAV26-2, TRAJ39)
CSLRGNNNAGNMLT

SEQ ID NO: 443838 - protein, 15 aa, Homo sapiens
  CDR3 for beta chain variable domain of TCR clone 221919 (TRBV5-4, TRBJ1-1)
CASSSLGWAITEAFF

SEQ ID NO: 443839 - protein, 11 aa, Homo sapiens
  CDR3 for alpha chain variable domain of TCR clone 221920 (TRAV29/DV5, TRAJ49)
CAAFTGNQFYF

SEQ ID NO: 443840 - protein, 13 aa, Homo sapiens
  CDR3 for beta chain variable domain of TCR clone 221920 (TRBV10-3, TRBJ2-7)
CASKLAVNYEQYF

SEQ ID NO: 443841 - protein, 14 aa, Homo sapiens
  CDR3 for alpha chain variable domain of TCR clone 221921 (TRAV1-2, TRAJ16)
CAGNRFSDGQKLLF

SEQ ID NO: 443842 - protein, 12 aa, Homo sapiens
  CDR3 for beta chain variable domain of TCR clone 221921 (TRBV7-9, TRBJ2-7)
CASSLEGYEQYF

SEQ ID NO: 443843 - protein, 15 aa, Homo sapiens
  CDR3 for alpha chain variable domain of TCR clone 221922 (TRAV17, TRAJ57)
CATGPSQGGSEKLVF

SEQ ID NO: 443844 - protein, 14 aa, Homo sapiens
  CDR3 for beta chain variable domain of TCR clone 221922 (TRBV25-1, TRBJ1-1)
CSSTHLGGNTEAFF

SEQ ID NO: 443845 - protein, 16 aa, Homo sapiens
  CDR3 for alpha chain variable domain of TCR clone 221923 (TRAV8-3, TRAJ13)
CAVGAYPSGGYQKVTF

SEQ ID NO: 443846 - protein, 14 aa, Homo sapiens
  CDR3 for beta chain variable domain of TCR clone 221923 (TRBV7-3, TRBJ2-1)
CASSLAGGTNEQFF

SEQ ID NO: 443847 - protein, 20 aa, Homo sapiens
  CDR3 for alpha chain variable domain of TCR clone 221924 (TRAV12-3, TRAJ41)
SLFIRDSQPSDSATPEALNF

SEQ ID NO: 443848 - protein, 13 aa, Homo sapiens
  CDR3 for beta chain variable domain of TCR clone 221924 (TRBV7-2, TRBJ1-2)
CASSLDGIYGYTF

SEQ ID NO: 443849 - protein, 15 aa, Homo sapiens
  CDR3 for alpha chain variable domain of TCR clone 221925 (TRAV13-1, TRAJ57)
QVPPLSQGGSEKLVF

SEQ ID NO: 443850 - protein, 17 aa, Homo sapiens
  CDR3 for beta chain variable domain of TCR clone 221925 (TRBV7-3, TRBJ2-3)
CASSLMKRMRGADTQYL

SEQ ID NO: 443851 - protein, 12 aa, Homo sapiens
  CDR3 for alpha chain variable domain of TCR clone 221926 (TRAV13-1, TRAJ53)
AASGGSNYKLTF

SEQ ID NO: 443852 - protein, 16 aa, Homo sapiens
  CDR3 for beta chain variable domain of TCR clone 221926 (TRBV28, TRBJ2-6)
CASNNRRGSGANVLTF

SEQ ID NO: 443853 - protein, 12 aa, Homo sapiens
  CDR3 for alpha chain variable domain of TCR clone 221927 (TRAV1-1, TRAJ30)
CAVRGRDDKIIF

SEQ ID NO: 443854 - protein, 13 aa, Homo sapiens
  CDR3 for beta chain variable domain of TCR clone 221927 (TRBV11-3, TRBJ2-7)
CASSLDKLYEQHF

SEQ ID NO: 443855 - protein, 14 aa, Homo sapiens
  CDR3 for alpha chain variable domain of TCR clone 221928 (TRAV8-3, TRAJ36)
CAVGQITGANNLFF

SEQ ID NO: 443856 - protein, 15 aa, Homo sapiens
  CDR3 for beta chain variable domain of TCR clone 221928 (TRBV4-1, TRBJ2-1)
CASSQDPGNYNEQFF

SEQ ID NO: 443857 - protein, 15 aa, Homo sapiens
  CDR3 for alpha chain variable domain of TCR clone 221929 (TRAV17, TRAJ35)
CATALVIGFGNVLHC

SEQ ID NO: 443858 - protein, 15 aa, Homo sapiens
  CDR3 for beta chain variable domain of TCR clone 221929 (TRBV7-6, TRBJ2-7)
CASSLGQGASYEQYF

SEQ ID NO: 443859 - protein, 15 aa, Homo sapiens
  CDR3 for alpha chain variable domain of TCR clone 221930 (TRAV2, TRAJ13)
CAVEPEFWGLPERYL

SEQ ID NO: 443860 - protein, 14 aa, Homo sapiens
  CDR3 for beta chain variable domain of TCR clone 221930 (TRBV28, TRBJ1-5)
CASSGQALYQPQHF

SEQ ID NO: 443861 - protein, 13 aa, Homo sapiens
  CDR3 for alpha chain variable domain of TCR clone 221931 (TRAV2, TRAJ16)
CAVELGDGQKLLF

SEQ ID NO: 443862 - protein, 13 aa, Homo sapiens
  CDR3 for beta chain variable domain of TCR clone 221931 (TRBV7-3, TRBJ2-5)
CASSFRGGETQYF

SEQ ID NO: 443863 - protein, 16 aa, Homo sapiens
  CDR3 for alpha chain variable domain of TCR clone 221932 (TRAV3, TRAJ37)
CAVRGKGSGNTGKLIF

SEQ ID NO: 443864 - protein, 13 aa, Homo sapiens
  CDR3 for beta chain variable domain of TCR clone 221932 (TRBV14, TRBJ2-7)
CASSQDRRYEEYF

SEQ ID NO: 443865 - protein, 12 aa, Homo sapiens
  CDR3 for alpha chain variable domain of TCR clone 221933 (TRAV36/DV7, TRAJ54)
CAVVRGAQKLVF

SEQ ID NO: 443866 - protein, 14 aa, Homo sapiens
  CDR3 for beta chain variable domain of TCR clone 221933 (TRBV13, TRBJ2-3)
CASSLGGPQRPQYF

SEQ ID NO: 443867 - protein, 17 aa, Homo sapiens
  CDR3 for alpha chain variable domain of TCR clone 221934 (TRAV17, TRAJ7)
CATLVRLAFGKGNQVVV

SEQ ID NO: 443868 - protein, 13 aa, Homo sapiens
  CDR3 for beta chain variable domain of TCR clone 221934 (TRBV12-4, TRBJ2-7)
CASSLERVKEQYI

SEQ ID NO: 443869 - protein, 13 aa, Homo sapiens
  CDR3 for alpha chain variable domain of TCR clone 221935 (TRAV1-2, TRAJ9)
CAVLNTGGFKTIF

SEQ ID NO: 443870 - protein, 12 aa, Homo sapiens
  CDR3 for beta chain variable domain of TCR clone 221935 (TRBV13, TRBJ2-3)
CASSQGTDTQYF

SEQ ID NO: 443871 - protein, 12 aa, Homo sapiens
  CDR3 for alpha chain variable domain of TCR clone 221936 (TRAV16, TRAJ10)
CSSTGGGNKLTF

SEQ ID NO: 443872 - protein, 13 aa, Homo sapiens
  CDR3 for beta chain variable domain of TCR clone 221936 (TRBV15, TRBJ2-7)
CATSTTGHYEQYF

SEQ ID NO: 443873 - protein, 15 aa, Homo sapiens
  CDR3 for alpha chain variable domain of TCR clone 221937 (TRAV3, TRAJ22)
CAVRDRGGSARQLTF

SEQ ID NO: 443874 - protein, 14 aa, Homo sapiens
  CDR3 for beta chain variable domain of TCR clone 221937 (TRBV20-1, TRBJ1-1)
CSAQTRIGGTVAFF

SEQ ID NO: 443875 - protein, 14 aa, Homo sapiens
  CDR3 for alpha chain variable domain of TCR clone 221938 (TRAV1-2, TRAJ16)
CAVNRFSVGQKLLF

SEQ ID NO: 443876 - protein, 11 aa, Homo sapiens
  CDR3 for beta chain variable domain of TCR clone 221938 (TRBV7-8, TRBJ2-7)
CASSISLEQYF

SEQ ID NO: 443877 - protein, 15 aa, Homo sapiens
  CDR3 for alpha chain variable domain of TCR clone 221939 (TRAV8-4, TRAJ3)
CAVTGENLVQQCFQD

SEQ ID NO: 443878 - protein, 16 aa, Homo sapiens
  CDR3 for beta chain variable domain of TCR clone 221939 (TRBV4-2, TRBJ1-1)
RASSQAGFGMNTEAFF

SEQ ID NO: 443879 - protein, 13 aa, Homo sapiens
  CDR3 for alpha chain variable domain of TCR clone 221940 (TRAV3, TRAJ27)
CAVRPLGAGKSTF

SEQ ID NO: 443880 - protein, 11 aa, Homo sapiens
  CDR3 for beta chain variable domain of TCR clone 221940 (TRBV7-9, TRBJ2-3)
CASSGPDTQYF

SEQ ID NO: 443881 - protein, 11 aa, Homo sapiens
  CDR3 for alpha chain variable domain of TCR clone 221941 (TRAV2, TRAJ33)
CAVDSNYQLIW

SEQ ID NO: 443882 - protein, 14 aa, Homo sapiens
  CDR3 for beta chain variable domain of TCR clone 221941 (TRBV11-2, TRBJ2-3)
SASSRLARTDTQYF

SEQ ID NO: 443883 - protein, 18 aa, Homo sapiens
  CDR3 for alpha chain variable domain of TCR clone 221942 (TRAV12-3, TRAJ52)
CAMSRTNAGGTSYGKLTF

SEQ ID NO: 443884 - protein, 17 aa, Homo sapiens
  CDR3 for beta chain variable domain of TCR clone 221942 (TRBV7-3, TRBJ2-3)
CASSLRKRRRGADTQYF

SEQ ID NO: 443885 - protein, 11 aa, Homo sapiens
  CDR3 for alpha chain variable domain of TCR clone 221943 (TRAV26-1, TRAJ37)
CIVRVGRKLIF

SEQ ID NO: 443886 - protein, 14 aa, Homo sapiens
  CDR3 for beta chain variable domain of TCR clone 221943 (TRBV6-1, TRBJ1-2)
CASSTGWPPTGYTF

SEQ ID NO: 443887 - protein, 16 aa, Homo sapiens
  CDR3 for alpha chain variable domain of TCR clone 221944 (TRAV12-2, TRAJ6)
CAAPLAGSGGSYIPTF

SEQ ID NO: 443888 - protein, 12 aa, Homo sapiens
  CDR3 for beta chain variable domain of TCR clone 221944 (TRBV28, TRBJ1-2)
CAAVLTEPSSVR

SEQ ID NO: 443889 - protein, 14 aa, Homo sapiens
  CDR3 for alpha chain variable domain of TCR clone 221945 (TRAV2, TRAJ9)
CAVEDRGGGFKTIF

SEQ ID NO: 443890 - protein, 13 aa, Homo sapiens
  CDR3 for beta chain variable domain of TCR clone 221945 (TRBV24-1, TRBJ2-2)
CATSDWSTGELFF

SEQ ID NO: 443891 - protein, 14 aa, Homo sapiens
  CDR3 for alpha chain variable domain of TCR clone 221946 (TRAV20, TRAJ42)
CAVQAGGSQGNLIF

SEQ ID NO: 443892 - protein, 18 aa, Homo sapiens
  CDR3 for beta chain variable domain of TCR clone 221946 (TRBV4-1, TRBJ1-5)
CASSQDPRGQGLNQPQHF

SEQ ID NO: 443893 - protein, 10 aa, Homo sapiens
  CDR3 for alpha chain variable domain of TCR clone 221947 (TRAV12-3, TRAJ49)
CAMNDDQFYF

SEQ ID NO: 443894 - protein, 16 aa, Homo sapiens
  CDR3 for beta chain variable domain of TCR clone 221947 (TRBV6-1, TRBJ2-2)
CASSAFRGGDTGELFF

SEQ ID NO: 443895 - protein, 12 aa, Homo sapiens
  CDR3 for alpha chain variable domain of TCR clone 221948 (TRAV12-2, TRAJ3)
CAVWSSASKIIF

SEQ ID NO: 443896 - protein, 15 aa, Homo sapiens
  CDR3 for beta chain variable domain of TCR clone 221948 (TRBV20-1, TRBJ2-7)
CSARDRVSGMDEQYF

SEQ ID NO: 443897 - protein, 11 aa, Homo sapiens
  CDR3 for alpha chain variable domain of TCR clone 221949 (TRAV13-2, TRAJ26)
CAEIPGQNFVF

SEQ ID NO: 443898 - protein, 15 aa, Homo sapiens
  CDR3 for beta chain variable domain of TCR clone 221949 (TRBV10-3, TRBJ1-5)
CAISDTGLGGQPQYF

SEQ ID NO: 443899 - protein, 16 aa, Homo sapiens
  CDR3 for alpha chain variable domain of TCR clone 221950 (TRAV30, TRAJ24)
RGTEIVDADSWGKFQF

SEQ ID NO: 443900 - protein, 15 aa, Homo sapiens
  CDR3 for beta chain variable domain of TCR clone 221950 (TRBV19, TRBJ2-7)
CASRPTPGLSIEQYF

SEQ ID NO: 443901 - protein, 15 aa, Homo sapiens
  CDR3 for alpha chain variable domain of TCR clone 221951 (TRAV8-4, TRAJ15)
CAVSDPVQAGTALIF

SEQ ID NO: 443902 - protein, 15 aa, Homo sapiens
  CDR3 for beta chain variable domain of TCR clone 221951 (TRBV24-1, TRBJ2-1)
CATSEPGQGYNEQFF

SEQ ID NO: 443903 - protein, 17 aa, Homo sapiens
  CDR3 for alpha chain variable domain of TCR clone 221952 (TRAV27, TRAJ42)
CAERVIYYGGSQGNLIF

SEQ ID NO: 443904 - protein, 14 aa, Homo sapiens
  CDR3 for beta chain variable domain of TCR clone 221952 (TRBV6-6, TRBJ2-3)
CASRLQREADTQYF

SEQ ID NO: 443905 - protein, 16 aa, Homo sapiens
  CDR3 for alpha chain variable domain of TCR clone 221953 (TRAV3, TRAJ37)
CAVRGKGSGNTGKLFF

SEQ ID NO: 443906 - protein, 12 aa, Homo sapiens
  CDR3 for beta chain variable domain of TCR clone 221953 (TRBV12-4, TRBJ2-3)
CASSTLPDTQYF

SEQ ID NO: 443907 - protein, 12 aa, Homo sapiens
  CDR3 for alpha chain variable domain of TCR clone 221954 (TRAV12-3, TRAJ17)
CAMTLTGNKLTF

SEQ ID NO: 443908 - protein, 15 aa, Homo sapiens
  CDR3 for beta chain variable domain of TCR clone 221954 (TRBV6-6, TRBJ2-5)
CASSPGGGLEQTQYF

SEQ ID NO: 443909 - protein, 14 aa, Homo sapiens
  CDR3 for alpha chain variable domain of TCR clone 221955 (TRAV27, TRAJ42)
CAGGGGGSQGNLIF

SEQ ID NO: 443910 - protein, 14 aa, Homo sapiens
  CDR3 for beta chain variable domain of TCR clone 221955 (TRBV19, TRBJ1-2)
CASSRQGSSIGYTF

SEQ ID NO: 443911 - protein, 15 aa, Homo sapiens
  CDR3 for alpha chain variable domain of TCR clone 221956 (TRAV3, TRAJ22)
CAVRDRGGSARQLTF

SEQ ID NO: 443912 - protein, 14 aa, Homo sapiens
  CDR3 for beta chain variable domain of TCR clone 221956 (TRBV13, TRBJ2-7)
CASSLKGASYEQYF

SEQ ID NO: 443913 - protein, 12 aa, Homo sapiens
  CDR3 for alpha chain variable domain of TCR clone 221957 (TRAV8-3, TRAJ20)
CAVGGNDYKPSF

SEQ ID NO: 443914 - protein, 16 aa, Homo sapiens
  CDR3 for beta chain variable domain of TCR clone 221957 (TRBV19, TRBJ2-2)
CASRSPGTGATGELFF

SEQ ID NO: 443915 - protein, 14 aa, Homo sapiens
  CDR3 for alpha chain variable domain of TCR clone 221958 (TRAV8-3, TRAJ39)
CAVGANNAGNMLPF

SEQ ID NO: 443916 - protein, 12 aa, Homo sapiens
  CDR3 for beta chain variable domain of TCR clone 221958 (TRBV28, TRBJ1-3)
CASVSSGNTIYF

SEQ ID NO: 443917 - protein, 12 aa, Homo sapiens
  CDR3 for alpha chain variable domain of TCR clone 221959 (TRAV13-1, TRAJ53)
AASGGSNYKLTF

SEQ ID NO: 443918 - protein, 16 aa, Homo sapiens
  CDR3 for beta chain variable domain of TCR clone 221959 (TRBV28, TRBJ2-6)
CASSNRRGSGANVLNF

SEQ ID NO: 443919 - protein, 16 aa, Homo sapiens
  CDR3 for alpha chain variable domain of TCR clone 221960 (TRAV12-2, TRAJ10)
CAVNRVLTGGGNKLTF

SEQ ID NO: 443920 - protein, 13 aa, Homo sapiens
  CDR3 for beta chain variable domain of TCR clone 221960 (TRBV2, TRBJ1-2)
CASSVRGNYGYTF

SEQ ID NO: 443921 - protein, 16 aa, Homo sapiens
  CDR3 for alpha chain variable domain of TCR clone 221961 (TRAV3, TRAJ37)
CAVRPHVSGNTGKLIL

SEQ ID NO: 443922 - protein, 16 aa, Homo sapiens
  CDR3 for beta chain variable domain of TCR clone 221961 (TRBV9, TRBJ1-2)
CASSVEEKVSPYGYTF

SEQ ID NO: 443923 - protein, 13 aa, Homo sapiens
  CDR3 for alpha chain variable domain of TCR clone 221962 (TRAV2, TRAJ40)
CAVVTSGTFKYTF

SEQ ID NO: 443924 - protein, 14 aa, Homo sapiens
  CDR3 for beta chain variable domain of TCR clone 221962 (TRBV19, TRBJ2-1)
CASPTFVLSGEQFF

SEQ ID NO: 443925 - protein, 13 aa, Homo sapiens
  CDR3 for alpha chain variable domain of TCR clone 221963 (TRAV3, TRAJ20)
CAVRDTGDYKLSF

SEQ ID NO: 443926 - protein, 13 aa, Homo sapiens
  CDR3 for beta chain variable domain of TCR clone 221963 (TRBV29-1, TRBJ2-1)
CSVEGGRVNEQFF

SEQ ID NO: 443927 - protein, 17 aa, Homo sapiens
  CDR3 for alpha chain variable domain of TCR clone 221964 (TRAV26-1, TRAJ53)
CIVRVDDSGGSNYKLTF

SEQ ID NO: 443928 - protein, 15 aa, Homo sapiens
  CDR3 for beta chain variable domain of TCR clone 221964 (TRBV20-1, TRBJ2-7)
CSARVPAACFYEQYF

SEQ ID NO: 443929 - protein, 15 aa, Homo sapiens
  CDR3 for alpha chain variable domain of TCR clone 221965 (TRAV38-2/DV8, TRAJ47)
CAYRTPLEYGNKLFF

SEQ ID NO: 443930 - protein, 11 aa, Homo sapiens
  CDR3 for beta chain variable domain of TCR clone 221965 (TRBV11-2, TRBJ2-2)
CASSLPGELFF

SEQ ID NO: 443931 - protein, 16 aa, Homo sapiens
  CDR3 for alpha chain variable domain of TCR clone 221966 (TRAV20, TRAJ10)
CAVLRGLTGGGNKLPF

SEQ ID NO: 443932 - protein, 14 aa, Homo sapiens
  CDR3 for beta chain variable domain of TCR clone 221966 (TRBV19, TRBJ1-5)
CAGRAPDSFLSQHF

SEQ ID NO: 443933 - protein, 11 aa, Homo sapiens
  CDR3 for alpha chain variable domain of TCR clone 221967 (TRAV21, TRAJ34)
CAVTNTDKLIF

SEQ ID NO: 443934 - protein, 13 aa, Homo sapiens
  CDR3 for beta chain variable domain of TCR clone 221967 (TRBV29-1, TRBJ1-3)
CSVEGGSGNTIYL

SEQ ID NO: 443935 - protein, 12 aa, Homo sapiens
  CDR3 for alpha chain variable domain of TCR clone 221968 (TRAV21, TRAJ11)
CAVRGGNSTLTF

SEQ ID NO: 443936 - protein, 13 aa, Homo sapiens
  CDR3 for beta chain variable domain of TCR clone 221968 (TRBV20-1, TRBJ1-1)
CSAPLGGGTEAFF

SEQ ID NO: 443937 - protein, 15 aa, Homo sapiens
  CDR3 for alpha chain variable domain of TCR clone 221969 (TRAV21, TRAJ24)
CAARSSTDSWGKLQF

SEQ ID NO: 443938 - protein, 15 aa, Homo sapiens
  CDR3 for beta chain variable domain of TCR clone 221969 (TRBV5-1, TRBJ2-1)
CASSPLRAPYNEQFF

SEQ ID NO: 443939 - protein, 15 aa, Homo sapiens
  CDR3 for alpha chain variable domain of TCR clone 221970 (TRAV12-3, TRAJ48)
CAMSASNFGNEKLTF

SEQ ID NO: 443940 - protein, 13 aa, Homo sapiens
  CDR3 for beta chain variable domain of TCR clone 221970 (TRBV24-1, TRBJ2-1)
CATSRGARNGQFF

SEQ ID NO: 443941 - protein, 14 aa, Homo sapiens
  CDR3 for alpha chain variable domain of TCR clone 221971 (TRAV13-1, TRAJ35)
CAASKGGFGNVLHF

SEQ ID NO: 443942 - protein, 16 aa, Homo sapiens
  CDR3 for beta chain variable domain of TCR clone 221971 (TRBV2, TRBJ1-4)
CASNLFQGATNEKLFF

SEQ ID NO: 443943 - protein, 14 aa, Homo sapiens
  CDR3 for alpha chain variable domain of TCR clone 221972 (TRAV13-2, TRAJ39)
CAENKNNAGNMLTF

SEQ ID NO: 443944 - protein, 14 aa, Homo sapiens
  CDR3 for beta chain variable domain of TCR clone 221972 (TRBV19, TRBJ1-5)
CASRAPDSFLSQHF

SEQ ID NO: 443945 - protein, 16 aa, Homo sapiens
  CDR3 for alpha chain variable domain of TCR clone 221973 (TRAV3, TRAJ37)
CAVRGKGSGNTGKLSF

SEQ ID NO: 443946 - protein, 13 aa, Homo sapiens
  CDR3 for beta chain variable domain of TCR clone 221973 (TRBV7-2, TRBJ2-2)
CASSSVRAGELFF

SEQ ID NO: 443947 - protein, 15 aa, Homo sapiens
  CDR3 for alpha chain variable domain of TCR clone 221974 (TRAV35, TRAJ40)
CAGQLGTSGTYKYIF

SEQ ID NO: 443948 - protein, 14 aa, Homo sapiens
  CDR3 for beta chain variable domain of TCR clone 221974 (TRBV7-3, TRBJ2-1)
CASSLAGGRNEQFF

SEQ ID NO: 443949 - protein, 13 aa, Homo sapiens
  CDR3 for alpha chain variable domain of TCR clone 221975 (TRAV3, TRAJ15)
CAVRDQAGTALIF

SEQ ID NO: 443950 - protein, 12 aa, Homo sapiens
  CDR3 for beta chain variable domain of TCR clone 221975 (TRBV7-8, TRBJ2-5)
CASSPRVETQYF

SEQ ID NO: 443951 - protein, 10 aa, Homo sapiens
  CDR3 for alpha chain variable domain of TCR clone 221976 (TRAV1-2, TRAJ20)
CALNDYKLSF

SEQ ID NO: 443952 - protein, 15 aa, Homo sapiens
  CDR3 for beta chain variable domain of TCR clone 221976 (TRBV12-4, TRBJ1-2)
CASRLGVAGNYGYTF

SEQ ID NO: 443953 - protein, 14 aa, Homo sapiens
  CDR3 for alpha chain variable domain of TCR clone 221977 (TRAV23/DV6, TRAJ58)
CAGMRETSGSSVTF

SEQ ID NO: 443954 - protein, 13 aa, Homo sapiens
  CDR3 for beta chain variable domain of TCR clone 221977 (TRBV28, TRBJ2-7)
CASRSSGVYEQYF

SEQ ID NO: 443955 - protein, 12 aa, Homo sapiens
  CDR3 for alpha chain variable domain of TCR clone 221978 (TRAV12-1, TRAJ40)
CVFYSGTYTYIF

SEQ ID NO: 443956 - protein, 12 aa, Homo sapiens
  CDR3 for beta chain variable domain of TCR clone 221978 (TRBV7-3, TRBJ2-1)
CASSFINNEQFF

SEQ ID NO: 443957 - protein, 14 aa, Homo sapiens
  CDR3 for alpha chain variable domain of TCR clone 221979 (TRAV9-2, TRAJ39)
CALYIYNAGNMLTF

SEQ ID NO: 443958 - protein, 13 aa, Homo sapiens
  CDR3 for beta chain variable domain of TCR clone 221979 (TRBV12-4, TRBJ1-2)
CASSLRQGKGDTF

SEQ ID NO: 443959 - protein, 11 aa, Homo sapiens
  CDR3 for alpha chain variable domain of TCR clone 221980 (TRAV17, TRAJ31)
CATSNNAGLMF

SEQ ID NO: 443960 - protein, 16 aa, Homo sapiens
  CDR3 for beta chain variable domain of TCR clone 221980 (TRBV7-8, TRBJ2-4)
CASSAERTLAKNIQYF

SEQ ID NO: 443961 - protein, 13 aa, Homo sapiens
  CDR3 for alpha chain variable domain of TCR clone 221981 (TRAV21, TRAJ20)
CAVGLRVDYKLSF

SEQ ID NO: 443962 - protein, 15 aa, Homo sapiens
  CDR3 for beta chain variable domain of TCR clone 221981 (TRBV3-1, TRBJ2-7)
CASSQDAGRTYEQYF

SEQ ID NO: 443963 - protein, 14 aa, Homo sapiens
  CDR3 for alpha chain variable domain of TCR clone 221982 (TRAV12-3, TRAJ58)
CAMSTETSGSRLTF

SEQ ID NO: 443964 - protein, 12 aa, Homo sapiens
  CDR3 for beta chain variable domain of TCR clone 221982 (TRBV7-8, TRBJ2-7)
CARSLGDREQYF

SEQ ID NO: 443965 - protein, 16 aa, Homo sapiens
  CDR3 for alpha chain variable domain of TCR clone 221983 (TRAV12-3, TRAJ53)
CAMSPGSGGSNYKLTF

SEQ ID NO: 443966 - protein, 14 aa, Homo sapiens
  CDR3 for beta chain variable domain of TCR clone 221983 (TRBV12-5, TRBJ2-5)
CASDSRTHKETQYF

SEQ ID NO: 443967 - protein, 13 aa, Homo sapiens
  CDR3 for alpha chain variable domain of TCR clone 221984 (TRAV12-2, TRAJ30)
CAVNLNRDDKIIF

SEQ ID NO: 443968 - protein, 15 aa, Homo sapiens
  CDR3 for beta chain variable domain of TCR clone 221984 (TRBV7-9, TRBJ2-7)
CASSLALAEAYEQYF

SEQ ID NO: 443969 - protein, 11 aa, Homo sapiens
  CDR3 for alpha chain variable domain of TCR clone 221985 (TRAV35, TRAJ30)
CALGGDDKIIF

SEQ ID NO: 443970 - protein, 13 aa, Homo sapiens
  CDR3 for beta chain variable domain of TCR clone 221985 (TRBV7-6, TRBJ2-1)
CQQLGGGADEQFF

SEQ ID NO: 443971 - protein, 11 aa, Homo sapiens
  CDR3 for alpha chain variable domain of TCR clone 221986 (TRAV12-1, TRAJ34)
CVVNKGRELIF

SEQ ID NO: 443972 - protein, 15 aa, Homo sapiens
  CDR3 for beta chain variable domain of TCR clone 221986 (TRBV7-2, TRBJ1-2)
CARRLVSGGEYGYTL

SEQ ID NO: 443973 - protein, 12 aa, Homo sapiens
  CDR3 for alpha chain variable domain of TCR clone 221987 (TRAV16, TRAJ13)
CITFRGYQKVTF

SEQ ID NO: 443974 - protein, 17 aa, Homo sapiens
  CDR3 for beta chain variable domain of TCR clone 221987 (TRBV28, TRBJ2-5)
CASSRQGGLAGAETQYF

SEQ ID NO: 443975 - protein, 13 aa, Homo sapiens
  CDR3 for alpha chain variable domain of TCR clone 221988 (TRAV12-2, TRAJ20)
CAVYPSSDYKLSF

SEQ ID NO: 443976 - protein, 15 aa, Homo sapiens
  CDR3 for beta chain variable domain of TCR clone 221988 (TRBV18, TRBJ1-2)
CASSPGNGLGYGYTF

SEQ ID NO: 443977 - protein, 13 aa, Homo sapiens
  CDR3 for alpha chain variable domain of TCR clone 221989 (TRAV29/DV5, TRAJ31)
CAASRNNNARLMF

SEQ ID NO: 443978 - protein, 15 aa, Homo sapiens
  CDR3 for beta chain variable domain of TCR clone 221989 (TRBV28, TRBJ2-7)
CASSLISGGSYEQYF

SEQ ID NO: 443979 - protein, 13 aa, Homo sapiens
  CDR3 for alpha chain variable domain of TCR clone 221990 (TRAV8-1, TRAJ28)
CAVSGAGSYQLTF

SEQ ID NO: 443980 - protein, 12 aa, Homo sapiens
  CDR3 for beta chain variable domain of TCR clone 221990 (TRBV11-2, TRBJ2-2)
CASSLGGGELFF

SEQ ID NO: 443981 - protein, 17 aa, Homo sapiens
  CDR3 for alpha chain variable domain of TCR clone 221991 (TRAV4, TRAJ18)
CLVGERSVGSTLGRLYF

SEQ ID NO: 443982 - protein, 12 aa, Homo sapiens
  CDR3 for beta chain variable domain of TCR clone 221991 (TRBV7-9, TRBJ2-7)
CASSFGSYEQYF

SEQ ID NO: 443983 - protein, 13 aa, Homo sapiens
  CDR3 for alpha chain variable domain of TCR clone 221992 (TRAV12-3, TRAJ33)
CAMSVNTNYQLIW

SEQ ID NO: 443984 - protein, 13 aa, Homo sapiens
  CDR3 for beta chain variable domain of TCR clone 221992 (TRBV7-2, TRBJ2-2)
CASSLAVTGELFF

SEQ ID NO: 443985 - protein, 15 aa, Homo sapiens
  CDR3 for alpha chain variable domain of TCR clone 221993 (TRAV21, TRAJ24)
CAARSSTDSWGQLQV

SEQ ID NO: 443986 - protein, 13 aa, Homo sapiens
  CDR3 for beta chain variable domain of TCR clone 221993 (TRBV11-2, TRBJ2-5)
CASSSTGEETQYF

SEQ ID NO: 443987 - protein, 13 aa, Homo sapiens
  CDR3 for alpha chain variable domain of TCR clone 221994 (TRAV3, TRAJ20)
CAVRDTPRYKLSF

SEQ ID NO: 443988 - protein, 16 aa, Homo sapiens
  CDR3 for beta chain variable domain of TCR clone 221994 (TRBV4-3, TRBJ2-2)
CASSHLQGSGTGELFF

SEQ ID NO: 443989 - protein, 12 aa, Homo sapiens
  CDR3 for alpha chain variable domain of TCR clone 221995 (TRAV35, TRAJ30)
CAGLNRDDKIIF

SEQ ID NO: 443990 - protein, 15 aa, Homo sapiens
  CDR3 for beta chain variable domain of TCR clone 221995 (TRBV9, TRBJ1-6)
CASSVAGTGDSPLQF

SEQ ID NO: 443991 - protein, 13 aa, Homo sapiens
  CDR3 for alpha chain variable domain of TCR clone 221996 (TRAV29/DV5, TRAJ26)
CAASGNYGQNFVF

SEQ ID NO: 443992 - protein, 14 aa, Homo sapiens
  CDR3 for beta chain variable domain of TCR clone 221996 (TRBV7-9, TRBJ1-6)
CASRPGTVNSPLHF

SEQ ID NO: 443993 - protein, 12 aa, Homo sapiens
  CDR3 for alpha chain variable domain of TCR clone 221997 (TRAV3, TRAJ20)
CAVRDGDYKLSF

SEQ ID NO: 443994 - protein, 17 aa, Homo sapiens
  CDR3 for beta chain variable domain of TCR clone 221997 (TRBV25-1, TRBJ2-7)
CASSDARVVFSSYEQYF

SEQ ID NO: 443995 - protein, 14 aa, Homo sapiens
  CDR3 for alpha chain variable domain of TCR clone 221998 (TRAV1-2, TRAJ8)
CAVREDTVFQKLVF

SEQ ID NO: 443996 - protein, 12 aa, Homo sapiens
  CDR3 for beta chain variable domain of TCR clone 221998 (TRBV7-8, TRBJ2-7)
CASGLGDREQYF

SEQ ID NO: 443997 - protein, 16 aa, Homo sapiens
  CDR3 for alpha chain variable domain of TCR clone 221999 (TRAV30, TRAJ24)
CGTEIVDADSWGKFQF

SEQ ID NO: 443998 - protein, 15 aa, Homo sapiens
  CDR3 for beta chain variable domain of TCR clone 221999 (TRBV7-3, TRBJ2-2)
CQQLKAGDLVRELFF

SEQ ID NO: 443999 - protein, 14 aa, Homo sapiens
  CDR3 for alpha chain variable domain of TCR clone 222000 (TRAV35, TRAJ13)
CAGSPSGGYQKVTF

SEQ ID NO: 444000 - protein, 14 aa, Homo sapiens
  CDR3 for beta chain variable domain of TCR clone 222000 (TRBV18, TRBJ2-5)
CASSPGVSQETQYF

SEQ ID NO: 444001 - protein, 13 aa, Homo sapiens
  CDR3 for alpha chain variable domain of TCR clone 222001 (TRAV21, TRAJ20)
CAVGLRVDYKLSF

SEQ ID NO: 444002 - protein, 14 aa, Homo sapiens
  CDR3 for beta chain variable domain of TCR clone 222001 (TRBV10-3, TRBJ2-7)
CHQCGTSETYEQYF

SEQ ID NO: 444003 - protein, 13 aa, Homo sapiens
  CDR3 for alpha chain variable domain of TCR clone 222002 (TRAV12-3, TRAJ33)
CAMSVNSDYQLIW

SEQ ID NO: 444004 - protein, 12 aa, Homo sapiens
  CDR3 for beta chain variable domain of TCR clone 222002 (TRBV11-2, TRBJ2-2)
CASSLGGGELFF

SEQ ID NO: 444005 - protein, 21 aa, Homo sapiens
  CDR3 for alpha chain variable domain of TCR clone 222003 (TRAV36/DV7, TRAJ39)
TATQTGDSAIYLPNAGNMLTF

SEQ ID NO: 444006 - protein, 15 aa, Homo sapiens
  CDR3 for beta chain variable domain of TCR clone 222003 (TRBV6-3, TRBJ2-7)
CASSSPGTVFYEQYF

SEQ ID NO: 444007 - protein, 13 aa, Homo sapiens
  CDR3 for alpha chain variable domain of TCR clone 222004 (TRAV17, TRAJ5)
FATMDTGRRALTF

SEQ ID NO: 444008 - protein, 15 aa, Homo sapiens
  CDR3 for beta chain variable domain of TCR clone 222004 (TRBV20-1, TRBJ2-5)
CSATRTSGSLETQYF

SEQ ID NO: 444009 - protein, 13 aa, Homo sapiens
  CDR3 for alpha chain variable domain of TCR clone 222005 (TRAV13-2, TRAJ23)
CAERQGRKAYLRT

SEQ ID NO: 444010 - protein, 16 aa, Homo sapiens
  CDR3 for beta chain variable domain of TCR clone 222005 (TRBV20-1, TRBJ1-4)
CSAPGQGLLTNEKLFF

SEQ ID NO: 444011 - protein, 13 aa, Homo sapiens
  CDR3 for alpha chain variable domain of TCR clone 222006 (TRAV21, TRAJ57)
CAVTQGGSEKLVC

SEQ ID NO: 444012 - protein, 15 aa, Homo sapiens
  CDR3 for beta chain variable domain of TCR clone 222006 (TRBV5-1, TRBJ1-1)
CASSSTTGTNTEAFF

SEQ ID NO: 444013 - protein, 18 aa, Homo sapiens
  CDR3 for alpha chain variable domain of TCR clone 222007 (TRAV13-1, TRAJ52)
RAASKRSAGGTIYGKLTF

SEQ ID NO: 444014 - protein, 13 aa, Homo sapiens
  CDR3 for beta chain variable domain of TCR clone 222007 (TRBV12-4, TRBJ1-2)
CASSLRQGKGDTF

SEQ ID NO: 444015 - protein, 21 aa, Homo sapiens
  CDR3 for alpha chain variable domain of TCR clone 222008 (TRAV9-2, )
CALIQIGDIQNPDPSVYQLRD

SEQ ID NO: 444016 - protein, 13 aa, Homo sapiens
  CDR3 for beta chain variable domain of TCR clone 222008 (TRBV20-1, TRBJ1-1)
CSARGGGNTEAFF

SEQ ID NO: 444017 - protein, 15 aa, Homo sapiens
  CDR3 for alpha chain variable domain of TCR clone 222009 (TRAV12-2, TRAJ11)
CAVNLRNSGYRTLTF

SEQ ID NO: 444018 - protein, 18 aa, Homo sapiens
  CDR3 for beta chain variable domain of TCR clone 222009 (TRBV7-2, TRBJ2-2)
CASSLASRGAGGPGELFF

SEQ ID NO: 444019 - protein, 14 aa, Homo sapiens
  CDR3 for alpha chain variable domain of TCR clone 222010 (TRAV1-2, TRAJ16)
CAVNRFSDDQKLLF

SEQ ID NO: 444020 - protein, 15 aa, Homo sapiens
  CDR3 for beta chain variable domain of TCR clone 222010 (TRBV9, TRBJ1-6)
CASSVAGTGDSTLHF

SEQ ID NO: 444021 - protein, 18 aa, Homo sapiens
  CDR3 for alpha chain variable domain of TCR clone 222011 (TRAV21, TRAJ52)
CAVRPSPAGGTSYGKLTF

SEQ ID NO: 444022 - protein, 13 aa, Homo sapiens
  CDR3 for beta chain variable domain of TCR clone 222011 (TRBV29-1, TRBJ2-2)
CSVYREDTGELLF

SEQ ID NO: 444023 - protein, 16 aa, Homo sapiens
  CDR3 for alpha chain variable domain of TCR clone 222012 (TRAV16, TRAJ4)
CALSRMFSGGYNKLIF

SEQ ID NO: 444024 - protein, 12 aa, Homo sapiens
  CDR3 for beta chain variable domain of TCR clone 222012 (TRBV19, TRBJ2-1)
CASSMQDTEQFF

SEQ ID NO: 444025 - protein, 12 aa, Homo sapiens
  CDR3 for alpha chain variable domain of TCR clone 222013 (TRAV8-3, TRAJ26)
CAGDNYGENFVF

SEQ ID NO: 444026 - protein, 15 aa, Homo sapiens
  CDR3 for beta chain variable domain of TCR clone 222013 (TRBV12-4, TRBJ2-1)
CASSLSGGASNEQFF

SEQ ID NO: 444027 - protein, 11 aa, Homo sapiens
  CDR3 for alpha chain variable domain of TCR clone 222014 (TRAV12-3, TRAJ26)
CAMSNGQNFVF

SEQ ID NO: 444028 - protein, 15 aa, Homo sapiens
  CDR3 for beta chain variable domain of TCR clone 222014 (TRBV15, TRBJ1-3)
CATSRDRGPGNTMYF

SEQ ID NO: 444029 - protein, 12 aa, Homo sapiens
  CDR3 for alpha chain variable domain of TCR clone 222015 (TRAV27, TRAJ41)
CAGRNSVYALNF

SEQ ID NO: 444030 - protein, 14 aa, Homo sapiens
  CDR3 for beta chain variable domain of TCR clone 222015 (TRBV7-6, TRBJ1-6)
CASSQAGGGSPLHF

SEQ ID NO: 444031 - protein, 13 aa, Homo sapiens
  CDR3 for alpha chain variable domain of TCR clone 222016 (TRAV30, TRAJ6)
CGFIEGGSYIPTF

SEQ ID NO: 444032 - protein, 17 aa, Homo sapiens
  CDR3 for beta chain variable domain of TCR clone 222016 (TRBV28, TRBJ2-5)
CASSRQGGLAGAETQYF

SEQ ID NO: 444033 - protein, 18 aa, Homo sapiens
  CDR3 for alpha chain variable domain of TCR clone 222017 (TRAV12-2, )
CAVEDIQNPDPAVYQLRD

SEQ ID NO: 444034 - protein, 18 aa, Homo sapiens
  CDR3 for beta chain variable domain of TCR clone 222017 (TRBV11-2, TRBJ2-3)
CASSLGGSSRGAPNTQCF

SEQ ID NO: 444035 - protein, 12 aa, Homo sapiens
  CDR3 for alpha chain variable domain of TCR clone 222018 (TRAV35, TRAJ43)
CSGAYNNNDMRF

SEQ ID NO: 444036 - protein, 14 aa, Homo sapiens
  CDR3 for beta chain variable domain of TCR clone 222018 (TRBV2, TRBJ2-2)
CASSWPGATGELFF

SEQ ID NO: 444037 - protein, 11 aa, Homo sapiens
  CDR3 for alpha chain variable domain of TCR clone 222019 (TRAV12-2, TRAJ33)
CAVGSNYQLIW

SEQ ID NO: 444038 - protein, 14 aa, Homo sapiens
  CDR3 for beta chain variable domain of TCR clone 222019 (TRBV6-1, TRBJ2-2)
CASVEHIESGELLF

SEQ ID NO: 444039 - protein, 13 aa, Homo sapiens
  CDR3 for alpha chain variable domain of TCR clone 222020 (TRAV27, TRAJ8)
CAGGPTGFQKLVS

SEQ ID NO: 444040 - protein, 17 aa, Homo sapiens
  CDR3 for beta chain variable domain of TCR clone 222020 (TRBV11-2, TRBJ2-1)
CASSLYPPGVEYNEQFF

SEQ ID NO: 444041 - protein, 18 aa, Homo sapiens
  CDR3 for alpha chain variable domain of TCR clone 222021 (TRAV19, TRAJ18)
CALSEPSDRGSTLGGLYF

SEQ ID NO: 444042 - protein, 15 aa, Homo sapiens
  CDR3 for beta chain variable domain of TCR clone 222021 (TRBV3-1, TRBJ2-1)
CASSQALVAYNEQFF

SEQ ID NO: 444043 - protein, 14 aa, Homo sapiens
  CDR3 for alpha chain variable domain of TCR clone 222022 (TRAV26-1, TRAJ34)
CIVRVAYNTDKLIF

SEQ ID NO: 444044 - protein, 17 aa, Homo sapiens
  CDR3 for beta chain variable domain of TCR clone 222022 (TRBV11-2, TRBJ2-1)
CASSLYPPGVEYNEQFV

SEQ ID NO: 444045 - protein, 15 aa, Homo sapiens
  CDR3 for alpha chain variable domain of TCR clone 222023 (TRAV27, TRAJ38)
CAARRNAGNNRKLIW

SEQ ID NO: 444046 - protein, 13 aa, Homo sapiens
  CDR3 for beta chain variable domain of TCR clone 222023 (TRBV4-1, TRBJ2-7)
CASSQGQAYEQYF

SEQ ID NO: 444047 - protein, 13 aa, Homo sapiens
  CDR3 for alpha chain variable domain of TCR clone 222024 (TRAV17, TRAJ26)
CATVDNYGQNFVC

SEQ ID NO: 444048 - protein, 16 aa, Homo sapiens
  CDR3 for beta chain variable domain of TCR clone 222024 (TRBV2, TRBJ2-1)
CASSVGGSLSYNEQFF

SEQ ID NO: 444049 - protein, 14 aa, Homo sapiens
  CDR3 for alpha chain variable domain of TCR clone 222025 (TRAV12-2, TRAJ13)
CAVKKTGGYQKVTF

SEQ ID NO: 444050 - protein, 14 aa, Homo sapiens
  CDR3 for beta chain variable domain of TCR clone 222025 (TRBV5-5, TRBJ2-7)
CASSLGQGTYERYF

SEQ ID NO: 444051 - protein, 15 aa, Homo sapiens
  CDR3 for alpha chain variable domain of TCR clone 222026 (TRAV17, TRAJ57)
CATGPSQGGSEKLVF

SEQ ID NO: 444052 - protein, 15 aa, Homo sapiens
  CDR3 for beta chain variable domain of TCR clone 222026 (TRBV6-3, TRBJ2-7)
CASSSPGTVFYERYF

SEQ ID NO: 444053 - protein, 14 aa, Homo sapiens
  CDR3 for alpha chain variable domain of TCR clone 222027 (TRAV12-2, TRAJ17)
CAVPFKAAGNKLTF

SEQ ID NO: 444054 - protein, 12 aa, Homo sapiens
  CDR3 for beta chain variable domain of TCR clone 222027 (TRBV11-2, TRBJ2-2)
YASSLGGGELFF

SEQ ID NO: 444055 - protein, 15 aa, Homo sapiens
  CDR3 for alpha chain variable domain of TCR clone 222028 (TRAV26-1, TRAJ29)
CIVRVEGSGNTPLVF

SEQ ID NO: 444056 - protein, 14 aa, Homo sapiens
  CDR3 for beta chain variable domain of TCR clone 222028 (TRBV25-1, TRBJ1-1)
CASTYLGGNTEAFF

SEQ ID NO: 444057 - protein, 14 aa, Homo sapiens
  CDR3 for alpha chain variable domain of TCR clone 222029 (TRAV8-4, TRAJ9)
CAVRRNTGGCKTIF

SEQ ID NO: 444058 - protein, 15 aa, Homo sapiens
  CDR3 for beta chain variable domain of TCR clone 222029 (TRBV10-2, TRBJ2-6)
CASSEQGTGANVLTF

SEQ ID NO: 444059 - protein, 17 aa, Homo sapiens
  CDR3 for alpha chain variable domain of TCR clone 222030 (TRAV3, TRAJ6)
CAVRDGPRAGGSYIPTF

SEQ ID NO: 444060 - protein, 15 aa, Homo sapiens
  CDR3 for beta chain variable domain of TCR clone 222030 (TRBV7-2, TRBJ2-5)
CASSPLGLDRETQYF

SEQ ID NO: 444061 - protein, 11 aa, Homo sapiens
  CDR3 for alpha chain variable domain of TCR clone 222031 (TRAV2, TRAJ33)
CAVESNYQLIW

SEQ ID NO: 444062 - protein, 16 aa, Homo sapiens
  CDR3 for beta chain variable domain of TCR clone 222031 (TRBV27, TRBJ2-1)
CASSSRLAGNYNEQFF

SEQ ID NO: 444063 - protein, 15 aa, Homo sapiens
  CDR3 for alpha chain variable domain of TCR clone 222032 (TRAV8-3, TRAJ45)
CASSYSGGGAAGRTF

SEQ ID NO: 444064 - protein, 13 aa, Homo sapiens
  CDR3 for beta chain variable domain of TCR clone 222032 (TRBV10-3, TRBJ2-7)
CASKLAVNYEQYF

SEQ ID NO: 444065 - protein, 16 aa, Homo sapiens
  CDR3 for alpha chain variable domain of TCR clone 222033 (TRAV23/DV6, TRAJ3)
CSARAPQQCFQDNLWI

SEQ ID NO: 444066 - protein, 17 aa, Homo sapiens
  CDR3 for beta chain variable domain of TCR clone 222033 (TRBV7-9, TRBJ2-3)
CASSPTVAGDLTDTQYF

SEQ ID NO: 444067 - protein, 16 aa, Homo sapiens
  CDR3 for alpha chain variable domain of TCR clone 222034 (TRAV27, TRAJ52)
CAGAGAGGTSYGNLTF

SEQ ID NO: 444068 - protein, 17 aa, Homo sapiens
  CDR3 for beta chain variable domain of TCR clone 222034 (TRBV24-1, TRBJ2-3)
CATSDLPSGEDTDTQYF

SEQ ID NO: 444069 - protein, 16 aa, Homo sapiens
  CDR3 for alpha chain variable domain of TCR clone 222035 (TRAV36/DV7, TRAJ30)
CAVETYGLDRDDKIIF

SEQ ID NO: 444070 - protein, 15 aa, Homo sapiens
  CDR3 for beta chain variable domain of TCR clone 222035 (TRBV6-6, TRBJ2-5)
CASSYGKSIQETQYF

SEQ ID NO: 444071 - protein, 12 aa, Homo sapiens
  CDR3 for alpha chain variable domain of TCR clone 222036 (TRAV27, TRAJ21)
CAGVRQLQQILL

SEQ ID NO: 444072 - protein, 14 aa, Homo sapiens
  CDR3 for beta chain variable domain of TCR clone 222036 (TRBV7-9, TRBJ1-4)
CASSLEGLSEKLFF

SEQ ID NO: 444073 - protein, 12 aa, Homo sapiens
  CDR3 for alpha chain variable domain of TCR clone 222037 (TRAV12-3, TRAJ17)
CAMTLTGNQLIL

SEQ ID NO: 444074 - protein, 15 aa, Homo sapiens
  CDR3 for beta chain variable domain of TCR clone 222037 (TRBV20-1, TRBJ2-7)
CSARDRVSGRDEQYF

SEQ ID NO: 444075 - protein, 11 aa, Homo sapiens
  CDR3 for alpha chain variable domain of TCR clone 222038 (TRAV17, TRAJ9)
CGFTGGFQTIF

SEQ ID NO: 444076 - protein, 14 aa, Homo sapiens
  CDR3 for beta chain variable domain of TCR clone 222038 (TRBV7-9, TRBJ2-2)
CASSLVQDTGELFF

SEQ ID NO: 444077 - protein, 12 aa, Homo sapiens
  CDR3 for alpha chain variable domain of TCR clone 222039 (TRAV2, TRAJ21)
CAVDYNFNKFYF

SEQ ID NO: 444078 - protein, 16 aa, Homo sapiens
  CDR3 for beta chain variable domain of TCR clone 222039 (TRBV12-5, TRBJ2-5)
CASGPRTSGNQETQYF

SEQ ID NO: 444079 - protein, 11 aa, Homo sapiens
  CDR3 for alpha chain variable domain of TCR clone 222040 (TRAV21, TRAJ48)
CAVDGNEKLTF

SEQ ID NO: 444080 - protein, 14 aa, Homo sapiens
  CDR3 for beta chain variable domain of TCR clone 222040 (TRBV28, TRBJ1-4)
CASRVTGFDEKLFF

SEQ ID NO: 444081 - protein, 15 aa, Homo sapiens
  CDR3 for alpha chain variable domain of TCR clone 222041 (TRAV1-2, TRAJ15)
CAVDVMGSTGTALLF

SEQ ID NO: 444082 - protein, 13 aa, Homo sapiens
  CDR3 for beta chain variable domain of TCR clone 222041 (TRBV7-2, TRBJ2-5)
CASSQTSVETQYF

SEQ ID NO: 444083 - protein, 14 aa, Homo sapiens
  CDR3 for alpha chain variable domain of TCR clone 222042 (TRAV13-1, TRAJ35)
CAASKGGFGNVLHC

SEQ ID NO: 444084 - protein, 13 aa, Homo sapiens
  CDR3 for beta chain variable domain of TCR clone 222042 (TRBV7-3, TRBJ1-1)
RASSQDGGAEAFF

SEQ ID NO: 444085 - protein, 13 aa, Homo sapiens
  CDR3 for alpha chain variable domain of TCR clone 222043 (TRAV3, TRAJ33)
CAVRDRSNYHLIW

SEQ ID NO: 444086 - protein, 16 aa, Homo sapiens
  CDR3 for beta chain variable domain of TCR clone 222043 (TRBV4-2, TRBJ2-7)
CASSQDRGTSSYEQYF

SEQ ID NO: 444087 - protein, 11 aa, Homo sapiens
  CDR3 for alpha chain variable domain of TCR clone 222044 (TRAV26-1, TRAJ37)
CIVRVGRKLIF

SEQ ID NO: 444088 - protein, 15 aa, Homo sapiens
  CDR3 for beta chain variable domain of TCR clone 222044 (TRBV7-3, TRBJ2-1)
CASSLGQGPFGEQFF

SEQ ID NO: 444089 - protein, 14 aa, Homo sapiens
  CDR3 for alpha chain variable domain of TCR clone 222045 (TRAV9-2, TRAJ39)
CALYIYNAGNMLTF

SEQ ID NO: 444090 - protein, 13 aa, Homo sapiens
  CDR3 for beta chain variable domain of TCR clone 222045 (TRBV19, TRBJ2-2)
CASQEGIHGELFF

SEQ ID NO: 444091 - protein, 21 aa, Homo sapiens
  CDR3 for alpha chain variable domain of TCR clone 222046 (TRAV1-1, TRAJ6)
CLLLLRCEGLERTGGSYITTF

SEQ ID NO: 444092 - protein, 13 aa, Homo sapiens
  CDR3 for beta chain variable domain of TCR clone 222046 (TRBV10-2, TRBJ2-7)
CASGASGGYEQYF

SEQ ID NO: 444093 - protein, 11 aa, Homo sapiens
  CDR3 for alpha chain variable domain of TCR clone 222047 (TRAV12-1, TRAJ43)
CVEYDNNDMRF

SEQ ID NO: 444094 - protein, 14 aa, Homo sapiens
  CDR3 for beta chain variable domain of TCR clone 222047 (TRBV18, TRBJ2-7)
CASSPRGGAYEQYF

SEQ ID NO: 444095 - protein, 15 aa, Homo sapiens
  CDR3 for alpha chain variable domain of TCR clone 222048 (TRAV2, TRAJ24)
CAVVRLKNSWGKLQF

SEQ ID NO: 444096 - protein, 16 aa, Homo sapiens
  CDR3 for beta chain variable domain of TCR clone 222048 (TRBV7-7, TRBJ2-3)
CAGSPGTSGSTDTQYF

SEQ ID NO: 444097 - protein, 15 aa, Homo sapiens
  CDR3 for alpha chain variable domain of TCR clone 222049 (TRAV3, TRAJ22)
CAVRDRGGSARQLTF

SEQ ID NO: 444098 - protein, 16 aa, Homo sapiens
  CDR3 for beta chain variable domain of TCR clone 222049 (TRBV19, TRBJ2-3)
CASSPGAASRTDTQYF

SEQ ID NO: 444099 - protein, 13 aa, Homo sapiens
  CDR3 for alpha chain variable domain of TCR clone 222050 (TRAV23/DV6, TRAJ12)
CAPRVDSRYKLIF

SEQ ID NO: 444100 - protein, 12 aa, Homo sapiens
  CDR3 for beta chain variable domain of TCR clone 222050 (TRBV7-8, TRBJ2-7)
CASSLGDREQYF

SEQ ID NO: 444101 - protein, 16 aa, Homo sapiens
  CDR3 for alpha chain variable domain of TCR clone 222051 (TRAV30, TRAJ24)
CGTEIVDADSWGKIQF

SEQ ID NO: 444102 - protein, 13 aa, Homo sapiens
  CDR3 for beta chain variable domain of TCR clone 222051 (TRBV7-3, TRBJ1-1)
CASSQDWGAEAFF

SEQ ID NO: 444103 - protein, 10 aa, Homo sapiens
  CDR3 for alpha chain variable domain of TCR clone 222052 (TRAV26-1, TRAJ40)
CIAGTYKYSF

SEQ ID NO: 444104 - protein, 15 aa, Homo sapiens
  CDR3 for beta chain variable domain of TCR clone 222052 (TRBV19, TRBJ2-1)
CASSSPGVPLDEQFF

SEQ ID NO: 444105 - protein, 17 aa, Homo sapiens
  CDR3 for alpha chain variable domain of TCR clone 222053 (TRAV8-6, TRAJ8)
CAVKEGIENTGFQKLVF

SEQ ID NO: 444106 - protein, 16 aa, Homo sapiens
  CDR3 for beta chain variable domain of TCR clone 222053 (TRBV7-7, TRBJ2-1)
CASSLASGTSYNEQFF

SEQ ID NO: 444107 - protein, 14 aa, Homo sapiens
  CDR3 for alpha chain variable domain of TCR clone 222054 (TRAV26-1, TRAJ34)
CIVRVAYNTDKLSF

SEQ ID NO: 444108 - protein, 15 aa, Homo sapiens
  CDR3 for beta chain variable domain of TCR clone 222054 (TRBV20-1, TRBJ2-7)
RSARVPAAYFYEQYF

SEQ ID NO: 444109 - protein, 14 aa, Homo sapiens
  CDR3 for alpha chain variable domain of TCR clone 222055 (TRAV1-1, TRAJ23)
CAVSIYNQGGKLIF

SEQ ID NO: 444110 - protein, 15 aa, Homo sapiens
  CDR3 for beta chain variable domain of TCR clone 222055 (TRBV4-1, TRBJ1-4)
CASSDTGGTNEKLFF

SEQ ID NO: 444111 - protein, 13 aa, Homo sapiens
  CDR3 for alpha chain variable domain of TCR clone 222056 (TRAV8-3, TRAJ28)
CAWGAVGSYQLTF

SEQ ID NO: 444112 - protein, 14 aa, Homo sapiens
  CDR3 for beta chain variable domain of TCR clone 222056 (TRBV7-2, TRBJ2-7)
CASRSQGAAYEQYF

SEQ ID NO: 444113 - protein, 13 aa, Homo sapiens
  CDR3 for alpha chain variable domain of TCR clone 222057 (TRAV8-6, TRAJ49)
CAVITNTGNQFYF

SEQ ID NO: 444114 - protein, 14 aa, Homo sapiens
  CDR3 for beta chain variable domain of TCR clone 222057 (TRBV7-3, TRBJ2-2)
CASSSGGYTGELFF

SEQ ID NO: 444115 - protein, 21 aa, Homo sapiens
  CDR3 for alpha chain variable domain of TCR clone 222058 (TRAV3, )
CAARPTPDIQNPDPAVYQLRD

SEQ ID NO: 444116 - protein, 15 aa, Homo sapiens
  CDR3 for beta chain variable domain of TCR clone 222058 (TRBV11-3, TRBJ2-5)
CASSDTSGGIETQYF

SEQ ID NO: 444117 - protein, 11 aa, Homo sapiens
  CDR3 for alpha chain variable domain of TCR clone 222059 (TRAV21, TRAJ34)
CAVTNTDKLIF

SEQ ID NO: 444118 - protein, 16 aa, Homo sapiens
  CDR3 for beta chain variable domain of TCR clone 222059 (TRBV12-5, TRBJ2-5)
CTSGPRTSGNQETQYF

SEQ ID NO: 444119 - protein, 12 aa, Homo sapiens
  CDR3 for alpha chain variable domain of TCR clone 222060 (TRAV12-2, TRAJ4)
GWPEGGYNKLIC

SEQ ID NO: 444120 - protein, 15 aa, Homo sapiens
  CDR3 for beta chain variable domain of TCR clone 222060 (TRBV9, TRBJ1-6)
CASSVAGTGDSPLHF

SEQ ID NO: 444121 - protein, 15 aa, Homo sapiens
  CDR3 for alpha chain variable domain of TCR clone 222061 (TRAV4, TRAJ17)
CLVGDIGAAGNKLTF

SEQ ID NO: 444122 - protein, 14 aa, Homo sapiens
  CDR3 for beta chain variable domain of TCR clone 222061 (TRBV6-3, TRBJ2-7)
CARSYSVRVYEQYF

SEQ ID NO: 444123 - protein, 13 aa, Homo sapiens
  CDR3 for alpha chain variable domain of TCR clone 222062 (TRAV8-6, TRAJ49)
CAVITSTGNQLYF

SEQ ID NO: 444124 - protein, 14 aa, Homo sapiens
  CDR3 for beta chain variable domain of TCR clone 222062 (TRBV5-1, TRBJ2-7)
CASSRGESLYEQYF

SEQ ID NO: 444125 - protein, 13 aa, Homo sapiens
  CDR3 for alpha chain variable domain of TCR clone 222063 (TRAV26-1, )
CIVSHRVEVLWNQ

SEQ ID NO: 444126 - protein, 14 aa, Homo sapiens
  CDR3 for beta chain variable domain of TCR clone 222063 (TRBV20-1, TRBJ2-7)
CSAWTALSSYEQYF

SEQ ID NO: 444127 - protein, 14 aa, Homo sapiens
  CDR3 for alpha chain variable domain of TCR clone 222064 (TRAV2, TRAJ9)
CAVEGRSGGFKTIF

SEQ ID NO: 444128 - protein, 17 aa, Homo sapiens
  CDR3 for beta chain variable domain of TCR clone 222064 (TRBV20-1, TRBJ2-7)
CSATRAGGVAGVEEQYF

SEQ ID NO: 444129 - protein, 20 aa, Homo sapiens
  CDR3 for alpha chain variable domain of TCR clone 222065 (TRAV38-2/DV8, TRAJ21)
CAYRSNLNKFYFVSVTKLNL

SEQ ID NO: 444130 - protein, 15 aa, Homo sapiens
  CDR3 for beta chain variable domain of TCR clone 222065 (TRBV6-1, TRBJ2-7)
CASSDWDKPNYEQYF

SEQ ID NO: 444131 - protein, 12 aa, Homo sapiens
  CDR3 for alpha chain variable domain of TCR clone 222066 (TRAV4, TRAJ26)
CLVGDYGQNFVF

SEQ ID NO: 444132 - protein, 16 aa, Homo sapiens
  CDR3 for beta chain variable domain of TCR clone 222066 (TRBV12-4, TRBJ1-5)
CQQCRDREYSNQPQHF

SEQ ID NO: 444133 - protein, 16 aa, Homo sapiens
  CDR3 for alpha chain variable domain of TCR clone 222067 (TRAV29/DV5, TRAJ39)
CAARLLFNNAGTIITF

SEQ ID NO: 444134 - protein, 16 aa, Homo sapiens
  CDR3 for beta chain variable domain of TCR clone 222067 (TRBV19, TRBJ2-6)
CASSMSGLSGANILTF

SEQ ID NO: 444135 - protein, 13 aa, Homo sapiens
  CDR3 for alpha chain variable domain of TCR clone 222068 (TRAV13-1, TRAJ13)
CAAFGGGYQKVTF

SEQ ID NO: 444136 - protein, 13 aa, Homo sapiens
  CDR3 for beta chain variable domain of TCR clone 222068 (TRBV10-3, TRBJ2-7)
CASTLAVNYEQYF

SEQ ID NO: 444137 - protein, 15 aa, Homo sapiens
  CDR3 for alpha chain variable domain of TCR clone 222069 (TRAV26-1, TRAJ38)
CIVRAEGGNKRKLIW

SEQ ID NO: 444138 - protein, 14 aa, Homo sapiens
  CDR3 for beta chain variable domain of TCR clone 222069 (TRBV7-6, TRBJ2-5)
CASSSPSGSETQYF

SEQ ID NO: 444139 - protein, 17 aa, Homo sapiens
  CDR3 for alpha chain variable domain of TCR clone 222070 (TRAV29/DV5, TRAJ45)
CAADGPFSGGGADGLTF

SEQ ID NO: 444140 - protein, 16 aa, Homo sapiens
  CDR3 for beta chain variable domain of TCR clone 222070 (TRBV15, TRBJ2-3)
CATSRDLGIVTDTQYF

SEQ ID NO: 444141 - protein, 16 aa, Homo sapiens
  CDR3 for alpha chain variable domain of TCR clone 222071 (TRAV30, TRAJ24)
CGTEIVDADSWGKFEF

SEQ ID NO: 444142 - protein, 19 aa, Homo sapiens
  CDR3 for beta chain variable domain of TCR clone 222071 (TRBV25-1, TRBJ2-2)
CAILVYRVDRGRKTGELFL

SEQ ID NO: 444143 - protein, 16 aa, Homo sapiens
  CDR3 for alpha chain variable domain of TCR clone 222072 (TRAV27, TRAJ13)
CAGAKSDSGDYQKVTF

SEQ ID NO: 444144 - protein, 13 aa, Homo sapiens
  CDR3 for beta chain variable domain of TCR clone 222072 (TRBV4-1, TRBJ2-1)
CASSQAGGDEQFF

SEQ ID NO: 444145 - protein, 14 aa, Homo sapiens
  CDR3 for alpha chain variable domain of TCR clone 222073 (TRAV26-1, TRAJ49)
WIVRLTNTGNQFYF

SEQ ID NO: 444146 - protein, 13 aa, Homo sapiens
  CDR3 for beta chain variable domain of TCR clone 222073 (TRBV4-1, TRBJ2-7)
CASSQGQAYEQYF

SEQ ID NO: 444147 - protein, 14 aa, Homo sapiens
  CDR3 for alpha chain variable domain of TCR clone 222074 (TRAV8-3, TRAJ6)
CAVGASGGSYIPTF

SEQ ID NO: 444148 - protein, 17 aa, Homo sapiens
  CDR3 for beta chain variable domain of TCR clone 222074 (TRBV18, TRBJ2-2)
CASSPSDPWQNTGELFV

SEQ ID NO: 444149 - protein, 12 aa, Homo sapiens
  CDR3 for alpha chain variable domain of TCR clone 222075 (TRAV12-3, TRAJ17)
CAMTITGNKLTF

SEQ ID NO: 444150 - protein, 14 aa, Homo sapiens
  CDR3 for beta chain variable domain of TCR clone 222075 (TRBV20-1, TRBJ1-3)
CSASPTGAGNTIYF

SEQ ID NO: 444151 - protein, 14 aa, Homo sapiens
  CDR3 for alpha chain variable domain of TCR clone 222076 (TRAV12-2, TRAJ45)
CALPERGGADGLTF

SEQ ID NO: 444152 - protein, 17 aa, Homo sapiens
  CDR3 for beta chain variable domain of TCR clone 222076 (TRBV20-1, TRBJ2-2)
CSASGSGQGGLTGELFF

SEQ ID NO: 444153 - protein, 13 aa, Homo sapiens
  CDR3 for alpha chain variable domain of TCR clone 222077 (TRAV1-1, TRAJ23)
CAVVANQGEKLIF

SEQ ID NO: 444154 - protein, 15 aa, Homo sapiens
  CDR3 for beta chain variable domain of TCR clone 222077 (TRBV7-9, TRBJ1-5)
CASSQGHQPNQPQHF

SEQ ID NO: 444155 - protein, 17 aa, Homo sapiens
  CDR3 for alpha chain variable domain of TCR clone 222078 (TRAV14/DV4, TRAJ12)
CAMRELPWMHSSYKLIF

SEQ ID NO: 444156 - protein, 14 aa, Homo sapiens
  CDR3 for beta chain variable domain of TCR clone 222078 (TRBV20-1, TRBJ2-7)
CSARRSGSSYEQYF

SEQ ID NO: 444157 - protein, 16 aa, Homo sapiens
  CDR3 for alpha chain variable domain of TCR clone 222079 (TRAV30, TRAJ24)
CGPEIADADSWGKFQF

SEQ ID NO: 444158 - protein, 18 aa, Homo sapiens
  CDR3 for beta chain variable domain of TCR clone 222079 (TRBV11-2, TRBJ2-3)
CASSLGGASRGAPNTQYF

SEQ ID NO: 444159 - protein, 14 aa, Homo sapiens
  CDR3 for alpha chain variable domain of TCR clone 222080 (TRAV2, TRAJ37)
CAVDFTSNTGKLIF

SEQ ID NO: 444160 - protein, 15 aa, Homo sapiens
  CDR3 for beta chain variable domain of TCR clone 222080 (TRBV20-1, TRBJ1-1)
CSASRGATRNTEAFF

SEQ ID NO: 444161 - protein, 12 aa, Homo sapiens
  CDR3 for alpha chain variable domain of TCR clone 222081 (TRAV3, TRAJ31)
CAVRDGNARLMF

SEQ ID NO: 444162 - protein, 18 aa, Homo sapiens
  CDR3 for beta chain variable domain of TCR clone 222081 (TRBV7-2, TRBJ2-3)
CASSLKREGSGITDTQYV

SEQ ID NO: 444163 - protein, 17 aa, Homo sapiens
  CDR3 for alpha chain variable domain of TCR clone 222082 (TRAV3, TRAJ6)
CAVRAGPRAGGNYIPTF

SEQ ID NO: 444164 - protein, 14 aa, Homo sapiens
  CDR3 for beta chain variable domain of TCR clone 222082 (TRBV7-2, TRBJ2-7)
CASSPKTSFYEQYF

SEQ ID NO: 444165 - protein, 18 aa, Homo sapiens
  CDR3 for alpha chain variable domain of TCR clone 222083 (TRAV13-1, TRAJ52)
CAAKNPNAGGTSYGKLTF

SEQ ID NO: 444166 - protein, 15 aa, Homo sapiens
  CDR3 for beta chain variable domain of TCR clone 222083 (TRBV6-1, TRBJ2-3)
CASSERGGITDSQYF

SEQ ID NO: 444167 - protein, 12 aa, Homo sapiens
  CDR3 for alpha chain variable domain of TCR clone 222084 (TRAV16, TRAJ13)
CITLRGYQKVTF

SEQ ID NO: 444168 - protein, 11 aa, Homo sapiens
  CDR3 for beta chain variable domain of TCR clone 222084 (TRBV27, TRBJ2-3)
CASSLGDTQYF

SEQ ID NO: 444169 - protein, 11 aa, Homo sapiens
  CDR3 for alpha chain variable domain of TCR clone 222085 (TRAV17, TRAJ9)
CGFTGGFKTIF

SEQ ID NO: 444170 - protein, 14 aa, Homo sapiens
  CDR3 for beta chain variable domain of TCR clone 222085 (TRBV7-9, TRBJ2-2)
CASSSVQDTGELFF

SEQ ID NO: 444171 - protein, 16 aa, Homo sapiens
  CDR3 for alpha chain variable domain of TCR clone 222086 (TRAV30, TRAJ24)
CGTEIVDADRWGKFQF

SEQ ID NO: 444172 - protein, 14 aa, Homo sapiens
  CDR3 for beta chain variable domain of TCR clone 222086 (TRBV12-5, TRBJ2-5)
CASGSRTHQETQCF

SEQ ID NO: 444173 - protein, 15 aa, Homo sapiens
  CDR3 for alpha chain variable domain of TCR clone 222087 (TRAV21, TRAJ24)
CAARSSTGSWGQLQF

SEQ ID NO: 444174 - protein, 13 aa, Homo sapiens
  CDR3 for beta chain variable domain of TCR clone 222087 (TRBV10-3, TRBJ2-7)
CASKLAVNYEQYF

SEQ ID NO: 444175 - protein, 14 aa, Homo sapiens
  CDR3 for alpha chain variable domain of TCR clone 222088 (TRAV9-2, TRAJ39)
CALYIYNAGNMLTF

SEQ ID NO: 444176 - protein, 16 aa, Homo sapiens
  CDR3 for beta chain variable domain of TCR clone 222088 (TRBV18, TRBJ2-7)
CASSPGRAGGAYEQYF

SEQ ID NO: 444177 - protein, 12 aa, Homo sapiens
  CDR3 for alpha chain variable domain of TCR clone 222089 (TRAV27, TRAJ36)
ASTPAGANNLIF

SEQ ID NO: 444178 - protein, 13 aa, Homo sapiens
  CDR3 for beta chain variable domain of TCR clone 222089 (TRBV7-9, TRBJ2-3)
CASSPGSTDTQYF

SEQ ID NO: 444179 - protein, 13 aa, Homo sapiens
  CDR3 for alpha chain variable domain of TCR clone 222090 (TRAV8-6, TRAJ16)
CAVSSPDGPTLLF

SEQ ID NO: 444180 - protein, 16 aa, Homo sapiens
  CDR3 for beta chain variable domain of TCR clone 222090 (TRBV5-7, TRBJ2-3)
CASSSLGGAITDTQYF

SEQ ID NO: 444181 - protein, 16 aa, Homo sapiens
  CDR3 for alpha chain variable domain of TCR clone 222091 (TRAV3, TRAJ37)
CAVRGKGCGNTGKLIF

SEQ ID NO: 444182 - protein, 13 aa, Homo sapiens
  CDR3 for beta chain variable domain of TCR clone 222091 (TRBV14, TRBJ2-7)
CASSQDRRYEQYF

SEQ ID NO: 444183 - protein, 14 aa, Homo sapiens
  CDR3 for alpha chain variable domain of TCR clone 222092 (TRAV35, TRAJ22)
CAGLRPGSARQLTF

SEQ ID NO: 444184 - protein, 13 aa, Homo sapiens
  CDR3 for beta chain variable domain of TCR clone 222092 (TRBV20-1, TRBJ1-1)
CSARGGVNTEAFF

SEQ ID NO: 444185 - protein, 14 aa, Homo sapiens
  CDR3 for alpha chain variable domain of TCR clone 222093 (TRAV12-1, TRAJ29)
CVVNEGTGNTPLVF

SEQ ID NO: 444186 - protein, 13 aa, Homo sapiens
  CDR3 for beta chain variable domain of TCR clone 222093 (TRBV7-9, TRBJ2-3)
CASSPGSTDTQYF

SEQ ID NO: 444187 - protein, 14 aa, Homo sapiens
  CDR3 for alpha chain variable domain of TCR clone 222094 (TRAV30, TRAJ33)
CGTESRFSNYQLIW

SEQ ID NO: 444188 - protein, 16 aa, Homo sapiens
  CDR3 for beta chain variable domain of TCR clone 222094 (TRBV7-3, TRBJ2-2)
CASSLKRGTLSGELFF

SEQ ID NO: 444189 - protein, 12 aa, Homo sapiens
  CDR3 for alpha chain variable domain of TCR clone 222095 (TRAV8-3, TRAJ20)
CAVGANDYKLSF

SEQ ID NO: 444190 - protein, 13 aa, Homo sapiens
  CDR3 for beta chain variable domain of TCR clone 222095 (TRBV19, TRBJ1-5)
CASSIDRDQPQHF

SEQ ID NO: 444191 - protein, 16 aa, Homo sapiens
  CDR3 for alpha chain variable domain of TCR clone 222096 (TRAV21, TRAJ37)
CAVRTAGSSNTGKLTF

SEQ ID NO: 444192 - protein, 13 aa, Homo sapiens
  CDR3 for beta chain variable domain of TCR clone 222096 (TRBV7-9, TRBJ2-5)
SASLPSGRETQYF

SEQ ID NO: 444193 - protein, 18 aa, Homo sapiens
  CDR3 for alpha chain variable domain of TCR clone 222097 (TRAV13-1, TRAJ52)
CAAKNPNAGGTSYGKLTF

SEQ ID NO: 444194 - protein, 12 aa, Homo sapiens
  CDR3 for beta chain variable domain of TCR clone 222097 (TRBV5-1, TRBJ1-2)
CASSQDTYGYTF

SEQ ID NO: 444195 - protein, 13 aa, Homo sapiens
  CDR3 for alpha chain variable domain of TCR clone 222098 (TRAV35, TRAJ27)
CAGQEGDAGKSTF

SEQ ID NO: 444196 - protein, 12 aa, Homo sapiens
  CDR3 for beta chain variable domain of TCR clone 222098 (TRBV6-3, TRBJ2-7)
CASSEPGFEQYF

SEQ ID NO: 444197 - protein, 12 aa, Homo sapiens
  CDR3 for alpha chain variable domain of TCR clone 222099 (TRAV12-2, TRAJ43)
CSVNVNNNDIRF

SEQ ID NO: 444198 - protein, 14 aa, Homo sapiens
  CDR3 for beta chain variable domain of TCR clone 222099 (TRBV25-1, TRBJ2-2)
CASSELGLPGELFF

SEQ ID NO: 444199 - protein, 13 aa, Homo sapiens
  CDR3 for alpha chain variable domain of TCR clone 222100 (TRAV12-2, TRAJ18)
CAVRGSTLGRLYF

SEQ ID NO: 444200 - protein, 14 aa, Homo sapiens
  CDR3 for beta chain variable domain of TCR clone 222100 (TRBV7-2, TRBJ1-1)
CASSFLTGTTEAFF

SEQ ID NO: 444201 - protein, 16 aa, Homo sapiens
  CDR3 for alpha chain variable domain of TCR clone 222101 (TRAV8-4, TRAJ56)
CAVSDLRGGANSKLTF

SEQ ID NO: 444202 - protein, 13 aa, Homo sapiens
  CDR3 for beta chain variable domain of TCR clone 222101 (TRBV19, TRBJ1-2)
CASSVPGQDGYTF

SEQ ID NO: 444203 - protein, 15 aa, Homo sapiens
  CDR3 for alpha chain variable domain of TCR clone 222102 (TRAV26-1, TRAJ24)
CIVREDTNSWGKLQF

SEQ ID NO: 444204 - protein, 14 aa, Homo sapiens
  CDR3 for beta chain variable domain of TCR clone 222102 (TRBV6-1, TRBJ1-3)
CASVQGGGGNTIYF

SEQ ID NO: 444205 - protein, 13 aa, Homo sapiens
  CDR3 for alpha chain variable domain of TCR clone 222103 (TRAV8-3, TRAJ21)
CAVGAYNFNKFYF

SEQ ID NO: 444206 - protein, 18 aa, Homo sapiens
  CDR3 for beta chain variable domain of TCR clone 222103 (TRBV7-9, TRBJ2-7)
CASSLTTSGSRTWYEQYF

SEQ ID NO: 444207 - protein, 11 aa, Homo sapiens
  CDR3 for alpha chain variable domain of TCR clone 222104 (TRAV1-2, TRAJ20)
CAVANDYKLSF

SEQ ID NO: 444208 - protein, 10 aa, Homo sapiens
  CDR3 for beta chain variable domain of TCR clone 222104 (TRBV12-4, TRBJ2-2)
CASSLVAGTR

SEQ ID NO: 444209 - protein, 12 aa, Homo sapiens
  CDR3 for alpha chain variable domain of TCR clone 222105 (TRAV21, TRAJ3)
CCFYSSASKIIF

SEQ ID NO: 444210 - protein, 16 aa, Homo sapiens
  CDR3 for beta chain variable domain of TCR clone 222105 (TRBV7-8, TRBJ2-4)
CASSAERTLAKNIQYF

SEQ ID NO: 444211 - protein, 14 aa, Homo sapiens
  CDR3 for alpha chain variable domain of TCR clone 222106 (TRAV1-2, TRAJ8)
CAVREDTGFQKLVF

SEQ ID NO: 444212 - protein, 12 aa, Homo sapiens
  CDR3 for beta chain variable domain of TCR clone 222106 (TRBV7-8, TRBJ2-7)
CASSLGDREQNF

SEQ ID NO: 444213 - protein, 13 aa, Homo sapiens
  CDR3 for alpha chain variable domain of TCR clone 222107 (TRAV41, TRAJ54)
CAVRIQGAQKLVV

SEQ ID NO: 444214 - protein, 14 aa, Homo sapiens
  CDR3 for beta chain variable domain of TCR clone 222107 (TRBV2, TRBJ2-1)
CASRTGSSYNEQFF

SEQ ID NO: 444215 - protein, 12 aa, Homo sapiens
  CDR3 for alpha chain variable domain of TCR clone 222108 (TRAV21, TRAJ33)
CAKMDSNYQLIW

SEQ ID NO: 444216 - protein, 17 aa, Homo sapiens
  CDR3 for beta chain variable domain of TCR clone 222108 (TRBV20-1, TRBJ2-2)
CSASGSGQGGLTRELFF

SEQ ID NO: 444217 - protein, 14 aa, Homo sapiens
  CDR3 for alpha chain variable domain of TCR clone 222109 (TRAV17, TRAJ32)
CATDPGGAANKLIF

SEQ ID NO: 444218 - protein, 14 aa, Homo sapiens
  CDR3 for beta chain variable domain of TCR clone 222109 (TRBV2, TRBJ1-5)
CASSENSGGQPQHF

SEQ ID NO: 444219 - protein, 13 aa, Homo sapiens
  CDR3 for alpha chain variable domain of TCR clone 222110 (TRAV21, TRAJ36)
CAVIKTGANNLFF

SEQ ID NO: 444220 - protein, 14 aa, Homo sapiens
  CDR3 for beta chain variable domain of TCR clone 222110 (TRBV6-1, TRBJ1-3)
CASVQGGGGNTIYF

SEQ ID NO: 444221 - protein, 14 aa, Homo sapiens
  CDR3 for alpha chain variable domain of TCR clone 222111 (TRAV1-2, TRAJ8)
CAVREDTGFQKLAF

SEQ ID NO: 444222 - protein, 15 aa, Homo sapiens
  CDR3 for beta chain variable domain of TCR clone 222111 (TRBV5-1, TRBJ2-7)
CASSLNGGPAREQYF

SEQ ID NO: 444223 - protein, 16 aa, Homo sapiens
  CDR3 for alpha chain variable domain of TCR clone 222112 (TRAV25, TRAJ24)
CAQRRGTTDSWGKLQF

SEQ ID NO: 444224 - protein, 15 aa, Homo sapiens
  CDR3 for beta chain variable domain of TCR clone 222112 (TRBV7-3, TRBJ2-1)
CASSPTGGGEVEQFF

SEQ ID NO: 444225 - protein, 15 aa, Homo sapiens
  CDR3 for alpha chain variable domain of TCR clone 222113 (TRAV26-2, TRAJ28)
CTLVESGAGSYQLTF

SEQ ID NO: 444226 - protein, 11 aa, Homo sapiens
  CDR3 for beta chain variable domain of TCR clone 222113 (TRBV25-1, TRBJ2-7)
CASSTSYEQYF

SEQ ID NO: 444227 - protein, 14 aa, Homo sapiens
  CDR3 for alpha chain variable domain of TCR clone 222114 (TRAV2, TRAJ3)
CSVPPYSSASKIIF

SEQ ID NO: 444228 - protein, 16 aa, Homo sapiens
  CDR3 for beta chain variable domain of TCR clone 222114 (TRBV19, TRBJ2-1)
CASSKAGPSSYNEQFF

SEQ ID NO: 444229 - protein, 18 aa, Homo sapiens
  CDR3 for alpha chain variable domain of TCR clone 222115 (TRAV12-3, TRAJ28)
CAMSARGYSGAGSYQLTF

SEQ ID NO: 444230 - protein, 15 aa, Homo sapiens
  CDR3 for beta chain variable domain of TCR clone 222115 (TRBV19, TRBJ1-2)
CASNLGGETPYGYTF

SEQ ID NO: 444231 - protein, 15 aa, Homo sapiens
  CDR3 for alpha chain variable domain of TCR clone 222116 (TRAV21, TRAJ53)
CATLNSGGSNYKLTF

SEQ ID NO: 444232 - protein, 14 aa, Homo sapiens
  CDR3 for beta chain variable domain of TCR clone 222116 (TRBV7-2, TRBJ2-7)
CASSLRWEVNEQYF

SEQ ID NO: 444233 - protein, 14 aa, Homo sapiens
  CDR3 for alpha chain variable domain of TCR clone 222117 (TRAV13-1, TRAJ35)
CAASKGGCGNVLPC

SEQ ID NO: 444234 - protein, 14 aa, Homo sapiens
  CDR3 for beta chain variable domain of TCR clone 222117 (TRBV7-2, TRBJ2-7)
CASSPKTSFYEQYF

SEQ ID NO: 444235 - protein, 12 aa, Homo sapiens
  CDR3 for alpha chain variable domain of TCR clone 222118 (TRAV12-3, TRAJ34)
CAMGYNTDNLIF

SEQ ID NO: 444236 - protein, 15 aa, Homo sapiens
  CDR3 for beta chain variable domain of TCR clone 222118 (TRBV28, TRBJ2-1)
CASSIIAGGRSEQFF

SEQ ID NO: 444237 - protein, 15 aa, Homo sapiens
  CDR3 for alpha chain variable domain of TCR clone 222119 (TRAV3, TRAJ3)
CAVRDRDSSASKIIF

SEQ ID NO: 444238 - protein, 18 aa, Homo sapiens
  CDR3 for beta chain variable domain of TCR clone 222119 (TRBV25-1, TRBJ1-2)
CASSGLQNGQGWIFGYTF

SEQ ID NO: 444239 - protein, 12 aa, Homo sapiens
  CDR3 for alpha chain variable domain of TCR clone 222120 (TRAV17, TRAJ39)
CAINNAGNMLTF

SEQ ID NO: 444240 - protein, 14 aa, Homo sapiens
  CDR3 for beta chain variable domain of TCR clone 222120 (TRBV7-2, TRBJ2-7)
CASRSQGAAYEQYF

SEQ ID NO: 444241 - protein, 13 aa, Homo sapiens
  CDR3 for alpha chain variable domain of TCR clone 222121 (TRAV21, TRAJ27)
CAARPGNAGKSIF

SEQ ID NO: 444242 - protein, 20 aa, Homo sapiens
  CDR3 for beta chain variable domain of TCR clone 222121 (TRBV4-2, TRBJ2-7)
CASSQAGGGNLRAVLRAGHQ

SEQ ID NO: 444243 - protein, 13 aa, Homo sapiens
  CDR3 for alpha chain variable domain of TCR clone 222122 (TRAV23/DV6, TRAJ36)
CAASQTGANNLFF

SEQ ID NO: 444244 - protein, 13 aa, Homo sapiens
  CDR3 for beta chain variable domain of TCR clone 222122 (TRBV5-4, TRBJ1-5)
CASSLGGDQPQLF

SEQ ID NO: 444245 - protein, 16 aa, Homo sapiens
  CDR3 for alpha chain variable domain of TCR clone 222123 (TRAV16, TRAJ4)
CALSRMFSGGYNKLMF

SEQ ID NO: 444246 - protein, 14 aa, Homo sapiens
  CDR3 for beta chain variable domain of TCR clone 222123 (TRBV4-1, TRBJ2-2)
CASSQAVNTGELFF

SEQ ID NO: 444247 - protein, 15 aa, Homo sapiens
  CDR3 for alpha chain variable domain of TCR clone 222124 (TRAV23/DV6, TRAJ4)
CAASPLRGGYNKLIF

SEQ ID NO: 444248 - protein, 15 aa, Homo sapiens
  CDR3 for beta chain variable domain of TCR clone 222124 (TRBV4-2, TRBJ1-2)
CASSQRTGGRDGYTF

SEQ ID NO: 444249 - protein, 16 aa, Homo sapiens
  CDR3 for alpha chain variable domain of TCR clone 222125 (TRAV38-2/DV8, TRAJ45)
CAYRGNSGGGADGLTF

SEQ ID NO: 444250 - protein, 16 aa, Homo sapiens
  CDR3 for beta chain variable domain of TCR clone 222125 (TRBV11-3, TRBJ2-5)
CQQPPRGPGGKETQYF

SEQ ID NO: 444251 - protein, 14 aa, Homo sapiens
  CDR3 for alpha chain variable domain of TCR clone 222126 (TRAV12-2, TRAJ13)
CAVKKTGGYQKVTF

SEQ ID NO: 444252 - protein, 17 aa, Homo sapiens
  CDR3 for beta chain variable domain of TCR clone 222126 (TRBV7-9, TRBJ2-5)
CASSPGLAGGGRETQYF

SEQ ID NO: 444253 - protein, 13 aa, Homo sapiens
  CDR3 for alpha chain variable domain of TCR clone 222127 (TRAV13-1, TRAJ9)
CAASGTGGVKTIF

SEQ ID NO: 444254 - protein, 12 aa, Homo sapiens
  CDR3 for beta chain variable domain of TCR clone 222127 (TRBV11-2, TRBJ2-2)
CASSLGGGELFF

SEQ ID NO: 444255 - protein, 15 aa, Homo sapiens
  CDR3 for alpha chain variable domain of TCR clone 222128 (TRAV3, TRAJ47)
CAVRDIGKYGKKLVF

SEQ ID NO: 444256 - protein, 14 aa, Homo sapiens
  CDR3 for beta chain variable domain of TCR clone 222128 (TRBV13, TRBJ2-5)
CASSLERVGETQYF

SEQ ID NO: 444257 - protein, 15 aa, Homo sapiens
  CDR3 for alpha chain variable domain of TCR clone 222129 (TRAV21, TRAJ45)
CAVGYSGGGADGLTF

SEQ ID NO: 444258 - protein, 13 aa, Homo sapiens
  CDR3 for beta chain variable domain of TCR clone 222129 (TRBV20-1, TRBJ2-5)
CSAATELQETQYF

SEQ ID NO: 444259 - protein, 17 aa, Homo sapiens
  CDR3 for alpha chain variable domain of TCR clone 222130 (TRAV1-1, TRAJ32)
CAVRVDELWWCYKQAHL

SEQ ID NO: 444260 - protein, 16 aa, Homo sapiens
  CDR3 for beta chain variable domain of TCR clone 222130 (TRBV28, TRBJ2-2)
CASSLEGGSNTGELFF

SEQ ID NO: 444261 - protein, 14 aa, Homo sapiens
  CDR3 for alpha chain variable domain of TCR clone 222131 (TRAV25, TRAJ48)
CAGPGGFGNEKLTF

SEQ ID NO: 444262 - protein, 13 aa, Homo sapiens
  CDR3 for beta chain variable domain of TCR clone 222131 (TRBV7-3, TRBJ1-1)
CASSQDWGAEAFF

SEQ ID NO: 444263 - protein, 13 aa, Homo sapiens
  CDR3 for alpha chain variable domain of TCR clone 222132 (TRAV17, TRAJ5)
CATGDTGRRALTF

SEQ ID NO: 444264 - protein, 12 aa, Homo sapiens
  CDR3 for beta chain variable domain of TCR clone 222132 (TRBV4-3, TRBJ2-1)
CASSLSGYEQFF

SEQ ID NO: 444265 - protein, 12 aa, Homo sapiens
  CDR3 for alpha chain variable domain of TCR clone 222133 (TRAV12-3, TRAJ40)
CAMSSGTYKYIF

SEQ ID NO: 444266 - protein, 14 aa, Homo sapiens
  CDR3 for beta chain variable domain of TCR clone 222133 (TRBV19, TRBJ2-7)
CASTVQGRPYEQYF

SEQ ID NO: 444267 - protein, 14 aa, Homo sapiens
  CDR3 for alpha chain variable domain of TCR clone 222134 (TRAV23/DV6, TRAJ8)
CAASKNTGFQKLVF

SEQ ID NO: 444268 - protein, 16 aa, Homo sapiens
  CDR3 for beta chain variable domain of TCR clone 222134 (TRBV4-1, TRBJ2-6)
CASSQVGYPEANVLTF

SEQ ID NO: 444269 - protein, 14 aa, Homo sapiens
  CDR3 for alpha chain variable domain of TCR clone 222135 (TRAV26-1, TRAJ38)
CIADNAVNIRKLIW

SEQ ID NO: 444270 - protein, 13 aa, Homo sapiens
  CDR3 for beta chain variable domain of TCR clone 222135 (TRBV20-1, TRBJ1-1)
CSARGGGNTEAFF

SEQ ID NO: 444271 - protein, 11 aa, Homo sapiens
  CDR3 for alpha chain variable domain of TCR clone 222136 (TRAV1-1, TRAJ23)
CAVRQGGKLIF

SEQ ID NO: 444272 - protein, 16 aa, Homo sapiens
  CDR3 for beta chain variable domain of TCR clone 222136 (TRBV19, TRBJ2-1)
CASSMGGGSSYNEQFF

SEQ ID NO: 444273 - protein, 13 aa, Homo sapiens
  CDR3 for alpha chain variable domain of TCR clone 222137 (TRAV1-2, TRAJ20)
CAVRDGDDYKLSF

SEQ ID NO: 444274 - protein, 19 aa, Homo sapiens
  CDR3 for beta chain variable domain of TCR clone 222137 (TRBV7-2, TRBJ2-3)
CASSLGGGERYAVSWPRHP

SEQ ID NO: 444275 - protein, 16 aa, Homo sapiens
  CDR3 for alpha chain variable domain of TCR clone 222138 (TRAV20, TRAJ22)
CAVRASSSGSARQLTF

SEQ ID NO: 444276 - protein, 13 aa, Homo sapiens
  CDR3 for beta chain variable domain of TCR clone 222138 (TRBV7-2, TRBJ2-5)
CASSQTSVETQFF

SEQ ID NO: 444277 - protein, 11 aa, Homo sapiens
  CDR3 for alpha chain variable domain of TCR clone 222139 (TRAV21, TRAJ41)
CAVRSGYALNF

SEQ ID NO: 444278 - protein, 13 aa, Homo sapiens
  CDR3 for beta chain variable domain of TCR clone 222139 (TRBV7-9, TRBJ1-2)
CASSLKQNYGYTI

SEQ ID NO: 444279 - protein, 19 aa, Homo sapiens
  CDR3 for alpha chain variable domain of TCR clone 222140 (TRAV1-2, TRAJ26)
CLLPLCCERPDNYGQNFVF

SEQ ID NO: 444280 - protein, 17 aa, Homo sapiens
  CDR3 for beta chain variable domain of TCR clone 222140 (TRBV13, TRBJ2-3)
CASSLSRVAGGRNTQCF

SEQ ID NO: 444281 - protein, 12 aa, Homo sapiens
  CDR3 for alpha chain variable domain of TCR clone 222141 (TRAV1-2, TRAJ37)
CAFPGNTGKLIF

SEQ ID NO: 444282 - protein, 15 aa, Homo sapiens
  CDR3 for beta chain variable domain of TCR clone 222141 (TRBV4-2, TRBJ1-2)
CASSQRTGGRDGYTF

SEQ ID NO: 444283 - protein, 14 aa, Homo sapiens
  CDR3 for alpha chain variable domain of TCR clone 222142 (TRAV12-2, TRAJ44)
CAVNPAGTASKLTF

SEQ ID NO: 444284 - protein, 13 aa, Homo sapiens
  CDR3 for beta chain variable domain of TCR clone 222142 (TRBV20-1, TRBJ1-6)
CSAPMGVGSPLHF

SEQ ID NO: 444285 - protein, 16 aa, Homo sapiens
  CDR3 for alpha chain variable domain of TCR clone 222143 (TRAV1-2, TRAJ16)
CAVNRFQMARSCSLRG

SEQ ID NO: 444286 - protein, 15 aa, Homo sapiens
  CDR3 for beta chain variable domain of TCR clone 222143 (TRBV9, TRBJ1-6)
CASSVAGTGDSPLHF

SEQ ID NO: 444287 - protein, 15 aa, Homo sapiens
  CDR3 for alpha chain variable domain of TCR clone 222144 (TRAV4, TRAJ3)
CLVGDSDSSASKIIF

SEQ ID NO: 444288 - protein, 16 aa, Homo sapiens
  CDR3 for beta chain variable domain of TCR clone 222144 (TRBV12-5, TRBJ2-5)
CASGPRTSGNQETQYF

SEQ ID NO: 444289 - protein, 15 aa, Homo sapiens
  CDR3 for alpha chain variable domain of TCR clone 222145 (TRAV21, TRAJ52)
CAVRGGGTSDGKLTF

SEQ ID NO: 444290 - protein, 13 aa, Homo sapiens
  CDR3 for beta chain variable domain of TCR clone 222145 (TRBV6-5, TRBJ2-5)
CATAPSPQETQYF

SEQ ID NO: 444291 - protein, 13 aa, Homo sapiens
  CDR3 for alpha chain variable domain of TCR clone 222146 (TRAV12-3, TRAJ33)
CAMSVNSNYQSIW

SEQ ID NO: 444292 - protein, 12 aa, Homo sapiens
  CDR3 for beta chain variable domain of TCR clone 222146 (TRBV11-2, TRBJ2-2)
CASSLGGGELFF

SEQ ID NO: 444293 - protein, 17 aa, Homo sapiens
  CDR3 for alpha chain variable domain of TCR clone 222147 (TRAV13-1, TRAJ52)
CAAGRNAGGTSYGKLTF

SEQ ID NO: 444294 - protein, 13 aa, Homo sapiens
  CDR3 for beta chain variable domain of TCR clone 222147 (TRBV19, TRBJ1-2)
CASSVPGQDGYTF

SEQ ID NO: 444295 - protein, 19 aa, Homo sapiens
  CDR3 for alpha chain variable domain of TCR clone 222148 (TRAV1-2, TRAJ26)
CLLPLCCERPDNYGQTFVF

SEQ ID NO: 444296 - protein, 12 aa, Homo sapiens
  CDR3 for beta chain variable domain of TCR clone 222148 (TRBV6-3, TRBJ2-7)
CASSEPGFEQYF

SEQ ID NO: 444297 - protein, 17 aa, Homo sapiens
  CDR3 for alpha chain variable domain of TCR clone 222149 (TRAV3, TRAJ42)
CAVRDRDYGGSQGNLSF

SEQ ID NO: 444298 - protein, 13 aa, Homo sapiens
  CDR3 for beta chain variable domain of TCR clone 222149 (TRBV20-1, TRBJ2-5)
CSARRGTGATQYF

SEQ ID NO: 444299 - protein, 12 aa, Homo sapiens
  CDR3 for alpha chain variable domain of TCR clone 222150 (TRAV21, TRAJ43)
CAVSWNNNDMRF

SEQ ID NO: 444300 - protein, 15 aa, Homo sapiens
  CDR3 for beta chain variable domain of TCR clone 222150 (TRBV20-1, TRBJ2-1)
CSASPPRGGYNEQFF

SEQ ID NO: 444301 - protein, 14 aa, Homo sapiens
  CDR3 for alpha chain variable domain of TCR clone 222151 (TRAV1-2, TRAJ10)
CAVRFTGGGNKLPF

SEQ ID NO: 444302 - protein, 12 aa, Homo sapiens
  CDR3 for beta chain variable domain of TCR clone 222151 (TRBV5-4, TRBJ1-1)
CASSFGQTEAFF

SEQ ID NO: 444303 - protein, 12 aa, Homo sapiens
  CDR3 for alpha chain variable domain of TCR clone 222152 (TRAV12-3, TRAJ40)
CAMSSGTYKYIF

SEQ ID NO: 444304 - protein, 20 aa, Homo sapiens
  CDR3 for beta chain variable domain of TCR clone 222152 (TRBV7-8, TRBJ2-2)
CASSHLFPGPTIHSTGELFF

SEQ ID NO: 444305 - protein, 14 aa, Homo sapiens
  CDR3 for alpha chain variable domain of TCR clone 222153 (TRAV1-1, TRAJ27)
CAVIYNTNAGKSTF

SEQ ID NO: 444306 - protein, 14 aa, Homo sapiens
  CDR3 for beta chain variable domain of TCR clone 222153 (TRBV20-1, TRBJ1-3)
CSASPTGAGNTIYF

SEQ ID NO: 444307 - protein, 14 aa, Homo sapiens
  CDR3 for alpha chain variable domain of TCR clone 222154 (TRAV12-3, TRAJ58)
CAMSTETSGSRLTF

SEQ ID NO: 444308 - protein, 12 aa, Homo sapiens
  CDR3 for beta chain variable domain of TCR clone 222154 (TRBV7-8, TRBJ2-7)
CASSLGDREQNF

SEQ ID NO: 444309 - protein, 13 aa, Homo sapiens
  CDR3 for alpha chain variable domain of TCR clone 222155 (TRAV3, TRAJ43)
CAVKARNNNDMRF

SEQ ID NO: 444310 - protein, 14 aa, Homo sapiens
  CDR3 for beta chain variable domain of TCR clone 222155 (TRBV27, TRBJ2-3)
CATWTSGRPWGQYF

SEQ ID NO: 444311 - protein, 16 aa, Homo sapiens
  CDR3 for alpha chain variable domain of TCR clone 222156 (TRAV13-1, TRAJ13)
CAASRVGVTRKLPLEL

SEQ ID NO: 444312 - protein, 12 aa, Homo sapiens
  CDR3 for beta chain variable domain of TCR clone 222156 (TRBV19, TRBJ2-1)
CASSRQGAEQFF

SEQ ID NO: 444313 - protein, 16 aa, Homo sapiens
  CDR3 for alpha chain variable domain of TCR clone 222157 (TRAV3, TRAJ10)
CAVRDMRAGGGSKLTF

SEQ ID NO: 444314 - protein, 13 aa, Homo sapiens
  CDR3 for beta chain variable domain of TCR clone 222157 (TRBV6-1, TRBJ1-1)
CASSRQGNTEAFF

SEQ ID NO: 444315 - protein, 14 aa, Homo sapiens
  CDR3 for alpha chain variable domain of TCR clone 222158 (TRAV1-2, TRAJ8)
CAVREDTGFQKLVF

SEQ ID NO: 444316 - protein, 16 aa, Homo sapiens
  CDR3 for beta chain variable domain of TCR clone 222158 (TRBV27, TRBJ2-2)
CASSFRALVRTGELFF

SEQ ID NO: 444317 - protein, 11 aa, Homo sapiens
  CDR3 for alpha chain variable domain of TCR clone 222159 (TRAV22, TRAJ30)
CAGNRDDKIIF

SEQ ID NO: 444318 - protein, 14 aa, Homo sapiens
  CDR3 for beta chain variable domain of TCR clone 222159 (TRBV7-9, TRBJ2-1)
CASSDNSGYNEQFF

SEQ ID NO: 444319 - protein, 14 aa, Homo sapiens
  CDR3 for alpha chain variable domain of TCR clone 222160 (TRAV8-4, TRAJ9)
CAVTFNTGGFKTIL

SEQ ID NO: 444320 - protein, 15 aa, Homo sapiens
  CDR3 for beta chain variable domain of TCR clone 222160 (TRBV7-9, TRBJ2-2)
CASSPETGAGGELFF

SEQ ID NO: 444321 - protein, 14 aa, Homo sapiens
  CDR3 for alpha chain variable domain of TCR clone 222161 (TRAV35, TRAJ22)
CAGLRPGSARQLTF

SEQ ID NO: 444322 - protein, 14 aa, Homo sapiens
  CDR3 for beta chain variable domain of TCR clone 222161 (TRBV7-3, TRBJ2-1)
CASSLSGSYNEQFF

SEQ ID NO: 444323 - protein, 17 aa, Homo sapiens
  CDR3 for alpha chain variable domain of TCR clone 222162 (TRAV26-1, TRAJ37)
FIVRVITVSSNTGKLIF

SEQ ID NO: 444324 - protein, 14 aa, Homo sapiens
  CDR3 for beta chain variable domain of TCR clone 222162 (TRBV19, TRBJ2-1)
CASTTFVLSGEQFF

SEQ ID NO: 444325 - protein, 13 aa, Homo sapiens
  CDR3 for alpha chain variable domain of TCR clone 222163 (TRAV3, TRAJ27)
CAVRPLGAGKSTF

SEQ ID NO: 444326 - protein, 16 aa, Homo sapiens
  CDR3 for beta chain variable domain of TCR clone 222163 (TRBV7-3, TRBJ2-1)
CASSKPLAGGYNEQFF

SEQ ID NO: 444327 - protein, 13 aa, Homo sapiens
  CDR3 for alpha chain variable domain of TCR clone 222164 (TRAV12-2, TRAJ30)
CAVNLNREDKIIF

SEQ ID NO: 444328 - protein, 14 aa, Homo sapiens
  CDR3 for beta chain variable domain of TCR clone 222164 (TRBV7-2, TRBJ1-2)
CASSSQGAHYGYTF

SEQ ID NO: 444329 - protein, 15 aa, Homo sapiens
  CDR3 for alpha chain variable domain of TCR clone 222165 (TRAV3, TRAJ5)
CAVRDLDTGRRARTF

SEQ ID NO: 444330 - protein, 17 aa, Homo sapiens
  CDR3 for beta chain variable domain of TCR clone 222165 (TRBV7-8, TRBJ2-6)
CASSAGTGGAGANVLTF

SEQ ID NO: 444331 - protein, 14 aa, Homo sapiens
  CDR3 for alpha chain variable domain of TCR clone 222166 (TRAV16, TRAJ10)
CSKKHTGGGNKLTF

SEQ ID NO: 444332 - protein, 16 aa, Homo sapiens
  CDR3 for beta chain variable domain of TCR clone 222166 (TRBV19, TRBJ2-1)
CASSKAGPSSYNEQFF

SEQ ID NO: 444333 - protein, 13 aa, Homo sapiens
  CDR3 for alpha chain variable domain of TCR clone 222167 (TRAV17, TRAJ5)
CALRGTGRNALTF

SEQ ID NO: 444334 - protein, 14 aa, Homo sapiens
  CDR3 for beta chain variable domain of TCR clone 222167 (TRBV12-5, TRBJ2-5)
CASGSRTHQETQYF

SEQ ID NO: 444335 - protein, 14 aa, Homo sapiens
  CDR3 for alpha chain variable domain of TCR clone 222168 (TRAV3, TRAJ6)
CAVRDWGGVYIPTF

SEQ ID NO: 444336 - protein, 17 aa, Homo sapiens
  CDR3 for beta chain variable domain of TCR clone 222168 (TRBV6-5, TRBJ2-1)
CASRLSGRFESYNEQFF

SEQ ID NO: 444337 - protein, 15 aa, Homo sapiens
  CDR3 for alpha chain variable domain of TCR clone 222169 (TRAV21, TRAJ52)
CAVRGGGTSYGKLTF

SEQ ID NO: 444338 - protein, 13 aa, Homo sapiens
  CDR3 for beta chain variable domain of TCR clone 222169 (TRBV6-5, TRBJ2-5)
CATSPSPQETQYF

SEQ ID NO: 444339 - protein, 14 aa, Homo sapiens
  CDR3 for alpha chain variable domain of TCR clone 222170 (TRAV1-2, TRAJ16)
CAVNRFSDGQKLLF

SEQ ID NO: 444340 - protein, 11 aa, Homo sapiens
  CDR3 for beta chain variable domain of TCR clone 222170 (TRBV20-1, TRBJ1-5)
CSAQGDQPQHF

SEQ ID NO: 444341 - protein, 14 aa, Homo sapiens
  CDR3 for alpha chain variable domain of TCR clone 222171 (TRAV8-4, TRAJ37)
CAVSEPSNTGKLIF

SEQ ID NO: 444342 - protein, 13 aa, Homo sapiens
  CDR3 for beta chain variable domain of TCR clone 222171 (TRBV3-1, TRBJ1-1)
CASSQLQGAEAFF

SEQ ID NO: 444343 - protein, 11 aa, Homo sapiens
  CDR3 for alpha chain variable domain of TCR clone 222172 (TRAV23/DV6, TRAJ43)
CAASSGNDMRC

SEQ ID NO: 444344 - protein, 14 aa, Homo sapiens
  CDR3 for beta chain variable domain of TCR clone 222172 (TRBV4-1, TRBJ1-2)
CASSQDPLPYGYTF

SEQ ID NO: 444345 - protein, 15 aa, Homo sapiens
  CDR3 for alpha chain variable domain of TCR clone 222173 (TRAV8-4, TRAJ47)
CAVRDLLGYGKKLVF

SEQ ID NO: 444346 - protein, 16 aa, Homo sapiens
  CDR3 for beta chain variable domain of TCR clone 222173 (TRBV19, TRBJ2-2)
CASSPSGGLNTGELFF

SEQ ID NO: 444347 - protein, 11 aa, Homo sapiens
  CDR3 for alpha chain variable domain of TCR clone 222174 (TRAV1-1, TRAJ23)
CAVRQGGKLIF

SEQ ID NO: 444348 - protein, 13 aa, Homo sapiens
  CDR3 for beta chain variable domain of TCR clone 222174 (TRBV19, TRBJ1-2)
CASSQGQVYGYTF

SEQ ID NO: 444349 - protein, 12 aa, Homo sapiens
  CDR3 for alpha chain variable domain of TCR clone 222175 (TRAV21, TRAJ29)
CAVTSGNTPLVF

SEQ ID NO: 444350 - protein, 14 aa, Homo sapiens
  CDR3 for beta chain variable domain of TCR clone 222175 (TRBV7-2, TRBJ2-7)
CASSPKTSFYEQYF

SEQ ID NO: 444351 - protein, 14 aa, Homo sapiens
  CDR3 for alpha chain variable domain of TCR clone 222176 (TRAV12-2, TRAJ17)
CAVNIKAAGNKLTF

SEQ ID NO: 444352 - protein, 16 aa, Homo sapiens
  CDR3 for beta chain variable domain of TCR clone 222176 (TRBV10-3, TRBJ1-5)
CAISGQGGLSNQPQHF

SEQ ID NO: 444353 - protein, 15 aa, Homo sapiens
  CDR3 for alpha chain variable domain of TCR clone 222177 (TRAV8-3, TRAJ11)
CAVGLLNSGYSTLTF

SEQ ID NO: 444354 - protein, 13 aa, Homo sapiens
  CDR3 for beta chain variable domain of TCR clone 222177 (TRBV19, TRBJ1-5)
CASSIGGEQPQHF

SEQ ID NO: 444355 - protein, 15 aa, Homo sapiens
  CDR3 for alpha chain variable domain of TCR clone 222178 (TRAV13-1, TRAJ18)
CAASGGGSTLGSLYF

SEQ ID NO: 444356 - protein, 13 aa, Homo sapiens
  CDR3 for beta chain variable domain of TCR clone 222178 (TRBV18, TRBJ2-1)
CASGLASNNEQFF

SEQ ID NO: 444357 - protein, 12 aa, Homo sapiens
  CDR3 for alpha chain variable domain of TCR clone 222179 (TRAV13-2, TRAJ8)
CAPWLGFQKLVF

SEQ ID NO: 444358 - protein, 16 aa, Homo sapiens
  CDR3 for beta chain variable domain of TCR clone 222179 (TRBV20-1, TRBJ1-2)
CSASMGQGVANYGYTF

SEQ ID NO: 444359 - protein, 14 aa, Homo sapiens
  CDR3 for alpha chain variable domain of TCR clone 222180 (TRAV29/DV5, TRAJ36)
CAARRKTVANNLFF

SEQ ID NO: 444360 - protein, 12 aa, Homo sapiens
  CDR3 for beta chain variable domain of TCR clone 222180 (TRBV11-2, TRBJ2-1)
CASSPGNNEQFF

SEQ ID NO: 444361 - protein, 15 aa, Homo sapiens
  CDR3 for alpha chain variable domain of TCR clone 222181 (TRAV8-4, TRAJ3)
CAVTGENLVQQCFQD

SEQ ID NO: 444362 - protein, 13 aa, Homo sapiens
  CDR3 for beta chain variable domain of TCR clone 222181 (TRBV7-9, TRBJ2-3)
CASSPGSTDTQYF

SEQ ID NO: 444363 - protein, 13 aa, Homo sapiens
  CDR3 for alpha chain variable domain of TCR clone 222182 (TRAV2, TRAJ29)
CAAGGLGNTPLVF

SEQ ID NO: 444364 - protein, 13 aa, Homo sapiens
  CDR3 for beta chain variable domain of TCR clone 222182 (TRBV14, TRBJ1-2)
CASSEDRRYGYTF

SEQ ID NO: 444365 - protein, 13 aa, Homo sapiens
  CDR3 for alpha chain variable domain of TCR clone 222183 (TRAV27, TRAJ45)
CRSSGGGADGLTF

SEQ ID NO: 444366 - protein, 15 aa, Homo sapiens
  CDR3 for beta chain variable domain of TCR clone 222183 (TRBV20-1, TRBJ2-7)
CSARDRVSGIDEQYF

SEQ ID NO: 444367 - protein, 10 aa, Homo sapiens
  CDR3 for alpha chain variable domain of TCR clone 222184 (TRAV8-4, TRAJ43)
CAVSADVIRF

SEQ ID NO: 444368 - protein, 15 aa, Homo sapiens
  CDR3 for beta chain variable domain of TCR clone 222184 (TRBV5-1, TRBJ2-3)
CASSVTSGSTDTQYF

SEQ ID NO: 444369 - protein, 12 aa, Homo sapiens
  CDR3 for alpha chain variable domain of TCR clone 222185 (TRAV2, TRAJ3)
CAVRCSASKIIF

SEQ ID NO: 444370 - protein, 15 aa, Homo sapiens
  CDR3 for beta chain variable domain of TCR clone 222185 (TRBV15, TRBJ2-5)
CATSRDVGPQETQYF

SEQ ID NO: 444371 - protein, 14 aa, Homo sapiens
  CDR3 for alpha chain variable domain of TCR clone 222186 (TRAV12-3, TRAJ10)
SHLPLTGGGNKLTF

SEQ ID NO: 444372 - protein, 15 aa, Homo sapiens
  CDR3 for beta chain variable domain of TCR clone 222186 (TRBV18, TRBJ2-7)
CASSPRSGTAYEQYF

SEQ ID NO: 444373 - protein, 16 aa, Homo sapiens
  CDR3 for alpha chain variable domain of TCR clone 222187 (TRAV1-2, TRAJ10)
CAVRGVLTGGGNELTF

SEQ ID NO: 444374 - protein, 15 aa, Homo sapiens
  CDR3 for beta chain variable domain of TCR clone 222187 (TRBV5-7, TRBJ1-5)
CASSYGKLWDQPQHF

SEQ ID NO: 444375 - protein, 13 aa, Homo sapiens
  CDR3 for alpha chain variable domain of TCR clone 222188 (TRAV1-2, TRAJ9)
CAALNTGGFKTIL

SEQ ID NO: 444376 - protein, 13 aa, Homo sapiens
  CDR3 for beta chain variable domain of TCR clone 222188 (TRBV4-2, TRBJ1-1)
CASSQAENTEAFF

SEQ ID NO: 444377 - protein, 14 aa, Homo sapiens
  CDR3 for alpha chain variable domain of TCR clone 222189 (TRAV9-2, TRAJ48)
CALDFNFGNEKLTF

SEQ ID NO: 444378 - protein, 15 aa, Homo sapiens
  CDR3 for beta chain variable domain of TCR clone 222189 (TRBV3-1, TRBJ2-1)
CASSHARTGFDEQFF

SEQ ID NO: 444379 - protein, 13 aa, Homo sapiens
  CDR3 for alpha chain variable domain of TCR clone 222190 (TRAV26-1, TRAJ48)
CIVRVVGDEKLTF

SEQ ID NO: 444380 - protein, 11 aa, Homo sapiens
  CDR3 for beta chain variable domain of TCR clone 222190 (TRBV29-1, TRBJ2-5)
CSEDRTGTQYF

SEQ ID NO: 444381 - protein, 14 aa, Homo sapiens
  CDR3 for alpha chain variable domain of TCR clone 222191 (TRAV17, TRAJ39)
CATDPVRAGNMLTF

SEQ ID NO: 444382 - protein, 17 aa, Homo sapiens
  CDR3 for beta chain variable domain of TCR clone 222191 (TRBV11-2, TRBJ2-3)
CASSPTGTGGLTDTQYF

SEQ ID NO: 444383 - protein, 13 aa, Homo sapiens
  CDR3 for alpha chain variable domain of TCR clone 222192 (TRAV12-2, TRAJ20)
CAVYPSNDYKLSF

SEQ ID NO: 444384 - protein, 13 aa, Homo sapiens
  CDR3 for beta chain variable domain of TCR clone 222192 (TRBV10-2, TRBJ2-7)
CASGASGGYEQYF

SEQ ID NO: 444385 - protein, 16 aa, Homo sapiens
  CDR3 for alpha chain variable domain of TCR clone 222193 (TRAV12-3, TRAJ53)
CAMSPGRGGSNYKLTF

SEQ ID NO: 444386 - protein, 16 aa, Homo sapiens
  CDR3 for beta chain variable domain of TCR clone 222193 (TRBV12-5, TRBJ2-5)
CASGPRTSGNQETQYF

SEQ ID NO: 444387 - protein, 14 aa, Homo sapiens
  CDR3 for alpha chain variable domain of TCR clone 222194 (TRAV27, TRAJ22)
CAGLPSGSARQLTF

SEQ ID NO: 444388 - protein, 13 aa, Homo sapiens
  CDR3 for beta chain variable domain of TCR clone 222194 (TRBV19, TRBJ2-2)
CASRTLGTGELFF

SEQ ID NO: 444389 - protein, 13 aa, Homo sapiens
  CDR3 for alpha chain variable domain of TCR clone 222195 (TRAV8-6, TRAJ32)
CAVSDRAKNKLIF

SEQ ID NO: 444390 - protein, 13 aa, Homo sapiens
  CDR3 for beta chain variable domain of TCR clone 222195 (TRBV11-2, TRBJ2-7)
CASSLDLGYEQYF

SEQ ID NO: 444391 - protein, 14 aa, Homo sapiens
  CDR3 for alpha chain variable domain of TCR clone 222196 (TRAV12-2, TRAJ17)
LAVLFKAAGNKLTF

SEQ ID NO: 444392 - protein, 17 aa, Homo sapiens
  CDR3 for beta chain variable domain of TCR clone 222196 (TRBV20-1, TRBJ2-2)
CSASGSGQGGLTGELFF

SEQ ID NO: 444393 - protein, 15 aa, Homo sapiens
  CDR3 for alpha chain variable domain of TCR clone 222197 (TRAV8-3, TRAJ45)
CASSYSGGGADGLTF

SEQ ID NO: 444394 - protein, 10 aa, Homo sapiens
  CDR3 for beta chain variable domain of TCR clone 222197 (TRBV10-3, TRBJ2-7)
CAATSNEQYF

SEQ ID NO: 444395 - protein, 14 aa, Homo sapiens
  CDR3 for alpha chain variable domain of TCR clone 222198 (TRAV1-2, TRAJ16)
CAVNRFSAGQKLLF

SEQ ID NO: 444396 - protein, 15 aa, Homo sapiens
  CDR3 for beta chain variable domain of TCR clone 222198 (TRBV7-2, TRBJ2-7)
CASSLKGALTYEQYF

SEQ ID NO: 444397 - protein, 14 aa, Homo sapiens
  CDR3 for alpha chain variable domain of TCR clone 222199 (TRAV12-1, TRAJ8)
CVVNSNTGFQKLVF

SEQ ID NO: 444398 - protein, 15 aa, Homo sapiens
  CDR3 for beta chain variable domain of TCR clone 222199 (TRBV4-1, TRBJ1-4)
CASSDTGGTNEKLFF

SEQ ID NO: 444399 - protein, 17 aa, Homo sapiens
  CDR3 for alpha chain variable domain of TCR clone 222200 (TRAV13-1, )
CAANIQSPDPAVYQLRD

SEQ ID NO: 444400 - protein, 15 aa, Homo sapiens
  CDR3 for beta chain variable domain of TCR clone 222200 (TRBV27, TRBJ2-1)
CASSNGGGSSNEQFF

SEQ ID NO: 444401 - protein, 13 aa, Homo sapiens
  CDR3 for alpha chain variable domain of TCR clone 222201 (TRAV21, TRAJ20)
CAVGLRVDYKLSF

SEQ ID NO: 444402 - protein, 15 aa, Homo sapiens
  CDR3 for beta chain variable domain of TCR clone 222201 (TRBV12-4, TRBJ2-1)
CASSLLATGNNEQFF

SEQ ID NO: 444403 - protein, 12 aa, Homo sapiens
  CDR3 for alpha chain variable domain of TCR clone 222202 (TRAV8-3, TRAJ41)
CAVALSGYALNF

SEQ ID NO: 444404 - protein, 18 aa, Homo sapiens
  CDR3 for beta chain variable domain of TCR clone 222202 (TRBV20-1, TRBJ2-6)
CSAETTPAHGAGANVLSF

SEQ ID NO: 444405 - protein, 13 aa, Homo sapiens
  CDR3 for alpha chain variable domain of TCR clone 222203 (TRAV27, TRAJ45)
CRSSGGGADGLTF

SEQ ID NO: 444406 - protein, 15 aa, Homo sapiens
  CDR3 for beta chain variable domain of TCR clone 222203 (TRBV9, TRBJ2-2)
CASSDFAGASGELFC

SEQ ID NO: 444407 - protein, 13 aa, Homo sapiens
  CDR3 for alpha chain variable domain of TCR clone 222204 (TRAV21, TRAJ27)
FAARPGNAGKSTF

SEQ ID NO: 444408 - protein, 13 aa, Homo sapiens
  CDR3 for beta chain variable domain of TCR clone 222204 (TRBV20-1, TRBJ1-1)
CSARGGGNTEAFF

SEQ ID NO: 444409 - protein, 16 aa, Homo sapiens
  CDR3 for alpha chain variable domain of TCR clone 222205 (TRAV21, TRAJ37)
CAVLTAGSSNTGTLIF

SEQ ID NO: 444410 - protein, 13 aa, Homo sapiens
  CDR3 for beta chain variable domain of TCR clone 222205 (TRBV7-9, TRBJ2-5)
CASLPSGRETQYF

SEQ ID NO: 444411 - protein, 15 aa, Homo sapiens
  CDR3 for alpha chain variable domain of TCR clone 222206 (TRAV35, TRAJ23)
CAGPLGNKQGGKIIF

SEQ ID NO: 444412 - protein, 14 aa, Homo sapiens
  CDR3 for beta chain variable domain of TCR clone 222206 (TRBV7-9, TRBJ1-1)
CASTPLQSYTEAFF

SEQ ID NO: 444413 - protein, 11 aa, Homo sapiens
  CDR3 for alpha chain variable domain of TCR clone 222207 (TRAV2, TRAJ13)
CASGGYQKVTF

SEQ ID NO: 444414 - protein, 14 aa, Homo sapiens
  CDR3 for beta chain variable domain of TCR clone 222207 (TRBV27, TRBJ2-2)
CASSLGAATGELFF

SEQ ID NO: 444415 - protein, 14 aa, Homo sapiens
  CDR3 for alpha chain variable domain of TCR clone 222208 (TRAV8-2, TRAJ4)
CVVSPSGGYNKLIV

SEQ ID NO: 444416 - protein, 15 aa, Homo sapiens
  CDR3 for beta chain variable domain of TCR clone 222208 (TRBV4-1, TRBJ1-4)
CASSDTGGTNEKLFF

SEQ ID NO: 444417 - protein, 14 aa, Homo sapiens
  CDR3 for alpha chain variable domain of TCR clone 222209 (TRAV1-2, TRAJ16)
CAVNRFSDGQNLLF

SEQ ID NO: 444418 - protein, 14 aa, Homo sapiens
  CDR3 for beta chain variable domain of TCR clone 222209 (TRBV7-2, TRBJ2-7)
CASSPKTSFYEQYF

SEQ ID NO: 444419 - protein, 11 aa, Homo sapiens
  CDR3 for alpha chain variable domain of TCR clone 222210 (TRAV13-1, TRAJ24)
CAASGWGKLQF

SEQ ID NO: 444420 - protein, 15 aa, Homo sapiens
  CDR3 for beta chain variable domain of TCR clone 222210 (TRBV11-2, TRBJ2-2)
CASSLDTGNTGELFC

SEQ ID NO: 444421 - protein, 14 aa, Homo sapiens
  CDR3 for alpha chain variable domain of TCR clone 222211 (TRAV13-1, TRAJ39)
CAASYNNAGNMLTF

SEQ ID NO: 444422 - protein, 14 aa, Homo sapiens
  CDR3 for beta chain variable domain of TCR clone 222211 (TRBV19, TRBJ2-7)
CASSIRLGDHEQYF

SEQ ID NO: 444423 - protein, 16 aa, Homo sapiens
  CDR3 for alpha chain variable domain of TCR clone 222212 (TRAV3, TRAJ28)
CAVLPRSGVGSYQPTF

SEQ ID NO: 444424 - protein, 13 aa, Homo sapiens
  CDR3 for beta chain variable domain of TCR clone 222212 (TRBV12-4, TRBJ2-5)
CASRLAVQETQYF

SEQ ID NO: 444425 - protein, 13 aa, Homo sapiens
  CDR3 for alpha chain variable domain of TCR clone 222213 (TRAV13-1, TRAJ8)
CAASIRGFHKLVF

SEQ ID NO: 444426 - protein, 14 aa, Homo sapiens
  CDR3 for beta chain variable domain of TCR clone 222213 (TRBV7-2, TRBJ2-1)
CASSLVQGRNEQFF

SEQ ID NO: 444427 - protein, 11 aa, Homo sapiens
  CDR3 for alpha chain variable domain of TCR clone 222214 (TRAV2, TRAJ13)
CASGGYQKVTF

SEQ ID NO: 444428 - protein, 15 aa, Homo sapiens
  CDR3 for beta chain variable domain of TCR clone 222214 (TRBV7-2, TRBJ2-1)
CASSSGLAGGNEQLF

SEQ ID NO: 444429 - protein, 11 aa, Homo sapiens
  CDR3 for alpha chain variable domain of TCR clone 222215 (TRAV12-1, TRAJ34)
CVVNKGRELIF

SEQ ID NO: 444430 - protein, 13 aa, Homo sapiens
  CDR3 for beta chain variable domain of TCR clone 222215 (TRBV6-1, TRBJ1-1)
CASSRQGNTEACF

SEQ ID NO: 444431 - protein, 14 aa, Homo sapiens
  CDR3 for alpha chain variable domain of TCR clone 222216 (TRAV12-2, TRAJ53)
CAVKGGGSNYKLTF

SEQ ID NO: 444432 - protein, 14 aa, Homo sapiens
  CDR3 for beta chain variable domain of TCR clone 222216 (TRBV7-7, TRBJ2-2)
CATRQDSDTGELCF

SEQ ID NO: 444433 - protein, 15 aa, Homo sapiens
  CDR3 for alpha chain variable domain of TCR clone 222217 (TRAV26-1, TRAJ29)
CIVRVEGSGNTPLVF

SEQ ID NO: 444434 - protein, 17 aa, Homo sapiens
  CDR3 for beta chain variable domain of TCR clone 222217 (TRBV11-2, TRBJ2-1)
CASSLCPPGVEYNEQFF

SEQ ID NO: 444435 - protein, 17 aa, Homo sapiens
  CDR3 for alpha chain variable domain of TCR clone 222218 (TRAV26-1, TRAJ37)
CIVRVITVSSNTGKLIF

SEQ ID NO: 444436 - protein, 18 aa, Homo sapiens
  CDR3 for beta chain variable domain of TCR clone 222218 (TRBV7-6, TRBJ2-1)
CASSPRTSGMSSYNEQFF

SEQ ID NO: 444437 - protein, 11 aa, Homo sapiens
  CDR3 for alpha chain variable domain of TCR clone 222219 (TRAV21, TRAJ34)
CAVTNTDKLIF

SEQ ID NO: 444438 - protein, 14 aa, Homo sapiens
  CDR3 for beta chain variable domain of TCR clone 222219 (TRBV23-1, TRBJ2-5)
CASSFLRSQETQYF

SEQ ID NO: 444439 - protein, 15 aa, Homo sapiens
  CDR3 for alpha chain variable domain of TCR clone 222220 (TRAV8-1, TRAJ8)
CAVNAMNTGFQKLVF

SEQ ID NO: 444440 - protein, 15 aa, Homo sapiens
  CDR3 for beta chain variable domain of TCR clone 222220 (TRBV5-8, TRBJ1-1)
CASSVSGTSLKGAFF

SEQ ID NO: 444441 - protein, 17 aa, Homo sapiens
  CDR3 for alpha chain variable domain of TCR clone 222221 (TRAV3, TRAJ4)
CAVGDIMFSCGYNKLIF

SEQ ID NO: 444442 - protein, 13 aa, Homo sapiens
  CDR3 for beta chain variable domain of TCR clone 222221 (TRBV28, TRBJ2-1)
CASSLIGRDEQFF

SEQ ID NO: 444443 - protein, 12 aa, Homo sapiens
  CDR3 for alpha chain variable domain of TCR clone 222222 (TRAV26-1, TRAJ36)
CIVRVRADNLIF

SEQ ID NO: 444444 - protein, 16 aa, Homo sapiens
  CDR3 for beta chain variable domain of TCR clone 222222 (TRBV5-1, TRBJ2-3)
CASSSIGAGSTDTQYF

SEQ ID NO: 444445 - protein, 14 aa, Homo sapiens
  CDR3 for alpha chain variable domain of TCR clone 222223 (TRAV1-2, TRAJ16)
CAVNRFSDGQKLLF

SEQ ID NO: 444446 - protein, 12 aa, Homo sapiens
  CDR3 for beta chain variable domain of TCR clone 222223 (TRBV11-2, TRBJ2-2)
CAGSLGGGELFF

SEQ ID NO: 444447 - protein, 15 aa, Homo sapiens
  CDR3 for alpha chain variable domain of TCR clone 222224 (TRAV17, TRAJ57)
CATGPSQGGSEKLVF

SEQ ID NO: 444448 - protein, 14 aa, Homo sapiens
  CDR3 for beta chain variable domain of TCR clone 222224 (TRBV7-2, TRBJ2-5)
CASSPRGSSETQYF

SEQ ID NO: 444449 - protein, 13 aa, Homo sapiens
  CDR3 for alpha chain variable domain of TCR clone 222225 (TRAV12-1, TRAJ43)
CVVSHHNNNDMRL

SEQ ID NO: 444450 - protein, 14 aa, Homo sapiens
  CDR3 for beta chain variable domain of TCR clone 222225 (TRBV5-5, TRBJ2-2)
CASSLLGDTGELFF

SEQ ID NO: 444451 - protein, 15 aa, Homo sapiens
  CDR3 for alpha chain variable domain of TCR clone 222226 (TRAV13-1, TRAJ11)
CAASNRNSGYSTLTF

SEQ ID NO: 444452 - protein, 11 aa, Homo sapiens
  CDR3 for beta chain variable domain of TCR clone 222226 (TRBV20-1, TRBJ2-7)
CSARLGYEQYF

SEQ ID NO: 444453 - protein, 12 aa, Homo sapiens
  CDR3 for alpha chain variable domain of TCR clone 222227 (TRAV12-3, TRAJ17)
CAMTLTGNKLTF

SEQ ID NO: 444454 - protein, 17 aa, Homo sapiens
  CDR3 for beta chain variable domain of TCR clone 222227 (TRBV11-2, TRBJ2-1)
CASSLYPQGVEYNEQFF

SEQ ID NO: 444455 - protein, 16 aa, Homo sapiens
  CDR3 for alpha chain variable domain of TCR clone 222228 (TRAV3, TRAJ23)
CAVKIGIYNQGGKLIF

SEQ ID NO: 444456 - protein, 17 aa, Homo sapiens
  CDR3 for beta chain variable domain of TCR clone 222228 (TRBV10-3, TRBJ2-6)
WAISESTAPSGANVLTF

SEQ ID NO: 444457 - protein, 13 aa, Homo sapiens
  CDR3 for alpha chain variable domain of TCR clone 222229 (TRAV27, TRAJ49)
CAPRPYTGNQFYF

SEQ ID NO: 444458 - protein, 15 aa, Homo sapiens
  CDR3 for beta chain variable domain of TCR clone 222229 (TRBV28, TRBJ2-5)
CASSPPWSYQETQYF

SEQ ID NO: 444459 - protein, 14 aa, Homo sapiens
  CDR3 for alpha chain variable domain of TCR clone 222230 (TRAV26-1, TRAJ39)
CIVRGSRAGTMLTF

SEQ ID NO: 444460 - protein, 13 aa, Homo sapiens
  CDR3 for beta chain variable domain of TCR clone 222230 (TRBV7-3, TRBJ2-1)
CASSLDSYNEQFF

SEQ ID NO: 444461 - protein, 12 aa, Homo sapiens
  CDR3 for alpha chain variable domain of TCR clone 222231 (TRAV6, TRAJ9)
CALNTGGFKTIF

SEQ ID NO: 444462 - protein, 15 aa, Homo sapiens
  CDR3 for beta chain variable domain of TCR clone 222231 (TRBV20-1, TRBJ2-5)
CSAEGTGGRQETQYF

SEQ ID NO: 444463 - protein, 14 aa, Homo sapiens
  CDR3 for alpha chain variable domain of TCR clone 222232 (TRAV13-2, TRAJ9)
CAENLETGGFKTIF

SEQ ID NO: 444464 - protein, 15 aa, Homo sapiens
  CDR3 for beta chain variable domain of TCR clone 222232 (TRBV6-5, TRBJ2-1)
CASSYDAGAGNEQFF

SEQ ID NO: 444465 - protein, 14 aa, Homo sapiens
  CDR3 for alpha chain variable domain of TCR clone 222233 (TRAV12-2, TRAJ13)
CAVKKTGGHQKVPF

SEQ ID NO: 444466 - protein, 15 aa, Homo sapiens
  CDR3 for beta chain variable domain of TCR clone 222233 (TRBV27, TRBJ2-1)
CASSNGGGSSNEQFF

SEQ ID NO: 444467 - protein, 16 aa, Homo sapiens
  CDR3 for alpha chain variable domain of TCR clone 222234 (TRAV38-1, TRAJ32)
CAFMPFLGGATNKLIF

SEQ ID NO: 444468 - protein, 12 aa, Homo sapiens
  CDR3 for beta chain variable domain of TCR clone 222234 (TRBV11-2, TRBJ2-2)
CASSLPTGELFF

SEQ ID NO: 444469 - protein, 17 aa, Homo sapiens
  CDR3 for alpha chain variable domain of TCR clone 222235 (TRAV23/DV6, TRAJ57)
CAASSTLSQGGSEKLVS

SEQ ID NO: 444470 - protein, 13 aa, Homo sapiens
  CDR3 for beta chain variable domain of TCR clone 222235 (TRBV7-9, TRBJ1-2)
CASSLKQNYGYTF

SEQ ID NO: 444471 - protein, 13 aa, Homo sapiens
  CDR3 for alpha chain variable domain of TCR clone 222236 (TRAV13-1, TRAJ12)
CAASPDSSYKLIF

SEQ ID NO: 444472 - protein, 16 aa, Homo sapiens
  CDR3 for beta chain variable domain of TCR clone 222236 (TRBV15, TRBJ2-1)
CATSREILAGAYEQFF

SEQ ID NO: 444473 - protein, 13 aa, Homo sapiens
  CDR3 for alpha chain variable domain of TCR clone 222237 (TRAV2, TRAJ40)
CAVVTSGAYKYIF

SEQ ID NO: 444474 - protein, 14 aa, Homo sapiens
  CDR3 for beta chain variable domain of TCR clone 222237 (TRBV19, TRBJ2-1)
CASPTFVVSGEQFF

SEQ ID NO: 444475 - protein, 11 aa, Homo sapiens
  CDR3 for alpha chain variable domain of TCR clone 222238 (TRAV21, TRAJ23)
CVPQRRGKLIF

SEQ ID NO: 444476 - protein, 14 aa, Homo sapiens
  CDR3 for beta chain variable domain of TCR clone 222238 (TRBV4-2, TRBJ2-3)
CASRETRAPGMQYF

SEQ ID NO: 444477 - protein, 18 aa, Homo sapiens
  CDR3 for alpha chain variable domain of TCR clone 222239 (TRAV13-1, TRAJ52)
CAAKNPNAGCTSYGKLTF

SEQ ID NO: 444478 - protein, 18 aa, Homo sapiens
  CDR3 for beta chain variable domain of TCR clone 222239 (TRBV12-4, TRBJ2-4)
CASSRTGAVDVAKNIQYF

SEQ ID NO: 444479 - protein, 13 aa, Homo sapiens
  CDR3 for alpha chain variable domain of TCR clone 222240 (TRAV12-2, TRAJ11)
CAVPNSGYSTLTF

SEQ ID NO: 444480 - protein, 13 aa, Homo sapiens
  CDR3 for beta chain variable domain of TCR clone 222240 (TRBV7-9, TRBJ2-3)
CASSPGSTDTQYF

SEQ ID NO: 444481 - protein, 14 aa, Homo sapiens
  CDR3 for alpha chain variable domain of TCR clone 222241 (TRAV12-2, TRAJ6)
CASKWGGGSYIPTF

SEQ ID NO: 444482 - protein, 13 aa, Homo sapiens
  CDR3 for beta chain variable domain of TCR clone 222241 (TRBV2, TRBJ1-1)
CASIEGGNTEAFF

SEQ ID NO: 444483 - protein, 15 aa, Homo sapiens
  CDR3 for alpha chain variable domain of TCR clone 222242 (TRAV34, TRAJ38)
CGADFTPGNNRKLIW

SEQ ID NO: 444484 - protein, 14 aa, Homo sapiens
  CDR3 for beta chain variable domain of TCR clone 222242 (TRBV11-2, TRBJ1-2)
CASSLYRGNYGYTF

SEQ ID NO: 444485 - protein, 11 aa, Homo sapiens
  CDR3 for alpha chain variable domain of TCR clone 222243 (TRAV17, TRAJ9)
CGFTGGFKTLF

SEQ ID NO: 444486 - protein, 14 aa, Homo sapiens
  CDR3 for beta chain variable domain of TCR clone 222243 (TRBV7-9, TRBJ2-2)
CASSLVQDTGELFF

SEQ ID NO: 444487 - protein, 16 aa, Homo sapiens
  CDR3 for alpha chain variable domain of TCR clone 222244 (TRAV20, TRAJ38)
CAVQASNAGNNRKRIW

SEQ ID NO: 444488 - protein, 16 aa, Homo sapiens
  CDR3 for beta chain variable domain of TCR clone 222244 (TRBV7-8, TRBJ2-6)
CASRVGDSSGANVLTF

SEQ ID NO: 444489 - protein, 16 aa, Homo sapiens
  CDR3 for alpha chain variable domain of TCR clone 222245 (TRAV4, TRAJ22)
CLVGDLYSDSARQLTF

SEQ ID NO: 444490 - protein, 16 aa, Homo sapiens
  CDR3 for beta chain variable domain of TCR clone 222245 (TRBV7-9, TRBJ2-1)
CASSDVAGGSYNEQFF

SEQ ID NO: 444491 - protein, 12 aa, Homo sapiens
  CDR3 for alpha chain variable domain of TCR clone 222246 (TRAV13-2, TRAJ8)
CAPWLGFQKLVF

SEQ ID NO: 444492 - protein, 19 aa, Homo sapiens
  CDR3 for beta chain variable domain of TCR clone 222246 (TRBV7-9, TRBJ2-6)
CASSLESATVLPGANVLTF

SEQ ID NO: 444493 - protein, 11 aa, Homo sapiens
  CDR3 for alpha chain variable domain of TCR clone 222247 (TRAV3, TRAJ21)
CAVGNFNKFYF

SEQ ID NO: 444494 - protein, 15 aa, Homo sapiens
  CDR3 for beta chain variable domain of TCR clone 222247 (TRBV2, TRBJ2-7)
CASSEGLARSYEQYF

SEQ ID NO: 444495 - protein, 15 aa, Homo sapiens
  CDR3 for alpha chain variable domain of TCR clone 222248 (TRAV25, TRAJ53)
CPTSNSGGSNYKLTF

SEQ ID NO: 444496 - protein, 19 aa, Homo sapiens
  CDR3 for beta chain variable domain of TCR clone 222248 (TRBV25-1, TRBJ2-2)
CAILVYRVDRGRKTGELFF

SEQ ID NO: 444497 - protein, 15 aa, Homo sapiens
  CDR3 for alpha chain variable domain of TCR clone 222249 (TRAV12-2, TRAJ50)
CAVNGLETSYDKVIF

SEQ ID NO: 444498 - protein, 12 aa, Homo sapiens
  CDR3 for beta chain variable domain of TCR clone 222249 (TRBV7-8, TRBJ2-7)
CASSLGDREQYF

SEQ ID NO: 444499 - protein, 16 aa, Homo sapiens
  CDR3 for alpha chain variable domain of TCR clone 222250 (TRAV3, TRAJ21)
CALRDIERGNFNKFYF

SEQ ID NO: 444500 - protein, 13 aa, Homo sapiens
  CDR3 for beta chain variable domain of TCR clone 222250 (TRBV28, TRBJ2-5)
CASSSRNQETQYF

SEQ ID NO: 444501 - protein, 14 aa, Homo sapiens
  CDR3 for alpha chain variable domain of TCR clone 222251 (TRAV3, TRAJ9)
CAVRLNTGGFKTIF

SEQ ID NO: 444502 - protein, 17 aa, Homo sapiens
  CDR3 for beta chain variable domain of TCR clone 222251 (TRBV7-3, TRBJ2-3)
CASSLMKRMRGADTQYF

SEQ ID NO: 444503 - protein, 13 aa, Homo sapiens
  CDR3 for alpha chain variable domain of TCR clone 222252 (TRAV36/DV7, TRAJ38)
CVANAGNNRNLIW

SEQ ID NO: 444504 - protein, 14 aa, Homo sapiens
  CDR3 for beta chain variable domain of TCR clone 222252 (TRBV7-2, TRBJ2-7)
CASSLRWEVNEQYF

SEQ ID NO: 444505 - protein, 13 aa, Homo sapiens
  CDR3 for alpha chain variable domain of TCR clone 222253 (TRAV12-1, TRAJ26)
CVVRRNYGQNFVF

SEQ ID NO: 444506 - protein, 11 aa, Homo sapiens
  CDR3 for beta chain variable domain of TCR clone 222253 (TRBV7-8, TRBJ2-7)
CASSLSLEQYF

SEQ ID NO: 444507 - protein, 11 aa, Homo sapiens
  CDR3 for alpha chain variable domain of TCR clone 222254 (TRAV12-2, TRAJ49)
CALRGGNQFYF

SEQ ID NO: 444508 - protein, 13 aa, Homo sapiens
  CDR3 for beta chain variable domain of TCR clone 222254 (TRBV4-1, TRBJ1-1)
CASSQLGTGEAFF

SEQ ID NO: 444509 - protein, 11 aa, Homo sapiens
  CDR3 for alpha chain variable domain of TCR clone 222255 (TRAV4, TRAJ31)
CLVGDNATLMF

SEQ ID NO: 444510 - protein, 16 aa, Homo sapiens
  CDR3 for beta chain variable domain of TCR clone 222255 (TRBV7-2, TRBJ2-5)
CASSSKWLSGQETQYF

SEQ ID NO: 444511 - protein, 17 aa, Homo sapiens
  CDR3 for alpha chain variable domain of TCR clone 222256 (TRAV12-2, TRAJ48)
CASNEKLTFGTGTRLTI

SEQ ID NO: 444512 - protein, 14 aa, Homo sapiens
  CDR3 for beta chain variable domain of TCR clone 222256 (TRBV5-1, TRBJ2-5)
CASRLAGRQETQYF

SEQ ID NO: 444513 - protein, 14 aa, Homo sapiens
  CDR3 for alpha chain variable domain of TCR clone 222257 (TRAV13-1, TRAJ40)
CAASMTSGTDKYIF

SEQ ID NO: 444514 - protein, 15 aa, Homo sapiens
  CDR3 for beta chain variable domain of TCR clone 222257 (TRBV7-3, TRBJ2-1)
CASSPTGGGEVEQFF

SEQ ID NO: 444515 - protein, 17 aa, Homo sapiens
  CDR3 for alpha chain variable domain of TCR clone 222258 (TRAV26-1, TRAJ11)
CIVRVGQSNSGYSTLTF

SEQ ID NO: 444516 - protein, 15 aa, Homo sapiens
  CDR3 for beta chain variable domain of TCR clone 222258 (TRBV27, TRBJ2-5)
CASSLIPSGGETQDF

SEQ ID NO: 444517 - protein, 14 aa, Homo sapiens
  CDR3 for alpha chain variable domain of TCR clone 222259 (TRAV1-2, TRAJ16)
CSVNRFPDGQKLLF

SEQ ID NO: 444518 - protein, 16 aa, Homo sapiens
  CDR3 for beta chain variable domain of TCR clone 222259 (TRBV7-3, TRBJ2-2)
CASSLKRGTLSGELFF

SEQ ID NO: 444519 - protein, 15 aa, Homo sapiens
  CDR3 for alpha chain variable domain of TCR clone 222260 (TRAV27, TRAJ38)
CAARRNAGNKRKLNW

SEQ ID NO: 444520 - protein, 17 aa, Homo sapiens
  CDR3 for beta chain variable domain of TCR clone 222260 (TRBV20-1, TRBJ2-2)
CSASGSGQGGLTGELFF

SEQ ID NO: 444521 - protein, 15 aa, Homo sapiens
  CDR3 for alpha chain variable domain of TCR clone 222261 (TRAV27, TRAJ38)
CAARRNAGNNRKLIW

SEQ ID NO: 444522 - protein, 17 aa, Homo sapiens
  CDR3 for beta chain variable domain of TCR clone 222261 (TRBV4-1, TRBJ2-5)
CASSSRSGSGGQETQYF

SEQ ID NO: 444523 - protein, 12 aa, Homo sapiens
  CDR3 for alpha chain variable domain of TCR clone 222262 (TRAV27, TRAJ35)
CAGADFGNVLHC

SEQ ID NO: 444524 - protein, 16 aa, Homo sapiens
  CDR3 for beta chain variable domain of TCR clone 222262 (TRBV7-2, TRBJ2-3)
CASSLVALYSTDTQYF

SEQ ID NO: 444525 - protein, 12 aa, Homo sapiens
  CDR3 for alpha chain variable domain of TCR clone 222263 (TRAV3, TRAJ20)
CAVRDPDYKLSF

SEQ ID NO: 444526 - protein, 13 aa, Homo sapiens
  CDR3 for beta chain variable domain of TCR clone 222263 (TRBV5-1, TRBJ2-1)
CASSLGSYNEQFF

SEQ ID NO: 444527 - protein, 12 aa, Homo sapiens
  CDR3 for alpha chain variable domain of TCR clone 222264 (TRAV23/DV6, TRAJ17)
CAAKAAGNKLTG

SEQ ID NO: 444528 - protein, 17 aa, Homo sapiens
  CDR3 for beta chain variable domain of TCR clone 222264 (TRBV5-5, TRBJ1-1)
CASSLRFRGLMNTEAFF

SEQ ID NO: 444529 - protein, 14 aa, Homo sapiens
  CDR3 for alpha chain variable domain of TCR clone 222265 (TRAV12-2, TRAJ45)
CAVYSGGGADGLTF

SEQ ID NO: 444530 - protein, 15 aa, Homo sapiens
  CDR3 for beta chain variable domain of TCR clone 222265 (TRBV7-2, TRBJ2-2)
CASRRPGQNTGELFF

SEQ ID NO: 444531 - protein, 14 aa, Homo sapiens
  CDR3 for alpha chain variable domain of TCR clone 222266 (TRAV8-6, TRAJ6)
CAVSSSGGSYIPTF

SEQ ID NO: 444532 - protein, 14 aa, Homo sapiens
  CDR3 for beta chain variable domain of TCR clone 222266 (TRBV4-1, TRBJ2-2)
CASSQAVNTGELFF

SEQ ID NO: 444533 - protein, 12 aa, Homo sapiens
  CDR3 for alpha chain variable domain of TCR clone 222267 (TRAV12-3, TRAJ42)
CAPGGSQGNLIF

SEQ ID NO: 444534 - protein, 13 aa, Homo sapiens
  CDR3 for beta chain variable domain of TCR clone 222267 (TRBV5-7, TRBJ2-6)
SASTSSGANVLTF

SEQ ID NO: 444535 - protein, 21 aa, Homo sapiens
  CDR3 for alpha chain variable domain of TCR clone 222268 (TRAV29/DV5, TRAJ52)
CSVLLCSKREAGGTSYGKLTF

SEQ ID NO: 444536 - protein, 13 aa, Homo sapiens
  CDR3 for beta chain variable domain of TCR clone 222268 (TRBV27, TRBJ1-4)
CASSLMGAETLFF

SEQ ID NO: 444537 - protein, 14 aa, Homo sapiens
  CDR3 for alpha chain variable domain of TCR clone 222269 (TRAV21, TRAJ28)
CAVGSGAGSYQLTF

SEQ ID NO: 444538 - protein, 14 aa, Homo sapiens
  CDR3 for beta chain variable domain of TCR clone 222269 (TRBV18, TRBJ1-4)
CASSPGPNGEKLVF

SEQ ID NO: 444539 - protein, 15 aa, Homo sapiens
  CDR3 for alpha chain variable domain of TCR clone 222270 (TRAV3, TRAJ20)
CAVRDIKLSDYKLSF

SEQ ID NO: 444540 - protein, 15 aa, Homo sapiens
  CDR3 for beta chain variable domain of TCR clone 222270 (TRBV4-1, TRBJ1-4)
CASSDTGGTNEKLFF

SEQ ID NO: 444541 - protein, 17 aa, Homo sapiens
  CDR3 for alpha chain variable domain of TCR clone 222271 (TRAV3, TRAJ42)
CAVRDRDYGGSQGNLIF

SEQ ID NO: 444542 - protein, 15 aa, Homo sapiens
  CDR3 for beta chain variable domain of TCR clone 222271 (TRBV6-6, TRBJ2-7)
CASSYSYGGAYKQYF

SEQ ID NO: 444543 - protein, 12 aa, Homo sapiens
  CDR3 for alpha chain variable domain of TCR clone 222272 (TRAV13-1, TRAJ21)
CAAFFNFNKFYF

SEQ ID NO: 444544 - protein, 17 aa, Homo sapiens
  CDR3 for beta chain variable domain of TCR clone 222272 (TRBV18, TRBJ1-5)
CASSPTMGQGTNQPQHF

SEQ ID NO: 444545 - protein, 14 aa, Homo sapiens
  CDR3 for alpha chain variable domain of TCR clone 222273 (TRAV1-2, TRAJ15)
CALRDRQAGTALIF

SEQ ID NO: 444546 - protein, 17 aa, Homo sapiens
  CDR3 for beta chain variable domain of TCR clone 222273 (TRBV5-5, TRBJ1-2)
CASSLGSLDGQSEGYTF

SEQ ID NO: 444547 - protein, 15 aa, Homo sapiens
  CDR3 for alpha chain variable domain of TCR clone 222274 (TRAV12-3, TRAJ6)
CAMSATSGGSYIPTF

SEQ ID NO: 444548 - protein, 13 aa, Homo sapiens
  CDR3 for beta chain variable domain of TCR clone 222274 (TRBV12-4, TRBJ2-7)
CASSLSGVYEQYF

SEQ ID NO: 444549 - protein, 13 aa, Homo sapiens
  CDR3 for alpha chain variable domain of TCR clone 222275 (TRAV36/DV7, TRAJ53)
CALSVGSNYKLTF

SEQ ID NO: 444550 - protein, 13 aa, Homo sapiens
  CDR3 for beta chain variable domain of TCR clone 222275 (TRBV28, TRBJ2-7)
CASSLPSRYERYF

SEQ ID NO: 444551 - protein, 22 aa, Homo sapiens
  CDR3 for alpha chain variable domain of TCR clone 222276 (TRAV8-2, TRAJ45)
HLTKHSAHMSDAAEYSADGLTF

SEQ ID NO: 444552 - protein, 13 aa, Homo sapiens
  CDR3 for beta chain variable domain of TCR clone 222276 (TRBV7-3, TRBJ2-1)
CASSPVAYNEQFF

SEQ ID NO: 444553 - protein, 13 aa, Homo sapiens
  CDR3 for alpha chain variable domain of TCR clone 222277 (TRAV12-1, TRAJ6)
CVVFPGGSYIPTF

SEQ ID NO: 444554 - protein, 13 aa, Homo sapiens
  CDR3 for beta chain variable domain of TCR clone 222277 (TRBV28, TRBJ2-5)
CASRFAGGETQYF

SEQ ID NO: 444555 - protein, 10 aa, Homo sapiens
  CDR3 for alpha chain variable domain of TCR clone 222278 (TRAV8-3, TRAJ45)
CAVGVLFRRR

SEQ ID NO: 444556 - protein, 11 aa, Homo sapiens
  CDR3 for beta chain variable domain of TCR clone 222278 (TRBV20-1, TRBJ2-5)
CSAARAETQYF

SEQ ID NO: 444557 - protein, 18 aa, Homo sapiens
  CDR3 for alpha chain variable domain of TCR clone 222279 (TRAV21, TRAJ52)
CAVRPSPAGGTSYGKLTF

SEQ ID NO: 444558 - protein, 16 aa, Homo sapiens
  CDR3 for beta chain variable domain of TCR clone 222279 (TRBV2, TRBJ2-1)
CASRLNTASAYNEQFF

SEQ ID NO: 444559 - protein, 14 aa, Homo sapiens
  CDR3 for alpha chain variable domain of TCR clone 222280 (TRAV12-2, TRAJ17)
CAALFKAAGNKLTF

SEQ ID NO: 444560 - protein, 15 aa, Homo sapiens
  CDR3 for beta chain variable domain of TCR clone 222280 (TRBV18, TRBJ2-3)
CASSPLAGETDKQYF

SEQ ID NO: 444561 - protein, 14 aa, Homo sapiens
  CDR3 for alpha chain variable domain of TCR clone 222281 (TRAV1-2, TRAJ8)
CAVREDTGFQKLVF

SEQ ID NO: 444562 - protein, 14 aa, Homo sapiens
  CDR3 for beta chain variable domain of TCR clone 222281 (TRBV20-1, TRBJ1-5)
CSARDDRGNQPQHF

SEQ ID NO: 444563 - protein, 16 aa, Homo sapiens
  CDR3 for alpha chain variable domain of TCR clone 222282 (TRAV3, TRAJ37)
CAVRVRGSGNTGKPIF

SEQ ID NO: 444564 - protein, 15 aa, Homo sapiens
  CDR3 for beta chain variable domain of TCR clone 222282 (TRBV3-1, TRBJ2-1)
CASSPRDSGFNEQFF

SEQ ID NO: 444565 - protein, 22 aa, Homo sapiens
  CDR3 for alpha chain variable domain of TCR clone 222283 (TRAV26-1, TRAJ17)
CCVLLHRQSRLFIKAAGNKLTF

SEQ ID NO: 444566 - protein, 12 aa, Homo sapiens
  CDR3 for beta chain variable domain of TCR clone 222283 (TRBV19, TRBJ2-1)
CASSMQDTEQFF

SEQ ID NO: 444567 - protein, 13 aa, Homo sapiens
  CDR3 for alpha chain variable domain of TCR clone 222284 (TRAV20, TRAJ20)
CAVQAGSGYKLSF

SEQ ID NO: 444568 - protein, 14 aa, Homo sapiens
  CDR3 for beta chain variable domain of TCR clone 222284 (TRBV4-1, TRBJ2-2)
CASSQAVNTGELFF

SEQ ID NO: 444569 - protein, 14 aa, Homo sapiens
  CDR3 for alpha chain variable domain of TCR clone 222285 (TRAV38-1, TRAJ45)
CASHSGGGADGLTF

SEQ ID NO: 444570 - protein, 17 aa, Homo sapiens
  CDR3 for beta chain variable domain of TCR clone 222285 (TRBV4-1, TRBJ2-5)
CASSQDLTGGPIETQYF

SEQ ID NO: 444571 - protein, 15 aa, Homo sapiens
  CDR3 for alpha chain variable domain of TCR clone 222286 (TRAV27, TRAJ38)
CAARRNAGNNRKLIL

SEQ ID NO: 444572 - protein, 13 aa, Homo sapiens
  CDR3 for beta chain variable domain of TCR clone 222286 (TRBV10-3, TRBJ2-7)
CASKLAVNYEQYF

SEQ ID NO: 444573 - protein, 12 aa, Homo sapiens
  CDR3 for alpha chain variable domain of TCR clone 222287 (TRAV13-1, TRAJ15)
CAACQAGTALIF

SEQ ID NO: 444574 - protein, 18 aa, Homo sapiens
  CDR3 for beta chain variable domain of TCR clone 222287 (TRBV7-9, TRBJ2-3)
CASSLPINGQISTDTQYF

SEQ ID NO: 444575 - protein, 16 aa, Homo sapiens
  CDR3 for alpha chain variable domain of TCR clone 222288 (TRAV30, TRAJ24)
CGTEIVDADSWGKFQF

SEQ ID NO: 444576 - protein, 15 aa, Homo sapiens
  CDR3 for beta chain variable domain of TCR clone 222288 (TRBV19, TRBJ1-1)
CASTSGQIQNTEAFS

SEQ ID NO: 444577 - protein, 14 aa, Homo sapiens
  CDR3 for alpha chain variable domain of TCR clone 222289 (TRAV13-2, TRAJ16)
CAENNWEDGQKLLF

SEQ ID NO: 444578 - protein, 13 aa, Homo sapiens
  CDR3 for beta chain variable domain of TCR clone 222289 (TRBV7-9, TRBJ1-1)
CQQLVGLKTEAFF

SEQ ID NO: 444579 - protein, 12 aa, Homo sapiens
  CDR3 for alpha chain variable domain of TCR clone 222290 (TRAV12-2, TRAJ4)
GWPEGGYNKLIF

SEQ ID NO: 444580 - protein, 16 aa, Homo sapiens
  CDR3 for beta chain variable domain of TCR clone 222290 (TRBV5-1, TRBJ2-3)
CASSVQGRVGADTQYF

SEQ ID NO: 444581 - protein, 12 aa, Homo sapiens
  CDR3 for alpha chain variable domain of TCR clone 222291 (TRAV3, TRAJ39)
CAVIEWSNMLTC

SEQ ID NO: 444582 - protein, 14 aa, Homo sapiens
  CDR3 for beta chain variable domain of TCR clone 222291 (TRBV7-8, TRBJ2-3)
CASGFPDGQDTQYF

SEQ ID NO: 444583 - protein, 13 aa, Homo sapiens
  CDR3 for alpha chain variable domain of TCR clone 222292 (TRAV2, TRAJ13)
CAVESGGYQKVTF

SEQ ID NO: 444584 - protein, 13 aa, Homo sapiens
  CDR3 for beta chain variable domain of TCR clone 222292 (TRBV28, TRBJ2-5)
CASRFAGGETQYF

SEQ ID NO: 444585 - protein, 14 aa, Homo sapiens
  CDR3 for alpha chain variable domain of TCR clone 222293 (TRAV1-2, TRAJ26)
CCERPDNYGQNFVF

SEQ ID NO: 444586 - protein, 16 aa, Homo sapiens
  CDR3 for beta chain variable domain of TCR clone 222293 (TRBV7-2, TRBJ2-5)
CASSPFPTGGEETQYF

SEQ ID NO: 444587 - protein, 14 aa, Homo sapiens
  CDR3 for alpha chain variable domain of TCR clone 222294 (TRAV1-2, TRAJ8)
CAVREDTGFQKLVF

SEQ ID NO: 444588 - protein, 15 aa, Homo sapiens
  CDR3 for beta chain variable domain of TCR clone 222294 (TRBV7-9, TRBJ2-2)
CASGPLDTFPGEPFF

SEQ ID NO: 444589 - protein, 13 aa, Homo sapiens
  CDR3 for alpha chain variable domain of TCR clone 222295 (TRAV21, TRAJ20)
CAVGLRVDYKLSF

SEQ ID NO: 444590 - protein, 12 aa, Homo sapiens
  CDR3 for beta chain variable domain of TCR clone 222295 (TRBV11-2, TRBJ2-5)
CASSLGQETQYF

SEQ ID NO: 444591 - protein, 12 aa, Homo sapiens
  CDR3 for alpha chain variable domain of TCR clone 222296 (TRAV12-2, TRAJ20)
CAVRPSDYKLSF

SEQ ID NO: 444592 - protein, 20 aa, Homo sapiens
  CDR3 for beta chain variable domain of TCR clone 222296 (TRBV28, TRBJ2-1)
CASTPIGRSPGLAGGNEQFF

SEQ ID NO: 444593 - protein, 14 aa, Homo sapiens
  CDR3 for alpha chain variable domain of TCR clone 222297 (TRAV1-2, TRAJ16)
CAVNRFSDGQNLLF

SEQ ID NO: 444594 - protein, 12 aa, Homo sapiens
  CDR3 for beta chain variable domain of TCR clone 222297 (TRBV6-5, TRBJ2-5)
CASSEGSETQYF

SEQ ID NO: 444595 - protein, 16 aa, Homo sapiens
  CDR3 for alpha chain variable domain of TCR clone 222298 (TRAV30, TRAJ24)
CGTEIVDADSWGKFKF

SEQ ID NO: 444596 - protein, 15 aa, Homo sapiens
  CDR3 for beta chain variable domain of TCR clone 222298 (TRBV5-1, TRBJ1-1)
CASSSTTGTNTEAFF

SEQ ID NO: 444597 - protein, 14 aa, Homo sapiens
  CDR3 for alpha chain variable domain of TCR clone 222299 (TRAV17, TRAJ54)
CSTDANQGAQKLVF

SEQ ID NO: 444598 - protein, 12 aa, Homo sapiens
  CDR3 for beta chain variable domain of TCR clone 222299 (TRBV7-9, TRBJ2-7)
CASSIKREEQYF

SEQ ID NO: 444599 - protein, 13 aa, Homo sapiens
  CDR3 for alpha chain variable domain of TCR clone 222300 (TRAV2, TRAJ23)
CAVMGNQGGKLSF

SEQ ID NO: 444600 - protein, 14 aa, Homo sapiens
  CDR3 for beta chain variable domain of TCR clone 222300 (TRBV11-2, TRBJ2-1)
CASSRATSYNEQFF

SEQ ID NO: 444601 - protein, 14 aa, Homo sapiens
  CDR3 for alpha chain variable domain of TCR clone 222301 (TRAV1-1, TRAJ33)
CAVRPEDSNYQLIL

SEQ ID NO: 444602 - protein, 15 aa, Homo sapiens
  CDR3 for beta chain variable domain of TCR clone 222301 (TRBV20-1, TRBJ2-1)
CSARSPGGPGNEQFF

SEQ ID NO: 444603 - protein, 13 aa, Homo sapiens
  CDR3 for alpha chain variable domain of TCR clone 222302 (TRAV12-3, TRAJ30)
CAMNLNRDDKVIF

SEQ ID NO: 444604 - protein, 15 aa, Homo sapiens
  CDR3 for beta chain variable domain of TCR clone 222302 (TRBV6-3, TRBJ2-7)
CASSSPGTVFYEQYF

SEQ ID NO: 444605 - protein, 13 aa, Homo sapiens
  CDR3 for alpha chain variable domain of TCR clone 222303 (TRAV12-1, TRAJ3)
CVVNPRGASKIIF

SEQ ID NO: 444606 - protein, 16 aa, Homo sapiens
  CDR3 for beta chain variable domain of TCR clone 222303 (TRBV20-1, TRBJ1-4)
CSAPGQGLLTNEKLFF

SEQ ID NO: 444607 - protein, 14 aa, Homo sapiens
  CDR3 for alpha chain variable domain of TCR clone 222304 (TRAV1-2, TRAJ8)
CAVREYTGFQKLVF

SEQ ID NO: 444608 - protein, 16 aa, Homo sapiens
  CDR3 for beta chain variable domain of TCR clone 222304 (TRBV2, TRBJ2-1)
CASSVGGSLSYNEQFF

SEQ ID NO: 444609 - protein, 13 aa, Homo sapiens
  CDR3 for alpha chain variable domain of TCR clone 222305 (TRAV3, TRAJ20)
CAVRDTPRYKLSF

SEQ ID NO: 444610 - protein, 10 aa, Homo sapiens
  CDR3 for beta chain variable domain of TCR clone 222305 (TRBV23-1, TRBJ2-7)
SAGTGLEQYF

SEQ ID NO: 444611 - protein, 13 aa, Homo sapiens
  CDR3 for alpha chain variable domain of TCR clone 222306 (TRAV38-1, TRAJ42)
CARWGGGQGNLIF

SEQ ID NO: 444612 - protein, 17 aa, Homo sapiens
  CDR3 for beta chain variable domain of TCR clone 222306 (TRBV20-1, TRBJ2-1)
CSARDPLAGAWDNEQFF

SEQ ID NO: 444613 - protein, 14 aa, Homo sapiens
  CDR3 for alpha chain variable domain of TCR clone 222307 (TRAV13-1, TRAJ40)
CAASMTSGTYKYIF

SEQ ID NO: 444614 - protein, 13 aa, Homo sapiens
  CDR3 for beta chain variable domain of TCR clone 222307 (TRBV4-1, TRBJ2-5)
CASSQGVQETQYF

SEQ ID NO: 444615 - protein, 13 aa, Homo sapiens
  CDR3 for alpha chain variable domain of TCR clone 222308 (TRAV30, TRAJ6)
CGTEAGGSYIPTF

SEQ ID NO: 444616 - protein, 16 aa, Homo sapiens
  CDR3 for beta chain variable domain of TCR clone 222308 (TRBV7-2, TRBJ1-5)
CASSPWGPEGNQPQHF

SEQ ID NO: 444617 - protein, 11 aa, Homo sapiens
  CDR3 for alpha chain variable domain of TCR clone 222309 (TRAV16, TRAJ31)
CALFNNARLMF

SEQ ID NO: 444618 - protein, 13 aa, Homo sapiens
  CDR3 for beta chain variable domain of TCR clone 222309 (TRBV7-9, TRBJ1-4)
CASSLPGIEKLFF

SEQ ID NO: 444619 - protein, 17 aa, Homo sapiens
  CDR3 for alpha chain variable domain of TCR clone 222310 (TRAV8-6, TRAJ58)
CAVSSWGGETSGSRLTF

SEQ ID NO: 444620 - protein, 14 aa, Homo sapiens
  CDR3 for beta chain variable domain of TCR clone 222310 (TRBV6-1, TRBJ1-3)
CASVQGGGGNTIYF

SEQ ID NO: 444621 - protein, 14 aa, Homo sapiens
  CDR3 for alpha chain variable domain of TCR clone 222311 (TRAV17, TRAJ57)
CATDPQGGSEKLGF

SEQ ID NO: 444622 - protein, 12 aa, Homo sapiens
  CDR3 for beta chain variable domain of TCR clone 222311 (TRBV11-2, TRBJ2-2)
CASSLPTGELFF

SEQ ID NO: 444623 - protein, 15 aa, Homo sapiens
  CDR3 for alpha chain variable domain of TCR clone 222312 (TRAV34, TRAJ38)
CGADFTPGNNRKLIW

SEQ ID NO: 444624 - protein, 16 aa, Homo sapiens
  CDR3 for beta chain variable domain of TCR clone 222312 (TRBV12-5, TRBJ2-5)
CASGLRTSGNQETQYF

SEQ ID NO: 444625 - protein, 12 aa, Homo sapiens
  CDR3 for alpha chain variable domain of TCR clone 222313 (TRAV3, TRAJ31)
CAVRDGNARLMF

SEQ ID NO: 444626 - protein, 13 aa, Homo sapiens
  CDR3 for beta chain variable domain of TCR clone 222313 (TRBV19, TRBJ1-2)
CASSQGQVYGYTF

SEQ ID NO: 444627 - protein, 14 aa, Homo sapiens
  CDR3 for alpha chain variable domain of TCR clone 222314 (TRAV38-1, TRAJ45)
CASYSGGGADGLTF

SEQ ID NO: 444628 - protein, 13 aa, Homo sapiens
  CDR3 for beta chain variable domain of TCR clone 222314 (TRBV10-3, TRBJ1-2)
CAISERDSYGYTF

SEQ ID NO: 444629 - protein, 17 aa, Homo sapiens
  CDR3 for alpha chain variable domain of TCR clone 222315 (TRAV13-2, TRAJ31)
CAENARLMFGDCTQLVV

SEQ ID NO: 444630 - protein, 14 aa, Homo sapiens
  CDR3 for beta chain variable domain of TCR clone 222315 (TRBV7-9, TRBJ2-1)
CASSLGVADNEQFF

SEQ ID NO: 444631 - protein, 13 aa, Homo sapiens
  CDR3 for alpha chain variable domain of TCR clone 222316 (TRAV8-4, TRAJ30)
CATYKNREDKIIF

SEQ ID NO: 444632 - protein, 11 aa, Homo sapiens
  CDR3 for beta chain variable domain of TCR clone 222316 (TRBV6-1, TRBJ2-1)
CASRGYNEQFF

SEQ ID NO: 444633 - protein, 11 aa, Homo sapiens
  CDR3 for alpha chain variable domain of TCR clone 222317 (TRAV21, TRAJ21)
CAADNFNKFYF

SEQ ID NO: 444634 - protein, 13 aa, Homo sapiens
  CDR3 for beta chain variable domain of TCR clone 222317 (TRBV11-3, TRBJ1-1)
CASSRQPNPEAFF

SEQ ID NO: 444635 - protein, 11 aa, Homo sapiens
  CDR3 for alpha chain variable domain of TCR clone 222318 (TRAV23/DV6, TRAJ49)
CSARAGNQFYF

SEQ ID NO: 444636 - protein, 13 aa, Homo sapiens
  CDR3 for beta chain variable domain of TCR clone 222318 (TRBV19, TRBJ1-5)
CASSINFNQPQHF

SEQ ID NO: 444637 - protein, 12 aa, Homo sapiens
  CDR3 for alpha chain variable domain of TCR clone 222319 (TRAV30, TRAJ49)
CGTLGVSNQFYF

SEQ ID NO: 444638 - protein, 12 aa, Homo sapiens
  CDR3 for beta chain variable domain of TCR clone 222319 (TRBV11-2, TRBJ2-2)
CASSLGGGELFF

SEQ ID NO: 444639 - protein, 18 aa, Homo sapiens
  CDR3 for alpha chain variable domain of TCR clone 222320 (TRAV21, TRAJ52)
CAVGPSPAGGTSYGKLTF

SEQ ID NO: 444640 - protein, 17 aa, Homo sapiens
  CDR3 for beta chain variable domain of TCR clone 222320 (TRBV13, TRBJ2-3)
CVSSLSRVAGGRNTQYF

SEQ ID NO: 444641 - protein, 13 aa, Homo sapiens
  CDR3 for alpha chain variable domain of TCR clone 222321 (TRAV25, TRAJ24)
CSGGTDSWGKFQF

SEQ ID NO: 444642 - protein, 13 aa, Homo sapiens
  CDR3 for beta chain variable domain of TCR clone 222321 (TRBV4-2, TRBJ1-1)
CASSQAGNTEAFF

SEQ ID NO: 444643 - protein, 15 aa, Homo sapiens
  CDR3 for alpha chain variable domain of TCR clone 222322 (TRAV17, TRAJ37)
CATDGGSSNTGKLIF

SEQ ID NO: 444644 - protein, 15 aa, Homo sapiens
  CDR3 for beta chain variable domain of TCR clone 222322 (TRBV28, TRBJ2-5)
CASSSGRTIHETQYF

SEQ ID NO: 444645 - protein, 18 aa, Homo sapiens
  CDR3 for alpha chain variable domain of TCR clone 222323 (TRAV13-1, TRAJ52)
CAASKRSAGGTSSGKLTF

SEQ ID NO: 444646 - protein, 14 aa, Homo sapiens
  CDR3 for beta chain variable domain of TCR clone 222323 (TRBV7-2, TRBJ2-5)
CASSTGGELKTQYF

SEQ ID NO: 444647 - protein, 13 aa, Homo sapiens
  CDR3 for alpha chain variable domain of TCR clone 222324 (TRAV21, TRAJ27)
CAARPGNAGKSTF

SEQ ID NO: 444648 - protein, 14 aa, Homo sapiens
  CDR3 for beta chain variable domain of TCR clone 222324 (TRBV5-4, TRBJ1-1)
CASSLESRRDEALF

SEQ ID NO: 444649 - protein, 15 aa, Homo sapiens
  CDR3 for alpha chain variable domain of TCR clone 222325 (TRAV27, TRAJ38)
CAARRNAGNNRKLMW

SEQ ID NO: 444650 - protein, 13 aa, Homo sapiens
  CDR3 for beta chain variable domain of TCR clone 222325 (TRBV12-5, TRBJ2-3)
CASRDRQSDTQYF

SEQ ID NO: 444651 - protein, 11 aa, Homo sapiens
  CDR3 for alpha chain variable domain of TCR clone 222326 (TRAV4, TRAJ20)
CLVGDKVRLQA

SEQ ID NO: 444652 - protein, 15 aa, Homo sapiens
  CDR3 for beta chain variable domain of TCR clone 222326 (TRBV18, TRBJ2-7)
CASSPSSTGNYEQYF

SEQ ID NO: 444653 - protein, 15 aa, Homo sapiens
  CDR3 for alpha chain variable domain of TCR clone 222327 (TRAV26-1, TRAJ29)
CIVRVEGSGNTPLVF

SEQ ID NO: 444654 - protein, 15 aa, Homo sapiens
  CDR3 for beta chain variable domain of TCR clone 222327 (TRBV18, TRBJ1-1)
CASSPRQGENTEAFF

SEQ ID NO: 444655 - protein, 15 aa, Homo sapiens
  CDR3 for alpha chain variable domain of TCR clone 222328 (TRAV8-4, TRAJ8)
CAVSDLNTGFQKLVF

SEQ ID NO: 444656 - protein, 15 aa, Homo sapiens
  CDR3 for beta chain variable domain of TCR clone 222328 (TRBV5-1, TRBJ2-1)
CASSPPRAPYNEQFF

SEQ ID NO: 444657 - protein, 11 aa, Homo sapiens
  CDR3 for alpha chain variable domain of TCR clone 222329 (TRAV13-2, TRAJ26)
CAEIPGQHFVF

SEQ ID NO: 444658 - protein, 19 aa, Homo sapiens
  CDR3 for beta chain variable domain of TCR clone 222329 (TRBV19, TRBJ2-2)
CASTRPGLAGGRVTGELFF

SEQ ID NO: 444659 - protein, 17 aa, Homo sapiens
  CDR3 for alpha chain variable domain of TCR clone 222330 (TRAV3, TRAJ6)
CAVRDGPRAGGSYIPTF

SEQ ID NO: 444660 - protein, 16 aa, Homo sapiens
  CDR3 for beta chain variable domain of TCR clone 222330 (TRBV9, TRBJ2-2)
CASSAMGKGNTGELFF

SEQ ID NO: 444661 - protein, 16 aa, Homo sapiens
  CDR3 for alpha chain variable domain of TCR clone 222331 (TRAV12-1, TRAJ43)
CMVNPHRFGAGTRLTV

SEQ ID NO: 444662 - protein, 16 aa, Homo sapiens
  CDR3 for beta chain variable domain of TCR clone 222331 (TRBV27, TRBJ2-2)
CASSSTGGGDTGELFF

SEQ ID NO: 444663 - protein, 16 aa, Homo sapiens
  CDR3 for alpha chain variable domain of TCR clone 222332 (TRAV4, TRAJ5)
CLVGPDHGHGQESTYF

SEQ ID NO: 444664 - protein, 17 aa, Homo sapiens
  CDR3 for beta chain variable domain of TCR clone 222332 (TRBV11-3, TRBJ2-1)
GASSLYPPGVEYNEQFF

SEQ ID NO: 444665 - protein, 15 aa, Homo sapiens
  CDR3 for alpha chain variable domain of TCR clone 222333 (TRAV26-1, TRAJ40)
CIVRVTTSGTYKYIF

SEQ ID NO: 444666 - protein, 12 aa, Homo sapiens
  CDR3 for beta chain variable domain of TCR clone 222333 (TRBV7-9, TRAJ28)
CASSTDREKLFF

SEQ ID NO: 444667 - protein, 13 aa, Homo sapiens
  CDR3 for alpha chain variable domain of TCR clone 222334 (TRAV2, TRAJ15)
CAVAFQAGTALIF

SEQ ID NO: 444668 - protein, 14 aa, Homo sapiens
  CDR3 for beta chain variable domain of TCR clone 222334 (TRBV6-1, TRBJ1-3)
CASVQGGGGNTIYF

SEQ ID NO: 444669 - protein, 16 aa, Homo sapiens
  CDR3 for alpha chain variable domain of TCR clone 222335 (TRAV3, TRAJ10)
CAVRDMRAGGGNKRTF

SEQ ID NO: 444670 - protein, 15 aa, Homo sapiens
  CDR3 for beta chain variable domain of TCR clone 222335 (TRBV11-2, TRBJ1-6)
CASTGSGTAVSPLHF

SEQ ID NO: 444671 - protein, 10 aa, Homo sapiens
  CDR3 for alpha chain variable domain of TCR clone 222336 (TRAV13-1, TRAJ8)
CAAPFQKLVF

SEQ ID NO: 444672 - protein, 15 aa, Homo sapiens
  CDR3 for beta chain variable domain of TCR clone 222336 (TRBV27, TRBJ2-1)
CASSNGGGSSNEQFF

SEQ ID NO: 444673 - protein, 15 aa, Homo sapiens
  CDR3 for alpha chain variable domain of TCR clone 222337 (TRAV16, TRAJ48)
CALFISNFGNEKLTF

SEQ ID NO: 444674 - protein, 13 aa, Homo sapiens
  CDR3 for beta chain variable domain of TCR clone 222337 (TRBV4-1, TRBJ2-1)
CASSQAGGDEQFF

SEQ ID NO: 444675 - protein, 17 aa, Homo sapiens
  CDR3 for alpha chain variable domain of TCR clone 222338 (TRAV3, TRAJ6)
CAVRDGPRAGGSYIPTF

SEQ ID NO: 444676 - protein, 12 aa, Homo sapiens
  CDR3 for beta chain variable domain of TCR clone 222338 (TRBV11-3, TRBJ2-4)
CASSAGRVIQYF

SEQ ID NO: 444677 - protein, 12 aa, Homo sapiens
  CDR3 for alpha chain variable domain of TCR clone 222339 (TRAV3, TRAJ43)
CAVRDPNNDMRF

SEQ ID NO: 444678 - protein, 14 aa, Homo sapiens
  CDR3 for beta chain variable domain of TCR clone 222339 (TRBV27, TRBJ1-5)
CSSLGTGFDQPQHF

SEQ ID NO: 444679 - protein, 14 aa, Homo sapiens
  CDR3 for alpha chain variable domain of TCR clone 222340 (TRAV12-2, TRAJ13)
CAVKKTGGYQKVTF

SEQ ID NO: 444680 - protein, 16 aa, Homo sapiens
  CDR3 for beta chain variable domain of TCR clone 222340 (TRBV10-2, TRBJ2-7)
CASSESTGASSYEQYF

SEQ ID NO: 444681 - protein, 14 aa, Homo sapiens
  CDR3 for alpha chain variable domain of TCR clone 222341 (TRAV21, TRAJ35)
CAVLPKGFGNVLHC

SEQ ID NO: 444682 - protein, 12 aa, Homo sapiens
  CDR3 for beta chain variable domain of TCR clone 222341 (TRBV7-9, TRBJ2-7)
CASSIKREEQYF

SEQ ID NO: 444683 - protein, 14 aa, Homo sapiens
  CDR3 for alpha chain variable domain of TCR clone 222342 (TRAV23/DV6, TRAJ4)
CAAPSSGGCNKLIF

SEQ ID NO: 444684 - protein, 16 aa, Homo sapiens
  CDR3 for beta chain variable domain of TCR clone 222342 (TRBV19, TRBJ1-1)
CASRFGGPVTGTEAFF

SEQ ID NO: 444685 - protein, 18 aa, Homo sapiens
  CDR3 for alpha chain variable domain of TCR clone 222343 (TRAV13-1, TRAJ52)
CAAKNPNAGGTSYGKLTF

SEQ ID NO: 444686 - protein, 15 aa, Homo sapiens
  CDR3 for beta chain variable domain of TCR clone 222343 (TRBV6-1, TRBJ2-3)
CASSEGGGITDTQYF

SEQ ID NO: 444687 - protein, 14 aa, Homo sapiens
  CDR3 for alpha chain variable domain of TCR clone 222344 (TRAV12-1, TRAJ17)
CAVNYKAAGNKLTF

SEQ ID NO: 444688 - protein, 17 aa, Homo sapiens
  CDR3 for beta chain variable domain of TCR clone 222344 (TRBV20-1, TRBJ2-1)
CSASSSGLAESYNEQFF

SEQ ID NO: 444689 - protein, 15 aa, Homo sapiens
  CDR3 for alpha chain variable domain of TCR clone 222345 (TRAV26-1, TRAJ56)
CIVRVATGANSKLTF

SEQ ID NO: 444690 - protein, 12 aa, Homo sapiens
  CDR3 for beta chain variable domain of TCR clone 222345 (TRBV7-3, TRBJ2-1)
CASSFINNEQFF

SEQ ID NO: 444691 - protein, 15 aa, Homo sapiens
  CDR3 for alpha chain variable domain of TCR clone 222346 (TRAV1-2, TRAJ36)
CAASAEQTGANNLFF

SEQ ID NO: 444692 - protein, 15 aa, Homo sapiens
  CDR3 for beta chain variable domain of TCR clone 222346 (TRBV5-1, TRBJ2-7)
CASSFSTDSVYEQYF

SEQ ID NO: 444693 - protein, 15 aa, Homo sapiens
  CDR3 for alpha chain variable domain of TCR clone 222347 (TRAV3, TRAJ5)
CAVRDLDTGGRALTF

SEQ ID NO: 444694 - protein, 17 aa, Homo sapiens
  CDR3 for beta chain variable domain of TCR clone 222347 (TRBV28, TRBJ2-3)
CASSPTPAGGRVDTQYF

SEQ ID NO: 444695 - protein, 13 aa, Homo sapiens
  CDR3 for alpha chain variable domain of TCR clone 222348 (TRAV17, TRAJ22)
CAGRQGSARQLTF

SEQ ID NO: 444696 - protein, 14 aa, Homo sapiens
  CDR3 for beta chain variable domain of TCR clone 222348 (TRBV19, TRBJ1-1)
CASSITGWETEAFF

SEQ ID NO: 444697 - protein, 12 aa, Homo sapiens
  CDR3 for alpha chain variable domain of TCR clone 222349 (TRAV13-1, TRAJ49)
CAASPMGNQFYF

SEQ ID NO: 444698 - protein, 17 aa, Homo sapiens
  CDR3 for beta chain variable domain of TCR clone 222349 (TRBV20-1, TRBJ2-1)
CSARDPLAGVWDNEQFF

SEQ ID NO: 444699 - protein, 14 aa, Homo sapiens
  CDR3 for alpha chain variable domain of TCR clone 222350 (TRAV1-2, TRAJ16)
CAVNRFSDGQKLLF

SEQ ID NO: 444700 - protein, 14 aa, Homo sapiens
  CDR3 for beta chain variable domain of TCR clone 222350 (TRBV7-2, TRBJ2-7)
CASSRKTSFYEQYF

SEQ ID NO: 444701 - protein, 13 aa, Homo sapiens
  CDR3 for alpha chain variable domain of TCR clone 222351 (TRAV12-1, TRAJ40)
CVVPTSGTYKYIF

SEQ ID NO: 444702 - protein, 19 aa, Homo sapiens
  CDR3 for beta chain variable domain of TCR clone 222351 (TRBV19, TRBJ2-5)
CASSIGQVTDFFLGETQYF

SEQ ID NO: 444703 - protein, 14 aa, Homo sapiens
  CDR3 for alpha chain variable domain of TCR clone 222352 (TRAV8-4, TRAJ16)
CAVSPVGSWPEAAL

SEQ ID NO: 444704 - protein, 15 aa, Homo sapiens
  CDR3 for beta chain variable domain of TCR clone 222352 (TRBV11-3, TRBJ2-7)
CASSPGPASSYEQYF

SEQ ID NO: 444705 - protein, 13 aa, Homo sapiens
  CDR3 for alpha chain variable domain of TCR clone 222353 (TRAV36/DV7, TRAJ33)
CAVDMDSNSQLIW

SEQ ID NO: 444706 - protein, 16 aa, Homo sapiens
  CDR3 for beta chain variable domain of TCR clone 222353 (TRBV15, TRBJ2-3)
CATRLSGGRAPDTQYF

SEQ ID NO: 444707 - protein, 11 aa, Homo sapiens
  CDR3 for alpha chain variable domain of TCR clone 222354 (TRAV21, TRAJ23)
CAPQRRGKLIF

SEQ ID NO: 444708 - protein, 14 aa, Homo sapiens
  CDR3 for beta chain variable domain of TCR clone 222354 (TRBV19, TRBJ2-3)
CASSVGRGSDTQYF

SEQ ID NO: 444709 - protein, 15 aa, Homo sapiens
  CDR3 for alpha chain variable domain of TCR clone 222355 (TRAV12-2, TRAJ53)
CAVNGGGGSNYKRTL

SEQ ID NO: 444710 - protein, 13 aa, Homo sapiens
  CDR3 for beta chain variable domain of TCR clone 222355 (TRBV3-1, TRBJ1-1)
CASSPGVITEAFF

SEQ ID NO: 444711 - protein, 15 aa, Homo sapiens
  CDR3 for alpha chain variable domain of TCR clone 222356 (TRAV3, TRAJ4)
CAVRDGTGGYNKLIF

SEQ ID NO: 444712 - protein, 12 aa, Homo sapiens
  CDR3 for beta chain variable domain of TCR clone 222356 (TRBV19, TRBJ1-1)
CASMNRYTEAFF

SEQ ID NO: 444713 - protein, 15 aa, Homo sapiens
  CDR3 for alpha chain variable domain of TCR clone 222357 (TRAV17, TRAJ54)
CATEKLGQRAQKLVF

SEQ ID NO: 444714 - protein, 14 aa, Homo sapiens
  CDR3 for beta chain variable domain of TCR clone 222357 (TRBV7-3, TRBJ1-1)
CQQLRGQMNTEAFF

SEQ ID NO: 444715 - protein, 14 aa, Homo sapiens
  CDR3 for alpha chain variable domain of TCR clone 222358 (TRAV1-2, TRAJ16)
CAVNRFSDGQKLLF

SEQ ID NO: 444716 - protein, 16 aa, Homo sapiens
  CDR3 for beta chain variable domain of TCR clone 222358 (TRBV27, TRBJ2-2)
CVSSFRGLVRTGELFF

SEQ ID NO: 444717 - protein, 14 aa, Homo sapiens
  CDR3 for alpha chain variable domain of TCR clone 222359 (TRAV12-2, TRAJ13)
CAVKKTGGYQKVTF

SEQ ID NO: 444718 - protein, 19 aa, Homo sapiens
  CDR3 for beta chain variable domain of TCR clone 222359 (TRBV25-1, TRBJ2-2)
CAILVYRVDRGRKTRELFF

SEQ ID NO: 444719 - protein, 14 aa, Homo sapiens
  CDR3 for alpha chain variable domain of TCR clone 222360 (TRAV2, TRAJ29)
CAGPFQYGNTPLVF

SEQ ID NO: 444720 - protein, 18 aa, Homo sapiens
  CDR3 for beta chain variable domain of TCR clone 222360 (TRBV6-1, TRBJ1-6)
CASSGSGGRRINSSPLHF

SEQ ID NO: 444721 - protein, 15 aa, Homo sapiens
  CDR3 for alpha chain variable domain of TCR clone 222361 (TRAV17, TRAJ57)
CATGPSQGGFEKLFF

SEQ ID NO: 444722 - protein, 18 aa, Homo sapiens
  CDR3 for beta chain variable domain of TCR clone 222361 (TRBV7-9, TRBJ2-7)
CASSLTTSGSRTWYEQYF

SEQ ID NO: 444723 - protein, 16 aa, Homo sapiens
  CDR3 for alpha chain variable domain of TCR clone 222362 (TRAV30, TRAJ24)
CGAEIVDADSWGKFQF

SEQ ID NO: 444724 - protein, 14 aa, Homo sapiens
  CDR3 for beta chain variable domain of TCR clone 222362 (TRBV12-5, TRBJ2-5)
CASGSRTRQETQYF

SEQ ID NO: 444725 - protein, 15 aa, Homo sapiens
  CDR3 for alpha chain variable domain of TCR clone 222363 (TRAV2, TRAJ9)
CAVEDRGTRGFKTIF

SEQ ID NO: 444726 - protein, 13 aa, Homo sapiens
  CDR3 for beta chain variable domain of TCR clone 222363 (TRBV20-1, TRBJ1-1)
CSARGGGNTEAFF

SEQ ID NO: 444727 - protein, 15 aa, Homo sapiens
  CDR3 for alpha chain variable domain of TCR clone 222364 (TRAV3, TRAJ45)
CAARTPWGGADGLTF

SEQ ID NO: 444728 - protein, 16 aa, Homo sapiens
  CDR3 for beta chain variable domain of TCR clone 222364 (TRBV6-1, TRBJ2-2)
CASSFGQGANTGELFF

SEQ ID NO: 444729 - protein, 14 aa, Homo sapiens
  CDR3 for alpha chain variable domain of TCR clone 222365 (TRAV1-2, TRAJ8)
CAVREDTGFPKLVF

SEQ ID NO: 444730 - protein, 15 aa, Homo sapiens
  CDR3 for beta chain variable domain of TCR clone 222365 (TRBV7-2, TRBJ2-3)
CASSLVVRGPDTQYF

SEQ ID NO: 444731 - protein, 13 aa, Homo sapiens
  CDR3 for alpha chain variable domain of TCR clone 222366 (TRAV2, TRAJ40)
CAVVSSGTYKYIF

SEQ ID NO: 444732 - protein, 14 aa, Homo sapiens
  CDR3 for beta chain variable domain of TCR clone 222366 (TRBV19, TRBJ2-1)
CASPTFALSGEQFF

SEQ ID NO: 444733 - protein, 23 aa, Homo sapiens
  CDR3 for alpha chain variable domain of TCR clone 222367 (TRAV36/DV7, TRAJ45)
TATQTGDPAIYPSGGGGADGLTF

SEQ ID NO: 444734 - protein, 13 aa, Homo sapiens
  CDR3 for beta chain variable domain of TCR clone 222367 (TRBV28, TRBJ2-7)
CASSPSGTYEQYF

SEQ ID NO: 444735 - protein, 14 aa, Homo sapiens
  CDR3 for alpha chain variable domain of TCR clone 222368 (TRAV17, TRAJ22)
CATSPSGSARQLTF

SEQ ID NO: 444736 - protein, 14 aa, Homo sapiens
  CDR3 for beta chain variable domain of TCR clone 222368 (TRBV7-2, TRBJ1-1)
CASSFLTGTTEDFF

SEQ ID NO: 444737 - protein, 14 aa, Homo sapiens
  CDR3 for alpha chain variable domain of TCR clone 222369 (TRAV29/DV5, TRAJ49)
CAASAQNTGNQFDF

SEQ ID NO: 444738 - protein, 16 aa, Homo sapiens
  CDR3 for beta chain variable domain of TCR clone 222369 (TRBV12-4, TRBJ1-5)
CASRQPVEGSNQPQHF

SEQ ID NO: 444739 - protein, 18 aa, Homo sapiens
  CDR3 for alpha chain variable domain of TCR clone 222370 (TRAV13-1, TRAJ52)
CAAKNPNAGGTSYGKLTF

SEQ ID NO: 444740 - protein, 15 aa, Homo sapiens
  CDR3 for beta chain variable domain of TCR clone 222370 (TRBV6-1, TRBJ2-3)
CASSERGGIKDTQYF

SEQ ID NO: 444741 - protein, 17 aa, Homo sapiens
  CDR3 for alpha chain variable domain of TCR clone 222371 (TRAV17, TRAJ52)
CATERPSGGTSSGKLTF

SEQ ID NO: 444742 - protein, 13 aa, Homo sapiens
  CDR3 for beta chain variable domain of TCR clone 222371 (TRBV7-9, TRBJ1-2)
CASSLKQNYGYTF

SEQ ID NO: 444743 - protein, 13 aa, Homo sapiens
  CDR3 for alpha chain variable domain of TCR clone 222372 (TRAV1-2, TRAJ9)
CAALNTGGFKTIF

SEQ ID NO: 444744 - protein, 14 aa, Homo sapiens
  CDR3 for beta chain variable domain of TCR clone 222372 (TRBV4-1, TRBJ2-2)
CASSQAVNTGGLFF

SEQ ID NO: 444745 - protein, 12 aa, Homo sapiens
  CDR3 for alpha chain variable domain of TCR clone 222373 (TRAV8-3, TRAJ20)
CAVGANDYKLSL

SEQ ID NO: 444746 - protein, 15 aa, Homo sapiens
  CDR3 for beta chain variable domain of TCR clone 222373 (TRBV11-2, TRBJ2-1)
CASSLGTSGLNEQFF

SEQ ID NO: 444747 - protein, 14 aa, Homo sapiens
  CDR3 for alpha chain variable domain of TCR clone 222374 (TRAV8-1, TRAJ13)
CAVTPSGGYQKVTF

SEQ ID NO: 444748 - protein, 17 aa, Homo sapiens
  CDR3 for beta chain variable domain of TCR clone 222374 (TRBV5-1, TRBJ2-1)
CASSTGTSGYSYNEQFF

SEQ ID NO: 444749 - protein, 11 aa, Homo sapiens
  CDR3 for alpha chain variable domain of TCR clone 222375 (TRAV2, TRAJ31)
CAAGPPAILMF

SEQ ID NO: 444750 - protein, 13 aa, Homo sapiens
  CDR3 for beta chain variable domain of TCR clone 222375 (TRBV4-1, TRBJ2-3)
CASSQPPTDTQYF

SEQ ID NO: 444751 - protein, 16 aa, Homo sapiens
  CDR3 for alpha chain variable domain of TCR clone 222376 (TRAV3, TRAJ37)
CAVRPPGSGNTGKLIL

SEQ ID NO: 444752 - protein, 15 aa, Homo sapiens
  CDR3 for beta chain variable domain of TCR clone 222376 (TRBV10-3, TRBJ2-3)
CAISLTSGGTDTQYF

SEQ ID NO: 444753 - protein, 11 aa, Homo sapiens
  CDR3 for alpha chain variable domain of TCR clone 222377 (TRAV1-2, TRAJ20)
CAVSNDYKLSF

SEQ ID NO: 444754 - protein, 16 aa, Homo sapiens
  CDR3 for beta chain variable domain of TCR clone 222377 (TRBV29-1, TRBJ2-6)
SAALKTSHSGANVLTF

SEQ ID NO: 444755 - protein, 13 aa, Homo sapiens
  CDR3 for alpha chain variable domain of TCR clone 222378 (TRAV17, TRAJ9)
CATDYTGGFKTIF

SEQ ID NO: 444756 - protein, 14 aa, Homo sapiens
  CDR3 for beta chain variable domain of TCR clone 222378 (TRBV7-6, TRBJ2-3)
CASSVAGGTDTQYF

SEQ ID NO: 444757 - protein, 16 aa, Homo sapiens
  CDR3 for alpha chain variable domain of TCR clone 222379 (TRAV3, TRAJ21)
CAVRDIERGNFNKFYF

SEQ ID NO: 444758 - protein, 15 aa, Homo sapiens
  CDR3 for beta chain variable domain of TCR clone 222379 (TRBV27, TRBJ1-6)
CASSFDRGLGSPLHF

SEQ ID NO: 444759 - protein, 15 aa, Homo sapiens
  CDR3 for alpha chain variable domain of TCR clone 222380 (TRAV13-2, TRAJ32)
CAETGLWWCYKQAHL

SEQ ID NO: 444760 - protein, 15 aa, Homo sapiens
  CDR3 for beta chain variable domain of TCR clone 222380 (TRBV27, TRBJ1-6)
CASSFDRGLGSPLHF

SEQ ID NO: 444761 - protein, 13 aa, Homo sapiens
  CDR3 for alpha chain variable domain of TCR clone 222381 (TRAV12-1, TRAJ34)
CVVTGYNTDKLIF

SEQ ID NO: 444762 - protein, 13 aa, Homo sapiens
  CDR3 for beta chain variable domain of TCR clone 222381 (TRBV28, TRBJ2-7)
CASKAGGLYEQYF

SEQ ID NO: 444763 - protein, 16 aa, Homo sapiens
  CDR3 for alpha chain variable domain of TCR clone 222382 (TRAV3, TRAJ5)
CAVRNLMDTGRRALTF

SEQ ID NO: 444764 - protein, 16 aa, Homo sapiens
  CDR3 for beta chain variable domain of TCR clone 222382 (TRBV5-4, TRBJ2-3)
CASQQPGAGGADTQYF

SEQ ID NO: 444765 - protein, 11 aa, Homo sapiens
  CDR3 for alpha chain variable domain of TCR clone 222383 (TRAV27, TRAJ47)
CRSNQGNKLVF

SEQ ID NO: 444766 - protein, 16 aa, Homo sapiens
  CDR3 for beta chain variable domain of TCR clone 222383 (TRBV12-5, TRBJ2-5)
CASGPRTSGNQETQYF

SEQ ID NO: 444767 - protein, 12 aa, Homo sapiens
  CDR3 for alpha chain variable domain of TCR clone 222384 (TRAV17, TRAJ57)
CATDGGSEKLVF

SEQ ID NO: 444768 - protein, 16 aa, Homo sapiens
  CDR3 for beta chain variable domain of TCR clone 222384 (TRBV2, TRBJ2-5)
CASSETQGVGEETQYF

SEQ ID NO: 444769 - protein, 13 aa, Homo sapiens
  CDR3 for alpha chain variable domain of TCR clone 222385 (TRAV13-1, TRAJ6)
CAARRVGSYIPTF

SEQ ID NO: 444770 - protein, 16 aa, Homo sapiens
  CDR3 for beta chain variable domain of TCR clone 222385 (TRBV7-9, TRBJ2-2)
CASSLATGVGTGELFF

SEQ ID NO: 444771 - protein, 11 aa, Homo sapiens
  CDR3 for alpha chain variable domain of TCR clone 222386 (TRAV12-2, TRAJ33)
CDVGSNYQLIW

SEQ ID NO: 444772 - protein, 12 aa, Homo sapiens
  CDR3 for beta chain variable domain of TCR clone 222386 (TRBV11-2, TRBJ2-2)
CASSLGGGELFF

SEQ ID NO: 444773 - protein, 13 aa, Homo sapiens
  CDR3 for alpha chain variable domain of TCR clone 222387 (TRAV6, TRAJ16)
CALDDSDGQKLLF

SEQ ID NO: 444774 - protein, 14 aa, Homo sapiens
  CDR3 for beta chain variable domain of TCR clone 222387 (TRBV7-6, TRBJ2-3)
CASSLGTVTDTQYF

SEQ ID NO: 444775 - protein, 13 aa, Homo sapiens
  CDR3 for alpha chain variable domain of TCR clone 222388 (TRAV36/DV7, TRAJ37)
CAVFSSNTGKLIF

SEQ ID NO: 444776 - protein, 17 aa, Homo sapiens
  CDR3 for beta chain variable domain of TCR clone 222388 (TRBV4-1, TRBJ1-4)
CASSQEGPRGVEEKLFF

SEQ ID NO: 444777 - protein, 13 aa, Homo sapiens
  CDR3 for alpha chain variable domain of TCR clone 222389 (TRAV23/DV6, TRAJ27)
CAASKPVQANQPL

SEQ ID NO: 444778 - protein, 14 aa, Homo sapiens
  CDR3 for beta chain variable domain of TCR clone 222389 (TRBV5-4, TRBJ1-1)
CASSLDSRRDEAFF

SEQ ID NO: 444779 - protein, 14 aa, Homo sapiens
  CDR3 for alpha chain variable domain of TCR clone 222390 (TRAV12-2, TRAJ9)
CAVNALEGGFKTIF

SEQ ID NO: 444780 - protein, 14 aa, Homo sapiens
  CDR3 for beta chain variable domain of TCR clone 222390 (TRBV12-4, TRBJ2-3)
CASSGQGSTDTQYF

SEQ ID NO: 444781 - protein, 16 aa, Homo sapiens
  CDR3 for alpha chain variable domain of TCR clone 222391 (TRAV8-3, TRAJ10)
CAVGPGVTGGGSKLTL

SEQ ID NO: 444782 - protein, 13 aa, Homo sapiens
  CDR3 for beta chain variable domain of TCR clone 222391 (TRBV18, TRBJ1-1)
CASSPGPSGEAFF

SEQ ID NO: 444783 - protein, 14 aa, Homo sapiens
  CDR3 for alpha chain variable domain of TCR clone 222392 (TRAV2, TRAJ42)
CAVVGGGSQGNLIF

SEQ ID NO: 444784 - protein, 16 aa, Homo sapiens
  CDR3 for beta chain variable domain of TCR clone 222392 (TRBV4-2, TRBJ2-1)
CASSQGEGSIHNEQFF

SEQ ID NO: 444785 - protein, 16 aa, Homo sapiens
  CDR3 for alpha chain variable domain of TCR clone 222393 (TRAV12-2, TRAJ52)
CRLANAGGTSYGKLTF

SEQ ID NO: 444786 - protein, 13 aa, Homo sapiens
  CDR3 for beta chain variable domain of TCR clone 222393 (TRBV15, TRBJ1-2)
CATSREEGDGYTF

SEQ ID NO: 444787 - protein, 15 aa, Homo sapiens
  CDR3 for alpha chain variable domain of TCR clone 222394 (TRAV38-1, TRAJ37)
CAFIFGSGNTGKLIF

SEQ ID NO: 444788 - protein, 16 aa, Homo sapiens
  CDR3 for beta chain variable domain of TCR clone 222394 (TRBV13, TRBJ2-2)
CASSPRTGEHTGELLF

SEQ ID NO: 444789 - protein, 14 aa, Homo sapiens
  CDR3 for alpha chain variable domain of TCR clone 222395 (TRAV13-2, TRAJ57)
CAENFQGGSEKLVF

SEQ ID NO: 444790 - protein, 18 aa, Homo sapiens
  CDR3 for beta chain variable domain of TCR clone 222395 (TRBV28, TRBJ2-1)
CASSSPSGLAGAIYEQFF

SEQ ID NO: 444791 - protein, 14 aa, Homo sapiens
  CDR3 for alpha chain variable domain of TCR clone 222396 (TRAV17, TRAJ39)
CATDPVRAGNMLTF

SEQ ID NO: 444792 - protein, 14 aa, Homo sapiens
  CDR3 for beta chain variable domain of TCR clone 222396 (TRBV7-8, TRBJ2-3)
CASSLEAGTDTQYF

SEQ ID NO: 444793 - protein, 15 aa, Homo sapiens
  CDR3 for alpha chain variable domain of TCR clone 222397 (TRAV8-3, TRAJ20)
CAVEAKGSNDYKLSF

SEQ ID NO: 444794 - protein, 14 aa, Homo sapiens
  CDR3 for beta chain variable domain of TCR clone 222397 (TRBV25-1, TRBJ1-1)
CASTHLGGNTEAFF

SEQ ID NO: 444795 - protein, 11 aa, Homo sapiens
  CDR3 for alpha chain variable domain of TCR clone 222398 (TRAV12-1, TRAJ21)
CVVNNFNKFYF

SEQ ID NO: 444796 - protein, 14 aa, Homo sapiens
  CDR3 for beta chain variable domain of TCR clone 222398 (TRBV15, TRBJ1-5)
CATSREQSNQAQHF

SEQ ID NO: 444797 - protein, 16 aa, Homo sapiens
  CDR3 for alpha chain variable domain of TCR clone 222399 (TRAV12-3, TRAJ53)
CAMSPWSGGSNYKLTF

SEQ ID NO: 444798 - protein, 16 aa, Homo sapiens
  CDR3 for beta chain variable domain of TCR clone 222399 (TRBV4-2, TRBJ1-1)
CASSQAGFGMNTEAFF

SEQ ID NO: 444799 - protein, 16 aa, Homo sapiens
  CDR3 for alpha chain variable domain of TCR clone 222400 (TRAV16, TRAJ52)
CALSAAGGTSYGKLTF

SEQ ID NO: 444800 - protein, 16 aa, Homo sapiens
  CDR3 for beta chain variable domain of TCR clone 222400 (TRBV4-1, TRBJ1-5)
CASSPRGGLSPSILVM

SEQ ID NO: 444801 - protein, 10 aa, Homo sapiens
  CDR3 for alpha chain variable domain of TCR clone 222401 (TRAV2, TRAJ34)
CAVVNDKLIF

SEQ ID NO: 444802 - protein, 15 aa, Homo sapiens
  CDR3 for beta chain variable domain of TCR clone 222401 (TRBV19, TRBJ1-1)
CASSIRRQMNTEAFF

SEQ ID NO: 444803 - protein, 14 aa, Homo sapiens
  CDR3 for alpha chain variable domain of TCR clone 222402 (TRAV12-3, TRAJ10)
SHLPLTGGGDKLTF

SEQ ID NO: 444804 - protein, 15 aa, Homo sapiens
  CDR3 for beta chain variable domain of TCR clone 222402 (TRBV7-3, TRBJ2-2)
CASSETGQGTGELFF

SEQ ID NO: 444805 - protein, 13 aa, Homo sapiens
  CDR3 for alpha chain variable domain of TCR clone 222403 (TRAV17, TRAJ9)
CATDYTGGFKTIF

SEQ ID NO: 444806 - protein, 16 aa, Homo sapiens
  CDR3 for beta chain variable domain of TCR clone 222403 (TRBV11-2, TRBJ1-2)
CASSLDRGGNNYGYTF

SEQ ID NO: 444807 - protein, 12 aa, Homo sapiens
  CDR3 for alpha chain variable domain of TCR clone 222404 (TRAV12-1, TRAJ40)
CVVPSGTYKYIF

SEQ ID NO: 444808 - protein, 17 aa, Homo sapiens
  CDR3 for beta chain variable domain of TCR clone 222404 (TRBV7-3, TRBJ2-3)
CASSRGLAGEVPDTQYF

SEQ ID NO: 444809 - protein, 14 aa, Homo sapiens
  CDR3 for alpha chain variable domain of TCR clone 222405 (TRAV13-1, TRAJ22)
CAASNGGSARQLTF

SEQ ID NO: 444810 - protein, 17 aa, Homo sapiens
  CDR3 for beta chain variable domain of TCR clone 222405 (TRBV13, TRBJ2-3)
CASSLSRVAGGRNTQYF

SEQ ID NO: 444811 - protein, 13 aa, Homo sapiens
  CDR3 for alpha chain variable domain of TCR clone 222406 (TRAV30, TRAJ24)
CGTVTDSWGKLQF

SEQ ID NO: 444812 - protein, 15 aa, Homo sapiens
  CDR3 for beta chain variable domain of TCR clone 222406 (TRBV25-1, TRBJ1-4)
CASSPGDSTNAKLFF

SEQ ID NO: 444813 - protein, 16 aa, Homo sapiens
  CDR3 for alpha chain variable domain of TCR clone 222407 (TRAV30, TRAJ24)
CGTEIVDADSWGKFLF

SEQ ID NO: 444814 - protein, 13 aa, Homo sapiens
  CDR3 for beta chain variable domain of TCR clone 222407 (TRBV11-2, TRBJ2-5)
CASSSTGEETQYF

SEQ ID NO: 444815 - protein, 12 aa, Homo sapiens
  CDR3 for alpha chain variable domain of TCR clone 222408 (TRAV23/DV6, TRAJ30)
CAASKGDDMIIF

SEQ ID NO: 444816 - protein, 18 aa, Homo sapiens
  CDR3 for beta chain variable domain of TCR clone 222408 (TRBV10-3, TRBJ2-3)
CAISESRVGPMRGDTQYF

SEQ ID NO: 444817 - protein, 17 aa, Homo sapiens
  CDR3 for alpha chain variable domain of TCR clone 222409 (TRAV3, TRAJ6)
CAVRDGPRAGGSYIPTF

SEQ ID NO: 444818 - protein, 17 aa, Homo sapiens
  CDR3 for beta chain variable domain of TCR clone 222409 (TRBV11-2, TRBJ2-1)
CANSLYPPGVEYNEQFF

SEQ ID NO: 444819 - protein, 14 aa, Homo sapiens
  CDR3 for alpha chain variable domain of TCR clone 222410 (TRAV30, TRAJ26)
CGTEIVSYGQNFVF

SEQ ID NO: 444820 - protein, 11 aa, Homo sapiens
  CDR3 for beta chain variable domain of TCR clone 222410 (TRBV29-1, TRBJ2-5)
CSEDRTGTQYF

SEQ ID NO: 444821 - protein, 12 aa, Homo sapiens
  CDR3 for alpha chain variable domain of TCR clone 222411 (TRAV35, TRAJ12)
CAGMDSSYKLIF

SEQ ID NO: 444822 - protein, 14 aa, Homo sapiens
  CDR3 for beta chain variable domain of TCR clone 222411 (TRBV19, TRBJ2-1)
CASPTFVLSGEQFF

SEQ ID NO: 444823 - protein, 14 aa, Homo sapiens
  CDR3 for alpha chain variable domain of TCR clone 222412 (TRAV12-2, TRAJ40)
CAVKIPSGTYKYIF

SEQ ID NO: 444824 - protein, 15 aa, Homo sapiens
  CDR3 for beta chain variable domain of TCR clone 222412 (TRBV20-1, TRBJ1-1)
HLKCTTTDWGTEAFF

SEQ ID NO: 444825 - protein, 13 aa, Homo sapiens
  CDR3 for alpha chain variable domain of TCR clone 222413 (TRAV20, TRAJ9)
CAVPDTGGFKTIF

SEQ ID NO: 444826 - protein, 13 aa, Homo sapiens
  CDR3 for beta chain variable domain of TCR clone 222413 (TRBV7-9, TRBJ2-7)
CASSFAGAYEQYF

SEQ ID NO: 444827 - protein, 12 aa, Homo sapiens
  CDR3 for alpha chain variable domain of TCR clone 222414 (TRAV21, TRAJ42)
CAVGGSQGNLIF

SEQ ID NO: 444828 - protein, 15 aa, Homo sapiens
  CDR3 for beta chain variable domain of TCR clone 222414 (TRBV7-9, TRBJ1-5)
CASSQGHQPNQPQHF

SEQ ID NO: 444829 - protein, 13 aa, Homo sapiens
  CDR3 for alpha chain variable domain of TCR clone 222415 (TRAV12-3, TRAJ13)
CAMSSGGYTKVTF

SEQ ID NO: 444830 - protein, 13 aa, Homo sapiens
  CDR3 for beta chain variable domain of TCR clone 222415 (TRBV20-1, TRBJ1-1)
FSAPPGGHTEAFF

SEQ ID NO: 444831 - protein, 13 aa, Homo sapiens
  CDR3 for alpha chain variable domain of TCR clone 222416 (TRAV2, TRAJ40)
CAVVTSGTYKYIF

SEQ ID NO: 444832 - protein, 15 aa, Homo sapiens
  CDR3 for beta chain variable domain of TCR clone 222416 (TRBV19, TRBJ1-2)
CASTLDSTGNYGYTF

SEQ ID NO: 444833 - protein, 13 aa, Homo sapiens
  CDR3 for alpha chain variable domain of TCR clone 222417 (TRAV36/DV7, TRAJ29)
CAVEPSGNTPLVF

SEQ ID NO: 444834 - protein, 11 aa, Homo sapiens
  CDR3 for beta chain variable domain of TCR clone 222417 (TRBV19, TRBJ2-7)
RASGNSYEQYF

SEQ ID NO: 444835 - protein, 16 aa, Homo sapiens
  CDR3 for alpha chain variable domain of TCR clone 222418 (TRAV26-1, TRAJ13)
CIVSPKDSGGYQKVTF

SEQ ID NO: 444836 - protein, 12 aa, Homo sapiens
  CDR3 for beta chain variable domain of TCR clone 222418 (TRBV11-2, TRBJ2-2)
CASSLGGGELFF

SEQ ID NO: 444837 - protein, 14 aa, Homo sapiens
  CDR3 for alpha chain variable domain of TCR clone 222419 (TRAV12-3, TRAJ13)
CAMRNSGGYQKVTF

SEQ ID NO: 444838 - protein, 15 aa, Homo sapiens
  CDR3 for beta chain variable domain of TCR clone 222419 (TRBV7-2, TRBJ1-2)
CASSLVSGGDYGYTF

SEQ ID NO: 444839 - protein, 11 aa, Homo sapiens
  CDR3 for alpha chain variable domain of TCR clone 222420 (TRAV17, TRAJ9)
CATTGGFKTIF

SEQ ID NO: 444840 - protein, 13 aa, Homo sapiens
  CDR3 for beta chain variable domain of TCR clone 222420 (TRBV20-1, TRBJ1-1)
CSAPLGGGTEALF

SEQ ID NO: 444841 - protein, 14 aa, Homo sapiens
  CDR3 for alpha chain variable domain of TCR clone 222421 (TRAV12-2, TRAJ40)
CAVKIPSGTYKYIL

SEQ ID NO: 444842 - protein, 17 aa, Homo sapiens
  CDR3 for beta chain variable domain of TCR clone 222421 (TRBV11-2, TRBJ2-1)
CASSLYPPGVEYNEQFF

SEQ ID NO: 444843 - protein, 14 aa, Homo sapiens
  CDR3 for alpha chain variable domain of TCR clone 222422 (TRAV14/DV4, TRAJ26)
CAMREGTYGQNFVF

SEQ ID NO: 444844 - protein, 14 aa, Homo sapiens
  CDR3 for beta chain variable domain of TCR clone 222422 (TRBV7-2, TRBJ2-5)
CASSTGGELKTQYF

SEQ ID NO: 444845 - protein, 13 aa, Homo sapiens
  CDR3 for alpha chain variable domain of TCR clone 222423 (TRAV2, TRAJ40)
CAVVTSGTYKYTF

SEQ ID NO: 444846 - protein, 15 aa, Homo sapiens
  CDR3 for beta chain variable domain of TCR clone 222423 (TRBV11-3, TRBJ2-3)
CASLKDGREGDTQYI

SEQ ID NO: 444847 - protein, 12 aa, Homo sapiens
  CDR3 for alpha chain variable domain of TCR clone 222424 (TRAV3, TRAJ20)
CAVRDPDYKLSF

SEQ ID NO: 444848 - protein, 13 aa, Homo sapiens
  CDR3 for beta chain variable domain of TCR clone 222424 (TRBV7-2, TRBJ2-2)
RASSSVRAGELFF

SEQ ID NO: 444849 - protein, 17 aa, Homo sapiens
  CDR3 for alpha chain variable domain of TCR clone 222425 (TRAV8-6, TRAJ58)
CAVSSWVGETSGSRLTF

SEQ ID NO: 444850 - protein, 14 aa, Homo sapiens
  CDR3 for beta chain variable domain of TCR clone 222425 (TRBV27, TRBJ2-1)
CASRHLGGGKEQFF

SEQ ID NO: 444851 - protein, 14 aa, Homo sapiens
  CDR3 for alpha chain variable domain of TCR clone 222426 (TRAV13-1, TRAJ35)
CAASKGGFGNVLHC

SEQ ID NO: 444852 - protein, 13 aa, Homo sapiens
  CDR3 for beta chain variable domain of TCR clone 222426 (TRBV7-3, TRBJ1-1)
CTSSKDWGAEAFF

SEQ ID NO: 444853 - protein, 17 aa, Homo sapiens
  CDR3 for alpha chain variable domain of TCR clone 222427 (TRAV4, TRAJ18)
CLVGERSVGSTLGRRYF

SEQ ID NO: 444854 - protein, 12 aa, Homo sapiens
  CDR3 for beta chain variable domain of TCR clone 222427 (TRBV11-2, TRBJ2-2)
CASSLGGGELFF

SEQ ID NO: 444855 - protein, 17 aa, Homo sapiens
  CDR3 for alpha chain variable domain of TCR clone 222428 (TRAV3, TRAJ6)
CAVRDGPRAGGSYIPTF

SEQ ID NO: 444856 - protein, 16 aa, Homo sapiens
  CDR3 for beta chain variable domain of TCR clone 222428 (TRBV9, TRBJ2-7)
CASSAGPDRSPYEQYF

SEQ ID NO: 444857 - protein, 13 aa, Homo sapiens
  CDR3 for alpha chain variable domain of TCR clone 222429 (TRAV3, TRAJ15)
CAVRDQAGTALIF

SEQ ID NO: 444858 - protein, 13 aa, Homo sapiens
  CDR3 for beta chain variable domain of TCR clone 222429 (TRBV28, TRBJ2-7)
CASRSSGVYEQYF

SEQ ID NO: 444859 - protein, 15 aa, Homo sapiens
  CDR3 for alpha chain variable domain of TCR clone 222430 (TRAV12-2, TRAJ53)
CAVNTGGGSNYKLTF

SEQ ID NO: 444860 - protein, 15 aa, Homo sapiens
  CDR3 for beta chain variable domain of TCR clone 222430 (TRBV4-3, TRBJ1-1)
CASSQELGRGTEAFF

SEQ ID NO: 444861 - protein, 15 aa, Homo sapiens
  CDR3 for alpha chain variable domain of TCR clone 222431 (TRAV3, TRAJ20)
CAVRDIKLSDYKLSF

SEQ ID NO: 444862 - protein, 15 aa, Homo sapiens
  CDR3 for beta chain variable domain of TCR clone 222431 (TRBV2, TRBJ2-3)
CASSDFEKATDTQYF

SEQ ID NO: 444863 - protein, 14 aa, Homo sapiens
  CDR3 for alpha chain variable domain of TCR clone 222432 (TRAV17, TRAJ16)
CATADFSDGQKLLF

SEQ ID NO: 444864 - protein, 11 aa, Homo sapiens
  CDR3 for beta chain variable domain of TCR clone 222432 (TRBV18, TRBJ2-1)
PPSASYNEQFF

SEQ ID NO: 444865 - protein, 13 aa, Homo sapiens
  CDR3 for alpha chain variable domain of TCR clone 222433 (TRAV26-1, TRAJ34)
CIVRPWITDKLIF

SEQ ID NO: 444866 - protein, 14 aa, Homo sapiens
  CDR3 for beta chain variable domain of TCR clone 222433 (TRBV7-7, TRBJ2-7)
CASSLGRGVGEQYF

SEQ ID NO: 444867 - protein, 12 aa, Homo sapiens
  CDR3 for alpha chain variable domain of TCR clone 222434 (TRAV13-2, TRAJ49)
CAATDTGNQFYF

SEQ ID NO: 444868 - protein, 19 aa, Homo sapiens
  CDR3 for beta chain variable domain of TCR clone 222434 (TRBV25-1, TRBJ2-2)
CAILVYRVDRGRKTGELFF

SEQ ID NO: 444869 - protein, 11 aa, Homo sapiens
  CDR3 for alpha chain variable domain of TCR clone 222435 (TRAV13-1, TRAJ40)
CAVSGTYKYIF

SEQ ID NO: 444870 - protein, 13 aa, Homo sapiens
  CDR3 for beta chain variable domain of TCR clone 222435 (TRBV19, TRBJ1-5)
CGSSIGGNQPQHF

SEQ ID NO: 444871 - protein, 14 aa, Homo sapiens
  CDR3 for alpha chain variable domain of TCR clone 222436 (TRAV13-1, TRAJ52)
CAALDGTSYGKLTF

SEQ ID NO: 444872 - protein, 16 aa, Homo sapiens
  CDR3 for beta chain variable domain of TCR clone 222436 (TRBV7-2, TRBJ1-6)
CASSLAPGNLNSPLHF

SEQ ID NO: 444873 - protein, 16 aa, Homo sapiens
  CDR3 for alpha chain variable domain of TCR clone 222437 (TRAV12-3, TRAJ53)
CAMSPGSGGSNYKLTF

SEQ ID NO: 444874 - protein, 15 aa, Homo sapiens
  CDR3 for beta chain variable domain of TCR clone 222437 (TRBV5-7, TRBJ2-7)
CASSLPGQVFYEQYF

SEQ ID NO: 444875 - protein, 15 aa, Homo sapiens
  CDR3 for alpha chain variable domain of TCR clone 222438 (TRAV1-2, TRAJ17)
CAVRGYGAAGNKLTF

SEQ ID NO: 444876 - protein, 15 aa, Homo sapiens
  CDR3 for beta chain variable domain of TCR clone 222438 (TRBV11-2, TRBJ2-7)
CASSGPGWGAHEQYF

SEQ ID NO: 444877 - protein, 14 aa, Homo sapiens
  CDR3 for alpha chain variable domain of TCR clone 222439 (TRAV12-2, TRAJ36)
CAVKISTGANNLFF

SEQ ID NO: 444878 - protein, 14 aa, Homo sapiens
  CDR3 for beta chain variable domain of TCR clone 222439 (TRBV25-1, TRBJ1-2)
CASNDTTGVVGYTF

SEQ ID NO: 444879 - protein, 17 aa, Homo sapiens
  CDR3 for alpha chain variable domain of TCR clone 222440 (TRAV8-6, TRAJ58)
CAVSSWVGETSGSRLTF

SEQ ID NO: 444880 - protein, 14 aa, Homo sapiens
  CDR3 for beta chain variable domain of TCR clone 222440 (TRBV19, TRBJ2-1)
CASSRLASINEQFF

SEQ ID NO: 444881 - protein, 17 aa, Homo sapiens
  CDR3 for alpha chain variable domain of TCR clone 222441 (TRAV4, TRAJ18)
CLVGERSVGSTLGRLYF

SEQ ID NO: 444882 - protein, 18 aa, Homo sapiens
  CDR3 for beta chain variable domain of TCR clone 222441 (TRBV11-2, TRBJ2-3)
CASSFGGASRGAPNTQYF

SEQ ID NO: 444883 - protein, 17 aa, Homo sapiens
  CDR3 for alpha chain variable domain of TCR clone 222442 (TRAV3, TRAJ6)
CAVRHGPRAGGSYIPTF

SEQ ID NO: 444884 - protein, 20 aa, Homo sapiens
  CDR3 for beta chain variable domain of TCR clone 222442 (TRBV28, TRBJ2-1)
CASTPIGRSPGLAGGNEQFF

SEQ ID NO: 444885 - protein, 14 aa, Homo sapiens
  CDR3 for alpha chain variable domain of TCR clone 222443 (TRAV12-3, TRAJ5)
CAVNRSTGRRALTF

SEQ ID NO: 444886 - protein, 13 aa, Homo sapiens
  CDR3 for beta chain variable domain of TCR clone 222443 (TRBV20-1, TRBJ2-7)
CSARPSTNYEQYF

SEQ ID NO: 444887 - protein, 10 aa, Homo sapiens
  CDR3 for alpha chain variable domain of TCR clone 222444 (TRAV12-2, TRAJ52)
RSTSYGKLTF

SEQ ID NO: 444888 - protein, 14 aa, Homo sapiens
  CDR3 for beta chain variable domain of TCR clone 222444 (TRBV20-1, TRBJ1-1)
CSAQTRIGGTEAFF

SEQ ID NO: 444889 - protein, 13 aa, Homo sapiens
  CDR3 for alpha chain variable domain of TCR clone 222445 (TRAV19, TRAJ57)
CALLQGGSEKLVF

SEQ ID NO: 444890 - protein, 14 aa, Homo sapiens
  CDR3 for beta chain variable domain of TCR clone 222445 (TRBV20-1, TRBJ2-1)
CSAQIGGSANEQFF

SEQ ID NO: 444891 - protein, 15 aa, Homo sapiens
  CDR3 for alpha chain variable domain of TCR clone 222446 (TRAV26-1, TRAJ21)
CIVRVPNYNFNKFYF

SEQ ID NO: 444892 - protein, 16 aa, Homo sapiens
  CDR3 for beta chain variable domain of TCR clone 222446 (TRBV7-9, TRBJ2-3)
CASGLQGNPGTDTQYF

SEQ ID NO: 444893 - protein, 15 aa, Homo sapiens
  CDR3 for alpha chain variable domain of TCR clone 222447 (TRAV3, TRAJ17)
CAVSPKEAAGNKLNF

SEQ ID NO: 444894 - protein, 14 aa, Homo sapiens
  CDR3 for beta chain variable domain of TCR clone 222447 (TRBV5-1, TRBJ2-3)
CASSLFGPTDTQYF

SEQ ID NO: 444895 - protein, 18 aa, Homo sapiens
  CDR3 for alpha chain variable domain of TCR clone 222448 (TRAV12-3, TRAJ52)
CAMSVGGAGGTSYGKLTF

SEQ ID NO: 444896 - protein, 16 aa, Homo sapiens
  CDR3 for beta chain variable domain of TCR clone 222448 (TRBV7-6, TRBJ2-1)
CIAVPAAWGGADEQFF

SEQ ID NO: 444897 - protein, 16 aa, Homo sapiens
  CDR3 for alpha chain variable domain of TCR clone 222449 (TRAV21, TRAJ37)
CAVRPRGSSNTGRLIF

SEQ ID NO: 444898 - protein, 12 aa, Homo sapiens
  CDR3 for beta chain variable domain of TCR clone 222449 (TRBV5-5, TRBJ2-5)
CASSYFGETQYF

SEQ ID NO: 444899 - protein, 11 aa, Homo sapiens
  CDR3 for alpha chain variable domain of TCR clone 222450 (TRAV1-2, TRAJ20)
CAVSNDYKLSF

SEQ ID NO: 444900 - protein, 16 aa, Homo sapiens
  CDR3 for beta chain variable domain of TCR clone 222450 (TRBV12-4, TRBJ1-5)
CASSRPVGGSNQPQHF

SEQ ID NO: 444901 - protein, 14 aa, Homo sapiens
  CDR3 for alpha chain variable domain of TCR clone 222451 (TRAV16, TRAJ26)
CITALSAYGQNFVF

SEQ ID NO: 444902 - protein, 14 aa, Homo sapiens
  CDR3 for beta chain variable domain of TCR clone 222451 (TRBV7-2, TRBJ2-7)
CASRSQGAAYEQYF

SEQ ID NO: 444903 - protein, 14 aa, Homo sapiens
  CDR3 for alpha chain variable domain of TCR clone 222452 (TRAV12-2, TRAJ17)
CAVNIKAAGNKLTF

SEQ ID NO: 444904 - protein, 16 aa, Homo sapiens
  CDR3 for beta chain variable domain of TCR clone 222452 (TRBV7-9, TRBJ2-1)
CASSLGADLSYNEQFF

SEQ ID NO: 444905 - protein, 14 aa, Homo sapiens
  CDR3 for alpha chain variable domain of TCR clone 222453 (TRAV8-3, TRAJ4)
CAVGASGGYNKLIF

SEQ ID NO: 444906 - protein, 16 aa, Homo sapiens
  CDR3 for beta chain variable domain of TCR clone 222453 (TRBV4-3, TRBJ2-2)
CASSHLPGSGTGELFF

SEQ ID NO: 444907 - protein, 16 aa, Homo sapiens
  CDR3 for alpha chain variable domain of TCR clone 222454 (TRAV16, TRAJ57)
CAPYLITHGGSAKLVF

SEQ ID NO: 444908 - protein, 17 aa, Homo sapiens
  CDR3 for beta chain variable domain of TCR clone 222454 (TRBV24-1, TRBJ2-4)
CATSDAEARGVRNIQYF

SEQ ID NO: 444909 - protein, 14 aa, Homo sapiens
  CDR3 for alpha chain variable domain of TCR clone 222455 (TRAV12-3, TRAJ10)
SHLPLTGGGNKLTF

SEQ ID NO: 444910 - protein, 15 aa, Homo sapiens
  CDR3 for beta chain variable domain of TCR clone 222455 (TRBV5-1, TRBJ1-5)
CASSLGTVSNQPQHF

SEQ ID NO: 444911 - protein, 13 aa, Homo sapiens
  CDR3 for alpha chain variable domain of TCR clone 222456 (TRAV13-2, TRAJ48)
CAEMDFGNETLTF

SEQ ID NO: 444912 - protein, 14 aa, Homo sapiens
  CDR3 for beta chain variable domain of TCR clone 222456 (TRBV15, TRBJ2-3)
CATRSGTSTDTQYF

SEQ ID NO: 444913 - protein, 17 aa, Homo sapiens
  CDR3 for alpha chain variable domain of TCR clone 222457 (TRAV3, TRAJ42)
CAVRDRDYGGSQGNLIF

SEQ ID NO: 444914 - protein, 14 aa, Homo sapiens
  CDR3 for beta chain variable domain of TCR clone 222457 (TRBV10-3, TRBJ1-1)
CAISDTDRGVEAFF

SEQ ID NO: 444915 - protein, 13 aa, Homo sapiens
  CDR3 for alpha chain variable domain of TCR clone 222458 (TRAV26-2, TRAJ43)
CILRAVNNNDMRF

SEQ ID NO: 444916 - protein, 11 aa, Homo sapiens
  CDR3 for beta chain variable domain of TCR clone 222458 (TRBV29-1, TRBJ2-5)
GSEDRTGTQYF

SEQ ID NO: 444917 - protein, 14 aa, Homo sapiens
  CDR3 for alpha chain variable domain of TCR clone 222459 (TRAV1-2, TRAJ16)
CAVNRFSDVQKLLF

SEQ ID NO: 444918 - protein, 15 aa, Homo sapiens
  CDR3 for beta chain variable domain of TCR clone 222459 (TRBV9, TRBJ1-6)
CASSVAGTGDSPLQF

SEQ ID NO: 444919 - protein, 14 aa, Homo sapiens
  CDR3 for alpha chain variable domain of TCR clone 222460 (TRAV12-3, TRAJ56)
CAMSVTGANSKLTF

SEQ ID NO: 444920 - protein, 17 aa, Homo sapiens
  CDR3 for beta chain variable domain of TCR clone 222460 (TRBV20-1, TRBJ2-3)
GIASLRGRGGSADTQYF

SEQ ID NO: 444921 - protein, 14 aa, Homo sapiens
  CDR3 for alpha chain variable domain of TCR clone 222461 (TRAV2, TRAJ45)
CAVEDLFQEEVLTD

SEQ ID NO: 444922 - protein, 14 aa, Homo sapiens
  CDR3 for beta chain variable domain of TCR clone 222461 (TRBV27, TRBJ2-5)
CASSRTFLVDTQYF

SEQ ID NO: 444923 - protein, 14 aa, Homo sapiens
  CDR3 for alpha chain variable domain of TCR clone 222462 (TRAV29/DV5, TRAJ32)
CAAEYGGATNKLIV

SEQ ID NO: 444924 - protein, 11 aa, Homo sapiens
  CDR3 for beta chain variable domain of TCR clone 222462 (TRBV11-2, TRBJ2-2)
CASSLPGELFF

SEQ ID NO: 444925 - protein, 16 aa, Homo sapiens
  CDR3 for alpha chain variable domain of TCR clone 222463 (TRAV12-2, TRAJ45)
CAVIFLSGGGADGLTF

SEQ ID NO: 444926 - protein, 19 aa, Homo sapiens
  CDR3 for beta chain variable domain of TCR clone 222463 (TRBV28, TRBJ2-4)
RASSFQQGGPAHSKNSQYF

SEQ ID NO: 444927 - protein, 13 aa, Homo sapiens
  CDR3 for alpha chain variable domain of TCR clone 222464 (TRAV8-3, TRAJ28)
CAVGAVGSYQLTF

SEQ ID NO: 444928 - protein, 14 aa, Homo sapiens
  CDR3 for beta chain variable domain of TCR clone 222464 (TRBV28, TRBJ2-5)
CASSLYRGTETQYF

SEQ ID NO: 444929 - protein, 14 aa, Homo sapiens
  CDR3 for alpha chain variable domain of TCR clone 222465 (TRAV2, TRAJ26)
CAVERDNDGQNFVF

SEQ ID NO: 444930 - protein, 14 aa, Homo sapiens
  CDR3 for beta chain variable domain of TCR clone 222465 (TRBV12-5, TRBJ2-5)
CASGSRTHQETQYF

SEQ ID NO: 444931 - protein, 15 aa, Homo sapiens
  CDR3 for alpha chain variable domain of TCR clone 222466 (TRAV14/DV4, TRAJ12)
CAMREERDSSYKLIF

SEQ ID NO: 444932 - protein, 15 aa, Homo sapiens
  CDR3 for beta chain variable domain of TCR clone 222466 (TRBV11-3, TRBJ2-3)
CASLKDGREGDTQYF

SEQ ID NO: 444933 - protein, 11 aa, Homo sapiens
  CDR3 for alpha chain variable domain of TCR clone 222467 (TRAV13-2, TRAJ15)
CSHQAGTALIF

SEQ ID NO: 444934 - protein, 14 aa, Homo sapiens
  CDR3 for beta chain variable domain of TCR clone 222467 (TRBV4-1, TRBJ2-2)
CASSQAVNTGELFF

SEQ ID NO: 444935 - protein, 18 aa, Homo sapiens
  CDR3 for alpha chain variable domain of TCR clone 222468 (TRAV26-1, TRAJ23)
CIVRVGLEVWNQGGKLIF

SEQ ID NO: 444936 - protein, 16 aa, Homo sapiens
  CDR3 for beta chain variable domain of TCR clone 222468 (TRBV12-4, TRBJ2-5)
CASSFFVRGCQETQYV

SEQ ID NO: 444937 - protein, 11 aa, Homo sapiens
  CDR3 for alpha chain variable domain of TCR clone 222469 (TRAV1-2, TRAJ31)
CAVNNNDRLMF

SEQ ID NO: 444938 - protein, 18 aa, Homo sapiens
  CDR3 for beta chain variable domain of TCR clone 222469 (TRBV25-1, TRBJ1-2)
CASSGLQNGQGLIFGYTF

SEQ ID NO: 444939 - protein, 13 aa, Homo sapiens
  CDR3 for alpha chain variable domain of TCR clone 222470 (TRAV35, TRAJ48)
CAGHEFGNEELTF

SEQ ID NO: 444940 - protein, 16 aa, Homo sapiens
  CDR3 for beta chain variable domain of TCR clone 222470 (TRBV12-5, TRBJ2-5)
CASGPRTSGNQETQYF

SEQ ID NO: 444941 - protein, 15 aa, Homo sapiens
  CDR3 for alpha chain variable domain of TCR clone 222471 (TRAV12-2, TRAJ53)
CAANGGGGSNYKLTF

SEQ ID NO: 444942 - protein, 17 aa, Homo sapiens
  CDR3 for beta chain variable domain of TCR clone 222471 (TRBV7-3, TRBJ2-3)
RASSLMKRMRGADTQYF

SEQ ID NO: 444943 - protein, 14 aa, Homo sapiens
  CDR3 for alpha chain variable domain of TCR clone 222472 (TRAV27, TRAJ22)
CAGLPSGSARQLTF

SEQ ID NO: 444944 - protein, 13 aa, Homo sapiens
  CDR3 for beta chain variable domain of TCR clone 222472 (TRBV7-2, TRBJ2-7)
CASSSPSGSGQYF

SEQ ID NO: 444945 - protein, 16 aa, Homo sapiens
  CDR3 for alpha chain variable domain of TCR clone 222473 (TRAV30, TRAJ24)
CGTEIVDADSWGKFQF

SEQ ID NO: 444946 - protein, 13 aa, Homo sapiens
  CDR3 for beta chain variable domain of TCR clone 222473 (TRBV18, TRBJ1-2)
CASSASATEGYTV

SEQ ID NO: 444947 - protein, 14 aa, Homo sapiens
  CDR3 for alpha chain variable domain of TCR clone 222474 (TRAV17, TRAJ32)
CATDPGGATNKLIF

SEQ ID NO: 444948 - protein, 14 aa, Homo sapiens
  CDR3 for beta chain variable domain of TCR clone 222474 (TRBV7-8, TRBJ2-3)
CASSLEAGTDTQYF

SEQ ID NO: 444949 - protein, 18 aa, Homo sapiens
  CDR3 for alpha chain variable domain of TCR clone 222475 (TRAV21, TRAJ52)
CAVRPSPAGGTSYGKLTF

SEQ ID NO: 444950 - protein, 14 aa, Homo sapiens
  CDR3 for beta chain variable domain of TCR clone 222475 (TRBV6-6, TRBJ1-6)
CASGFEGTTSPLHS

SEQ ID NO: 444951 - protein, 14 aa, Homo sapiens
  CDR3 for alpha chain variable domain of TCR clone 222476 (TRAV8-4, TRAJ9)
CAVILNTGGFKTIL

SEQ ID NO: 444952 - protein, 11 aa, Homo sapiens
  CDR3 for beta chain variable domain of TCR clone 222476 (TRBV7-9, TRBJ2-6)
CASPRANVLTF

SEQ ID NO: 444953 - protein, 18 aa, Homo sapiens
  CDR3 for alpha chain variable domain of TCR clone 222477 (TRAV26-2, TRAJ18)
CILRDVNHRGSILGRLYF

SEQ ID NO: 444954 - protein, 14 aa, Homo sapiens
  CDR3 for beta chain variable domain of TCR clone 222477 (TRBV4-1, TRBJ2-1)
CASRTSGVFHEQFF

SEQ ID NO: 444955 - protein, 13 aa, Homo sapiens
  CDR3 for alpha chain variable domain of TCR clone 222478 (TRAV17, TRAJ9)
CATDYTGGFKTIF

SEQ ID NO: 444956 - protein, 14 aa, Homo sapiens
  CDR3 for beta chain variable domain of TCR clone 222478 (TRBV2, TRBJ2-1)
CASSEALDGNEQFF

SEQ ID NO: 444957 - protein, 17 aa, Homo sapiens
  CDR3 for alpha chain variable domain of TCR clone 222479 (TRAV3, TRAJ6)
CAVRDGPGAGGSYIPPF

SEQ ID NO: 444958 - protein, 14 aa, Homo sapiens
  CDR3 for beta chain variable domain of TCR clone 222479 (TRBV7-2, TRBJ2-7)
CASSPKTSFYEQYF

SEQ ID NO: 444959 - protein, 17 aa, Homo sapiens
  CDR3 for alpha chain variable domain of TCR clone 222480 (TRAV3, TRAJ6)
CAVRDGPRAGGSHIPTF

SEQ ID NO: 444960 - protein, 14 aa, Homo sapiens
  CDR3 for beta chain variable domain of TCR clone 222480 (TRBV7-2, TRBJ2-7)
CASSPKTSFYERYF

SEQ ID NO: 444961 - protein, 13 aa, Homo sapiens
  CDR3 for alpha chain variable domain of TCR clone 222481 (TRAV12-1, TRAJ7)
CVVNMRGNNRLAF

SEQ ID NO: 444962 - protein, 15 aa, Homo sapiens
  CDR3 for beta chain variable domain of TCR clone 222481 (TRBV20-1, TRBJ2-5)
CSASGTSGGGETQYF

SEQ ID NO: 444963 - protein, 12 aa, Homo sapiens
  CDR3 for alpha chain variable domain of TCR clone 222482 (TRAV3, TRAJ31)
CAVRDGNARLMF

SEQ ID NO: 444964 - protein, 14 aa, Homo sapiens
  CDR3 for beta chain variable domain of TCR clone 222482 (TRBV6-5, TRBJ1-1)
CASSFGQGLTEAFF

SEQ ID NO: 444965 - protein, 10 aa, Homo sapiens
  CDR3 for alpha chain variable domain of TCR clone 222483 (TRAV1-2, TRAJ20)
CACNDYKLSF

SEQ ID NO: 444966 - protein, 16 aa, Homo sapiens
  CDR3 for beta chain variable domain of TCR clone 222483 (TRBV12-5, TRBJ2-5)
CASGPRTSGNQETQYF

SEQ ID NO: 444967 - protein, 15 aa, Homo sapiens
  CDR3 for alpha chain variable domain of TCR clone 222484 (TRAV2, TRAJ38)
CAVEDRIGNNRKLLW

SEQ ID NO: 444968 - protein, 16 aa, Homo sapiens
  CDR3 for beta chain variable domain of TCR clone 222484 (TRBV7-8, TRBJ2-1)
CASSLAGTGRYNEQFF

SEQ ID NO: 444969 - protein, 15 aa, Homo sapiens
  CDR3 for alpha chain variable domain of TCR clone 222485 (TRAV2, TRAJ15)
CAVEDRGQAGTALIF

SEQ ID NO: 444970 - protein, 16 aa, Homo sapiens
  CDR3 for beta chain variable domain of TCR clone 222485 (TRBV12-4, TRBJ2-5)
CASSFFVRGRQETQYF

SEQ ID NO: 444971 - protein, 16 aa, Homo sapiens
  CDR3 for alpha chain variable domain of TCR clone 222486 (TRAV12-2, TRAJ6)
CAAPLAGSGGSYIPTF

SEQ ID NO: 444972 - protein, 10 aa, Homo sapiens
  CDR3 for beta chain variable domain of TCR clone 222486 (TRBV28, TRBJ1-2)
CASSPDRAVF

SEQ ID NO: 444973 - protein, 12 aa, Homo sapiens
  CDR3 for alpha chain variable domain of TCR clone 222487 (TRAV1-1, TRAJ23)
CAVPGRKAYLRT

SEQ ID NO: 444974 - protein, 20 aa, Homo sapiens
  CDR3 for beta chain variable domain of TCR clone 222487 (TRBV7-8, TRBJ2-2)
CASSHLFPGPTIHITGELFF

SEQ ID NO: 444975 - protein, 17 aa, Homo sapiens
  CDR3 for alpha chain variable domain of TCR clone 222488 (TRAV13-1, TRAJ52)
CAASSGAGGTSYGKLTF

SEQ ID NO: 444976 - protein, 15 aa, Homo sapiens
  CDR3 for beta chain variable domain of TCR clone 222488 (TRBV12-4, TRBJ1-5)
CAYTRGSGFGQPQHF

SEQ ID NO: 444977 - protein, 14 aa, Homo sapiens
  CDR3 for alpha chain variable domain of TCR clone 222489 (TRAV12-3, TRAJ47)
CAMSVREYGNKLVF

SEQ ID NO: 444978 - protein, 16 aa, Homo sapiens
  CDR3 for beta chain variable domain of TCR clone 222489 (TRBV5-1, TRBJ2-5)
CASSRGTGEVGETQYF

SEQ ID NO: 444979 - protein, 11 aa, Homo sapiens
  CDR3 for alpha chain variable domain of TCR clone 222490 (TRAV9-2, TRAJ7)
CALSGNNRLAF

SEQ ID NO: 444980 - protein, 15 aa, Homo sapiens
  CDR3 for beta chain variable domain of TCR clone 222490 (TRBV20-1, TRBJ1-5)
CSARVGRVVCQPQHF

SEQ ID NO: 444981 - protein, 14 aa, Homo sapiens
  CDR3 for alpha chain variable domain of TCR clone 222491 (TRAV26-1, TRAJ38)
CIADNAGNNRKLIW

SEQ ID NO: 444982 - protein, 15 aa, Homo sapiens
  CDR3 for beta chain variable domain of TCR clone 222491 (TRBV11-2, TRBJ2-2)
CASRGLAANTGELFF

SEQ ID NO: 444983 - protein, 19 aa, Homo sapiens
  CDR3 for alpha chain variable domain of TCR clone 222492 (TRAV26-1, TRAJ22)
CCVLASSEYRSGSARQLTF

SEQ ID NO: 444984 - protein, 13 aa, Homo sapiens
  CDR3 for beta chain variable domain of TCR clone 222492 (TRBV7-9, TRBJ1-2)
CASSLKQNYGYTF

SEQ ID NO: 444985 - protein, 13 aa, Homo sapiens
  CDR3 for alpha chain variable domain of TCR clone 222493 (TRAV8-3, TRAJ28)
CAVGAVGSYQLTF

SEQ ID NO: 444986 - protein, 16 aa, Homo sapiens
  CDR3 for beta chain variable domain of TCR clone 222493 (TRBV5-1, TRBJ1-1)
CASSSGGNSLNTEAFF

SEQ ID NO: 444987 - protein, 17 aa, Homo sapiens
  CDR3 for alpha chain variable domain of TCR clone 222494 (TRAV23/DV6, TRAJ57)
CAASSTLSQGGSEKLVC

SEQ ID NO: 444988 - protein, 14 aa, Homo sapiens
  CDR3 for beta chain variable domain of TCR clone 222494 (TRBV25-1, TRBJ1-1)
CASTHLGGNTEAFF

SEQ ID NO: 444989 - protein, 14 aa, Homo sapiens
  CDR3 for alpha chain variable domain of TCR clone 222495 (TRAV1-2, TRAJ8)
CAVREDTGFQKLVF

SEQ ID NO: 444990 - protein, 17 aa, Homo sapiens
  CDR3 for beta chain variable domain of TCR clone 222495 (TRBV11-2, TRBJ2-1)
CASSLYPPGVGYNEQFF

SEQ ID NO: 444991 - protein, 17 aa, Homo sapiens
  CDR3 for alpha chain variable domain of TCR clone 222496 (TRAV1-1, TRAJ11)
CAGYSTLTFGKGTMLLV

SEQ ID NO: 444992 - protein, 15 aa, Homo sapiens
  CDR3 for beta chain variable domain of TCR clone 222496 (TRBV6-3, TRBJ2-7)
CASSSPGTVFYEQYF

SEQ ID NO: 444993 - protein, 16 aa, Homo sapiens
  CDR3 for alpha chain variable domain of TCR clone 222497 (TRAV30, TRAJ24)
CGTEIVDADSWGKFQF

SEQ ID NO: 444994 - protein, 14 aa, Homo sapiens
  CDR3 for beta chain variable domain of TCR clone 222497 (TRBV7-2, TRBJ1-1)
CASSFYDLNTEAFF

SEQ ID NO: 444995 - protein, 15 aa, Homo sapiens
  CDR3 for alpha chain variable domain of TCR clone 222498 (TRAV17, TRAJ4)
CATGTWSGGYNKLIF

SEQ ID NO: 444996 - protein, 13 aa, Homo sapiens
  CDR3 for beta chain variable domain of TCR clone 222498 (TRBV19, TRBJ2-2)
CASSYGYTGELFF

SEQ ID NO: 444997 - protein, 11 aa, Homo sapiens
  CDR3 for alpha chain variable domain of TCR clone 222499 (TRAV2, TRAJ13)
CASGGYLKVTF

SEQ ID NO: 444998 - protein, 16 aa, Homo sapiens
  CDR3 for beta chain variable domain of TCR clone 222499 (TRBV2, TRBJ2-1)
CASSVGGSLSYNEQFF

SEQ ID NO: 444999 - protein, 10 aa, Homo sapiens
  CDR3 for alpha chain variable domain of TCR clone 222500 (TRAV12-2, TRAJ43)
CAVKVLSMRF

SEQ ID NO: 445000 - protein, 13 aa, Homo sapiens
  CDR3 for beta chain variable domain of TCR clone 222500 (TRBV27, TRBJ1-4)
CASSLMGDEKLFF

SEQ ID NO: 445001 - protein, 17 aa, Homo sapiens
  CDR3 for alpha chain variable domain of TCR clone 222501 (TRAV38-1, TRAJ57)
CAFMKHGLQGGSEKLVF

SEQ ID NO: 445002 - protein, 13 aa, Homo sapiens
  CDR3 for beta chain variable domain of TCR clone 222501 (TRBV7-9, TRBJ1-2)
CASSLKQNYGYTF

SEQ ID NO: 445003 - protein, 14 aa, Homo sapiens
  CDR3 for alpha chain variable domain of TCR clone 222502 (TRAV38-1, TRAJ40)
CALRPTSGTYNYIF

SEQ ID NO: 445004 - protein, 12 aa, Homo sapiens
  CDR3 for beta chain variable domain of TCR clone 222502 (TRBV5-1, TRBJ1-2)
CASSQDTYGYTF

SEQ ID NO: 445005 - protein, 17 aa, Homo sapiens
  CDR3 for alpha chain variable domain of TCR clone 222503 (TRAV1-2, TRAJ6)
CAVGDTTRTGGSFIPTF

SEQ ID NO: 445006 - protein, 12 aa, Homo sapiens
  CDR3 for beta chain variable domain of TCR clone 222503 (TRBV24-1, TRBJ2-3)
CATSSGGDTQYF

SEQ ID NO: 445007 - protein, 16 aa, Homo sapiens
  CDR3 for alpha chain variable domain of TCR clone 222504 (TRAV4, TRAJ9)
CLVVDPNRPGGFKTIF

SEQ ID NO: 445008 - protein, 14 aa, Homo sapiens
  CDR3 for beta chain variable domain of TCR clone 222504 (TRBV20-1, TRBJ1-1)
CSAQTRIGGTEAFF

SEQ ID NO: 445009 - protein, 13 aa, Homo sapiens
  CDR3 for alpha chain variable domain of TCR clone 222505 (TRAV3, TRAJ20)
CAVRDGGDYKLSF

SEQ ID NO: 445010 - protein, 15 aa, Homo sapiens
  CDR3 for beta chain variable domain of TCR clone 222505 (TRBV4-1, TRBJ1-4)
CASSDTGGTNEKLFF

SEQ ID NO: 445011 - protein, 11 aa, Homo sapiens
  CDR3 for alpha chain variable domain of TCR clone 222506 (TRAV13-2, TRAJ36)
CAETGANNLFF

SEQ ID NO: 445012 - protein, 13 aa, Homo sapiens
  CDR3 for beta chain variable domain of TCR clone 222506 (TRBV7-9, TRBJ2-4)
CTTEGLAGNIQYF

SEQ ID NO: 445013 - protein, 15 aa, Homo sapiens
  CDR3 for alpha chain variable domain of TCR clone 222507 (TRAV3, TRAJ5)
CAVRDLQTGRRALTF

SEQ ID NO: 445014 - protein, 13 aa, Homo sapiens
  CDR3 for beta chain variable domain of TCR clone 222507 (TRBV12-4, TRBJ2-7)
CASSPTETYEQYF

SEQ ID NO: 445015 - protein, 12 aa, Homo sapiens
  CDR3 for alpha chain variable domain of TCR clone 222508 (TRAV21, TRAJ39)
CAADNAGNMLTF

SEQ ID NO: 445016 - protein, 14 aa, Homo sapiens
  CDR3 for beta chain variable domain of TCR clone 222508 (TRBV5-1, TRBJ2-7)
CASSLEGRTYEQYF

SEQ ID NO: 445017 - protein, 15 aa, Homo sapiens
  CDR3 for alpha chain variable domain of TCR clone 222509 (TRAV20, TRAJ58)
CSVQDLETSGSRLTF

SEQ ID NO: 445018 - protein, 12 aa, Homo sapiens
  CDR3 for beta chain variable domain of TCR clone 222509 (TRBV9, TRBJ2-2)
CASSARTRELFF

SEQ ID NO: 445019 - protein, 14 aa, Homo sapiens
  CDR3 for alpha chain variable domain of TCR clone 222510 (TRAV12-2, TRAJ17)
CAVLFKAAGNKLTL

SEQ ID NO: 445020 - protein, 15 aa, Homo sapiens
  CDR3 for beta chain variable domain of TCR clone 222510 (TRBV6-5, TRBJ2-1)
CASSYDAGAGNEQFF

SEQ ID NO: 445021 - protein, 14 aa, Homo sapiens
  CDR3 for alpha chain variable domain of TCR clone 222511 (TRAV8-4, TRAJ8)
CAVSLNTGFQKLVF

SEQ ID NO: 445022 - protein, 15 aa, Homo sapiens
  CDR3 for beta chain variable domain of TCR clone 222511 (TRBV5-7, TRBJ1-5)
CASSYGKLWDQPQHF

SEQ ID NO: 445023 - protein, 12 aa, Homo sapiens
  CDR3 for alpha chain variable domain of TCR clone 222512 (TRAV23/DV6, TRAJ16)
CAATGTGQKLRF

SEQ ID NO: 445024 - protein, 12 aa, Homo sapiens
  CDR3 for beta chain variable domain of TCR clone 222512 (TRBV11-2, TRBJ2-2)
CASSLGGGELFF

SEQ ID NO: 445025 - protein, 12 aa, Homo sapiens
  CDR3 for alpha chain variable domain of TCR clone 222513 (TRAV17, TRAJ20)
CATALNDYKLSF

SEQ ID NO: 445026 - protein, 12 aa, Homo sapiens
  CDR3 for beta chain variable domain of TCR clone 222513 (TRBV10-3, TRBJ2-7)
CDHGADSGEQYF

SEQ ID NO: 445027 - protein, 11 aa, Homo sapiens
  CDR3 for alpha chain variable domain of TCR clone 222514 (TRAV1-2, TRAJ40)
CAVPGTYKYIS

SEQ ID NO: 445028 - protein, 13 aa, Homo sapiens
  CDR3 for beta chain variable domain of TCR clone 222514 (TRBV25-1, TRBJ2-5)
CASSESGRETQYF

SEQ ID NO: 445029 - protein, 16 aa, Homo sapiens
  CDR3 for alpha chain variable domain of TCR clone 222515 (TRAV12-3, TRAJ53)
CAMSPGSGGSNYKLTL

SEQ ID NO: 445030 - protein, 14 aa, Homo sapiens
  CDR3 for beta chain variable domain of TCR clone 222515 (TRBV4-2, TRBJ2-1)
CASGLDRAYNEQFF

SEQ ID NO: 445031 - protein, 16 aa, Homo sapiens
  CDR3 for alpha chain variable domain of TCR clone 222516 (TRAV30, TRAJ24)
CGTEIVDADSWGKFQF

SEQ ID NO: 445032 - protein, 12 aa, Homo sapiens
  CDR3 for beta chain variable domain of TCR clone 222516 (TRBV27, TRBJ2-1)
CASRGVYNEQFF

SEQ ID NO: 445033 - protein, 16 aa, Homo sapiens
  CDR3 for alpha chain variable domain of TCR clone 222517 (TRAV12-3, TRAJ53)
CAISPGSGGSNYKLTF

SEQ ID NO: 445034 - protein, 16 aa, Homo sapiens
  CDR3 for beta chain variable domain of TCR clone 222517 (TRBV4-2, TRBJ1-1)
CASRPLDGGGDTEAFF

SEQ ID NO: 445035 - protein, 13 aa, Homo sapiens
  CDR3 for alpha chain variable domain of TCR clone 222518 (TRAV2, TRAJ40)
CAVVTSGTYKCIF

SEQ ID NO: 445036 - protein, 18 aa, Homo sapiens
  CDR3 for beta chain variable domain of TCR clone 222518 (TRBV11-2, TRBJ2-3)
CASSLGGASRGAPNTQYF

SEQ ID NO: 445037 - protein, 15 aa, Homo sapiens
  CDR3 for alpha chain variable domain of TCR clone 222519 (TRAV23/DV6, TRAJ57)
CAASSTLSQGGSEKL

SEQ ID NO: 445038 - protein, 15 aa, Homo sapiens
  CDR3 for beta chain variable domain of TCR clone 222519 (TRBV27, TRBJ1-4)
CASSAQQDLNEKLFF

SEQ ID NO: 445039 - protein, 17 aa, Homo sapiens
  CDR3 for alpha chain variable domain of TCR clone 222520 (TRAV3, TRAJ6)
CAVRDGPRAVGSYIPTF

SEQ ID NO: 445040 - protein, 17 aa, Homo sapiens
  CDR3 for beta chain variable domain of TCR clone 222520 (TRBV20-1, TRBJ2-1)
CSAPPRLAGTRYNEQFF

SEQ ID NO: 445041 - protein, 14 aa, Homo sapiens
  CDR3 for alpha chain variable domain of TCR clone 222521 (TRAV8-6, TRAJ54)
CAVIPALGAQKLVF

SEQ ID NO: 445042 - protein, 15 aa, Homo sapiens
  CDR3 for beta chain variable domain of TCR clone 222521 (TRBV4-1, TRBJ1-6)
CASSAGQGYNSPLHF

SEQ ID NO: 445043 - protein, 14 aa, Homo sapiens
  CDR3 for alpha chain variable domain of TCR clone 222522 (TRAV29/DV5, TRAJ49)
CAASLSNTGNQFYF

SEQ ID NO: 445044 - protein, 21 aa, Homo sapiens
  CDR3 for beta chain variable domain of TCR clone 222522 (TRBV9, TRBJ2-5)
CVSRGRLAGGPEDPVLRARHA

SEQ ID NO: 445045 - protein, 17 aa, Homo sapiens
  CDR3 for alpha chain variable domain of TCR clone 222523 (TRAV3, TRAJ6)
CAVRDGPRAGGSYIPPF

SEQ ID NO: 445046 - protein, 13 aa, Homo sapiens
  CDR3 for beta chain variable domain of TCR clone 222523 (TRBV18, TRBJ1-1)
CASSGGRNTEAFF

SEQ ID NO: 445047 - protein, 11 aa, Homo sapiens
  CDR3 for alpha chain variable domain of TCR clone 222524 (TRAV17, TRAJ31)
CATSNNARLMF

SEQ ID NO: 445048 - protein, 16 aa, Homo sapiens
  CDR3 for beta chain variable domain of TCR clone 222524 (TRBV7-8, TRBJ2-4)
CASSAERTLAKNIHYF

SEQ ID NO: 445049 - protein, 14 aa, Homo sapiens
  CDR3 for alpha chain variable domain of TCR clone 222525 (TRAV12-2, TRAJ17)
CAVLFKAAGNKLTF

SEQ ID NO: 445050 - protein, 19 aa, Homo sapiens
  CDR3 for beta chain variable domain of TCR clone 222525 (TRBV2, TRBJ2-7)
CASSDDETSGRANDYEQYF

SEQ ID NO: 445051 - protein, 13 aa, Homo sapiens
  CDR3 for alpha chain variable domain of TCR clone 222526 (TRAV21, TRAJ36)
CAVIKTGANNLFF

SEQ ID NO: 445052 - protein, 15 aa, Homo sapiens
  CDR3 for beta chain variable domain of TCR clone 222526 (TRBV18, TRBJ2-5)
CASTDRGPRQETQYF

SEQ ID NO: 445053 - protein, 10 aa, Homo sapiens
  CDR3 for alpha chain variable domain of TCR clone 222527 (TRAV23/DV6, TRAJ57)
CAASSTLSQG

SEQ ID NO: 445054 - protein, 12 aa, Homo sapiens
  CDR3 for beta chain variable domain of TCR clone 222527 (TRBV5-1, TRBJ2-7)
CASSLDSYEQYF

SEQ ID NO: 445055 - protein, 11 aa, Homo sapiens
  CDR3 for alpha chain variable domain of TCR clone 222528 (TRAV12-3, TRAJ43)
CAMSVSNDMRF

SEQ ID NO: 445056 - protein, 13 aa, Homo sapiens
  CDR3 for beta chain variable domain of TCR clone 222528 (TRBV20-1, TRBJ1-3)
CSAGAYSGNTIYF

SEQ ID NO: 445057 - protein, 16 aa, Homo sapiens
  CDR3 for alpha chain variable domain of TCR clone 222529 (TRAV3, TRAJ37)
CAVRPHASGNTGKLIF

SEQ ID NO: 445058 - protein, 17 aa, Homo sapiens
  CDR3 for beta chain variable domain of TCR clone 222529 (TRBV20-1, TRBJ2-1)
CSASSSGLTGSYNEQFF

SEQ ID NO: 445059 - protein, 12 aa, Homo sapiens
  CDR3 for alpha chain variable domain of TCR clone 222530 (TRAV3, TRAJ34)
CAVLGNTDKLIF

SEQ ID NO: 445060 - protein, 15 aa, Homo sapiens
  CDR3 for beta chain variable domain of TCR clone 222530 (TRBV20-1, TRBJ2-7)
CSARDRVSGMDEQYF

SEQ ID NO: 445061 - protein, 15 aa, Homo sapiens
  CDR3 for alpha chain variable domain of TCR clone 222531 (TRAV10, TRAJ6)
RVVRPRTGGSYIPTF

SEQ ID NO: 445062 - protein, 15 aa, Homo sapiens
  CDR3 for beta chain variable domain of TCR clone 222531 (TRBV20-1, TRBJ2-7)
CSARDRVSGMDEQYF

SEQ ID NO: 445063 - protein, 14 aa, Homo sapiens
  CDR3 for alpha chain variable domain of TCR clone 222532 (TRAV12-2, TRAJ15)
CAPHTGQAGTALIF

SEQ ID NO: 445064 - protein, 13 aa, Homo sapiens
  CDR3 for beta chain variable domain of TCR clone 222532 (TRBV12-4, TRBJ1-5)
CASSPDRAQAQHF

SEQ ID NO: 445065 - protein, 15 aa, Homo sapiens
  CDR3 for alpha chain variable domain of TCR clone 222533 (TRAV35, TRAJ20)
CAGELVGSNDYKLSF

SEQ ID NO: 445066 - protein, 13 aa, Homo sapiens
  CDR3 for beta chain variable domain of TCR clone 222533 (TRBV19, TRBJ2-7)
CASSKTGTHEQYF

SEQ ID NO: 445067 - protein, 13 aa, Homo sapiens
  CDR3 for alpha chain variable domain of TCR clone 222534 (TRAV12-1, TRAJ29)
CVVNGPGNTPLVF

SEQ ID NO: 445068 - protein, 13 aa, Homo sapiens
  CDR3 for beta chain variable domain of TCR clone 222534 (TRBV7-2, TRBJ2-5)
CASSRGGLKTQYF

SEQ ID NO: 445069 - protein, 11 aa, Homo sapiens
  CDR3 for alpha chain variable domain of TCR clone 222535 (TRAV1-2, TRAJ20)
CAVANDYKLGF

SEQ ID NO: 445070 - protein, 11 aa, Homo sapiens
  CDR3 for beta chain variable domain of TCR clone 222535 (TRBV19, TRBJ1-2)
CASSISSGYTF

SEQ ID NO: 445071 - protein, 13 aa, Homo sapiens
  CDR3 for alpha chain variable domain of TCR clone 222536 (TRAV12-3, TRAJ29)
CNDLAFMKHTSCL

SEQ ID NO: 445072 - protein, 16 aa, Homo sapiens
  CDR3 for beta chain variable domain of TCR clone 222536 (TRBV28, TRBJ2-7)
CASSSGTSGGGYEQYF

SEQ ID NO: 445073 - protein, 15 aa, Homo sapiens
  CDR3 for alpha chain variable domain of TCR clone 222537 (TRAV3, TRAJ22)
CAVRDRGGSARQLTF

SEQ ID NO: 445074 - protein, 14 aa, Homo sapiens
  CDR3 for beta chain variable domain of TCR clone 222537 (TRBV20-1, TRBJ2-1)
CSARRGGSYNEQFF

SEQ ID NO: 445075 - protein, 11 aa, Homo sapiens
  CDR3 for alpha chain variable domain of TCR clone 222538 (TRAV17, TRAJ9)
CGFTGGFKTIF

SEQ ID NO: 445076 - protein, 15 aa, Homo sapiens
  CDR3 for beta chain variable domain of TCR clone 222538 (TRBV19, TRBJ2-4)
CASRGPRRGENIQYF

SEQ ID NO: 445077 - protein, 18 aa, Homo sapiens
  CDR3 for alpha chain variable domain of TCR clone 222539 (TRAV3, TRAJ32)
CAVREIRGYGGATNKLIF

SEQ ID NO: 445078 - protein, 15 aa, Homo sapiens
  CDR3 for beta chain variable domain of TCR clone 222539 (TRBV12-4, TRBJ2-2)
CASSLGVRHTGELFF

SEQ ID NO: 445079 - protein, 18 aa, Homo sapiens
  CDR3 for alpha chain variable domain of TCR clone 222540 (TRAV21, TRAJ52)
CAVRPSPAGGTSSGKLTF

SEQ ID NO: 445080 - protein, 13 aa, Homo sapiens
  CDR3 for beta chain variable domain of TCR clone 222540 (TRBV20-1, TRBJ2-5)
CSAREAFQETQYF

SEQ ID NO: 445081 - protein, 14 aa, Homo sapiens
  CDR3 for alpha chain variable domain of TCR clone 222541 (TRAV12-2, TRAJ13)
CAVKKTGGYQKVTF

SEQ ID NO: 445082 - protein, 11 aa, Homo sapiens
  CDR3 for beta chain variable domain of TCR clone 222541 (TRBV7-9, TRBJ2-3)
CASSGPDTQYF

SEQ ID NO: 445083 - protein, 11 aa, Homo sapiens
  CDR3 for alpha chain variable domain of TCR clone 222542 (TRAV13-2, TRAJ23)
CRASQGGKLIF

SEQ ID NO: 445084 - protein, 15 aa, Homo sapiens
  CDR3 for beta chain variable domain of TCR clone 222542 (TRBV15, TRBJ2-1)
CATSRPGQGLHEQFF

SEQ ID NO: 445085 - protein, 13 aa, Homo sapiens
  CDR3 for alpha chain variable domain of TCR clone 222543 (TRAV13-1, TRAJ39)
CSKYSNAGNMLTF

SEQ ID NO: 445086 - protein, 13 aa, Homo sapiens
  CDR3 for beta chain variable domain of TCR clone 222543 (TRBV12-4, TRBJ1-2)
CASSLRQGKGYTF

SEQ ID NO: 445087 - protein, 14 aa, Homo sapiens
  CDR3 for alpha chain variable domain of TCR clone 222544 (TRAV1-2, TRAJ6)
CAVSLSGGSYILAF

SEQ ID NO: 445088 - protein, 15 aa, Homo sapiens
  CDR3 for beta chain variable domain of TCR clone 222544 (TRBV7-9, TRBJ2-7)
CASSPGGGLTYEQYF

SEQ ID NO: 445089 - protein, 13 aa, Homo sapiens
  CDR3 for alpha chain variable domain of TCR clone 222545 (TRAV27, TRAJ45)
CRSSGGGADGLTF

SEQ ID NO: 445090 - protein, 13 aa, Homo sapiens
  CDR3 for beta chain variable domain of TCR clone 222545 (TRBV4-1, TRBJ2-2)
CASSQENTGELFF

SEQ ID NO: 445091 - protein, 20 aa, Homo sapiens
  CDR3 for alpha chain variable domain of TCR clone 222546 (TRAV16, TRAJ32)
CSRGRLSHVLGGGATNKLIF

SEQ ID NO: 445092 - protein, 11 aa, Homo sapiens
  CDR3 for beta chain variable domain of TCR clone 222546 (TRBV19, TRBJ1-1)
CASSIGSEAFF

SEQ ID NO: 445093 - protein, 22 aa, Homo sapiens
  CDR3 for alpha chain variable domain of TCR clone 222547 (TRAV8-3, TRAJ32)
CAVEVVLKTSSSLELALCLLSS

SEQ ID NO: 445094 - protein, 12 aa, Homo sapiens
  CDR3 for beta chain variable domain of TCR clone 222547 (TRBV7-8, TRBJ2-7)
CASSLGDREQYF

SEQ ID NO: 445095 - protein, 17 aa, Homo sapiens
  CDR3 for alpha chain variable domain of TCR clone 222548 (TRAV3, TRAJ6)
CAVRDGPRAGGSYTPTF

SEQ ID NO: 445096 - protein, 16 aa, Homo sapiens
  CDR3 for beta chain variable domain of TCR clone 222548 (TRBV15, TRBJ2-3)
CATSRDLGIVTDTQYF

SEQ ID NO: 445097 - protein, 16 aa, Homo sapiens
  CDR3 for alpha chain variable domain of TCR clone 222549 (TRAV30, TRAJ24)
CGTEIVDAESWGKFQF

SEQ ID NO: 445098 - protein, 16 aa, Homo sapiens
  CDR3 for beta chain variable domain of TCR clone 222549 (TRBV6-1, TRBJ2-1)
CASILRQGSSYNEQFF

SEQ ID NO: 445099 - protein, 10 aa, Homo sapiens
  CDR3 for alpha chain variable domain of TCR clone 222550 (TRAV1-2, TRAJ31)
CAFFDARLMF

SEQ ID NO: 445100 - protein, 15 aa, Homo sapiens
  CDR3 for beta chain variable domain of TCR clone 222550 (TRBV4-1, TRBJ1-4)
CASSDTGGTNEKLYF

SEQ ID NO: 445101 - protein, 15 aa, Homo sapiens
  CDR3 for alpha chain variable domain of TCR clone 222551 (TRAV3, TRAJ29)
CAERDINSGNTPLVF

SEQ ID NO: 445102 - protein, 16 aa, Homo sapiens
  CDR3 for beta chain variable domain of TCR clone 222551 (TRBV4-1, TRBJ2-5)
CASSQTFYGDQETQYF

SEQ ID NO: 445103 - protein, 14 aa, Homo sapiens
  CDR3 for alpha chain variable domain of TCR clone 222552 (TRAV12-2, TRAJ45)
CARPERGGADGLTF

SEQ ID NO: 445104 - protein, 14 aa, Homo sapiens
  CDR3 for beta chain variable domain of TCR clone 222552 (TRBV18, TRBJ1-5)
CASSPGNSNQPQHF

SEQ ID NO: 445105 - protein, 16 aa, Homo sapiens
  CDR3 for alpha chain variable domain of TCR clone 222553 (TRAV3, TRAJ37)
CAVRGKGSGNTGKLIF

SEQ ID NO: 445106 - protein, 13 aa, Homo sapiens
  CDR3 for beta chain variable domain of TCR clone 222553 (TRBV12-4, TRBJ2-5)
CASSPGTVETQYF

SEQ ID NO: 445107 - protein, 13 aa, Homo sapiens
  CDR3 for alpha chain variable domain of TCR clone 222554 (TRAV27, TRAJ43)
CAGAGNNNNDMRF

SEQ ID NO: 445108 - protein, 14 aa, Homo sapiens
  CDR3 for beta chain variable domain of TCR clone 222554 (TRBV7-2, TRBJ2-7)
CASRSQGGAYEQYF

SEQ ID NO: 445109 - protein, 13 aa, Homo sapiens
  CDR3 for alpha chain variable domain of TCR clone 222555 (TRAV36/DV7, TRAJ7)
CAGTRYGNNRLAF

SEQ ID NO: 445110 - protein, 14 aa, Homo sapiens
  CDR3 for beta chain variable domain of TCR clone 222555 (TRBV19, TRBJ2-1)
CAGPTFVLSGEQFF

SEQ ID NO: 445111 - protein, 13 aa, Homo sapiens
  CDR3 for alpha chain variable domain of TCR clone 222556 (TRAV27, TRAJ45)
CRSSGGDADGLTF

SEQ ID NO: 445112 - protein, 11 aa, Homo sapiens
  CDR3 for beta chain variable domain of TCR clone 222556 (TRBV19, TRBJ1-1)
CASSIGSEAFF

SEQ ID NO: 445113 - protein, 16 aa, Homo sapiens
  CDR3 for alpha chain variable domain of TCR clone 222557 (TRAV30, TRAJ24)
CGTEIVDADSWGKFQF

SEQ ID NO: 445114 - protein, 17 aa, Homo sapiens
  CDR3 for beta chain variable domain of TCR clone 222557 (TRBV7-2, TRBJ2-7)
CASSPCGSSGPSPEQYF

SEQ ID NO: 445115 - protein, 15 aa, Homo sapiens
  CDR3 for alpha chain variable domain of TCR clone 222558 (TRAV1-2, TRAJ20)
CLLPLWCASDYKLSF

SEQ ID NO: 445116 - protein, 18 aa, Homo sapiens
  CDR3 for beta chain variable domain of TCR clone 222558 (TRBV20-1, TRBJ2-6)
CSAETTPTHGSGANVLTF

SEQ ID NO: 445117 - protein, 13 aa, Homo sapiens
  CDR3 for alpha chain variable domain of TCR clone 222559 (TRAV12-2, TRAJ52)
CAVRGTSYGKLTF

SEQ ID NO: 445118 - protein, 17 aa, Homo sapiens
  CDR3 for beta chain variable domain of TCR clone 222559 (TRBV11-2, TRBJ2-1)
CASSLSPPGVEYNEQFF

SEQ ID NO: 445119 - protein, 12 aa, Homo sapiens
  CDR3 for alpha chain variable domain of TCR clone 222560 (TRAV12-3, TRAJ17)
CAMTPTGNKLTF

SEQ ID NO: 445120 - protein, 13 aa, Homo sapiens
  CDR3 for beta chain variable domain of TCR clone 222560 (TRBV10-3, TRBJ2-7)
CASKLAVNYEQYF

SEQ ID NO: 445121 - protein, 12 aa, Homo sapiens
  CDR3 for alpha chain variable domain of TCR clone 222561 (TRAV16, TRAJ27)
CSLNTNAGKSTF

SEQ ID NO: 445122 - protein, 14 aa, Homo sapiens
  CDR3 for beta chain variable domain of TCR clone 222561 (TRBV5-1, TRBJ2-7)
CASSLGVRAYEQYF

SEQ ID NO: 445123 - protein, 12 aa, Homo sapiens
  CDR3 for alpha chain variable domain of TCR clone 222562 (TRAV1-2, TRAJ33)
CAALDSNYQLTW

SEQ ID NO: 445124 - protein, 16 aa, Homo sapiens
  CDR3 for beta chain variable domain of TCR clone 222562 (TRBV6-4, TRBJ1-2)
CASSEAVGDPNYGDTF

SEQ ID NO: 445125 - protein, 13 aa, Homo sapiens
  CDR3 for alpha chain variable domain of TCR clone 222563 (TRAV13-2, TRAJ48)
CAEVDFGNEKLTF

SEQ ID NO: 445126 - protein, 15 aa, Homo sapiens
  CDR3 for beta chain variable domain of TCR clone 222563 (TRBV7-9, TRBJ1-6)
CASSAPGRGNSPLHF

SEQ ID NO: 445127 - protein, 14 aa, Homo sapiens
  CDR3 for alpha chain variable domain of TCR clone 222564 (TRAV34, TRAJ44)
CGADVTGTASKLTF

SEQ ID NO: 445128 - protein, 17 aa, Homo sapiens
  CDR3 for beta chain variable domain of TCR clone 222564 (TRBV28, TRBJ2-5)
CASSRQGGLAGAETQYF

SEQ ID NO: 445129 - protein, 17 aa, Homo sapiens
  CDR3 for alpha chain variable domain of TCR clone 222565 (TRAV26-1, TRAJ22)
CIVTVPSHSGSARQLTF

SEQ ID NO: 445130 - protein, 16 aa, Homo sapiens
  CDR3 for beta chain variable domain of TCR clone 222565 (TRBV28, TRBJ2-1)
CASRRSGRVVGNEQFF

SEQ ID NO: 445131 - protein, 14 aa, Homo sapiens
  CDR3 for alpha chain variable domain of TCR clone 222566 (TRAV36/DV7, TRAJ44)
CCGANTGTASKLTF

SEQ ID NO: 445132 - protein, 15 aa, Homo sapiens
  CDR3 for beta chain variable domain of TCR clone 222566 (TRBV6-5, TRBJ2-1)
CASSYDAGAGNEQFF

SEQ ID NO: 445133 - protein, 13 aa, Homo sapiens
  CDR3 for alpha chain variable domain of TCR clone 222567 (TRAV12-3, TRAJ54)
CAMSVQGAQKLVI

SEQ ID NO: 445134 - protein, 13 aa, Homo sapiens
  CDR3 for beta chain variable domain of TCR clone 222567 (TRBV2, TRBJ1-6)
CADSGSYNSPLHF

SEQ ID NO: 445135 - protein, 12 aa, Homo sapiens
  CDR3 for alpha chain variable domain of TCR clone 222568 (TRAV17, TRAJ20)
CATQANGYKLSF

SEQ ID NO: 445136 - protein, 12 aa, Homo sapiens
  CDR3 for beta chain variable domain of TCR clone 222568 (TRBV6-1, TRBJ1-1)
CASNSPTAEAFF

SEQ ID NO: 445137 - protein, 12 aa, Homo sapiens
  CDR3 for alpha chain variable domain of TCR clone 222569 (TRAV12-3, TRAJ4)
CAMTGAGPRLAV

SEQ ID NO: 445138 - protein, 14 aa, Homo sapiens
  CDR3 for beta chain variable domain of TCR clone 222569 (TRBV10-3, TRBJ1-1)
CAISDTDRGVEAFF

SEQ ID NO: 445139 - protein, 14 aa, Homo sapiens
  CDR3 for alpha chain variable domain of TCR clone 222570 (TRAV36/DV7, TRAJ40)
CAVETTSGTYKYIF

SEQ ID NO: 445140 - protein, 17 aa, Homo sapiens
  CDR3 for beta chain variable domain of TCR clone 222570 (TRBV25-1, TRBJ2-7)
CASSYARVVFSSYEQYF

SEQ ID NO: 445141 - protein, 11 aa, Homo sapiens
  CDR3 for alpha chain variable domain of TCR clone 222571 (TRAV22, TRAJ30)
CAGNRDDKIIF

SEQ ID NO: 445142 - protein, 13 aa, Homo sapiens
  CDR3 for beta chain variable domain of TCR clone 222571 (TRBV4-1, TRBJ2-2)
CASSQENTGELFF

SEQ ID NO: 445143 - protein, 11 aa, Homo sapiens
  CDR3 for alpha chain variable domain of TCR clone 222572 (TRAV2, TRAJ33)
CAVDSNYQLIW

SEQ ID NO: 445144 - protein, 14 aa, Homo sapiens
  CDR3 for beta chain variable domain of TCR clone 222572 (TRBV19, TRBJ1-2)
CSSVGQVLNYGYTF

SEQ ID NO: 445145 - protein, 13 aa, Homo sapiens
  CDR3 for alpha chain variable domain of TCR clone 222573 (TRAV12-3, TRAJ48)
CAMSAVGNEKLTF

SEQ ID NO: 445146 - protein, 11 aa, Homo sapiens
  CDR3 for beta chain variable domain of TCR clone 222573 (TRBV3-1, TRBJ1-1)
CASSSTSEAFF

SEQ ID NO: 445147 - protein, 10 aa, Homo sapiens
  CDR3 for alpha chain variable domain of TCR clone 222574 (TRAV14/DV4, TRAJ48)
CAPRREKLTF

SEQ ID NO: 445148 - protein, 17 aa, Homo sapiens
  CDR3 for beta chain variable domain of TCR clone 222574 (TRBV28, TRBJ2-5)
CASSTPEGDALQETQYF

SEQ ID NO: 445149 - protein, 16 aa, Homo sapiens
  CDR3 for alpha chain variable domain of TCR clone 222575 (TRAV8-3, TRAJ13)
CAVGAYPSGGYQKVTF

SEQ ID NO: 445150 - protein, 15 aa, Homo sapiens
  CDR3 for beta chain variable domain of TCR clone 222575 (TRBV4-1, TRBJ2-3)
CASSRGQGIPDTQYF

SEQ ID NO: 445151 - protein, 13 aa, Homo sapiens
  CDR3 for alpha chain variable domain of TCR clone 222576 (TRAV30, TRAJ24)
CDTVTDSWGKLQF

SEQ ID NO: 445152 - protein, 16 aa, Homo sapiens
  CDR3 for beta chain variable domain of TCR clone 222576 (TRBV7-3, TRBJ2-2)
CASSLKRGTLSGELFF

SEQ ID NO: 445153 - protein, 20 aa, Homo sapiens
  CDR3 for alpha chain variable domain of TCR clone 222577 (TRAV26-1, TRAJ42)
CCVLLHRKTYYGGSQGSLIF

SEQ ID NO: 445154 - protein, 13 aa, Homo sapiens
  CDR3 for beta chain variable domain of TCR clone 222577 (TRBV7-2, TRBJ1-5)
CASSTQGSQPQHF

SEQ ID NO: 445155 - protein, 14 aa, Homo sapiens
  CDR3 for alpha chain variable domain of TCR clone 222578 (TRAV12-3, TRAJ12)
CAMSALDSSYRLIF

SEQ ID NO: 445156 - protein, 16 aa, Homo sapiens
  CDR3 for beta chain variable domain of TCR clone 222578 (TRBV7-9, TRBJ2-3)
CASSLQGNPGTDTQYF

SEQ ID NO: 445157 - protein, 11 aa, Homo sapiens
  CDR3 for alpha chain variable domain of TCR clone 222579 (TRAV12-1, TRAJ30)
CVVNGQDKIIF

SEQ ID NO: 445158 - protein, 12 aa, Homo sapiens
  CDR3 for beta chain variable domain of TCR clone 222579 (TRBV28, TRBJ2-3)
CASSLYRDTQYF

SEQ ID NO: 445159 - protein, 15 aa, Homo sapiens
  CDR3 for alpha chain variable domain of TCR clone 222580 (TRAV26-1, TRAJ29)
CIVRVEGSGNTPLVF

SEQ ID NO: 445160 - protein, 13 aa, Homo sapiens
  CDR3 for beta chain variable domain of TCR clone 222580 (TRBV27, TRBJ2-5)
CASSLSSLETQYF

SEQ ID NO: 445161 - protein, 14 aa, Homo sapiens
  CDR3 for alpha chain variable domain of TCR clone 222581 (TRAV12-2, TRAJ5)
CAVNRSTGRRALTF

SEQ ID NO: 445162 - protein, 13 aa, Homo sapiens
  CDR3 for beta chain variable domain of TCR clone 222581 (TRBV12-4, TRBJ2-7)
CASSPTETYEQYF

SEQ ID NO: 445163 - protein, 13 aa, Homo sapiens
  CDR3 for alpha chain variable domain of TCR clone 222582 (TRAV12-3, TRAJ7)
CAMSASGNNRLAF

SEQ ID NO: 445164 - protein, 14 aa, Homo sapiens
  CDR3 for beta chain variable domain of TCR clone 222582 (TRBV19, TRBJ2-1)
CASPTFVFSGEQFF

SEQ ID NO: 445165 - protein, 14 aa, Homo sapiens
  CDR3 for alpha chain variable domain of TCR clone 222583 (TRAV12-2, TRAJ6)
CASKWGGGSYIPTF

SEQ ID NO: 445166 - protein, 16 aa, Homo sapiens
  CDR3 for beta chain variable domain of TCR clone 222583 (TRBV7-3, TRBJ2-2)
CASSLKRGTLSGELFF

SEQ ID NO: 445167 - protein, 11 aa, Homo sapiens
  CDR3 for alpha chain variable domain of TCR clone 222584 (TRAV12-3, TRAJ26)
CAMSHGQNFVF

SEQ ID NO: 445168 - protein, 18 aa, Homo sapiens
  CDR3 for beta chain variable domain of TCR clone 222584 (TRBV7-2, TRBJ2-7)
CASSLSGRGLAGGYEQYF

SEQ ID NO: 445169 - protein, 12 aa, Homo sapiens
  CDR3 for alpha chain variable domain of TCR clone 222585 (TRAV12-2, TRAJ3)
CAVWSSASKIIF

SEQ ID NO: 445170 - protein, 12 aa, Homo sapiens
  CDR3 for beta chain variable domain of TCR clone 222585 (TRBV11-2, TRBJ2-1)
CASSHGNNEQFV

SEQ ID NO: 445171 - protein, 14 aa, Homo sapiens
  CDR3 for alpha chain variable domain of TCR clone 222586 (TRAV25, TRAJ9)
CAGPGNTGGFKTIF

SEQ ID NO: 445172 - protein, 14 aa, Homo sapiens
  CDR3 for beta chain variable domain of TCR clone 222586 (TRBV18, TRBJ2-5)
CASSPPSRQETQYF

SEQ ID NO: 445173 - protein, 12 aa, Homo sapiens
  CDR3 for alpha chain variable domain of TCR clone 222587 (TRAV13-1, TRAJ21)
CAAKEGFNKFYF

SEQ ID NO: 445174 - protein, 15 aa, Homo sapiens
  CDR3 for beta chain variable domain of TCR clone 222587 (TRBV20-1, TRBJ2-7)
CSARERVSGMDEQYF

SEQ ID NO: 445175 - protein, 14 aa, Homo sapiens
  CDR3 for alpha chain variable domain of TCR clone 222588 (TRAV17, TRAJ17)
CATDDAAAGNKLTF

SEQ ID NO: 445176 - protein, 13 aa, Homo sapiens
  CDR3 for beta chain variable domain of TCR clone 222588 (TRBV7-9, TRBJ2-7)
CASSFAGAYEQYF

SEQ ID NO: 445177 - protein, 14 aa, Homo sapiens
  CDR3 for alpha chain variable domain of TCR clone 222589 (TRAV12-3, TRAJ13)
CAMRNPGGYQKVTF

SEQ ID NO: 445178 - protein, 14 aa, Homo sapiens
  CDR3 for beta chain variable domain of TCR clone 222589 (TRBV4-1, TRBJ1-6)
CASSPGSDSSPLLF

SEQ ID NO: 445179 - protein, 13 aa, Homo sapiens
  CDR3 for alpha chain variable domain of TCR clone 222590 (TRAV21, TRAJ57)
CAVTQGGSEKLVV

SEQ ID NO: 445180 - protein, 13 aa, Homo sapiens
  CDR3 for beta chain variable domain of TCR clone 222590 (TRBV20-1, TRBJ1-1)
CSARGGGNTEAFF

SEQ ID NO: 445181 - protein, 17 aa, Homo sapiens
  CDR3 for alpha chain variable domain of TCR clone 222591 (TRAV38-1, TRAJ45)
CAFVRSHSGGGADGLTF

SEQ ID NO: 445182 - protein, 15 aa, Homo sapiens
  CDR3 for beta chain variable domain of TCR clone 222591 (TRBV7-2, TRBJ2-3)
CASSLVVRGPDTQYF

SEQ ID NO: 445183 - protein, 15 aa, Homo sapiens
  CDR3 for alpha chain variable domain of TCR clone 222592 (TRAV27, TRAJ38)
RAARRNAGINRKLSW

SEQ ID NO: 445184 - protein, 13 aa, Homo sapiens
  CDR3 for beta chain variable domain of TCR clone 222592 (TRBV12-5, TRBJ2-3)
CASGDRQSDTQYF

SEQ ID NO: 445185 - protein, 14 aa, Homo sapiens
  CDR3 for alpha chain variable domain of TCR clone 222593 (TRAV29/DV5, TRAJ43)
CAAIHSYNNNDMRF

SEQ ID NO: 445186 - protein, 14 aa, Homo sapiens
  CDR3 for beta chain variable domain of TCR clone 222593 (TRBV12-4, TRBJ2-5)
CASSSTEGTKTPYF

SEQ ID NO: 445187 - protein, 12 aa, Homo sapiens
  CDR3 for alpha chain variable domain of TCR clone 222594 (TRAV3, TRAJ31)
CAVRDGNARLMF

SEQ ID NO: 445188 - protein, 18 aa, Homo sapiens
  CDR3 for beta chain variable domain of TCR clone 222594 (TRBV7-2, TRBJ2-3)
CASSLKREGSGITDKQYF

SEQ ID NO: 445189 - protein, 13 aa, Homo sapiens
  CDR3 for alpha chain variable domain of TCR clone 222595 (TRAV8-3, TRAJ48)
CAVVPFGNDKLTF

SEQ ID NO: 445190 - protein, 14 aa, Homo sapiens
  CDR3 for beta chain variable domain of TCR clone 222595 (TRBV18, TRBJ2-7)
CASSPRGGAYEQYF

SEQ ID NO: 445191 - protein, 16 aa, Homo sapiens
  CDR3 for alpha chain variable domain of TCR clone 222596 (TRAV38-1, TRAJ56)
CAFMKRQTGANSKLTF

SEQ ID NO: 445192 - protein, 13 aa, Homo sapiens
  CDR3 for beta chain variable domain of TCR clone 222596 (TRBV11-2, TRBJ2-5)
CASSSTGEETQYF

SEQ ID NO: 445193 - protein, 14 aa, Homo sapiens
  CDR3 for alpha chain variable domain of TCR clone 222597 (TRAV8-3, TRAJ48)
CCGCGQFGNEKLTF

SEQ ID NO: 445194 - protein, 15 aa, Homo sapiens
  CDR3 for beta chain variable domain of TCR clone 222597 (TRBV28, TRBJ2-4)
CAAGSGTLLMGSQYL

SEQ ID NO: 445195 - protein, 12 aa, Homo sapiens
  CDR3 for alpha chain variable domain of TCR clone 222598 (TRAV12-3, TRAJ17)
CAMTLTGNKLTF

SEQ ID NO: 445196 - protein, 15 aa, Homo sapiens
  CDR3 for beta chain variable domain of TCR clone 222598 (TRBV20-1, TRBJ2-7)
RSARDRVSGRDEQYF

SEQ ID NO: 445197 - protein, 13 aa, Homo sapiens
  CDR3 for alpha chain variable domain of TCR clone 222599 (TRAV21, TRAJ27)
CAARPGNAGKSTF

SEQ ID NO: 445198 - protein, 10 aa, Homo sapiens
  CDR3 for beta chain variable domain of TCR clone 222599 (TRBV7-9, TRBJ1-1)
CASSFTEAFF

SEQ ID NO: 445199 - protein, 14 aa, Homo sapiens
  CDR3 for alpha chain variable domain of TCR clone 222600 (TRAV8-6, TRAJ54)
CAVSLIQGAQKLVF

SEQ ID NO: 445200 - protein, 16 aa, Homo sapiens
  CDR3 for beta chain variable domain of TCR clone 222600 (TRBV7-3, TRBJ2-2)
CASSLKRGTLSGELFF

SEQ ID NO: 445201 - protein, 12 aa, Homo sapiens
  CDR3 for alpha chain variable domain of TCR clone 222601 (TRAV13-1, TRAJ21)
CAAKEGFNKFYF

SEQ ID NO: 445202 - protein, 14 aa, Homo sapiens
  CDR3 for beta chain variable domain of TCR clone 222601 (TRBV11-2, TRBJ1-5)
CASSSLTGNQPQHF

SEQ ID NO: 445203 - protein, 13 aa, Homo sapiens
  CDR3 for alpha chain variable domain of TCR clone 222602 (TRAV2, TRAJ15)
CAVASQAGTALIF

SEQ ID NO: 445204 - protein, 11 aa, Homo sapiens
  CDR3 for beta chain variable domain of TCR clone 222602 (TRBV19, TRBJ2-2)
CASRYSGELFF

SEQ ID NO: 445205 - protein, 15 aa, Homo sapiens
  CDR3 for alpha chain variable domain of TCR clone 222603 (TRAV12-2, TRAJ53)
CAVNGGGGSNYKLTF

SEQ ID NO: 445206 - protein, 13 aa, Homo sapiens
  CDR3 for beta chain variable domain of TCR clone 222603 (TRBV12-4, TRBJ2-7)
FASSPTETYEQYF

SEQ ID NO: 445207 - protein, 12 aa, Homo sapiens
  CDR3 for alpha chain variable domain of TCR clone 222604 (TRAV12-2, TRAJ43)
CAVNVNNNDMRF

SEQ ID NO: 445208 - protein, 14 aa, Homo sapiens
  CDR3 for beta chain variable domain of TCR clone 222604 (TRBV25-1, TRBJ2-2)
CASSQLGLPGELFF

SEQ ID NO: 445209 - protein, 13 aa, Homo sapiens
  CDR3 for alpha chain variable domain of TCR clone 222605 (TRAV23/DV6, TRAJ58)
CAATGTSGSRLNF

SEQ ID NO: 445210 - protein, 13 aa, Homo sapiens
  CDR3 for beta chain variable domain of TCR clone 222605 (TRBV5-5, TRBJ1-2)
CASSFWRGEDYTF

SEQ ID NO: 445211 - protein, 14 aa, Homo sapiens
  CDR3 for alpha chain variable domain of TCR clone 222606 (TRAV38-1, TRAJ40)
CALRPTSGTYKYIF

SEQ ID NO: 445212 - protein, 15 aa, Homo sapiens
  CDR3 for beta chain variable domain of TCR clone 222606 (TRBV12-4, TRBJ2-1)
CASSLQAGAADEQFF

SEQ ID NO: 445213 - protein, 15 aa, Homo sapiens
  CDR3 for alpha chain variable domain of TCR clone 222607 (TRAV38-2/DV8, TRAJ45)
CAYWDSGGDADGLTF

SEQ ID NO: 445214 - protein, 13 aa, Homo sapiens
  CDR3 for beta chain variable domain of TCR clone 222607 (TRBV6-1, TRBJ1-5)
CASTSVGDQPQHF

SEQ ID NO: 445215 - protein, 12 aa, Homo sapiens
  CDR3 for alpha chain variable domain of TCR clone 222608 (TRAV27, TRAJ42)
CAGWGSQGNLIF

SEQ ID NO: 445216 - protein, 13 aa, Homo sapiens
  CDR3 for beta chain variable domain of TCR clone 222608 (TRBV19, TRBJ2-7)
CASSIRSSYEQYF

SEQ ID NO: 445217 - protein, 14 aa, Homo sapiens
  CDR3 for alpha chain variable domain of TCR clone 222609 (TRAV30, TRAJ33)
CGTVAPRSNYQLIW

SEQ ID NO: 445218 - protein, 14 aa, Homo sapiens
  CDR3 for beta chain variable domain of TCR clone 222609 (TRBV6-1, TRBJ1-3)
CASVQGGGGNTIYF

SEQ ID NO: 445219 - protein, 11 aa, Homo sapiens
  CDR3 for alpha chain variable domain of TCR clone 222610 (TRAV12-3, TRAJ16)
LTGGAGQKLLF

SEQ ID NO: 445220 - protein, 13 aa, Homo sapiens
  CDR3 for beta chain variable domain of TCR clone 222610 (TRBV12-4, TRBJ1-4)
CASAMGHNEKLFF

SEQ ID NO: 445221 - protein, 14 aa, Homo sapiens
  CDR3 for alpha chain variable domain of TCR clone 222611 (TRAV12-2, TRAJ17)
CAVNIKAAGNKLTF

SEQ ID NO: 445222 - protein, 16 aa, Homo sapiens
  CDR3 for beta chain variable domain of TCR clone 222611 (TRBV2, TRBJ2-3)
CASSTSVEGVTDTQYF

SEQ ID NO: 445223 - protein, 16 aa, Homo sapiens
  CDR3 for alpha chain variable domain of TCR clone 222612 (TRAV3, TRAJ37)
CAVRGKGSGNTGKLIF

SEQ ID NO: 445224 - protein, 13 aa, Homo sapiens
  CDR3 for beta chain variable domain of TCR clone 222612 (TRBV28, TRBJ1-2)
CASRGPGIYGYTF

SEQ ID NO: 445225 - protein, 15 aa, Homo sapiens
  CDR3 for alpha chain variable domain of TCR clone 222613 (TRAV27, TRAJ38)
CAARRNAGNNRKLIW

SEQ ID NO: 445226 - protein, 14 aa, Homo sapiens
  CDR3 for beta chain variable domain of TCR clone 222613 (TRBV18, TRBJ2-7)
CASSPRGGAYEQYF

SEQ ID NO: 445227 - protein, 14 aa, Homo sapiens
  CDR3 for alpha chain variable domain of TCR clone 222614 (TRAV1-2, TRAJ8)
CAVREDTGFQKLVF

SEQ ID NO: 445228 - protein, 15 aa, Homo sapiens
  CDR3 for beta chain variable domain of TCR clone 222614 (TRBV4-1, TRBJ1-1)
CASSQEWGHYTEAFF

SEQ ID NO: 445229 - protein, 14 aa, Homo sapiens
  CDR3 for alpha chain variable domain of TCR clone 222615 (TRAV17, TRAJ6)
CATNPAGGIYIPTF

SEQ ID NO: 445230 - protein, 11 aa, Homo sapiens
  CDR3 for beta chain variable domain of TCR clone 222615 (TRBV29-1, TRBJ2-5)
CSEDRTGTQYF

SEQ ID NO: 445231 - protein, 16 aa, Homo sapiens
  CDR3 for alpha chain variable domain of TCR clone 222616 (TRAV3, TRAJ23)
CAVKIGIYNQAGKLIF

SEQ ID NO: 445232 - protein, 17 aa, Homo sapiens
  CDR3 for beta chain variable domain of TCR clone 222616 (TRBV10-3, TRBJ2-6)
CAISESTAPSGANVLTF

SEQ ID NO: 445233 - protein, 15 aa, Homo sapiens
  CDR3 for alpha chain variable domain of TCR clone 222617 (TRAV12-1, TRAJ42)
CVVTRDGGSQGNLIF

SEQ ID NO: 445234 - protein, 15 aa, Homo sapiens
  CDR3 for beta chain variable domain of TCR clone 222617 (TRBV7-9, TRBJ1-6)
CASSSPGRGNSPLHF

SEQ ID NO: 445235 - protein, 13 aa, Homo sapiens
  CDR3 for alpha chain variable domain of TCR clone 222618 (TRAV24, TRAJ42)
CAFSTGSQVNLIF

SEQ ID NO: 445236 - protein, 15 aa, Homo sapiens
  CDR3 for beta chain variable domain of TCR clone 222618 (TRBV11-3, TRBJ2-7)
CASSPGPASSYEQYF

SEQ ID NO: 445237 - protein, 15 aa, Homo sapiens
  CDR3 for alpha chain variable domain of TCR clone 222619 (TRAV12-3, TRAJ6)
CAMSATTGGSYIPTF

SEQ ID NO: 445238 - protein, 15 aa, Homo sapiens
  CDR3 for beta chain variable domain of TCR clone 222619 (TRBV7-9, TRBJ1-1)
CASSLLEQGGTEAFF

SEQ ID NO: 445239 - protein, 17 aa, Homo sapiens
  CDR3 for alpha chain variable domain of TCR clone 222620 (TRAV4, TRAJ18)
CLVGERSVGATLGRLYF

SEQ ID NO: 445240 - protein, 16 aa, Homo sapiens
  CDR3 for beta chain variable domain of TCR clone 222620 (TRBV15, TRBJ1-4)
CATSRDSPPGREKLFF

SEQ ID NO: 445241 - protein, 18 aa, Homo sapiens
  CDR3 for alpha chain variable domain of TCR clone 222621 (TRAV26-2, TRAJ54)
CILRDVEVGIQGAQKLVF

SEQ ID NO: 445242 - protein, 16 aa, Homo sapiens
  CDR3 for beta chain variable domain of TCR clone 222621 (TRBV7-9, TRBJ2-1)
CASSSPQGTTRNEQFF

SEQ ID NO: 445243 - protein, 18 aa, Homo sapiens
  CDR3 for alpha chain variable domain of TCR clone 222622 (TRAV20, TRAJ4)
CAVQPYYMLSGGYNKLIF

SEQ ID NO: 445244 - protein, 13 aa, Homo sapiens
  CDR3 for beta chain variable domain of TCR clone 222622 (TRBV19, TRBJ2-3)
CATWDKITDTQYF

SEQ ID NO: 445245 - protein, 14 aa, Homo sapiens
  CDR3 for alpha chain variable domain of TCR clone 222623 (TRAV17, TRAJ22)
CATSPSGSARQLTF

SEQ ID NO: 445246 - protein, 12 aa, Homo sapiens
  CDR3 for beta chain variable domain of TCR clone 222623 (TRBV7-9, TRBJ2-7)
CASSIKREEQYF

SEQ ID NO: 445247 - protein, 13 aa, Homo sapiens
  CDR3 for alpha chain variable domain of TCR clone 222624 (TRAV8-6, TRAJ16)
CAVGSPDGQKLLF

SEQ ID NO: 445248 - protein, 16 aa, Homo sapiens
  CDR3 for beta chain variable domain of TCR clone 222624 (TRBV5-7, TRBJ2-3)
RASSSLGGAITDTQYF

SEQ ID NO: 445249 - protein, 16 aa, Homo sapiens
  CDR3 for alpha chain variable domain of TCR clone 222625 (TRAV17, TRAJ52)
CATSNAGGTSYGKLTF

SEQ ID NO: 445250 - protein, 13 aa, Homo sapiens
  CDR3 for beta chain variable domain of TCR clone 222625 (TRBV6-5, TRBJ1-1)
VTSGTPPVGEAFF

SEQ ID NO: 445251 - protein, 15 aa, Homo sapiens
  CDR3 for alpha chain variable domain of TCR clone 222626 (TRAV3, TRAJ22)
CAVRDRGGSARPLTF

SEQ ID NO: 445252 - protein, 13 aa, Homo sapiens
  CDR3 for beta chain variable domain of TCR clone 222626 (TRBV12-4, TRBJ1-2)
CASSLRQGKGYTF

SEQ ID NO: 445253 - protein, 14 aa, Homo sapiens
  CDR3 for alpha chain variable domain of TCR clone 222627 (TRAV20, TRAJ22)
CAVQVSGSARQLTF

SEQ ID NO: 445254 - protein, 13 aa, Homo sapiens
  CDR3 for beta chain variable domain of TCR clone 222627 (TRBV20-1, TRBJ2-5)
CSASEGGKETQYF

SEQ ID NO: 445255 - protein, 15 aa, Homo sapiens
  CDR3 for alpha chain variable domain of TCR clone 222628 (TRAV23/DV6, TRAJ18)
CAARYRGSTLGRLYF

SEQ ID NO: 445256 - protein, 13 aa, Homo sapiens
  CDR3 for beta chain variable domain of TCR clone 222628 (TRBV7-2, TRBJ2-7)
CASSSPSGSEKYF

SEQ ID NO: 445257 - protein, 16 aa, Homo sapiens
  CDR3 for alpha chain variable domain of TCR clone 222629 (TRAV8-3, TRAJ13)
CAVGAYPSGGYQKVTF

SEQ ID NO: 445258 - protein, 15 aa, Homo sapiens
  CDR3 for beta chain variable domain of TCR clone 222629 (TRBV6-6, TRBJ2-5)
CASSPGGGLEETQYF

SEQ ID NO: 445259 - protein, 13 aa, Homo sapiens
  CDR3 for alpha chain variable domain of TCR clone 222630 (TRAV21, TRAJ27)
CAARPGNAGKSTF

SEQ ID NO: 445260 - protein, 15 aa, Homo sapiens
  CDR3 for beta chain variable domain of TCR clone 222630 (TRBV7-2, TRBJ2-1)
CASSLASGRVNEQFF

SEQ ID NO: 445261 - protein, 14 aa, Homo sapiens
  CDR3 for alpha chain variable domain of TCR clone 222631 (TRAV23/DV6, TRAJ17)
CAARGRAAGNKLTF

SEQ ID NO: 445262 - protein, 15 aa, Homo sapiens
  CDR3 for beta chain variable domain of TCR clone 222631 (TRBV5-1, TRBJ2-1)
CASSPPRAPYNEQFF

SEQ ID NO: 445263 - protein, 15 aa, Homo sapiens
  CDR3 for alpha chain variable domain of TCR clone 222632 (TRAV8-3, TRAJ45)
CASSYSGGGADGLTF

SEQ ID NO: 445264 - protein, 12 aa, Homo sapiens
  CDR3 for beta chain variable domain of TCR clone 222632 (TRBV5-1, TRBJ1-2)
CASSQDTYGYTF

SEQ ID NO: 445265 - protein, 17 aa, Homo sapiens
  CDR3 for alpha chain variable domain of TCR clone 222633 (TRAV3, TRAJ42)
CSVRVRDYGGSQGNLIF

SEQ ID NO: 445266 - protein, 15 aa, Homo sapiens
  CDR3 for beta chain variable domain of TCR clone 222633 (TRBV27, TRBJ1-6)
CASSFDRGLGSPLHF

SEQ ID NO: 445267 - protein, 15 aa, Homo sapiens
  CDR3 for alpha chain variable domain of TCR clone 222634 (TRAV14/DV4, TRAJ12)
CAMREERDSSYKLIF

SEQ ID NO: 445268 - protein, 17 aa, Homo sapiens
  CDR3 for beta chain variable domain of TCR clone 222634 (TRBV2, TRBJ2-1)
CASSRPGQGVMVNDQFF

SEQ ID NO: 445269 - protein, 13 aa, Homo sapiens
  CDR3 for alpha chain variable domain of TCR clone 222635 (TRAV17, TRAJ9)
CATAMTGGFKTIF

SEQ ID NO: 445270 - protein, 16 aa, Homo sapiens
  CDR3 for beta chain variable domain of TCR clone 222635 (TRBV15, TRBJ2-1)
CATSRNLAGGYNEQFF

SEQ ID NO: 445271 - protein, 15 aa, Homo sapiens
  CDR3 for alpha chain variable domain of TCR clone 222636 (TRAV12-3, TRAJ11)
CAMSEENSGYSTLTF

SEQ ID NO: 445272 - protein, 16 aa, Homo sapiens
  CDR3 for beta chain variable domain of TCR clone 222636 (TRBV6-6, TRBJ2-5)
CASSYDWAGGSETQYF

SEQ ID NO: 445273 - protein, 14 aa, Homo sapiens
  CDR3 for alpha chain variable domain of TCR clone 222637 (TRAV23/DV6, TRAJ24)
CAASLSDNWGKLQF

SEQ ID NO: 445274 - protein, 14 aa, Homo sapiens
  CDR3 for beta chain variable domain of TCR clone 222637 (TRBV15, TRBJ2-5)
CATSRDRGIETQYF

SEQ ID NO: 445275 - protein, 15 aa, Homo sapiens
  CDR3 for alpha chain variable domain of TCR clone 222638 (TRAV1-2, TRAJ28)
CAVQDSGAGSYQLTF

SEQ ID NO: 445276 - protein, 11 aa, Homo sapiens
  CDR3 for beta chain variable domain of TCR clone 222638 (TRBV29-1, TRBJ2-5)
CSEDRTGTQYF

SEQ ID NO: 445277 - protein, 14 aa, Homo sapiens
  CDR3 for alpha chain variable domain of TCR clone 222639 (TRAV3, TRAJ8)
CAVSLNTGFQKLVF

SEQ ID NO: 445278 - protein, 13 aa, Homo sapiens
  CDR3 for beta chain variable domain of TCR clone 222639 (TRBV2, TRBJ1-5)
CATAGPGNQPQHF

SEQ ID NO: 445279 - protein, 15 aa, Homo sapiens
  CDR3 for alpha chain variable domain of TCR clone 222640 (TRAV4, TRAJ33)
CTTASWGDSNYQLIW

SEQ ID NO: 445280 - protein, 14 aa, Homo sapiens
  CDR3 for beta chain variable domain of TCR clone 222640 (TRBV5-1, TRBJ2-2)
CASSSGSNTGELFF

SEQ ID NO: 445281 - protein, 15 aa, Homo sapiens
  CDR3 for alpha chain variable domain of TCR clone 222641 (TRAV3, TRAJ17)
CAMRDTGAAGNKLTF

SEQ ID NO: 445282 - protein, 18 aa, Homo sapiens
  CDR3 for beta chain variable domain of TCR clone 222641 (TRBV27, TRBJ2-1)
CASGNRAVGVGSKNEQFF

SEQ ID NO: 445283 - protein, 14 aa, Homo sapiens
  CDR3 for alpha chain variable domain of TCR clone 222642 (TRAV2, TRAJ9)
CAVVDRSGGFKTIF

SEQ ID NO: 445284 - protein, 12 aa, Homo sapiens
  CDR3 for beta chain variable domain of TCR clone 222642 (TRBV14, TRBJ2-7)
CASSRLKGEQYF

SEQ ID NO: 445285 - protein, 14 aa, Homo sapiens
  CDR3 for alpha chain variable domain of TCR clone 222643 (TRAV12-3, TRAJ10)
SHLPPTGGGNKLTF

SEQ ID NO: 445286 - protein, 15 aa, Homo sapiens
  CDR3 for beta chain variable domain of TCR clone 222643 (TRBV11-2, TRBJ1-3)
CASSLDGTVGNTIYF

SEQ ID NO: 445287 - protein, 17 aa, Homo sapiens
  CDR3 for alpha chain variable domain of TCR clone 222644 (TRAV3, TRAJ6)
CAVRDGPRAGGSYIPTF

SEQ ID NO: 445288 - protein, 16 aa, Homo sapiens
  CDR3 for beta chain variable domain of TCR clone 222644 (TRBV28, TRBJ1-2)
CASSLYGQEANYGHTF

SEQ ID NO: 445289 - protein, 14 aa, Homo sapiens
  CDR3 for alpha chain variable domain of TCR clone 222645 (TRAV35, TRAJ50)
CAGHRKTSYDKVIF

SEQ ID NO: 445290 - protein, 17 aa, Homo sapiens
  CDR3 for beta chain variable domain of TCR clone 222645 (TRBV7-8, TRBJ2-6)
CVSSAGTGGAGANVLTF

SEQ ID NO: 445291 - protein, 17 aa, Homo sapiens
  CDR3 for alpha chain variable domain of TCR clone 222646 (TRAV13-1, TRAJ53)
CAASWKSSGGSNYKPTF

SEQ ID NO: 445292 - protein, 19 aa, Homo sapiens
  CDR3 for beta chain variable domain of TCR clone 222646 (TRBV7-9, TRBJ2-1)
CASSHNRGALLRSYNEQFF

SEQ ID NO: 445293 - protein, 14 aa, Homo sapiens
  CDR3 for alpha chain variable domain of TCR clone 222647 (TRAV8-4, TRAJ54)
CAVSEVLGAQKLVF

SEQ ID NO: 445294 - protein, 15 aa, Homo sapiens
  CDR3 for beta chain variable domain of TCR clone 222647 (TRBV11-2, TRBJ2-2)
CASSSDRVNAGELFF

SEQ ID NO: 445295 - protein, 15 aa, Homo sapiens
  CDR3 for alpha chain variable domain of TCR clone 222648 (TRAV27, TRAJ38)
CAARRNAGNNRKLSW

SEQ ID NO: 445296 - protein, 13 aa, Homo sapiens
  CDR3 for beta chain variable domain of TCR clone 222648 (TRBV11-2, TRBJ2-7)
CASSSYPSYEQYF

SEQ ID NO: 445297 - protein, 14 aa, Homo sapiens
  CDR3 for alpha chain variable domain of TCR clone 222649 (TRAV16, TRAJ32)
CALKSGGATNKLIF

SEQ ID NO: 445298 - protein, 15 aa, Homo sapiens
  CDR3 for beta chain variable domain of TCR clone 222649 (TRBV10-3, TRBJ2-3)
CAISLTSGGTDTQYF

SEQ ID NO: 445299 - protein, 15 aa, Homo sapiens
  CDR3 for alpha chain variable domain of TCR clone 222650 (TRAV12-3, TRAJ6)
CAMSATSGGSYIPTF

SEQ ID NO: 445300 - protein, 14 aa, Homo sapiens
  CDR3 for beta chain variable domain of TCR clone 222650 (TRBV7-9, TRBJ2-7)
CASSPSGGQNEQYF

SEQ ID NO: 445301 - protein, 12 aa, Homo sapiens
  CDR3 for alpha chain variable domain of TCR clone 222651 (TRAV3, TRAJ43)
CAVRDPNNDMRF

SEQ ID NO: 445302 - protein, 17 aa, Homo sapiens
  CDR3 for beta chain variable domain of TCR clone 222651 (TRBV7-8, TRBJ2-6)
CASSAGTGGAGASVLTF

SEQ ID NO: 445303 - protein, 14 aa, Homo sapiens
  CDR3 for alpha chain variable domain of TCR clone 222652 (TRAV8-4, TRAJ13)
CAVTLSGGYQKVTF

SEQ ID NO: 445304 - protein, 16 aa, Homo sapiens
  CDR3 for beta chain variable domain of TCR clone 222652 (TRBV5-7, IGLJ4)
CASSPSGGLKTEKLFF

SEQ ID NO: 445305 - protein, 13 aa, Homo sapiens
  CDR3 for alpha chain variable domain of TCR clone 222653 (TRAV8-3, TRAJ43)
CAVGIYNNNDMRF

SEQ ID NO: 445306 - protein, 12 aa, Homo sapiens
  CDR3 for beta chain variable domain of TCR clone 222653 (TRBV11-2, TRBJ2-1)
CASSPGNNEQFF

SEQ ID NO: 445307 - protein, 14 aa, Homo sapiens
  CDR3 for alpha chain variable domain of TCR clone 222654 (TRAV1-1, TRAJ23)
CAVSIYNQGGKLIF

SEQ ID NO: 445308 - protein, 16 aa, Homo sapiens
  CDR3 for beta chain variable domain of TCR clone 222654 (TRBV6-1, TRBJ2-5)
CASSLRTGGVGETQYF

SEQ ID NO: 445309 - protein, 11 aa, Homo sapiens
  CDR3 for alpha chain variable domain of TCR clone 222655 (TRAV1-2, TRAJ40)
CSVPGTYKYIF

SEQ ID NO: 445310 - protein, 16 aa, Homo sapiens
  CDR3 for beta chain variable domain of TCR clone 222655 (TRBV7-3, TRBJ2-2)
CASSLKRGTLSGELVF

SEQ ID NO: 445311 - protein, 11 aa, Homo sapiens
  CDR3 for alpha chain variable domain of TCR clone 222656 (TRAV35, TRAJ22)
CAGPGVGQLTF

SEQ ID NO: 445312 - protein, 20 aa, Homo sapiens
  CDR3 for beta chain variable domain of TCR clone 222656 (TRBV19, TRBJ2-1)
CASSISRTVTSTRLNNEQFF

SEQ ID NO: 445313 - protein, 15 aa, Homo sapiens
  CDR3 for alpha chain variable domain of TCR clone 222657 (TRAV12-1, TRAJ45)
CVVLSGGGGADGLTF

SEQ ID NO: 445314 - protein, 11 aa, Homo sapiens
  CDR3 for beta chain variable domain of TCR clone 222657 (TRBV20-1, TRBJ2-5)
CSADRAETQYF

SEQ ID NO: 445315 - protein, 22 aa, Homo sapiens
  CDR3 for alpha chain variable domain of TCR clone 222658 (TRAV4, TRAJ37)
CLVGDGRLWQHRQTNLWARDNF

SEQ ID NO: 445316 - protein, 15 aa, Homo sapiens
  CDR3 for beta chain variable domain of TCR clone 222658 (TRBV6-6, TRBJ1-1)
CASSYASGAGTEAFS

SEQ ID NO: 445317 - protein, 14 aa, Homo sapiens
  CDR3 for alpha chain variable domain of TCR clone 222659 (TRAV8-4, TRAJ40)
CAVLSTSGTYKYIF

SEQ ID NO: 445318 - protein, 13 aa, Homo sapiens
  CDR3 for beta chain variable domain of TCR clone 222659 (TRBV7-9, TRBJ2-3)
CTSSPGSADTQYF

SEQ ID NO: 445319 - protein, 13 aa, Homo sapiens
  CDR3 for alpha chain variable domain of TCR clone 222660 (TRAV27, TRAJ57)
CRSAQGGSDKLVF

SEQ ID NO: 445320 - protein, 12 aa, Homo sapiens
  CDR3 for beta chain variable domain of TCR clone 222660 (TRBV11-2, TRBJ2-2)
CASSLGGGELFF

SEQ ID NO: 445321 - protein, 14 aa, Homo sapiens
  CDR3 for alpha chain variable domain of TCR clone 222661 (TRAV12-2, TRAJ13)
CAVKKTGGYQKVTF

SEQ ID NO: 445322 - protein, 17 aa, Homo sapiens
  CDR3 for beta chain variable domain of TCR clone 222661 (TRBV20-1, TRBJ2-2)
FSASGSGQGGLTGELFF

SEQ ID NO: 445323 - protein, 16 aa, Homo sapiens
  CDR3 for alpha chain variable domain of TCR clone 222662 (TRAV8-3, TRAJ8)
CAVPRDGNTGFQKLVF

SEQ ID NO: 445324 - protein, 15 aa, Homo sapiens
  CDR3 for beta chain variable domain of TCR clone 222662 (TRBV6-1, TRBJ2-6)
CGSSSRPSGANVLTF

SEQ ID NO: 445325 - protein, 14 aa, Homo sapiens
  CDR3 for alpha chain variable domain of TCR clone 222663 (TRAV2, TRAJ9)
CAVVDRSGGFKTIF

SEQ ID NO: 445326 - protein, 14 aa, Homo sapiens
  CDR3 for beta chain variable domain of TCR clone 222663 (TRBV7-3, TRBJ2-1)
CASSLAGGTNEQFF

SEQ ID NO: 445327 - protein, 13 aa, Homo sapiens
  CDR3 for alpha chain variable domain of TCR clone 222664 (TRAV8-3, TRAJ36)
CAVGATGANNLFF

SEQ ID NO: 445328 - protein, 15 aa, Homo sapiens
  CDR3 for beta chain variable domain of TCR clone 222664 (TRBV4-3, TRBJ2-3)
CASSLGTRSSDTQYF

SEQ ID NO: 445329 - protein, 14 aa, Homo sapiens
  CDR3 for alpha chain variable domain of TCR clone 222665 (TRAV3, TRAJ13)
CAVSYSGGYQKVTF

SEQ ID NO: 445330 - protein, 15 aa, Homo sapiens
  CDR3 for beta chain variable domain of TCR clone 222665 (TRBV7-2, TRBJ1-3)
CASSLQAGGENTIDF

SEQ ID NO: 445331 - protein, 14 aa, Homo sapiens
  CDR3 for alpha chain variable domain of TCR clone 222666 (TRAV26-1, TRAJ54)
CIVRVPQGAQKRVF

SEQ ID NO: 445332 - protein, 12 aa, Homo sapiens
  CDR3 for beta chain variable domain of TCR clone 222666 (TRBV14, TRBJ2-5)
CASSQLKETQYF

SEQ ID NO: 445333 - protein, 14 aa, Homo sapiens
  CDR3 for alpha chain variable domain of TCR clone 222667 (TRAV13-1, TRAJ5)
CAAHPDTGRRALTF

SEQ ID NO: 445334 - protein, 13 aa, Homo sapiens
  CDR3 for beta chain variable domain of TCR clone 222667 (TRBV7-9, TRBJ1-2)
CASSLKQNYGYTF

SEQ ID NO: 445335 - protein, 11 aa, Homo sapiens
  CDR3 for alpha chain variable domain of TCR clone 222668 (TRAV2, TRAJ13)
CASGGYQKVTF

SEQ ID NO: 445336 - protein, 14 aa, Homo sapiens
  CDR3 for beta chain variable domain of TCR clone 222668 (TRBV7-9, TRBJ1-2)
CASSRQGANYGYTF

SEQ ID NO: 445337 - protein, 12 aa, Homo sapiens
  CDR3 for alpha chain variable domain of TCR clone 222669 (TRAV12-3, TRAJ17)
WSMTLTGNKLTF

SEQ ID NO: 445338 - protein, 15 aa, Homo sapiens
  CDR3 for beta chain variable domain of TCR clone 222669 (TRBV20-1, TRBJ2-7)
CSARDRVSGMDERYF

SEQ ID NO: 445339 - protein, 11 aa, Homo sapiens
  CDR3 for alpha chain variable domain of TCR clone 222670 (TRAV21, TRAJ27)
CAVRMQANQPL

SEQ ID NO: 445340 - protein, 16 aa, Homo sapiens
  CDR3 for beta chain variable domain of TCR clone 222670 (TRBV3-1, TRBJ2-7)
CASSQVATGVAYEQYF

SEQ ID NO: 445341 - protein, 16 aa, Homo sapiens
  CDR3 for alpha chain variable domain of TCR clone 222671 (TRAV23/DV6, TRAJ9)
CAASIGGNTGGFKTMF

SEQ ID NO: 445342 - protein, 14 aa, Homo sapiens
  CDR3 for beta chain variable domain of TCR clone 222671 (TRBV9, TRBJ2-7)
CASSVGVGSYEQYF

SEQ ID NO: 445343 - protein, 13 aa, Homo sapiens
  CDR3 for alpha chain variable domain of TCR clone 222672 (TRAV21, TRAJ27)
CASRPGNAGKSTL

SEQ ID NO: 445344 - protein, 14 aa, Homo sapiens
  CDR3 for beta chain variable domain of TCR clone 222672 (TRBV11-2, TRBJ2-7)
CASSLGAGAYEQYF

SEQ ID NO: 445345 - protein, 14 aa, Homo sapiens
  CDR3 for alpha chain variable domain of TCR clone 222673 (TRAV1-2, TRAJ8)
CALREDTGFQKLVF

SEQ ID NO: 445346 - protein, 16 aa, Homo sapiens
  CDR3 for beta chain variable domain of TCR clone 222673 (TRBV5-1, TRBJ1-4)
CASSLDRVGDNEKLFF

SEQ ID NO: 445347 - protein, 12 aa, Homo sapiens
  CDR3 for alpha chain variable domain of TCR clone 222674 (TRAV13-2, TRAJ23)
WAERHRGGKLIF

SEQ ID NO: 445348 - protein, 14 aa, Homo sapiens
  CDR3 for beta chain variable domain of TCR clone 222674 (TRBV5-1, TRBJ1-2)
CASSPQGANYGYTF

SEQ ID NO: 445349 - protein, 15 aa, Homo sapiens
  CDR3 for alpha chain variable domain of TCR clone 222675 (TRAV8-6, TRAJ38)
CAVSSNAGNNRKMIW

SEQ ID NO: 445350 - protein, 15 aa, Homo sapiens
  CDR3 for beta chain variable domain of TCR clone 222675 (TRBV6-4, TRBJ2-1)
CASSSGTSGYNEQFF

SEQ ID NO: 445351 - protein, 14 aa, Homo sapiens
  CDR3 for alpha chain variable domain of TCR clone 222676 (TRAV13-1, TRAJ44)
CAAKATGTASKLTS

SEQ ID NO: 445352 - protein, 17 aa, Homo sapiens
  CDR3 for beta chain variable domain of TCR clone 222676 (TRBV7-3, TRBJ2-3)
CASSLMKRMRGADTQCF

SEQ ID NO: 445353 - protein, 14 aa, Homo sapiens
  CDR3 for alpha chain variable domain of TCR clone 222677 (TRAV12-2, TRAJ40)
CAVKIPSGTYKYIF

SEQ ID NO: 445354 - protein, 15 aa, Homo sapiens
  CDR3 for beta chain variable domain of TCR clone 222677 (TRBV5-1, TRBJ1-4)
CASSLARATNEKLFF

SEQ ID NO: 445355 - protein, 12 aa, Homo sapiens
  CDR3 for alpha chain variable domain of TCR clone 222678 (TRAV13-1, TRAJ48)
CAANFGNEKLTF

SEQ ID NO: 445356 - protein, 14 aa, Homo sapiens
  CDR3 for beta chain variable domain of TCR clone 222678 (TRBV20-1, TRBJ1-1)
CSAQTRIGGTEAFF

SEQ ID NO: 445357 - protein, 17 aa, Homo sapiens
  CDR3 for alpha chain variable domain of TCR clone 222679 (TRAV3, TRAJ12)
CAVRDGGRMDSSYKLIF

SEQ ID NO: 445358 - protein, 14 aa, Homo sapiens
  CDR3 for beta chain variable domain of TCR clone 222679 (TRBV11-2, TRBJ2-5)
CASRPLAGRETQYF

SEQ ID NO: 445359 - protein, 16 aa, Homo sapiens
  CDR3 for alpha chain variable domain of TCR clone 222680 (TRAV13-1, TRAJ22)
CAAKGGRSGSARQLTF

SEQ ID NO: 445360 - protein, 15 aa, Homo sapiens
  CDR3 for beta chain variable domain of TCR clone 222680 (TRBV9, TRBJ1-6)
CASSVAGTGDSPLRF

SEQ ID NO: 445361 - protein, 11 aa, Homo sapiens
  CDR3 for alpha chain variable domain of TCR clone 222681 (TRAV3, TRAJ21)
CAVGNFNKFYF

SEQ ID NO: 445362 - protein, 15 aa, Homo sapiens
  CDR3 for beta chain variable domain of TCR clone 222681 (TRBV19, TRBJ2-1)
CASSKAGPSYNEQFF

SEQ ID NO: 445363 - protein, 14 aa, Homo sapiens
  CDR3 for alpha chain variable domain of TCR clone 222682 (TRAV1-1, TRAJ28)
CAAPSGAGSYQLTF

SEQ ID NO: 445364 - protein, 15 aa, Homo sapiens
  CDR3 for beta chain variable domain of TCR clone 222682 (TRBV27, TRBJ2-7)
CASSTAGTGSYEQYF

SEQ ID NO: 445365 - protein, 13 aa, Homo sapiens
  CDR3 for alpha chain variable domain of TCR clone 222683 (TRAV17, TRAJ5)
CALRGTGRRALTF

SEQ ID NO: 445366 - protein, 15 aa, Homo sapiens
  CDR3 for beta chain variable domain of TCR clone 222683 (TRBV27, TRBJ1-6)
CASSFDRGLGSPLHF

SEQ ID NO: 445367 - protein, 23 aa, Homo sapiens
  CDR3 for alpha chain variable domain of TCR clone 222684 (TRAV26-1, TRAJ38)
CIADNAGNNHIQNPDPAVYQLRD

SEQ ID NO: 445368 - protein, 16 aa, Homo sapiens
  CDR3 for beta chain variable domain of TCR clone 222684 (TRBV7-9, TRBJ1-2)
RASSLGFSSGEDGYTF

SEQ ID NO: 445369 - protein, 14 aa, Homo sapiens
  CDR3 for alpha chain variable domain of TCR clone 222685 (TRAV26-1, TRAJ39)
CIVRGSRAGNMLTF

SEQ ID NO: 445370 - protein, 13 aa, Homo sapiens
  CDR3 for beta chain variable domain of TCR clone 222685 (TRBV7-9, TRBJ2-7)
CASSAGLQYEQYF

SEQ ID NO: 445371 - protein, 12 aa, Homo sapiens
  CDR3 for alpha chain variable domain of TCR clone 222686 (TRAV23/DV6, TRAJ30)
RAASKGDDKIIF

SEQ ID NO: 445372 - protein, 15 aa, Homo sapiens
  CDR3 for beta chain variable domain of TCR clone 222686 (TRBV29-1, TRBJ2-1)
CSGRDRKSSYNEQFF

SEQ ID NO: 445373 - protein, 14 aa, Homo sapiens
  CDR3 for alpha chain variable domain of TCR clone 222687 (TRAV13-1, TRAJ44)
CTAKATGTASKLTF

SEQ ID NO: 445374 - protein, 12 aa, Homo sapiens
  CDR3 for beta chain variable domain of TCR clone 222687 (TRBV7-8, TRBJ2-7)
CASSLGDREQYF

SEQ ID NO: 445375 - protein, 14 aa, Homo sapiens
  CDR3 for alpha chain variable domain of TCR clone 222688 (TRAV1-2, TRAJ16)
CAVRGFSDGQKLLF

SEQ ID NO: 445376 - protein, 15 aa, Homo sapiens
  CDR3 for beta chain variable domain of TCR clone 222688 (TRBV7-9, TRBJ2-5)
CASSFKAGREETQYF

SEQ ID NO: 445377 - protein, 14 aa, Homo sapiens
  CDR3 for alpha chain variable domain of TCR clone 222689 (TRAV26-1, TRAJ45)
CIVRVVGGADGLTF

SEQ ID NO: 445378 - protein, 16 aa, Homo sapiens
  CDR3 for beta chain variable domain of TCR clone 222689 (TRBV7-9, TRBJ1-1)
CASSLTQVRSTTEAFF

SEQ ID NO: 445379 - protein, 16 aa, Homo sapiens
  CDR3 for alpha chain variable domain of TCR clone 222690 (TRAV8-6, TRAJ53)
CAVRENSGGSNYKLTF

SEQ ID NO: 445380 - protein, 15 aa, Homo sapiens
  CDR3 for beta chain variable domain of TCR clone 222690 (TRBV7-9, TRBJ2-2)
CASGPLDTFPGELFF

SEQ ID NO: 445381 - protein, 14 aa, Homo sapiens
  CDR3 for alpha chain variable domain of TCR clone 222691 (TRAV1-2, TRAJ8)
CAVREDTGFQKLVF

SEQ ID NO: 445382 - protein, 19 aa, Homo sapiens
  CDR3 for beta chain variable domain of TCR clone 222691 (TRBV3-1, TRBJ2-5)
CASSQDSPINRGRRETQYF

SEQ ID NO: 445383 - protein, 12 aa, Homo sapiens
  CDR3 for alpha chain variable domain of TCR clone 222692 (TRAV23/DV6, TRAJ33)
CAAEDSNYQLIW

SEQ ID NO: 445384 - protein, 16 aa, Homo sapiens
  CDR3 for beta chain variable domain of TCR clone 222692 (TRBV10-3, TRBJ2-1)
CAIRGGGRGDYNEQFF

SEQ ID NO: 445385 - protein, 11 aa, Homo sapiens
  CDR3 for alpha chain variable domain of TCR clone 222693 (TRAV4, TRAJ28)
CLVGDNRAETL

SEQ ID NO: 445386 - protein, 13 aa, Homo sapiens
  CDR3 for beta chain variable domain of TCR clone 222693 (TRBV20-1, TRBJ2-7)
SSATHTSGYEQYF

SEQ ID NO: 445387 - protein, 14 aa, Homo sapiens
  CDR3 for alpha chain variable domain of TCR clone 222694 (TRAV29/DV5, TRAJ32)
CAAAYGGSINKLIF

SEQ ID NO: 445388 - protein, 15 aa, Homo sapiens
  CDR3 for beta chain variable domain of TCR clone 222694 (TRBV27, TRBJ2-7)
CASSTAGTGSYEQYF

SEQ ID NO: 445389 - protein, 11 aa, Homo sapiens
  CDR3 for alpha chain variable domain of TCR clone 222695 (TRAV8-3, TRAJ49)
CAVGGGNQFYF

SEQ ID NO: 445390 - protein, 13 aa, Homo sapiens
  CDR3 for beta chain variable domain of TCR clone 222695 (TRBV11-2, TRBJ2-5)
CASSSTGEETQYF

SEQ ID NO: 445391 - protein, 16 aa, Homo sapiens
  CDR3 for alpha chain variable domain of TCR clone 222696 (TRAV16, TRAJ57)
CAPYLITQGGSEKLVF

SEQ ID NO: 445392 - protein, 17 aa, Homo sapiens
  CDR3 for beta chain variable domain of TCR clone 222696 (TRBV24-1, TRBJ2-4)
CATSDAEARGVRNIQYV

SEQ ID NO: 445393 - protein, 16 aa, Homo sapiens
  CDR3 for alpha chain variable domain of TCR clone 222697 (TRAV3, TRAJ10)
CAVRDMRAGGGNKLTF

SEQ ID NO: 445394 - protein, 15 aa, Homo sapiens
  CDR3 for beta chain variable domain of TCR clone 222697 (TRBV7-3, TRBJ2-2)
CASKANGANTGELFF

SEQ ID NO: 445395 - protein, 11 aa, Homo sapiens
  CDR3 for alpha chain variable domain of TCR clone 222698 (TRAV8-3, TRAJ15)
CAVGPGTALIF

SEQ ID NO: 445396 - protein, 18 aa, Homo sapiens
  CDR3 for beta chain variable domain of TCR clone 222698 (TRBV18, TRBJ2-3)
CASSYASGAAGGTDTQYF

SEQ ID NO: 445397 - protein, 14 aa, Homo sapiens
  CDR3 for alpha chain variable domain of TCR clone 222699 (TRAV29/DV5, TRAJ36)
CAARRKTGANNLFF

SEQ ID NO: 445398 - protein, 14 aa, Homo sapiens
  CDR3 for beta chain variable domain of TCR clone 222699 (TRBV7-7, TRBJ2-2)
CASSMGQNTGELFF

SEQ ID NO: 445399 - protein, 13 aa, Homo sapiens
  CDR3 for alpha chain variable domain of TCR clone 222700 (TRAV16, TRAJ5)
CALTNTGRRALTF

SEQ ID NO: 445400 - protein, 13 aa, Homo sapiens
  CDR3 for beta chain variable domain of TCR clone 222700 (TRBV19, TRBJ2-1)
CASSMYRVNEQFF

SEQ ID NO: 445401 - protein, 12 aa, Homo sapiens
  CDR3 for alpha chain variable domain of TCR clone 222701 (TRAV22, TRAJ43)
CAVELNNNDIRF

SEQ ID NO: 445402 - protein, 13 aa, Homo sapiens
  CDR3 for beta chain variable domain of TCR clone 222701 (TRBV4-1, TRBJ2-1)
CASSQAGGDEQFF

SEQ ID NO: 445403 - protein, 15 aa, Homo sapiens
  CDR3 for alpha chain variable domain of TCR clone 222702 (TRAV21, TRAJ22)
CAVRLFFWFCKATDL

SEQ ID NO: 445404 - protein, 13 aa, Homo sapiens
  CDR3 for beta chain variable domain of TCR clone 222702 (TRBV7-2, TRBJ2-2)
CASSLAVTGELFF

SEQ ID NO: 445405 - protein, 14 aa, Homo sapiens
  CDR3 for alpha chain variable domain of TCR clone 222703 (TRAV12-3, TRAJ33)
CAMSVPGSNYQLIW

SEQ ID NO: 445406 - protein, 15 aa, Homo sapiens
  CDR3 for beta chain variable domain of TCR clone 222703 (TRBV11-2, TRBJ2-1)
CASSSPSTRYNEQFF

SEQ ID NO: 445407 - protein, 16 aa, Homo sapiens
  CDR3 for alpha chain variable domain of TCR clone 222704 (TRAV12-2, TRAJ52)
CAVNNRGGTSYGKLTF

SEQ ID NO: 445408 - protein, 15 aa, Homo sapiens
  CDR3 for beta chain variable domain of TCR clone 222704 (TRBV11-2, TRBJ2-1)
CASSPAGQSLNEQFF

SEQ ID NO: 445409 - protein, 14 aa, Homo sapiens
  CDR3 for alpha chain variable domain of TCR clone 222705 (TRAV12-2, TRAJ9)
CAVNLNTGGFKTIF

SEQ ID NO: 445410 - protein, 15 aa, Homo sapiens
  CDR3 for beta chain variable domain of TCR clone 222705 (TRBV19, TRBJ1-5)
CASSIVWADNQPQHF

SEQ ID NO: 445411 - protein, 13 aa, Homo sapiens
  CDR3 for alpha chain variable domain of TCR clone 222706 (TRAV8-6, TRAJ34)
CAVRDQGTDKLIF

SEQ ID NO: 445412 - protein, 14 aa, Homo sapiens
  CDR3 for beta chain variable domain of TCR clone 222706 (TRBV12-4, TRBJ1-1)
CASTWTGHDTEAFF

SEQ ID NO: 445413 - protein, 15 aa, Homo sapiens
  CDR3 for alpha chain variable domain of TCR clone 222707 (TRAV8-2, TRAJ49)
CVVSDPTNTGNQFYF

SEQ ID NO: 445414 - protein, 16 aa, Homo sapiens
  CDR3 for beta chain variable domain of TCR clone 222707 (TRBV12-5, TRBJ2-5)
CASGPRTSGNQETQYF

SEQ ID NO: 445415 - protein, 13 aa, Homo sapiens
  CDR3 for alpha chain variable domain of TCR clone 222708 (TRAV17, TRAJ9)
CATGSTGGFKTIF

SEQ ID NO: 445416 - protein, 14 aa, Homo sapiens
  CDR3 for beta chain variable domain of TCR clone 222708 (TRBV7-8, TRBJ2-7)
CASTLRGGPNEQYF

SEQ ID NO: 445417 - protein, 10 aa, Homo sapiens
  CDR3 for alpha chain variable domain of TCR clone 222709 (TRAV38-2/DV8, TRAJ30)
CAPLDDKIIF

SEQ ID NO: 445418 - protein, 18 aa, Homo sapiens
  CDR3 for beta chain variable domain of TCR clone 222709 (TRBV4-1, TRBJ1-5)
CASSQDPRGQGLNQPQHF

SEQ ID NO: 445419 - protein, 21 aa, Homo sapiens
  CDR3 for alpha chain variable domain of TCR clone 222710 (TRAV1-1, TRAJ6)
CLLLLRCERLERTGGSYIPTF

SEQ ID NO: 445420 - protein, 15 aa, Homo sapiens
  CDR3 for beta chain variable domain of TCR clone 222710 (TRBV11-3, TRBJ2-3)
CASLKDGREGDTQYF

SEQ ID NO: 445421 - protein, 11 aa, Homo sapiens
  CDR3 for alpha chain variable domain of TCR clone 222711 (TRAV1-2, TRAJ20)
CAVANDYKLSF

SEQ ID NO: 445422 - protein, 15 aa, Homo sapiens
  CDR3 for beta chain variable domain of TCR clone 222711 (TRBV2, TRBJ2-2)
CASSRETVGTGELFF

SEQ ID NO: 445423 - protein, 13 aa, Homo sapiens
  CDR3 for alpha chain variable domain of TCR clone 222712 (TRAV1-2, TRAJ9)
CAALNTGGFKTIF

SEQ ID NO: 445424 - protein, 16 aa, Homo sapiens
  CDR3 for beta chain variable domain of TCR clone 222712 (TRBV11-2, TRBJ2-1)
CASSPRLAGVYNDQFF

SEQ ID NO: 445425 - protein, 16 aa, Homo sapiens
  CDR3 for alpha chain variable domain of TCR clone 222713 (TRAV30, TRAJ24)
CGTEIVDADSWGKFQL

SEQ ID NO: 445426 - protein, 14 aa, Homo sapiens
  CDR3 for beta chain variable domain of TCR clone 222713 (TRBV4-1, TRBJ2-2)
CASSQAVNTGELFF

SEQ ID NO: 445427 - protein, 13 aa, Homo sapiens
  CDR3 for alpha chain variable domain of TCR clone 222714 (TRAV3, TRAJ40)
CAVRGSGAYKYIF

SEQ ID NO: 445428 - protein, 15 aa, Homo sapiens
  CDR3 for beta chain variable domain of TCR clone 222714 (TRBV28, TRBJ1-5)
CASSRDRGRDQPQHF

SEQ ID NO: 445429 - protein, 12 aa, Homo sapiens
  CDR3 for alpha chain variable domain of TCR clone 222715 (TRAV12-3, TRAJ17)
CAMTLTGNKLTF

SEQ ID NO: 445430 - protein, 13 aa, Homo sapiens
  CDR3 for beta chain variable domain of TCR clone 222715 (TRBV7-3, TRBJ1-1)
CASRQDWGDEAFF

SEQ ID NO: 445431 - protein, 14 aa, Homo sapiens
  CDR3 for alpha chain variable domain of TCR clone 222716 (TRAV38-1, TRAJ35)
CAFSAIGFGNVLHC

SEQ ID NO: 445432 - protein, 15 aa, Homo sapiens
  CDR3 for beta chain variable domain of TCR clone 222716 (TRBV20-1, TRBJ2-7)
CSARGLWTGVGEQYF

SEQ ID NO: 445433 - protein, 14 aa, Homo sapiens
  CDR3 for alpha chain variable domain of TCR clone 222717 (TRAV13-1, TRAJ35)
CTASKGGFGNVLHC

SEQ ID NO: 445434 - protein, 15 aa, Homo sapiens
  CDR3 for beta chain variable domain of TCR clone 222717 (TRBV6-1, TRBJ2-3)
CASSERGGITDTQYF

SEQ ID NO: 445435 - protein, 13 aa, Homo sapiens
  CDR3 for alpha chain variable domain of TCR clone 222718 (TRAV12-1, TRAJ6)
CVVFPGGSYIPKF

SEQ ID NO: 445436 - protein, 14 aa, Homo sapiens
  CDR3 for beta chain variable domain of TCR clone 222718 (TRBV20-1, TRBJ1-3)
CSASQTGAGNTIYF

SEQ ID NO: 445437 - protein, 14 aa, Homo sapiens
  CDR3 for alpha chain variable domain of TCR clone 222719 (TRAV34, TRAJ22)
CGADTSGSARQPTF

SEQ ID NO: 445438 - protein, 19 aa, Homo sapiens
  CDR3 for beta chain variable domain of TCR clone 222719 (TRBV19, TRBJ2-6)
CASTPTWGRAASGANVLTF

SEQ ID NO: 445439 - protein, 16 aa, Homo sapiens
  CDR3 for alpha chain variable domain of TCR clone 222720 (TRAV35, TRAJ28)
CAGQRYSGAGSYQLTF

SEQ ID NO: 445440 - protein, 13 aa, Homo sapiens
  CDR3 for beta chain variable domain of TCR clone 222720 (TRBV19, TRBJ1-2)
CASSQGQVYRHTF

SEQ ID NO: 445441 - protein, 14 aa, Homo sapiens
  CDR3 for alpha chain variable domain of TCR clone 222721 (TRAV35, TRAJ54)
CARYLIQGAQKLVF

SEQ ID NO: 445442 - protein, 14 aa, Homo sapiens
  CDR3 for beta chain variable domain of TCR clone 222721 (TRBV7-2, TRBJ2-5)
CASSVGWAEETQYF

SEQ ID NO: 445443 - protein, 15 aa, Homo sapiens
  CDR3 for alpha chain variable domain of TCR clone 222722 (TRAV8-3, TRAJ32)
CAVDLYGGATNKLIF

SEQ ID NO: 445444 - protein, 17 aa, Homo sapiens
  CDR3 for beta chain variable domain of TCR clone 222722 (TRBV7-8, TRBJ2-6)
CASSAGTGGAGANVLTF

SEQ ID NO: 445445 - protein, 15 aa, Homo sapiens
  CDR3 for alpha chain variable domain of TCR clone 222723 (TRAV13-1, TRAJ44)
CAASRGGGTASKLTF

SEQ ID NO: 445446 - protein, 14 aa, Homo sapiens
  CDR3 for beta chain variable domain of TCR clone 222723 (TRBV7-9, TRBJ2-7)
CASSRPGGPYEQYF

SEQ ID NO: 445447 - protein, 16 aa, Homo sapiens
  CDR3 for alpha chain variable domain of TCR clone 222724 (TRAV3, TRAJ10)
CAVRDMRAGGGNKPNF

SEQ ID NO: 445448 - protein, 13 aa, Homo sapiens
  CDR3 for beta chain variable domain of TCR clone 222724 (TRBV20-1, TRBJ2-7)
CSARWGYNYEQYF

SEQ ID NO: 445449 - protein, 14 aa, Homo sapiens
  CDR3 for alpha chain variable domain of TCR clone 222725 (TRAV1-1, TRAJ35)
CAAPPLGFGNVLHC

SEQ ID NO: 445450 - protein, 14 aa, Homo sapiens
  CDR3 for beta chain variable domain of TCR clone 222725 (TRBV25-1, TRBJ1-1)
CASTHLGGNTEAFF

SEQ ID NO: 445451 - protein, 13 aa, Homo sapiens
  CDR3 for alpha chain variable domain of TCR clone 222726 (TRAV4, TRAJ42)
CLVGGGSQGTLIF

SEQ ID NO: 445452 - protein, 16 aa, Homo sapiens
  CDR3 for beta chain variable domain of TCR clone 222726 (TRBV5-1, TRBJ2-3)
CASSLQGRVGADTQYF

SEQ ID NO: 445453 - protein, 12 aa, Homo sapiens
  CDR3 for alpha chain variable domain of TCR clone 222727 (TRAV25, TRAJ38)
CAGTCNNRKLIW

SEQ ID NO: 445454 - protein, 14 aa, Homo sapiens
  CDR3 for beta chain variable domain of TCR clone 222727 (TRBV5-4, TRBJ1-1)
CASSLDSRRDEAFF

SEQ ID NO: 445455 - protein, 12 aa, Homo sapiens
  CDR3 for alpha chain variable domain of TCR clone 222728 (TRAV1-1, TRAJ39)
CAVPVVGNMLTF

SEQ ID NO: 445456 - protein, 15 aa, Homo sapiens
  CDR3 for beta chain variable domain of TCR clone 222728 (TRBV19, TRBJ1-6)
CASSTQGAVGAPLHF

SEQ ID NO: 445457 - protein, 14 aa, Homo sapiens
  CDR3 for alpha chain variable domain of TCR clone 222729 (TRAV8-2, TRAJ11)
CVVSEKSGYSTLTF

SEQ ID NO: 445458 - protein, 11 aa, Homo sapiens
  CDR3 for beta chain variable domain of TCR clone 222729 (TRBV20-1, TRBJ2-7)
CSARLSYEQYF

SEQ ID NO: 445459 - protein, 13 aa, Homo sapiens
  CDR3 for alpha chain variable domain of TCR clone 222730 (TRAV13-1, TRAJ5)
CAASDRAGEHLLL

SEQ ID NO: 445460 - protein, 12 aa, Homo sapiens
  CDR3 for beta chain variable domain of TCR clone 222730 (TRBV28, TRBJ2-3)
CASSLYRDTQYF

SEQ ID NO: 445461 - protein, 17 aa, Homo sapiens
  CDR3 for alpha chain variable domain of TCR clone 222731 (TRAV12-2, TRAJ48)
CASNEKLTFGTGTRLTI

SEQ ID NO: 445462 - protein, 15 aa, Homo sapiens
  CDR3 for beta chain variable domain of TCR clone 222731 (TRBV20-1, TRBJ1-5)
CSATSDRGLGQPQHF

SEQ ID NO: 445463 - protein, 17 aa, Homo sapiens
  CDR3 for alpha chain variable domain of TCR clone 222732 (TRAV3, TRAJ6)
CAVGDGPRAGGSYIPTF

SEQ ID NO: 445464 - protein, 16 aa, Homo sapiens
  CDR3 for beta chain variable domain of TCR clone 222732 (TRBV4-2, TRBJ1-1)
CASRPLDGGGDTEAFF

SEQ ID NO: 445465 - protein, 14 aa, Homo sapiens
  CDR3 for alpha chain variable domain of TCR clone 222733 (TRAV12-2, TRAJ53)
CAVKGGGSNYKLTF

SEQ ID NO: 445466 - protein, 14 aa, Homo sapiens
  CDR3 for beta chain variable domain of TCR clone 222733 (TRBV7-7, TRBJ2-2)
CATRQDSDTGELFI

SEQ ID NO: 445467 - protein, 14 aa, Homo sapiens
  CDR3 for alpha chain variable domain of TCR clone 222734 (TRAV13-1, TRAJ44)
CAAKATGTASKLTF

SEQ ID NO: 445468 - protein, 14 aa, Homo sapiens
  CDR3 for beta chain variable domain of TCR clone 222734 (TRBV5-8, TRBJ1-6)
CASSPRTENSPLHF

SEQ ID NO: 445469 - protein, 13 aa, Homo sapiens
  CDR3 for alpha chain variable domain of TCR clone 222735 (TRAV2, TRAJ21)
CAVEDLNFNKFYF

SEQ ID NO: 445470 - protein, 15 aa, Homo sapiens
  CDR3 for beta chain variable domain of TCR clone 222735 (TRBV28, TRBJ2-5)
CASSPGQGGIETQYF

SEQ ID NO: 445471 - protein, 16 aa, Homo sapiens
  CDR3 for alpha chain variable domain of TCR clone 222736 (TRAV26-1, TRAJ36)
CIVRVSYQTGANNLFF

SEQ ID NO: 445472 - protein, 15 aa, Homo sapiens
  CDR3 for beta chain variable domain of TCR clone 222736 (TRBV5-4, TRBJ1-2)
CASRGSRGTSGGYTF

SEQ ID NO: 445473 - protein, 11 aa, Homo sapiens
  CDR3 for alpha chain variable domain of TCR clone 222737 (TRAV3, TRAJ21)
CAVGNFTKFYF

SEQ ID NO: 445474 - protein, 17 aa, Homo sapiens
  CDR3 for beta chain variable domain of TCR clone 222737 (TRBV13, TRBJ2-3)
CASSLSRVAGGRNTQYF

SEQ ID NO: 445475 - protein, 14 aa, Homo sapiens
  CDR3 for alpha chain variable domain of TCR clone 222738 (TRAV12-1, TRAJ17)
CVVNYKAAGNKLTF

SEQ ID NO: 445476 - protein, 13 aa, Homo sapiens
  CDR3 for beta chain variable domain of TCR clone 222738 (TRBV25-1, TRBJ1-1)
CASSDRGRAEAFF

SEQ ID NO: 445477 - protein, 14 aa, Homo sapiens
  CDR3 for alpha chain variable domain of TCR clone 222739 (TRAV26-1, TRAJ11)
CIVPLYSGYSTLTF

SEQ ID NO: 445478 - protein, 15 aa, Homo sapiens
  CDR3 for beta chain variable domain of TCR clone 222739 (TRBV7-9, TRBJ1-4)
CASSARTGGNEKLFF

SEQ ID NO: 445479 - protein, 14 aa, Homo sapiens
  CDR3 for alpha chain variable domain of TCR clone 222740 (TRAV17, TRAJ37)
CATDGSSNTGKLIF

SEQ ID NO: 445480 - protein, 13 aa, Homo sapiens
  CDR3 for beta chain variable domain of TCR clone 222740 (TRBV11-2, TRBJ2-1)
CASSLDLINEQFF

SEQ ID NO: 445481 - protein, 13 aa, Homo sapiens
  CDR3 for alpha chain variable domain of TCR clone 222741 (TRAV3, TRAJ4)
CALRDGGYNKLIF

SEQ ID NO: 445482 - protein, 14 aa, Homo sapiens
  CDR3 for beta chain variable domain of TCR clone 222741 (TRBV12-4, TRBJ1-2)
CASSSSAAGSSYTF

SEQ ID NO: 445483 - protein, 16 aa, Homo sapiens
  CDR3 for alpha chain variable domain of TCR clone 222742 (TRAV16, TRAJ52)
CALSAAGGTSYGKLTF

SEQ ID NO: 445484 - protein, 11 aa, Homo sapiens
  CDR3 for beta chain variable domain of TCR clone 222742 (TRBV6-3, TRBJ2-3)
CATGQADTQYF

SEQ ID NO: 445485 - protein, 13 aa, Homo sapiens
  CDR3 for alpha chain variable domain of TCR clone 222743 (TRAV12-3, TRAJ7)
CAMTPYGNNRLAF

SEQ ID NO: 445486 - protein, 13 aa, Homo sapiens
  CDR3 for beta chain variable domain of TCR clone 222743 (TRBV2, TRBJ1-5)
CATAGPGNQPQHF

SEQ ID NO: 445487 - protein, 14 aa, Homo sapiens
  CDR3 for alpha chain variable domain of TCR clone 222744 (TRAV1-2, TRAJ33)
CAVRATDGNYQLIW

SEQ ID NO: 445488 - protein, 14 aa, Homo sapiens
  CDR3 for beta chain variable domain of TCR clone 222744 (TRBV11-3, TRBJ1-6)
CASSFSGGDSPLHF

SEQ ID NO: 445489 - protein, 12 aa, Homo sapiens
  CDR3 for alpha chain variable domain of TCR clone 222745 (TRAV21, TRAJ37)
CAVRGNTGKLIF

SEQ ID NO: 445490 - protein, 13 aa, Homo sapiens
  CDR3 for beta chain variable domain of TCR clone 222745 (TRBV7-3, TRBJ2-1)
CASSLDSYNEQFF

SEQ ID NO: 445491 - protein, 12 aa, Homo sapiens
  CDR3 for alpha chain variable domain of TCR clone 222746 (TRAV12-3, TRAJ40)
CAVSSGTYKYIF

SEQ ID NO: 445492 - protein, 15 aa, Homo sapiens
  CDR3 for beta chain variable domain of TCR clone 222746 (TRBV7-9, TRBJ2-7)
CASSPGSGLTYEQYF

SEQ ID NO: 445493 - protein, 21 aa, Homo sapiens
  CDR3 for alpha chain variable domain of TCR clone 222747 (TRAV3, TRAJ37)
CAETTWLWQHRQTNLWARDNF

SEQ ID NO: 445494 - protein, 11 aa, Homo sapiens
  CDR3 for beta chain variable domain of TCR clone 222747 (TRBV10-3, TRBJ2-7)
CAISEGLEQYF

SEQ ID NO: 445495 - protein, 16 aa, Homo sapiens
  CDR3 for alpha chain variable domain of TCR clone 222748 (TRAV30, TRAJ24)
CGTEIVDADSWGKFKF

SEQ ID NO: 445496 - protein, 14 aa, Homo sapiens
  CDR3 for beta chain variable domain of TCR clone 222748 (TRBV12-5, TRBJ2-5)
CARGSRTHQETQYF

SEQ ID NO: 445497 - protein, 12 aa, Homo sapiens
  CDR3 for alpha chain variable domain of TCR clone 222749 (TRAV8-3, TRAJ43)
CAVGAGNNDMRF

SEQ ID NO: 445498 - protein, 15 aa, Homo sapiens
  CDR3 for beta chain variable domain of TCR clone 222749 (TRBV6-1, TRBJ2-3)
CASSERGGITDTQYF

SEQ ID NO: 445499 - protein, 13 aa, Homo sapiens
  CDR3 for alpha chain variable domain of TCR clone 222750 (TRAV13-2, TRAJ13)
CAERQGGYQKVTF

SEQ ID NO: 445500 - protein, 18 aa, Homo sapiens
  CDR3 for beta chain variable domain of TCR clone 222750 (TRBV7-6, TRBJ2-1)
CASSPRTSGMSSYNEQFF

SEQ ID NO: 445501 - protein, 14 aa, Homo sapiens
  CDR3 for alpha chain variable domain of TCR clone 222751 (TRAV1-2, TRAJ16)
CAVNRFSDGQKLLF

SEQ ID NO: 445502 - protein, 15 aa, Homo sapiens
  CDR3 for beta chain variable domain of TCR clone 222751 (TRBV7-9, TRBJ1-5)
CASSFGTGNNQPQHF

SEQ ID NO: 445503 - protein, 13 aa, Homo sapiens
  CDR3 for alpha chain variable domain of TCR clone 222752 (TRAV29/DV5, TRAJ31)
CAASRSNNARLML

SEQ ID NO: 445504 - protein, 12 aa, Homo sapiens
  CDR3 for beta chain variable domain of TCR clone 222752 (TRBV14, TRBJ2-5)
CASSQLKETQYF

SEQ ID NO: 445505 - protein, 14 aa, Homo sapiens
  CDR3 for alpha chain variable domain of TCR clone 222753 (TRAV4, TRAJ17)
CLVGDMAAGTKLTF

SEQ ID NO: 445506 - protein, 13 aa, Homo sapiens
  CDR3 for beta chain variable domain of TCR clone 222753 (TRBV18, TRBJ2-7)
CASQSGGGYEQYF

SEQ ID NO: 445507 - protein, 18 aa, Homo sapiens
  CDR3 for alpha chain variable domain of TCR clone 222754 (TRAV20, TRAJ4)
CAVQPYCMFSGVYNKLIF

SEQ ID NO: 445508 - protein, 13 aa, Homo sapiens
  CDR3 for beta chain variable domain of TCR clone 222754 (TRBV19, TRBJ2-3)
CATWDKITDTQYF

SEQ ID NO: 445509 - protein, 15 aa, Homo sapiens
  CDR3 for alpha chain variable domain of TCR clone 222755 (TRAV13-1, TRAJ52)
CAASSPSTSYGKLTF

SEQ ID NO: 445510 - protein, 13 aa, Homo sapiens
  CDR3 for beta chain variable domain of TCR clone 222755 (TRBV27, TRBJ2-5)
CASSLSSLETEYF

SEQ ID NO: 445511 - protein, 14 aa, Homo sapiens
  CDR3 for alpha chain variable domain of TCR clone 222756 (TRAV12-2, TRAJ40)
CSVKIPSGTYKYIF

SEQ ID NO: 445512 - protein, 15 aa, Homo sapiens
  CDR3 for beta chain variable domain of TCR clone 222756 (TRBV27, TRBJ2-7)
CASSTAGTGSYEQYF

SEQ ID NO: 445513 - protein, 13 aa, Homo sapiens
  CDR3 for alpha chain variable domain of TCR clone 222757 (TRAV21, TRAJ35)
CAVEGGFGNVLHC

SEQ ID NO: 445514 - protein, 15 aa, Homo sapiens
  CDR3 for beta chain variable domain of TCR clone 222757 (TRBV11-2, TRBJ2-1)
CASSLGAGPSNEQFF

SEQ ID NO: 445515 - protein, 14 aa, Homo sapiens
  CDR3 for alpha chain variable domain of TCR clone 222758 (TRAV17, TRAJ30)
CATVTVNRDDKIIF

SEQ ID NO: 445516 - protein, 14 aa, Homo sapiens
  CDR3 for beta chain variable domain of TCR clone 222758 (TRBV7-8, TRBJ2-3)
CASSLEVGTDTQYF

SEQ ID NO: 445517 - protein, 14 aa, Homo sapiens
  CDR3 for alpha chain variable domain of TCR clone 222759 (TRAV26-1, TRAJ39)
CIVRGSRAGNMLTF

SEQ ID NO: 445518 - protein, 13 aa, Homo sapiens
  CDR3 for beta chain variable domain of TCR clone 222759 (TRBV7-2, TRBJ2-7)
CASSSPSGSEQYF

SEQ ID NO: 445519 - protein, 11 aa, Homo sapiens
  CDR3 for alpha chain variable domain of TCR clone 222760 (TRAV12-1, TRAJ31)
CVGRVQCQTHV

SEQ ID NO: 445520 - protein, 19 aa, Homo sapiens
  CDR3 for beta chain variable domain of TCR clone 222760 (TRBV28, TRBJ2-4)
CASSFQPGGPAHSKNIQYF

SEQ ID NO: 445521 - protein, 14 aa, Homo sapiens
  CDR3 for alpha chain variable domain of TCR clone 222761 (TRAV1-2, TRAJ17)
CAVRDMTAGNKLTF

SEQ ID NO: 445522 - protein, 15 aa, Homo sapiens
  CDR3 for beta chain variable domain of TCR clone 222761 (TRBV20-1, TRBJ2-7)
CSATDRVSGMDEQYF

SEQ ID NO: 445523 - protein, 16 aa, Homo sapiens
  CDR3 for alpha chain variable domain of TCR clone 222762 (TRAV3, TRAJ37)
CAVRGKGSGNTGKLIC

SEQ ID NO: 445524 - protein, 14 aa, Homo sapiens
  CDR3 for beta chain variable domain of TCR clone 222762 (TRBV28, TRBJ1-1)
CASSFPRKNTEAFF

SEQ ID NO: 445525 - protein, 14 aa, Homo sapiens
  CDR3 for alpha chain variable domain of TCR clone 222763 (TRAV1-2, TRAJ16)
CAVNRFSDGQKLLF

SEQ ID NO: 445526 - protein, 15 aa, Homo sapiens
  CDR3 for beta chain variable domain of TCR clone 222763 (TRBV20-1, TRBJ2-7)
CSARDRVSGMEEQYF

SEQ ID NO: 445527 - protein, 18 aa, Homo sapiens
  CDR3 for alpha chain variable domain of TCR clone 222764 (TRAV26-1, TRAJ23)
CIVRVGLEVWNQGGKFIF

SEQ ID NO: 445528 - protein, 13 aa, Homo sapiens
  CDR3 for beta chain variable domain of TCR clone 222764 (TRBV7-2, TRBJ2-2)
CASSLAVTGELFF

SEQ ID NO: 445529 - protein, 13 aa, Homo sapiens
  CDR3 for alpha chain variable domain of TCR clone 222765 (TRAV21, TRAJ27)
CAARPGNAGKSTF

SEQ ID NO: 445530 - protein, 20 aa, Homo sapiens
  CDR3 for beta chain variable domain of TCR clone 222765 (TRBV7-8, TRBJ2-2)
CASSHLFPGPTIHITGELIF

SEQ ID NO: 445531 - protein, 13 aa, Homo sapiens
  CDR3 for alpha chain variable domain of TCR clone 222766 (TRAV20, TRAJ37)
CAGCSSNTGKLIF

SEQ ID NO: 445532 - protein, 13 aa, Homo sapiens
  CDR3 for beta chain variable domain of TCR clone 222766 (TRBV20-1, TRBJ1-1)
CSAPLGGGTEAFF

SEQ ID NO: 445533 - protein, 14 aa, Homo sapiens
  CDR3 for alpha chain variable domain of TCR clone 222767 (TRAV13-1, TRAJ13)
CAASRVGGYQKVTF

SEQ ID NO: 445534 - protein, 15 aa, Homo sapiens
  CDR3 for beta chain variable domain of TCR clone 222767 (TRBV6-3, TRBJ2-7)
CASSSPGTVFYEQYF

SEQ ID NO: 445535 - protein, 13 aa, Homo sapiens
  CDR3 for alpha chain variable domain of TCR clone 222768 (TRAV1-1, TRAJ9)
CAAQNTGGFKTIF

SEQ ID NO: 445536 - protein, 17 aa, Homo sapiens
  CDR3 for beta chain variable domain of TCR clone 222768 (TRBV13, TRBJ2-3)
CASSLSRVAGGRNTQYF

SEQ ID NO: 445537 - protein, 12 aa, Homo sapiens
  CDR3 for alpha chain variable domain of TCR clone 222769 (TRAV8-3, TRAJ20)
CAVGANDYKLSC

SEQ ID NO: 445538 - protein, 15 aa, Homo sapiens
  CDR3 for beta chain variable domain of TCR clone 222769 (TRBV11-2, TRBJ2-1)
CASSLGTSGLNEQFF

SEQ ID NO: 445539 - protein, 16 aa, Homo sapiens
  CDR3 for alpha chain variable domain of TCR clone 222770 (TRAV13-2, TRAJ32)
CAENMNYGGATNKIIF

SEQ ID NO: 445540 - protein, 14 aa, Homo sapiens
  CDR3 for beta chain variable domain of TCR clone 222770 (TRBV15, TRBJ2-5)
CATSSRGYQETQYF

SEQ ID NO: 445541 - protein, 14 aa, Homo sapiens
  CDR3 for alpha chain variable domain of TCR clone 222771 (TRAV17, TRAJ53)
CATDAGGSNYKLTF

SEQ ID NO: 445542 - protein, 16 aa, Homo sapiens
  CDR3 for beta chain variable domain of TCR clone 222771 (TRBV4-1, TRBJ1-1)
CASSKDAGMGNTKAFF

SEQ ID NO: 445543 - protein, 15 aa, Homo sapiens
  CDR3 for alpha chain variable domain of TCR clone 222772 (TRAV8-3, TRAJ27)
CAVGPSKTNAGKSTF

SEQ ID NO: 445544 - protein, 14 aa, Homo sapiens
  CDR3 for beta chain variable domain of TCR clone 222772 (TRBV11-2, TRBJ2-1)
CASSLSGPYNEQFF

SEQ ID NO: 445545 - protein, 14 aa, Homo sapiens
  CDR3 for alpha chain variable domain of TCR clone 222773 (TRAV8-3, TRAJ39)
CAVGAWGAGNMLTF

SEQ ID NO: 445546 - protein, 16 aa, Homo sapiens
  CDR3 for beta chain variable domain of TCR clone 222773 (TRBV7-2, TRBJ1-3)
CASSSGRVLSANTIYF

SEQ ID NO: 445547 - protein, 12 aa, Homo sapiens
  CDR3 for alpha chain variable domain of TCR clone 222774 (TRAV27, TRAJ41)
CAGRNSGYALNF

SEQ ID NO: 445548 - protein, 12 aa, Homo sapiens
  CDR3 for beta chain variable domain of TCR clone 222774 (TRBV6-3, TRBJ2-7)
CASSEPGFEQYF

SEQ ID NO: 445549 - protein, 12 aa, Homo sapiens
  CDR3 for alpha chain variable domain of TCR clone 222775 (TRAV27, TRAJ42)
CAGGGSQGNPIL

SEQ ID NO: 445550 - protein, 13 aa, Homo sapiens
  CDR3 for beta chain variable domain of TCR clone 222775 (TRBV19, TRBJ2-7)
CASSIRSSYEQYF

SEQ ID NO: 445551 - protein, 14 aa, Homo sapiens
  CDR3 for alpha chain variable domain of TCR clone 222776 (TRAV1-2, TRAJ6)
CAVRTSGGSYIPTF

SEQ ID NO: 445552 - protein, 15 aa, Homo sapiens
  CDR3 for beta chain variable domain of TCR clone 222776 (TRBV5-1, TRBJ2-6)
CASSLEGSGANVLTF

SEQ ID NO: 445553 - protein, 22 aa, Homo sapiens
  CDR3 for alpha chain variable domain of TCR clone 222777 (TRAV16, )
CALRTQIPDIKDPDPAVYQLRD

SEQ ID NO: 445554 - protein, 16 aa, Homo sapiens
  CDR3 for beta chain variable domain of TCR clone 222777 (TRBV7-2, TRBJ1-2)
CASSSNQDRRGHGYTF

SEQ ID NO: 445555 - protein, 12 aa, Homo sapiens
  CDR3 for alpha chain variable domain of TCR clone 222778 (TRAV13-1, TRAJ42)
SVLRGSQGNLIF

SEQ ID NO: 445556 - protein, 13 aa, Homo sapiens
  CDR3 for beta chain variable domain of TCR clone 222778 (TRBV10-3, TRBJ1-2)
CAISERDSYGYTF

SEQ ID NO: 445557 - protein, 18 aa, Homo sapiens
  CDR3 for alpha chain variable domain of TCR clone 222779 (TRAV12-3, TRAJ52)
CAMSRTNAGGTSYGKLTF

SEQ ID NO: 445558 - protein, 13 aa, Homo sapiens
  CDR3 for beta chain variable domain of TCR clone 222779 (TRBV5-7, TRBJ2-6)
CASTSSGANVLTF

SEQ ID NO: 445559 - protein, 12 aa, Homo sapiens
  CDR3 for alpha chain variable domain of TCR clone 222780 (TRAV12-3, TRAJ32)
CAGGGATNKLTF

SEQ ID NO: 445560 - protein, 17 aa, Homo sapiens
  CDR3 for beta chain variable domain of TCR clone 222780 (TRBV28, TRBJ2-5)
CASSTPEGDALQETQYF

SEQ ID NO: 445561 - protein, 14 aa, Homo sapiens
  CDR3 for alpha chain variable domain of TCR clone 222781 (TRAV12-3, TRAJ10)
SHLPLTGGGNKLTF

SEQ ID NO: 445562 - protein, 14 aa, Homo sapiens
  CDR3 for beta chain variable domain of TCR clone 222781 (TRBV12-4, TRBJ2-3)
CASSLVPSTDTQYF

SEQ ID NO: 445563 - protein, 12 aa, Homo sapiens
  CDR3 for alpha chain variable domain of TCR clone 222782 (TRAV12-3, TRAJ42)
CAPGGSQGNLIF

SEQ ID NO: 445564 - protein, 13 aa, Homo sapiens
  CDR3 for beta chain variable domain of TCR clone 222782 (TRBV5-7, TRBJ2-6)
CTSTSSGANVLTF

SEQ ID NO: 445565 - protein, 10 aa, Homo sapiens
  CDR3 for alpha chain variable domain of TCR clone 222783 (TRAV23/DV6, TRAJ9)
CASKYWRLQN

SEQ ID NO: 445566 - protein, 14 aa, Homo sapiens
  CDR3 for beta chain variable domain of TCR clone 222783 (TRBV6-1, TRBJ2-7)
CASTRKGDYYEQYF

SEQ ID NO: 445567 - protein, 13 aa, Homo sapiens
  CDR3 for alpha chain variable domain of TCR clone 222784 (TRAV3, TRAJ21)
CAVREPDFNKFYF

SEQ ID NO: 445568 - protein, 15 aa, Homo sapiens
  CDR3 for beta chain variable domain of TCR clone 222784 (TRBV10-3, TRBJ2-1)
CAIRNGTSGHNEQFF

SEQ ID NO: 445569 - protein, 11 aa, Homo sapiens
  CDR3 for alpha chain variable domain of TCR clone 222785 (TRAV26-1, TRAJ40)
CIVSGTYKYIF

SEQ ID NO: 445570 - protein, 14 aa, Homo sapiens
  CDR3 for beta chain variable domain of TCR clone 222785 (TRBV4-3, TRBJ2-7)
CASSQDVAGGEQYF

SEQ ID NO: 445571 - protein, 17 aa, Homo sapiens
  CDR3 for alpha chain variable domain of TCR clone 222786 (TRAV3, TRAJ38)
CAVRDCLNAGNNRKLIW

SEQ ID NO: 445572 - protein, 20 aa, Homo sapiens
  CDR3 for beta chain variable domain of TCR clone 222786 (TRBV28, TRBJ2-1)
CASTPIGRSPGLAGGNEQFF

SEQ ID NO: 445573 - protein, 12 aa, Homo sapiens
  CDR3 for alpha chain variable domain of TCR clone 222787 (TRAV12-3, TRAJ17)
CAMTLTGNKLTF

SEQ ID NO: 445574 - protein, 17 aa, Homo sapiens
  CDR3 for beta chain variable domain of TCR clone 222787 (TRBV20-1, TRBJ2-7)
CSAAGTSGGGSSYEQYF

SEQ ID NO: 445575 - protein, 14 aa, Homo sapiens
  CDR3 for alpha chain variable domain of TCR clone 222788 (TRAV1-2, TRAJ16)
CAVNRFSYGQKLLF

SEQ ID NO: 445576 - protein, 12 aa, Homo sapiens
  CDR3 for beta chain variable domain of TCR clone 222788 (TRBV6-5, TRBJ2-5)
CASSEGSETQYF

SEQ ID NO: 445577 - protein, 14 aa, Homo sapiens
  CDR3 for alpha chain variable domain of TCR clone 222789 (TRAV1-2, TRAJ16)
CAVNRFSDGQKLLF

SEQ ID NO: 445578 - protein, 14 aa, Homo sapiens
  CDR3 for beta chain variable domain of TCR clone 222789 (TRBV28, TRBJ2-7)
CASSLLRISYEQYF

SEQ ID NO: 445579 - protein, 14 aa, Homo sapiens
  CDR3 for alpha chain variable domain of TCR clone 222790 (TRAV3, TRAJ26)
CAVRDYNYGKNFVF

SEQ ID NO: 445580 - protein, 15 aa, Homo sapiens
  CDR3 for beta chain variable domain of TCR clone 222790 (TRBV20-1, TRBJ2-5)
CSANPPGRGGETQYF

SEQ ID NO: 445581 - protein, 13 aa, Homo sapiens
  CDR3 for alpha chain variable domain of TCR clone 222791 (TRAV36/DV7, TRAJ49)
CAVEANTGNQFYF

SEQ ID NO: 445582 - protein, 14 aa, Homo sapiens
  CDR3 for beta chain variable domain of TCR clone 222791 (TRBV11-2, TRBJ1-5)
CASSLDRGRQPQHF

SEQ ID NO: 445583 - protein, 13 aa, Homo sapiens
  CDR3 for alpha chain variable domain of TCR clone 222792 (TRAV4, TRAJ32)
CLVGDIVGAMVVL

SEQ ID NO: 445584 - protein, 14 aa, Homo sapiens
  CDR3 for beta chain variable domain of TCR clone 222792 (TRBV25-1, TRBJ1-1)
CASTHLGGNTEAFF

SEQ ID NO: 445585 - protein, 12 aa, Homo sapiens
  CDR3 for alpha chain variable domain of TCR clone 222793 (TRAV27, TRAJ36)
ASTQAGANNLFF

SEQ ID NO: 445586 - protein, 13 aa, Homo sapiens
  CDR3 for beta chain variable domain of TCR clone 222793 (TRBV7-9, TRBJ2-3)
CASSPGSTDTQYF

SEQ ID NO: 445587 - protein, 15 aa, Homo sapiens
  CDR3 for alpha chain variable domain of TCR clone 222794 (TRAV2, TRAJ15)
CAVEDRNQAGTALIF

SEQ ID NO: 445588 - protein, 12 aa, Homo sapiens
  CDR3 for beta chain variable domain of TCR clone 222794 (TRBV7-3, TRBJ1-1)
CQQPRMNTEAFF

SEQ ID NO: 445589 - protein, 11 aa, Homo sapiens
  CDR3 for alpha chain variable domain of TCR clone 222795 (TRAV27, TRAJ20)
CAGADDYKLSF

SEQ ID NO: 445590 - protein, 16 aa, Homo sapiens
  CDR3 for beta chain variable domain of TCR clone 222795 (TRBV7-9, TRBJ1-2)
CASSLGFSSGEDGYTF

SEQ ID NO: 445591 - protein, 12 aa, Homo sapiens
  CDR3 for alpha chain variable domain of TCR clone 222796 (TRAV8-3, TRAJ20)
CAVDFNDYKLSF

SEQ ID NO: 445592 - protein, 16 aa, Homo sapiens
  CDR3 for beta chain variable domain of TCR clone 222796 (TRBV28, TRBJ2-7)
CASSLFFETGGPEQYF

SEQ ID NO: 445593 - protein, 14 aa, Homo sapiens
  CDR3 for alpha chain variable domain of TCR clone 222797 (TRAV29/DV5, TRAJ49)
CAASLSNTGNQFSF

SEQ ID NO: 445594 - protein, 21 aa, Homo sapiens
  CDR3 for beta chain variable domain of TCR clone 222797 (TRBV9, TRBJ2-5)
CASRGRLAGGPEDPVLRARHA

SEQ ID NO: 445595 - protein, 13 aa, Homo sapiens
  CDR3 for alpha chain variable domain of TCR clone 222798 (TRAV20, TRAJ31)
CAVQAIGGARLMF

SEQ ID NO: 445596 - protein, 17 aa, Homo sapiens
  CDR3 for beta chain variable domain of TCR clone 222798 (TRBV11-3, TRBJ2-3)
CASSLGLTGGGTDTQYF

SEQ ID NO: 445597 - protein, 14 aa, Homo sapiens
  CDR3 for alpha chain variable domain of TCR clone 222799 (TRAV25, TRAJ35)
CARRVEGFGNVLHC

SEQ ID NO: 445598 - protein, 13 aa, Homo sapiens
  CDR3 for beta chain variable domain of TCR clone 222799 (TRBV7-2, TRBJ1-4)
CASSLAGLEKLFF

SEQ ID NO: 445599 - protein, 11 aa, Homo sapiens
  CDR3 for alpha chain variable domain of TCR clone 222800 (TRAV12-3, TRAJ43)
CAMSVSNDMRF

SEQ ID NO: 445600 - protein, 14 aa, Homo sapiens
  CDR3 for beta chain variable domain of TCR clone 222800 (TRBV7-7, TRBJ2-2)
CATRQDSDTGELFF

SEQ ID NO: 445601 - protein, 15 aa, Homo sapiens
  CDR3 for alpha chain variable domain of TCR clone 222801 (TRAV8-1, TRAJ6)
CAVNTPPRRKRHTYI

SEQ ID NO: 445602 - protein, 14 aa, Homo sapiens
  CDR3 for beta chain variable domain of TCR clone 222801 (TRBV12-4, TRBJ2-1)
CASSLGQGASEQFF

SEQ ID NO: 445603 - protein, 19 aa, Homo sapiens
  CDR3 for alpha chain variable domain of TCR clone 222802 (TRAV26-1, TRAJ52)
CIVSVANNAGGTSYGKLTF

SEQ ID NO: 445604 - protein, 14 aa, Homo sapiens
  CDR3 for beta chain variable domain of TCR clone 222802 (TRBV19, TRBJ1-2)
RASSIGAGSYGYTF

SEQ ID NO: 445605 - protein, 12 aa, Homo sapiens
  CDR3 for alpha chain variable domain of TCR clone 222803 (TRAV13-2, TRAJ23)
CAERHRGGKLIF

SEQ ID NO: 445606 - protein, 14 aa, Homo sapiens
  CDR3 for beta chain variable domain of TCR clone 222803 (TRBV20-1, TRBJ2-5)
CSARYRGLQETQYF

SEQ ID NO: 445607 - protein, 23 aa, Homo sapiens
  CDR3 for alpha chain variable domain of TCR clone 222804 (TRAV8-4, TRAJ38)
CARLNAGNNHIQHPDPAVYQLRD

SEQ ID NO: 445608 - protein, 12 aa, Homo sapiens
  CDR3 for beta chain variable domain of TCR clone 222804 (TRBV6-1, TRBJ2-7)
CASSEPLYEQYF

SEQ ID NO: 445609 - protein, 12 aa, Homo sapiens
  CDR3 for alpha chain variable domain of TCR clone 222805 (TRAV12-1, TRAJ40)
CVVYSGTYKYTF

SEQ ID NO: 445610 - protein, 15 aa, Homo sapiens
  CDR3 for beta chain variable domain of TCR clone 222805 (TRBV7-9, TRBJ1-6)
CASSFPGRGNSPLHF

SEQ ID NO: 445611 - protein, 15 aa, Homo sapiens
  CDR3 for alpha chain variable domain of TCR clone 222806 (TRAV29/DV5, TRAJ24)
CAASGATDSWGKFQF

SEQ ID NO: 445612 - protein, 12 aa, Homo sapiens
  CDR3 for beta chain variable domain of TCR clone 222806 (TRBV11-2, TRBJ2-2)
CASSLPNGELFF

SEQ ID NO: 445613 - protein, 14 aa, Homo sapiens
  CDR3 for alpha chain variable domain of TCR clone 222807 (TRAV20, TRAJ42)
CAVQARGSQGNLIF

SEQ ID NO: 445614 - protein, 15 aa, Homo sapiens
  CDR3 for beta chain variable domain of TCR clone 222807 (TRBV4-1, TRBJ1-4)
CASSDTGGTNEKLFF

SEQ ID NO: 445615 - protein, 13 aa, Homo sapiens
  CDR3 for alpha chain variable domain of TCR clone 222808 (TRAV3, TRAJ41)
CAVSSNSGYALNF

SEQ ID NO: 445616 - protein, 13 aa, Homo sapiens
  CDR3 for beta chain variable domain of TCR clone 222808 (TRBV19, TRBJ1-2)
CASSVPGQDGYTF

SEQ ID NO: 445617 - protein, 13 aa, Homo sapiens
  CDR3 for alpha chain variable domain of TCR clone 222809 (TRAV12-2, TRAJ11)
CAVPNSGYSTLTF

SEQ ID NO: 445618 - protein, 14 aa, Homo sapiens
  CDR3 for beta chain variable domain of TCR clone 222809 (TRBV25-1, TRBJ1-1)
CASTHLGGNTEAFF

SEQ ID NO: 445619 - protein, 16 aa, Homo sapiens
  CDR3 for alpha chain variable domain of TCR clone 222810 (TRAV30, TRAJ24)
CGTEIVDADSWRKFQF

SEQ ID NO: 445620 - protein, 12 aa, Homo sapiens
  CDR3 for beta chain variable domain of TCR clone 222810 (TRBV12-4, TRBJ2-3)
CASSSTTDTQYF

SEQ ID NO: 445621 - protein, 15 aa, Homo sapiens
  CDR3 for alpha chain variable domain of TCR clone 222811 (TRAV3, TRAJ47)
CAVRDIGEYGDNLVF

SEQ ID NO: 445622 - protein, 14 aa, Homo sapiens
  CDR3 for beta chain variable domain of TCR clone 222811 (TRBV13, TRBJ2-5)
CASSLERVGETQYF

SEQ ID NO: 445623 - protein, 13 aa, Homo sapiens
  CDR3 for alpha chain variable domain of TCR clone 222812 (TRAV12-1, TRAJ13)
CVVALLGYQKVTF

SEQ ID NO: 445624 - protein, 18 aa, Homo sapiens
  CDR3 for beta chain variable domain of TCR clone 222812 (TRBV18, TRBJ1-3)
CASSPRGGAGPSGNTIYF

SEQ ID NO: 445625 - protein, 15 aa, Homo sapiens
  CDR3 for alpha chain variable domain of TCR clone 222813 (TRAV12-2, TRAJ53)
CAVNGGGGSNFKLTF

SEQ ID NO: 445626 - protein, 14 aa, Homo sapiens
  CDR3 for beta chain variable domain of TCR clone 222813 (TRBV18, TRBJ2-7)
CASSPRGGAYEQYF

SEQ ID NO: 445627 - protein, 14 aa, Homo sapiens
  CDR3 for alpha chain variable domain of TCR clone 222814 (TRAV1-2, TRAJ16)
FAVNRFSDGQKLLF

SEQ ID NO: 445628 - protein, 15 aa, Homo sapiens
  CDR3 for beta chain variable domain of TCR clone 222814 (TRBV27, TRBJ2-3)
CASRSPAGVIDTQYF

SEQ ID NO: 445629 - protein, 16 aa, Homo sapiens
  CDR3 for alpha chain variable domain of TCR clone 222815 (TRAV1-2, TRAJ10)
CAVRGVLTGGGNKLTF

SEQ ID NO: 445630 - protein, 15 aa, Homo sapiens
  CDR3 for beta chain variable domain of TCR clone 222815 (TRBV7-2, TRBJ2-1)
CASSSGLAGGNEQFF

SEQ ID NO: 445631 - protein, 16 aa, Homo sapiens
  CDR3 for alpha chain variable domain of TCR clone 222816 (TRAV30, TRAJ24)
CGTEIVDADSWGKFQF

SEQ ID NO: 445632 - protein, 17 aa, Homo sapiens
  CDR3 for beta chain variable domain of TCR clone 222816 (TRBV20-1, TRBJ2-1)
CSASSSGLAGSDNEQFF

SEQ ID NO: 445633 - protein, 12 aa, Homo sapiens
  CDR3 for alpha chain variable domain of TCR clone 222817 (TRAV13-1, TRAJ21)
CAAKEGFDKFYF

SEQ ID NO: 445634 - protein, 13 aa, Homo sapiens
  CDR3 for beta chain variable domain of TCR clone 222817 (TRBV19, TRBJ2-7)
CASSPRQSYEQYF

SEQ ID NO: 445635 - protein, 11 aa, Homo sapiens
  CDR3 for alpha chain variable domain of TCR clone 222818 (TRAV12-2, TRAJ39)
CAVNNMLTFGG

SEQ ID NO: 445636 - protein, 15 aa, Homo sapiens
  CDR3 for beta chain variable domain of TCR clone 222818 (TRBV2, TRBJ2-5)
CASTRDGGPQETQYF

SEQ ID NO: 445637 - protein, 11 aa, Homo sapiens
  CDR3 for alpha chain variable domain of TCR clone 222819 (TRAV21, TRAJ11)
CAVNGYSTLTF

SEQ ID NO: 445638 - protein, 16 aa, Homo sapiens
  CDR3 for beta chain variable domain of TCR clone 222819 (TRBV9, TRBJ2-2)
CASSPTSGGGTGELFF

SEQ ID NO: 445639 - protein, 11 aa, Homo sapiens
  CDR3 for alpha chain variable domain of TCR clone 222820 (TRAV17, TRAJ31)
CATSNNARLMF

SEQ ID NO: 445640 - protein, 15 aa, Homo sapiens
  CDR3 for beta chain variable domain of TCR clone 222820 (TRBV3-1, TRBJ2-5)
CASSANLGGPETQYF

SEQ ID NO: 445641 - protein, 12 aa, Homo sapiens
  CDR3 for alpha chain variable domain of TCR clone 222821 (TRAV8-3, TRAJ34)
WASGYNTYKLIF

SEQ ID NO: 445642 - protein, 13 aa, Homo sapiens
  CDR3 for beta chain variable domain of TCR clone 222821 (TRBV6-4, TRBJ2-3)
CASSVSWADTQYF

SEQ ID NO: 445643 - protein, 12 aa, Homo sapiens
  CDR3 for alpha chain variable domain of TCR clone 222822 (TRAV12-1, TRAJ40)
CVVYSGTYKYIF

SEQ ID NO: 445644 - protein, 18 aa, Homo sapiens
  CDR3 for beta chain variable domain of TCR clone 222822 (TRBV11-2, TRBJ2-3)
WASSVGGASRGAPNTQYF

SEQ ID NO: 445645 - protein, 13 aa, Homo sapiens
  CDR3 for alpha chain variable domain of TCR clone 222823 (TRAV13-1, TRAJ46)
CAASIDADNKLTF

SEQ ID NO: 445646 - protein, 16 aa, Homo sapiens
  CDR3 for beta chain variable domain of TCR clone 222823 (TRBV20-1, TRBJ2-1)
CSATGRAGSYSDEQFF

SEQ ID NO: 445647 - protein, 14 aa, Homo sapiens
  CDR3 for alpha chain variable domain of TCR clone 222824 (TRAV12-2, TRAJ24)
CAVTPADSWGKLQF

SEQ ID NO: 445648 - protein, 15 aa, Homo sapiens
  CDR3 for beta chain variable domain of TCR clone 222824 (TRBV4-2, TRBJ1-1)
CASSQVGSMNTEAFF

SEQ ID NO: 445649 - protein, 14 aa, Homo sapiens
  CDR3 for alpha chain variable domain of TCR clone 222825 (TRAV23/DV6, TRAJ8)
CAASKNTGFQKLVF

SEQ ID NO: 445650 - protein, 16 aa, Homo sapiens
  CDR3 for beta chain variable domain of TCR clone 222825 (TRBV4-1, TRBJ2-6)
CASSQVGDHGADVLTF

SEQ ID NO: 445651 - protein, 15 aa, Homo sapiens
  CDR3 for alpha chain variable domain of TCR clone 222826 (TRAV21, TRAJ33)
CAVNPPRDSNYQLIW

SEQ ID NO: 445652 - protein, 15 aa, Homo sapiens
  CDR3 for beta chain variable domain of TCR clone 222826 (TRBV27, TRBJ2-1)
CASSNGGGSSNEQFF

SEQ ID NO: 445653 - protein, 15 aa, Homo sapiens
  CDR3 for alpha chain variable domain of TCR clone 222827 (TRAV8-4, TRAJ3)
CAVTGENLVQQCFQD

SEQ ID NO: 445654 - protein, 16 aa, Homo sapiens
  CDR3 for beta chain variable domain of TCR clone 222827 (TRBV4-2, TRBJ1-1)
CASSQAGFGMNTDAFF

SEQ ID NO: 445655 - protein, 13 aa, Homo sapiens
  CDR3 for alpha chain variable domain of TCR clone 222828 (TRAV2, TRAJ23)
CAVMGNPGGKLIF

SEQ ID NO: 445656 - protein, 15 aa, Homo sapiens
  CDR3 for beta chain variable domain of TCR clone 222828 (TRBV11-2, TRBJ2-1)
CASSSSTISYNEQFF

SEQ ID NO: 445657 - protein, 16 aa, Homo sapiens
  CDR3 for alpha chain variable domain of TCR clone 222829 (TRAV2, TRAJ32)
CAVEDGYGGATNKLIF

SEQ ID NO: 445658 - protein, 15 aa, Homo sapiens
  CDR3 for beta chain variable domain of TCR clone 222829 (TRBV9, TRBJ1-6)
CASSVAGTGDSPLHF

SEQ ID NO: 445659 - protein, 14 aa, Homo sapiens
  CDR3 for alpha chain variable domain of TCR clone 222830 (TRAV12-1, TRAJ17)
CVVNYKAAGNKLTF

SEQ ID NO: 445660 - protein, 16 aa, Homo sapiens
  CDR3 for beta chain variable domain of TCR clone 222830 (TRBV12-4, TRBJ1-5)
CASSRPVGGSNPPQHF

SEQ ID NO: 445661 - protein, 13 aa, Homo sapiens
  CDR3 for alpha chain variable domain of TCR clone 222831 (TRAV21, TRAJ3)
CCEPYSSASKIIF

SEQ ID NO: 445662 - protein, 15 aa, Homo sapiens
  CDR3 for beta chain variable domain of TCR clone 222831 (TRBV7-3, TRBJ2-1)
CASSPTVGGEVEQFF

SEQ ID NO: 445663 - protein, 14 aa, Homo sapiens
  CDR3 for alpha chain variable domain of TCR clone 222832 (TRAV13-1, TRAJ44)
CAAKATGTASKLTF

SEQ ID NO: 445664 - protein, 14 aa, Homo sapiens
  CDR3 for beta chain variable domain of TCR clone 222832 (TRBV3-1, TRBJ2-2)
CASSQDWVQGELFF

SEQ ID NO: 445665 - protein, 15 aa, Homo sapiens
  CDR3 for alpha chain variable domain of TCR clone 222833 (TRAV29/DV5, TRAJ47)
CAARPIMEYGNKLVF

SEQ ID NO: 445666 - protein, 13 aa, Homo sapiens
  CDR3 for beta chain variable domain of TCR clone 222833 (TRBV20-1, TRBJ1-1)
CSARAGGNTEAFF

SEQ ID NO: 445667 - protein, 13 aa, Homo sapiens
  CDR3 for alpha chain variable domain of TCR clone 222834 (TRAV13-1, TRAJ10)
CAATAAGGNKLTF

SEQ ID NO: 445668 - protein, 14 aa, Homo sapiens
  CDR3 for beta chain variable domain of TCR clone 222834 (TRBV12-4, TRBJ2-7)
CASSPAGLKYEQYF

SEQ ID NO: 445669 - protein, 16 aa, Homo sapiens
  CDR3 for alpha chain variable domain of TCR clone 222835 (TRAV30, TRAJ24)
CGTEIVDADSWGKFQT

SEQ ID NO: 445670 - protein, 14 aa, Homo sapiens
  CDR3 for beta chain variable domain of TCR clone 222835 (TRBV20-1, TRBJ1-1)
CSAQTRIGGTEAFF

SEQ ID NO: 445671 - protein, 14 aa, Homo sapiens
  CDR3 for alpha chain variable domain of TCR clone 222836 (TRAV1-2, TRAJ16)
CAVNRFSDGQKLLF

SEQ ID NO: 445672 - protein, 12 aa, Homo sapiens
  CDR3 for beta chain variable domain of TCR clone 222836 (TRBV10-3, TRBJ2-2)
CAIRENTGELFF

SEQ ID NO: 445673 - protein, 15 aa, Homo sapiens
  CDR3 for alpha chain variable domain of TCR clone 222837 (TRAV17, TRAJ57)
CDTGPSQGGSEKLVF

SEQ ID NO: 445674 - protein, 12 aa, Homo sapiens
  CDR3 for beta chain variable domain of TCR clone 222837 (TRBV7-8, TRBJ2-7)
CASSRGDREQYF

SEQ ID NO: 445675 - protein, 12 aa, Homo sapiens
  CDR3 for alpha chain variable domain of TCR clone 222838 (TRAV25, TRAJ31)
CAGHLNNARLMF

SEQ ID NO: 445676 - protein, 16 aa, Homo sapiens
  CDR3 for beta chain variable domain of TCR clone 222838 (TRBV10-3, TRBJ2-1)
CASRGGGRGDYNEQFF

SEQ ID NO: 445677 - protein, 15 aa, Homo sapiens
  CDR3 for alpha chain variable domain of TCR clone 222839 (TRAV8-3, TRAJ23)
CAVGDRYNQGGKLIF

SEQ ID NO: 445678 - protein, 22 aa, Homo sapiens
  CDR3 for beta chain variable domain of TCR clone 222839 (TRBV29-1, TRBJ2-5)
AVSNMSPEDSSIYLCSAGTQYF

SEQ ID NO: 445679 - protein, 14 aa, Homo sapiens
  CDR3 for alpha chain variable domain of TCR clone 222840 (TRAV26-1, TRAJ39)
CIVRGSRARNMLTF

SEQ ID NO: 445680 - protein, 15 aa, Homo sapiens
  CDR3 for beta chain variable domain of TCR clone 222840 (TRBV7-9, TRBJ1-5)
CASSQGHQPNQPQHF

SEQ ID NO: 445681 - protein, 11 aa, Homo sapiens
  CDR3 for alpha chain variable domain of TCR clone 222841 (TRAV21, TRAJ20)
CAVRDGYKLSF

SEQ ID NO: 445682 - protein, 14 aa, Homo sapiens
  CDR3 for beta chain variable domain of TCR clone 222841 (TRBV12-4, TRBJ1-1)
CASSFSQMNTEAFF

SEQ ID NO: 445683 - protein, 15 aa, Homo sapiens
  CDR3 for alpha chain variable domain of TCR clone 222842 (TRAV13-1, TRAJ11)
CAASNRNSGYSTLTF

SEQ ID NO: 445684 - protein, 11 aa, Homo sapiens
  CDR3 for beta chain variable domain of TCR clone 222842 (TRBV20-1, TRBJ2-7)
CSAGLSYEQYF

SEQ ID NO: 445685 - protein, 13 aa, Homo sapiens
  CDR3 for alpha chain variable domain of TCR clone 222843 (TRAV13-2, TRAJ49)
CAETLHGGNQFYF

SEQ ID NO: 445686 - protein, 14 aa, Homo sapiens
  CDR3 for beta chain variable domain of TCR clone 222843 (TRBV7-2, TRBJ2-7)
CASRSQGAAYEQYF

SEQ ID NO: 445687 - protein, 14 aa, Homo sapiens
  CDR3 for alpha chain variable domain of TCR clone 222844 (TRAV1-2, TRAJ16)
CAVDRFSDGQKLLF

SEQ ID NO: 445688 - protein, 15 aa, Homo sapiens
  CDR3 for beta chain variable domain of TCR clone 222844 (TRBV4-1, TRBJ1-4)
CASSDTGGTNEKLFF

SEQ ID NO: 445689 - protein, 14 aa, Homo sapiens
  CDR3 for alpha chain variable domain of TCR clone 222845 (TRAV29/DV5, TRAJ45)
CAASFRGGADGLTF

SEQ ID NO: 445690 - protein, 16 aa, Homo sapiens
  CDR3 for beta chain variable domain of TCR clone 222845 (TRBV7-3, TRBJ2-1)
CASSLEGYRSYNEQFF

SEQ ID NO: 445691 - protein, 14 aa, Homo sapiens
  CDR3 for alpha chain variable domain of TCR clone 222846 (TRAV8-3, TRAJ4)
CAVGAAGGYNKLIF

SEQ ID NO: 445692 - protein, 15 aa, Homo sapiens
  CDR3 for beta chain variable domain of TCR clone 222846 (TRBV7-8, TRBJ2-1)
CASSLADSLYNEQFF

SEQ ID NO: 445693 - protein, 13 aa, Homo sapiens
  CDR3 for alpha chain variable domain of TCR clone 222847 (TRAV27, TRAJ45)
CRSSVGGADGLTF

SEQ ID NO: 445694 - protein, 17 aa, Homo sapiens
  CDR3 for beta chain variable domain of TCR clone 222847 (TRBV11-2, TRBJ2-1)
CASTLYPPGVEYNEQFF

SEQ ID NO: 445695 - protein, 11 aa, Homo sapiens
  CDR3 for alpha chain variable domain of TCR clone 222848 (TRAV20, TRAJ26)
WWDNYGQNFVF

SEQ ID NO: 445696 - protein, 14 aa, Homo sapiens
  CDR3 for beta chain variable domain of TCR clone 222848 (TRBV7-3, TRBJ2-1)
CASSLAGGTNEQFF

SEQ ID NO: 445697 - protein, 16 aa, Homo sapiens
  CDR3 for alpha chain variable domain of TCR clone 222849 (TRAV1-2, TRAJ10)
CAVRGVLTGGGNKLTF

SEQ ID NO: 445698 - protein, 12 aa, Homo sapiens
  CDR3 for beta chain variable domain of TCR clone 222849 (TRBV7-8, TRBJ2-7)
GASSLGDREQYF

SEQ ID NO: 445699 - protein, 22 aa, Homo sapiens
  CDR3 for alpha chain variable domain of TCR clone 222850 (TRAV27, TRAJ40)
TAAQPGDTGLYLPCKGTYKYIF

SEQ ID NO: 445700 - protein, 17 aa, Homo sapiens
  CDR3 for beta chain variable domain of TCR clone 222850 (TRBV5-7, TRBJ2-1)
CASSFGLAGPAYNEQFF

SEQ ID NO: 445701 - protein, 14 aa, Homo sapiens
  CDR3 for alpha chain variable domain of TCR clone 222851 (TRAV38-1, TRAJ29)
CAFITPSGNTPLVF

SEQ ID NO: 445702 - protein, 17 aa, Homo sapiens
  CDR3 for beta chain variable domain of TCR clone 222851 (TRBV3-1, TRBJ2-7)
CASSEVGHRGPSYEQYF

SEQ ID NO: 445703 - protein, 14 aa, Homo sapiens
  CDR3 for alpha chain variable domain of TCR clone 222852 (TRAV13-1, TRAJ35)
CAASKGGFGNVLHC

SEQ ID NO: 445704 - protein, 14 aa, Homo sapiens
  CDR3 for beta chain variable domain of TCR clone 222852 (TRBV19, TRBJ2-2)
CATTGHANTGELFF

SEQ ID NO: 445705 - protein, 14 aa, Homo sapiens
  CDR3 for alpha chain variable domain of TCR clone 222853 (TRAV8-3, TRAJ37)
CAVGSSGNTGKLIF

SEQ ID NO: 445706 - protein, 15 aa, Homo sapiens
  CDR3 for beta chain variable domain of TCR clone 222853 (TRBV3-1, TRBJ1-2)
CASSHPGTPGYGYTF

SEQ ID NO: 445707 - protein, 11 aa, Homo sapiens
  CDR3 for alpha chain variable domain of TCR clone 222854 (TRAV8-3, TRAJ15)
CAVGPGTALIF

SEQ ID NO: 445708 - protein, 17 aa, Homo sapiens
  CDR3 for beta chain variable domain of TCR clone 222854 (TRBV18, TRBJ2-3)
CSSYTSGAAGGTDTQYF

SEQ ID NO: 445709 - protein, 11 aa, Homo sapiens
  CDR3 for alpha chain variable domain of TCR clone 222855 (TRAV2, TRAJ31)
CAVYNNARLMF

SEQ ID NO: 445710 - protein, 16 aa, Homo sapiens
  CDR3 for beta chain variable domain of TCR clone 222855 (TRBV28, TRBJ1-6)
CASSSRMEGDNSPLHF

SEQ ID NO: 445711 - protein, 16 aa, Homo sapiens
  CDR3 for alpha chain variable domain of TCR clone 222856 (TRAV30, TRAJ24)
CGTEIVDADSWGKFQF

SEQ ID NO: 445712 - protein, 13 aa, Homo sapiens
  CDR3 for beta chain variable domain of TCR clone 222856 (TRBV11-2, TRBJ2-5)
CASSPTGEETQYF

SEQ ID NO: 445713 - protein, 11 aa, Homo sapiens
  CDR3 for alpha chain variable domain of TCR clone 222857 (TRAV12-1, TRAJ30)
CVGNGQDKIIF

SEQ ID NO: 445714 - protein, 16 aa, Homo sapiens
  CDR3 for beta chain variable domain of TCR clone 222857 (TRBV24-1, TRBJ2-3)
CATSDAISGITDTQYF

SEQ ID NO: 445715 - protein, 14 aa, Homo sapiens
  CDR3 for alpha chain variable domain of TCR clone 222858 (TRAV12-3, TRAJ29)
YAMILLSGNTPLVF

SEQ ID NO: 445716 - protein, 16 aa, Homo sapiens
  CDR3 for beta chain variable domain of TCR clone 222858 (TRBV28, TRBJ2-7)
CASSSGTSGRGYEQYF

SEQ ID NO: 445717 - protein, 15 aa, Homo sapiens
  CDR3 for alpha chain variable domain of TCR clone 222859 (TRAV17, TRAJ35)
CATAFVIGFGNVLHC

SEQ ID NO: 445718 - protein, 14 aa, Homo sapiens
  CDR3 for beta chain variable domain of TCR clone 222859 (TRBV6-1, TRBJ1-3)
CASVQGGGGNTMYF

SEQ ID NO: 445719 - protein, 10 aa, Homo sapiens
  CDR3 for alpha chain variable domain of TCR clone 222860 (TRAV8-4, TRAJ43)
CAVSADDMRF

SEQ ID NO: 445720 - protein, 15 aa, Homo sapiens
  CDR3 for beta chain variable domain of TCR clone 222860 (TRBV13, TRBJ1-2)
CASSLGRQPGYGYTF

SEQ ID NO: 445721 - protein, 15 aa, Homo sapiens
  CDR3 for alpha chain variable domain of TCR clone 222861 (TRAV17, TRAJ23)
CATDAEDNQGGKLIF

SEQ ID NO: 445722 - protein, 15 aa, Homo sapiens
  CDR3 for beta chain variable domain of TCR clone 222861 (TRBV7-2, TRBJ1-2)
CASSPRAGWNYGYTF

SEQ ID NO: 445723 - protein, 23 aa, Homo sapiens
  CDR3 for alpha chain variable domain of TCR clone 222862 (TRAV26-1, )
CIVRVAGNNHIQNPDPAVYQLRD

SEQ ID NO: 445724 - protein, 17 aa, Homo sapiens
  CDR3 for beta chain variable domain of TCR clone 222862 (TRBV10-3, TRBJ1-1)
CAISESGTGGGTTEAFF

SEQ ID NO: 445725 - protein, 12 aa, Homo sapiens
  CDR3 for alpha chain variable domain of TCR clone 222863 (TRAV16, TRAJ5)
CSRTGGGNKLTF

SEQ ID NO: 445726 - protein, 13 aa, Homo sapiens
  CDR3 for beta chain variable domain of TCR clone 222863 (TRBV12-4, TRBJ2-7)
CASSPTETYKQYF

SEQ ID NO: 445727 - protein, 14 aa, Homo sapiens
  CDR3 for alpha chain variable domain of TCR clone 222864 (TRAV21, TRAJ53)
CAVVSGGSNYKLTF

SEQ ID NO: 445728 - protein, 13 aa, Homo sapiens
  CDR3 for beta chain variable domain of TCR clone 222864 (TRBV12-4, TRBJ2-5)
CASRLAVQETQYF

SEQ ID NO: 445729 - protein, 13 aa, Homo sapiens
  CDR3 for alpha chain variable domain of TCR clone 222865 (TRAV2, TRAJ20)
CAVEGPSEYELSF

SEQ ID NO: 445730 - protein, 16 aa, Homo sapiens
  CDR3 for beta chain variable domain of TCR clone 222865 (TRBV25-1, TRBJ2-7)
CASSELTGGGIYEQYF

SEQ ID NO: 445731 - protein, 15 aa, Homo sapiens
  CDR3 for alpha chain variable domain of TCR clone 222866 (TRAV3, TRAJ5)
CAVRDLDTGRRALTF

SEQ ID NO: 445732 - protein, 12 aa, Homo sapiens
  CDR3 for beta chain variable domain of TCR clone 222866 (TRBV28, TRBJ2-1)
CASSFRGNEQFF

SEQ ID NO: 445733 - protein, 17 aa, Homo sapiens
  CDR3 for alpha chain variable domain of TCR clone 222867 (TRAV4, TRAJ18)
CLVVAAGRGSTLRRLYF

SEQ ID NO: 445734 - protein, 17 aa, Homo sapiens
  CDR3 for beta chain variable domain of TCR clone 222867 (TRBV28, TRBJ2-2)
CASSLATGMGDAGELFF

SEQ ID NO: 445735 - protein, 14 aa, Homo sapiens
  CDR3 for alpha chain variable domain of TCR clone 222868 (TRAV1-2, TRAJ8)
CAVREDSGFQKLVF

SEQ ID NO: 445736 - protein, 11 aa, Homo sapiens
  CDR3 for beta chain variable domain of TCR clone 222868 (TRBV11-3, TRBJ2-7)
CASSRTYEQYF

SEQ ID NO: 445737 - protein, 15 aa, Homo sapiens
  CDR3 for alpha chain variable domain of TCR clone 222869 (TRAV27, TRAJ38)
CAARRNAGNNRKLIW

SEQ ID NO: 445738 - protein, 14 aa, Homo sapiens
  CDR3 for beta chain variable domain of TCR clone 222869 (TRBV5-7, TRBJ2-2)
CASSLARNTGELFF

SEQ ID NO: 445739 - protein, 15 aa, Homo sapiens
  CDR3 for alpha chain variable domain of TCR clone 222870 (TRAV38-1, TRAJ37)
CAFIFGSGNTGKLIF

SEQ ID NO: 445740 - protein, 12 aa, Homo sapiens
  CDR3 for beta chain variable domain of TCR clone 222870 (TRBV7-9, TRBJ2-7)
CARSLEGYEQYS

SEQ ID NO: 445741 - protein, 16 aa, Homo sapiens
  CDR3 for alpha chain variable domain of TCR clone 222871 (TRAV12-1, TRAJ43)
RVVNPHRFGAGTRLTV

SEQ ID NO: 445742 - protein, 13 aa, Homo sapiens
  CDR3 for beta chain variable domain of TCR clone 222871 (TRBV12-4, TRBJ1-2)
CASSSGPNYGYTF

SEQ ID NO: 445743 - protein, 13 aa, Homo sapiens
  CDR3 for alpha chain variable domain of TCR clone 222872 (TRAV12-1, TRAJ16)
CVVNGPDGQKLLF

SEQ ID NO: 445744 - protein, 16 aa, Homo sapiens
  CDR3 for beta chain variable domain of TCR clone 222872 (TRBV7-2, TRBJ2-5)
CASSSKWLSGQETQYF

SEQ ID NO: 445745 - protein, 12 aa, Homo sapiens
  CDR3 for alpha chain variable domain of TCR clone 222873 (TRAV12-3, TRAJ17)
CAMTLTGYKLTF

SEQ ID NO: 445746 - protein, 13 aa, Homo sapiens
  CDR3 for beta chain variable domain of TCR clone 222873 (TRBV10-2, TRBJ2-7)
CASGASGGYEQYF

SEQ ID NO: 445747 - protein, 14 aa, Homo sapiens
  CDR3 for alpha chain variable domain of TCR clone 222874 (TRAV12-1, TRAJ17)
CVVNYKAAGNKLTF

SEQ ID NO: 445748 - protein, 15 aa, Homo sapiens
  CDR3 for beta chain variable domain of TCR clone 222874 (TRBV7-2, TRBJ2-1)
CASTHGTGIYSEQFF

SEQ ID NO: 445749 - protein, 13 aa, Homo sapiens
  CDR3 for alpha chain variable domain of TCR clone 222875 (TRAV22, TRAJ29)
CAVGGSGNTPLVF

SEQ ID NO: 445750 - protein, 14 aa, Homo sapiens
  CDR3 for beta chain variable domain of TCR clone 222875 (TRBV29-1, TRBJ2-2)
CSVLAETNTGELFF

SEQ ID NO: 445751 - protein, 12 aa, Homo sapiens
  CDR3 for alpha chain variable domain of TCR clone 222876 (TRAV2, TRAJ33)
CAFMDSNYQLIW

SEQ ID NO: 445752 - protein, 16 aa, Homo sapiens
  CDR3 for beta chain variable domain of TCR clone 222876 (TRBV2, TRBJ2-7)
CASSEPWTGPSYELYF

SEQ ID NO: 445753 - protein, 16 aa, Homo sapiens
  CDR3 for alpha chain variable domain of TCR clone 222877 (TRAV26-1, TRAJ52)
CIVSNAGGTSYGKLTF

SEQ ID NO: 445754 - protein, 16 aa, Homo sapiens
  CDR3 for beta chain variable domain of TCR clone 222877 (TRBV5-1, TRBJ2-1)
CASSLEGRVLYNEQFF

SEQ ID NO: 445755 - protein, 16 aa, Homo sapiens
  CDR3 for alpha chain variable domain of TCR clone 222878 (TRAV4, TRAJ5)
CLVGPDHGHGQESTYF

SEQ ID NO: 445756 - protein, 15 aa, Homo sapiens
  CDR3 for beta chain variable domain of TCR clone 222878 (TRBV6-3, TRBJ2-7)
SASSSPGTVFYEQYF

SEQ ID NO: 445757 - protein, 12 aa, Homo sapiens
  CDR3 for alpha chain variable domain of TCR clone 222879 (TRAV12-1, TRAJ40)
CVVYSGTYKYIF

SEQ ID NO: 445758 - protein, 18 aa, Homo sapiens
  CDR3 for beta chain variable domain of TCR clone 222879 (TRBV11-2, TRBJ2-3)
CASSLGGAARGATNTQYF

SEQ ID NO: 445759 - protein, 13 aa, Homo sapiens
  CDR3 for alpha chain variable domain of TCR clone 222880 (TRAV12-1, TRAJ26)
CVVRRNYGQNFVF

SEQ ID NO: 445760 - protein, 14 aa, Homo sapiens
  CDR3 for beta chain variable domain of TCR clone 222880 (TRBV6-3, TRBJ1-1)
CTSRYSGESTEAFF

SEQ ID NO: 445761 - protein, 11 aa, Homo sapiens
  CDR3 for alpha chain variable domain of TCR clone 222881 (TRAV3, TRAJ21)
CAVGNFNKFYF

SEQ ID NO: 445762 - protein, 14 aa, Homo sapiens
  CDR3 for beta chain variable domain of TCR clone 222881 (TRBV20-1, TRBJ2-2)
CSAPDTASTGELFF

SEQ ID NO: 445763 - protein, 11 aa, Homo sapiens
  CDR3 for alpha chain variable domain of TCR clone 222882 (TRAV2, TRAJ21)
CAVFNFNKFYV

SEQ ID NO: 445764 - protein, 14 aa, Homo sapiens
  CDR3 for beta chain variable domain of TCR clone 222882 (TRBV15, TRBJ2-3)
CATRSGTSTDTQYF

SEQ ID NO: 445765 - protein, 13 aa, Homo sapiens
  CDR3 for alpha chain variable domain of TCR clone 222883 (TRAV17, TRAJ40)
CAGALGGTYKYIF

SEQ ID NO: 445766 - protein, 16 aa, Homo sapiens
  CDR3 for beta chain variable domain of TCR clone 222883 (TRBV7-2, TRBJ1-4)
CASSLAPGRRDERLFF

SEQ ID NO: 445767 - protein, 15 aa, Homo sapiens
  CDR3 for alpha chain variable domain of TCR clone 222884 (TRAV8-6, TRAJ20)
CAVTRPGSNDYKLSF

SEQ ID NO: 445768 - protein, 14 aa, Homo sapiens
  CDR3 for beta chain variable domain of TCR clone 222884 (TRBV7-6, TRBJ2-1)
CASSLGGGADEQFF

SEQ ID NO: 445769 - protein, 11 aa, Homo sapiens
  CDR3 for alpha chain variable domain of TCR clone 222885 (TRAV16, TRAJ49)
CAEGPVTSSIL

SEQ ID NO: 445770 - protein, 18 aa, Homo sapiens
  CDR3 for beta chain variable domain of TCR clone 222885 (TRBV28, TRBJ2-7)
CASSSGLAGVGTSSTSGR

SEQ ID NO: 445771 - protein, 14 aa, Homo sapiens
  CDR3 for alpha chain variable domain of TCR clone 222886 (TRAV8-4, TRAJ13)
CAVTLSGGYQKVTF

SEQ ID NO: 445772 - protein, 15 aa, Homo sapiens
  CDR3 for beta chain variable domain of TCR clone 222886 (TRBV11-2, TRBJ2-7)
CASSPIGGKAYEQYF

SEQ ID NO: 445773 - protein, 14 aa, Homo sapiens
  CDR3 for alpha chain variable domain of TCR clone 222887 (TRAV12-3, TRAJ12)
CAMSALDSSYKLIF

SEQ ID NO: 445774 - protein, 16 aa, Homo sapiens
  CDR3 for beta chain variable domain of TCR clone 222887 (TRBV7-9, TRBJ2-3)
CASSLQGNPGTDQQYF

SEQ ID NO: 445775 - protein, 11 aa, Homo sapiens
  CDR3 for alpha chain variable domain of TCR clone 222888 (TRAV17, TRAJ9)
CATTGGFKTIF

SEQ ID NO: 445776 - protein, 14 aa, Homo sapiens
  CDR3 for beta chain variable domain of TCR clone 222888 (TRBV7-3, TRBJ1-1)
CASSRQGGDTEAFF

SEQ ID NO: 445777 - protein, 13 aa, Homo sapiens
  CDR3 for alpha chain variable domain of TCR clone 222889 (TRAV2, TRAJ47)
CAMDREYGNKLVF

SEQ ID NO: 445778 - protein, 17 aa, Homo sapiens
  CDR3 for beta chain variable domain of TCR clone 222889 (TRBV15, TRBJ1-5)
CATSRVKGIYSNQPQHF

SEQ ID NO: 445779 - protein, 14 aa, Homo sapiens
  CDR3 for alpha chain variable domain of TCR clone 222890 (TRAV12-1, TRAJ6)
CVVPTTGGSYIPTF

SEQ ID NO: 445780 - protein, 16 aa, Homo sapiens
  CDR3 for beta chain variable domain of TCR clone 222890 (TRBV2, TRBJ2-7)
CASSEPWTGPSYEQYF

SEQ ID NO: 445781 - protein, 12 aa, Homo sapiens
  CDR3 for alpha chain variable domain of TCR clone 222891 (TRAV21, TRAJ3)
CCFYSSASKIIF

SEQ ID NO: 445782 - protein, 15 aa, Homo sapiens
  CDR3 for beta chain variable domain of TCR clone 222891 (TRBV7-9, TRBJ1-6)
CASSSPGRGNSPLHF

SEQ ID NO: 445783 - protein, 14 aa, Homo sapiens
  CDR3 for alpha chain variable domain of TCR clone 222892 (TRAV12-2, TRAJ45)
CAVNKGGGADGLTF

SEQ ID NO: 445784 - protein, 13 aa, Homo sapiens
  CDR3 for beta chain variable domain of TCR clone 222892 (TRBV20-1, TRBJ1-1)
QCYGRTANTEAFF

SEQ ID NO: 445785 - protein, 13 aa, Homo sapiens
  CDR3 for alpha chain variable domain of TCR clone 222893 (TRAV27, TRAJ56)
CAGKPGANSKLTF

SEQ ID NO: 445786 - protein, 16 aa, Homo sapiens
  CDR3 for beta chain variable domain of TCR clone 222893 (TRBV4-1, TRBJ2-7)
CASSQEWTSGPLEQYF

SEQ ID NO: 445787 - protein, 15 aa, Homo sapiens
  CDR3 for alpha chain variable domain of TCR clone 222894 (TRAV2, TRAJ15)
CAVECRGQAGTALIF

SEQ ID NO: 445788 - protein, 13 aa, Homo sapiens
  CDR3 for beta chain variable domain of TCR clone 222894 (TRBV10-2, TRBJ2-7)
CASGASGGYEQYF

SEQ ID NO: 445789 - protein, 14 aa, Homo sapiens
  CDR3 for alpha chain variable domain of TCR clone 222895 (TRAV1-2, TRAJ8)
CAVREDTGFQKLVF

SEQ ID NO: 445790 - protein, 13 aa, Homo sapiens
  CDR3 for beta chain variable domain of TCR clone 222895 (TRBV20-1, TRBJ2-3)
CSARLAGTDTQYF

SEQ ID NO: 445791 - protein, 15 aa, Homo sapiens
  CDR3 for alpha chain variable domain of TCR clone 222896 (TRAV3, TRAJ22)
CAVRDRGGSARQLTF

SEQ ID NO: 445792 - protein, 12 aa, Homo sapiens
  CDR3 for beta chain variable domain of TCR clone 222896 (TRBV12-4, TRBJ2-1)
CASSKDRRWQFF

SEQ ID NO: 445793 - protein, 15 aa, Homo sapiens
  CDR3 for alpha chain variable domain of TCR clone 222897 (TRAV27, TRAJ38)
CAARRNAGSNRKLMW

SEQ ID NO: 445794 - protein, 13 aa, Homo sapiens
  CDR3 for beta chain variable domain of TCR clone 222897 (TRBV12-5, TRBJ2-3)
CASGDRQSDTQYF

SEQ ID NO: 445795 - protein, 13 aa, Homo sapiens
  CDR3 for alpha chain variable domain of TCR clone 222898 (TRAV8-4, TRAJ54)
CAVTGGGAQKLVF

SEQ ID NO: 445796 - protein, 12 aa, Homo sapiens
  CDR3 for beta chain variable domain of TCR clone 222898 (TRBV11-2, TRBJ2-2)
CASSLGGGELFF

SEQ ID NO: 445797 - protein, 13 aa, Homo sapiens
  CDR3 for alpha chain variable domain of TCR clone 222899 (TRAV38-2/DV8, TRAJ34)
CAYRTWNADKPIL

SEQ ID NO: 445798 - protein, 18 aa, Homo sapiens
  CDR3 for beta chain variable domain of TCR clone 222899 (TRBV6-6, TRBJ1-3)
CASSYSKWDSISGNTIYF

SEQ ID NO: 445799 - protein, 13 aa, Homo sapiens
  CDR3 for alpha chain variable domain of TCR clone 222900 (TRAV17, TRAJ9)
CATDYSGGFKTIF

SEQ ID NO: 445800 - protein, 14 aa, Homo sapiens
  CDR3 for beta chain variable domain of TCR clone 222900 (TRBV19, TRBJ2-5)
CASSMTGQQETQYF

SEQ ID NO: 445801 - protein, 13 aa, Homo sapiens
  CDR3 for alpha chain variable domain of TCR clone 222901 (TRAV27, TRAJ8)
CAGGPTGFQNLVF

SEQ ID NO: 445802 - protein, 15 aa, Homo sapiens
  CDR3 for beta chain variable domain of TCR clone 222901 (TRBV7-2, TRBJ2-1)
CASSSGLAGGNEQFF

SEQ ID NO: 445803 - protein, 14 aa, Homo sapiens
  CDR3 for alpha chain variable domain of TCR clone 222902 (TRAV20, TRAJ42)
CAVQAGGSPGNLLF

SEQ ID NO: 445804 - protein, 14 aa, Homo sapiens
  CDR3 for beta chain variable domain of TCR clone 222902 (TRBV28, TRBJ1-2)
CASRIQGANYGYTF

SEQ ID NO: 445805 - protein, 17 aa, Homo sapiens
  CDR3 for alpha chain variable domain of TCR clone 222903 (TRAV3, TRAJ12)
CAVRDGGRMDSSYKLIF

SEQ ID NO: 445806 - protein, 13 aa, Homo sapiens
  CDR3 for beta chain variable domain of TCR clone 222903 (TRBV15, TRBJ1-6)
CATSGGRNSPLHF

SEQ ID NO: 445807 - protein, 12 aa, Homo sapiens
  CDR3 for alpha chain variable domain of TCR clone 222904 (TRAV13-1, TRAJ22)
FAGRRSARQLTF

SEQ ID NO: 445808 - protein, 15 aa, Homo sapiens
  CDR3 for beta chain variable domain of TCR clone 222904 (TRBV20-1, TRBJ2-7)
CSASVWGQESYEQYY

SEQ ID NO: 445809 - protein, 14 aa, Homo sapiens
  CDR3 for alpha chain variable domain of TCR clone 222905 (TRAV12-2, TRAJ40)
CAVKIPSGTYKYIF

SEQ ID NO: 445810 - protein, 15 aa, Homo sapiens
  CDR3 for beta chain variable domain of TCR clone 222905 (TRBV19, TRBJ2-7)
CASSIGGGLVNEQYF

SEQ ID NO: 445811 - protein, 13 aa, Homo sapiens
  CDR3 for alpha chain variable domain of TCR clone 222906 (TRAV1-2, TRAJ9)
CAALNTGGFKTIF

SEQ ID NO: 445812 - protein, 14 aa, Homo sapiens
  CDR3 for beta chain variable domain of TCR clone 222906 (TRBV7-9, TRBJ2-7)
CASSLSQGSYEQYF

SEQ ID NO: 445813 - protein, 16 aa, Homo sapiens
  CDR3 for alpha chain variable domain of TCR clone 222907 (TRAV26-1, TRAJ45)
CIVEKYSGGGADGLTF

SEQ ID NO: 445814 - protein, 16 aa, Homo sapiens
  CDR3 for beta chain variable domain of TCR clone 222907 (TRBV10-3, TRBJ1-6)
CAISEGRGQGNSPLHF

SEQ ID NO: 445815 - protein, 12 aa, Homo sapiens
  CDR3 for alpha chain variable domain of TCR clone 222908 (TRAV13-1, TRAJ21)
SAAKEGFNKFYF

SEQ ID NO: 445816 - protein, 17 aa, Homo sapiens
  CDR3 for beta chain variable domain of TCR clone 222908 (TRBV20-1, TRBJ2-1)
CSASSSGLAGSYNEQFF

SEQ ID NO: 445817 - protein, 10 aa, Homo sapiens
  CDR3 for alpha chain variable domain of TCR clone 222909 (TRAV8-4, TRAJ39)
RAVAGNMLTF

SEQ ID NO: 445818 - protein, 15 aa, Homo sapiens
  CDR3 for beta chain variable domain of TCR clone 222909 (TRBV13, TRBJ2-1)
CASSFQPTRGNEQFF

SEQ ID NO: 445819 - protein, 10 aa, Homo sapiens
  CDR3 for alpha chain variable domain of TCR clone 222910 (TRAV25, TRAJ20)
CAGNDYKLSF

SEQ ID NO: 445820 - protein, 15 aa, Homo sapiens
  CDR3 for beta chain variable domain of TCR clone 222910 (TRBV18, TRBJ2-5)
CASSPDPGLQETQYF

SEQ ID NO: 445821 - protein, 11 aa, Homo sapiens
  CDR3 for alpha chain variable domain of TCR clone 222911 (TRAV36/DV7, TRAJ45)
SGGGGADGLTS

SEQ ID NO: 445822 - protein, 13 aa, Homo sapiens
  CDR3 for beta chain variable domain of TCR clone 222911 (TRBV28, TRBJ2-7)
CASSPSGTYEQYF

SEQ ID NO: 445823 - protein, 13 aa, Homo sapiens
  CDR3 for alpha chain variable domain of TCR clone 222912 (TRAV35, TRAJ42)
CAGFSGSQGNLIF

SEQ ID NO: 445824 - protein, 13 aa, Homo sapiens
  CDR3 for beta chain variable domain of TCR clone 222912 (TRBV29-1, TRBJ2-1)
CSVEGGRVNEQFF

SEQ ID NO: 445825 - protein, 16 aa, Homo sapiens
  CDR3 for alpha chain variable domain of TCR clone 222913 (TRAV8-4, TRAJ28)
CAEESNSGAGSYQLTF

SEQ ID NO: 445826 - protein, 15 aa, Homo sapiens
  CDR3 for beta chain variable domain of TCR clone 222913 (TRBV6-5, TRBJ2-1)
CASRRAQLSYNEQFF

SEQ ID NO: 445827 - protein, 13 aa, Homo sapiens
  CDR3 for alpha chain variable domain of TCR clone 222914 (TRAV8-6, TRAJ49)
CAVITNTGHPFYF

SEQ ID NO: 445828 - protein, 14 aa, Homo sapiens
  CDR3 for beta chain variable domain of TCR clone 222914 (TRBV5-1, TRBJ2-7)
CASSRGESLYEQYF

SEQ ID NO: 445829 - protein, 14 aa, Homo sapiens
  CDR3 for alpha chain variable domain of TCR clone 222915 (TRAV12-2, TRAJ13)
CAVKKTGGYQKVTF

SEQ ID NO: 445830 - protein, 13 aa, Homo sapiens
  CDR3 for beta chain variable domain of TCR clone 222915 (TRBV2, TRBJ2-7)
CASSVGGSGEQYL

SEQ ID NO: 445831 - protein, 13 aa, Homo sapiens
  CDR3 for alpha chain variable domain of TCR clone 222916 (TRAV21, TRAJ57)
CAVTQGGSEKLVF

SEQ ID NO: 445832 - protein, 14 aa, Homo sapiens
  CDR3 for beta chain variable domain of TCR clone 222916 (TRBV19, TRBJ2-1)
CARGARSFQWEQFF

SEQ ID NO: 445833 - protein, 16 aa, Homo sapiens
  CDR3 for alpha chain variable domain of TCR clone 222917 (TRAV3, TRAJ37)
CAVRGKGSDNTGKLIF

SEQ ID NO: 445834 - protein, 12 aa, Homo sapiens
  CDR3 for beta chain variable domain of TCR clone 222917 (TRBV25-1, TRBJ2-6)
CARGGGANVLTF

SEQ ID NO: 445835 - protein, 14 aa, Homo sapiens
  CDR3 for alpha chain variable domain of TCR clone 222918 (TRAV2, TRAJ9)
CAVEDRSGGFKTIF

SEQ ID NO: 445836 - protein, 18 aa, Homo sapiens
  CDR3 for beta chain variable domain of TCR clone 222918 (TRBV20-1, TRBJ2-5)
CRQTGDSGRLGGKETQYF

SEQ ID NO: 445837 - protein, 16 aa, Homo sapiens
  CDR3 for alpha chain variable domain of TCR clone 222919 (TRAV13-1, TRAJ3)
CAATGVQQCFHDNLWF

SEQ ID NO: 445838 - protein, 16 aa, Homo sapiens
  CDR3 for beta chain variable domain of TCR clone 222919 (TRBV7-3, TRBJ2-2)
CASSLKRGTLSGELFF

SEQ ID NO: 445839 - protein, 15 aa, Homo sapiens
  CDR3 for alpha chain variable domain of TCR clone 222920 (TRAV17, TRAJ52)
CATEAGGTSYGKLTF

SEQ ID NO: 445840 - protein, 16 aa, Homo sapiens
  CDR3 for beta chain variable domain of TCR clone 222920 (TRBV20-1, TRBJ2-1)
CSAGRPAGGAYKEQFF

SEQ ID NO: 445841 - protein, 12 aa, Homo sapiens
  CDR3 for alpha chain variable domain of TCR clone 222921 (TRAV12-2, TRAJ8)
CAVNTGFQKLVF

SEQ ID NO: 445842 - protein, 15 aa, Homo sapiens
  CDR3 for beta chain variable domain of TCR clone 222921 (TRBV11-3, TRBJ2-3)
CASLKDGREGDTQYF

SEQ ID NO: 445843 - protein, 15 aa, Homo sapiens
  CDR3 for alpha chain variable domain of TCR clone 222922 (TRAV12-2, TRAJ8)
CAVREENTGFQKLVF

SEQ ID NO: 445844 - protein, 15 aa, Homo sapiens
  CDR3 for beta chain variable domain of TCR clone 222922 (TRBV10-2, TRBJ2-6)
CASSEQGTGANVLTF

SEQ ID NO: 445845 - protein, 14 aa, Homo sapiens
  CDR3 for alpha chain variable domain of TCR clone 222923 (TRAV12-3, TRAJ37)
CVSEGSSNTGNLIF

SEQ ID NO: 445846 - protein, 14 aa, Homo sapiens
  CDR3 for beta chain variable domain of TCR clone 222923 (TRBV20-1, TRBJ1-1)
CSAQTRIGGTEAFF

SEQ ID NO: 445847 - protein, 16 aa, Homo sapiens
  CDR3 for alpha chain variable domain of TCR clone 222924 (TRAV3, TRAJ28)
CAVLLRSGAGSYQLPF

SEQ ID NO: 445848 - protein, 14 aa, Homo sapiens
  CDR3 for beta chain variable domain of TCR clone 222924 (TRBV19, TRBJ2-1)
CASPTFVLSGEQFF

SEQ ID NO: 445849 - protein, 14 aa, Homo sapiens
  CDR3 for alpha chain variable domain of TCR clone 222925 (TRAV16, TRAJ34)
CALPYDYNTDKLIF

SEQ ID NO: 445850 - protein, 15 aa, Homo sapiens
  CDR3 for beta chain variable domain of TCR clone 222925 (TRBV7-9, TRBJ1-6)
CASSSPGRGNSPLHF

SEQ ID NO: 445851 - protein, 13 aa, Homo sapiens
  CDR3 for alpha chain variable domain of TCR clone 222926 (TRAV2, TRAJ40)
CAVVTSGTYKYIF

SEQ ID NO: 445852 - protein, 18 aa, Homo sapiens
  CDR3 for beta chain variable domain of TCR clone 222926 (TRBV23-1, TRBJ2-3)
CISAPAVNRPASTDTQYF

SEQ ID NO: 445853 - protein, 15 aa, Homo sapiens
  CDR3 for alpha chain variable domain of TCR clone 222927 (TRAV13-1, TRAJ44)
CAASRNTGTASKLTF

SEQ ID NO: 445854 - protein, 14 aa, Homo sapiens
  CDR3 for beta chain variable domain of TCR clone 222927 (TRBV11-2, TRBJ1-2)
CAISLYRGNYGYTF

SEQ ID NO: 445855 - protein, 15 aa, Homo sapiens
  CDR3 for alpha chain variable domain of TCR clone 222928 (TRAV8-4, TRAJ6)
CAVSAPSGGSYIPTF

SEQ ID NO: 445856 - protein, 15 aa, Homo sapiens
  CDR3 for beta chain variable domain of TCR clone 222928 (TRBV2, TRBJ2-1)
CASSEARSAQNEQFF

SEQ ID NO: 445857 - protein, 12 aa, Homo sapiens
  CDR3 for alpha chain variable domain of TCR clone 222929 (TRAV12-2, TRAJ10)
WGVTGGGNKLTF

SEQ ID NO: 445858 - protein, 15 aa, Homo sapiens
  CDR3 for beta chain variable domain of TCR clone 222929 (TRBV7-8, TRBJ2-1)
CASSLAGGLYNEQFF

SEQ ID NO: 445859 - protein, 15 aa, Homo sapiens
  CDR3 for alpha chain variable domain of TCR clone 222930 (TRAV12-3, TRAJ11)
CALSEENSGYSTLTF

SEQ ID NO: 445860 - protein, 16 aa, Homo sapiens
  CDR3 for beta chain variable domain of TCR clone 222930 (TRBV5-1, TRBJ2-7)
CASSLEGLAGLYEQYF

SEQ ID NO: 445861 - protein, 11 aa, Homo sapiens
  CDR3 for alpha chain variable domain of TCR clone 222931 (TRAV3, TRAJ49)
CAPITGNQFYF

SEQ ID NO: 445862 - protein, 16 aa, Homo sapiens
  CDR3 for beta chain variable domain of TCR clone 222931 (TRBV12-5, TRBJ2-5)
CASGPRTSGNQETQYF

SEQ ID NO: 445863 - protein, 13 aa, Homo sapiens
  CDR3 for alpha chain variable domain of TCR clone 222932 (TRAV12-2, TRAJ39)
CAVNNNAGNMLTF

SEQ ID NO: 445864 - protein, 13 aa, Homo sapiens
  CDR3 for beta chain variable domain of TCR clone 222932 (TRBV2, TRBJ1-5)
CATAVPGNQPQHF

SEQ ID NO: 445865 - protein, 12 aa, Homo sapiens
  CDR3 for alpha chain variable domain of TCR clone 222933 (TRAV10, TRAJ6)
CVVSEGSYIPTF

SEQ ID NO: 445866 - protein, 11 aa, Homo sapiens
  CDR3 for beta chain variable domain of TCR clone 222933 (TRBV6-3, TRBJ2-3)
CATGQADTQYF

SEQ ID NO: 445867 - protein, 12 aa, Homo sapiens
  CDR3 for alpha chain variable domain of TCR clone 222934 (TRAV17, TRAJ20)
CATDSNDYKLSF

SEQ ID NO: 445868 - protein, 13 aa, Homo sapiens
  CDR3 for beta chain variable domain of TCR clone 222934 (TRBV7-2, TRBJ1-2)
CASSSNQDRRGMA

SEQ ID NO: 445869 - protein, 17 aa, Homo sapiens
  CDR3 for alpha chain variable domain of TCR clone 222935 (TRAV38-2/DV8, TRAJ28)
CAFLTLYSGAGSYQLTF

SEQ ID NO: 445870 - protein, 18 aa, Homo sapiens
  CDR3 for beta chain variable domain of TCR clone 222935 (TRBV7-2, TRBJ2-5)
CASSLSGGGDPVLRARHA

SEQ ID NO: 445871 - protein, 11 aa, Homo sapiens
  CDR3 for alpha chain variable domain of TCR clone 222936 (TRAV2, TRAJ13)
CASGGDQKVTF

SEQ ID NO: 445872 - protein, 15 aa, Homo sapiens
  CDR3 for beta chain variable domain of TCR clone 222936 (TRBV20-1, TRBJ2-7)
CSARDRVSGMDEQYF

SEQ ID NO: 445873 - protein, 13 aa, Homo sapiens
  CDR3 for alpha chain variable domain of TCR clone 222937 (TRAV8-4, TRAJ30)
CAVSVNRDDKINF

SEQ ID NO: 445874 - protein, 13 aa, Homo sapiens
  CDR3 for beta chain variable domain of TCR clone 222937 (TRBV3-1, TRBJ2-2)
CASLARGSGELFF

SEQ ID NO: 445875 - protein, 15 aa, Homo sapiens
  CDR3 for alpha chain variable domain of TCR clone 222938 (TRAV21, TRAJ53)
CATLNSGGSNDKLTF

SEQ ID NO: 445876 - protein, 15 aa, Homo sapiens
  CDR3 for beta chain variable domain of TCR clone 222938 (TRBV5-1, TRBJ2-3)
CASSYTSGSTDTQYF

SEQ ID NO: 445877 - protein, 16 aa, Homo sapiens
  CDR3 for alpha chain variable domain of TCR clone 222939 (TRAV16, TRAJ52)
CALSGVGGTSYGKLTF

SEQ ID NO: 445878 - protein, 11 aa, Homo sapiens
  CDR3 for beta chain variable domain of TCR clone 222939 (TRBV6-3, TRBJ2-3)
CATGQADTQYF

SEQ ID NO: 445879 - protein, 13 aa, Homo sapiens
  CDR3 for alpha chain variable domain of TCR clone 222940 (TRAV13-1, TRAJ11)
CAAALAGYSTLTF

SEQ ID NO: 445880 - protein, 17 aa, Homo sapiens
  CDR3 for beta chain variable domain of TCR clone 222940 (TRBV25-1, TRBJ2-7)
CASSDARVVFSSYEQYF

SEQ ID NO: 445881 - protein, 17 aa, Homo sapiens
  CDR3 for alpha chain variable domain of TCR clone 222941 (TRAV26-1, TRAJ53)
CIVRVDDGGGSNYKLTF

SEQ ID NO: 445882 - protein, 11 aa, Homo sapiens
  CDR3 for beta chain variable domain of TCR clone 222941 (TRBV20-1, TRBJ2-7)
ESAAYFYEQYF

SEQ ID NO: 445883 - protein, 12 aa, Homo sapiens
  CDR3 for alpha chain variable domain of TCR clone 222942 (TRAV21, TRAJ13)
PGPSGGYQKVTF

SEQ ID NO: 445884 - protein, 15 aa, Homo sapiens
  CDR3 for beta chain variable domain of TCR clone 222942 (TRBV7-9, TRBJ1-6)
CASSSPGRGNSPIHF

SEQ ID NO: 445885 - protein, 14 aa, Homo sapiens
  CDR3 for alpha chain variable domain of TCR clone 222943 (TRAV13-1, TRAJ44)
CAATATGTASKLTF

SEQ ID NO: 445886 - protein, 12 aa, Homo sapiens
  CDR3 for beta chain variable domain of TCR clone 222943 (TRBV7-8, TRBJ2-7)
CASSLGDREQYF

SEQ ID NO: 445887 - protein, 13 aa, Homo sapiens
  CDR3 for alpha chain variable domain of TCR clone 222944 (TRAV23/DV6, TRAJ58)
CAARLIRGSRLTF

SEQ ID NO: 445888 - protein, 13 aa, Homo sapiens
  CDR3 for beta chain variable domain of TCR clone 222944 (TRBV2, TRBJ1-6)
CADSGSYNSTLLF

SEQ ID NO: 445889 - protein, 14 aa, Homo sapiens
  CDR3 for alpha chain variable domain of TCR clone 222945 (TRAV12-2, TRAJ13)
CAVKKTGGYQKATF

SEQ ID NO: 445890 - protein, 14 aa, Homo sapiens
  CDR3 for beta chain variable domain of TCR clone 222945 (TRBV5-5, TRBJ2-7)
CASSLGQGTYEQYF

SEQ ID NO: 445891 - protein, 13 aa, Homo sapiens
  CDR3 for alpha chain variable domain of TCR clone 222946 (TRAV12-2, TRAJ6)
CAVNVSRKLHTYI

SEQ ID NO: 445892 - protein, 13 aa, Homo sapiens
  CDR3 for beta chain variable domain of TCR clone 222946 (TRBV12-4, TRBJ1-5)
CASRSRGNQPQHF

SEQ ID NO: 445893 - protein, 11 aa, Homo sapiens
  CDR3 for alpha chain variable domain of TCR clone 222947 (TRAV1-2, TRAJ34)
CAPYNTDKLIF

SEQ ID NO: 445894 - protein, 15 aa, Homo sapiens
  CDR3 for beta chain variable domain of TCR clone 222947 (TRBV29-1, TRBJ2-3)
CSVVHAATVTDTQYF

SEQ ID NO: 445895 - protein, 14 aa, Homo sapiens
  CDR3 for alpha chain variable domain of TCR clone 222948 (TRAV12-2, TRAJ11)
CAVNREPGYSTLTF

SEQ ID NO: 445896 - protein, 10 aa, Homo sapiens
  CDR3 for beta chain variable domain of TCR clone 222948 (TRBV20-1, TRBJ2-5)
CSARFETQYF

SEQ ID NO: 445897 - protein, 17 aa, Homo sapiens
  CDR3 for alpha chain variable domain of TCR clone 222949 (TRAV3, TRAJ6)
CAVRDGPRAGGSYIPTF

SEQ ID NO: 445898 - protein, 19 aa, Homo sapiens
  CDR3 for beta chain variable domain of TCR clone 222949 (TRBV2, TRBJ2-7)
CASSDDETSGRANDYEQYF

SEQ ID NO: 445899 - protein, 14 aa, Homo sapiens
  CDR3 for alpha chain variable domain of TCR clone 222950 (TRAV35, TRAJ50)
CAGHRKTSYDKVIF

SEQ ID NO: 445900 - protein, 13 aa, Homo sapiens
  CDR3 for beta chain variable domain of TCR clone 222950 (TRBV19, TRBJ1-1)
CASSPQMNTEAFF

SEQ ID NO: 445901 - protein, 14 aa, Homo sapiens
  CDR3 for alpha chain variable domain of TCR clone 222951 (TRAV12-2, TRAJ13)
CAVKKTGGYQKVTL

SEQ ID NO: 445902 - protein, 14 aa, Homo sapiens
  CDR3 for beta chain variable domain of TCR clone 222951 (TRBV7-2, TRBJ2-7)
CASSLYPGRYEQYF

SEQ ID NO: 445903 - protein, 14 aa, Homo sapiens
  CDR3 for alpha chain variable domain of TCR clone 222952 (TRAV8-6, TRAJ12)
GAVKAADSSYKLIF

SEQ ID NO: 445904 - protein, 15 aa, Homo sapiens
  CDR3 for beta chain variable domain of TCR clone 222952 (TRBV5-1, TRBJ2-5)
CASSLGLAEQETQYF

SEQ ID NO: 445905 - protein, 14 aa, Homo sapiens
  CDR3 for alpha chain variable domain of TCR clone 222953 (TRAV13-1, TRAJ39)
CAASYNNAGNMLTF

SEQ ID NO: 445906 - protein, 13 aa, Homo sapiens
  CDR3 for beta chain variable domain of TCR clone 222953 (TRBV24-1, TRBJ1-4)
GATNNGRSEKLFF

SEQ ID NO: 445907 - protein, 14 aa, Homo sapiens
  CDR3 for alpha chain variable domain of TCR clone 222954 (TRAV8-3, TRAJ13)
CAVGAAGGYQKVTF

SEQ ID NO: 445908 - protein, 18 aa, Homo sapiens
  CDR3 for beta chain variable domain of TCR clone 222954 (TRBV20-1, TRBJ2-3)
CSASGLAGGPGTTDTQYF

SEQ ID NO: 445909 - protein, 21 aa, Homo sapiens
  CDR3 for alpha chain variable domain of TCR clone 222955 (TRAV30, TRAJ43)
GLPAQLLRNPLPLIELNDIRF

SEQ ID NO: 445910 - protein, 14 aa, Homo sapiens
  CDR3 for beta chain variable domain of TCR clone 222955 (TRBV27, TRBJ2-1)
CASRHLGGGKEQFF

SEQ ID NO: 445911 - protein, 15 aa, Homo sapiens
  CDR3 for alpha chain variable domain of TCR clone 222956 (TRAV26-1, TRAJ40)
CIVRVTTSGTYKYIF

SEQ ID NO: 445912 - protein, 13 aa, Homo sapiens
  CDR3 for beta chain variable domain of TCR clone 222956 (TRBV5-5, TRBJ1-2)
CASSFWRGEDYTF

SEQ ID NO: 445913 - protein, 10 aa, Homo sapiens
  CDR3 for alpha chain variable domain of TCR clone 222957 (TRAV38-2/DV8, TRAJ21)
CAYRSNKFYF

SEQ ID NO: 445914 - protein, 13 aa, Homo sapiens
  CDR3 for beta chain variable domain of TCR clone 222957 (TRBV27, TRBJ2-7)
CASSSGDSYEQYF

SEQ ID NO: 445915 - protein, 12 aa, Homo sapiens
  CDR3 for alpha chain variable domain of TCR clone 222958 (TRAV12-2, TRAJ24)
CAVGDSWGKLQF

SEQ ID NO: 445916 - protein, 16 aa, Homo sapiens
  CDR3 for beta chain variable domain of TCR clone 222958 (TRBV18, TRBJ2-7)
CASSPRSQGISYEQYF

SEQ ID NO: 445917 - protein, 14 aa, Homo sapiens
  CDR3 for alpha chain variable domain of TCR clone 222959 (TRAV26-2, TRAJ31)
CILIPGTNNARLMF

SEQ ID NO: 445918 - protein, 16 aa, Homo sapiens
  CDR3 for beta chain variable domain of TCR clone 222959 (TRBV7-3, TRBJ2-1)
CASSLVSGSSNNEQFF

SEQ ID NO: 445919 - protein, 12 aa, Homo sapiens
  CDR3 for alpha chain variable domain of TCR clone 222960 (TRAV16, TRAJ10)
WSRTGGGNKLTF

SEQ ID NO: 445920 - protein, 19 aa, Homo sapiens
  CDR3 for beta chain variable domain of TCR clone 222960 (TRBV25-1, TRBJ2-2)
CAILVYRVDRGRKTGELFF

SEQ ID NO: 445921 - protein, 14 aa, Homo sapiens
  CDR3 for alpha chain variable domain of TCR clone 222961 (TRAV12-3, TRAJ10)
SHLPLTGGGNKLTF

SEQ ID NO: 445922 - protein, 16 aa, Homo sapiens
  CDR3 for beta chain variable domain of TCR clone 222961 (TRBV12-5, TRBJ2-5)
CASGPRTSGNQETQYL

SEQ ID NO: 445923 - protein, 18 aa, Homo sapiens
  CDR3 for alpha chain variable domain of TCR clone 222962 (TRAV2, TRAJ45)
TTVLWRIRSGGGADGLTF

SEQ ID NO: 445924 - protein, 16 aa, Homo sapiens
  CDR3 for beta chain variable domain of TCR clone 222962 (TRBV7-3, TRBJ2-2)
CASSLKRGTLSGELFF

SEQ ID NO: 445925 - protein, 12 aa, Homo sapiens
  CDR3 for alpha chain variable domain of TCR clone 222963 (TRAV12-3, TRAJ17)
CAMTLTGNKLTF

SEQ ID NO: 445926 - protein, 17 aa, Homo sapiens
  CDR3 for beta chain variable domain of TCR clone 222963 (TRBV11-2, TRBJ2-1)
CASSLYPPGVEYNEQFV

SEQ ID NO: 445927 - protein, 17 aa, Homo sapiens
  CDR3 for alpha chain variable domain of TCR clone 222964 (TRAV13-1, TRAJ31)
CAPRDRLMFGDGTQLVV

SEQ ID NO: 445928 - protein, 15 aa, Homo sapiens
  CDR3 for beta chain variable domain of TCR clone 222964 (TRBV25-1, TRBJ1-1)
CASSPRQGENTEAFF

SEQ ID NO: 445929 - protein, 13 aa, Homo sapiens
  CDR3 for alpha chain variable domain of TCR clone 222965 (TRAV12-3, TRAJ13)
CAMSPGGYQKVTF

SEQ ID NO: 445930 - protein, 16 aa, Homo sapiens
  CDR3 for beta chain variable domain of TCR clone 222965 (TRBV4-1, TRBJ2-7)
CASSRGDILNSYEQYF

SEQ ID NO: 445931 - protein, 12 aa, Homo sapiens
  CDR3 for alpha chain variable domain of TCR clone 222966 (TRAV12-1, TRAJ40)
CVVYSRTYKYIF

SEQ ID NO: 445932 - protein, 19 aa, Homo sapiens
  CDR3 for beta chain variable domain of TCR clone 222966 (TRBV7-2, TRBJ2-3)
CASSFLSRNWGGGTDTQYF

SEQ ID NO: 445933 - protein, 13 aa, Homo sapiens
  CDR3 for alpha chain variable domain of TCR clone 222967 (TRAV13-1, TRAJ20)
CAARVSNDYKLSF

SEQ ID NO: 445934 - protein, 16 aa, Homo sapiens
  CDR3 for beta chain variable domain of TCR clone 222967 (TRBV19, TRBJ2-2)
CASRSPGTGATGELFF

SEQ ID NO: 445935 - protein, 14 aa, Homo sapiens
  CDR3 for alpha chain variable domain of TCR clone 222968 (TRAV4, TRAJ17)
CLVGDMAAGNNLTF

SEQ ID NO: 445936 - protein, 18 aa, Homo sapiens
  CDR3 for beta chain variable domain of TCR clone 222968 (TRBV11-2, TRBJ2-3)
CASSLGGASRGAPNTQYF

SEQ ID NO: 445937 - protein, 13 aa, Homo sapiens
  CDR3 for alpha chain variable domain of TCR clone 222969 (TRAV8-4, TRAJ43)
CAVTLINNNDMRF

SEQ ID NO: 445938 - protein, 13 aa, Homo sapiens
  CDR3 for beta chain variable domain of TCR clone 222969 (TRBV2, TRBJ1-2)
CASTLGAGDGYTF

SEQ ID NO: 445939 - protein, 13 aa, Homo sapiens
  CDR3 for alpha chain variable domain of TCR clone 222970 (TRAV17, TRAJ26)
CATVYNYGQNFVF

SEQ ID NO: 445940 - protein, 16 aa, Homo sapiens
  CDR3 for beta chain variable domain of TCR clone 222970 (TRBV6-5, TRBJ2-1)
CASSETLAGHYNEQFF

SEQ ID NO: 445941 - protein, 13 aa, Homo sapiens
  CDR3 for alpha chain variable domain of TCR clone 222971 (TRAV35, TRAJ36)
CAGPRIGENNLFF

SEQ ID NO: 445942 - protein, 15 aa, Homo sapiens
  CDR3 for beta chain variable domain of TCR clone 222971 (TRBV28, TRBJ2-5)
CASSPPWSYQETQYF

SEQ ID NO: 445943 - protein, 14 aa, Homo sapiens
  CDR3 for alpha chain variable domain of TCR clone 222972 (TRAV2, TRAJ26)
CAVERDNYGQNFVF

SEQ ID NO: 445944 - protein, 15 aa, Homo sapiens
  CDR3 for beta chain variable domain of TCR clone 222972 (TRBV6-3, TRBJ2-7)
CASSSPGTVFYEQYF

SEQ ID NO: 445945 - protein, 16 aa, Homo sapiens
  CDR3 for alpha chain variable domain of TCR clone 222973 (TRAV17, TRAJ28)
CATALDSAAGSYQLTF

SEQ ID NO: 445946 - protein, 15 aa, Homo sapiens
  CDR3 for beta chain variable domain of TCR clone 222973 (TRBV12-4, TRBJ1-2)
CASSFEAGLGYGYTF

SEQ ID NO: 445947 - protein, 14 aa, Homo sapiens
  CDR3 for alpha chain variable domain of TCR clone 222974 (TRAV27, TRAJ17)
CSSTIRAAGNKLTF

SEQ ID NO: 445948 - protein, 16 aa, Homo sapiens
  CDR3 for beta chain variable domain of TCR clone 222974 (TRBV5-7, TRBJ2-5)
CASTLAPAGGRETQYF

SEQ ID NO: 445949 - protein, 11 aa, Homo sapiens
  CDR3 for alpha chain variable domain of TCR clone 222975 (TRAV1-1, TRAJ23)
CAVRQGGKLIF

SEQ ID NO: 445950 - protein, 20 aa, Homo sapiens
  CDR3 for beta chain variable domain of TCR clone 222975 (TRBV11-2, TRBJ1-6)
CPSSLVFATGGSVHPSTLGT

SEQ ID NO: 445951 - protein, 16 aa, Homo sapiens
  CDR3 for alpha chain variable domain of TCR clone 222976 (TRAV17, TRAJ52)
CATSNAGGTSYGKLTF

SEQ ID NO: 445952 - protein, 13 aa, Homo sapiens
  CDR3 for beta chain variable domain of TCR clone 222976 (TRBV20-1, TRBJ1-5)
CSASPRANQTQHF

SEQ ID NO: 445953 - protein, 17 aa, Homo sapiens
  CDR3 for alpha chain variable domain of TCR clone 222977 (TRAV17, TRAJ28)
CATDPRRGGAGSYQLTF

SEQ ID NO: 445954 - protein, 15 aa, Homo sapiens
  CDR3 for beta chain variable domain of TCR clone 222977 (TRBV11-2, TRBJ2-2)
CASSSDRVNAGELFF

SEQ ID NO: 445955 - protein, 13 aa, Homo sapiens
  CDR3 for alpha chain variable domain of TCR clone 222978 (TRAV3, TRAJ27)
CAVRPLGAGKSTC

SEQ ID NO: 445956 - protein, 16 aa, Homo sapiens
  CDR3 for beta chain variable domain of TCR clone 222978 (TRBV7-9, TRBJ2-7)
CASSSPSANTVNEQYF

SEQ ID NO: 445957 - protein, 15 aa, Homo sapiens
  CDR3 for alpha chain variable domain of TCR clone 222979 (TRAV3, TRAJ3)
CAVRDRDSSASKIIF

SEQ ID NO: 445958 - protein, 18 aa, Homo sapiens
  CDR3 for beta chain variable domain of TCR clone 222979 (TRBV25-1, TRBJ1-2)
CASSGLQNGQGLIYGYAF

SEQ ID NO: 445959 - protein, 11 aa, Homo sapiens
  CDR3 for alpha chain variable domain of TCR clone 222980 (TRAV1-2, TRAJ20)
CAVANDYKLSF

SEQ ID NO: 445960 - protein, 18 aa, Homo sapiens
  CDR3 for beta chain variable domain of TCR clone 222980 (TRBV20-1, TRBJ2-6)
CSAETTPTRGSGANDLTF

SEQ ID NO: 445961 - protein, 16 aa, Homo sapiens
  CDR3 for alpha chain variable domain of TCR clone 222981 (TRAV8-4, TRAJ28)
CAVESNSGAGSYQLTF

SEQ ID NO: 445962 - protein, 18 aa, Homo sapiens
  CDR3 for beta chain variable domain of TCR clone 222981 (TRBV11-2, TRBJ1-6)
CASSLAVQGLSLNSPLHF

SEQ ID NO: 445963 - protein, 12 aa, Homo sapiens
  CDR3 for alpha chain variable domain of TCR clone 222982 (TRAV26-2, TRAJ34)
CILRISSDKLIL

SEQ ID NO: 445964 - protein, 15 aa, Homo sapiens
  CDR3 for beta chain variable domain of TCR clone 222982 (TRBV18, TRBJ2-7)
CASSPRGGKGYEQYF

SEQ ID NO: 445965 - protein, 11 aa, Homo sapiens
  CDR3 for alpha chain variable domain of TCR clone 222983 (TRAV2, TRAJ20)
CAVLNDYKLSF

SEQ ID NO: 445966 - protein, 15 aa, Homo sapiens
  CDR3 for beta chain variable domain of TCR clone 222983 (TRBV7-9, TRBJ1-6)
CASSSPGRGNSPLHF

SEQ ID NO: 445967 - protein, 20 aa, Homo sapiens
  CDR3 for alpha chain variable domain of TCR clone 222984 (TRAV26-1, TRAJ42)
CCVLLHRQTYYGGSQGNFIF

SEQ ID NO: 445968 - protein, 12 aa, Homo sapiens
  CDR3 for beta chain variable domain of TCR clone 222984 (TRBV11-2, TRBJ2-2)
CASSLGGGELFF

SEQ ID NO: 445969 - protein, 15 aa, Homo sapiens
  CDR3 for alpha chain variable domain of TCR clone 222985 (TRAV12-1, TRAJ44)
CVVDEYTGTASKLTF

SEQ ID NO: 445970 - protein, 15 aa, Homo sapiens
  CDR3 for beta chain variable domain of TCR clone 222985 (TRBV11-3, TRBJ2-7)
CASSPGPASSYEQYF

SEQ ID NO: 445971 - protein, 16 aa, Homo sapiens
  CDR3 for alpha chain variable domain of TCR clone 222986 (TRAV30, TRAJ24)
CDTEIVDADSWGKFQF

SEQ ID NO: 445972 - protein, 13 aa, Homo sapiens
  CDR3 for beta chain variable domain of TCR clone 222986 (TRBV11-2, TRBJ2-5)
CASSSTGEETQYF

SEQ ID NO: 445973 - protein, 16 aa, Homo sapiens
  CDR3 for alpha chain variable domain of TCR clone 222987 (TRAV16, TRAJ4)
CITVLPFSGGYNKLIF

SEQ ID NO: 445974 - protein, 14 aa, Homo sapiens
  CDR3 for beta chain variable domain of TCR clone 222987 (TRBV19, TRBJ2-7)
CASSMGQGAIAQYF

SEQ ID NO: 445975 - protein, 13 aa, Homo sapiens
  CDR3 for alpha chain variable domain of TCR clone 222988 (TRAV12-2, TRAJ18)
CAVRGSTLGRLYF

SEQ ID NO: 445976 - protein, 20 aa, Homo sapiens
  CDR3 for beta chain variable domain of TCR clone 222988 (TRBV7-8, TRBJ2-2)
CASSHFFPGPTIHITGELFF

SEQ ID NO: 445977 - protein, 12 aa, Homo sapiens
  CDR3 for alpha chain variable domain of TCR clone 222989 (TRAV6, TRAJ9)
CAIVTGGFKTIF

SEQ ID NO: 445978 - protein, 16 aa, Homo sapiens
  CDR3 for beta chain variable domain of TCR clone 222989 (TRBV7-3, TRBJ2-2)
GGTQPCIQWNTGELFF

SEQ ID NO: 445979 - protein, 12 aa, Homo sapiens
  CDR3 for alpha chain variable domain of TCR clone 222990 (TRAV2, TRAJ9)
CAVGAGGFKTIF

SEQ ID NO: 445980 - protein, 16 aa, Homo sapiens
  CDR3 for beta chain variable domain of TCR clone 222990 (TRBV28, TRBJ2-7)
CASSLFFETGGPEQYF

SEQ ID NO: 445981 - protein, 13 aa, Homo sapiens
  CDR3 for alpha chain variable domain of TCR clone 222991 (TRAV3, TRAJ3)
CAVADSSASKIIF

SEQ ID NO: 445982 - protein, 16 aa, Homo sapiens
  CDR3 for beta chain variable domain of TCR clone 222991 (TRBV19, TRBJ2-1)
CASSKAGPSSYNEQFF

SEQ ID NO: 445983 - protein, 16 aa, Homo sapiens
  CDR3 for alpha chain variable domain of TCR clone 222992 (TRAV12-3, TRAJ53)
YAISPGSGGSNYKLTF

SEQ ID NO: 445984 - protein, 17 aa, Homo sapiens
  CDR3 for beta chain variable domain of TCR clone 222992 (TRBV7-8, TRBJ2-6)
CASSAGTGGAGANVLTF

SEQ ID NO: 445985 - protein, 14 aa, Homo sapiens
  CDR3 for alpha chain variable domain of TCR clone 222993 (TRAV12-3, TRAJ10)
SHLPLTGGGNKLTF

SEQ ID NO: 445986 - protein, 16 aa, Homo sapiens
  CDR3 for beta chain variable domain of TCR clone 222993 (TRBV5-8, TRBJ2-2)
CASSVINPGGAGELFF

SEQ ID NO: 445987 - protein, 12 aa, Homo sapiens
  CDR3 for alpha chain variable domain of TCR clone 222994 (TRAV17, TRAJ4)
CATRGGYNKLIF

SEQ ID NO: 445988 - protein, 14 aa, Homo sapiens
  CDR3 for beta chain variable domain of TCR clone 222994 (TRBV15, TRBJ2-5)
CATSSTGYQETQYF

SEQ ID NO: 445989 - protein, 14 aa, Homo sapiens
  CDR3 for alpha chain variable domain of TCR clone 222995 (TRAV8-3, TRAJ27)
CAGGRNTNAGKLTF

SEQ ID NO: 445990 - protein, 15 aa, Homo sapiens
  CDR3 for beta chain variable domain of TCR clone 222995 (TRBV11-3, TRBJ2-5)
CASSLRGRVQETQYF

SEQ ID NO: 445991 - protein, 14 aa, Homo sapiens
  CDR3 for alpha chain variable domain of TCR clone 222996 (TRAV12-1, TRAJ15)
CVVNRNQAGTALIF

SEQ ID NO: 445992 - protein, 14 aa, Homo sapiens
  CDR3 for beta chain variable domain of TCR clone 222996 (TRBV19, TRBJ1-1)
CATSSGTRGTEAFF

SEQ ID NO: 445993 - protein, 15 aa, Homo sapiens
  CDR3 for alpha chain variable domain of TCR clone 222997 (TRAV12-1, TRAJ44)
CVADLPTGTASKLTF

SEQ ID NO: 445994 - protein, 15 aa, Homo sapiens
  CDR3 for beta chain variable domain of TCR clone 222997 (TRBV5-1, TRBJ2-3)
CASSVTSGSTDTQYF

SEQ ID NO: 445995 - protein, 14 aa, Homo sapiens
  CDR3 for alpha chain variable domain of TCR clone 222998 (TRAV12-1, TRAJ36)
CVVNYWGKQPLLWD

SEQ ID NO: 445996 - protein, 13 aa, Homo sapiens
  CDR3 for beta chain variable domain of TCR clone 222998 (TRBV28, TRBJ2-7)
CASSTTRSYEQYF

SEQ ID NO: 445997 - protein, 11 aa, Homo sapiens
  CDR3 for alpha chain variable domain of TCR clone 222999 (TRAV3, TRAJ17)
TRGAAGNKLTF

SEQ ID NO: 445998 - protein, 12 aa, Homo sapiens
  CDR3 for beta chain variable domain of TCR clone 222999 (TRBV11-2, TRBJ2-2)
CASSLGGGELFF

SEQ ID NO: 445999 - protein, 17 aa, Homo sapiens
  CDR3 for alpha chain variable domain of TCR clone 223000 (TRAV3, TRAJ6)
CAVRDCPRAGGSYIPTL

SEQ ID NO: 446000 - protein, 14 aa, Homo sapiens
  CDR3 for beta chain variable domain of TCR clone 223000 (TRBV7-2, TRBJ2-7)
CASSPKTSFYEQYF

SEQ ID NO: 446001 - protein, 12 aa, Homo sapiens
  CDR3 for alpha chain variable domain of TCR clone 223001 (TRAV21, TRAJ13)
SGPSGGYQKVTF

SEQ ID NO: 446002 - protein, 15 aa, Homo sapiens
  CDR3 for beta chain variable domain of TCR clone 223001 (TRBV7-9, TRBJ1-6)
CASSSPGRGNSPLHF

SEQ ID NO: 446003 - protein, 13 aa, Homo sapiens
  CDR3 for alpha chain variable domain of TCR clone 223002 (TRAV17, TRAJ4)
CATKSGGYNKLIF

SEQ ID NO: 446004 - protein, 16 aa, Homo sapiens
  CDR3 for beta chain variable domain of TCR clone 223002 (TRBV7-9, TRBJ2-1)
CACSDVAGGSYNEQFF

SEQ ID NO: 446005 - protein, 13 aa, Homo sapiens
  CDR3 for alpha chain variable domain of TCR clone 223003 (TRAV17, TRAJ9)
CATASTGGFKTIF

SEQ ID NO: 446006 - protein, 16 aa, Homo sapiens
  CDR3 for beta chain variable domain of TCR clone 223003 (TRBV7-3, TRBJ2-1)
CASSKPLAGGYNEQFF

SEQ ID NO: 446007 - protein, 14 aa, Homo sapiens
  CDR3 for alpha chain variable domain of TCR clone 223004 (TRAV12-1, TRAJ29)
CVVNEGSGNTPLVF

SEQ ID NO: 446008 - protein, 13 aa, Homo sapiens
  CDR3 for beta chain variable domain of TCR clone 223004 (TRBV7-9, TRBJ2-3)
CASSPGSTDTHYF

SEQ ID NO: 446009 - protein, 12 aa, Homo sapiens
  CDR3 for alpha chain variable domain of TCR clone 223005 (TRAV27, TRAJ58)
CAGARDTSRLTV

SEQ ID NO: 446010 - protein, 15 aa, Homo sapiens
  CDR3 for beta chain variable domain of TCR clone 223005 (TRBV19, TRBJ2-7)
CASSFNSGGVWEQYF

SEQ ID NO: 446011 - protein, 15 aa, Homo sapiens
  CDR3 for alpha chain variable domain of TCR clone 223006 (TRAV27, TRAJ18)
CAGDDRGSTLGRLYF

SEQ ID NO: 446012 - protein, 14 aa, Homo sapiens
  CDR3 for beta chain variable domain of TCR clone 223006 (TRBV28, TRBJ1-5)
CASTIWESNQPQHF

SEQ ID NO: 446013 - protein, 14 aa, Homo sapiens
  CDR3 for alpha chain variable domain of TCR clone 223007 (TRAV12-2, TRAJ17)
CAVLFKAAGNKLTF

SEQ ID NO: 446014 - protein, 15 aa, Homo sapiens
  CDR3 for beta chain variable domain of TCR clone 223007 (TRBV4-1, TRBJ2-1)
CASSQAQREIYEQFF

SEQ ID NO: 446015 - protein, 14 aa, Homo sapiens
  CDR3 for alpha chain variable domain of TCR clone 223008 (TRAV12-1, TRAJ23)
CVVIVYNQVGKLIF

SEQ ID NO: 446016 - protein, 13 aa, Homo sapiens
  CDR3 for beta chain variable domain of TCR clone 223008 (TRBV11-2, TRBJ2-5)
CASSFSSQETQYF

SEQ ID NO: 446017 - protein, 14 aa, Homo sapiens
  CDR3 for alpha chain variable domain of TCR clone 223009 (TRAV17, TRAJ8)
CATQSGTGFQKLVC

SEQ ID NO: 446018 - protein, 15 aa, Homo sapiens
  CDR3 for beta chain variable domain of TCR clone 223009 (TRBV4-1, TRBJ1-4)
CASSDTGGTNEKLFF

SEQ ID NO: 446019 - protein, 14 aa, Homo sapiens
  CDR3 for alpha chain variable domain of TCR clone 223010 (TRAV29/DV5, TRAJ49)
CAASLSNTGNQFYF

SEQ ID NO: 446020 - protein, 15 aa, Homo sapiens
  CDR3 for beta chain variable domain of TCR clone 223010 (TRBV20-1, TRBJ2-1)
CSARGIGGAYNEQFF

SEQ ID NO: 446021 - protein, 10 aa, Homo sapiens
  CDR3 for alpha chain variable domain of TCR clone 223011 (TRAV16, TRAJ22)
SAVYLRQLTF

SEQ ID NO: 446022 - protein, 15 aa, Homo sapiens
  CDR3 for beta chain variable domain of TCR clone 223011 (TRBV7-9, TRBJ1-6)
CASSSPGRGNSTLHF

SEQ ID NO: 446023 - protein, 17 aa, Homo sapiens
  CDR3 for alpha chain variable domain of TCR clone 223012 (TRAV26-1, TRAJ47)
CIGPSLLYMEYGNKLVF

SEQ ID NO: 446024 - protein, 14 aa, Homo sapiens
  CDR3 for beta chain variable domain of TCR clone 223012 (TRBV7-3, TRBJ1-5)
RASSFSGCNQPQHF

SEQ ID NO: 446025 - protein, 15 aa, Homo sapiens
  CDR3 for alpha chain variable domain of TCR clone 223013 (TRAV8-3, TRAJ45)
CASSYSGGGADGLTF

SEQ ID NO: 446026 - protein, 13 aa, Homo sapiens
  CDR3 for beta chain variable domain of TCR clone 223013 (TRBV6-4, TRBJ1-5)
CASSADLNQPQHF

SEQ ID NO: 446027 - protein, 15 aa, Homo sapiens
  CDR3 for alpha chain variable domain of TCR clone 223014 (TRAV27, TRAJ45)
CAPVDSGGGADGLTF

SEQ ID NO: 446028 - protein, 13 aa, Homo sapiens
  CDR3 for beta chain variable domain of TCR clone 223014 (TRBV12-5, TRBJ2-3)
CASGDRQSDTQYF

SEQ ID NO: 446029 - protein, 14 aa, Homo sapiens
  CDR3 for alpha chain variable domain of TCR clone 223015 (TRAV38-1, TRAJ40)
CALRPTSGTYKYIF

SEQ ID NO: 446030 - protein, 17 aa, Homo sapiens
  CDR3 for beta chain variable domain of TCR clone 223015 (TRBV4-3, TRBJ2-2)
CASSQDTSARSPGELFF

SEQ ID NO: 446031 - protein, 16 aa, Homo sapiens
  CDR3 for alpha chain variable domain of TCR clone 223016 (TRAV22, TRAJ45)
CAVERGKRGGADGLTF

SEQ ID NO: 446032 - protein, 13 aa, Homo sapiens
  CDR3 for beta chain variable domain of TCR clone 223016 (TRBV27, TRBJ1-1)
CDSSLSIGAQPFF

SEQ ID NO: 446033 - protein, 14 aa, Homo sapiens
  CDR3 for alpha chain variable domain of TCR clone 223017 (TRAV12-3, TRAJ9)
CAMSPNTGGFKTIF

SEQ ID NO: 446034 - protein, 12 aa, Homo sapiens
  CDR3 for beta chain variable domain of TCR clone 223017 (TRBV11-2, TRBJ2-2)
CASSLGGGELFL

SEQ ID NO: 446035 - protein, 16 aa, Homo sapiens
  CDR3 for alpha chain variable domain of TCR clone 223018 (TRAV14/DV4, TRAJ12)
CAMREVLMDSSYKLIF

SEQ ID NO: 446036 - protein, 14 aa, Homo sapiens
  CDR3 for beta chain variable domain of TCR clone 223018 (TRBV7-2, TRBJ2-5)
CASSFTQGQETQHF

SEQ ID NO: 446037 - protein, 12 aa, Homo sapiens
  CDR3 for alpha chain variable domain of TCR clone 223019 (TRAV1-1, TRAJ8)
CAGGTGFQKLVF

SEQ ID NO: 446038 - protein, 15 aa, Homo sapiens
  CDR3 for beta chain variable domain of TCR clone 223019 (TRBV7-2, TRBJ1-1)
CASSPQGGANTEAFF

SEQ ID NO: 446039 - protein, 15 aa, Homo sapiens
  CDR3 for alpha chain variable domain of TCR clone 223020 (TRAV38-2/DV8, TRAJ37)
CAYRPGSGNTGKLIF

SEQ ID NO: 446040 - protein, 14 aa, Homo sapiens
  CDR3 for beta chain variable domain of TCR clone 223020 (TRBV7-2, TRBJ2-7)
CASSPKTSFYEQYF

SEQ ID NO: 446041 - protein, 13 aa, Homo sapiens
  CDR3 for alpha chain variable domain of TCR clone 223021 (TRAV17, TRAJ9)
CATAVTGGIKTIF

SEQ ID NO: 446042 - protein, 16 aa, Homo sapiens
  CDR3 for beta chain variable domain of TCR clone 223021 (TRBV15, TRBJ2-1)
CATSRNLAGGYNEQFF

SEQ ID NO: 446043 - protein, 13 aa, Homo sapiens
  CDR3 for alpha chain variable domain of TCR clone 223022 (TRAV8-6, TRAJ49)
CAVITNTGNQVDF

SEQ ID NO: 446044 - protein, 14 aa, Homo sapiens
  CDR3 for beta chain variable domain of TCR clone 223022 (TRBV28, TRBJ2-7)
CAIVGQGNLYEQYF

SEQ ID NO: 446045 - protein, 12 aa, Homo sapiens
  CDR3 for alpha chain variable domain of TCR clone 223023 (TRAV17, TRAJ10)
LTYTGGGNKLTF

SEQ ID NO: 446046 - protein, 15 aa, Homo sapiens
  CDR3 for beta chain variable domain of TCR clone 223023 (TRBV4-1, TRBJ2-5)
CASSQWDLYQETQYF

SEQ ID NO: 446047 - protein, 12 aa, Homo sapiens
  CDR3 for alpha chain variable domain of TCR clone 223024 (TRAV21, TRAJ42)
CAVGGSQGNLIF

SEQ ID NO: 446048 - protein, 16 aa, Homo sapiens
  CDR3 for beta chain variable domain of TCR clone 223024 (TRBV7-2, TRBJ2-5)
CASSPFPTGGEETQYF

SEQ ID NO: 446049 - protein, 14 aa, Homo sapiens
  CDR3 for alpha chain variable domain of TCR clone 223025 (TRAV3, TRAJ21)
CAVRDPYNFNKFYF

SEQ ID NO: 446050 - protein, 11 aa, Homo sapiens
  CDR3 for beta chain variable domain of TCR clone 223025 (TRBV10-3, TRBJ2-7)
CAISEGLEQYF

SEQ ID NO: 446051 - protein, 15 aa, Homo sapiens
  CDR3 for alpha chain variable domain of TCR clone 223026 (TRAV12-1, TRAJ36)
CVVNEHQTGASNLCF

SEQ ID NO: 446052 - protein, 12 aa, Homo sapiens
  CDR3 for beta chain variable domain of TCR clone 223026 (TRBV29-1, TRBJ2-3)
CSVTGGADTQYF

SEQ ID NO: 446053 - protein, 14 aa, Homo sapiens
  CDR3 for alpha chain variable domain of TCR clone 223027 (TRAV13-1, TRAJ9)
FAASALTGGFKTIF

SEQ ID NO: 446054 - protein, 12 aa, Homo sapiens
  CDR3 for beta chain variable domain of TCR clone 223027 (TRBV7-8, TRBJ2-7)
CASSLGDREQYF

SEQ ID NO: 446055 - protein, 15 aa, Homo sapiens
  CDR3 for alpha chain variable domain of TCR clone 223028 (TRAV8-3, TRAJ27)
CAVGPSKTNAGKSTF

SEQ ID NO: 446056 - protein, 15 aa, Homo sapiens
  CDR3 for beta chain variable domain of TCR clone 223028 (TRBV7-2, TRBJ2-1)
CASNSGLAGGNEQFY

SEQ ID NO: 446057 - protein, 14 aa, Homo sapiens
  CDR3 for alpha chain variable domain of TCR clone 223029 (TRAV12-2, TRAJ13)
CAVEKTGGYQKVTF

SEQ ID NO: 446058 - protein, 11 aa, Homo sapiens
  CDR3 for beta chain variable domain of TCR clone 223029 (TRBV11-2, TRBJ2-2)
CASSLPGELFF

SEQ ID NO: 446059 - protein, 14 aa, Homo sapiens
  CDR3 for alpha chain variable domain of TCR clone 223030 (TRAV12-2, TRAJ17)
CAVLFKAAGNKLTF

SEQ ID NO: 446060 - protein, 16 aa, Homo sapiens
  CDR3 for beta chain variable domain of TCR clone 223030 (TRBV19, TRBJ2-2)
CASSAAGTGGTGELFF

SEQ ID NO: 446061 - protein, 17 aa, Homo sapiens
  CDR3 for alpha chain variable domain of TCR clone 223031 (TRAV3, TRAJ42)
CAVGDRDYGGSQGNLIF

SEQ ID NO: 446062 - protein, 18 aa, Homo sapiens
  CDR3 for beta chain variable domain of TCR clone 223031 (TRBV20-1, TRBJ2-3)
CSASGLAGGPGTTDTQYF

SEQ ID NO: 446063 - protein, 13 aa, Homo sapiens
  CDR3 for alpha chain variable domain of TCR clone 223032 (TRAV26-1, TRAJ29)
CIVRRSGNTPLVF

SEQ ID NO: 446064 - protein, 16 aa, Homo sapiens
  CDR3 for beta chain variable domain of TCR clone 223032 (TRBV11-2, TRBJ2-7)
CASSLAPAGVNYEQYF

SEQ ID NO: 446065 - protein, 14 aa, Homo sapiens
  CDR3 for alpha chain variable domain of TCR clone 223033 (TRAV4, TRAJ9)
CLVGSGTGGFKTIF

SEQ ID NO: 446066 - protein, 13 aa, Homo sapiens
  CDR3 for beta chain variable domain of TCR clone 223033 (TRBV7-9, TRBJ2-3)
CASSPGSTDTQYF

SEQ ID NO: 446067 - protein, 11 aa, Homo sapiens
  CDR3 for alpha chain variable domain of TCR clone 223034 (TRAV26-1, TRAJ37)
CIVRVGRKLIF

SEQ ID NO: 446068 - protein, 14 aa, Homo sapiens
  CDR3 for beta chain variable domain of TCR clone 223034 (TRBV25-1, TRBJ1-6)
CASSLSADISPLHF

SEQ ID NO: 446069 - protein, 12 aa, Homo sapiens
  CDR3 for alpha chain variable domain of TCR clone 223035 (TRAV8-4, TRAJ43)
CAVSVNNNDMRF

SEQ ID NO: 446070 - protein, 14 aa, Homo sapiens
  CDR3 for beta chain variable domain of TCR clone 223035 (TRBV11-2, TRBJ1-2)
CASSLGTTNYGYTF

SEQ ID NO: 446071 - protein, 11 aa, Homo sapiens
  CDR3 for alpha chain variable domain of TCR clone 223036 (TRAV21, TRAJ34)
CAHYNTDKLIF

SEQ ID NO: 446072 - protein, 16 aa, Homo sapiens
  CDR3 for beta chain variable domain of TCR clone 223036 (TRBV2, TRBJ2-2)
CASIAFGDANTGELFF

SEQ ID NO: 446073 - protein, 15 aa, Homo sapiens
  CDR3 for alpha chain variable domain of TCR clone 223037 (TRAV2, TRAJ9)
CAVEDRGTGGFKTIF

SEQ ID NO: 446074 - protein, 14 aa, Homo sapiens
  CDR3 for beta chain variable domain of TCR clone 223037 (TRBV4-1, TRBJ2-2)
CASSQAVNTGELFS

SEQ ID NO: 446075 - protein, 11 aa, Homo sapiens
  CDR3 for alpha chain variable domain of TCR clone 223038 (TRAV16, TRAJ33)
CALHSNYHLIW

SEQ ID NO: 446076 - protein, 15 aa, Homo sapiens
  CDR3 for beta chain variable domain of TCR clone 223038 (TRBV4-1, TRBJ1-4)
CASSDTGGTNEKLFF

SEQ ID NO: 446077 - protein, 12 aa, Homo sapiens
  CDR3 for alpha chain variable domain of TCR clone 223039 (TRAV13-2, TRAJ23)
CAERHKGGKLIF

SEQ ID NO: 446078 - protein, 12 aa, Homo sapiens
  CDR3 for beta chain variable domain of TCR clone 223039 (TRBV11-2, TRBJ2-1)
CASSPGNNEQFF

SEQ ID NO: 446079 - protein, 14 aa, Homo sapiens
  CDR3 for alpha chain variable domain of TCR clone 223040 (TRAV16, TRAJ26)
CALSSANYGQNFVF

SEQ ID NO: 446080 - protein, 15 aa, Homo sapiens
  CDR3 for beta chain variable domain of TCR clone 223040 (TRBV11-2, TRBJ1-6)
CASSLDPWAVSPLHF

SEQ ID NO: 446081 - protein, 14 aa, Homo sapiens
  CDR3 for alpha chain variable domain of TCR clone 223041 (TRAV16, TRAJ33)
CALSAMDSNYQLIW

SEQ ID NO: 446082 - protein, 13 aa, Homo sapiens
  CDR3 for beta chain variable domain of TCR clone 223041 (TRBV12-5, TRBJ2-3)
CASGDRQSDTQYF

SEQ ID NO: 446083 - protein, 15 aa, Homo sapiens
  CDR3 for alpha chain variable domain of TCR clone 223042 (TRAV8-3, TRAJ40)
CAVGPYTSGTYKYIF

SEQ ID NO: 446084 - protein, 16 aa, Homo sapiens
  CDR3 for beta chain variable domain of TCR clone 223042 (TRBV7-2, TRBJ2-7)
CASSRDPGGGSGEQYF

SEQ ID NO: 446085 - protein, 12 aa, Homo sapiens
  CDR3 for alpha chain variable domain of TCR clone 223043 (TRAV16, TRAJ58)
CALKRGNQWLQV

SEQ ID NO: 446086 - protein, 12 aa, Homo sapiens
  CDR3 for beta chain variable domain of TCR clone 223043 (TRBV11-2, TRBJ2-2)
CASSLGGGELFF

SEQ ID NO: 446087 - protein, 15 aa, Homo sapiens
  CDR3 for alpha chain variable domain of TCR clone 223044 (TRAV26-1, TRAJ12)
IASSEVMDSSYKLIF

SEQ ID NO: 446088 - protein, 11 aa, Homo sapiens
  CDR3 for beta chain variable domain of TCR clone 223044 (TRBV7-9, TRBJ2-3)
CASSPPDTQYF

SEQ ID NO: 446089 - protein, 12 aa, Homo sapiens
  CDR3 for alpha chain variable domain of TCR clone 223045 (TRAV3, TRAJ27)
CAVRDGAGKSTF

SEQ ID NO: 446090 - protein, 18 aa, Homo sapiens
  CDR3 for beta chain variable domain of TCR clone 223045 (TRBV11-2, TRBJ2-3)
CASSLGGASRGAPNTQYF

SEQ ID NO: 446091 - protein, 16 aa, Homo sapiens
  CDR3 for alpha chain variable domain of TCR clone 223046 (TRAV17, TRAJ22)
CATGPISSGSARQLTF

SEQ ID NO: 446092 - protein, 14 aa, Homo sapiens
  CDR3 for beta chain variable domain of TCR clone 223046 (TRBV4-2, TRBJ2-1)
CASGLDRAYNEQFF

SEQ ID NO: 446093 - protein, 14 aa, Homo sapiens
  CDR3 for alpha chain variable domain of TCR clone 223047 (TRAV27, TRAJ22)
CAGLPSGSARQLTF

SEQ ID NO: 446094 - protein, 17 aa, Homo sapiens
  CDR3 for beta chain variable domain of TCR clone 223047 (TRBV7-8, TRBJ2-6)
CASSAGTGGAGANVLTF

SEQ ID NO: 446095 - protein, 21 aa, Homo sapiens
  CDR3 for alpha chain variable domain of TCR clone 223048 (TRAV36/DV7, TRAJ39)
TATQTGDSAIYLPNAGNMLTF

SEQ ID NO: 446096 - protein, 15 aa, Homo sapiens
  CDR3 for beta chain variable domain of TCR clone 223048 (TRBV5-1, TRBJ2-1)
CASSPPRAPYNEQFF

SEQ ID NO: 446097 - protein, 11 aa, Homo sapiens
  CDR3 for alpha chain variable domain of TCR clone 223049 (TRAV3, TRAJ21)
CAVGNFNKFYF

SEQ ID NO: 446098 - protein, 13 aa, Homo sapiens
  CDR3 for beta chain variable domain of TCR clone 223049 (TRBV20-1, TRBJ2-5)
CSAREAFQETQYV

SEQ ID NO: 446099 - protein, 13 aa, Homo sapiens
  CDR3 for alpha chain variable domain of TCR clone 223050 (TRAV25, TRAJ54)
CAGTIQGAQKLVF

SEQ ID NO: 446100 - protein, 16 aa, Homo sapiens
  CDR3 for beta chain variable domain of TCR clone 223050 (TRBV29-1, TRBJ2-6)
CSVEDITYSGANVLTF

SEQ ID NO: 446101 - protein, 12 aa, Homo sapiens
  CDR3 for alpha chain variable domain of TCR clone 223051 (TRAV21, TRAJ13)
PGPSGGYQQVTF

SEQ ID NO: 446102 - protein, 15 aa, Homo sapiens
  CDR3 for beta chain variable domain of TCR clone 223051 (TRBV27, TRBJ2-5)
CASSLYPRGGETQYF

SEQ ID NO: 446103 - protein, 12 aa, Homo sapiens
  CDR3 for alpha chain variable domain of TCR clone 223052 (TRAV21, TRAJ31)
CAVWGNNARLMF

SEQ ID NO: 446104 - protein, 14 aa, Homo sapiens
  CDR3 for beta chain variable domain of TCR clone 223052 (TRBV25-1, TRBJ1-1)
CASTHLGGNTEAFF

SEQ ID NO: 446105 - protein, 11 aa, Homo sapiens
  CDR3 for alpha chain variable domain of TCR clone 223053 (TRAV1-2, TRAJ20)
CAVSNDYKLSF

SEQ ID NO: 446106 - protein, 16 aa, Homo sapiens
  CDR3 for beta chain variable domain of TCR clone 223053 (TRBV29-1, TRBJ2-6)
CSVEDTTYSGANVLTF

SEQ ID NO: 446107 - protein, 13 aa, Homo sapiens
  CDR3 for alpha chain variable domain of TCR clone 223054 (TRAV17, TRAJ9)
CATAITGGFKNIF

SEQ ID NO: 446108 - protein, 16 aa, Homo sapiens
  CDR3 for beta chain variable domain of TCR clone 223054 (TRBV15, TRBJ2-1)
CATSRNLAGGYNEQFF

SEQ ID NO: 446109 - protein, 11 aa, Homo sapiens
  CDR3 for alpha chain variable domain of TCR clone 223055 (TRAV13-1, TRAJ5)
CAPKGRRAITF

SEQ ID NO: 446110 - protein, 17 aa, Homo sapiens
  CDR3 for beta chain variable domain of TCR clone 223055 (TRBV6-3, TRBJ1-5)
CASSWSGGLYSNQPQHF

SEQ ID NO: 446111 - protein, 13 aa, Homo sapiens
  CDR3 for alpha chain variable domain of TCR clone 223056 (TRAV35, TRAJ42)
CAGFPGSQGNLIF

SEQ ID NO: 446112 - protein, 14 aa, Homo sapiens
  CDR3 for beta chain variable domain of TCR clone 223056 (TRBV11-2, TRBJ2-5)
CASSLDLGRETQYF

SEQ ID NO: 446113 - protein, 13 aa, Homo sapiens
  CDR3 for alpha chain variable domain of TCR clone 223057 (TRAV13-1, TRAJ21)
CAASTYNFNKFYF

SEQ ID NO: 446114 - protein, 15 aa, Homo sapiens
  CDR3 for beta chain variable domain of TCR clone 223057 (TRBV15, TRBJ1-1)
CATSLQGGRNTEAFF

SEQ ID NO: 446115 - protein, 15 aa, Homo sapiens
  CDR3 for alpha chain variable domain of TCR clone 223058 (TRAV21, TRAJ32)
CAVNSNGGATNKLIF

SEQ ID NO: 446116 - protein, 18 aa, Homo sapiens
  CDR3 for beta chain variable domain of TCR clone 223058 (TRBV7-9, TRBJ2-1)
CASSTGLAEGSSYNEQFF

SEQ ID NO: 446117 - protein, 13 aa, Homo sapiens
  CDR3 for alpha chain variable domain of TCR clone 223059 (TRAV35, TRAJ37)
CAGSSGNTGKLIF

SEQ ID NO: 446118 - protein, 16 aa, Homo sapiens
  CDR3 for beta chain variable domain of TCR clone 223059 (TRBV10-3, TRBJ2-1)
CAISLASGNSYNEQFF

SEQ ID NO: 446119 - protein, 13 aa, Homo sapiens
  CDR3 for alpha chain variable domain of TCR clone 223060 (TRAV21, TRAJ27)
CAARPGNAGKSTF

SEQ ID NO: 446120 - protein, 12 aa, Homo sapiens
  CDR3 for beta chain variable domain of TCR clone 223060 (TRBV28, TRBJ2-1)
CASSFRGNEQFF

SEQ ID NO: 446121 - protein, 14 aa, Homo sapiens
  CDR3 for alpha chain variable domain of TCR clone 223061 (TRAV17, TRAJ6)
CATDASGGSYIPTF

SEQ ID NO: 446122 - protein, 19 aa, Homo sapiens
  CDR3 for beta chain variable domain of TCR clone 223061 (TRBV2, TRBJ2-7)
CASSDDATSGRANDYEQYF

SEQ ID NO: 446123 - protein, 13 aa, Homo sapiens
  CDR3 for alpha chain variable domain of TCR clone 223062 (TRAV26-1, TRAJ38)
CIADNAGNNRKRI

SEQ ID NO: 446124 - protein, 13 aa, Homo sapiens
  CDR3 for beta chain variable domain of TCR clone 223062 (TRBV20-1, TRBJ1-1)
CSARGGGNTEAFF

SEQ ID NO: 446125 - protein, 15 aa, Homo sapiens
  CDR3 for alpha chain variable domain of TCR clone 223063 (TRAV21, TRAJ38)
CAVRQDAGNNRKLLW

SEQ ID NO: 446126 - protein, 11 aa, Homo sapiens
  CDR3 for beta chain variable domain of TCR clone 223063 (TRBV12-4, TRBJ2-3)
CASTATDTQYF

SEQ ID NO: 446127 - protein, 14 aa, Homo sapiens
  CDR3 for alpha chain variable domain of TCR clone 223064 (TRAV1-2, TRAJ16)
CAVNRFSDGQKLLF

SEQ ID NO: 446128 - protein, 13 aa, Homo sapiens
  CDR3 for beta chain variable domain of TCR clone 223064 (TRBV4-1, TRBJ2-1)
CASSPAGGDEQFF

SEQ ID NO: 446129 - protein, 14 aa, Homo sapiens
  CDR3 for alpha chain variable domain of TCR clone 223065 (TRAV8-3, TRAJ4)
CAVGAAGGYNKLIF

SEQ ID NO: 446130 - protein, 16 aa, Homo sapiens
  CDR3 for beta chain variable domain of TCR clone 223065 (TRBV12-4, TRBJ1-5)
CASSSGPRGSNQPQHF

SEQ ID NO: 446131 - protein, 13 aa, Homo sapiens
  CDR3 for alpha chain variable domain of TCR clone 223066 (TRAV13-2, TRAJ13)
CAERPGGYQKVTF

SEQ ID NO: 446132 - protein, 13 aa, Homo sapiens
  CDR3 for beta chain variable domain of TCR clone 223066 (TRBV11-2, TRBJ2-7)
CASSGTRPYEQYF

SEQ ID NO: 446133 - protein, 13 aa, Homo sapiens
  CDR3 for alpha chain variable domain of TCR clone 223067 (TRAV12-1, TRAJ6)
CVVFSGGSYIPTF

SEQ ID NO: 446134 - protein, 14 aa, Homo sapiens
  CDR3 for beta chain variable domain of TCR clone 223067 (TRBV20-1, TRBJ1-3)
CSASPTGAGNTIYF

SEQ ID NO: 446135 - protein, 15 aa, Homo sapiens
  CDR3 for alpha chain variable domain of TCR clone 223068 (TRAV8-3, TRAJ45)
LASSYSGGGADGLTF

SEQ ID NO: 446136 - protein, 13 aa, Homo sapiens
  CDR3 for beta chain variable domain of TCR clone 223068 (TRBV10-3, TRBJ2-7)
CASKLAVNYEQYF

SEQ ID NO: 446137 - protein, 13 aa, Homo sapiens
  CDR3 for alpha chain variable domain of TCR clone 223069 (TRAV17, TRAJ5)
CALRGTGRSALTF

SEQ ID NO: 446138 - protein, 15 aa, Homo sapiens
  CDR3 for beta chain variable domain of TCR clone 223069 (TRBV6-1, TRBJ1-5)
CASSELREGNQPQHF

SEQ ID NO: 446139 - protein, 14 aa, Homo sapiens
  CDR3 for alpha chain variable domain of TCR clone 223070 (TRAV1-2, TRAJ16)
CAVNRFSDGQKLLF

SEQ ID NO: 446140 - protein, 19 aa, Homo sapiens
  CDR3 for beta chain variable domain of TCR clone 223070 (TRBV6-3, TRBJ1-2)
CASSYSKGRTGPPNYGDTF

SEQ ID NO: 446141 - protein, 15 aa, Homo sapiens
  CDR3 for alpha chain variable domain of TCR clone 223071 (TRAV4, TRAJ39)
CLVGPNNNAGNMLTF

SEQ ID NO: 446142 - protein, 13 aa, Homo sapiens
  CDR3 for beta chain variable domain of TCR clone 223071 (TRBV7-9, TRBJ2-4)
CATEGLAGNIQYF

SEQ ID NO: 446143 - protein, 15 aa, Homo sapiens
  CDR3 for alpha chain variable domain of TCR clone 223072 (TRAV8-3, TRAJ15)
CAVGVCQPGRNCSDL

SEQ ID NO: 446144 - protein, 14 aa, Homo sapiens
  CDR3 for beta chain variable domain of TCR clone 223072 (TRBV6-1, TRBJ1-3)
CASVQGGGGNTIYF

SEQ ID NO: 446145 - protein, 12 aa, Homo sapiens
  CDR3 for alpha chain variable domain of TCR clone 223073 (TRAV16, TRAJ10)
CAFTGGGNKLTF

SEQ ID NO: 446146 - protein, 19 aa, Homo sapiens
  CDR3 for beta chain variable domain of TCR clone 223073 (TRBV25-1, TRBJ2-2)
CAILVYRVDRGRKTGELFF

SEQ ID NO: 446147 - protein, 18 aa, Homo sapiens
  CDR3 for alpha chain variable domain of TCR clone 223074 (TRAV13-1, TRAJ52)
CAASKRSAGGTSYGKLTF

SEQ ID NO: 446148 - protein, 17 aa, Homo sapiens
  CDR3 for beta chain variable domain of TCR clone 223074 (TRBV5-4, TRBJ2-1)
CASSSAGGRGPYNEQFF

SEQ ID NO: 446149 - protein, 15 aa, Homo sapiens
  CDR3 for alpha chain variable domain of TCR clone 223075 (TRAV26-1, TRAJ44)
CIVRVPFGTASKLTF

SEQ ID NO: 446150 - protein, 17 aa, Homo sapiens
  CDR3 for beta chain variable domain of TCR clone 223075 (TRBV24-1, TRBJ2-4)
CATSDAEARGVRNIQYF

SEQ ID NO: 446151 - protein, 15 aa, Homo sapiens
  CDR3 for alpha chain variable domain of TCR clone 223076 (TRAV2, TRAJ13)
CCLLLCFRGLQKVTF

SEQ ID NO: 446152 - protein, 16 aa, Homo sapiens
  CDR3 for beta chain variable domain of TCR clone 223076 (TRBV19, TRBJ2-1)
CASSKAGPSSYNEQFF

SEQ ID NO: 446153 - protein, 13 aa, Homo sapiens
  CDR3 for alpha chain variable domain of TCR clone 223077 (TRAV21, TRAJ33)
CAVAGDSNYQLIW

SEQ ID NO: 446154 - protein, 13 aa, Homo sapiens
  CDR3 for beta chain variable domain of TCR clone 223077 (TRBV6-3, TRBJ2-7)
CASSFSGGYEQYF

SEQ ID NO: 446155 - protein, 14 aa, Homo sapiens
  CDR3 for alpha chain variable domain of TCR clone 223078 (TRAV14/DV4, TRAJ20)
CAMRESLNDYKLSF

SEQ ID NO: 446156 - protein, 15 aa, Homo sapiens
  CDR3 for beta chain variable domain of TCR clone 223078 (TRBV7-3, TRBJ2-5)
CASSLIAGGQETQYF

SEQ ID NO: 446157 - protein, 15 aa, Homo sapiens
  CDR3 for alpha chain variable domain of TCR clone 223079 (TRAV3, TRAJ5)
YAVRDLDTGRRALTF

SEQ ID NO: 446158 - protein, 12 aa, Homo sapiens
  CDR3 for beta chain variable domain of TCR clone 223079 (TRBV11-2, TRBJ2-2)
CASSLGGGELFF

SEQ ID NO: 446159 - protein, 13 aa, Homo sapiens
  CDR3 for alpha chain variable domain of TCR clone 223080 (TRAV12-2, TRAJ20)
CAVYPSNDYKLSF

SEQ ID NO: 446160 - protein, 13 aa, Homo sapiens
  CDR3 for beta chain variable domain of TCR clone 223080 (TRBV20-1, TRBJ2-5)
CSARGDYQETQYF

SEQ ID NO: 446161 - protein, 15 aa, Homo sapiens
  CDR3 for alpha chain variable domain of TCR clone 223081 (TRAV14/DV4, TRAJ12)
CALRELMDSSYKLIF

SEQ ID NO: 446162 - protein, 10 aa, Homo sapiens
  CDR3 for beta chain variable domain of TCR clone 223081 (TRBV20-1, TRBJ2-7)
CSEGYYEQYF

SEQ ID NO: 446163 - protein, 16 aa, Homo sapiens
  CDR3 for alpha chain variable domain of TCR clone 223082 (TRAV12-3, TRAJ53)
CAVSPGSGGSTYKLTF

SEQ ID NO: 446164 - protein, 16 aa, Homo sapiens
  CDR3 for beta chain variable domain of TCR clone 223082 (TRBV7-2, TRBJ2-5)
CASSLESAGGRETQYF

SEQ ID NO: 446165 - protein, 13 aa, Homo sapiens
  CDR3 for alpha chain variable domain of TCR clone 223083 (TRAV21, TRAJ15)
CAVCNQAGTALIF

SEQ ID NO: 446166 - protein, 16 aa, Homo sapiens
  CDR3 for beta chain variable domain of TCR clone 223083 (TRBV12-4, TRBJ1-5)
CASSRPVGVSNQPQHF

SEQ ID NO: 446167 - protein, 14 aa, Homo sapiens
  CDR3 for alpha chain variable domain of TCR clone 223084 (TRAV12-2, TRAJ17)
CAVLFKAAGNKLTF

SEQ ID NO: 446168 - protein, 14 aa, Homo sapiens
  CDR3 for beta chain variable domain of TCR clone 223084 (TRBV20-1, TRBJ2-7)
CSAWTALSSYEQYF

SEQ ID NO: 446169 - protein, 14 aa, Homo sapiens
  CDR3 for alpha chain variable domain of TCR clone 223085 (TRAV1-2, TRAJ8)
CAVREDTGFQKLVF

SEQ ID NO: 446170 - protein, 13 aa, Homo sapiens
  CDR3 for beta chain variable domain of TCR clone 223085 (TRBV7-3, TRBJ2-1)
CASSPVAYNEQFF

SEQ ID NO: 446171 - protein, 14 aa, Homo sapiens
  CDR3 for alpha chain variable domain of TCR clone 223086 (TRAV9-2, TRAJ39)
CALYIYNAGNMLTF

SEQ ID NO: 446172 - protein, 13 aa, Homo sapiens
  CDR3 for beta chain variable domain of TCR clone 223086 (TRBV19, TRBJ1-5)
CASSMRGYQPQHF

SEQ ID NO: 446173 - protein, 15 aa, Homo sapiens
  CDR3 for alpha chain variable domain of TCR clone 223087 (TRAV29/DV5, TRAJ29)
CAASERSSGNTPLVF

SEQ ID NO: 446174 - protein, 14 aa, Homo sapiens
  CDR3 for beta chain variable domain of TCR clone 223087 (TRBV10-2, TRBJ1-5)
CASSSTGRNQPQHF

SEQ ID NO: 446175 - protein, 12 aa, Homo sapiens
  CDR3 for alpha chain variable domain of TCR clone 223088 (TRAV3, TRAJ43)
CALRDPNNDIRF

SEQ ID NO: 446176 - protein, 15 aa, Homo sapiens
  CDR3 for beta chain variable domain of TCR clone 223088 (TRBV27, TRBJ1-5)
CASSLGTGFDQPQHF

SEQ ID NO: 446177 - protein, 10 aa, Homo sapiens
  CDR3 for alpha chain variable domain of TCR clone 223089 (TRAV12-2, TRAJ48)
CAVTSEKLTF

SEQ ID NO: 446178 - protein, 17 aa, Homo sapiens
  CDR3 for beta chain variable domain of TCR clone 223089 (TRBV11-1, TRBJ2-7)
WASSLTGSFGLDYEQYF

SEQ ID NO: 446179 - protein, 14 aa, Homo sapiens
  CDR3 for alpha chain variable domain of TCR clone 223090 (TRAV12-2, TRAJ40)
CAVTIPSGTYNYIF

SEQ ID NO: 446180 - protein, 14 aa, Homo sapiens
  CDR3 for beta chain variable domain of TCR clone 223090 (TRBV20-1, TRBJ1-1)
CSAQTRIGGTEAFF

SEQ ID NO: 446181 - protein, 11 aa, Homo sapiens
  CDR3 for alpha chain variable domain of TCR clone 223091 (TRAV3, TRAJ21)
CAVGNFNKFYF

SEQ ID NO: 446182 - protein, 14 aa, Homo sapiens
  CDR3 for beta chain variable domain of TCR clone 223091 (TRBV10-3, TRBJ2-1)
CAIRTDRGVNEQFF

SEQ ID NO: 446183 - protein, 16 aa, Homo sapiens
  CDR3 for alpha chain variable domain of TCR clone 223092 (TRAV30, TRAJ24)
CGTEIVDADSWGKFQF

SEQ ID NO: 446184 - protein, 18 aa, Homo sapiens
  CDR3 for beta chain variable domain of TCR clone 223092 (TRBV12-4, TRBJ2-2)
CASSRSGGAIPNTGELLF

SEQ ID NO: 446185 - protein, 11 aa, Homo sapiens
  CDR3 for alpha chain variable domain of TCR clone 223093 (TRAV17, TRAJ21)
CATGNFNKFYF

SEQ ID NO: 446186 - protein, 16 aa, Homo sapiens
  CDR3 for beta chain variable domain of TCR clone 223093 (TRBV2, TRBJ2-1)
CASSANPRDWQAEQFL

SEQ ID NO: 446187 - protein, 12 aa, Homo sapiens
  CDR3 for alpha chain variable domain of TCR clone 223094 (TRAV1-1, TRAJ8)
CAGGTGFKKLVF

SEQ ID NO: 446188 - protein, 13 aa, Homo sapiens
  CDR3 for beta chain variable domain of TCR clone 223094 (TRBV7-9, TRBJ1-2)
CASSLKQNYGYTF

SEQ ID NO: 446189 - protein, 14 aa, Homo sapiens
  CDR3 for alpha chain variable domain of TCR clone 223095 (TRAV26-1, TRAJ38)
CIADNAGNNRKLIW

SEQ ID NO: 446190 - protein, 11 aa, Homo sapiens
  CDR3 for beta chain variable domain of TCR clone 223095 (TRBV11-2, TRBJ2-2)
CASSLPGELFF

SEQ ID NO: 446191 - protein, 14 aa, Homo sapiens
  CDR3 for alpha chain variable domain of TCR clone 223096 (TRAV14/DV4, TRAJ54)
CALSPIQGAQKLVF

SEQ ID NO: 446192 - protein, 15 aa, Homo sapiens
  CDR3 for beta chain variable domain of TCR clone 223096 (TRBV5-1, TRBJ2-3)
CASRSNREGTDTQYF

SEQ ID NO: 446193 - protein, 19 aa, Homo sapiens
  CDR3 for alpha chain variable domain of TCR clone 223097 (TRAV3, TRAJ6)
CAVRDRNPSRSGESYIPTF

SEQ ID NO: 446194 - protein, 15 aa, Homo sapiens
  CDR3 for beta chain variable domain of TCR clone 223097 (TRBV18, TRBJ2-7)
CASSPTFMDSYEQYF

SEQ ID NO: 446195 - protein, 14 aa, Homo sapiens
  CDR3 for alpha chain variable domain of TCR clone 223098 (TRAV30, TRAJ33)
CGTVAPRSNYQLIW

SEQ ID NO: 446196 - protein, 14 aa, Homo sapiens
  CDR3 for beta chain variable domain of TCR clone 223098 (TRBV7-8, TRBJ1-2)
CASSPDSLSYGYTF

SEQ ID NO: 446197 - protein, 12 aa, Homo sapiens
  CDR3 for alpha chain variable domain of TCR clone 223099 (TRAV12-3, TRAJ5)
CAMDTGRRALTF

SEQ ID NO: 446198 - protein, 13 aa, Homo sapiens
  CDR3 for beta chain variable domain of TCR clone 223099 (TRBV7-7, TRBJ2-2)
CASSLTSAGELFF

SEQ ID NO: 446199 - protein, 12 aa, Homo sapiens
  CDR3 for alpha chain variable domain of TCR clone 223100 (TRAV21, TRAJ27)
CAANTNAGKSTF

SEQ ID NO: 446200 - protein, 15 aa, Homo sapiens
  CDR3 for beta chain variable domain of TCR clone 223100 (TRBV12-4, TRBJ1-6)
CASSFSGRFDSPLHF

SEQ ID NO: 446201 - protein, 18 aa, Homo sapiens
  CDR3 for alpha chain variable domain of TCR clone 223101 (TRAV13-1, TRAJ52)
CAAKNPNAGGTSYGKLTF

SEQ ID NO: 446202 - protein, 13 aa, Homo sapiens
  CDR3 for beta chain variable domain of TCR clone 223101 (TRBV12-4, TRBJ1-2)
CASSSGPNYGYTF

SEQ ID NO: 446203 - protein, 11 aa, Homo sapiens
  CDR3 for alpha chain variable domain of TCR clone 223102 (TRAV29/DV5, TRAJ31)
CAASYRDRLTF

SEQ ID NO: 446204 - protein, 15 aa, Homo sapiens
  CDR3 for beta chain variable domain of TCR clone 223102 (TRBV11-2, TRBJ2-1)
CASSLGTSGLKEQFF

SEQ ID NO: 446205 - protein, 18 aa, Homo sapiens
  CDR3 for alpha chain variable domain of TCR clone 223103 (TRAV13-1, TRAJ52)
CAASKRSAGGTSYGKLTF

SEQ ID NO: 446206 - protein, 15 aa, Homo sapiens
  CDR3 for beta chain variable domain of TCR clone 223103 (TRBV7-2, TRBJ1-2)
CASSPRAGWNYCYTF

SEQ ID NO: 446207 - protein, 12 aa, Homo sapiens
  CDR3 for alpha chain variable domain of TCR clone 223104 (TRAV17, TRAJ4)
CATDGRYNKLIF

SEQ ID NO: 446208 - protein, 15 aa, Homo sapiens
  CDR3 for beta chain variable domain of TCR clone 223104 (TRBV12-4, TRBJ2-5)
CASSPPTGLQETQYF

SEQ ID NO: 446209 - protein, 13 aa, Homo sapiens
  CDR3 for alpha chain variable domain of TCR clone 223105 (TRAV1-2, TRAJ26)
CAVRPNYGQNFVF

SEQ ID NO: 446210 - protein, 14 aa, Homo sapiens
  CDR3 for beta chain variable domain of TCR clone 223105 (TRBV4-1, TRBJ2-5)
CASSQDVALETQYF

SEQ ID NO: 446211 - protein, 12 aa, Homo sapiens
  CDR3 for alpha chain variable domain of TCR clone 223106 (TRAV12-3, TRAJ17)
CAMTLTVNKLTF

SEQ ID NO: 446212 - protein, 13 aa, Homo sapiens
  CDR3 for beta chain variable domain of TCR clone 223106 (TRBV7-9, TRBJ1-2)
CASSLKQNYGYTF

SEQ ID NO: 446213 - protein, 17 aa, Homo sapiens
  CDR3 for alpha chain variable domain of TCR clone 223107 (TRAV8-3, TRAJ34)
CAIPGKLIFGTGTRLQV

SEQ ID NO: 446214 - protein, 15 aa, Homo sapiens
  CDR3 for beta chain variable domain of TCR clone 223107 (TRBV5-7, TRBJ2-1)
CDSSRRLAGDNEQFF

SEQ ID NO: 446215 - protein, 13 aa, Homo sapiens
  CDR3 for alpha chain variable domain of TCR clone 223108 (TRAV3, TRAJ21)
CAVREPDFNKFYF

SEQ ID NO: 446216 - protein, 12 aa, Homo sapiens
  CDR3 for beta chain variable domain of TCR clone 223108 (TRBV2, TRBJ2-1)
CAYGPPGNEQFF

SEQ ID NO: 446217 - protein, 16 aa, Homo sapiens
  CDR3 for alpha chain variable domain of TCR clone 223109 (TRAV30, TRAJ24)
CGTEIVDADSWGEFQF

SEQ ID NO: 446218 - protein, 14 aa, Homo sapiens
  CDR3 for beta chain variable domain of TCR clone 223109 (TRBV12-5, TRBJ2-5)
CASRSRTHQETQYF

SEQ ID NO: 446219 - protein, 17 aa, Homo sapiens
  CDR3 for alpha chain variable domain of TCR clone 223110 (TRAV3, TRAJ12)
CAVRDGGRMDSSYKLIF

SEQ ID NO: 446220 - protein, 13 aa, Homo sapiens
  CDR3 for beta chain variable domain of TCR clone 223110 (TRBV7-3, TRBJ1-1)
CASSQEWGAEAFF

SEQ ID NO: 446221 - protein, 15 aa, Homo sapiens
  CDR3 for alpha chain variable domain of TCR clone 223111 (TRAV3, TRAJ20)
CAVRDIKLSDYKLSF

SEQ ID NO: 446222 - protein, 15 aa, Homo sapiens
  CDR3 for beta chain variable domain of TCR clone 223111 (TRBV7-9, TRBJ1-6)
CASSSPGRGNSALLF

SEQ ID NO: 446223 - protein, 12 aa, Homo sapiens
  CDR3 for alpha chain variable domain of TCR clone 223112 (TRAV12-2, TRAJ10)
WGVTGGGNKLTF

SEQ ID NO: 446224 - protein, 14 aa, Homo sapiens
  CDR3 for beta chain variable domain of TCR clone 223112 (TRBV27, TRBJ2-7)
CASVTGTERREQYF

SEQ ID NO: 446225 - protein, 12 aa, Homo sapiens
  CDR3 for alpha chain variable domain of TCR clone 223113 (TRAV35, TRAJ30)
CAGQLADDKIIF

SEQ ID NO: 446226 - protein, 17 aa, Homo sapiens
  CDR3 for beta chain variable domain of TCR clone 223113 (TRBV4-2, TRBJ2-5)
CASSTGRWRNFQETQYF

SEQ ID NO: 446227 - protein, 13 aa, Homo sapiens
  CDR3 for alpha chain variable domain of TCR clone 223114 (TRAV12-1, TRAJ6)
CVVNRGGSYIPTF

SEQ ID NO: 446228 - protein, 17 aa, Homo sapiens
  CDR3 for beta chain variable domain of TCR clone 223114 (TRBV13, TRBJ2-3)
CASSLSRVAGGRNTQYF

SEQ ID NO: 446229 - protein, 13 aa, Homo sapiens
  CDR3 for alpha chain variable domain of TCR clone 223115 (TRAV29/DV5, TRAJ31)
CAASRNNNARLMF

SEQ ID NO: 446230 - protein, 19 aa, Homo sapiens
  CDR3 for beta chain variable domain of TCR clone 223115 (TRBV19, TRBJ2-5)
CASSIGQVTDFFLGETQYF

SEQ ID NO: 446231 - protein, 12 aa, Homo sapiens
  CDR3 for alpha chain variable domain of TCR clone 223116 (TRAV13-1, TRAJ49)
CAAPKTGNQFYF

SEQ ID NO: 446232 - protein, 17 aa, Homo sapiens
  CDR3 for beta chain variable domain of TCR clone 223116 (TRBV25-1, TRBJ2-7)
CAGSDARVVFSSYEQYF

SEQ ID NO: 446233 - protein, 13 aa, Homo sapiens
  CDR3 for alpha chain variable domain of TCR clone 223117 (TRAV8-3, TRAJ48)
CAVVPFGNEKLTF

SEQ ID NO: 446234 - protein, 15 aa, Homo sapiens
  CDR3 for beta chain variable domain of TCR clone 223117 (TRBV15, TRBJ1-5)
CATSRDPVSNQPQHF

SEQ ID NO: 446235 - protein, 17 aa, Homo sapiens
  CDR3 for alpha chain variable domain of TCR clone 223118 (TRAV8-3, TRAJ50)
CAVGAVDTETSYDKVIF

SEQ ID NO: 446236 - protein, 14 aa, Homo sapiens
  CDR3 for beta chain variable domain of TCR clone 223118 (TRBV19, TRBJ2-7)
CASNFRDTFTGMYF

SEQ ID NO: 446237 - protein, 14 aa, Homo sapiens
  CDR3 for alpha chain variable domain of TCR clone 223119 (TRAV6, TRAJ40)
CALDIKGGTYKYIF

SEQ ID NO: 446238 - protein, 15 aa, Homo sapiens
  CDR3 for beta chain variable domain of TCR clone 223119 (TRBV19, TRBJ1-1)
CANTSGQIQNTEAFF

SEQ ID NO: 446239 - protein, 12 aa, Homo sapiens
  CDR3 for alpha chain variable domain of TCR clone 223120 (TRAV25, TRAJ5)
CAGGGGRRARTF

SEQ ID NO: 446240 - protein, 15 aa, Homo sapiens
  CDR3 for beta chain variable domain of TCR clone 223120 (TRBV20-1, TRBJ2-7)
CSARDRVSGMDEQYF

SEQ ID NO: 446241 - protein, 18 aa, Homo sapiens
  CDR3 for alpha chain variable domain of TCR clone 223121 (TRAV21, TRAJ52)
CAVRPSPAGGTSYGKLTF

SEQ ID NO: 446242 - protein, 15 aa, Homo sapiens
  CDR3 for beta chain variable domain of TCR clone 223121 (TRBV7-9, TRBJ2-2)
CASGPLDTFPGELFF

SEQ ID NO: 446243 - protein, 14 aa, Homo sapiens
  CDR3 for alpha chain variable domain of TCR clone 223122 (TRAV12-2, TRAJ17)
CAALFKAAGNKRTF

SEQ ID NO: 446244 - protein, 16 aa, Homo sapiens
  CDR3 for beta chain variable domain of TCR clone 223122 (TRBV20-1, TRBJ2-2)
CSASASGIPGAGELFF

SEQ ID NO: 446245 - protein, 16 aa, Homo sapiens
  CDR3 for alpha chain variable domain of TCR clone 223123 (TRAV12-3, TRAJ50)
CAMRDPMKTSYDKVIF

SEQ ID NO: 446246 - protein, 13 aa, Homo sapiens
  CDR3 for beta chain variable domain of TCR clone 223123 (TRBV4-1, TRBJ2-3)
CASSLDFTDAQYF

SEQ ID NO: 446247 - protein, 12 aa, Homo sapiens
  CDR3 for alpha chain variable domain of TCR clone 223124 (TRAV21, TRAJ11)
CAATSGYSTLTF

SEQ ID NO: 446248 - protein, 16 aa, Homo sapiens
  CDR3 for beta chain variable domain of TCR clone 223124 (TRBV28, TRBJ2-2)
CASSLEGGLNTGELFF

SEQ ID NO: 446249 - protein, 14 aa, Homo sapiens
  CDR3 for alpha chain variable domain of TCR clone 223125 (TRAV29/DV5, TRAJ34)
CGASASRETDKLIF

SEQ ID NO: 446250 - protein, 15 aa, Homo sapiens
  CDR3 for beta chain variable domain of TCR clone 223125 (TRBV7-8, TRBJ2-7)
CASSLERAGSYEQYF

SEQ ID NO: 446251 - protein, 13 aa, Homo sapiens
  CDR3 for alpha chain variable domain of TCR clone 223126 (TRAV2, TRAJ40)
CAVVTSGTYKYIF

SEQ ID NO: 446252 - protein, 15 aa, Homo sapiens
  CDR3 for beta chain variable domain of TCR clone 223126 (TRBV7-2, TRBJ1-2)
CASSITWTGNYGYTF

SEQ ID NO: 446253 - protein, 15 aa, Homo sapiens
  CDR3 for alpha chain variable domain of TCR clone 223127 (TRAV19, TRAJ23)
CALSEGGNQGGKLIF

SEQ ID NO: 446254 - protein, 13 aa, Homo sapiens
  CDR3 for beta chain variable domain of TCR clone 223127 (TRBV9, TRBJ2-7)
CASSVAEYYEQYF

SEQ ID NO: 446255 - protein, 14 aa, Homo sapiens
  CDR3 for alpha chain variable domain of TCR clone 223128 (TRAV1-2, TRAJ16)
CAVRSASDGQKLLF

SEQ ID NO: 446256 - protein, 17 aa, Homo sapiens
  CDR3 for beta chain variable domain of TCR clone 223128 (TRBV7-3, TRBJ2-3)
CASSLMNRMRGADTQYF

SEQ ID NO: 446257 - protein, 15 aa, Homo sapiens
  CDR3 for alpha chain variable domain of TCR clone 223129 (TRAV3, TRAJ29)
CAVRAPLSGNPPLVF

SEQ ID NO: 446258 - protein, 15 aa, Homo sapiens
  CDR3 for beta chain variable domain of TCR clone 223129 (TRBV28, TRBJ1-1)
CASRIKGGLNTEAFF

SEQ ID NO: 446259 - protein, 18 aa, Homo sapiens
  CDR3 for alpha chain variable domain of TCR clone 223130 (TRAV21, TRAJ52)
CAVRPSPAGGTSYGKLTF

SEQ ID NO: 446260 - protein, 14 aa, Homo sapiens
  CDR3 for beta chain variable domain of TCR clone 223130 (TRBV6-3, TRBJ2-7)
CASSYSVRVYEQYF

SEQ ID NO: 446261 - protein, 15 aa, Homo sapiens
  CDR3 for alpha chain variable domain of TCR clone 223131 (TRAV26-1, TRAJ44)
CIVRVGTGTASKLTF

SEQ ID NO: 446262 - protein, 15 aa, Homo sapiens
  CDR3 for beta chain variable domain of TCR clone 223131 (TRBV7-6, TRBJ2-1)
CASSSLAGEGIEQFF

SEQ ID NO: 446263 - protein, 14 aa, Homo sapiens
  CDR3 for alpha chain variable domain of TCR clone 223132 (TRAV26-1, TRAJ21)
CIVRVGHNFNKFYF

SEQ ID NO: 446264 - protein, 16 aa, Homo sapiens
  CDR3 for beta chain variable domain of TCR clone 223132 (TRBV20-1, TRBJ1-4)
CSAPGQGLLTNEKLFF

SEQ ID NO: 446265 - protein, 12 aa, Homo sapiens
  CDR3 for alpha chain variable domain of TCR clone 223133 (TRAV3, TRAJ43)
CAVRDPNNDMRF

SEQ ID NO: 446266 - protein, 14 aa, Homo sapiens
  CDR3 for beta chain variable domain of TCR clone 223133 (TRBV5-1, TRBJ2-3)
CASSLFEPTDTQYF

SEQ ID NO: 446267 - protein, 17 aa, Homo sapiens
  CDR3 for alpha chain variable domain of TCR clone 223134 (TRAV26-2, TRAJ42)
CILRDVGYGGSQGNLIF

SEQ ID NO: 446268 - protein, 12 aa, Homo sapiens
  CDR3 for beta chain variable domain of TCR clone 223134 (TRBV7-9, TRBJ2-7)
CASSLEGYEQYF

SEQ ID NO: 446269 - protein, 15 aa, Homo sapiens
  CDR3 for alpha chain variable domain of TCR clone 223135 (TRAV3, TRAJ29)
CAVRDINSGNQPLVF

SEQ ID NO: 446270 - protein, 16 aa, Homo sapiens
  CDR3 for beta chain variable domain of TCR clone 223135 (TRBV4-1, TRBJ2-5)
CASSQTFYGDQETQYF

SEQ ID NO: 446271 - protein, 14 aa, Homo sapiens
  CDR3 for alpha chain variable domain of TCR clone 223136 (TRAV16, TRAJ33)
CALSAMDSNYQLIW

SEQ ID NO: 446272 - protein, 16 aa, Homo sapiens
  CDR3 for beta chain variable domain of TCR clone 223136 (TRBV4-1, TRBJ2-3)
CASSQRAGGLTDTQYF

SEQ ID NO: 446273 - protein, 13 aa, Homo sapiens
  CDR3 for alpha chain variable domain of TCR clone 223137 (TRAV27, TRAJ56)
CAGKPGANSKLTF

SEQ ID NO: 446274 - protein, 18 aa, Homo sapiens
  CDR3 for beta chain variable domain of TCR clone 223137 (TRBV11-2, TRBJ2-3)
CASSLGGASRGAPNTQCF

SEQ ID NO: 446275 - protein, 13 aa, Homo sapiens
  CDR3 for alpha chain variable domain of TCR clone 223138 (TRAV2, TRAJ9)
CAVESTGGFKTIF

SEQ ID NO: 446276 - protein, 15 aa, Homo sapiens
  CDR3 for beta chain variable domain of TCR clone 223138 (TRBV20-1, TRBJ2-5)
CSAEGTGGLQETQYF

SEQ ID NO: 446277 - protein, 16 aa, Homo sapiens
  CDR3 for alpha chain variable domain of TCR clone 223139 (TRAV8-3, TRAJ10)
CAVGPILTGGGHKLTF

SEQ ID NO: 446278 - protein, 16 aa, Homo sapiens
  CDR3 for beta chain variable domain of TCR clone 223139 (TRBV7-2, TRBJ2-5)
CASGSKWLSGQETQYF

SEQ ID NO: 446279 - protein, 15 aa, Homo sapiens
  CDR3 for alpha chain variable domain of TCR clone 223140 (TRAV17, TRAJ16)
CATALRFSDGQKLLF

SEQ ID NO: 446280 - protein, 15 aa, Homo sapiens
  CDR3 for beta chain variable domain of TCR clone 223140 (TRBV4-1, TRBJ1-4)
CASSDTGGTNEKLFF

SEQ ID NO: 446281 - protein, 12 aa, Homo sapiens
  CDR3 for alpha chain variable domain of TCR clone 223141 (TRAV13-1, TRAJ27)
CAAHTNAGKSTF

SEQ ID NO: 446282 - protein, 20 aa, Homo sapiens
  CDR3 for beta chain variable domain of TCR clone 223141 (TRBV28, TRBJ2-1)
CASTPIGRSPGLAGGNEQFF

SEQ ID NO: 446283 - protein, 14 aa, Homo sapiens
  CDR3 for alpha chain variable domain of TCR clone 223142 (TRAV12-1, TRAJ12)
CVVTRMDSSYKLIF

SEQ ID NO: 446284 - protein, 13 aa, Homo sapiens
  CDR3 for beta chain variable domain of TCR clone 223142 (TRBV20-1, TRBJ1-1)
CSARGGGKTEAFF

SEQ ID NO: 446285 - protein, 15 aa, Homo sapiens
  CDR3 for alpha chain variable domain of TCR clone 223143 (TRAV38-2/DV8, TRAJ45)
CAYWDSGGGVDGLTF

SEQ ID NO: 446286 - protein, 14 aa, Homo sapiens
  CDR3 for beta chain variable domain of TCR clone 223143 (TRBV7-2, TRBJ2-7)
CASRSQGAAYEQYF

SEQ ID NO: 446287 - protein, 13 aa, Homo sapiens
  CDR3 for alpha chain variable domain of TCR clone 223144 (TRAV35, TRAJ36)
CAGPRIGANNLFF

SEQ ID NO: 446288 - protein, 15 aa, Homo sapiens
  CDR3 for beta chain variable domain of TCR clone 223144 (TRBV28, TRBJ2-5)
CASSLPWSYQETQYF

SEQ ID NO: 446289 - protein, 12 aa, Homo sapiens
  CDR3 for alpha chain variable domain of TCR clone 223145 (TRAV9-2, TRAJ26)
CALRGYGQNFVF

SEQ ID NO: 446290 - protein, 12 aa, Homo sapiens
  CDR3 for beta chain variable domain of TCR clone 223145 (TRBV29-1, TRBJ2-3)
CSVTGGADTHYF

SEQ ID NO: 446291 - protein, 14 aa, Homo sapiens
  CDR3 for alpha chain variable domain of TCR clone 223146 (TRAV26-1, TRAJ34)
CIVSVVYNTDKLIF

SEQ ID NO: 446292 - protein, 15 aa, Homo sapiens
  CDR3 for beta chain variable domain of TCR clone 223146 (TRBV20-1, TRBJ2-7)
CSARVPAAYFYEQYF

SEQ ID NO: 446293 - protein, 12 aa, Homo sapiens
  CDR3 for alpha chain variable domain of TCR clone 223147 (TRAV13-1, TRAJ9)
CASHTVGFKTIF

SEQ ID NO: 446294 - protein, 18 aa, Homo sapiens
  CDR3 for beta chain variable domain of TCR clone 223147 (TRBV11-2, TRBJ2-3)
CASSLGGASRGAPNTQYF

SEQ ID NO: 446295 - protein, 15 aa, Homo sapiens
  CDR3 for alpha chain variable domain of TCR clone 223148 (TRAV23/DV6, TRAJ18)
CAARYRGSTLGRLYF

SEQ ID NO: 446296 - protein, 16 aa, Homo sapiens
  CDR3 for beta chain variable domain of TCR clone 223148 (TRBV20-1, TRBJ1-2)
CSASMGQGVANYGYTV

SEQ ID NO: 446297 - protein, 14 aa, Homo sapiens
  CDR3 for alpha chain variable domain of TCR clone 223149 (TRAV38-1, TRAJ40)
CALRPTSGTYKYIF

SEQ ID NO: 446298 - protein, 14 aa, Homo sapiens
  CDR3 for beta chain variable domain of TCR clone 223149 (TRBV20-1, TRBJ1-5)
CSATDRGSNQPQHF

SEQ ID NO: 446299 - protein, 12 aa, Homo sapiens
  CDR3 for alpha chain variable domain of TCR clone 223150 (TRAV1-1, TRAJ8)
CAGGTGIQKFVF

SEQ ID NO: 446300 - protein, 15 aa, Homo sapiens
  CDR3 for beta chain variable domain of TCR clone 223150 (TRBV7-9, TRBJ1-4)
CASSRTGGFNEKLFF

SEQ ID NO: 446301 - protein, 14 aa, Homo sapiens
  CDR3 for alpha chain variable domain of TCR clone 223151 (TRAV17, TRAJ57)
CATDPQGGSEKLVF

SEQ ID NO: 446302 - protein, 14 aa, Homo sapiens
  CDR3 for beta chain variable domain of TCR clone 223151 (TRBV27, TRBJ2-5)
CASSSLKGWETQDF

SEQ ID NO: 446303 - protein, 14 aa, Homo sapiens
  CDR3 for alpha chain variable domain of TCR clone 223152 (TRAV17, TRAJ22)
CATSPSGSARQLTF

SEQ ID NO: 446304 - protein, 13 aa, Homo sapiens
  CDR3 for beta chain variable domain of TCR clone 223152 (TRBV12-4, TRBJ1-2)
CASNLRQGKGYTF

SEQ ID NO: 446305 - protein, 14 aa, Homo sapiens
  CDR3 for alpha chain variable domain of TCR clone 223153 (TRAV13-2, TRAJ10)
CAERGTGGGNKLTF

SEQ ID NO: 446306 - protein, 15 aa, Homo sapiens
  CDR3 for beta chain variable domain of TCR clone 223153 (TRBV7-9, TRBJ1-5)
CASSQGHQPNQPQHF

SEQ ID NO: 446307 - protein, 15 aa, Homo sapiens
  CDR3 for alpha chain variable domain of TCR clone 223154 (TRAV1-2, TRAJ28)
CAVQYSGAGSYQLTF

SEQ ID NO: 446308 - protein, 13 aa, Homo sapiens
  CDR3 for beta chain variable domain of TCR clone 223154 (TRBV20-1, TRBJ2-7)
CSATHTSGYKQYF

SEQ ID NO: 446309 - protein, 11 aa, Homo sapiens
  CDR3 for alpha chain variable domain of TCR clone 223155 (TRAV1-2, TRAJ34)
CAGYNTDNLIF

SEQ ID NO: 446310 - protein, 16 aa, Homo sapiens
  CDR3 for beta chain variable domain of TCR clone 223155 (TRBV10-3, TRBJ2-1)
CAISGVGDGGGGEQFF

SEQ ID NO: 446311 - protein, 11 aa, Homo sapiens
  CDR3 for alpha chain variable domain of TCR clone 223156 (TRAV2, TRAJ33)
CAVDSNYQLIW

SEQ ID NO: 446312 - protein, 15 aa, Homo sapiens
  CDR3 for beta chain variable domain of TCR clone 223156 (TRBV7-9, TRBJ2-7)
CASSLALAEAYEQYF

SEQ ID NO: 446313 - protein, 13 aa, Homo sapiens
  CDR3 for alpha chain variable domain of TCR clone 223157 (TRAV20, TRAJ34)
CAVSSYNTDKLIF

SEQ ID NO: 446314 - protein, 15 aa, Homo sapiens
  CDR3 for beta chain variable domain of TCR clone 223157 (TRBV20-1, TRBJ1-2)
CSAAGEGARIFGYTF

SEQ ID NO: 446315 - protein, 12 aa, Homo sapiens
  CDR3 for alpha chain variable domain of TCR clone 223158 (TRAV8-2, TRAJ45)
CVQGGGADGLTF

SEQ ID NO: 446316 - protein, 14 aa, Homo sapiens
  CDR3 for beta chain variable domain of TCR clone 223158 (TRBV4-3, TRBJ1-1)
CASSQGWTPARAVF

SEQ ID NO: 446317 - protein, 15 aa, Homo sapiens
  CDR3 for alpha chain variable domain of TCR clone 223159 (TRAV8-4, TRAJ15)
CAVSDPVQAGTALIF

SEQ ID NO: 446318 - protein, 14 aa, Homo sapiens
  CDR3 for beta chain variable domain of TCR clone 223159 (TRBV7-2, TRBJ1-3)
CASSLRRSGNTIYF

SEQ ID NO: 446319 - protein, 12 aa, Homo sapiens
  CDR3 for alpha chain variable domain of TCR clone 223160 (TRAV13-2, TRAJ8)
CAPWLGFQKLVF

SEQ ID NO: 446320 - protein, 17 aa, Homo sapiens
  CDR3 for beta chain variable domain of TCR clone 223160 (TRBV6-1, TRBJ2-7)
CASRARLAGSPSYEQYF

SEQ ID NO: 446321 - protein, 14 aa, Homo sapiens
  CDR3 for alpha chain variable domain of TCR clone 223161 (TRAV17, TRAJ53)
CATDAGGSDYKLTF

SEQ ID NO: 446322 - protein, 16 aa, Homo sapiens
  CDR3 for beta chain variable domain of TCR clone 223161 (TRBV4-1, TRBJ1-1)
CASSQDAAMGNTEAFF

SEQ ID NO: 446323 - protein, 11 aa, Homo sapiens
  CDR3 for alpha chain variable domain of TCR clone 223162 (TRAV23/DV6, TRAJ58)
CAARLLRGETS

SEQ ID NO: 446324 - protein, 14 aa, Homo sapiens
  CDR3 for beta chain variable domain of TCR clone 223162 (TRBV7-2, TRBJ2-7)
CASRSQGAVYEQYF

SEQ ID NO: 446325 - protein, 12 aa, Homo sapiens
  CDR3 for alpha chain variable domain of TCR clone 223163 (TRAV1-2, TRAJ29)
CAVPSGNTPLVF

SEQ ID NO: 446326 - protein, 14 aa, Homo sapiens
  CDR3 for beta chain variable domain of TCR clone 223163 (TRBV7-6, TRBJ2-1)
CARSLGGGADEQFF

SEQ ID NO: 446327 - protein, 14 aa, Homo sapiens
  CDR3 for alpha chain variable domain of TCR clone 223164 (TRAV3, TRAJ15)
CAVTLNQAGTALIF

SEQ ID NO: 446328 - protein, 17 aa, Homo sapiens
  CDR3 for beta chain variable domain of TCR clone 223164 (TRBV7-8, TRBJ2-7)
CASSFTSGRPPSYERYF

SEQ ID NO: 446329 - protein, 15 aa, Homo sapiens
  CDR3 for alpha chain variable domain of TCR clone 223165 (TRAV12-3, TRAJ6)
CAMSETTGGSYIPKF

SEQ ID NO: 446330 - protein, 16 aa, Homo sapiens
  CDR3 for beta chain variable domain of TCR clone 223165 (TRBV20-1, TRBJ1-2)
CSASMGQGVANYGYTF

SEQ ID NO: 446331 - protein, 13 aa, Homo sapiens
  CDR3 for alpha chain variable domain of TCR clone 223166 (TRAV21, TRAJ27)
CAARPGNAGKSTF

SEQ ID NO: 446332 - protein, 14 aa, Homo sapiens
  CDR3 for beta chain variable domain of TCR clone 223166 (TRBV7-6, TRBJ2-3)
CASSLGTGTDTQYV

SEQ ID NO: 446333 - protein, 13 aa, Homo sapiens
  CDR3 for alpha chain variable domain of TCR clone 223167 (TRAV12-3, TRAJ40)
CAMSDSGTYKHIF

SEQ ID NO: 446334 - protein, 14 aa, Homo sapiens
  CDR3 for beta chain variable domain of TCR clone 223167 (TRBV7-2, TRBJ1-5)
CASSTQGAGQPQHF

SEQ ID NO: 446335 - protein, 14 aa, Homo sapiens
  CDR3 for alpha chain variable domain of TCR clone 223168 (TRAV12-1, TRAJ17)
CVVNYKAACNKLTF

SEQ ID NO: 446336 - protein, 14 aa, Homo sapiens
  CDR3 for beta chain variable domain of TCR clone 223168 (TRBV7-8, TRBJ2-3)
CASSLEAGTDTQYF

SEQ ID NO: 446337 - protein, 14 aa, Homo sapiens
  CDR3 for alpha chain variable domain of TCR clone 223169 (TRAV16, TRAJ39)
CALSKNNAGSMLTF

SEQ ID NO: 446338 - protein, 16 aa, Homo sapiens
  CDR3 for beta chain variable domain of TCR clone 223169 (TRBV6-6, TRBJ2-1)
CASSYSFSGSYNEQFF

SEQ ID NO: 446339 - protein, 15 aa, Homo sapiens
  CDR3 for alpha chain variable domain of TCR clone 223170 (TRAV3, TRAJ17)
CAVRDTGAAGNKLTF

SEQ ID NO: 446340 - protein, 14 aa, Homo sapiens
  CDR3 for beta chain variable domain of TCR clone 223170 (TRBV6-3, TRBJ1-1)
CASSNLLPGAEALF

SEQ ID NO: 446341 - protein, 12 aa, Homo sapiens
  CDR3 for alpha chain variable domain of TCR clone 223171 (TRAV8-3, TRAJ26)
CAGDNYGQNFVF

SEQ ID NO: 446342 - protein, 17 aa, Homo sapiens
  CDR3 for beta chain variable domain of TCR clone 223171 (TRBV2, TRBJ2-5)
CASSEPLAGVTGETQYF

SEQ ID NO: 446343 - protein, 15 aa, Homo sapiens
  CDR3 for alpha chain variable domain of TCR clone 223172 (TRAV29/DV5, TRAJ57)
CAASLLRGGSEKLVF

SEQ ID NO: 446344 - protein, 14 aa, Homo sapiens
  CDR3 for beta chain variable domain of TCR clone 223172 (TRBV12-5, TRBJ2-5)
CASGSRTHQETQYF

SEQ ID NO: 446345 - protein, 13 aa, Homo sapiens
  CDR3 for alpha chain variable domain of TCR clone 223173 (TRAV3, TRAJ20)
CCEAFCNDYTLSF

SEQ ID NO: 446346 - protein, 16 aa, Homo sapiens
  CDR3 for beta chain variable domain of TCR clone 223173 (TRBV12-5, TRBJ2-5)
CASGPRTSGNQETQYF

SEQ ID NO: 446347 - protein, 14 aa, Homo sapiens
  CDR3 for alpha chain variable domain of TCR clone 223174 (TRAV23/DV6, TRAJ11)
CAASLESGYSTPTF

SEQ ID NO: 446348 - protein, 15 aa, Homo sapiens
  CDR3 for beta chain variable domain of TCR clone 223174 (TRBV28, TRBJ2-7)
CASSSPGTEPFEQYF

SEQ ID NO: 446349 - protein, 14 aa, Homo sapiens
  CDR3 for alpha chain variable domain of TCR clone 223175 (TRAV1-2, TRAJ8)
CAVREDTSFQKLVF

SEQ ID NO: 446350 - protein, 15 aa, Homo sapiens
  CDR3 for beta chain variable domain of TCR clone 223175 (TRBV11-3, TRBJ2-3)
CASLKDGREGDTQYF

SEQ ID NO: 446351 - protein, 18 aa, Homo sapiens
  CDR3 for alpha chain variable domain of TCR clone 223176 (TRAV12-2, )
CADEDIQNPDPAVSQLRD

SEQ ID NO: 446352 - protein, 18 aa, Homo sapiens
  CDR3 for beta chain variable domain of TCR clone 223176 (TRBV11-2, TRBJ2-3)
CASSLGGASRGAPNTQYF

SEQ ID NO: 446353 - protein, 19 aa, Homo sapiens
  CDR3 for alpha chain variable domain of TCR clone 223177 (TRAV3, TRAJ6)
CAVRDRNPSRSGGSYIPTF

SEQ ID NO: 446354 - protein, 12 aa, Homo sapiens
  CDR3 for beta chain variable domain of TCR clone 223177 (TRBV11-2, TRBJ2-1)
CASSPGNNEQFF

SEQ ID NO: 446355 - protein, 17 aa, Homo sapiens
  CDR3 for alpha chain variable domain of TCR clone 223178 (TRAV1-1, TRAJ28)
CAVDPAYSGAGSYQPTF

SEQ ID NO: 446356 - protein, 14 aa, Homo sapiens
  CDR3 for beta chain variable domain of TCR clone 223178 (TRBV19, TRBJ2-1)
CASPTFVLSGEQFF

SEQ ID NO: 446357 - protein, 14 aa, Homo sapiens
  CDR3 for alpha chain variable domain of TCR clone 223179 (TRAV8-3, TRAJ39)
CAVGANNAGNMLTF

SEQ ID NO: 446358 - protein, 16 aa, Homo sapiens
  CDR3 for beta chain variable domain of TCR clone 223179 (TRBV6-1, TRBJ2-5)
CASSETMDRGAETQYF

SEQ ID NO: 446359 - protein, 13 aa, Homo sapiens
  CDR3 for alpha chain variable domain of TCR clone 223180 (TRAV20, TRAJ54)
CAVQAGGAQKLVF

SEQ ID NO: 446360 - protein, 14 aa, Homo sapiens
  CDR3 for beta chain variable domain of TCR clone 223180 (TRBV20-1, TRBJ2-7)
CSAKTGTGGYDQYF

SEQ ID NO: 446361 - protein, 11 aa, Homo sapiens
  CDR3 for alpha chain variable domain of TCR clone 223181 (TRAV1-1, TRAJ5)
SALLFRRALTF

SEQ ID NO: 446362 - protein, 15 aa, Homo sapiens
  CDR3 for beta chain variable domain of TCR clone 223181 (TRBV4-1, TRBJ1-4)
CASSDTGGTNEKLFF

SEQ ID NO: 446363 - protein, 16 aa, Homo sapiens
  CDR3 for alpha chain variable domain of TCR clone 223182 (TRAV14/DV4, TRAJ20)
CAMREGRSRDDYKLSL

SEQ ID NO: 446364 - protein, 17 aa, Homo sapiens
  CDR3 for beta chain variable domain of TCR clone 223182 (TRBV13, TRBJ2-3)
CASSLSRVAGGRNTQYF

SEQ ID NO: 446365 - protein, 14 aa, Homo sapiens
  CDR3 for alpha chain variable domain of TCR clone 223183 (TRAV9-2, TRAJ39)
CALYIYNACNMLTF

SEQ ID NO: 446366 - protein, 14 aa, Homo sapiens
  CDR3 for beta chain variable domain of TCR clone 223183 (TRBV7-9, TRBJ2-1)
CASSPRDSLYEQFF

SEQ ID NO: 446367 - protein, 12 aa, Homo sapiens
  CDR3 for alpha chain variable domain of TCR clone 223184 (TRAV8-3, TRAJ41)
CAVALSGYALNF

SEQ ID NO: 446368 - protein, 17 aa, Homo sapiens
  CDR3 for beta chain variable domain of TCR clone 223184 (TRBV20-1, TRBJ2-2)
CSASGSGQGGLTGELFF

SEQ ID NO: 446369 - protein, 12 aa, Homo sapiens
  CDR3 for alpha chain variable domain of TCR clone 223185 (TRAV8-3, TRAJ43)
CALGAGINDMRF

SEQ ID NO: 446370 - protein, 14 aa, Homo sapiens
  CDR3 for beta chain variable domain of TCR clone 223185 (TRBV4-2, TRBJ1-5)
CASSRDRGNQPQHF

SEQ ID NO: 446371 - protein, 15 aa, Homo sapiens
  CDR3 for alpha chain variable domain of TCR clone 223186 (TRAV26-1, TRAJ37)
CIVRVATGNTGKLIF

SEQ ID NO: 446372 - protein, 13 aa, Homo sapiens
  CDR3 for beta chain variable domain of TCR clone 223186 (TRBV20-1, TRBJ1-1)
CSARGGGNTEAFF

SEQ ID NO: 446373 - protein, 13 aa, Homo sapiens
  CDR3 for alpha chain variable domain of TCR clone 223187 (TRAV13-2, TRAJ40)
YAEFTSGTYKYIF

SEQ ID NO: 446374 - protein, 14 aa, Homo sapiens
  CDR3 for beta chain variable domain of TCR clone 223187 (TRBV10-2, TRBJ1-5)
CASSSTGRNQPQHF

SEQ ID NO: 446375 - protein, 13 aa, Homo sapiens
  CDR3 for alpha chain variable domain of TCR clone 223188 (TRAV16, TRAJ31)
CALSAHNNASIMF

SEQ ID NO: 446376 - protein, 17 aa, Homo sapiens
  CDR3 for beta chain variable domain of TCR clone 223188 (TRBV12-4, TRBJ2-1)
CASSPGLAGRRINEHFF

SEQ ID NO: 446377 - protein, 12 aa, Homo sapiens
  CDR3 for alpha chain variable domain of TCR clone 223189 (TRAV13-2, TRAJ42)
CAEGGSQGNLIF

SEQ ID NO: 446378 - protein, 15 aa, Homo sapiens
  CDR3 for beta chain variable domain of TCR clone 223189 (TRBV4-1, TRBJ2-7)
CASSQNTGRLYEQYF

SEQ ID NO: 446379 - protein, 16 aa, Homo sapiens
  CDR3 for alpha chain variable domain of TCR clone 223190 (TRAV14/DV4, TRAJ21)
CAMREGPENNFNKFYF

SEQ ID NO: 446380 - protein, 13 aa, Homo sapiens
  CDR3 for beta chain variable domain of TCR clone 223190 (TRBV7-9, TRBJ1-2)
CASSLKQNYGYTF

SEQ ID NO: 446381 - protein, 17 aa, Homo sapiens
  CDR3 for alpha chain variable domain of TCR clone 223191 (TRAV3, TRAJ6)
CAVRDGPRAGGSYIPTF

SEQ ID NO: 446382 - protein, 15 aa, Homo sapiens
  CDR3 for beta chain variable domain of TCR clone 223191 (TRBV18, TRBJ2-3)
CASSPLAGETDTQYF

SEQ ID NO: 446383 - protein, 12 aa, Homo sapiens
  CDR3 for alpha chain variable domain of TCR clone 223192 (TRAV13-1, TRAJ20)
CAASMGDYKLSF

SEQ ID NO: 446384 - protein, 15 aa, Homo sapiens
  CDR3 for beta chain variable domain of TCR clone 223192 (TRBV11-3, TRBJ2-3)
CASSGGLESTDTQYF

SEQ ID NO: 446385 - protein, 16 aa, Homo sapiens
  CDR3 for alpha chain variable domain of TCR clone 223193 (TRAV3, TRAJ37)
CAVRPHRSGNTGKLLF

SEQ ID NO: 446386 - protein, 16 aa, Homo sapiens
  CDR3 for beta chain variable domain of TCR clone 223193 (TRBV9, TRBJ1-2)
CASSVEEKVSPYGYTF

SEQ ID NO: 446387 - protein, 14 aa, Homo sapiens
  CDR3 for alpha chain variable domain of TCR clone 223194 (TRAV12-2, TRAJ13)
CAVKRTGGYQKVTF

SEQ ID NO: 446388 - protein, 13 aa, Homo sapiens
  CDR3 for beta chain variable domain of TCR clone 223194 (TRBV7-9, TRBJ1-2)
CASSLKQNYGYTF

SEQ ID NO: 446389 - protein, 14 aa, Homo sapiens
  CDR3 for alpha chain variable domain of TCR clone 223195 (TRAV1-2, TRAJ8)
CAVREDTGFQKLVL

SEQ ID NO: 446390 - protein, 12 aa, Homo sapiens
  CDR3 for beta chain variable domain of TCR clone 223195 (TRBV14, TRBJ2-7)
CASSRLKGEQYF

SEQ ID NO: 446391 - protein, 17 aa, Homo sapiens
  CDR3 for alpha chain variable domain of TCR clone 223196 (TRAV3, TRAJ6)
CAVRDGPRAGGGHIPTF

SEQ ID NO: 446392 - protein, 14 aa, Homo sapiens
  CDR3 for beta chain variable domain of TCR clone 223196 (TRBV7-2, TRBJ2-7)
CASSPKTSFYEQYF

SEQ ID NO: 446393 - protein, 14 aa, Homo sapiens
  CDR3 for alpha chain variable domain of TCR clone 223197 (TRAV8-4, TRAJ15)
CAVTIREAGTALIF

SEQ ID NO: 446394 - protein, 17 aa, Homo sapiens
  CDR3 for beta chain variable domain of TCR clone 223197 (TRBV11-2, TRBJ2-1)
CASSLYPPGVEYNEQFF

SEQ ID NO: 446395 - protein, 14 aa, Homo sapiens
  CDR3 for alpha chain variable domain of TCR clone 223198 (TRAV12-3, TRAJ10)
RHLPLTGGGNKLTF

SEQ ID NO: 446396 - protein, 14 aa, Homo sapiens
  CDR3 for beta chain variable domain of TCR clone 223198 (TRBV19, TRBJ2-1)
CASPTFVLSGEQFF

SEQ ID NO: 446397 - protein, 14 aa, Homo sapiens
  CDR3 for alpha chain variable domain of TCR clone 223199 (TRAV1-2, TRAJ8)
CAVREDTGFQKLVF

SEQ ID NO: 446398 - protein, 18 aa, Homo sapiens
  CDR3 for beta chain variable domain of TCR clone 223199 (TRBV20-1, TRBJ2-6)
CGAETTPTHGSGANVLAF

SEQ ID NO: 446399 - protein, 14 aa, Homo sapiens
  CDR3 for alpha chain variable domain of TCR clone 223200 (TRAV8-4, TRAJ40)
CAVIPASGTYKYIF

SEQ ID NO: 446400 - protein, 15 aa, Homo sapiens
  CDR3 for beta chain variable domain of TCR clone 223200 (TRBV7-2, TRBJ2-1)
CASTSASGDYNEQFF

SEQ ID NO: 446401 - protein, 14 aa, Homo sapiens
  CDR3 for alpha chain variable domain of TCR clone 223201 (TRAV8-3, TRAJ37)
CAAIISGNTGKLIF

SEQ ID NO: 446402 - protein, 13 aa, Homo sapiens
  CDR3 for beta chain variable domain of TCR clone 223201 (TRBV29-1, TRBJ1-2)
CSVEAAIGDGYTF

SEQ ID NO: 446403 - protein, 14 aa, Homo sapiens
  CDR3 for alpha chain variable domain of TCR clone 223202 (TRAV8-3, TRAJ4)
CAVGAAGGYNKRIF

SEQ ID NO: 446404 - protein, 15 aa, Homo sapiens
  CDR3 for beta chain variable domain of TCR clone 223202 (TRBV11-3, TRBJ2-3)
CASLKDGREGDTQYF

SEQ ID NO: 446405 - protein, 13 aa, Homo sapiens
  CDR3 for alpha chain variable domain of TCR clone 223203 (TRAV13-2, TRAJ48)
CEEMDFGNEKLTF

SEQ ID NO: 446406 - protein, 14 aa, Homo sapiens
  CDR3 for beta chain variable domain of TCR clone 223203 (TRBV7-6, TRBJ2-3)
CASSLGTVTDTQYF

SEQ ID NO: 446407 - protein, 16 aa, Homo sapiens
  CDR3 for alpha chain variable domain of TCR clone 223204 (TRAV3, TRAJ37)
CAVRGKGSGNTGKLIF

SEQ ID NO: 446408 - protein, 13 aa, Homo sapiens
  CDR3 for beta chain variable domain of TCR clone 223204 (TRBV7-2, TRBJ2-2)
CASSSVRAGELFS

SEQ ID NO: 446409 - protein, 16 aa, Homo sapiens
  CDR3 for alpha chain variable domain of TCR clone 223205 (TRAV3, TRAJ10)
CAVRDMNAGGGNKLTF

SEQ ID NO: 446410 - protein, 14 aa, Homo sapiens
  CDR3 for beta chain variable domain of TCR clone 223205 (TRBV7-2, TRBJ2-7)
CASSLYPGRYEQYF

SEQ ID NO: 446411 - protein, 11 aa, Homo sapiens
  CDR3 for alpha chain variable domain of TCR clone 223206 (TRAV13-2, TRAJ20)
CADSNDYKLSF

SEQ ID NO: 446412 - protein, 13 aa, Homo sapiens
  CDR3 for beta chain variable domain of TCR clone 223206 (TRBV10-2, TRBJ2-7)
CASGTSGGYEQYF

SEQ ID NO: 446413 - protein, 13 aa, Homo sapiens
  CDR3 for alpha chain variable domain of TCR clone 223207 (TRAV8-3, TRAJ48)
CAVVPFGNEKLTL

SEQ ID NO: 446414 - protein, 14 aa, Homo sapiens
  CDR3 for beta chain variable domain of TCR clone 223207 (TRBV18, TRBJ2-7)
CASSPRGGAYEKYF

SEQ ID NO: 446415 - protein, 14 aa, Homo sapiens
  CDR3 for alpha chain variable domain of TCR clone 223208 (TRAV8-1, TRAJ5)
CALRTDTGRRALTF

SEQ ID NO: 446416 - protein, 13 aa, Homo sapiens
  CDR3 for beta chain variable domain of TCR clone 223208 (TRBV3-1, TRBJ1-1)
CASRPGVITEAFF

SEQ ID NO: 446417 - protein, 14 aa, Homo sapiens
  CDR3 for alpha chain variable domain of TCR clone 223209 (TRAV1-2, TRAJ16)
CAVNRFSAGQKLLF

SEQ ID NO: 446418 - protein, 15 aa, Homo sapiens
  CDR3 for beta chain variable domain of TCR clone 223209 (TRBV12-4, TRBJ2-5)
CASSPPTGLQETQYF

SEQ ID NO: 446419 - protein, 13 aa, Homo sapiens
  CDR3 for alpha chain variable domain of TCR clone 223210 (TRAV12-1, TRAJ17)
CVVNKAAGNKLTF

SEQ ID NO: 446420 - protein, 12 aa, Homo sapiens
  CDR3 for beta chain variable domain of TCR clone 223210 (TRBV6-3, TRBJ2-7)
CASSLTPYERYF

SEQ ID NO: 446421 - protein, 12 aa, Homo sapiens
  CDR3 for alpha chain variable domain of TCR clone 223211 (TRAV16, TRAJ10)
CSRTGGGSKLTF

SEQ ID NO: 446422 - protein, 15 aa, Homo sapiens
  CDR3 for beta chain variable domain of TCR clone 223211 (TRBV6-3, TRBJ2-6)
CASNPGGSGANVLTF

SEQ ID NO: 446423 - protein, 14 aa, Homo sapiens
  CDR3 for alpha chain variable domain of TCR clone 223212 (TRAV12-3, TRAJ54)
CAMRGTQGAQKLVF

SEQ ID NO: 446424 - protein, 13 aa, Homo sapiens
  CDR3 for beta chain variable domain of TCR clone 223212 (TRBV19, TRBJ1-1)
CASSPSNGGEAFF

SEQ ID NO: 446425 - protein, 14 aa, Homo sapiens
  CDR3 for alpha chain variable domain of TCR clone 223213 (TRAV12-1, TRAJ17)
CVVNYKAAGNKLTF

SEQ ID NO: 446426 - protein, 17 aa, Homo sapiens
  CDR3 for beta chain variable domain of TCR clone 223213 (TRBV20-1, TRBJ2-1)
CGASSSGLAGSYNGQFF

SEQ ID NO: 446427 - protein, 13 aa, Homo sapiens
  CDR3 for alpha chain variable domain of TCR clone 223214 (TRAV17, TRAJ9)
CATASTGGFKTIF

SEQ ID NO: 446428 - protein, 13 aa, Homo sapiens
  CDR3 for beta chain variable domain of TCR clone 223214 (TRBV4-2, TRBJ1-1)
CASSQAGNTEAFF

SEQ ID NO: 446429 - protein, 15 aa, Homo sapiens
  CDR3 for alpha chain variable domain of TCR clone 223215 (TRAV8-1, TRAJ6)
CAVNTPPGGSYIPTF

SEQ ID NO: 446430 - protein, 15 aa, Homo sapiens
  CDR3 for beta chain variable domain of TCR clone 223215 (TRBV11-2, TRBJ2-2)
CASSSDRVYAGELFF

SEQ ID NO: 446431 - protein, 13 aa, Homo sapiens
  CDR3 for alpha chain variable domain of TCR clone 223216 (TRAV27, TRAJ53)
CAGQGVSNYKLTF

SEQ ID NO: 446432 - protein, 13 aa, Homo sapiens
  CDR3 for beta chain variable domain of TCR clone 223216 (TRBV29-1, TRBJ1-1)
CSVESGFGTEAFF

SEQ ID NO: 446433 - protein, 12 aa, Homo sapiens
  CDR3 for alpha chain variable domain of TCR clone 223217 (TRAV12-2, TRAJ10)
WGVTGGGNKLTF

SEQ ID NO: 446434 - protein, 18 aa, Homo sapiens
  CDR3 for beta chain variable domain of TCR clone 223217 (TRBV11-2, TRBJ2-3)
CARSLGGASRGAPNTQYF

SEQ ID NO: 446435 - protein, 11 aa, Homo sapiens
  CDR3 for alpha chain variable domain of TCR clone 223218 (TRAV1-2, TRAJ11)
CAVRGYSTLTF

SEQ ID NO: 446436 - protein, 15 aa, Homo sapiens
  CDR3 for beta chain variable domain of TCR clone 223218 (TRBV27, TRBJ2-7)
CASSPQREGQREQYF

SEQ ID NO: 446437 - protein, 12 aa, Homo sapiens
  CDR3 for alpha chain variable domain of TCR clone 223219 (TRAV12-3, TRAJ41)
CAMSYSGYALNF

SEQ ID NO: 446438 - protein, 17 aa, Homo sapiens
  CDR3 for beta chain variable domain of TCR clone 223219 (TRBV4-1, TRBJ2-5)
CASSQDLTGGPIETQYF

SEQ ID NO: 446439 - protein, 13 aa, Homo sapiens
  CDR3 for alpha chain variable domain of TCR clone 223220 (TRAV2, TRAJ40)
CALVTSGTYKYIF

SEQ ID NO: 446440 - protein, 14 aa, Homo sapiens
  CDR3 for beta chain variable domain of TCR clone 223220 (TRBV19, TRBJ2-1)
CASPTVVLSGEQFF

SEQ ID NO: 446441 - protein, 13 aa, Homo sapiens
  CDR3 for alpha chain variable domain of TCR clone 223221 (TRAV12-1, TRAJ9)
CVVLNTGGFKTIF

SEQ ID NO: 446442 - protein, 13 aa, Homo sapiens
  CDR3 for beta chain variable domain of TCR clone 223221 (TRBV20-1, TRBJ1-1)
CSARGGGNTEACF

SEQ ID NO: 446443 - protein, 16 aa, Homo sapiens
  CDR3 for alpha chain variable domain of TCR clone 223222 (TRAV8-3, TRAJ45)
CAVGIIFRRRCCRTQL

SEQ ID NO: 446444 - protein, 11 aa, Homo sapiens
  CDR3 for beta chain variable domain of TCR clone 223222 (TRBV20-1, TRBJ2-5)
CSADRAETQYF

SEQ ID NO: 446445 - protein, 13 aa, Homo sapiens
  CDR3 for alpha chain variable domain of TCR clone 223223 (TRAV2, TRAJ15)
CAVASQAGTALIF

SEQ ID NO: 446446 - protein, 16 aa, Homo sapiens
  CDR3 for beta chain variable domain of TCR clone 223223 (TRBV9, TRBJ2-2)
CASSAMGKGNTGELFF

SEQ ID NO: 446447 - protein, 11 aa, Homo sapiens
  CDR3 for alpha chain variable domain of TCR clone 223224 (TRAV22, TRAJ27)
CAGVNAGKSTF

SEQ ID NO: 446448 - protein, 15 aa, Homo sapiens
  CDR3 for beta chain variable domain of TCR clone 223224 (TRBV12-4, TRBJ2-5)
CASSPPTGLQETQYF

SEQ ID NO: 446449 - protein, 16 aa, Homo sapiens
  CDR3 for alpha chain variable domain of TCR clone 223225 (TRAV3, TRAJ21)
CAVRDIERGNFNKFYF

SEQ ID NO: 446450 - protein, 13 aa, Homo sapiens
  CDR3 for beta chain variable domain of TCR clone 223225 (TRBV27, TRBJ2-7)
CARSLTTGYEQYF

SEQ ID NO: 446451 - protein, 16 aa, Homo sapiens
  CDR3 for alpha chain variable domain of TCR clone 223226 (TRAV17, TRAJ22)
FATGPISSGSARQLTF

SEQ ID NO: 446452 - protein, 13 aa, Homo sapiens
  CDR3 for beta chain variable domain of TCR clone 223226 (TRBV11-2, TRBJ2-1)
CASSLGLAGGRFF

SEQ ID NO: 446453 - protein, 12 aa, Homo sapiens
  CDR3 for alpha chain variable domain of TCR clone 223227 (TRAV14/DV4, TRAJ50)
RAMREGNSKVIF

SEQ ID NO: 446454 - protein, 16 aa, Homo sapiens
  CDR3 for beta chain variable domain of TCR clone 223227 (TRBV28, TRBJ2-3)
CASSLSGQTSTDTQYF

SEQ ID NO: 446455 - protein, 11 aa, Homo sapiens
  CDR3 for alpha chain variable domain of TCR clone 223228 (TRAV12-3, TRAJ43)
CAMSVSNDLRF

SEQ ID NO: 446456 - protein, 14 aa, Homo sapiens
  CDR3 for beta chain variable domain of TCR clone 223228 (TRBV20-1, TRBJ1-1)
SAVLHLGGGTEAFF

SEQ ID NO: 446457 - protein, 14 aa, Homo sapiens
  CDR3 for alpha chain variable domain of TCR clone 223229 (TRAV12-3, TRAJ10)
SHLPLTGGGNKLTF

SEQ ID NO: 446458 - protein, 15 aa, Homo sapiens
  CDR3 for beta chain variable domain of TCR clone 223229 (TRBV2, TRBJ2-2)
CASSRETVGTGELFF

SEQ ID NO: 446459 - protein, 17 aa, Homo sapiens
  CDR3 for alpha chain variable domain of TCR clone 223230 (TRAV8-1, TRAJ43)
CAVTNDRRFGAGTRLTV

SEQ ID NO: 446460 - protein, 17 aa, Homo sapiens
  CDR3 for beta chain variable domain of TCR clone 223230 (TRBV5-4, TRBJ2-1)
CASSSACGRGPYNEQFF

SEQ ID NO: 446461 - protein, 14 aa, Homo sapiens
  CDR3 for alpha chain variable domain of TCR clone 223231 (TRAV3, TRAJ37)
CCENPSGNTGKLIF

SEQ ID NO: 446462 - protein, 16 aa, Homo sapiens
  CDR3 for beta chain variable domain of TCR clone 223231 (TRBV7-9, TRBJ1-2)
CASSLGFSSGEDGYTF

SEQ ID NO: 446463 - protein, 15 aa, Homo sapiens
  CDR3 for alpha chain variable domain of TCR clone 223232 (TRAV13-1, TRAJ18)
CAASGGGSTLGRLYF

SEQ ID NO: 446464 - protein, 16 aa, Homo sapiens
  CDR3 for beta chain variable domain of TCR clone 223232 (TRBV12-5, TRBJ2-5)
CASGPRTSGNQETQYF

SEQ ID NO: 446465 - protein, 13 aa, Homo sapiens
  CDR3 for alpha chain variable domain of TCR clone 223233 (TRAV12-3, TRAJ13)
CAMGTGGYQKVTF

SEQ ID NO: 446466 - protein, 14 aa, Homo sapiens
  CDR3 for beta chain variable domain of TCR clone 223233 (TRBV7-2, TRBJ2-5)
CASSTGGELKTKYF

SEQ ID NO: 446467 - protein, 16 aa, Homo sapiens
  CDR3 for alpha chain variable domain of TCR clone 223234 (TRAV26-1, TRAJ36)
CIVRVSYQTGANNPFF

SEQ ID NO: 446468 - protein, 13 aa, Homo sapiens
  CDR3 for beta chain variable domain of TCR clone 223234 (TRBV5-5, TRBJ1-5)
RASSLGIGGDQHF

SEQ ID NO: 446469 - protein, 15 aa, Homo sapiens
  CDR3 for alpha chain variable domain of TCR clone 223235 (TRAV30, TRAJ57)
CGTAIPQGGSEKLVF

SEQ ID NO: 446470 - protein, 19 aa, Homo sapiens
  CDR3 for beta chain variable domain of TCR clone 223235 (TRBV7-9, TRBJ2-6)
CASSLESATVLPGANVLTF

SEQ ID NO: 446471 - protein, 15 aa, Homo sapiens
  CDR3 for alpha chain variable domain of TCR clone 223236 (TRAV13-2, TRAJ5)
CAENPHLTGRRALTF

SEQ ID NO: 446472 - protein, 16 aa, Homo sapiens
  CDR3 for beta chain variable domain of TCR clone 223236 (TRBV7-9, TRBJ1-3)
CASSQTSGLRLGTIYF

SEQ ID NO: 446473 - protein, 18 aa, Homo sapiens
  CDR3 for alpha chain variable domain of TCR clone 223237 (TRAV13-1, TRAJ31)
CAAIVTMPDSCLAMELSW

SEQ ID NO: 446474 - protein, 11 aa, Homo sapiens
  CDR3 for beta chain variable domain of TCR clone 223237 (TRBV20-1, TRBJ2-7)
CSARTSYEQYF

SEQ ID NO: 446475 - protein, 14 aa, Homo sapiens
  CDR3 for alpha chain variable domain of TCR clone 223238 (TRAV17, TRAJ56)
CATEDTGANRKLTF

SEQ ID NO: 446476 - protein, 16 aa, Homo sapiens
  CDR3 for beta chain variable domain of TCR clone 223238 (TRBV19, TRBJ2-1)
CASSIKLAGSYNEQFF

SEQ ID NO: 446477 - protein, 11 aa, Homo sapiens
  CDR3 for alpha chain variable domain of TCR clone 223239 (TRAV12-1, TRAJ43)
CVEYDNNDMRF

SEQ ID NO: 446478 - protein, 14 aa, Homo sapiens
  CDR3 for beta chain variable domain of TCR clone 223239 (TRBV18, TRBJ2-5)
CSSPRASEAETQYF

SEQ ID NO: 446479 - protein, 19 aa, Homo sapiens
  CDR3 for alpha chain variable domain of TCR clone 223240 (TRAV26-1, TRAJ52)
CIVRAHRNAGGTSYGKLTF

SEQ ID NO: 446480 - protein, 14 aa, Homo sapiens
  CDR3 for beta chain variable domain of TCR clone 223240 (TRBV4-1, TRBJ2-2)
CASSQAVNTGELFC

SEQ ID NO: 446481 - protein, 14 aa, Homo sapiens
  CDR3 for alpha chain variable domain of TCR clone 223241 (TRAV17, TRAJ6)
CATDERRGSYIPTF

SEQ ID NO: 446482 - protein, 13 aa, Homo sapiens
  CDR3 for beta chain variable domain of TCR clone 223241 (TRBV27, TRBJ2-1)
CASSVGRIWEQFF

SEQ ID NO: 446483 - protein, 11 aa, Homo sapiens
  CDR3 for alpha chain variable domain of TCR clone 223242 (TRAV12-1, TRAJ21)
CVVNNFNKFYF

SEQ ID NO: 446484 - protein, 14 aa, Homo sapiens
  CDR3 for beta chain variable domain of TCR clone 223242 (TRBV19, TRBJ2-7)
CASNFRDTFTGMYF

SEQ ID NO: 446485 - protein, 14 aa, Homo sapiens
  CDR3 for alpha chain variable domain of TCR clone 223243 (TRAV4, TRAJ39)
CLVGPHNNAGNMLT

SEQ ID NO: 446486 - protein, 16 aa, Homo sapiens
  CDR3 for beta chain variable domain of TCR clone 223243 (TRBV27, TRBJ2-2)
CASSFRGLVRTGELFF

SEQ ID NO: 446487 - protein, 14 aa, Homo sapiens
  CDR3 for alpha chain variable domain of TCR clone 223244 (TRAV38-1, TRAJ40)
CAVRPTSGTYKYIF

SEQ ID NO: 446488 - protein, 14 aa, Homo sapiens
  CDR3 for beta chain variable domain of TCR clone 223244 (TRBV5-4, TRBJ1-1)
CASSLDSRRDEAFF

SEQ ID NO: 446489 - protein, 14 aa, Homo sapiens
  CDR3 for alpha chain variable domain of TCR clone 223245 (TRAV13-2, TRAJ43)
CAEIPTYNNNDMRF

SEQ ID NO: 446490 - protein, 15 aa, Homo sapiens
  CDR3 for beta chain variable domain of TCR clone 223245 (TRBV11-3, TRBJ2-3)
CASLKDGREGDTQYF

SEQ ID NO: 446491 - protein, 12 aa, Homo sapiens
  CDR3 for alpha chain variable domain of TCR clone 223246 (TRAV17, TRAJ15)
CATGGTGTALIF

SEQ ID NO: 446492 - protein, 17 aa, Homo sapiens
  CDR3 for beta chain variable domain of TCR clone 223246 (TRBV4-2, TRBJ2-2)
CASSQDQGGGAVGELFF

SEQ ID NO: 446493 - protein, 16 aa, Homo sapiens
  CDR3 for alpha chain variable domain of TCR clone 223247 (TRAV36/DV7, TRAJ28)
CAGTLYSGAGSYQLTF

SEQ ID NO: 446494 - protein, 15 aa, Homo sapiens
  CDR3 for beta chain variable domain of TCR clone 223247 (TRBV2, TRBJ2-1)
CASSELAGSYNKQFF

SEQ ID NO: 446495 - protein, 15 aa, Homo sapiens
  CDR3 for alpha chain variable domain of TCR clone 223248 (TRAV3, TRAJ22)
CAVRDRGGPARELTF

SEQ ID NO: 446496 - protein, 15 aa, Homo sapiens
  CDR3 for beta chain variable domain of TCR clone 223248 (TRBV19, TRBJ2-5)
CASSIVRASQETQYF

SEQ ID NO: 446497 - protein, 16 aa, Homo sapiens
  CDR3 for alpha chain variable domain of TCR clone 223249 (TRAV14/DV4, TRAJ15)
CAVREGPAQAGTALIF

SEQ ID NO: 446498 - protein, 12 aa, Homo sapiens
  CDR3 for beta chain variable domain of TCR clone 223249 (TRBV28, TRBJ2-6)
CAIQAGANVLTF

SEQ ID NO: 446499 - protein, 22 aa, Homo sapiens
  CDR3 for alpha chain variable domain of TCR clone 223250 (TRAV8-3, TRAJ8)
CAVGPNEHRLSETCIWNWHPTS

SEQ ID NO: 446500 - protein, 14 aa, Homo sapiens
  CDR3 for beta chain variable domain of TCR clone 223250 (TRBV19, TRBJ2-1)
CVSPTFVLSGEQFF

SEQ ID NO: 446501 - protein, 12 aa, Homo sapiens
  CDR3 for alpha chain variable domain of TCR clone 223251 (TRAV17, TRAJ45)
CAAGGGADGLTF

SEQ ID NO: 446502 - protein, 14 aa, Homo sapiens
  CDR3 for beta chain variable domain of TCR clone 223251 (TRBV20-1, TRBJ1-1)
CSSQTRIGGTEAFF

SEQ ID NO: 446503 - protein, 12 aa, Homo sapiens
  CDR3 for alpha chain variable domain of TCR clone 223252 (TRAV13-1, TRAJ48)
CAANFGNEKLTC

SEQ ID NO: 446504 - protein, 12 aa, Homo sapiens
  CDR3 for beta chain variable domain of TCR clone 223252 (TRBV7-8, TRBJ2-7)
CASSLGDREQYF

SEQ ID NO: 446505 - protein, 13 aa, Homo sapiens
  CDR3 for alpha chain variable domain of TCR clone 223253 (TRAV38-2/DV8, TRAJ34)
CSYRNYNTDKPIF

SEQ ID NO: 446506 - protein, 15 aa, Homo sapiens
  CDR3 for beta chain variable domain of TCR clone 223253 (TRBV20-1, TRBJ2-5)
CSAEGTGGLQETQYF

SEQ ID NO: 446507 - protein, 10 aa, Homo sapiens
  CDR3 for alpha chain variable domain of TCR clone 223254 (TRAV1-2, TRAJ31)
CAFFGARLMF

SEQ ID NO: 446508 - protein, 13 aa, Homo sapiens
  CDR3 for beta chain variable domain of TCR clone 223254 (TRBV20-1, TRBJ2-2)
CSASAAGTGELFF

SEQ ID NO: 446509 - protein, 15 aa, Homo sapiens
  CDR3 for alpha chain variable domain of TCR clone 223255 (TRAV13-1, TRAJ9)
CAVEDRGTGGFKIIF

SEQ ID NO: 446510 - protein, 16 aa, Homo sapiens
  CDR3 for beta chain variable domain of TCR clone 223255 (TRBV24-1, TRBJ2-3)
CATSDPGTGATDTQYF

SEQ ID NO: 446511 - protein, 13 aa, Homo sapiens
  CDR3 for alpha chain variable domain of TCR clone 223256 (TRAV2, TRAJ13)
CAVESGGYQKVTF

SEQ ID NO: 446512 - protein, 17 aa, Homo sapiens
  CDR3 for beta chain variable domain of TCR clone 223256 (TRBV11-2, TRBJ2-1)
CASSLYPPGVEYNEQFF

SEQ ID NO: 446513 - protein, 16 aa, Homo sapiens
  CDR3 for alpha chain variable domain of TCR clone 223257 (TRAV1-1, TRAJ29)
CAVRSTRNSGNTPLVF

SEQ ID NO: 446514 - protein, 17 aa, Homo sapiens
  CDR3 for beta chain variable domain of TCR clone 223257 (TRBV7-3, TRBJ2-3)
CASSLMKRMRGADTQYF

SEQ ID NO: 446515 - protein, 15 aa, Homo sapiens
  CDR3 for alpha chain variable domain of TCR clone 223258 (TRAV21, TRAJ40)
CAVRPQTSGTYKYIF

SEQ ID NO: 446516 - protein, 19 aa, Homo sapiens
  CDR3 for beta chain variable domain of TCR clone 223258 (TRBV19, TRBJ2-5)
CASSIGQVTDFFLGETQYF

SEQ ID NO: 446517 - protein, 11 aa, Homo sapiens
  CDR3 for alpha chain variable domain of TCR clone 223259 (TRAV13-1, TRAJ6)
CATLGSYIPTF

SEQ ID NO: 446518 - protein, 11 aa, Homo sapiens
  CDR3 for beta chain variable domain of TCR clone 223259 (TRBV11-2, TRBJ2-1)
CQQPPNNEQFF

SEQ ID NO: 446519 - protein, 15 aa, Homo sapiens
  CDR3 for alpha chain variable domain of TCR clone 223260 (TRAV2, TRAJ24)
CAVVRLKNSWGKLQI

SEQ ID NO: 446520 - protein, 16 aa, Homo sapiens
  CDR3 for beta chain variable domain of TCR clone 223260 (TRBV7-7, TRBJ2-3)
CASSPGTSGSTDTQYF

SEQ ID NO: 446521 - protein, 20 aa, Homo sapiens
  CDR3 for alpha chain variable domain of TCR clone 223261 (TRAV30, TRAJ32)
RNLLLRRREGYGGATNNLIF

SEQ ID NO: 446522 - protein, 13 aa, Homo sapiens
  CDR3 for beta chain variable domain of TCR clone 223261 (TRBV10-3, TRBJ2-7)
CASKLAVNYEQYF

SEQ ID NO: 446523 - protein, 18 aa, Homo sapiens
  CDR3 for alpha chain variable domain of TCR clone 223262 (TRAV29/DV5, TRAJ52)
CAAGFRGAGGTSYGKLTF

SEQ ID NO: 446524 - protein, 16 aa, Homo sapiens
  CDR3 for beta chain variable domain of TCR clone 223262 (TRBV7-3, TRBJ2-2)
FASSLKRGTLSGELFF

SEQ ID NO: 446525 - protein, 17 aa, Homo sapiens
  CDR3 for alpha chain variable domain of TCR clone 223263 (TRAV35, TRAJ38)
CAGQLQRNAGNNRKLIW

SEQ ID NO: 446526 - protein, 12 aa, Homo sapiens
  CDR3 for beta chain variable domain of TCR clone 223263 (TRBV11-2, TRBJ2-2)
CASSLGGGELFF

SEQ ID NO: 446527 - protein, 14 aa, Homo sapiens
  CDR3 for alpha chain variable domain of TCR clone 223264 (TRAV20, TRAJ16)
CAVRFFSDGQKLPF

SEQ ID NO: 446528 - protein, 16 aa, Homo sapiens
  CDR3 for beta chain variable domain of TCR clone 223264 (TRBV5-1, TRBJ2-3)
CASSSIGAGSTDTQYF

SEQ ID NO: 446529 - protein, 19 aa, Homo sapiens
  CDR3 for alpha chain variable domain of TCR clone 223265 (TRAV35, TRAJ30)
CAPGGMTRSSLEKGHDFIF

SEQ ID NO: 446530 - protein, 15 aa, Homo sapiens
  CDR3 for beta chain variable domain of TCR clone 223265 (TRBV9, TRBJ1-6)
CASSVAGTGDSPLLF

SEQ ID NO: 446531 - protein, 13 aa, Homo sapiens
  CDR3 for alpha chain variable domain of TCR clone 223266 (TRAV2, TRAJ40)
CAMVTSGTYKYIF

SEQ ID NO: 446532 - protein, 14 aa, Homo sapiens
  CDR3 for beta chain variable domain of TCR clone 223266 (TRBV19, TRBJ2-1)
CASPTFVLSGEQFS

SEQ ID NO: 446533 - protein, 14 aa, Homo sapiens
  CDR3 for alpha chain variable domain of TCR clone 223267 (TRAV20, TRAJ22)
CAVQVSGSARQLTF

SEQ ID NO: 446534 - protein, 13 aa, Homo sapiens
  CDR3 for beta chain variable domain of TCR clone 223267 (TRBV20-1, TRBJ2-5)
CSAREGGKETQYL

SEQ ID NO: 446535 - protein, 12 aa, Homo sapiens
  CDR3 for alpha chain variable domain of TCR clone 223268 (TRAV12-3, TRAJ17)
CAMTLTGNRLTF

SEQ ID NO: 446536 - protein, 14 aa, Homo sapiens
  CDR3 for beta chain variable domain of TCR clone 223268 (TRBV7-9, TRBJ1-6)
CASSVMTDYSPLHF

SEQ ID NO: 446537 - protein, 16 aa, Homo sapiens
  CDR3 for alpha chain variable domain of TCR clone 223269 (TRAV12-2, TRAJ36)
CGTNNLFFGTGTRLTV

SEQ ID NO: 446538 - protein, 14 aa, Homo sapiens
  CDR3 for beta chain variable domain of TCR clone 223269 (TRBV7-2, TRBJ2-1)
CDSSLSRVDNEQLF

SEQ ID NO: 446539 - protein, 12 aa, Homo sapiens
  CDR3 for alpha chain variable domain of TCR clone 223270 (TRAV13-2, TRAJ8)
CAPWLSFQKLVF

SEQ ID NO: 446540 - protein, 14 aa, Homo sapiens
  CDR3 for beta chain variable domain of TCR clone 223270 (TRBV6-1, TRBJ1-3)
CASVQGGGGNTIYF

SEQ ID NO: 446541 - protein, 14 aa, Homo sapiens
  CDR3 for alpha chain variable domain of TCR clone 223271 (TRAV36/DV7, TRAJ40)
CAVETTSGTYKYIF

SEQ ID NO: 446542 - protein, 13 aa, Homo sapiens
  CDR3 for beta chain variable domain of TCR clone 223271 (TRBV11-3, TRBJ2-5)
CASSSTGEETQYF

SEQ ID NO: 446543 - protein, 10 aa, Homo sapiens
  CDR3 for alpha chain variable domain of TCR clone 223272 (TRAV13-1, TRAJ30)
CAARDDKIIF

SEQ ID NO: 446544 - protein, 15 aa, Homo sapiens
  CDR3 for beta chain variable domain of TCR clone 223272 (TRBV19, TRBJ2-4)
CASRGPRRGENIQYF

SEQ ID NO: 446545 - protein, 14 aa, Homo sapiens
  CDR3 for alpha chain variable domain of TCR clone 223273 (TRAV25, TRAJ44)
CAVFPTGTTSKLTF

SEQ ID NO: 446546 - protein, 13 aa, Homo sapiens
  CDR3 for beta chain variable domain of TCR clone 223273 (TRBV7-9, TRBJ2-3)
CASSPGSTDTQYF

SEQ ID NO: 446547 - protein, 15 aa, Homo sapiens
  CDR3 for alpha chain variable domain of TCR clone 223274 (TRAV8-4, TRAJ37)
CAVSTRSGNTGKRIV

SEQ ID NO: 446548 - protein, 20 aa, Homo sapiens
  CDR3 for beta chain variable domain of TCR clone 223274 (TRBV7-8, TRBJ2-2)
CASSHLFPGPTIHITGELFF

SEQ ID NO: 446549 - protein, 12 aa, Homo sapiens
  CDR3 for alpha chain variable domain of TCR clone 223275 (TRAV26-1, TRAJ36)
CIVRVRADNLFF

SEQ ID NO: 446550 - protein, 15 aa, Homo sapiens
  CDR3 for beta chain variable domain of TCR clone 223275 (TRBV20-1, TRBJ2-7)
CSARDRVSGMDEQYF

SEQ ID NO: 446551 - protein, 14 aa, Homo sapiens
  CDR3 for alpha chain variable domain of TCR clone 223276 (TRAV29/DV5, TRAJ20)
CAASAPIEDYKLSF

SEQ ID NO: 446552 - protein, 15 aa, Homo sapiens
  CDR3 for beta chain variable domain of TCR clone 223276 (TRBV6-1, TRBJ2-1)
RASSEAAYSYNEQFF

SEQ ID NO: 446553 - protein, 13 aa, Homo sapiens
  CDR3 for alpha chain variable domain of TCR clone 223277 (TRAV12-3, TRAJ47)
FAMKKEYGNKLVF

SEQ ID NO: 446554 - protein, 16 aa, Homo sapiens
  CDR3 for beta chain variable domain of TCR clone 223277 (TRBV3-1, TRBJ2-6)
CASSLTWVSGANVLTF

SEQ ID NO: 446555 - protein, 11 aa, Homo sapiens
  CDR3 for alpha chain variable domain of TCR clone 223278 (TRAV3, TRAJ21)
CAVGNFNKFYF

SEQ ID NO: 446556 - protein, 16 aa, Homo sapiens
  CDR3 for beta chain variable domain of TCR clone 223278 (TRBV12-4, TRBJ2-7)
CASSPEGQGSSYEQYF

SEQ ID NO: 446557 - protein, 18 aa, Homo sapiens
  CDR3 for alpha chain variable domain of TCR clone 223279 (TRAV29/DV5, TRAJ52)
CAAGFRGAGGTSYGKLTF

SEQ ID NO: 446558 - protein, 14 aa, Homo sapiens
  CDR3 for beta chain variable domain of TCR clone 223279 (TRBV7-6, TRBJ2-3)
CASSVAGGTDTQYF

SEQ ID NO: 446559 - protein, 11 aa, Homo sapiens
  CDR3 for alpha chain variable domain of TCR clone 223280 (TRAV2, TRAJ13)
CASGGYQKVTF

SEQ ID NO: 446560 - protein, 18 aa, Homo sapiens
  CDR3 for beta chain variable domain of TCR clone 223280 (TRBV11-2, TRBJ2-3)
CASSSGGASRGAPNTQYF

SEQ ID NO: 446561 - protein, 15 aa, Homo sapiens
  CDR3 for alpha chain variable domain of TCR clone 223281 (TRAV21, TRAJ24)
CAARSSTDSWGRLQF

SEQ ID NO: 446562 - protein, 11 aa, Homo sapiens
  CDR3 for beta chain variable domain of TCR clone 223281 (TRBV11-2, TRBJ2-2)
CASSLPGELFF

SEQ ID NO: 446563 - protein, 12 aa, Homo sapiens
  CDR3 for alpha chain variable domain of TCR clone 223282 (TRAV30, TRAJ43)
CGTEERGNDMRF

SEQ ID NO: 446564 - protein, 19 aa, Homo sapiens
  CDR3 for beta chain variable domain of TCR clone 223282 (TRBV7-2, TRBJ2-3)
CASSFLSRNWGGGTDTQYF

SEQ ID NO: 446565 - protein, 11 aa, Homo sapiens
  CDR3 for alpha chain variable domain of TCR clone 223283 (TRAV35, TRAJ34)
CWARNTDKLIF

SEQ ID NO: 446566 - protein, 13 aa, Homo sapiens
  CDR3 for beta chain variable domain of TCR clone 223283 (TRBV20-1, TRBJ1-1)
CSAPLGGGTEAFF

SEQ ID NO: 446567 - protein, 14 aa, Homo sapiens
  CDR3 for alpha chain variable domain of TCR clone 223284 (TRAV26-1, TRAJ49)
CIVRLTNTGNQFYF

SEQ ID NO: 446568 - protein, 13 aa, Homo sapiens
  CDR3 for beta chain variable domain of TCR clone 223284 (TRBV4-1, TRBJ2-7)
CASSQGQAYEQNF

SEQ ID NO: 446569 - protein, 14 aa, Homo sapiens
  CDR3 for alpha chain variable domain of TCR clone 223285 (TRAV16, TRAJ39)
CALRKNNAGNMLTF

SEQ ID NO: 446570 - protein, 17 aa, Homo sapiens
  CDR3 for beta chain variable domain of TCR clone 223285 (TRBV23-1, TRBJ1-2)
CASSNTGGGLLWLHLRF

SEQ ID NO: 446571 - protein, 13 aa, Homo sapiens
  CDR3 for alpha chain variable domain of TCR clone 223286 (TRAV12-1, TRAJ40)
CVLPTSGTYKYIF

SEQ ID NO: 446572 - protein, 16 aa, Homo sapiens
  CDR3 for beta chain variable domain of TCR clone 223286 (TRBV7-9, TRBJ1-2)
CASSSGFSSGEDGYTF

SEQ ID NO: 446573 - protein, 14 aa, Homo sapiens
  CDR3 for alpha chain variable domain of TCR clone 223287 (TRAV4, TRAJ26)
CLVGPHNYGQNFVF

SEQ ID NO: 446574 - protein, 12 aa, Homo sapiens
  CDR3 for beta chain variable domain of TCR clone 223287 (TRBV28, TRBJ2-3)
CASSLYRDTQYF

SEQ ID NO: 446575 - protein, 15 aa, Homo sapiens
  CDR3 for alpha chain variable domain of TCR clone 223288 (TRAV3, TRAJ22)
CAVRDRGGSARQLTF

SEQ ID NO: 446576 - protein, 15 aa, Homo sapiens
  CDR3 for beta chain variable domain of TCR clone 223288 (TRBV11-2, TRBJ1-1)
CASSSGSSLLLSLDK

SEQ ID NO: 446577 - protein, 15 aa, Homo sapiens
  CDR3 for alpha chain variable domain of TCR clone 223289 (TRAV21, TRAJ52)
CAVRGGGTSYGKLTF

SEQ ID NO: 446578 - protein, 15 aa, Homo sapiens
  CDR3 for beta chain variable domain of TCR clone 223289 (TRBV28, TRBJ2-7)
CASSLISGGSYEQYF

SEQ ID NO: 446579 - protein, 18 aa, Homo sapiens
  CDR3 for alpha chain variable domain of TCR clone 223290 (TRAV21, TRAJ52)
CAVRPSPAGGTSYGQLTF

SEQ ID NO: 446580 - protein, 13 aa, Homo sapiens
  CDR3 for beta chain variable domain of TCR clone 223290 (TRBV2, TRBJ1-5)
CATAGPGNQPQHF

SEQ ID NO: 446581 - protein, 14 aa, Homo sapiens
  CDR3 for alpha chain variable domain of TCR clone 223291 (TRAV12-2, TRAJ13)
CAVKKTGGYQKVTF

SEQ ID NO: 446582 - protein, 14 aa, Homo sapiens
  CDR3 for beta chain variable domain of TCR clone 223291 (TRBV7-9, TRBJ2-1)
CASSDNSGYNGQFF

SEQ ID NO: 446583 - protein, 10 aa, Homo sapiens
  CDR3 for alpha chain variable domain of TCR clone 223292 (TRAV23/DV6, TRAJ57)
CAASSTLSQG

SEQ ID NO: 446584 - protein, 14 aa, Homo sapiens
  CDR3 for beta chain variable domain of TCR clone 223292 (TRBV7-9, TRBJ2-5)
CASSSPPGTETQYF

SEQ ID NO: 446585 - protein, 10 aa, Homo sapiens
  CDR3 for alpha chain variable domain of TCR clone 223293 (TRAV30, TRAJ48)
CGIGNEKLTF

SEQ ID NO: 446586 - protein, 14 aa, Homo sapiens
  CDR3 for beta chain variable domain of TCR clone 223293 (TRBV7-6, TRBJ2-3)
CTSSVSGGTDTQYF

SEQ ID NO: 446587 - protein, 12 aa, Homo sapiens
  CDR3 for alpha chain variable domain of TCR clone 223294 (TRAV12-3, TRAJ40)
CAVSSGTYKDIF

SEQ ID NO: 446588 - protein, 15 aa, Homo sapiens
  CDR3 for beta chain variable domain of TCR clone 223294 (TRBV7-9, TRBJ2-7)
CASSPGGGLTYEQYF

SEQ ID NO: 446589 - protein, 13 aa, Homo sapiens
  CDR3 for alpha chain variable domain of TCR clone 223295 (TRAV13-1, TRAJ5)
CAASDTGRRALTF

SEQ ID NO: 446590 - protein, 15 aa, Homo sapiens
  CDR3 for beta chain variable domain of TCR clone 223295 (TRBV28, TRBJ2-7)
CASSPGGRGFYEQYF

SEQ ID NO: 446591 - protein, 14 aa, Homo sapiens
  CDR3 for alpha chain variable domain of TCR clone 223296 (TRAV23/DV6, TRAJ8)
CAASKNTGFQKLVF

SEQ ID NO: 446592 - protein, 16 aa, Homo sapiens
  CDR3 for beta chain variable domain of TCR clone 223296 (TRBV4-1, TRBJ2-6)
CASSQAGDPGANVLTF

SEQ ID NO: 446593 - protein, 14 aa, Homo sapiens
  CDR3 for alpha chain variable domain of TCR clone 223297 (TRAV12-3, TRAJ42)
CAMNYGGSQGKLIF

SEQ ID NO: 446594 - protein, 15 aa, Homo sapiens
  CDR3 for beta chain variable domain of TCR clone 223297 (TRBV5-7, TRBJ1-5)
CASSYGKLWDQPQHF

SEQ ID NO: 446595 - protein, 13 aa, Homo sapiens
  CDR3 for alpha chain variable domain of TCR clone 223298 (TRAV1-2, TRAJ36)
CTVDQTGANNLFF

SEQ ID NO: 446596 - protein, 14 aa, Homo sapiens
  CDR3 for beta chain variable domain of TCR clone 223298 (TRBV20-1, TRBJ2-5)
CSAREMPKQETQYF

SEQ ID NO: 446597 - protein, 12 aa, Homo sapiens
  CDR3 for alpha chain variable domain of TCR clone 223299 (TRAV12-3, TRAJ17)
CAMTLTGNKLTF

SEQ ID NO: 446598 - protein, 14 aa, Homo sapiens
  CDR3 for beta chain variable domain of TCR clone 223299 (TRBV4-1, TRBJ2-7)
CASNQDREHVEQYF

SEQ ID NO: 446599 - protein, 14 aa, Homo sapiens
  CDR3 for alpha chain variable domain of TCR clone 223300 (TRAV16, TRAJ16)
CALSVLSDGQKLLF

SEQ ID NO: 446600 - protein, 12 aa, Homo sapiens
  CDR3 for beta chain variable domain of TCR clone 223300 (TRBV2, TRBJ2-1)
CAKREGYNEQFF

SEQ ID NO: 446601 - protein, 13 aa, Homo sapiens
  CDR3 for alpha chain variable domain of TCR clone 223301 (TRAV20, TRAJ31)
CAVQAWNNARLMF

SEQ ID NO: 446602 - protein, 14 aa, Homo sapiens
  CDR3 for beta chain variable domain of TCR clone 223301 (TRBV7-2, TRBJ2-7)
CASSPKTSFYEQYF

SEQ ID NO: 446603 - protein, 17 aa, Homo sapiens
  CDR3 for alpha chain variable domain of TCR clone 223302 (TRAV3, TRAJ6)
CAVRDGPRAGGSYIPTF

SEQ ID NO: 446604 - protein, 14 aa, Homo sapiens
  CDR3 for beta chain variable domain of TCR clone 223302 (TRBV7-2, TRBJ2-7)
CASSSKSSFYEQYF

SEQ ID NO: 446605 - protein, 13 aa, Homo sapiens
  CDR3 for alpha chain variable domain of TCR clone 223303 (TRAV36/DV7, TRAJ54)
CAVCTQGAQKLVF

SEQ ID NO: 446606 - protein, 13 aa, Homo sapiens
  CDR3 for beta chain variable domain of TCR clone 223303 (TRBV27, TRBJ1-1)
CASSLSIGAEAFF

SEQ ID NO: 446607 - protein, 12 aa, Homo sapiens
  CDR3 for alpha chain variable domain of TCR clone 223304 (TRAV27, TRAJ41)
CAEGDSGYALNF

SEQ ID NO: 446608 - protein, 15 aa, Homo sapiens
  CDR3 for beta chain variable domain of TCR clone 223304 (TRBV20-1, TRBJ2-7)
CSARDRVSGMDEQYF

SEQ ID NO: 446609 - protein, 13 aa, Homo sapiens
  CDR3 for alpha chain variable domain of TCR clone 223305 (TRAV12-1, TRAJ21)
CVVTLYNFNKFYF

SEQ ID NO: 446610 - protein, 20 aa, Homo sapiens
  CDR3 for beta chain variable domain of TCR clone 223305 (TRBV7-8, TRBJ2-1)
CASSLANRRAGVRSYNEQFF

SEQ ID NO: 446611 - protein, 14 aa, Homo sapiens
  CDR3 for alpha chain variable domain of TCR clone 223306 (TRAV38-1, TRAJ35)
CAFLTIGFGNVLHC

SEQ ID NO: 446612 - protein, 17 aa, Homo sapiens
  CDR3 for beta chain variable domain of TCR clone 223306 (TRBV28, TRBJ1-1)
CASSGDLRTESNTEVFF

SEQ ID NO: 446613 - protein, 14 aa, Homo sapiens
  CDR3 for alpha chain variable domain of TCR clone 223307 (TRAV4, TRAJ26)
CLVGPHNYGQNFLF

SEQ ID NO: 446614 - protein, 17 aa, Homo sapiens
  CDR3 for beta chain variable domain of TCR clone 223307 (TRBV24-1, TRBJ2-1)
CATSDVSTSGTYNEQFF

SEQ ID NO: 446615 - protein, 14 aa, Homo sapiens
  CDR3 for alpha chain variable domain of TCR clone 223308 (TRAV8-3, TRAJ39)
CAVGANNAGNMLTV

SEQ ID NO: 446616 - protein, 16 aa, Homo sapiens
  CDR3 for beta chain variable domain of TCR clone 223308 (TRBV12-5, TRBJ2-5)
CASGPRASGNQETQYF

SEQ ID NO: 446617 - protein, 13 aa, Homo sapiens
  CDR3 for alpha chain variable domain of TCR clone 223309 (TRAV20, TRAJ31)
CAVQAWNNARLMF

SEQ ID NO: 446618 - protein, 12 aa, Homo sapiens
  CDR3 for beta chain variable domain of TCR clone 223309 (TRBV18, TRBJ2-1)
CASSSDEDEQFF

SEQ ID NO: 446619 - protein, 14 aa, Homo sapiens
  CDR3 for alpha chain variable domain of TCR clone 223310 (TRAV20, TRAJ47)
CAVTFGEYGNKLVF

SEQ ID NO: 446620 - protein, 18 aa, Homo sapiens
  CDR3 for beta chain variable domain of TCR clone 223310 (TRBV7-9, TRBJ2-7)
CASSLTTSGSRTWYEQYF

SEQ ID NO: 446621 - protein, 12 aa, Homo sapiens
  CDR3 for alpha chain variable domain of TCR clone 223311 (TRAV36/DV7, TRAJ54)
CAVVRGAQKLVF

SEQ ID NO: 446622 - protein, 13 aa, Homo sapiens
  CDR3 for beta chain variable domain of TCR clone 223311 (TRBV20-1, TRBJ1-1)
FSARGAGNTEAFF

SEQ ID NO: 446623 - protein, 11 aa, Homo sapiens
  CDR3 for alpha chain variable domain of TCR clone 223312 (TRAV12-1, TRAJ21)
CVVNNFNKFYF

SEQ ID NO: 446624 - protein, 14 aa, Homo sapiens
  CDR3 for beta chain variable domain of TCR clone 223312 (TRBV13, TRBJ2-5)
CASSLERVGETQYF

SEQ ID NO: 446625 - protein, 12 aa, Homo sapiens
  CDR3 for alpha chain variable domain of TCR clone 223313 (TRAV35, TRAJ28)
GVEGAGSYQLTF

SEQ ID NO: 446626 - protein, 14 aa, Homo sapiens
  CDR3 for beta chain variable domain of TCR clone 223313 (TRBV7-9, TRBJ2-5)
CASSLAPDQETQYF

SEQ ID NO: 446627 - protein, 13 aa, Homo sapiens
  CDR3 for alpha chain variable domain of TCR clone 223314 (TRAV21, TRAJ27)
CAARPDNAGKLTF

SEQ ID NO: 446628 - protein, 14 aa, Homo sapiens
  CDR3 for beta chain variable domain of TCR clone 223314 (TRBV7-6, TRBJ2-3)
CASSLGTVTDTQYF

SEQ ID NO: 446629 - protein, 14 aa, Homo sapiens
  CDR3 for alpha chain variable domain of TCR clone 223315 (TRAV8-3, TRAJ4)
CAVGAAGGYNTLIL

SEQ ID NO: 446630 - protein, 15 aa, Homo sapiens
  CDR3 for beta chain variable domain of TCR clone 223315 (TRBV6-5, TRBJ2-1)
CASSYDAGAGNEQFF

SEQ ID NO: 446631 - protein, 12 aa, Homo sapiens
  CDR3 for alpha chain variable domain of TCR clone 223316 (TRAV29/DV5, TRAJ49)
CAATDTGNQFYF

SEQ ID NO: 446632 - protein, 17 aa, Homo sapiens
  CDR3 for beta chain variable domain of TCR clone 223316 (TRBV7-3, TRBJ2-5)
CASSLGSGRSGSETQYF

SEQ ID NO: 446633 - protein, 16 aa, Homo sapiens
  CDR3 for alpha chain variable domain of TCR clone 223317 (TRAV23/DV6, TRAJ9)
CAASIGGNTGGFKTIF

SEQ ID NO: 446634 - protein, 12 aa, Homo sapiens
  CDR3 for beta chain variable domain of TCR clone 223317 (TRBV7-8, TRBJ2-7)
CASSLGDRGQYF

SEQ ID NO: 446635 - protein, 13 aa, Homo sapiens
  CDR3 for alpha chain variable domain of TCR clone 223318 (TRAV2, TRAJ15)
CAVASQAGTALIF

SEQ ID NO: 446636 - protein, 16 aa, Homo sapiens
  CDR3 for beta chain variable domain of TCR clone 223318 (TRBV24-1, TRBJ1-2)
CATSDERGGGNYGYTF

SEQ ID NO: 446637 - protein, 21 aa, Homo sapiens
  CDR3 for alpha chain variable domain of TCR clone 223319 (TRAV1-1, TRAJ6)
CPLLLRCERLERTGGGYIPTF

SEQ ID NO: 446638 - protein, 14 aa, Homo sapiens
  CDR3 for beta chain variable domain of TCR clone 223319 (TRBV4-1, TRBJ2-2)
CASSQAVNTGELFF

SEQ ID NO: 446639 - protein, 15 aa, Homo sapiens
  CDR3 for alpha chain variable domain of TCR clone 223320 (TRAV13-2, TRAJ23)
CAETALWGQGGKLIF

SEQ ID NO: 446640 - protein, 16 aa, Homo sapiens
  CDR3 for beta chain variable domain of TCR clone 223320 (TRBV2, TRBJ2-3)
CASSTSVEGVTDTQYF

SEQ ID NO: 446641 - protein, 15 aa, Homo sapiens
  CDR3 for alpha chain variable domain of TCR clone 223321 (TRAV2, TRAJ13)
CATPSYSGGYKKVTF

SEQ ID NO: 446642 - protein, 14 aa, Homo sapiens
  CDR3 for beta chain variable domain of TCR clone 223321 (TRBV4-2, TRBJ2-1)
CASGLDRAYNEQFF

SEQ ID NO: 446643 - protein, 12 aa, Homo sapiens
  CDR3 for alpha chain variable domain of TCR clone 223322 (TRAV16, TRAJ10)
CSRTGGGNKLTF

SEQ ID NO: 446644 - protein, 14 aa, Homo sapiens
  CDR3 for beta chain variable domain of TCR clone 223322 (TRBV12-5, TRBJ2-5)
CASGSRAHQETQYF

SEQ ID NO: 446645 - protein, 12 aa, Homo sapiens
  CDR3 for alpha chain variable domain of TCR clone 223323 (TRAV26-1, TRAJ43)
CIVRPRGDDMPF

SEQ ID NO: 446646 - protein, 16 aa, Homo sapiens
  CDR3 for beta chain variable domain of TCR clone 223323 (TRBV3-1, TRBJ2-1)
CASSQGGRRSFDEQFF

SEQ ID NO: 446647 - protein, 12 aa, Homo sapiens
  CDR3 for alpha chain variable domain of TCR clone 223324 (TRAV21, TRAJ27)
CAPPGNAGKSTL

SEQ ID NO: 446648 - protein, 13 aa, Homo sapiens
  CDR3 for beta chain variable domain of TCR clone 223324 (TRBV2, TRBJ1-1)
CARNPTGGFHAFF

SEQ ID NO: 446649 - protein, 14 aa, Homo sapiens
  CDR3 for alpha chain variable domain of TCR clone 223325 (TRAV13-1, TRAJ40)
CAASMTSGTYKYIF

SEQ ID NO: 446650 - protein, 12 aa, Homo sapiens
  CDR3 for beta chain variable domain of TCR clone 223325 (TRBV6-3, TRBJ2-1)
CASSGSYNEQFF

SEQ ID NO: 446651 - protein, 14 aa, Homo sapiens
  CDR3 for alpha chain variable domain of TCR clone 223326 (TRAV12-2, TRAJ13)
RAVKKTGGYQKVTF

SEQ ID NO: 446652 - protein, 16 aa, Homo sapiens
  CDR3 for beta chain variable domain of TCR clone 223326 (TRBV2, TRBJ2-1)
CASRSPAGGKYNEQFF

SEQ ID NO: 446653 - protein, 12 aa, Homo sapiens
  CDR3 for alpha chain variable domain of TCR clone 223327 (TRAV1-1, TRAJ20)
CAVRDRTTSLAL

SEQ ID NO: 446654 - protein, 18 aa, Homo sapiens
  CDR3 for beta chain variable domain of TCR clone 223327 (TRBV20-1, TRBJ2-6)
CSAETTPTHGSGANVLTF

SEQ ID NO: 446655 - protein, 16 aa, Homo sapiens
  CDR3 for alpha chain variable domain of TCR clone 223328 (TRAV30, TRAJ24)
CGTAIVDADSWGKLQF

SEQ ID NO: 446656 - protein, 14 aa, Homo sapiens
  CDR3 for beta chain variable domain of TCR clone 223328 (TRBV12-5, TRBJ2-5)
CASGSRTHQETQYF

SEQ ID NO: 446657 - protein, 14 aa, Homo sapiens
  CDR3 for alpha chain variable domain of TCR clone 223329 (TRAV12-3, TRAJ10)
SHLPLTGGGNKLIF

SEQ ID NO: 446658 - protein, 14 aa, Homo sapiens
  CDR3 for beta chain variable domain of TCR clone 223329 (TRBV7-2, TRBJ1-2)
CASSQTGSTYGYAF

SEQ ID NO: 446659 - protein, 15 aa, Homo sapiens
  CDR3 for alpha chain variable domain of TCR clone 223330 (TRAV21, TRAJ40)
CAVRPQTSGTYKYIF

SEQ ID NO: 446660 - protein, 16 aa, Homo sapiens
  CDR3 for beta chain variable domain of TCR clone 223330 (TRBV10-3, TRBJ2-1)
CAISGVGDGGGGEQFF

SEQ ID NO: 446661 - protein, 11 aa, Homo sapiens
  CDR3 for alpha chain variable domain of TCR clone 223331 (TRAV8-4, TRAJ34)
CAVSWTEKLIF

SEQ ID NO: 446662 - protein, 14 aa, Homo sapiens
  CDR3 for beta chain variable domain of TCR clone 223331 (TRBV7-9, TRBJ2-3)
CASSLEDGTDTQYF

SEQ ID NO: 446663 - protein, 11 aa, Homo sapiens
  CDR3 for alpha chain variable domain of TCR clone 223332 (TRAV2, TRAJ23)
CAVETRGKLIF

SEQ ID NO: 446664 - protein, 14 aa, Homo sapiens
  CDR3 for beta chain variable domain of TCR clone 223332 (TRBV2, TRBJ2-3)
CASSEEQNTDTQYF

SEQ ID NO: 446665 - protein, 18 aa, Homo sapiens
  CDR3 for alpha chain variable domain of TCR clone 223333 (TRAV21, TRAJ53)
CAVKGGENSGGSNYKLTF

SEQ ID NO: 446666 - protein, 15 aa, Homo sapiens
  CDR3 for beta chain variable domain of TCR clone 223333 (TRBV6-4, TRBJ2-1)
CASSDSTGGYNEQFF

SEQ ID NO: 446667 - protein, 14 aa, Homo sapiens
  CDR3 for alpha chain variable domain of TCR clone 223334 (TRAV13-1, TRAJ44)
RAAKATGTASKLTF

SEQ ID NO: 446668 - protein, 17 aa, Homo sapiens
  CDR3 for beta chain variable domain of TCR clone 223334 (TRBV7-3, TRBJ2-3)
RASSLMKRMLGADTQYF

SEQ ID NO: 446669 - protein, 11 aa, Homo sapiens
  CDR3 for alpha chain variable domain of TCR clone 223335 (TRAV1-1, TRAJ23)
CAVRQGGKLIF

SEQ ID NO: 446670 - protein, 16 aa, Homo sapiens
  CDR3 for beta chain variable domain of TCR clone 223335 (TRBV13, TRBJ2-2)
RASSPRTGEHTGELFF

SEQ ID NO: 446671 - protein, 13 aa, Homo sapiens
  CDR3 for alpha chain variable domain of TCR clone 223336 (TRAV3, TRAJ27)
CAVRPLGAGKSTF

SEQ ID NO: 446672 - protein, 16 aa, Homo sapiens
  CDR3 for beta chain variable domain of TCR clone 223336 (TRBV3-1, TRBJ2-7)
CASSQGATGVAYEQYF

SEQ ID NO: 446673 - protein, 14 aa, Homo sapiens
  CDR3 for alpha chain variable domain of TCR clone 223337 (TRAV3, TRAJ40)
CAVRDRRGTYKYIF

SEQ ID NO: 446674 - protein, 15 aa, Homo sapiens
  CDR3 for beta chain variable domain of TCR clone 223337 (TRBV11-1, TRBJ1-3)
CASTDPGAFGNTIYF

SEQ ID NO: 446675 - protein, 14 aa, Homo sapiens
  CDR3 for alpha chain variable domain of TCR clone 223338 (TRAV1-2, TRAJ16)
CAVNRFSDGQKLLF

SEQ ID NO: 446676 - protein, 15 aa, Homo sapiens
  CDR3 for beta chain variable domain of TCR clone 223338 (TRBV4-2, TRBJ1-1)
RASSQQGAGDTEAFL

SEQ ID NO: 446677 - protein, 12 aa, Homo sapiens
  CDR3 for alpha chain variable domain of TCR clone 223339 (TRAV8-3, TRAJ20)
CAVGANGYKLSF

SEQ ID NO: 446678 - protein, 16 aa, Homo sapiens
  CDR3 for beta chain variable domain of TCR clone 223339 (TRBV19, TRBJ2-2)
CASRYPGTGATGELFF

SEQ ID NO: 446679 - protein, 13 aa, Homo sapiens
  CDR3 for alpha chain variable domain of TCR clone 223340 (TRAV12-2, TRAJ52)
CAAHCTSYGKLTF

SEQ ID NO: 446680 - protein, 15 aa, Homo sapiens
  CDR3 for beta chain variable domain of TCR clone 223340 (TRBV10-3, TRBJ2-7)
CAISTFSGVKGEQYF

SEQ ID NO: 446681 - protein, 16 aa, Homo sapiens
  CDR3 for alpha chain variable domain of TCR clone 223341 (TRAV3, TRAJ27)
CAVRDPQGTNAGKSTV

SEQ ID NO: 446682 - protein, 15 aa, Homo sapiens
  CDR3 for beta chain variable domain of TCR clone 223341 (TRBV20-1, TRBJ2-7)
CSARDRVSGMDEQYF

SEQ ID NO: 446683 - protein, 13 aa, Homo sapiens
  CDR3 for alpha chain variable domain of TCR clone 223342 (TRAV27, TRAJ45)
CRSSGGGVDGLTF

SEQ ID NO: 446684 - protein, 11 aa, Homo sapiens
  CDR3 for beta chain variable domain of TCR clone 223342 (TRBV11-2, TRBJ2-2)
CASSLPGELFF

SEQ ID NO: 446685 - protein, 15 aa, Homo sapiens
  CDR3 for alpha chain variable domain of TCR clone 223343 (TRAV16, TRAJ57)
CALSGGQGGSEKLVF

SEQ ID NO: 446686 - protein, 14 aa, Homo sapiens
  CDR3 for beta chain variable domain of TCR clone 223343 (TRBV28, TRBJ2-2)
CASTRRSGDGELVF

SEQ ID NO: 446687 - protein, 15 aa, Homo sapiens
  CDR3 for alpha chain variable domain of TCR clone 223344 (TRAV26-1, TRAJ29)
CIVRVEGSGNTPLVF

SEQ ID NO: 446688 - protein, 14 aa, Homo sapiens
  CDR3 for beta chain variable domain of TCR clone 223344 (TRBV18, TRBJ2-5)
CASSSGVSQEAQYF

SEQ ID NO: 446689 - protein, 12 aa, Homo sapiens
  CDR3 for alpha chain variable domain of TCR clone 223345 (TRAV8-3, TRAJ26)
CAGDNYGQNFVF

SEQ ID NO: 446690 - protein, 15 aa, Homo sapiens
  CDR3 for beta chain variable domain of TCR clone 223345 (TRBV11-2, TRBJ2-1)
CASSLGTSVLNEQFF

SEQ ID NO: 446691 - protein, 15 aa, Homo sapiens
  CDR3 for alpha chain variable domain of TCR clone 223346 (TRAV8-4, TRAJ3)
CAVTGEHLVQQCFQD

SEQ ID NO: 446692 - protein, 16 aa, Homo sapiens
  CDR3 for beta chain variable domain of TCR clone 223346 (TRBV4-2, TRBJ1-1)
CASSQAGFGMNTEAFF

SEQ ID NO: 446693 - protein, 13 aa, Homo sapiens
  CDR3 for alpha chain variable domain of TCR clone 223347 (TRAV1-1, TRAJ9)
CAAKNTGGFKTIF

SEQ ID NO: 446694 - protein, 16 aa, Homo sapiens
  CDR3 for beta chain variable domain of TCR clone 223347 (TRBV7-9, TRBJ2-1)
CASSDVAGGSYNEQFF

SEQ ID NO: 446695 - protein, 13 aa, Homo sapiens
  CDR3 for alpha chain variable domain of TCR clone 223348 (TRAV38-2/DV8, TRAJ45)
CAYVGGGADGLTF

SEQ ID NO: 446696 - protein, 14 aa, Homo sapiens
  CDR3 for beta chain variable domain of TCR clone 223348 (TRBV18, TRBJ1-5)
CASSPGNSNQPQHF

SEQ ID NO: 446697 - protein, 13 aa, Homo sapiens
  CDR3 for alpha chain variable domain of TCR clone 223349 (TRAV12-2, TRAJ24)
CAVNINSWGKFQF

SEQ ID NO: 446698 - protein, 14 aa, Homo sapiens
  CDR3 for beta chain variable domain of TCR clone 223349 (TRBV25-1, TRBJ1-1)
CASTHLGGNTEAFF

SEQ ID NO: 446699 - protein, 14 aa, Homo sapiens
  CDR3 for alpha chain variable domain of TCR clone 223350 (TRAV4, TRAJ9)
CLVGSGTGGFKTIF

SEQ ID NO: 446700 - protein, 12 aa, Homo sapiens
  CDR3 for beta chain variable domain of TCR clone 223350 (TRBV6-3, TRBJ2-7)
CASSLTPYEQYF

SEQ ID NO: 446701 - protein, 13 aa, Homo sapiens
  CDR3 for alpha chain variable domain of TCR clone 223351 (TRAV36/DV7, TRAJ37)
CAVFSSNTGKLIF

SEQ ID NO: 446702 - protein, 15 aa, Homo sapiens
  CDR3 for beta chain variable domain of TCR clone 223351 (TRBV12-4, TRBJ2-5)
CQQFLVRGRQETQYF

SEQ ID NO: 446703 - protein, 14 aa, Homo sapiens
  CDR3 for alpha chain variable domain of TCR clone 223352 (TRAV12-1, TRAJ23)
CVVIVYNQGGKLIF

SEQ ID NO: 446704 - protein, 14 aa, Homo sapiens
  CDR3 for beta chain variable domain of TCR clone 223352 (TRBV6-1, TRBJ1-3)
CASVQGGGGNTIYF

SEQ ID NO: 446705 - protein, 11 aa, Homo sapiens
  CDR3 for alpha chain variable domain of TCR clone 223353 (TRAV1-1, TRAJ23)
CAVRQGSKLIF

SEQ ID NO: 446706 - protein, 20 aa, Homo sapiens
  CDR3 for beta chain variable domain of TCR clone 223353 (TRBV7-8, TRBJ2-2)
CASSHLFPGPTIHITGELFF

SEQ ID NO: 446707 - protein, 12 aa, Homo sapiens
  CDR3 for alpha chain variable domain of TCR clone 223354 (TRAV12-1, TRAJ9)
CVVHTGGFKTIF

SEQ ID NO: 446708 - protein, 13 aa, Homo sapiens
  CDR3 for beta chain variable domain of TCR clone 223354 (TRBV7-2, TRBJ2-7)
CASSSPSGSEQYF

SEQ ID NO: 446709 - protein, 16 aa, Homo sapiens
  CDR3 for alpha chain variable domain of TCR clone 223355 (TRAV16, TRAJ24)
CALSGGSTDSWGKVQF

SEQ ID NO: 446710 - protein, 15 aa, Homo sapiens
  CDR3 for beta chain variable domain of TCR clone 223355 (TRBV27, TRBJ2-1)
CASSNGGGSSNEQFF

SEQ ID NO: 446711 - protein, 14 aa, Homo sapiens
  CDR3 for alpha chain variable domain of TCR clone 223356 (TRAV26-1, TRAJ38)
SIADNAGNNRKLIW

SEQ ID NO: 446712 - protein, 14 aa, Homo sapiens
  CDR3 for beta chain variable domain of TCR clone 223356 (TRBV7-2, TRBJ2-7)
CASRSQGAAYEQYF

SEQ ID NO: 446713 - protein, 10 aa, Homo sapiens
  CDR3 for alpha chain variable domain of TCR clone 223357 (TRAV2, TRAJ34)
CAVVNDKLIF

SEQ ID NO: 446714 - protein, 15 aa, Homo sapiens
  CDR3 for beta chain variable domain of TCR clone 223357 (TRBV3-1, TRBJ2-2)
CASSQDWNRAGELFF

SEQ ID NO: 446715 - protein, 12 aa, Homo sapiens
  CDR3 for alpha chain variable domain of TCR clone 223358 (TRAV13-1, TRAJ27)
CTAHTNAGKSTF

SEQ ID NO: 446716 - protein, 14 aa, Homo sapiens
  CDR3 for beta chain variable domain of TCR clone 223358 (TRBV19, TRBJ2-2)
CASSGQGIAGELFF

SEQ ID NO: 446717 - protein, 13 aa, Homo sapiens
  CDR3 for alpha chain variable domain of TCR clone 223359 (TRAV3, TRAJ27)
CAVRPLGAGKSTF

SEQ ID NO: 446718 - protein, 12 aa, Homo sapiens
  CDR3 for beta chain variable domain of TCR clone 223359 (TRBV7-9, TRBJ2-7)
CATRTDAYEQDF

SEQ ID NO: 446719 - protein, 14 aa, Homo sapiens
  CDR3 for alpha chain variable domain of TCR clone 223360 (TRAV35, TRAJ34)
CAGQSSYNTDKLIF

SEQ ID NO: 446720 - protein, 12 aa, Homo sapiens
  CDR3 for beta chain variable domain of TCR clone 223360 (TRBV11-2, TRBJ2-2)
CASSLGGGELFF

SEQ ID NO: 446721 - protein, 14 aa, Homo sapiens
  CDR3 for alpha chain variable domain of TCR clone 223361 (TRAV12-2, TRAJ45)
CAVNKGGGAEDSPL

SEQ ID NO: 446722 - protein, 14 aa, Homo sapiens
  CDR3 for beta chain variable domain of TCR clone 223361 (TRBV20-1, TRBJ1-1)
CSAMGGTANTEAFF

SEQ ID NO: 446723 - protein, 13 aa, Homo sapiens
  CDR3 for alpha chain variable domain of TCR clone 223362 (TRAV1-2, TRAJ31)
CAVRPSNNARLMF

SEQ ID NO: 446724 - protein, 14 aa, Homo sapiens
  CDR3 for beta chain variable domain of TCR clone 223362 (TRBV11-2, TRBJ2-1)
CASSLSGPYNEQFF

SEQ ID NO: 446725 - protein, 14 aa, Homo sapiens
  CDR3 for alpha chain variable domain of TCR clone 223363 (TRAV12-2, TRAJ17)
CAALFKAAGNKLTF

SEQ ID NO: 446726 - protein, 11 aa, Homo sapiens
  CDR3 for beta chain variable domain of TCR clone 223363 (TRBV29-1, TRBJ2-5)
CSEDRTGTQYF

SEQ ID NO: 446727 - protein, 13 aa, Homo sapiens
  CDR3 for alpha chain variable domain of TCR clone 223364 (TRAV8-3, TRAJ28)
CAVGAVGSHQLTF

SEQ ID NO: 446728 - protein, 14 aa, Homo sapiens
  CDR3 for beta chain variable domain of TCR clone 223364 (TRBV7-2, TRBJ2-7)
CASRSRGAAYEQYF

SEQ ID NO: 446729 - protein, 12 aa, Homo sapiens
  CDR3 for alpha chain variable domain of TCR clone 223365 (TRAV13-1, TRAJ21)
CAVKEGFNKFYF

SEQ ID NO: 446730 - protein, 14 aa, Homo sapiens
  CDR3 for beta chain variable domain of TCR clone 223365 (TRBV5-1, TRBJ2-7)
CASSRGESLYEQYF

SEQ ID NO: 446731 - protein, 14 aa, Homo sapiens
  CDR3 for alpha chain variable domain of TCR clone 223366 (TRAV26-1, TRAJ38)
CIADNAGNNRKMIW

SEQ ID NO: 446732 - protein, 15 aa, Homo sapiens
  CDR3 for beta chain variable domain of TCR clone 223366 (TRBV18, TRBJ2-1)
CASSPPSASYNEQFF

SEQ ID NO: 446733 - protein, 12 aa, Homo sapiens
  CDR3 for alpha chain variable domain of TCR clone 223367 (TRAV13-2, TRAJ8)
CAPWLGFQKLVF

SEQ ID NO: 446734 - protein, 16 aa, Homo sapiens
  CDR3 for beta chain variable domain of TCR clone 223367 (TRBV2, TRBJ2-1)
CASSVGGSLSYNEQFF

SEQ ID NO: 446735 - protein, 11 aa, Homo sapiens
  CDR3 for alpha chain variable domain of TCR clone 223368 (TRAV12-2, TRAJ43)
CASPIGNDMRF

SEQ ID NO: 446736 - protein, 14 aa, Homo sapiens
  CDR3 for beta chain variable domain of TCR clone 223368 (TRBV19, TRBJ2-1)
CASPTFFLSGEQFF

SEQ ID NO: 446737 - protein, 15 aa, Homo sapiens
  CDR3 for alpha chain variable domain of TCR clone 223369 (TRAV25, TRAJ53)
CPTSTSGGSNYKLTF

SEQ ID NO: 446738 - protein, 15 aa, Homo sapiens
  CDR3 for beta chain variable domain of TCR clone 223369 (TRBV20-1, TRBJ2-7)
CSARDRVSGMDEQYF

SEQ ID NO: 446739 - protein, 14 aa, Homo sapiens
  CDR3 for alpha chain variable domain of TCR clone 223370 (TRAV12-2, TRAJ9)
CAVNMEGGGCKTIF

SEQ ID NO: 446740 - protein, 14 aa, Homo sapiens
  CDR3 for beta chain variable domain of TCR clone 223370 (TRBV2, TRBJ2-5)
CASSEVLAQETQYF

SEQ ID NO: 446741 - protein, 14 aa, Homo sapiens
  CDR3 for alpha chain variable domain of TCR clone 223371 (TRAV8-3, TRAJ42)
CAVGAWGSQGNLIF

SEQ ID NO: 446742 - protein, 20 aa, Homo sapiens
  CDR3 for beta chain variable domain of TCR clone 223371 (TRBV19, TRBJ2-1)
CASSISRTVTSTRLNNEQFF

SEQ ID NO: 446743 - protein, 14 aa, Homo sapiens
  CDR3 for alpha chain variable domain of TCR clone 223372 (TRAV1-2, TRAJ16)
CAVNRFSDGQKLLF

SEQ ID NO: 446744 - protein, 14 aa, Homo sapiens
  CDR3 for beta chain variable domain of TCR clone 223372 (TRBV4-1, TRBJ1-4)
CASSQERKNEKLFF

SEQ ID NO: 446745 - protein, 14 aa, Homo sapiens
  CDR3 for alpha chain variable domain of TCR clone 223373 (TRAV23/DV6, TRAJ57)
CAASSTLSRADLKS

SEQ ID NO: 446746 - protein, 14 aa, Homo sapiens
  CDR3 for beta chain variable domain of TCR clone 223373 (TRBV25-1, TRBJ1-1)
CASTHLGGNTEAFF

SEQ ID NO: 446747 - protein, 14 aa, Homo sapiens
  CDR3 for alpha chain variable domain of TCR clone 223374 (TRAV4, TRAJ30)
CLVGDMNRDYKIIF

SEQ ID NO: 446748 - protein, 14 aa, Homo sapiens
  CDR3 for beta chain variable domain of TCR clone 223374 (TRBV19, TRBJ2-7)
CASSIQEWSYEQYF

SEQ ID NO: 446749 - protein, 14 aa, Homo sapiens
  CDR3 for alpha chain variable domain of TCR clone 223375 (TRAV2, TRAJ9)
CAVEDRSGGFKTIF

SEQ ID NO: 446750 - protein, 15 aa, Homo sapiens
  CDR3 for beta chain variable domain of TCR clone 223375 (TRBV7-3, TRBJ2-1)
CQQLRGYRSYNEQFF

SEQ ID NO: 446751 - protein, 15 aa, Homo sapiens
  CDR3 for alpha chain variable domain of TCR clone 223376 (TRAV26-1, TRAJ17)
CIVRVVKAAGNKLTF

SEQ ID NO: 446752 - protein, 16 aa, Homo sapiens
  CDR3 for beta chain variable domain of TCR clone 223376 (TRBV7-9, TRBJ2-1)
CGSSLVSGPSYNEQFF

SEQ ID NO: 446753 - protein, 12 aa, Homo sapiens
  CDR3 for alpha chain variable domain of TCR clone 223377 (TRAV36/DV7, TRAJ54)
CAVVRVAQKLVF

SEQ ID NO: 446754 - protein, 14 aa, Homo sapiens
  CDR3 for beta chain variable domain of TCR clone 223377 (TRBV7-3, TRBJ1-1)
CASRLKGGNTEAFF

SEQ ID NO: 446755 - protein, 11 aa, Homo sapiens
  CDR3 for alpha chain variable domain of TCR clone 223378 (TRAV13-1, TRAJ8)
CAARGFQKLVF

SEQ ID NO: 446756 - protein, 16 aa, Homo sapiens
  CDR3 for beta chain variable domain of TCR clone 223378 (TRBV19, TRBJ1-5)
CASSTRGTTSNQPQHF

SEQ ID NO: 446757 - protein, 13 aa, Homo sapiens
  CDR3 for alpha chain variable domain of TCR clone 223379 (TRAV12-1, TRAJ40)
CVVPTSGTYKYIF

SEQ ID NO: 446758 - protein, 15 aa, Homo sapiens
  CDR3 for beta chain variable domain of TCR clone 223379 (TRBV7-3, TRBJ2-1)
CASSLSSGSFDEQFF

SEQ ID NO: 446759 - protein, 17 aa, Homo sapiens
  CDR3 for alpha chain variable domain of TCR clone 223380 (TRAV36/DV7, TRAJ52)
CAVAQRAGGTCYGKLTF

SEQ ID NO: 446760 - protein, 14 aa, Homo sapiens
  CDR3 for beta chain variable domain of TCR clone 223380 (TRBV19, TRBJ2-1)
CASPTFVLSGEQFF

SEQ ID NO: 446761 - protein, 13 aa, Homo sapiens
  CDR3 for alpha chain variable domain of TCR clone 223381 (TRAV1-1, TRAJ9)
CAAKNTGGFKTIF

SEQ ID NO: 446762 - protein, 13 aa, Homo sapiens
  CDR3 for beta chain variable domain of TCR clone 223381 (TRBV4-2, TRBJ1-1)
CASSQAGNAEAFF

SEQ ID NO: 446763 - protein, 15 aa, Homo sapiens
  CDR3 for alpha chain variable domain of TCR clone 223382 (TRAV4, TRAJ39)
CLVGPNNNAGNMLTF

SEQ ID NO: 446764 - protein, 14 aa, Homo sapiens
  CDR3 for beta chain variable domain of TCR clone 223382 (TRBV11-3, TRBJ2-1)
CASSATTSGSIQFF

SEQ ID NO: 446765 - protein, 14 aa, Homo sapiens
  CDR3 for alpha chain variable domain of TCR clone 223383 (TRAV12-1, TRAJ46)
CVVTAKSSGDKLTF

SEQ ID NO: 446766 - protein, 17 aa, Homo sapiens
  CDR3 for beta chain variable domain of TCR clone 223383 (TRBV4-1, TRBJ2-3)
CASSPDPAGGPLDTQYF

SEQ ID NO: 446767 - protein, 11 aa, Homo sapiens
  CDR3 for alpha chain variable domain of TCR clone 223384 (TRAV29/DV5, TRAJ30)
CAASARTRSSL

SEQ ID NO: 446768 - protein, 15 aa, Homo sapiens
  CDR3 for beta chain variable domain of TCR clone 223384 (TRBV5-1, TRBJ2-7)
CASSLNGGPAREQYF

SEQ ID NO: 446769 - protein, 12 aa, Homo sapiens
  CDR3 for alpha chain variable domain of TCR clone 223385 (TRAV12-1, TRAJ40)
CVVPSGTYKYIF

SEQ ID NO: 446770 - protein, 15 aa, Homo sapiens
  CDR3 for beta chain variable domain of TCR clone 223385 (TRBV12-4, TRBJ2-1)
RASSPLSGRNNEQLF

SEQ ID NO: 446771 - protein, 10 aa, Homo sapiens
  CDR3 for alpha chain variable domain of TCR clone 223386 (TRAV3, TRAJ18)
CAVRLTEAQP

SEQ ID NO: 446772 - protein, 14 aa, Homo sapiens
  CDR3 for beta chain variable domain of TCR clone 223386 (TRBV18, TRBJ2-5)
CASSPGVSQETQYF

SEQ ID NO: 446773 - protein, 18 aa, Homo sapiens
  CDR3 for alpha chain variable domain of TCR clone 223387 (TRAV20, TRAJ4)
CAVQPYYMFSGGYNKLIF

SEQ ID NO: 446774 - protein, 13 aa, Homo sapiens
  CDR3 for beta chain variable domain of TCR clone 223387 (TRBV19, TRBJ2-3)
CATLYKITDTQYF

SEQ ID NO: 446775 - protein, 13 aa, Homo sapiens
  CDR3 for alpha chain variable domain of TCR clone 223388 (TRAV21, TRAJ34)
CAVSEGDTDKLIF

SEQ ID NO: 446776 - protein, 17 aa, Homo sapiens
  CDR3 for beta chain variable domain of TCR clone 223388 (TRBV28, TRBJ2-5)
CASSTREGDALQETQYF

SEQ ID NO: 446777 - protein, 15 aa, Homo sapiens
  CDR3 for alpha chain variable domain of TCR clone 223389 (TRAV12-2, TRAJ53)
CAVNGGGGSNHKLTF

SEQ ID NO: 446778 - protein, 17 aa, Homo sapiens
  CDR3 for beta chain variable domain of TCR clone 223389 (TRBV7-3, TRBJ2-3)
CASSLMKRVRGADTQYF

SEQ ID NO: 446779 - protein, 15 aa, Homo sapiens
  CDR3 for alpha chain variable domain of TCR clone 223390 (TRAV3, TRAJ3)
CAVRDGHSSASKIIF

SEQ ID NO: 446780 - protein, 17 aa, Homo sapiens
  CDR3 for beta chain variable domain of TCR clone 223390 (TRBV25-1, TRBJ2-7)
CASSGARVVFSSYEQYF

SEQ ID NO: 446781 - protein, 15 aa, Homo sapiens
  CDR3 for alpha chain variable domain of TCR clone 223391 (TRAV27, TRAJ38)
CAARRNAGNNRKLIW

SEQ ID NO: 446782 - protein, 13 aa, Homo sapiens
  CDR3 for beta chain variable domain of TCR clone 223391 (TRBV19, TRBJ1-3)
CASRLSLGNTIYF

SEQ ID NO: 446783 - protein, 15 aa, Homo sapiens
  CDR3 for alpha chain variable domain of TCR clone 223392 (TRAV13-1, TRAJ43)
CAATPELGGNNGMRF

SEQ ID NO: 446784 - protein, 14 aa, Homo sapiens
  CDR3 for beta chain variable domain of TCR clone 223392 (TRBV12-5, TRBJ2-5)
CASGSRTHQETQYF

SEQ ID NO: 446785 - protein, 14 aa, Homo sapiens
  CDR3 for alpha chain variable domain of TCR clone 223393 (TRAV12-2, TRAJ13)
CAVKKTGGYQKVTF

SEQ ID NO: 446786 - protein, 15 aa, Homo sapiens
  CDR3 for beta chain variable domain of TCR clone 223393 (TRBV6-3, TRBJ2-7)
CASSSHGTVFYEQYF

SEQ ID NO: 446787 - protein, 16 aa, Homo sapiens
  CDR3 for alpha chain variable domain of TCR clone 223394 (TRAV12-2, TRAJ32)
CAVNLGQGGATNKLIF

SEQ ID NO: 446788 - protein, 14 aa, Homo sapiens
  CDR3 for beta chain variable domain of TCR clone 223394 (TRBV18, TRBJ2-3)
CASSRDRGTDTQYF

SEQ ID NO: 446789 - protein, 14 aa, Homo sapiens
  CDR3 for alpha chain variable domain of TCR clone 223395 (TRAV12-2, TRAJ3)
CAVSLYSSASKIIF

SEQ ID NO: 446790 - protein, 13 aa, Homo sapiens
  CDR3 for beta chain variable domain of TCR clone 223395 (TRBV28, TRBJ2-7)
CASTPGLAGEQYF

SEQ ID NO: 446791 - protein, 14 aa, Homo sapiens
  CDR3 for alpha chain variable domain of TCR clone 223396 (TRAV17, TRAJ57)
CATDPQGGSEKLVF

SEQ ID NO: 446792 - protein, 14 aa, Homo sapiens
  CDR3 for beta chain variable domain of TCR clone 223396 (TRBV11-2, TRBJ1-2)
CASSLGTANYGYTF

SEQ ID NO: 446793 - protein, 15 aa, Homo sapiens
  CDR3 for alpha chain variable domain of TCR clone 223397 (TRAV26-1, TRAJ15)
CIVRAANQAGPALIF

SEQ ID NO: 446794 - protein, 15 aa, Homo sapiens
  CDR3 for beta chain variable domain of TCR clone 223397 (TRBV20-1, TRBJ1-1)
CSARSAATANTEAFF

SEQ ID NO: 446795 - protein, 12 aa, Homo sapiens
  CDR3 for alpha chain variable domain of TCR clone 223398 (TRAV12-1, TRAJ23)
CVVNIPGGKLIF

SEQ ID NO: 446796 - protein, 15 aa, Homo sapiens
  CDR3 for beta chain variable domain of TCR clone 223398 (TRBV7-2, TRBJ2-7)
CASSLLSSGSYEQYF

SEQ ID NO: 446797 - protein, 15 aa, Homo sapiens
  CDR3 for alpha chain variable domain of TCR clone 223399 (TRAV27, TRAJ38)
CAARRNASNNRKLIW

SEQ ID NO: 446798 - protein, 13 aa, Homo sapiens
  CDR3 for beta chain variable domain of TCR clone 223399 (TRBV12-5, TRBJ2-3)
CASGDRQTDTQYF

SEQ ID NO: 446799 - protein, 14 aa, Homo sapiens
  CDR3 for alpha chain variable domain of TCR clone 223400 (TRAV13-1, TRAJ35)
CAASKGGFGNVLHC

SEQ ID NO: 446800 - protein, 21 aa, Homo sapiens
  CDR3 for beta chain variable domain of TCR clone 223400 (TRBV7-3, TRBJ1-1)
GGTQPCISVPAARIGGAEDFF

SEQ ID NO: 446801 - protein, 13 aa, Homo sapiens
  CDR3 for alpha chain variable domain of TCR clone 223401 (TRAV21, TRAJ20)
CAVGLRVDYKLSF

SEQ ID NO: 446802 - protein, 13 aa, Homo sapiens
  CDR3 for beta chain variable domain of TCR clone 223401 (TRBV28, TRBJ2-2)
CASIRESTGELFF

SEQ ID NO: 446803 - protein, 16 aa, Homo sapiens
  CDR3 for alpha chain variable domain of TCR clone 223402 (TRAV12-3, TRAJ53)
CAMSPGSGGSNYKLTF

SEQ ID NO: 446804 - protein, 14 aa, Homo sapiens
  CDR3 for beta chain variable domain of TCR clone 223402 (TRBV7-2, TRBJ1-1)
CASSFLTGTTDAFF

SEQ ID NO: 446805 - protein, 11 aa, Homo sapiens
  CDR3 for alpha chain variable domain of TCR clone 223403 (TRAV1-2, TRAJ20)
CAVANDYKLSF

SEQ ID NO: 446806 - protein, 15 aa, Homo sapiens
  CDR3 for beta chain variable domain of TCR clone 223403 (TRBV28, TRBJ2-1)
CASSIIAGGRSEQFV

SEQ ID NO: 446807 - protein, 15 aa, Homo sapiens
  CDR3 for alpha chain variable domain of TCR clone 223404 (TRAV21, TRAJ53)
CATLNSGGSNYKLTF

SEQ ID NO: 446808 - protein, 15 aa, Homo sapiens
  CDR3 for beta chain variable domain of TCR clone 223404 (TRBV10-3, TRBJ2-2)
CAISEGDRAAGELFF

SEQ ID NO: 446809 - protein, 14 aa, Homo sapiens
  CDR3 for alpha chain variable domain of TCR clone 223405 (TRAV12-3, TRAJ10)
SHLPLTGGGNKLTF

SEQ ID NO: 446810 - protein, 13 aa, Homo sapiens
  CDR3 for beta chain variable domain of TCR clone 223405 (TRBV4-2, TRBJ1-1)
CASSQAENTEAFF

SEQ ID NO: 446811 - protein, 15 aa, Homo sapiens
  CDR3 for alpha chain variable domain of TCR clone 223406 (TRAV12-3, TRAJ17)
CAMSPSLAAGNKLTF

SEQ ID NO: 446812 - protein, 14 aa, Homo sapiens
  CDR3 for beta chain variable domain of TCR clone 223406 (TRBV7-3, TRBJ2-1)
CASSLGTSANEQFF

SEQ ID NO: 446813 - protein, 14 aa, Homo sapiens
  CDR3 for alpha chain variable domain of TCR clone 223407 (TRAV8-3, TRAJ35)
CAVVPQGFGNVLHC

SEQ ID NO: 446814 - protein, 15 aa, Homo sapiens
  CDR3 for beta chain variable domain of TCR clone 223407 (TRBV19, TRBJ2-2)
CASRQTGADTGELFF

SEQ ID NO: 446815 - protein, 16 aa, Homo sapiens
  CDR3 for alpha chain variable domain of TCR clone 223408 (TRAV26-1, TRAJ40)
CIVRGYPTSGTYKYIF

SEQ ID NO: 446816 - protein, 16 aa, Homo sapiens
  CDR3 for beta chain variable domain of TCR clone 223408 (TRBV5-1, TRBJ1-4)
CASSSGQGGEKRFLAV

SEQ ID NO: 446817 - protein, 15 aa, Homo sapiens
  CDR3 for alpha chain variable domain of TCR clone 223409 (TRAV3, TRAJ22)
CAVRDRRGSARQLTF

SEQ ID NO: 446818 - protein, 13 aa, Homo sapiens
  CDR3 for beta chain variable domain of TCR clone 223409 (TRBV2, TRBJ1-5)
CATAGPGNQPQHF

SEQ ID NO: 446819 - protein, 17 aa, Homo sapiens
  CDR3 for alpha chain variable domain of TCR clone 223410 (TRAV26-1, TRAJ57)
CIVRPRFTQGGSEKLVF

SEQ ID NO: 446820 - protein, 16 aa, Homo sapiens
  CDR3 for beta chain variable domain of TCR clone 223410 (TRBV13, TRBJ2-2)
CASREVFGANTGELFF

SEQ ID NO: 446821 - protein, 13 aa, Homo sapiens
  CDR3 for alpha chain variable domain of TCR clone 223411 (TRAV8-4, TRAJ20)
CAVSRSNDYKLSF

SEQ ID NO: 446822 - protein, 15 aa, Homo sapiens
  CDR3 for beta chain variable domain of TCR clone 223411 (TRBV6-1, TRBJ2-2)
CASIVTSGIPGELFF

SEQ ID NO: 446823 - protein, 12 aa, Homo sapiens
  CDR3 for alpha chain variable domain of TCR clone 223412 (TRAV21, TRAJ29)
FAVTSGNTPFVF

SEQ ID NO: 446824 - protein, 20 aa, Homo sapiens
  CDR3 for beta chain variable domain of TCR clone 223412 (TRBV7-8, TRBJ2-2)
CASSHLFPGPTIHITGELFF

SEQ ID NO: 446825 - protein, 17 aa, Homo sapiens
  CDR3 for alpha chain variable domain of TCR clone 223413 (TRAV3, TRAJ42)
CAVRDRDYGGSQGKLIF

SEQ ID NO: 446826 - protein, 13 aa, Homo sapiens
  CDR3 for beta chain variable domain of TCR clone 223413 (TRBV20-1, TRBJ2-5)
CSARRGTGATQYF

SEQ ID NO: 446827 - protein, 11 aa, Homo sapiens
  CDR3 for alpha chain variable domain of TCR clone 223414 (TRAV12-2, TRAJ31)
CAVTRWARLMF

SEQ ID NO: 446828 - protein, 15 aa, Homo sapiens
  CDR3 for beta chain variable domain of TCR clone 223414 (TRBV19, TRBJ2-7)
CASSIGGGLVYEQYF

SEQ ID NO: 446829 - protein, 15 aa, Homo sapiens
  CDR3 for alpha chain variable domain of TCR clone 223415 (TRAV12-3, TRAJ9)
CAMSPRNTGGFKTIF

SEQ ID NO: 446830 - protein, 14 aa, Homo sapiens
  CDR3 for beta chain variable domain of TCR clone 223415 (TRBV19, TRBJ1-5)
CASGTEVYNQPQHF

SEQ ID NO: 446831 - protein, 16 aa, Homo sapiens
  CDR3 for alpha chain variable domain of TCR clone 223416 (TRAV16, TRAJ4)
CALSRMFSGGYNKLCF

SEQ ID NO: 446832 - protein, 16 aa, Homo sapiens
  CDR3 for beta chain variable domain of TCR clone 223416 (TRBV24-1, TRBJ2-3)
CATSDPGTGATDTQYF

SEQ ID NO: 446833 - protein, 16 aa, Homo sapiens
  CDR3 for alpha chain variable domain of TCR clone 223417 (TRAV16, TRAJ37)
CCKWPDGSSNTGKLIF

SEQ ID NO: 446834 - protein, 13 aa, Homo sapiens
  CDR3 for beta chain variable domain of TCR clone 223417 (TRBV7-2, TRBJ2-2)
CASSLAVTGELFF

SEQ ID NO: 446835 - protein, 12 aa, Homo sapiens
  CDR3 for alpha chain variable domain of TCR clone 223418 (TRAV17, TRAJ32)
CATDGGTPMVVL

SEQ ID NO: 446836 - protein, 11 aa, Homo sapiens
  CDR3 for beta chain variable domain of TCR clone 223418 (TRBV20-1, TRBJ1-1)
CSARVRLGAFF

SEQ ID NO: 446837 - protein, 13 aa, Homo sapiens
  CDR3 for alpha chain variable domain of TCR clone 223419 (TRAV21, TRAJ57)
CAVTQGGSEKLVF

SEQ ID NO: 446838 - protein, 15 aa, Homo sapiens
  CDR3 for beta chain variable domain of TCR clone 223419 (TRBV29-1, TRBJ2-1)
CSARGGTRYYNEQFF

SEQ ID NO: 446839 - protein, 13 aa, Homo sapiens
  CDR3 for alpha chain variable domain of TCR clone 223420 (TRAV29/DV5, TRAJ29)
CAASAAGNQPLVF

SEQ ID NO: 446840 - protein, 14 aa, Homo sapiens
  CDR3 for beta chain variable domain of TCR clone 223420 (TRBV19, TRBJ2-3)
CASSAPRGTDTQYF

SEQ ID NO: 446841 - protein, 14 aa, Homo sapiens
  CDR3 for alpha chain variable domain of TCR clone 223421 (TRAV12-1, TRAJ30)
CVVNIGGRDDKIIF

SEQ ID NO: 446842 - protein, 12 aa, Homo sapiens
  CDR3 for beta chain variable domain of TCR clone 223421 (TRBV20-1, TRBJ1-1)
QCSTWGGTEAFF

SEQ ID NO: 446843 - protein, 17 aa, Homo sapiens
  CDR3 for alpha chain variable domain of TCR clone 223422 (TRAV27, TRAJ52)
CAGAGGAGGTSYGKLTF

SEQ ID NO: 446844 - protein, 15 aa, Homo sapiens
  CDR3 for beta chain variable domain of TCR clone 223422 (TRBV19, TRBJ2-1)
CSSKAGPSSYNEQFF

SEQ ID NO: 446845 - protein, 15 aa, Homo sapiens
  CDR3 for alpha chain variable domain of TCR clone 223423 (TRAV2, TRAJ24)
CAVVRLKNSWGKLQF

SEQ ID NO: 446846 - protein, 17 aa, Homo sapiens
  CDR3 for beta chain variable domain of TCR clone 223423 (TRBV4-2, TRBJ1-1)
CASTQFGGGSGNTEAFF

SEQ ID NO: 446847 - protein, 13 aa, Homo sapiens
  CDR3 for alpha chain variable domain of TCR clone 223424 (TRAV36/DV7, TRAJ54)
CAVCTQGAQKRVF

SEQ ID NO: 446848 - protein, 13 aa, Homo sapiens
  CDR3 for beta chain variable domain of TCR clone 223424 (TRBV7-6, TRBJ2-7)
CASSLDHTHEQYF

SEQ ID NO: 446849 - protein, 14 aa, Homo sapiens
  CDR3 for alpha chain variable domain of TCR clone 223425 (TRAV38-1, TRAJ40)
CALRPTSGTYKYIF

SEQ ID NO: 446850 - protein, 16 aa, Homo sapiens
  CDR3 for beta chain variable domain of TCR clone 223425 (TRBV10-3, TRBJ2-1)
CAISGVGDGGGGEQFF

SEQ ID NO: 446851 - protein, 13 aa, Homo sapiens
  CDR3 for alpha chain variable domain of TCR clone 223426 (TRAV13-2, TRAJ8)
CAFMNTGFLKLVF

SEQ ID NO: 446852 - protein, 17 aa, Homo sapiens
  CDR3 for beta chain variable domain of TCR clone 223426 (TRBV28, TRBJ2-1)
CASSSARQALTYNEQFF

SEQ ID NO: 446853 - protein, 15 aa, Homo sapiens
  CDR3 for alpha chain variable domain of TCR clone 223427 (TRAV8-4, TRAJ3)
CAVSEPYSSASKIIF

SEQ ID NO: 446854 - protein, 16 aa, Homo sapiens
  CDR3 for beta chain variable domain of TCR clone 223427 (TRBV27, TRBJ2-2)
CASSFRGLVRTGELFF

SEQ ID NO: 446855 - protein, 15 aa, Homo sapiens
  CDR3 for alpha chain variable domain of TCR clone 223428 (TRAV25, TRAJ52)
CAGRPGGTSYGKLTF

SEQ ID NO: 446856 - protein, 17 aa, Homo sapiens
  CDR3 for beta chain variable domain of TCR clone 223428 (TRBV7-8, TRBJ2-6)
CASSAGTGGVWANVLTF

SEQ ID NO: 446857 - protein, 16 aa, Homo sapiens
  CDR3 for alpha chain variable domain of TCR clone 223429 (TRAV3, TRAJ18)
CAVRDGRGSTLGRLYF

SEQ ID NO: 446858 - protein, 13 aa, Homo sapiens
  CDR3 for beta chain variable domain of TCR clone 223429 (TRBV11-2, TRBJ2-1)
CASSLDLVNEQFF

SEQ ID NO: 446859 - protein, 14 aa, Homo sapiens
  CDR3 for alpha chain variable domain of TCR clone 223430 (TRAV4, TRAJ17)
CLVGDMAAGNKLTF

SEQ ID NO: 446860 - protein, 11 aa, Homo sapiens
  CDR3 for beta chain variable domain of TCR clone 223430 (TRBV29-1, TRBJ2-5)
CSEDRTGTQYF

SEQ ID NO: 446861 - protein, 14 aa, Homo sapiens
  CDR3 for alpha chain variable domain of TCR clone 223431 (TRAV9-2, TRAJ39)
CALYIYNAGNMLTF

SEQ ID NO: 446862 - protein, 15 aa, Homo sapiens
  CDR3 for beta chain variable domain of TCR clone 223431 (TRBV19, TRBJ1-6)
CASSTQGEVGSPLHF

SEQ ID NO: 446863 - protein, 12 aa, Homo sapiens
  CDR3 for alpha chain variable domain of TCR clone 223432 (TRAV1-1, TRAJ39)
CAVPVVGNMLTF

SEQ ID NO: 446864 - protein, 17 aa, Homo sapiens
  CDR3 for beta chain variable domain of TCR clone 223432 (TRBV13, TRBJ2-3)
FASSLSRVAGGRNTQYF

SEQ ID NO: 446865 - protein, 14 aa, Homo sapiens
  CDR3 for alpha chain variable domain of TCR clone 223433 (TRAV1-2, TRAJ8)
CAVREDTGFQKLVF

SEQ ID NO: 446866 - protein, 15 aa, Homo sapiens
  CDR3 for beta chain variable domain of TCR clone 223433 (TRBV7-9, TRBJ2-2)
CAGGPFDTFPGELFF

SEQ ID NO: 446867 - protein, 14 aa, Homo sapiens
  CDR3 for alpha chain variable domain of TCR clone 223434 (TRAV1-1, TRAJ27)
CAVIDNTNAGKSTF

SEQ ID NO: 446868 - protein, 14 aa, Homo sapiens
  CDR3 for beta chain variable domain of TCR clone 223434 (TRBV25-1, TRBJ1-1)
CASTHLGGNTEAFF

SEQ ID NO: 446869 - protein, 14 aa, Homo sapiens
  CDR3 for alpha chain variable domain of TCR clone 223435 (TRAV12-2, TRAJ53)
GAVKGGGSNYKLTF

SEQ ID NO: 446870 - protein, 14 aa, Homo sapiens
  CDR3 for beta chain variable domain of TCR clone 223435 (TRBV7-7, TRBJ2-2)
CATRQDSDTGELFF

SEQ ID NO: 446871 - protein, 11 aa, Homo sapiens
  CDR3 for alpha chain variable domain of TCR clone 223436 (TRAV12-1, TRAJ30)
WVVNGQDKIIF

SEQ ID NO: 446872 - protein, 15 aa, Homo sapiens
  CDR3 for beta chain variable domain of TCR clone 223436 (TRBV28, TRBJ2-5)
CASSSGRTIQETQYF

SEQ ID NO: 446873 - protein, 14 aa, Homo sapiens
  CDR3 for alpha chain variable domain of TCR clone 223437 (TRAV29/DV5, TRAJ47)
CAASSIEYGNKLDF

SEQ ID NO: 446874 - protein, 15 aa, Homo sapiens
  CDR3 for beta chain variable domain of TCR clone 223437 (TRBV19, TRBJ1-2)
CASSVGQVLNYGYTF

SEQ ID NO: 446875 - protein, 15 aa, Homo sapiens
  CDR3 for alpha chain variable domain of TCR clone 223438 (TRAV1-2, TRAJ35)
CAVRDPGGFGNVLHC

SEQ ID NO: 446876 - protein, 14 aa, Homo sapiens
  CDR3 for beta chain variable domain of TCR clone 223438 (TRBV5-1, TRBJ2-1)
CASSLDDMFDEQFF

SEQ ID NO: 446877 - protein, 19 aa, Homo sapiens
  CDR3 for alpha chain variable domain of TCR clone 223439 (TRAV8-4, TRAJ3)
CAVTGETLVQQCFPDNLWI

SEQ ID NO: 446878 - protein, 16 aa, Homo sapiens
  CDR3 for beta chain variable domain of TCR clone 223439 (TRBV4-2, TRBJ1-1)
CASSQAGFGMNTEAFF

SEQ ID NO: 446879 - protein, 15 aa, Homo sapiens
  CDR3 for alpha chain variable domain of TCR clone 223440 (TRAV2, TRAJ20)
CAVDLRGSNDYKLSF

SEQ ID NO: 446880 - protein, 15 aa, Homo sapiens
  CDR3 for beta chain variable domain of TCR clone 223440 (TRBV27, TRBJ2-1)
CASSNGGGSSNEQFF

SEQ ID NO: 446881 - protein, 15 aa, Homo sapiens
  CDR3 for alpha chain variable domain of TCR clone 223441 (TRAV23/DV6, TRAJ18)
CAARYRGSTLGRLYF

SEQ ID NO: 446882 - protein, 15 aa, Homo sapiens
  CDR3 for beta chain variable domain of TCR clone 223441 (TRBV13, TRBJ1-5)
CASSFGQGGVQPQHF

SEQ ID NO: 446883 - protein, 15 aa, Homo sapiens
  CDR3 for alpha chain variable domain of TCR clone 223442 (TRAV12-3, TRAJ5)
CALSGLGTGRRALTF

SEQ ID NO: 446884 - protein, 15 aa, Homo sapiens
  CDR3 for beta chain variable domain of TCR clone 223442 (TRBV19, TRBJ1-1)
CASTSGQIQNTEAFF

SEQ ID NO: 446885 - protein, 15 aa, Homo sapiens
  CDR3 for alpha chain variable domain of TCR clone 223443 (TRAV4, TRAJ39)
CLVGPNNNAGNMLTF

SEQ ID NO: 446886 - protein, 16 aa, Homo sapiens
  CDR3 for beta chain variable domain of TCR clone 223443 (TRBV4-1, TRBJ2-7)
CASSQEWTSGPLEQYF

SEQ ID NO: 446887 - protein, 14 aa, Homo sapiens
  CDR3 for alpha chain variable domain of TCR clone 223444 (TRAV1-2, TRAJ16)
CAVNRFSDGQNLLF

SEQ ID NO: 446888 - protein, 14 aa, Homo sapiens
  CDR3 for beta chain variable domain of TCR clone 223444 (TRBV19, TRBJ2-1)
CASPTFVLSGEQFF

SEQ ID NO: 446889 - protein, 15 aa, Homo sapiens
  CDR3 for alpha chain variable domain of TCR clone 223445 (TRAV12-3, TRAJ9)
CAMSPRNTGGFKTIF

SEQ ID NO: 446890 - protein, 18 aa, Homo sapiens
  CDR3 for beta chain variable domain of TCR clone 223445 (TRBV11-2, TRBJ2-3)
CASSLGGASRGAPNTQYF

SEQ ID NO: 446891 - protein, 10 aa, Homo sapiens
  CDR3 for alpha chain variable domain of TCR clone 223446 (TRAV20, TRAJ22)
CAAPARQLTF

SEQ ID NO: 446892 - protein, 17 aa, Homo sapiens
  CDR3 for beta chain variable domain of TCR clone 223446 (TRBV19, TRBJ1-1)
CASSRGGQALLNTEAFF

SEQ ID NO: 446893 - protein, 13 aa, Homo sapiens
  CDR3 for alpha chain variable domain of TCR clone 223447 (TRAV1-2, TRAJ9)
CAALNAGGFKTIF

SEQ ID NO: 446894 - protein, 13 aa, Homo sapiens
  CDR3 for beta chain variable domain of TCR clone 223447 (TRBV19, TRBJ1-2)
CASSVPGQDGDTF

SEQ ID NO: 446895 - protein, 17 aa, Homo sapiens
  CDR3 for alpha chain variable domain of TCR clone 223448 (TRAV17, TRAJ7)
CATLGRLAFGKGNQVVV

SEQ ID NO: 446896 - protein, 12 aa, Homo sapiens
  CDR3 for beta chain variable domain of TCR clone 223448 (TRBV7-8, TRBJ2-7)
CASSLGDREQYF

SEQ ID NO: 446897 - protein, 13 aa, Homo sapiens
  CDR3 for alpha chain variable domain of TCR clone 223449 (TRAV12-3, TRAJ48)
CAMSLVGNEKLTF

SEQ ID NO: 446898 - protein, 18 aa, Homo sapiens
  CDR3 for beta chain variable domain of TCR clone 223449 (TRBV25-1, TRBJ1-2)
CASSGLQNGQGLIFGYTF

SEQ ID NO: 446899 - protein, 13 aa, Homo sapiens
  CDR3 for alpha chain variable domain of TCR clone 223450 (TRAV13-1, TRAJ39)
CAASIWADNMLTF

SEQ ID NO: 446900 - protein, 15 aa, Homo sapiens
  CDR3 for beta chain variable domain of TCR clone 223450 (TRBV7-9, TRBJ1-1)
CASSLLEQGGTEASF

SEQ ID NO: 446901 - protein, 22 aa, Homo sapiens
  CDR3 for alpha chain variable domain of TCR clone 223451 (TRAV27, TRAJ41)
CAVRTQIPDIQNPDPAVYQLRD

SEQ ID NO: 446902 - protein, 16 aa, Homo sapiens
  CDR3 for beta chain variable domain of TCR clone 223451 (TRBV5-1, TRBJ2-3)
CACSLGLAVYTDTQYF

SEQ ID NO: 446903 - protein, 13 aa, Homo sapiens
  CDR3 for alpha chain variable domain of TCR clone 223452 (TRAV12-2, TRAJ20)
CAVNRFDDYKLSF

SEQ ID NO: 446904 - protein, 11 aa, Homo sapiens
  CDR3 for beta chain variable domain of TCR clone 223452 (TRBV28, TRBJ2-3)
CSSLYRDTQYF

SEQ ID NO: 446905 - protein, 15 aa, Homo sapiens
  CDR3 for alpha chain variable domain of TCR clone 223453 (TRAV26-1, TRAJ29)
CIVRAEGSGNTPLVF

SEQ ID NO: 446906 - protein, 15 aa, Homo sapiens
  CDR3 for beta chain variable domain of TCR clone 223453 (TRBV28, TRBJ1-3)
CASSMGWASGNTIYF

SEQ ID NO: 446907 - protein, 17 aa, Homo sapiens
  CDR3 for alpha chain variable domain of TCR clone 223454 (TRAV3, TRAJ6)
CAVRDGPRAGGSYIPTI

SEQ ID NO: 446908 - protein, 14 aa, Homo sapiens
  CDR3 for beta chain variable domain of TCR clone 223454 (TRBV7-3, TRBJ2-1)
CASSTSGGWDEQFF

SEQ ID NO: 446909 - protein, 12 aa, Homo sapiens
  CDR3 for alpha chain variable domain of TCR clone 223455 (TRAV17, TRAJ43)
CATDAFPADIRF

SEQ ID NO: 446910 - protein, 14 aa, Homo sapiens
  CDR3 for beta chain variable domain of TCR clone 223455 (TRBV20-1, TRBJ2-3)
CSARDGGRTDTQYF

SEQ ID NO: 446911 - protein, 14 aa, Homo sapiens
  CDR3 for alpha chain variable domain of TCR clone 223456 (TRAV12-3, TRAJ10)
SHLPLTGGGNKLTF

SEQ ID NO: 446912 - protein, 13 aa, Homo sapiens
  CDR3 for beta chain variable domain of TCR clone 223456 (TRBV20-1, TRBJ2-2)
CSALSGGAGELFF

SEQ ID NO: 446913 - protein, 15 aa, Homo sapiens
  CDR3 for alpha chain variable domain of TCR clone 223457 (TRAV12-3, TRAJ49)
CEMAVTPNTGNQFYF

SEQ ID NO: 446914 - protein, 18 aa, Homo sapiens
  CDR3 for beta chain variable domain of TCR clone 223457 (TRBV4-1, TRBJ1-5)
CASSQDPRGQGLNQPQHF

SEQ ID NO: 446915 - protein, 14 aa, Homo sapiens
  CDR3 for alpha chain variable domain of TCR clone 223458 (TRAV38-1, TRAJ45)
CAYHSGGGADGLTF

SEQ ID NO: 446916 - protein, 13 aa, Homo sapiens
  CDR3 for beta chain variable domain of TCR clone 223458 (TRBV10-3, TRBJ1-2)
CAISERDSYGYTF

SEQ ID NO: 446917 - protein, 16 aa, Homo sapiens
  CDR3 for alpha chain variable domain of TCR clone 223459 (TRAV30, TRAJ24)
CGTAIVDADSWGKFQF

SEQ ID NO: 446918 - protein, 12 aa, Homo sapiens
  CDR3 for beta chain variable domain of TCR clone 223459 (TRBV11-2, TRBJ2-2)
CASSLPTGELFL

SEQ ID NO: 446919 - protein, 13 aa, Homo sapiens
  CDR3 for alpha chain variable domain of TCR clone 223460 (TRAV8-6, TRAJ43)
CAVPGSRNNEMRF

SEQ ID NO: 446920 - protein, 15 aa, Homo sapiens
  CDR3 for beta chain variable domain of TCR clone 223460 (TRBV6-6, TRBJ2-4)
CASSHMGSGKNIQYF

SEQ ID NO: 446921 - protein, 15 aa, Homo sapiens
  CDR3 for alpha chain variable domain of TCR clone 223461 (TRAV26-2, TRAJ13)
CILRDLSGGYQKVTF

SEQ ID NO: 446922 - protein, 14 aa, Homo sapiens
  CDR3 for beta chain variable domain of TCR clone 223461 (TRBV4-1, TRBJ2-3)
GASSQEGSTDTQYF

SEQ ID NO: 446923 - protein, 13 aa, Homo sapiens
  CDR3 for alpha chain variable domain of TCR clone 223462 (TRAV8-2, TRAJ15)
CVVSGPGRNCSDL

SEQ ID NO: 446924 - protein, 15 aa, Homo sapiens
  CDR3 for beta chain variable domain of TCR clone 223462 (TRBV20-1, TRBJ2-7)
CSARDRVSGMDEQYF

SEQ ID NO: 446925 - protein, 16 aa, Homo sapiens
  CDR3 for alpha chain variable domain of TCR clone 223463 (TRAV3, TRAJ10)
CAVRDMRAGGGDKLTF

SEQ ID NO: 446926 - protein, 15 aa, Homo sapiens
  CDR3 for beta chain variable domain of TCR clone 223463 (TRBV5-1, TRBJ2-1)
CASSPPRAPYNEQFF

SEQ ID NO: 446927 - protein, 13 aa, Homo sapiens
  CDR3 for alpha chain variable domain of TCR clone 223464 (TRAV12-3, TRAJ9)
CAMRNTGGFKTIF

SEQ ID NO: 446928 - protein, 14 aa, Homo sapiens
  CDR3 for beta chain variable domain of TCR clone 223464 (TRBV11-2, TRBJ2-7)
CTSSSTGEGYEQYF

SEQ ID NO: 446929 - protein, 13 aa, Homo sapiens
  CDR3 for alpha chain variable domain of TCR clone 223465 (TRAV12-1, TRAJ6)
CVVTPGGSYIPTF

SEQ ID NO: 446930 - protein, 16 aa, Homo sapiens
  CDR3 for beta chain variable domain of TCR clone 223465 (TRBV7-3, TRBJ2-1)
CASSLVSGSSNNEQFF

SEQ ID NO: 446931 - protein, 17 aa, Homo sapiens
  CDR3 for alpha chain variable domain of TCR clone 223466 (TRAV3, TRAJ42)
CAVRDRDYGGSQGNRIF

SEQ ID NO: 446932 - protein, 15 aa, Homo sapiens
  CDR3 for beta chain variable domain of TCR clone 223466 (TRBV6-6, TRBJ2-7)
CASSYSYGGSCEQYF

SEQ ID NO: 446933 - protein, 13 aa, Homo sapiens
  CDR3 for alpha chain variable domain of TCR clone 223467 (TRAV8-4, TRAJ42)
CAVKEVSQGNLIF

SEQ ID NO: 446934 - protein, 15 aa, Homo sapiens
  CDR3 for beta chain variable domain of TCR clone 223467 (TRBV7-2, TRBJ2-1)
CASSSGLAGGNEQFF

SEQ ID NO: 446935 - protein, 15 aa, Homo sapiens
  CDR3 for alpha chain variable domain of TCR clone 223468 (TRAV8-3, TRAJ45)
CASSYSGGGADGLTF

SEQ ID NO: 446936 - protein, 16 aa, Homo sapiens
  CDR3 for beta chain variable domain of TCR clone 223468 (TRBV20-1, TRBJ2-2)
SSASASGIPGAGELFF

SEQ ID NO: 446937 - protein, 12 aa, Homo sapiens
  CDR3 for alpha chain variable domain of TCR clone 223469 (TRAV3, TRAJ43)
CAVRDPNNDMRF

SEQ ID NO: 446938 - protein, 15 aa, Homo sapiens
  CDR3 for beta chain variable domain of TCR clone 223469 (TRBV27, TRBJ1-5)
CASSLGTGFDQDQHF

SEQ ID NO: 446939 - protein, 15 aa, Homo sapiens
  CDR3 for alpha chain variable domain of TCR clone 223470 (TRAV25, TRAJ52)
CAGRPGGTSYGKLKF

SEQ ID NO: 446940 - protein, 12 aa, Homo sapiens
  CDR3 for beta chain variable domain of TCR clone 223470 (TRBV7-8, TRBJ2-7)
CASSLGDREQYF

SEQ ID NO: 446941 - protein, 15 aa, Homo sapiens
  CDR3 for alpha chain variable domain of TCR clone 223471 (TRAV3, TRAJ40)
CAVRDGPGGTYKYSF

SEQ ID NO: 446942 - protein, 16 aa, Homo sapiens
  CDR3 for beta chain variable domain of TCR clone 223471 (TRBV5-1, TRBJ1-1)
CASSSGGNSLNTEAFF

SEQ ID NO: 446943 - protein, 13 aa, Homo sapiens
  CDR3 for alpha chain variable domain of TCR clone 223472 (TRAV13-1, TRAJ5)
CAARVTGMKALTF

SEQ ID NO: 446944 - protein, 15 aa, Homo sapiens
  CDR3 for beta chain variable domain of TCR clone 223472 (TRBV7-9, TRBJ2-7)
CASSPGGGLTYEQYF

SEQ ID NO: 446945 - protein, 12 aa, Homo sapiens
  CDR3 for alpha chain variable domain of TCR clone 223473 (TRAV13-1, TRAJ21)
CAAKEGFNKFYF

SEQ ID NO: 446946 - protein, 14 aa, Homo sapiens
  CDR3 for beta chain variable domain of TCR clone 223473 (TRBV5-4, TRBJ1-1)
CASSLDSQRDEAFF

SEQ ID NO: 446947 - protein, 15 aa, Homo sapiens
  CDR3 for alpha chain variable domain of TCR clone 223474 (TRAV16, TRAJ17)
CALSQIKAAGNKLTF

SEQ ID NO: 446948 - protein, 14 aa, Homo sapiens
  CDR3 for beta chain variable domain of TCR clone 223474 (TRBV6-1, TRBJ1-3)
CASVQGGGGNTIYF

SEQ ID NO: 446949 - protein, 12 aa, Homo sapiens
  CDR3 for alpha chain variable domain of TCR clone 223475 (TRAV8-6, TRAJ43)
CAVSNNNNDMRF

SEQ ID NO: 446950 - protein, 14 aa, Homo sapiens
  CDR3 for beta chain variable domain of TCR clone 223475 (TRBV2, TRBJ2-1)
CASSEARQGVSEFF

SEQ ID NO: 446951 - protein, 16 aa, Homo sapiens
  CDR3 for alpha chain variable domain of TCR clone 223476 (TRAV30, TRAJ24)
CGTEIVDADSWGKFQF

SEQ ID NO: 446952 - protein, 19 aa, Homo sapiens
  CDR3 for beta chain variable domain of TCR clone 223476 (TRBV25-1, TRBJ2-2)
CAILVYRVDTGRKTGELFF

SEQ ID NO: 446953 - protein, 14 aa, Homo sapiens
  CDR3 for alpha chain variable domain of TCR clone 223477 (TRAV12-3, TRAJ10)
SHLPLTGGGNKLTF

SEQ ID NO: 446954 - protein, 14 aa, Homo sapiens
  CDR3 for beta chain variable domain of TCR clone 223477 (TRBV20-1, TRBJ1-3)
CSASPTGAGNTIYF

SEQ ID NO: 446955 - protein, 12 aa, Homo sapiens
  CDR3 for alpha chain variable domain of TCR clone 223478 (TRAV13-2, TRAJ37)
CAEKGNTGKLIF

SEQ ID NO: 446956 - protein, 17 aa, Homo sapiens
  CDR3 for beta chain variable domain of TCR clone 223478 (TRBV11-2, TRBJ2-1)
CASSLYPPGVEYNEQFF

SEQ ID NO: 446957 - protein, 13 aa, Homo sapiens
  CDR3 for alpha chain variable domain of TCR clone 223479 (TRAV12-3, TRAJ33)
CAMSVNSNYQLIW

SEQ ID NO: 446958 - protein, 13 aa, Homo sapiens
  CDR3 for beta chain variable domain of TCR clone 223479 (TRBV7-2, TRBJ2-2)
CASSSAVTGELFF

SEQ ID NO: 446959 - protein, 13 aa, Homo sapiens
  CDR3 for alpha chain variable domain of TCR clone 223480 (TRAV12-3, TRAJ13)
CAMSSGGYQKVTF

SEQ ID NO: 446960 - protein, 13 aa, Homo sapiens
  CDR3 for beta chain variable domain of TCR clone 223480 (TRBV20-1, TRBJ1-1)
CSAPPGGHTEDLF

SEQ ID NO: 446961 - protein, 11 aa, Homo sapiens
  CDR3 for alpha chain variable domain of TCR clone 223481 (TRAV1-2, TRAJ8)
CAVSSFQKLVF

SEQ ID NO: 446962 - protein, 14 aa, Homo sapiens
  CDR3 for beta chain variable domain of TCR clone 223481 (TRBV7-2, TRBJ2-7)
CASSLYPGRYEQYF

SEQ ID NO: 446963 - protein, 14 aa, Homo sapiens
  CDR3 for alpha chain variable domain of TCR clone 223482 (TRAV12-2, TRAJ13)
CAVKKTGGYHKVTF

SEQ ID NO: 446964 - protein, 14 aa, Homo sapiens
  CDR3 for beta chain variable domain of TCR clone 223482 (TRBV4-1, TRBJ2-7)
CASIPSREGFEQYF

SEQ ID NO: 446965 - protein, 12 aa, Homo sapiens
  CDR3 for alpha chain variable domain of TCR clone 223483 (TRAV12-3, TRAJ17)
CAMTLTGNKLTF

SEQ ID NO: 446966 - protein, 15 aa, Homo sapiens
  CDR3 for beta chain variable domain of TCR clone 223483 (TRBV6-3, TRBJ2-3)
RLIHYSVGQADTQYF

SEQ ID NO: 446967 - protein, 11 aa, Homo sapiens
  CDR3 for alpha chain variable domain of TCR clone 223484 (TRAV12-2, TRAJ31)
CAILNNARLMF

SEQ ID NO: 446968 - protein, 16 aa, Homo sapiens
  CDR3 for beta chain variable domain of TCR clone 223484 (TRBV13, TRBJ2-2)
CVSSPRTGEHTGELFF

SEQ ID NO: 446969 - protein, 15 aa, Homo sapiens
  CDR3 for alpha chain variable domain of TCR clone 223485 (TRAV17, TRAJ57)
CATGPSQGGSEKLVF

SEQ ID NO: 446970 - protein, 13 aa, Homo sapiens
  CDR3 for beta chain variable domain of TCR clone 223485 (TRBV7-9, TRBJ2-4)
CATEGLAGNIQYF

SEQ ID NO: 446971 - protein, 15 aa, Homo sapiens
  CDR3 for alpha chain variable domain of TCR clone 223486 (TRAV26-1, TRAJ39)
CIVRDGSNAGNMLTF

SEQ ID NO: 446972 - protein, 14 aa, Homo sapiens
  CDR3 for beta chain variable domain of TCR clone 223486 (TRBV10-3, TRBJ1-2)
RAIRAGTGDYGYTF

SEQ ID NO: 446973 - protein, 14 aa, Homo sapiens
  CDR3 for alpha chain variable domain of TCR clone 223487 (TRAV12-1, TRAJ23)
CVVNIGNQGGKLIF

SEQ ID NO: 446974 - protein, 13 aa, Homo sapiens
  CDR3 for beta chain variable domain of TCR clone 223487 (TRBV29-1, TRBJ1-3)
CSVEGGSGNTIYF

SEQ ID NO: 446975 - protein, 16 aa, Homo sapiens
  CDR3 for alpha chain variable domain of TCR clone 223488 (TRAV13-1, TRAJ10)
CAESSHFTGGGNKLTF

SEQ ID NO: 446976 - protein, 15 aa, Homo sapiens
  CDR3 for beta chain variable domain of TCR clone 223488 (TRBV7-9, TRBJ1-6)
CASSSPGRGNSPLHF

SEQ ID NO: 446977 - protein, 12 aa, Homo sapiens
  CDR3 for alpha chain variable domain of TCR clone 223489 (TRAV3, TRAJ31)
CAVRDGNARLMF

SEQ ID NO: 446978 - protein, 18 aa, Homo sapiens
  CDR3 for beta chain variable domain of TCR clone 223489 (TRBV7-2, TRBJ2-3)
CASSLKREGSGMTDTQYF

SEQ ID NO: 446979 - protein, 14 aa, Homo sapiens
  CDR3 for alpha chain variable domain of TCR clone 223490 (TRAV13-1, TRAJ21)
CEQRKASTNFTLDL

SEQ ID NO: 446980 - protein, 14 aa, Homo sapiens
  CDR3 for beta chain variable domain of TCR clone 223490 (TRBV23-1, TRBJ2-5)
CASSFLRSQETQYF

SEQ ID NO: 446981 - protein, 14 aa, Homo sapiens
  CDR3 for alpha chain variable domain of TCR clone 223491 (TRAV12-1, TRAJ30)
GVVRGMNRDDKIIF

SEQ ID NO: 446982 - protein, 14 aa, Homo sapiens
  CDR3 for beta chain variable domain of TCR clone 223491 (TRBV7-2, TRBJ2-1)
CASSLTSGNRRQFF

SEQ ID NO: 446983 - protein, 13 aa, Homo sapiens
  CDR3 for alpha chain variable domain of TCR clone 223492 (TRAV13-1, TRAJ21)
CAASIYNFNKFYF

SEQ ID NO: 446984 - protein, 14 aa, Homo sapiens
  CDR3 for beta chain variable domain of TCR clone 223492 (TRBV5-1, TRBJ2-2)
CASSLIWIPGELFF

SEQ ID NO: 446985 - protein, 11 aa, Homo sapiens
  CDR3 for alpha chain variable domain of TCR clone 223493 (TRAV21, TRAJ11)
CAVNGYSTLTF

SEQ ID NO: 446986 - protein, 13 aa, Homo sapiens
  CDR3 for beta chain variable domain of TCR clone 223493 (TRBV4-1, TRBJ1-1)
CASSRKMNTEAFF

SEQ ID NO: 446987 - protein, 13 aa, Homo sapiens
  CDR3 for alpha chain variable domain of TCR clone 223494 (TRAV1-2, TRAJ20)
CAVRDGNDYKLSF

SEQ ID NO: 446988 - protein, 16 aa, Homo sapiens
  CDR3 for beta chain variable domain of TCR clone 223494 (TRBV11-2, TRBJ2-5)
CASSGQGYSPQETQYF

SEQ ID NO: 446989 - protein, 13 aa, Homo sapiens
  CDR3 for alpha chain variable domain of TCR clone 223495 (TRAV26-1, TRAJ33)
CIVRVEGNYQLIC

SEQ ID NO: 446990 - protein, 13 aa, Homo sapiens
  CDR3 for beta chain variable domain of TCR clone 223495 (TRBV6-3, TRBJ2-7)
CARTWGSSYEQYF

SEQ ID NO: 446991 - protein, 14 aa, Homo sapiens
  CDR3 for alpha chain variable domain of TCR clone 223496 (TRAV26-1, TRAJ38)
CIADNAGNNRKLIW

SEQ ID NO: 446992 - protein, 15 aa, Homo sapiens
  CDR3 for beta chain variable domain of TCR clone 223496 (TRBV10-3, TRBJ2-2)
CAISEGDRAAGELFF

SEQ ID NO: 446993 - protein, 11 aa, Homo sapiens
  CDR3 for alpha chain variable domain of TCR clone 223497 (TRAV1-2, TRAJ20)
CAVANDYKLSF

SEQ ID NO: 446994 - protein, 18 aa, Homo sapiens
  CDR3 for beta chain variable domain of TCR clone 223497 (TRBV20-1, TRBJ2-6)
CSAETTPTHGSGANVLTF

SEQ ID NO: 446995 - protein, 17 aa, Homo sapiens
  CDR3 for alpha chain variable domain of TCR clone 223498 (TRAV12-3, TRAJ18)
CAMIRADKGSTLGRLYF

SEQ ID NO: 446996 - protein, 14 aa, Homo sapiens
  CDR3 for beta chain variable domain of TCR clone 223498 (TRBV5-7, TRBJ1-6)
CASTPWPADSPLHF

SEQ ID NO: 446997 - protein, 12 aa, Homo sapiens
  CDR3 for alpha chain variable domain of TCR clone 223499 (TRAV12-2, TRAJ31)
CAVNTPDARLMF

SEQ ID NO: 446998 - protein, 12 aa, Homo sapiens
  CDR3 for beta chain variable domain of TCR clone 223499 (TRBV7-8, TRBJ2-7)
CANSLGDREQYF

SEQ ID NO: 446999 - protein, 14 aa, Homo sapiens
  CDR3 for alpha chain variable domain of TCR clone 223500 (TRAV9-2, TRAJ36)
CALPWRTGANNLFF

SEQ ID NO: 447000 - protein, 14 aa, Homo sapiens
  CDR3 for beta chain variable domain of TCR clone 223500 (TRBV2, TRBJ1-2)
CASSELQVNYRYTF

SEQ ID NO: 447001 - protein, 15 aa, Homo sapiens
  CDR3 for alpha chain variable domain of TCR clone 223501 (TRAV26-1, TRAJ29)
CIVRVEGSGNRPLVF

SEQ ID NO: 447002 - protein, 15 aa, Homo sapiens
  CDR3 for beta chain variable domain of TCR clone 223501 (TRBV7-9, TRBJ1-5)
CASSQGHQPNQPQHF

SEQ ID NO: 447003 - protein, 14 aa, Homo sapiens
  CDR3 for alpha chain variable domain of TCR clone 223502 (TRAV26-1, TRAJ6)
CIVNKSGGSYIPTF

SEQ ID NO: 447004 - protein, 14 aa, Homo sapiens
  CDR3 for beta chain variable domain of TCR clone 223502 (TRBV19, TRBJ2-1)
CASPTFVLSGEQFF

SEQ ID NO: 447005 - protein, 14 aa, Homo sapiens
  CDR3 for alpha chain variable domain of TCR clone 223503 (TRAV12-2, TRAJ40)
CAVKIPSGTYKYIF

SEQ ID NO: 447006 - protein, 14 aa, Homo sapiens
  CDR3 for beta chain variable domain of TCR clone 223503 (TRBV18, TRBJ2-7)
CASSLDRAAYEQYF

SEQ ID NO: 447007 - protein, 16 aa, Homo sapiens
  CDR3 for alpha chain variable domain of TCR clone 223504 (TRAV4, TRAJ5)
CLVGPDHGHGQESTYF

SEQ ID NO: 447008 - protein, 13 aa, Homo sapiens
  CDR3 for beta chain variable domain of TCR clone 223504 (TRBV4-2, TRBJ1-2)
CASSLSASGGDTF

SEQ ID NO: 447009 - protein, 14 aa, Homo sapiens
  CDR3 for alpha chain variable domain of TCR clone 223505 (TRAV23/DV6, TRAJ8)
CAASKATGCQKLVF

SEQ ID NO: 447010 - protein, 15 aa, Homo sapiens
  CDR3 for beta chain variable domain of TCR clone 223505 (TRBV28, TRBJ2-3)
CASSPDRQGANTQYF

SEQ ID NO: 447011 - protein, 14 aa, Homo sapiens
  CDR3 for alpha chain variable domain of TCR clone 223506 (TRAV23/DV6, TRAJ40)
CAASLTSGTYKYIF

SEQ ID NO: 447012 - protein, 15 aa, Homo sapiens
  CDR3 for beta chain variable domain of TCR clone 223506 (TRBV5-1, TRBJ2-1)
CASSPPRAPYNEQFF

SEQ ID NO: 447013 - protein, 13 aa, Homo sapiens
  CDR3 for alpha chain variable domain of TCR clone 223507 (TRAV27, TRAJ57)
CRSAQGGSEKLAF

SEQ ID NO: 447014 - protein, 13 aa, Homo sapiens
  CDR3 for beta chain variable domain of TCR clone 223507 (TRBV7-3, TRBJ1-1)
CASSQDWGAEAFF

SEQ ID NO: 447015 - protein, 13 aa, Homo sapiens
  CDR3 for alpha chain variable domain of TCR clone 223508 (TRAV1-2, TRAJ9)
CAALNTGGFKTIF

SEQ ID NO: 447016 - protein, 13 aa, Homo sapiens
  CDR3 for beta chain variable domain of TCR clone 223508 (TRBV28, TRBJ2-1)
CASRSGGLNEQFF

SEQ ID NO: 447017 - protein, 16 aa, Homo sapiens
  CDR3 for alpha chain variable domain of TCR clone 223509 (TRAV3, TRAJ37)
CAVRLHGSGNTGKLIF

SEQ ID NO: 447018 - protein, 11 aa, Homo sapiens
  CDR3 for beta chain variable domain of TCR clone 223509 (TRBV10-3, TRBJ2-7)
CAISEGLEQYF

SEQ ID NO: 447019 - protein, 13 aa, Homo sapiens
  CDR3 for alpha chain variable domain of TCR clone 223510 (TRAV12-3, TRAJ9)
CAMRNTGGFKTIF

SEQ ID NO: 447020 - protein, 12 aa, Homo sapiens
  CDR3 for beta chain variable domain of TCR clone 223510 (TRBV11-2, TRBJ2-5)
CASSLGQETQYF

SEQ ID NO: 447021 - protein, 15 aa, Homo sapiens
  CDR3 for alpha chain variable domain of TCR clone 223511 (TRAV8-3, TRAJ45)
CTSSYSGGGADGLTF

SEQ ID NO: 447022 - protein, 17 aa, Homo sapiens
  CDR3 for beta chain variable domain of TCR clone 223511 (TRBV7-8, TRBJ1-2)
CASSLRPLQGHLYGYTF

SEQ ID NO: 447023 - protein, 16 aa, Homo sapiens
  CDR3 for alpha chain variable domain of TCR clone 223512 (TRAV23/DV6, TRAJ52)
CAARTSGGTSYGKLTF

SEQ ID NO: 447024 - protein, 13 aa, Homo sapiens
  CDR3 for beta chain variable domain of TCR clone 223512 (TRBV7-9, TRBJ1-1)
CASSLSGETEAFF

SEQ ID NO: 447025 - protein, 15 aa, Homo sapiens
  CDR3 for alpha chain variable domain of TCR clone 223513 (TRAV25, TRAJ53)
CPTSNRGGRNYKLTF

SEQ ID NO: 447026 - protein, 14 aa, Homo sapiens
  CDR3 for beta chain variable domain of TCR clone 223513 (TRBV11-2, TRBJ2-3)
CASSRLARTDTQYF

SEQ ID NO: 447027 - protein, 11 aa, Homo sapiens
  CDR3 for alpha chain variable domain of TCR clone 223514 (TRAV12-3, TRAJ27)
CAMANAGKSTF

SEQ ID NO: 447028 - protein, 15 aa, Homo sapiens
  CDR3 for beta chain variable domain of TCR clone 223514 (TRBV18, TRBJ1-4)
CASSPTTAYNEKLFF

SEQ ID NO: 447029 - protein, 17 aa, Homo sapiens
  CDR3 for alpha chain variable domain of TCR clone 223515 (TRAV13-1, TRAJ31)
CAPRDRLMFGDGTQLEV

SEQ ID NO: 447030 - protein, 12 aa, Homo sapiens
  CDR3 for beta chain variable domain of TCR clone 223515 (TRBV7-9, TRBJ2-7)
CASSVEGYEQYF

SEQ ID NO: 447031 - protein, 14 aa, Homo sapiens
  CDR3 for alpha chain variable domain of TCR clone 223516 (TRAV1-2, TRAJ8)
CAVREDTGFQKLVF

SEQ ID NO: 447032 - protein, 12 aa, Homo sapiens
  CDR3 for beta chain variable domain of TCR clone 223516 (TRBV29-1, TRBJ2-3)
CSVTGGADTQYF

SEQ ID NO: 447033 - protein, 11 aa, Homo sapiens
  CDR3 for alpha chain variable domain of TCR clone 223517 (TRAV29/DV5, TRAJ31)
CAASYRDRLMF

SEQ ID NO: 447034 - protein, 13 aa, Homo sapiens
  CDR3 for beta chain variable domain of TCR clone 223517 (TRBV3-1, TRBJ1-1)
CASSPGVITEAFF

SEQ ID NO: 447035 - protein, 13 aa, Homo sapiens
  CDR3 for alpha chain variable domain of TCR clone 223518 (TRAV23/DV6, TRAJ22)
CAPYSSSARHLTF

SEQ ID NO: 447036 - protein, 15 aa, Homo sapiens
  CDR3 for beta chain variable domain of TCR clone 223518 (TRBV10-2, TRBJ2-6)
CASSEQGTGANVLTF

SEQ ID NO: 447037 - protein, 13 aa, Homo sapiens
  CDR3 for alpha chain variable domain of TCR clone 223519 (TRAV20, TRAJ48)
CAVQGGGNEKLTF

SEQ ID NO: 447038 - protein, 18 aa, Homo sapiens
  CDR3 for beta chain variable domain of TCR clone 223519 (TRBV2, TRBJ2-2)
CQQSTGTSGGGNTGELFF

SEQ ID NO: 447039 - protein, 12 aa, Homo sapiens
  CDR3 for alpha chain variable domain of TCR clone 223520 (TRAV12-3, TRAJ17)
CAMALTGNKLTF

SEQ ID NO: 447040 - protein, 15 aa, Homo sapiens
  CDR3 for beta chain variable domain of TCR clone 223520 (TRBV20-1, TRBJ2-7)
CIARDRVSGMDEQYF

SEQ ID NO: 447041 - protein, 12 aa, Homo sapiens
  CDR3 for alpha chain variable domain of TCR clone 223521 (TRAV21, TRAJ58)
CAAETSGSRLTC

SEQ ID NO: 447042 - protein, 15 aa, Homo sapiens
  CDR3 for beta chain variable domain of TCR clone 223521 (TRBV20-1, TRBJ2-7)
CSARDPFKGEGEQYF

SEQ ID NO: 447043 - protein, 14 aa, Homo sapiens
  CDR3 for alpha chain variable domain of TCR clone 223522 (TRAV12-1, TRAJ3)
CVVNLGSSASKLIF

SEQ ID NO: 447044 - protein, 14 aa, Homo sapiens
  CDR3 for beta chain variable domain of TCR clone 223522 (TRBV20-1, TRBJ2-3)
CSARGGTSTDTQYF

SEQ ID NO: 447045 - protein, 16 aa, Homo sapiens
  CDR3 for alpha chain variable domain of TCR clone 223523 (TRAV3, TRAJ3)
CAVRDRAKSSASKIIF

SEQ ID NO: 447046 - protein, 16 aa, Homo sapiens
  CDR3 for beta chain variable domain of TCR clone 223523 (TRBV20-1, TRBJ2-4)
CSATSLAELAKNIQYV

SEQ ID NO: 447047 - protein, 12 aa, Homo sapiens
  CDR3 for alpha chain variable domain of TCR clone 223524 (TRAV1-2, TRAJ33)
CAALDSNYQLIW

SEQ ID NO: 447048 - protein, 16 aa, Homo sapiens
  CDR3 for beta chain variable domain of TCR clone 223524 (TRBV6-4, TRBJ1-2)
CASSEAVGDSNYGYTF

SEQ ID NO: 447049 - protein, 12 aa, Homo sapiens
  CDR3 for alpha chain variable domain of TCR clone 223525 (TRAV1-1, TRAJ24)
CAVRGSWGKFQF

SEQ ID NO: 447050 - protein, 13 aa, Homo sapiens
  CDR3 for beta chain variable domain of TCR clone 223525 (TRBV12-4, TRBJ1-1)
CASSPGTGFEAFF

SEQ ID NO: 447051 - protein, 14 aa, Homo sapiens
  CDR3 for alpha chain variable domain of TCR clone 223526 (TRAV6, TRAJ10)
CALDLTGGGNKLTF

SEQ ID NO: 447052 - protein, 14 aa, Homo sapiens
  CDR3 for beta chain variable domain of TCR clone 223526 (TRBV18, TRBJ2-7)
CASAPAGGPGEQYF

SEQ ID NO: 447053 - protein, 11 aa, Homo sapiens
  CDR3 for alpha chain variable domain of TCR clone 223527 (TRAV3, TRAJ21)
CAVGNFNKFYF

SEQ ID NO: 447054 - protein, 15 aa, Homo sapiens
  CDR3 for beta chain variable domain of TCR clone 223527 (TRBV11-2, TRBJ1-6)
CASSLDPWAVSPLHF

SEQ ID NO: 447055 - protein, 14 aa, Homo sapiens
  CDR3 for alpha chain variable domain of TCR clone 223528 (TRAV1-2, TRAJ16)
CAVNRFSDGQKLLF

SEQ ID NO: 447056 - protein, 14 aa, Homo sapiens
  CDR3 for beta chain variable domain of TCR clone 223528 (TRBV20-1, TRBJ2-4)
CSASGRVGENIRYF

SEQ ID NO: 447057 - protein, 16 aa, Homo sapiens
  CDR3 for alpha chain variable domain of TCR clone 223529 (TRAV3, TRAJ3)
CAVRDRAQSSASKIIF

SEQ ID NO: 447058 - protein, 13 aa, Homo sapiens
  CDR3 for beta chain variable domain of TCR clone 223529 (TRBV10-3, TRBJ2-7)
CASKLAVNYEQYF

SEQ ID NO: 447059 - protein, 16 aa, Homo sapiens
  CDR3 for alpha chain variable domain of TCR clone 223530 (TRAV8-4, TRAJ3)
CAVSDPGYSSASKIIF

SEQ ID NO: 447060 - protein, 13 aa, Homo sapiens
  CDR3 for beta chain variable domain of TCR clone 223530 (TRBV7-9, TRBJ1-2)
CASSLKQNYGYTF

SEQ ID NO: 447061 - protein, 13 aa, Homo sapiens
  CDR3 for alpha chain variable domain of TCR clone 223531 (TRAV12-3, TRAJ40)
CAMSARGTDKYIF

SEQ ID NO: 447062 - protein, 16 aa, Homo sapiens
  CDR3 for beta chain variable domain of TCR clone 223531 (TRBV20-1, TRBJ2-3)
CSGEARLAGGQDTQYF

SEQ ID NO: 447063 - protein, 15 aa, Homo sapiens
  CDR3 for alpha chain variable domain of TCR clone 223532 (TRAV9-2, TRAJ56)
CALSDVDGANSKLTF

SEQ ID NO: 447064 - protein, 16 aa, Homo sapiens
  CDR3 for beta chain variable domain of TCR clone 223532 (TRBV27, TRBJ2-2)
CASSFRVLVRTGELFF

SEQ ID NO: 447065 - protein, 16 aa, Homo sapiens
  CDR3 for alpha chain variable domain of TCR clone 223533 (TRAV12-3, TRAJ53)
CAMSPGSGGSKYKLTF

SEQ ID NO: 447066 - protein, 12 aa, Homo sapiens
  CDR3 for beta chain variable domain of TCR clone 223533 (TRBV7-8, TRBJ2-7)
CASSLGDREQYF

SEQ ID NO: 447067 - protein, 11 aa, Homo sapiens
  CDR3 for alpha chain variable domain of TCR clone 223534 (TRAV21, TRAJ31)
CAVRNNARLMF

SEQ ID NO: 447068 - protein, 17 aa, Homo sapiens
  CDR3 for beta chain variable domain of TCR clone 223534 (TRBV25-1, TRBJ2-7)
CASSDARVVFSSYEQYF

SEQ ID NO: 447069 - protein, 12 aa, Homo sapiens
  CDR3 for alpha chain variable domain of TCR clone 223535 (TRAV12-3, TRAJ17)
CAMTITGNKLTF

SEQ ID NO: 447070 - protein, 20 aa, Homo sapiens
  CDR3 for beta chain variable domain of TCR clone 223535 (TRBV19, TRBJ2-1)
CASSISRTVTSTRLNNEQFF

SEQ ID NO: 447071 - protein, 12 aa, Homo sapiens
  CDR3 for alpha chain variable domain of TCR clone 223536 (TRAV26-1, TRAJ23)
CIITPQGGKLIF

SEQ ID NO: 447072 - protein, 13 aa, Homo sapiens
  CDR3 for beta chain variable domain of TCR clone 223536 (TRBV6-6, TRBJ1-5)
CASSRGSNQPQHF

SEQ ID NO: 447073 - protein, 16 aa, Homo sapiens
  CDR3 for alpha chain variable domain of TCR clone 223537 (TRAV4, TRAJ18)
CCVLLIGGSTLGRLYF

SEQ ID NO: 447074 - protein, 12 aa, Homo sapiens
  CDR3 for beta chain variable domain of TCR clone 223537 (TRBV12-4, TRBJ2-7)
CASSLGGYEQYF

SEQ ID NO: 447075 - protein, 20 aa, Homo sapiens
  CDR3 for alpha chain variable domain of TCR clone 223538 (TRAV26-1, TRAJ42)
CCVLLHRQTYYGGSQGNLIF

SEQ ID NO: 447076 - protein, 16 aa, Homo sapiens
  CDR3 for beta chain variable domain of TCR clone 223538 (TRBV7-3, TRBJ2-2)
CPSSLKRGTLSGELFF

SEQ ID NO: 447077 - protein, 13 aa, Homo sapiens
  CDR3 for alpha chain variable domain of TCR clone 223539 (TRAV29/DV5, TRAJ31)
CAASRNNNARLMF

SEQ ID NO: 447078 - protein, 15 aa, Homo sapiens
  CDR3 for beta chain variable domain of TCR clone 223539 (TRBV28, TRBJ2-3)
CAPTFRDWSTDTQYF

SEQ ID NO: 447079 - protein, 14 aa, Homo sapiens
  CDR3 for alpha chain variable domain of TCR clone 223540 (TRAV3, TRAJ34)
CAVRAPGNTDKLIF

SEQ ID NO: 447080 - protein, 17 aa, Homo sapiens
  CDR3 for beta chain variable domain of TCR clone 223540 (TRBV20-1, TRBJ2-7)
SSAAPGLARGISYEQYF

SEQ ID NO: 447081 - protein, 15 aa, Homo sapiens
  CDR3 for alpha chain variable domain of TCR clone 223541 (TRAV21, TRAJ52)
CAVRGGGTCYGKLTF

SEQ ID NO: 447082 - protein, 15 aa, Homo sapiens
  CDR3 for beta chain variable domain of TCR clone 223541 (TRBV18, TRBJ1-5)
CASSPSDRSNQPQHF

SEQ ID NO: 447083 - protein, 12 aa, Homo sapiens
  CDR3 for alpha chain variable domain of TCR clone 223542 (TRAV38-2/DV8, TRAJ47)
CVLMEDGNKLVF

SEQ ID NO: 447084 - protein, 14 aa, Homo sapiens
  CDR3 for beta chain variable domain of TCR clone 223542 (TRBV20-1, TRBJ1-5)
CSATDRGSNQPQHF

SEQ ID NO: 447085 - protein, 14 aa, Homo sapiens
  CDR3 for alpha chain variable domain of TCR clone 223543 (TRAV8-3, TRAJ12)
CAVGARDSSYKLIF

SEQ ID NO: 447086 - protein, 15 aa, Homo sapiens
  CDR3 for beta chain variable domain of TCR clone 223543 (TRBV19, TRBJ1-1)
CASTSGQIQNTEAFF

SEQ ID NO: 447087 - protein, 14 aa, Homo sapiens
  CDR3 for alpha chain variable domain of TCR clone 223544 (TRAV1-1, TRAJ28)
CAAPSGAGSYQLTF

SEQ ID NO: 447088 - protein, 17 aa, Homo sapiens
  CDR3 for beta chain variable domain of TCR clone 223544 (TRBV25-1, TRBJ2-1)
CASSAYGQGRGVYEQFF

SEQ ID NO: 447089 - protein, 11 aa, Homo sapiens
  CDR3 for alpha chain variable domain of TCR clone 223545 (TRAV17, TRAJ49)
CATDAGNQVYF

SEQ ID NO: 447090 - protein, 16 aa, Homo sapiens
  CDR3 for beta chain variable domain of TCR clone 223545 (TRBV7-2, TRBJ1-2)
CASSPTSGTSLGGYTF

SEQ ID NO: 447091 - protein, 12 aa, Homo sapiens
  CDR3 for alpha chain variable domain of TCR clone 223546 (TRAV12-2, TRAJ4)
GWPEGGYNKLIF

SEQ ID NO: 447092 - protein, 16 aa, Homo sapiens
  CDR3 for beta chain variable domain of TCR clone 223546 (TRBV6-1, TRBJ2-5)
CASSETLNRGAETQYF

SEQ ID NO: 447093 - protein, 17 aa, Homo sapiens
  CDR3 for alpha chain variable domain of TCR clone 223547 (TRAV3, TRAJ6)
CAVRDGPRAGGSYIPPF

SEQ ID NO: 447094 - protein, 14 aa, Homo sapiens
  CDR3 for beta chain variable domain of TCR clone 223547 (TRBV7-2, TRBJ2-7)
CASIPKTSFYEQYF

SEQ ID NO: 447095 - protein, 11 aa, Homo sapiens
  CDR3 for alpha chain variable domain of TCR clone 223548 (TRAV3, TRAJ21)
CAVCNFNKFYF

SEQ ID NO: 447096 - protein, 16 aa, Homo sapiens
  CDR3 for beta chain variable domain of TCR clone 223548 (TRBV19, TRBJ2-1)
CAGSKAGPSSYNEQFF

SEQ ID NO: 447097 - protein, 11 aa, Homo sapiens
  CDR3 for alpha chain variable domain of TCR clone 223549 (TRAV2, TRAJ23)
CAVETRGKLIF

SEQ ID NO: 447098 - protein, 17 aa, Homo sapiens
  CDR3 for beta chain variable domain of TCR clone 223549 (TRBV20-1, TRBJ2-1)
SSASSSGLAGSYNEQFF

SEQ ID NO: 447099 - protein, 13 aa, Homo sapiens
  CDR3 for alpha chain variable domain of TCR clone 223550 (TRAV12-1, TRAJ6)
CVVFPGGSYIPTF

SEQ ID NO: 447100 - protein, 14 aa, Homo sapiens
  CDR3 for beta chain variable domain of TCR clone 223550 (TRBV7-3, TRBJ1-1)
CASSLGTGYTEASF

SEQ ID NO: 447101 - protein, 13 aa, Homo sapiens
  CDR3 for alpha chain variable domain of TCR clone 223551 (TRAV8-3, TRAJ28)
CAVGAAGSYQLTF

SEQ ID NO: 447102 - protein, 14 aa, Homo sapiens
  CDR3 for beta chain variable domain of TCR clone 223551 (TRBV7-3, TRBJ2-1)
CASSLAGGTNEQFF

SEQ ID NO: 447103 - protein, 16 aa, Homo sapiens
  CDR3 for alpha chain variable domain of TCR clone 223552 (TRAV8-3, TRAJ22)
CAVDLLGSGSARQLTF

SEQ ID NO: 447104 - protein, 14 aa, Homo sapiens
  CDR3 for beta chain variable domain of TCR clone 223552 (TRBV11-2, TRBJ2-7)
CASSLELEGYEQYF

SEQ ID NO: 447105 - protein, 15 aa, Homo sapiens
  CDR3 for alpha chain variable domain of TCR clone 223553 (TRAV8-3, TRAJ45)
CASSYSGGGADGLPF

SEQ ID NO: 447106 - protein, 15 aa, Homo sapiens
  CDR3 for beta chain variable domain of TCR clone 223553 (TRBV12-4, TRBJ2-1)
CASSLLATGNNEQFF

SEQ ID NO: 447107 - protein, 12 aa, Homo sapiens
  CDR3 for alpha chain variable domain of TCR clone 223554 (TRAV8-3, TRAJ20)
CAVDFNDYKLSF

SEQ ID NO: 447108 - protein, 14 aa, Homo sapiens
  CDR3 for beta chain variable domain of TCR clone 223554 (TRBV9, TRBJ2-7)
CASSVGVGSYEQYF

SEQ ID NO: 447109 - protein, 15 aa, Homo sapiens
  CDR3 for alpha chain variable domain of TCR clone 223555 (TRAV26-1, TRAJ29)
CIVRVEGSGNTPLVF

SEQ ID NO: 447110 - protein, 18 aa, Homo sapiens
  CDR3 for beta chain variable domain of TCR clone 223555 (TRBV5-5, TRBJ1-5)
CASSLRQVKGSSNQPQLF

SEQ ID NO: 447111 - protein, 13 aa, Homo sapiens
  CDR3 for alpha chain variable domain of TCR clone 223556 (TRAV25, TRAJ10)
CAGRTGGGNKLTF

SEQ ID NO: 447112 - protein, 17 aa, Homo sapiens
  CDR3 for beta chain variable domain of TCR clone 223556 (TRBV7-9, TRBJ2-6)
CASSFGAGYSGANVLTF

SEQ ID NO: 447113 - protein, 15 aa, Homo sapiens
  CDR3 for alpha chain variable domain of TCR clone 223557 (TRAV21, TRAJ53)
CATLNSGGSNYKLTF

SEQ ID NO: 447114 - protein, 15 aa, Homo sapiens
  CDR3 for beta chain variable domain of TCR clone 223557 (TRBV11-3, TRBJ2-3)
CASLKDGRDGDTQYF

SEQ ID NO: 447115 - protein, 13 aa, Homo sapiens
  CDR3 for alpha chain variable domain of TCR clone 223558 (TRAV2, TRAJ9)
CAGGRRLQNYLWS

SEQ ID NO: 447116 - protein, 16 aa, Homo sapiens
  CDR3 for beta chain variable domain of TCR clone 223558 (TRBV13, TRBJ2-2)
CASSPRTGEHTGELFF

SEQ ID NO: 447117 - protein, 11 aa, Homo sapiens
  CDR3 for alpha chain variable domain of TCR clone 223559 (TRAV27, TRAJ37)
CAGTPGGKLIF

SEQ ID NO: 447118 - protein, 14 aa, Homo sapiens
  CDR3 for beta chain variable domain of TCR clone 223559 (TRBV19, TRBJ2-1)
CASPTFVLSGEQFF

SEQ ID NO: 447119 - protein, 15 aa, Homo sapiens
  CDR3 for alpha chain variable domain of TCR clone 223560 (TRAV34, TRAJ38)
CGADFTPGDNRKLIW

SEQ ID NO: 447120 - protein, 13 aa, Homo sapiens
  CDR3 for beta chain variable domain of TCR clone 223560 (TRBV7-8, TRBJ2-7)
CASSLGTTYEQYF

SEQ ID NO: 447121 - protein, 12 aa, Homo sapiens
  CDR3 for alpha chain variable domain of TCR clone 223561 (TRAV23/DV6, TRAJ30)
CAASKGDDKIIF

SEQ ID NO: 447122 - protein, 18 aa, Homo sapiens
  CDR3 for beta chain variable domain of TCR clone 223561 (TRBV10-3, TRBJ2-3)
CAISESRVGPMRGETQYF

SEQ ID NO: 447123 - protein, 13 aa, Homo sapiens
  CDR3 for alpha chain variable domain of TCR clone 223562 (TRAV13-1, TRAJ39)
CAASIWAGDMLTF

SEQ ID NO: 447124 - protein, 14 aa, Homo sapiens
  CDR3 for beta chain variable domain of TCR clone 223562 (TRBV7-2, TRBJ1-1)
CASSFLTGTTEAFF

SEQ ID NO: 447125 - protein, 13 aa, Homo sapiens
  CDR3 for alpha chain variable domain of TCR clone 223563 (TRAV13-1, TRAJ33)
CAAWTDSNYQLIW

SEQ ID NO: 447126 - protein, 13 aa, Homo sapiens
  CDR3 for beta chain variable domain of TCR clone 223563 (TRBV7-2, TRBJ1-6)
CASSLKLDSPLHF

SEQ ID NO: 447127 - protein, 12 aa, Homo sapiens
  CDR3 for alpha chain variable domain of TCR clone 223564 (TRAV12-1, TRAJ40)
CVVYSGTYKYIF

SEQ ID NO: 447128 - protein, 10 aa, Homo sapiens
  CDR3 for beta chain variable domain of TCR clone 223564 (TRBV2, TRBJ2-5)
CASSAATQYF

SEQ ID NO: 447129 - protein, 14 aa, Homo sapiens
  CDR3 for alpha chain variable domain of TCR clone 223565 (TRAV16, TRAJ26)
FALSSANYGQNLVF

SEQ ID NO: 447130 - protein, 16 aa, Homo sapiens
  CDR3 for beta chain variable domain of TCR clone 223565 (TRBV20-1, TRBJ1-4)
CSAPGQGLLTNEKLFF

SEQ ID NO: 447131 - protein, 12 aa, Homo sapiens
  CDR3 for alpha chain variable domain of TCR clone 223566 (TRAV29/DV5, TRAJ49)
CAATDTGNQFNF

SEQ ID NO: 447132 - protein, 12 aa, Homo sapiens
  CDR3 for beta chain variable domain of TCR clone 223566 (TRBV12-4, TRBJ2-7)
CASSLGGYEQYF

SEQ ID NO: 447133 - protein, 13 aa, Homo sapiens
  CDR3 for alpha chain variable domain of TCR clone 223567 (TRAV2, TRAJ40)
CAVVTSGTYKYIF

SEQ ID NO: 447134 - protein, 14 aa, Homo sapiens
  CDR3 for beta chain variable domain of TCR clone 223567 (TRBV7-7, TRBJ2-2)
CASSRDRSTGELFF

SEQ ID NO: 447135 - protein, 16 aa, Homo sapiens
  CDR3 for alpha chain variable domain of TCR clone 223568 (TRAV30, TRAJ49)
SAAQRVGPNTCNQFYF

SEQ ID NO: 447136 - protein, 15 aa, Homo sapiens
  CDR3 for beta chain variable domain of TCR clone 223568 (TRBV2, TRBJ2-1)
CASSELAGSYNEQFF

SEQ ID NO: 447137 - protein, 14 aa, Homo sapiens
  CDR3 for alpha chain variable domain of TCR clone 223569 (TRAV27, TRAJ22)
CAGLPSGSARQLTF

SEQ ID NO: 447138 - protein, 16 aa, Homo sapiens
  CDR3 for beta chain variable domain of TCR clone 223569 (TRBV7-3, TRBJ2-2)
WASSLKRGTLSGELFF

SEQ ID NO: 447139 - protein, 14 aa, Homo sapiens
  CDR3 for alpha chain variable domain of TCR clone 223570 (TRAV1-2, TRAJ8)
CAVREDTGFQKLVF

SEQ ID NO: 447140 - protein, 16 aa, Homo sapiens
  CDR3 for beta chain variable domain of TCR clone 223570 (TRBV20-1, TRBJ1-4)
CSAPGQGLLTNEILFF

SEQ ID NO: 447141 - protein, 12 aa, Homo sapiens
  CDR3 for alpha chain variable domain of TCR clone 223571 (TRAV4, TRAJ6)
CLAPGGSYIPTF

SEQ ID NO: 447142 - protein, 15 aa, Homo sapiens
  CDR3 for beta chain variable domain of TCR clone 223571 (TRBV27, TRBJ2-1)
CASSNGGGSSNEQFF

SEQ ID NO: 447143 - protein, 14 aa, Homo sapiens
  CDR3 for alpha chain variable domain of TCR clone 223572 (TRAV17, TRAJ40)
CATALTSGTYKYIF

SEQ ID NO: 447144 - protein, 13 aa, Homo sapiens
  CDR3 for beta chain variable domain of TCR clone 223572 (TRBV27, TRBJ2-1)
FASSSGSYNEQFF

SEQ ID NO: 447145 - protein, 11 aa, Homo sapiens
  CDR3 for alpha chain variable domain of TCR clone 223573 (TRAV1-2, TRAJ20)
CAVSNYYKLSF

SEQ ID NO: 447146 - protein, 13 aa, Homo sapiens
  CDR3 for beta chain variable domain of TCR clone 223573 (TRBV7-9, TRBJ1-2)
CASSLKQNYGYTF

SEQ ID NO: 447147 - protein, 15 aa, Homo sapiens
  CDR3 for alpha chain variable domain of TCR clone 223574 (TRAV12-3, TRAJ27)
CAMRAYNTNAGKSTF

SEQ ID NO: 447148 - protein, 12 aa, Homo sapiens
  CDR3 for beta chain variable domain of TCR clone 223574 (TRBV6-3, TRBJ2-7)
CASSLTPYEQYF

SEQ ID NO: 447149 - protein, 13 aa, Homo sapiens
  CDR3 for alpha chain variable domain of TCR clone 223575 (TRAV8-3, TRAJ36)
CAVGATWANNLFF

SEQ ID NO: 447150 - protein, 15 aa, Homo sapiens
  CDR3 for beta chain variable domain of TCR clone 223575 (TRBV7-2, TRBJ1-2)
CASSPRAGRNYGYTF

SEQ ID NO: 447151 - protein, 14 aa, Homo sapiens
  CDR3 for alpha chain variable domain of TCR clone 223576 (TRAV12-2, TRAJ45)
CAVNKGGGADGLTF

SEQ ID NO: 447152 - protein, 16 aa, Homo sapiens
  CDR3 for beta chain variable domain of TCR clone 223576 (TRBV6-1, TRBJ2-5)
CASSETLDRGAETQYF

SEQ ID NO: 447153 - protein, 14 aa, Homo sapiens
  CDR3 for alpha chain variable domain of TCR clone 223577 (TRAV2, TRAJ37)
CAVDFTSNTGKLIF

SEQ ID NO: 447154 - protein, 14 aa, Homo sapiens
  CDR3 for beta chain variable domain of TCR clone 223577 (TRBV7-9, TRBJ2-7)
CASSLGGSSYEQYF

SEQ ID NO: 447155 - protein, 13 aa, Homo sapiens
  CDR3 for alpha chain variable domain of TCR clone 223578 (TRAV20, TRAJ42)
CAADGGSQGNLIF

SEQ ID NO: 447156 - protein, 15 aa, Homo sapiens
  CDR3 for beta chain variable domain of TCR clone 223578 (TRBV12-4, TRBJ1-3)
CASTPGRRSGNTIYF

SEQ ID NO: 447157 - protein, 14 aa, Homo sapiens
  CDR3 for alpha chain variable domain of TCR clone 223579 (TRAV12-2, TRAJ13)
CAVKKTGGYQKVTF

SEQ ID NO: 447158 - protein, 15 aa, Homo sapiens
  CDR3 for beta chain variable domain of TCR clone 223579 (TRBV5-1, TRBJ2-2)
CASSLAAGGSGELFF

SEQ ID NO: 447159 - protein, 12 aa, Homo sapiens
  CDR3 for alpha chain variable domain of TCR clone 223580 (TRAV12-2, TRAJ36)
CAAPRGANNLFF

SEQ ID NO: 447160 - protein, 15 aa, Homo sapiens
  CDR3 for beta chain variable domain of TCR clone 223580 (TRBV11-2, TRBJ1-3)
CASSLDGTVGNTRYF

SEQ ID NO: 447161 - protein, 12 aa, Homo sapiens
  CDR3 for alpha chain variable domain of TCR clone 223581 (TRAV2, TRAJ33)
CAVPDSNYQLIW

SEQ ID NO: 447162 - protein, 15 aa, Homo sapiens
  CDR3 for beta chain variable domain of TCR clone 223581 (TRBV15, TRBJ1-5)
CATSRDPVSKQPQHF

SEQ ID NO: 447163 - protein, 11 aa, Homo sapiens
  CDR3 for alpha chain variable domain of TCR clone 223582 (TRAV3, TRAJ21)
CAVVNLNKFYF

SEQ ID NO: 447164 - protein, 15 aa, Homo sapiens
  CDR3 for beta chain variable domain of TCR clone 223582 (TRBV29-1, TRBJ2-1)
CSVEGGPASYNEQFF

SEQ ID NO: 447165 - protein, 14 aa, Homo sapiens
  CDR3 for alpha chain variable domain of TCR clone 223583 (TRAV17, TRAJ37)
CATDGSSNTGKLLF

SEQ ID NO: 447166 - protein, 13 aa, Homo sapiens
  CDR3 for beta chain variable domain of TCR clone 223583 (TRBV11-2, TRBJ2-1)
CASSVDLVNEQFF

SEQ ID NO: 447167 - protein, 14 aa, Homo sapiens
  CDR3 for alpha chain variable domain of TCR clone 223584 (TRAV1-2, TRAJ8)
CAVREDTGFQRLVF

SEQ ID NO: 447168 - protein, 14 aa, Homo sapiens
  CDR3 for beta chain variable domain of TCR clone 223584 (TRBV15, TRBJ2-3)
CATRSGTSTDTQYF

SEQ ID NO: 447169 - protein, 14 aa, Homo sapiens
  CDR3 for alpha chain variable domain of TCR clone 223585 (TRAV26-1, TRAJ34)
CIVRVAYNTDKLIF

SEQ ID NO: 447170 - protein, 16 aa, Homo sapiens
  CDR3 for beta chain variable domain of TCR clone 223585 (TRBV11-2, TRBJ2-7)
CAGSPTTGGVSYEQYF

SEQ ID NO: 447171 - protein, 15 aa, Homo sapiens
  CDR3 for alpha chain variable domain of TCR clone 223586 (TRAV8-3, TRAJ27)
CAVVTSKTNAGKSTF

SEQ ID NO: 447172 - protein, 15 aa, Homo sapiens
  CDR3 for beta chain variable domain of TCR clone 223586 (TRBV7-2, TRBJ2-1)
CASSSGLAGGNEQFF

SEQ ID NO: 447173 - protein, 17 aa, Homo sapiens
  CDR3 for alpha chain variable domain of TCR clone 223587 (TRAV26-1, TRAJ37)
CIVRVITVSSNTGKLIF

SEQ ID NO: 447174 - protein, 15 aa, Homo sapiens
  CDR3 for beta chain variable domain of TCR clone 223587 (TRBV7-9, TRBJ2-3)
CASSSSGGATDTQYF

SEQ ID NO: 447175 - protein, 14 aa, Homo sapiens
  CDR3 for alpha chain variable domain of TCR clone 223588 (TRAV12-1, TRAJ12)
CVVTSGDSSYKLIF

SEQ ID NO: 447176 - protein, 14 aa, Homo sapiens
  CDR3 for beta chain variable domain of TCR clone 223588 (TRBV25-1, TRBJ1-1)
CASTHLGGNTEAFF

SEQ ID NO: 447177 - protein, 14 aa, Homo sapiens
  CDR3 for alpha chain variable domain of TCR clone 223589 (TRAV27, TRAJ23)
CAGLSYNQGGKLIF

SEQ ID NO: 447178 - protein, 15 aa, Homo sapiens
  CDR3 for beta chain variable domain of TCR clone 223589 (TRBV19, TRBJ2-2)
CASSLNRWVTGELFF

SEQ ID NO: 447179 - protein, 14 aa, Homo sapiens
  CDR3 for alpha chain variable domain of TCR clone 223590 (TRAV1-2, TRAJ8)
CAVREDTGFQKLVF

SEQ ID NO: 447180 - protein, 16 aa, Homo sapiens
  CDR3 for beta chain variable domain of TCR clone 223590 (TRBV7-3, TRBJ2-6)
CQQPGGQLSGANVLTF

SEQ ID NO: 447181 - protein, 12 aa, Homo sapiens
  CDR3 for alpha chain variable domain of TCR clone 223591 (TRAV1-2, TRAJ26)
CAVRYYGQNFVF

SEQ ID NO: 447182 - protein, 13 aa, Homo sapiens
  CDR3 for beta chain variable domain of TCR clone 223591 (TRBV19, TRBJ1-2)
CASSVPGQDGYTF

SEQ ID NO: 447183 - protein, 17 aa, Homo sapiens
  CDR3 for alpha chain variable domain of TCR clone 223592 (TRAV27, TRAJ42)
CAERVIYYGGRQGNLIF

SEQ ID NO: 447184 - protein, 14 aa, Homo sapiens
  CDR3 for beta chain variable domain of TCR clone 223592 (TRBV6-6, TRBJ2-3)
CASRLQREADTQYF

SEQ ID NO: 447185 - protein, 11 aa, Homo sapiens
  CDR3 for alpha chain variable domain of TCR clone 223593 (TRAV13-1, TRAJ52)
PGGTSYGKLTF

SEQ ID NO: 447186 - protein, 16 aa, Homo sapiens
  CDR3 for beta chain variable domain of TCR clone 223593 (TRBV28, TRBJ2-7)
CASSPWVATGDLSQCV

SEQ ID NO: 447187 - protein, 13 aa, Homo sapiens
  CDR3 for alpha chain variable domain of TCR clone 223594 (TRAV20, TRAJ31)
CAVQAIGGARLMF

SEQ ID NO: 447188 - protein, 17 aa, Homo sapiens
  CDR3 for beta chain variable domain of TCR clone 223594 (TRBV7-3, TRBJ2-3)
CASSLMKRMRGADTQYF

SEQ ID NO: 447189 - protein, 15 aa, Homo sapiens
  CDR3 for alpha chain variable domain of TCR clone 223595 (TRAV16, TRAJ4)
CALEDPSGGYNKLIF

SEQ ID NO: 447190 - protein, 13 aa, Homo sapiens
  CDR3 for beta chain variable domain of TCR clone 223595 (TRBV7-3, TRBJ2-7)
CASSQAGVYEQYF

SEQ ID NO: 447191 - protein, 10 aa, Homo sapiens
  CDR3 for alpha chain variable domain of TCR clone 223596 (TRAV12-2, TRAJ43)
CAVKVLSMRF

SEQ ID NO: 447192 - protein, 14 aa, Homo sapiens
  CDR3 for beta chain variable domain of TCR clone 223596 (TRBV11-2, TRBJ2-7)
CASSLGNSLCEQYF

SEQ ID NO: 447193 - protein, 19 aa, Homo sapiens
  CDR3 for alpha chain variable domain of TCR clone 223597 (TRAV1-2, TRAJ26)
CLLPLCCERPDNYGQNYVF

SEQ ID NO: 447194 - protein, 17 aa, Homo sapiens
  CDR3 for beta chain variable domain of TCR clone 223597 (TRBV13, TRBJ2-3)
CASSLSRVAGGRNTQYF

SEQ ID NO: 447195 - protein, 11 aa, Homo sapiens
  CDR3 for alpha chain variable domain of TCR clone 223598 (TRAV12-3, TRAJ43)
CAMSFSNDMRF

SEQ ID NO: 447196 - protein, 19 aa, Homo sapiens
  CDR3 for beta chain variable domain of TCR clone 223598 (TRBV28, TRBJ2-7)
CASSYSGTSRLGWVYEQYF

SEQ ID NO: 447197 - protein, 11 aa, Homo sapiens
  CDR3 for alpha chain variable domain of TCR clone 223599 (TRAV8-6, TRAJ42)
CAVRGRKQRKS

SEQ ID NO: 447198 - protein, 13 aa, Homo sapiens
  CDR3 for beta chain variable domain of TCR clone 223599 (TRBV7-3, TRBJ1-1)
CASSQDWGAEAFF

SEQ ID NO: 447199 - protein, 12 aa, Homo sapiens
  CDR3 for alpha chain variable domain of TCR clone 223600 (TRAV13-1, TRAJ21)
CAAKEGFNKFYF

SEQ ID NO: 447200 - protein, 16 aa, Homo sapiens
  CDR3 for beta chain variable domain of TCR clone 223600 (TRBV6-1, TRBJ1-3)
CASVQGGVETPYILER

SEQ ID NO: 447201 - protein, 14 aa, Homo sapiens
  CDR3 for alpha chain variable domain of TCR clone 223601 (TRAV12-3, TRAJ10)
SHLPLTGGGNKLTF

SEQ ID NO: 447202 - protein, 17 aa, Homo sapiens
  CDR3 for beta chain variable domain of TCR clone 223601 (TRBV5-1, TRBJ1-6)
CASSPSLQGSDNSPLHF

SEQ ID NO: 447203 - protein, 11 aa, Homo sapiens
  CDR3 for alpha chain variable domain of TCR clone 223602 (TRAV2, TRAJ13)
CASGGYQKVTF

SEQ ID NO: 447204 - protein, 14 aa, Homo sapiens
  CDR3 for beta chain variable domain of TCR clone 223602 (TRBV7-3, TRBJ2-1)
CASSLAGGTNERFF

SEQ ID NO: 447205 - protein, 16 aa, Homo sapiens
  CDR3 for alpha chain variable domain of TCR clone 223603 (TRAV12-3, TRAJ53)
CAMSPGSGGRNYKLTF

SEQ ID NO: 447206 - protein, 12 aa, Homo sapiens
  CDR3 for beta chain variable domain of TCR clone 223603 (TRBV7-8, TRBJ2-7)
CTSSLGDREQYF

SEQ ID NO: 447207 - protein, 15 aa, Homo sapiens
  CDR3 for alpha chain variable domain of TCR clone 223604 (TRAV21, TRAJ53)
CATLNSGGSKYKLTF

SEQ ID NO: 447208 - protein, 15 aa, Homo sapiens
  CDR3 for beta chain variable domain of TCR clone 223604 (TRBV18, TRBJ2-1)
CASSPPSASYNEQFF

SEQ ID NO: 447209 - protein, 16 aa, Homo sapiens
  CDR3 for alpha chain variable domain of TCR clone 223605 (TRAV3, TRAJ37)
CAVRVRGSGNTGKLIF

SEQ ID NO: 447210 - protein, 17 aa, Homo sapiens
  CDR3 for beta chain variable domain of TCR clone 223605 (TRBV19, TRBJ2-7)
CASSISFYDSYPYEQYF

SEQ ID NO: 447211 - protein, 12 aa, Homo sapiens
  CDR3 for alpha chain variable domain of TCR clone 223606 (TRAV13-1, TRAJ21)
RAAKEGFNKFSF

SEQ ID NO: 447212 - protein, 17 aa, Homo sapiens
  CDR3 for beta chain variable domain of TCR clone 223606 (TRBV19, TRBJ2-7)
CASSISFYDSYPYEQYF

SEQ ID NO: 447213 - protein, 17 aa, Homo sapiens
  CDR3 for alpha chain variable domain of TCR clone 223607 (TRAV8-6, TRAJ58)
CAVSPWVGETSGSRLTF

SEQ ID NO: 447214 - protein, 14 aa, Homo sapiens
  CDR3 for beta chain variable domain of TCR clone 223607 (TRBV6-1, TRBJ1-3)
CASVQGGGGNTIYF

SEQ ID NO: 447215 - protein, 15 aa, Homo sapiens
  CDR3 for alpha chain variable domain of TCR clone 223608 (TRAV25, TRAJ52)
CAGRPGGTSYGKLTF

SEQ ID NO: 447216 - protein, 17 aa, Homo sapiens
  CDR3 for beta chain variable domain of TCR clone 223608 (TRBV15, TRBJ1-1)
CATSRVGGADGDTEAFF

SEQ ID NO: 447217 - protein, 18 aa, Homo sapiens
  CDR3 for alpha chain variable domain of TCR clone 223609 (TRAV12-3, TRAJ52)
CAMSRTNAGGTSYGKLTF

SEQ ID NO: 447218 - protein, 17 aa, Homo sapiens
  CDR3 for beta chain variable domain of TCR clone 223609 (TRBV7-3, TRBJ2-3)
CASSLMKRMRGAETQYV

SEQ ID NO: 447219 - protein, 14 aa, Homo sapiens
  CDR3 for alpha chain variable domain of TCR clone 223610 (TRAV1-2, TRAJ16)
CAVNRFSAGQKLLF

SEQ ID NO: 447220 - protein, 14 aa, Homo sapiens
  CDR3 for beta chain variable domain of TCR clone 223610 (TRBV13, TRBJ1-1)
CASTVITVNTEAFF

SEQ ID NO: 447221 - protein, 14 aa, Homo sapiens
  CDR3 for alpha chain variable domain of TCR clone 223611 (TRAV26-2, TRAJ31)
CILIPGNNNARLMF

SEQ ID NO: 447222 - protein, 14 aa, Homo sapiens
  CDR3 for beta chain variable domain of TCR clone 223611 (TRBV7-9, TRBJ2-2)
CASSGLADTGELFF

SEQ ID NO: 447223 - protein, 12 aa, Homo sapiens
  CDR3 for alpha chain variable domain of TCR clone 223612 (TRAV13-1, TRAJ36)
WRGGAGANNLFF

SEQ ID NO: 447224 - protein, 16 aa, Homo sapiens
  CDR3 for beta chain variable domain of TCR clone 223612 (TRBV7-9, TRBJ2-5)
CASRREIGTRKGTQYF

SEQ ID NO: 447225 - protein, 13 aa, Homo sapiens
  CDR3 for alpha chain variable domain of TCR clone 223613 (TRAV27, TRAJ6)
CAGGTRGSYIPTF

SEQ ID NO: 447226 - protein, 15 aa, Homo sapiens
  CDR3 for beta chain variable domain of TCR clone 223613 (TRBV5-5, TRBJ2-7)
CASSLAAPLSYERYF

SEQ ID NO: 447227 - protein, 11 aa, Homo sapiens
  CDR3 for alpha chain variable domain of TCR clone 223614 (TRAV3, TRAJ21)
CAVGNFNKLYF

SEQ ID NO: 447228 - protein, 17 aa, Homo sapiens
  CDR3 for beta chain variable domain of TCR clone 223614 (TRBV24-1, TRBJ2-1)
CATSDVSTSGAYNEQFF

SEQ ID NO: 447229 - protein, 14 aa, Homo sapiens
  CDR3 for alpha chain variable domain of TCR clone 223615 (TRAV1-2, TRAJ16)
CAVNRFSDGQNLLF

SEQ ID NO: 447230 - protein, 12 aa, Homo sapiens
  CDR3 for beta chain variable domain of TCR clone 223615 (TRBV7-6, TRBJ2-7)
CASSLADSEQYF

SEQ ID NO: 447231 - protein, 14 aa, Homo sapiens
  CDR3 for alpha chain variable domain of TCR clone 223616 (TRAV26-1, TRAJ45)
CIVRVVGGADGLTF

SEQ ID NO: 447232 - protein, 16 aa, Homo sapiens
  CDR3 for beta chain variable domain of TCR clone 223616 (TRBV7-9, TRBJ1-1)
CAISLTQVRSNTEAFF

SEQ ID NO: 447233 - protein, 12 aa, Homo sapiens
  CDR3 for alpha chain variable domain of TCR clone 223617 (TRAV20, TRAJ56)
CAVTGANSKLTF

SEQ ID NO: 447234 - protein, 13 aa, Homo sapiens
  CDR3 for beta chain variable domain of TCR clone 223617 (TRBV7-9, TRBJ1-2)
CASSLKQNYGYTF

SEQ ID NO: 447235 - protein, 16 aa, Homo sapiens
  CDR3 for alpha chain variable domain of TCR clone 223618 (TRAV30, TRAJ24)
CGTEIVDADSWGKFQF

SEQ ID NO: 447236 - protein, 12 aa, Homo sapiens
  CDR3 for beta chain variable domain of TCR clone 223618 (TRBV5-1, TRBJ2-7)
CASSLDSYEQYF

SEQ ID NO: 447237 - protein, 15 aa, Homo sapiens
  CDR3 for alpha chain variable domain of TCR clone 223619 (TRAV27, TRAJ38)
CAARRNAGNNCKLIW

SEQ ID NO: 447238 - protein, 11 aa, Homo sapiens
  CDR3 for beta chain variable domain of TCR clone 223619 (TRBV12-4, TRBJ2-2)
CASSSAGELFF

SEQ ID NO: 447239 - protein, 14 aa, Homo sapiens
  CDR3 for alpha chain variable domain of TCR clone 223620 (TRAV13-1, TRAJ35)
CAASKGGFGNVCIA

SEQ ID NO: 447240 - protein, 14 aa, Homo sapiens
  CDR3 for beta chain variable domain of TCR clone 223620 (TRBV7-2, TRBJ2-7)
CASSPKTSFYEQYF

SEQ ID NO: 447241 - protein, 15 aa, Homo sapiens
  CDR3 for alpha chain variable domain of TCR clone 223621 (TRAV14/DV4, TRAJ12)
CAMREERDSSYKLIF

SEQ ID NO: 447242 - protein, 17 aa, Homo sapiens
  CDR3 for beta chain variable domain of TCR clone 223621 (TRBV2, TRBJ2-1)
CASSRPGQGMMVNEQFF

SEQ ID NO: 447243 - protein, 12 aa, Homo sapiens
  CDR3 for alpha chain variable domain of TCR clone 223622 (TRAV17, TRAJ57)
CATDGGSEKLVF

SEQ ID NO: 447244 - protein, 18 aa, Homo sapiens
  CDR3 for beta chain variable domain of TCR clone 223622 (TRBV4-3, TRBJ1-6)
CASSQETPASSYNSPLHF

SEQ ID NO: 447245 - protein, 16 aa, Homo sapiens
  CDR3 for alpha chain variable domain of TCR clone 223623 (TRAV3, TRAJ37)
CAVRGKGSGNTGKLII

SEQ ID NO: 447246 - protein, 12 aa, Homo sapiens
  CDR3 for beta chain variable domain of TCR clone 223623 (TRBV11-2, TRBJ2-2)
CASSLGGGELFF

SEQ ID NO: 447247 - protein, 12 aa, Homo sapiens
  CDR3 for alpha chain variable domain of TCR clone 223624 (TRAV13-1, TRAJ21)
CAAKEGFNKFYF

SEQ ID NO: 447248 - protein, 14 aa, Homo sapiens
  CDR3 for beta chain variable domain of TCR clone 223624 (TRBV4-1, TRBJ2-7)
CASRLTSGSYEQYF

SEQ ID NO: 447249 - protein, 14 aa, Homo sapiens
  CDR3 for alpha chain variable domain of TCR clone 223625 (TRAV16, TRAJ57)
CALPTQGGSEKLVF

SEQ ID NO: 447250 - protein, 15 aa, Homo sapiens
  CDR3 for beta chain variable domain of TCR clone 223625 (TRBV28, TRBJ1-3)
CASWGGHLSGNNIYF

SEQ ID NO: 447251 - protein, 12 aa, Homo sapiens
  CDR3 for alpha chain variable domain of TCR clone 223626 (TRAV25, TRAJ31)
CAGPDNNARLMF

SEQ ID NO: 447252 - protein, 16 aa, Homo sapiens
  CDR3 for beta chain variable domain of TCR clone 223626 (TRBV4-2, TRBJ1-4)
CASSQARGPTNEKLFF

SEQ ID NO: 447253 - protein, 14 aa, Homo sapiens
  CDR3 for alpha chain variable domain of TCR clone 223627 (TRAV12-2, TRAJ13)
CAVKKTGGYQKVTF

SEQ ID NO: 447254 - protein, 20 aa, Homo sapiens
  CDR3 for beta chain variable domain of TCR clone 223627 (TRBV11-1, TRBJ2-6)
CASSAEFQPGMSSGANVLTF

SEQ ID NO: 447255 - protein, 13 aa, Homo sapiens
  CDR3 for alpha chain variable domain of TCR clone 223628 (TRAV21, TRAJ57)
CAVTQGGTEKLVF

SEQ ID NO: 447256 - protein, 16 aa, Homo sapiens
  CDR3 for beta chain variable domain of TCR clone 223628 (TRBV29-1, TRBJ2-7)
CSVDDAEDGTAYEQYF

SEQ ID NO: 447257 - protein, 13 aa, Homo sapiens
  CDR3 for alpha chain variable domain of TCR clone 223629 (TRAV17, TRAJ9)
CATFLTGGFKTIV

SEQ ID NO: 447258 - protein, 16 aa, Homo sapiens
  CDR3 for beta chain variable domain of TCR clone 223629 (TRBV5-7, TRBJ1-4)
CASSPSGGMKTEKLFF

SEQ ID NO: 447259 - protein, 11 aa, Homo sapiens
  CDR3 for alpha chain variable domain of TCR clone 223630 (TRAV2, TRAJ13)
CASGVYQKVTF

SEQ ID NO: 447260 - protein, 16 aa, Homo sapiens
  CDR3 for beta chain variable domain of TCR clone 223630 (TRBV2, TRBJ2-1)
CASSVGGSLSYNEQFF

SEQ ID NO: 447261 - protein, 13 aa, Homo sapiens
  CDR3 for alpha chain variable domain of TCR clone 223631 (TRAV27, TRAJ11)
CAGGGSGYSTLTF

SEQ ID NO: 447262 - protein, 15 aa, Homo sapiens
  CDR3 for beta chain variable domain of TCR clone 223631 (TRBV5-1, TRBJ1-1)
CASSLGQGRFDEAFF

SEQ ID NO: 447263 - protein, 14 aa, Homo sapiens
  CDR3 for alpha chain variable domain of TCR clone 223632 (TRAV12-2, TRAJ36)
CAVKISTGANDLFF

SEQ ID NO: 447264 - protein, 14 aa, Homo sapiens
  CDR3 for beta chain variable domain of TCR clone 223632 (TRBV25-1, TRBJ1-2)
CASSDTTGVVGYTF

SEQ ID NO: 447265 - protein, 13 aa, Homo sapiens
  CDR3 for alpha chain variable domain of TCR clone 223633 (TRAV8-4, TRAJ48)
CAVSLLGNEKLTF

SEQ ID NO: 447266 - protein, 15 aa, Homo sapiens
  CDR3 for beta chain variable domain of TCR clone 223633 (TRBV20-1, TRBJ2-7)
CSARKGLAESYEQYF

SEQ ID NO: 447267 - protein, 13 aa, Homo sapiens
  CDR3 for alpha chain variable domain of TCR clone 223634 (TRAV27, TRAJ11)
CAGARSGYSTRTF

SEQ ID NO: 447268 - protein, 16 aa, Homo sapiens
  CDR3 for beta chain variable domain of TCR clone 223634 (TRBV10-2, TRBJ2-2)
CASSESRDRGSGELFF

SEQ ID NO: 447269 - protein, 14 aa, Homo sapiens
  CDR3 for alpha chain variable domain of TCR clone 223635 (TRAV1-2, TRAJ16)
CAVNRFSDGQKMLF

SEQ ID NO: 447270 - protein, 13 aa, Homo sapiens
  CDR3 for beta chain variable domain of TCR clone 223635 (TRBV18, TRBJ1-1)
CASSGGLNTEAFF

SEQ ID NO: 447271 - protein, 14 aa, Homo sapiens
  CDR3 for alpha chain variable domain of TCR clone 223636 (TRAV13-1, TRAJ44)
CAAKATGTASNLTF

SEQ ID NO: 447272 - protein, 15 aa, Homo sapiens
  CDR3 for beta chain variable domain of TCR clone 223636 (TRBV7-6, TRBJ1-1)
CASSPQGGANTEAFF

SEQ ID NO: 447273 - protein, 15 aa, Homo sapiens
  CDR3 for alpha chain variable domain of TCR clone 223637 (TRAV12-3, TRAJ11)
CAMSEENSGYSTLTF

SEQ ID NO: 447274 - protein, 15 aa, Homo sapiens
  CDR3 for beta chain variable domain of TCR clone 223637 (TRBV11-3, TRBJ2-3)
CASLKDGREGDTQYF

SEQ ID NO: 447275 - protein, 16 aa, Homo sapiens
  CDR3 for alpha chain variable domain of TCR clone 223638 (TRAV13-1, TRAJ18)
CAASTSGGSTLGRLYF

SEQ ID NO: 447276 - protein, 14 aa, Homo sapiens
  CDR3 for beta chain variable domain of TCR clone 223638 (TRBV13, TRBJ2-5)
CASSLERVGETQYF

SEQ ID NO: 447277 - protein, 16 aa, Homo sapiens
  CDR3 for alpha chain variable domain of TCR clone 223639 (TRAV38-2/DV8, TRAJ9)
CAYRSLLNTGGFKTIF

SEQ ID NO: 447278 - protein, 13 aa, Homo sapiens
  CDR3 for beta chain variable domain of TCR clone 223639 (TRBV29-1, TRBJ1-1)
CSVHGQGTTEAFF

SEQ ID NO: 447279 - protein, 14 aa, Homo sapiens
  CDR3 for alpha chain variable domain of TCR clone 223640 (TRAV35, TRAJ42)
CAGRYGGSQGNLII

SEQ ID NO: 447280 - protein, 15 aa, Homo sapiens
  CDR3 for beta chain variable domain of TCR clone 223640 (TRBV7-9, TRBJ2-1)
CASSLGWGRANEQFF

SEQ ID NO: 447281 - protein, 14 aa, Homo sapiens
  CDR3 for alpha chain variable domain of TCR clone 223641 (TRAV26-1, TRAJ24)
CIVRRVGGWGKFQF

SEQ ID NO: 447282 - protein, 13 aa, Homo sapiens
  CDR3 for beta chain variable domain of TCR clone 223641 (TRBV20-1, TRBJ1-1)
CSARGGGNTEAFF

SEQ ID NO: 447283 - protein, 13 aa, Homo sapiens
  CDR3 for alpha chain variable domain of TCR clone 223642 (TRAV16, TRAJ30)
CALAQNRDDKIIF

SEQ ID NO: 447284 - protein, 20 aa, Homo sapiens
  CDR3 for beta chain variable domain of TCR clone 223642 (TRBV19, TRBJ1-6)
CASSVRPSTGVVIHPSTLGM

SEQ ID NO: 447285 - protein, 11 aa, Homo sapiens
  CDR3 for alpha chain variable domain of TCR clone 223643 (TRAV21, TRAJ11)
CAVNGYSTLTF

SEQ ID NO: 447286 - protein, 14 aa, Homo sapiens
  CDR3 for beta chain variable domain of TCR clone 223643 (TRBV5-1, TRBJ2-7)
CASSLTGSGYEQYF

SEQ ID NO: 447287 - protein, 16 aa, Homo sapiens
  CDR3 for alpha chain variable domain of TCR clone 223644 (TRAV8-2, TRAJ7)
CVVSEGTYYGNNRLAF

SEQ ID NO: 447288 - protein, 13 aa, Homo sapiens
  CDR3 for beta chain variable domain of TCR clone 223644 (TRBV19, TRBJ2-1)
CASSMYRVNEQFF

SEQ ID NO: 447289 - protein, 10 aa, Homo sapiens
  CDR3 for alpha chain variable domain of TCR clone 223645 (TRAV36/DV7, TRAJ48)
CAVGNEKLTF

SEQ ID NO: 447290 - protein, 17 aa, Homo sapiens
  CDR3 for beta chain variable domain of TCR clone 223645 (TRBV28, TRBJ2-7)
CASSPLRGRRWKGGQYF

SEQ ID NO: 447291 - protein, 16 aa, Homo sapiens
  CDR3 for alpha chain variable domain of TCR clone 223646 (TRAV23/DV6, TRAJ9)
CAASIGGNTGGFKTIF

SEQ ID NO: 447292 - protein, 14 aa, Homo sapiens
  CDR3 for beta chain variable domain of TCR clone 223646 (TRBV11-2, TRBJ2-3)
CASSRLARTDTQYF

SEQ ID NO: 447293 - protein, 16 aa, Homo sapiens
  CDR3 for alpha chain variable domain of TCR clone 223647 (TRAV30, TRAJ24)
CGTEIVDADSWGKCQF

SEQ ID NO: 447294 - protein, 14 aa, Homo sapiens
  CDR3 for beta chain variable domain of TCR clone 223647 (TRBV12-5, TRBJ2-5)
CDSGSRTHQETQYF

SEQ ID NO: 447295 - protein, 14 aa, Homo sapiens
  CDR3 for alpha chain variable domain of TCR clone 223648 (TRAV23/DV6, TRAJ57)
CAASNQGGSEKLVF

SEQ ID NO: 447296 - protein, 13 aa, Homo sapiens
  CDR3 for beta chain variable domain of TCR clone 223648 (TRBV11-3, TRBJ2-7)
CASSSYPSYEQYF

SEQ ID NO: 447297 - protein, 14 aa, Homo sapiens
  CDR3 for alpha chain variable domain of TCR clone 223649 (TRAV17, TRAJ23)
CATALGGQGGKLIF

SEQ ID NO: 447298 - protein, 16 aa, Homo sapiens
  CDR3 for beta chain variable domain of TCR clone 223649 (TRBV19, TRBJ1-1)
CASSPTRFWPGTEAFF

SEQ ID NO: 447299 - protein, 13 aa, Homo sapiens
  CDR3 for alpha chain variable domain of TCR clone 223650 (TRAV12-3, TRAJ10)
CAAGTGGGNKLTF

SEQ ID NO: 447300 - protein, 13 aa, Homo sapiens
  CDR3 for beta chain variable domain of TCR clone 223650 (TRBV11-3, TRBJ2-3)
CASSFTGPDTQYF

SEQ ID NO: 447301 - protein, 14 aa, Homo sapiens
  CDR3 for alpha chain variable domain of TCR clone 223651 (TRAV1-2, TRAJ16)
CAVNRFSDGQKLLF

SEQ ID NO: 447302 - protein, 19 aa, Homo sapiens
  CDR3 for beta chain variable domain of TCR clone 223651 (TRBV7-2, TRBJ2-3)
CASSPGLAGGGLTTDTQYF

SEQ ID NO: 447303 - protein, 12 aa, Homo sapiens
  CDR3 for alpha chain variable domain of TCR clone 223652 (TRAV12-3, TRAJ17)
CAMALTGNKLTF

SEQ ID NO: 447304 - protein, 14 aa, Homo sapiens
  CDR3 for beta chain variable domain of TCR clone 223652 (TRBV20-1, TRBJ1-3)
CSASPTGAGNTIYF

SEQ ID NO: 447305 - protein, 15 aa, Homo sapiens
  CDR3 for alpha chain variable domain of TCR clone 223653 (TRAV26-1, TRAJ29)
CIVKVEGSGNTPLLF

SEQ ID NO: 447306 - protein, 14 aa, Homo sapiens
  CDR3 for beta chain variable domain of TCR clone 223653 (TRBV18, TRBJ2-5)
CASSPGVSQETQYF

SEQ ID NO: 447307 - protein, 18 aa, Homo sapiens
  CDR3 for alpha chain variable domain of TCR clone 223654 (TRAV21, TRAJ52)
CAVRPSPAGGTSYGKLKF

SEQ ID NO: 447308 - protein, 17 aa, Homo sapiens
  CDR3 for beta chain variable domain of TCR clone 223654 (TRBV13, TRBJ2-3)
CASSLSRVAGGRNTQYV

SEQ ID NO: 447309 - protein, 15 aa, Homo sapiens
  CDR3 for alpha chain variable domain of TCR clone 223655 (TRAV12-2, TRAJ53)
CAVNGGGGSNYQLTF

SEQ ID NO: 447310 - protein, 17 aa, Homo sapiens
  CDR3 for beta chain variable domain of TCR clone 223655 (TRBV7-3, TRBJ2-3)
RASSLMKRMRGADTQYF

SEQ ID NO: 447311 - protein, 11 aa, Homo sapiens
  CDR3 for alpha chain variable domain of TCR clone 223656 (TRAV17, TRAJ43)
CAKPRSNDMRF

SEQ ID NO: 447312 - protein, 15 aa, Homo sapiens
  CDR3 for beta chain variable domain of TCR clone 223656 (TRBV11-2, TRBJ2-1)
CASSLGTSGLNGQFF

SEQ ID NO: 447313 - protein, 17 aa, Homo sapiens
  CDR3 for alpha chain variable domain of TCR clone 223657 (TRAV38-2/DV8, TRAJ28)
CAFLTLYSGAGSYQLTF

SEQ ID NO: 447314 - protein, 12 aa, Homo sapiens
  CDR3 for beta chain variable domain of TCR clone 223657 (TRBV12-4, TRBJ2-7)
CASSLGGYEQYF

SEQ ID NO: 447315 - protein, 15 aa, Homo sapiens
  CDR3 for alpha chain variable domain of TCR clone 223658 (TRAV27, TRAJ50)
CAGVGRGTSYDEVIF

SEQ ID NO: 447316 - protein, 14 aa, Homo sapiens
  CDR3 for beta chain variable domain of TCR clone 223658 (TRBV7-2, TRBJ1-1)
CASSFYDLNTEAFF

SEQ ID NO: 447317 - protein, 14 aa, Homo sapiens
  CDR3 for alpha chain variable domain of TCR clone 223659 (TRAV8-3, TRAJ4)
CAVGAAGGYNKLIF

SEQ ID NO: 447318 - protein, 14 aa, Homo sapiens
  CDR3 for beta chain variable domain of TCR clone 223659 (TRBV10-3, TRBJ2-1)
CAISAVSSYNEQFF

SEQ ID NO: 447319 - protein, 14 aa, Homo sapiens
  CDR3 for alpha chain variable domain of TCR clone 223660 (TRAV13-1, TRAJ9)
CAASALTGGFKTIF

SEQ ID NO: 447320 - protein, 13 aa, Homo sapiens
  CDR3 for beta chain variable domain of TCR clone 223660 (TRBV20-1, TRBJ1-1)
CSAGAVGNTQAFF

SEQ ID NO: 447321 - protein, 15 aa, Homo sapiens
  CDR3 for alpha chain variable domain of TCR clone 223661 (TRAV3, TRAJ22)
CAVRDRGGSARQLTF

SEQ ID NO: 447322 - protein, 15 aa, Homo sapiens
  CDR3 for beta chain variable domain of TCR clone 223661 (TRBV18, TRBJ1-5)
CASSPSDRSNQPQHF

SEQ ID NO: 447323 - protein, 13 aa, Homo sapiens
  CDR3 for alpha chain variable domain of TCR clone 223662 (TRAV35, TRAJ22)
WAGLSGSARQLTF

SEQ ID NO: 447324 - protein, 16 aa, Homo sapiens
  CDR3 for beta chain variable domain of TCR clone 223662 (TRBV7-9, TRBJ2-1)
CASSLVLTGQGNEQFF

SEQ ID NO: 447325 - protein, 14 aa, Homo sapiens
  CDR3 for alpha chain variable domain of TCR clone 223663 (TRAV2, TRAJ9)
CAVEDRSGGFKTIL

SEQ ID NO: 447326 - protein, 14 aa, Homo sapiens
  CDR3 for beta chain variable domain of TCR clone 223663 (TRBV5-8, TRBJ2-3)
CASSLGQGTDTQYF

SEQ ID NO: 447327 - protein, 18 aa, Homo sapiens
  CDR3 for alpha chain variable domain of TCR clone 223664 (TRAV12-3, TRAJ52)
CAMSVGGAGGTSYGELTF

SEQ ID NO: 447328 - protein, 19 aa, Homo sapiens
  CDR3 for beta chain variable domain of TCR clone 223664 (TRBV25-1, TRBJ2-2)
CAILVYRVDRGRKTGELFF

SEQ ID NO: 447329 - protein, 13 aa, Homo sapiens
  CDR3 for alpha chain variable domain of TCR clone 223665 (TRAV13-2, TRAJ48)
CAEMDFGNEKLTF

SEQ ID NO: 447330 - protein, 13 aa, Homo sapiens
  CDR3 for beta chain variable domain of TCR clone 223665 (TRBV9, TRBJ2-1)
CASSPSGGNEQFF

SEQ ID NO: 447331 - protein, 15 aa, Homo sapiens
  CDR3 for alpha chain variable domain of TCR clone 223666 (TRAV27, TRAJ50)
CAGVGRGASYAKVIF

SEQ ID NO: 447332 - protein, 14 aa, Homo sapiens
  CDR3 for beta chain variable domain of TCR clone 223666 (TRBV7-2, TRBJ1-1)
CASSFYDLNTEAFF

SEQ ID NO: 447333 - protein, 16 aa, Homo sapiens
  CDR3 for alpha chain variable domain of TCR clone 223667 (TRAV30, TRAJ24)
CGTEIVGADSWGKFQF

SEQ ID NO: 447334 - protein, 13 aa, Homo sapiens
  CDR3 for beta chain variable domain of TCR clone 223667 (TRBV10-3, TRBJ2-7)
CASKLAVNYEQYF

SEQ ID NO: 447335 - protein, 13 aa, Homo sapiens
  CDR3 for alpha chain variable domain of TCR clone 223668 (TRAV26-1, TRAJ48)
CIVRVVGDEKLTF

SEQ ID NO: 447336 - protein, 15 aa, Homo sapiens
  CDR3 for beta chain variable domain of TCR clone 223668 (TRBV7-9, TRBJ2-1)
CASSFVGAGKNEQFF

SEQ ID NO: 447337 - protein, 13 aa, Homo sapiens
  CDR3 for alpha chain variable domain of TCR clone 223669 (TRAV12-3, TRAJ13)
CAMGTGGYEKVTF

SEQ ID NO: 447338 - protein, 14 aa, Homo sapiens
  CDR3 for beta chain variable domain of TCR clone 223669 (TRBV7-2, TRBJ2-5)
CASSTGGELKTQYF

SEQ ID NO: 447339 - protein, 15 aa, Homo sapiens
  CDR3 for alpha chain variable domain of TCR clone 223670 (TRAV26-1, TRAJ29)
FIVRVEGSGNTPLVF

SEQ ID NO: 447340 - protein, 15 aa, Homo sapiens
  CDR3 for beta chain variable domain of TCR clone 223670 (TRBV7-9, TRBJ1-5)
CASRQGHQPNQPQHF

SEQ ID NO: 447341 - protein, 11 aa, Homo sapiens
  CDR3 for alpha chain variable domain of TCR clone 223671 (TRAV17, TRAJ43)
CATDNNNDMRF

SEQ ID NO: 447342 - protein, 15 aa, Homo sapiens
  CDR3 for beta chain variable domain of TCR clone 223671 (TRBV20-1, TRBJ1-2)
FSAIRTGAFNYGYTF

SEQ ID NO: 447343 - protein, 20 aa, Homo sapiens
  CDR3 for alpha chain variable domain of TCR clone 223672 (TRAV12-3, TRAJ41)
YLFIRDSQPSDSATPEALNF

SEQ ID NO: 447344 - protein, 13 aa, Homo sapiens
  CDR3 for beta chain variable domain of TCR clone 223672 (TRBV10-3, TRBJ2-3)
CAIRDTGADTQYF

SEQ ID NO: 447345 - protein, 12 aa, Homo sapiens
  CDR3 for alpha chain variable domain of TCR clone 223673 (TRAV3, TRAJ43)
CAVRDPNNAMRF

SEQ ID NO: 447346 - protein, 16 aa, Homo sapiens
  CDR3 for beta chain variable domain of TCR clone 223673 (TRBV15, TRBJ2-3)
CATRLSGGRAPDTQYF

SEQ ID NO: 447347 - protein, 16 aa, Homo sapiens
  CDR3 for alpha chain variable domain of TCR clone 223674 (TRAV17, TRAJ28)
CATASVSGAGSYQLTF

SEQ ID NO: 447348 - protein, 12 aa, Homo sapiens
  CDR3 for beta chain variable domain of TCR clone 223674 (TRBV24-1, TRBJ1-1)
CATSDSDRGAFF

SEQ ID NO: 447349 - protein, 12 aa, Homo sapiens
  CDR3 for alpha chain variable domain of TCR clone 223675 (TRAV25, TRAJ5)
CAGGGGRRALTF

SEQ ID NO: 447350 - protein, 14 aa, Homo sapiens
  CDR3 for beta chain variable domain of TCR clone 223675 (TRBV19, TRBJ2-1)
CASPTFVLSDEQFF

SEQ ID NO: 447351 - protein, 11 aa, Homo sapiens
  CDR3 for alpha chain variable domain of TCR clone 223676 (TRAV13-1, TRAJ47)
CAAAPRNKLVF

SEQ ID NO: 447352 - protein, 15 aa, Homo sapiens
  CDR3 for beta chain variable domain of TCR clone 223676 (TRBV7-9, TRBJ1-5)
CASSQGHQPNQPQHF

SEQ ID NO: 447353 - protein, 14 aa, Homo sapiens
  CDR3 for alpha chain variable domain of TCR clone 223677 (TRAV12-2, TRAJ24)
CAVTPADSWGKLQF

SEQ ID NO: 447354 - protein, 15 aa, Homo sapiens
  CDR3 for beta chain variable domain of TCR clone 223677 (TRBV11-3, TRBJ2-3)
CASLKDGREGDTQYF

SEQ ID NO: 447355 - protein, 14 aa, Homo sapiens
  CDR3 for alpha chain variable domain of TCR clone 223678 (TRAV12-1, TRAJ24)
CVVIPTDSWGKLQF

SEQ ID NO: 447356 - protein, 14 aa, Homo sapiens
  CDR3 for beta chain variable domain of TCR clone 223678 (TRBV4-1, TRBJ2-7)
CASSPVAGGDEQYF

SEQ ID NO: 447357 - protein, 14 aa, Homo sapiens
  CDR3 for alpha chain variable domain of TCR clone 223679 (TRAV12-2, TRAJ13)
CAVKTTGGYQNVTF

SEQ ID NO: 447358 - protein, 15 aa, Homo sapiens
  CDR3 for beta chain variable domain of TCR clone 223679 (TRBV27, TRBJ2-1)
CASSNGGGSSNEQFF

SEQ ID NO: 447359 - protein, 14 aa, Homo sapiens
  CDR3 for alpha chain variable domain of TCR clone 223680 (TRAV26-1, TRAJ34)
CIVRESYNTDKLIF

SEQ ID NO: 447360 - protein, 13 aa, Homo sapiens
  CDR3 for beta chain variable domain of TCR clone 223680 (TRBV12-5, TRBJ2-3)
CARGDRQSDTQYF

SEQ ID NO: 447361 - protein, 14 aa, Homo sapiens
  CDR3 for alpha chain variable domain of TCR clone 223681 (TRAV3, TRAJ9)
CAVRLNTGGFKTIF

SEQ ID NO: 447362 - protein, 15 aa, Homo sapiens
  CDR3 for beta chain variable domain of TCR clone 223681 (TRBV7-2, TRBJ2-1)
CASSLASGSVNEQFF

SEQ ID NO: 447363 - protein, 17 aa, Homo sapiens
  CDR3 for alpha chain variable domain of TCR clone 223682 (TRAV26-1, TRAJ37)
CIVRVITVSSNTGKLIF

SEQ ID NO: 447364 - protein, 16 aa, Homo sapiens
  CDR3 for beta chain variable domain of TCR clone 223682 (TRBV4-3, TRBJ2-7)
CASSPRTSGRSYEQYF

SEQ ID NO: 447365 - protein, 15 aa, Homo sapiens
  CDR3 for alpha chain variable domain of TCR clone 223683 (TRAV35, TRAJ50)
CAGQLRKTSYDKVIF

SEQ ID NO: 447366 - protein, 12 aa, Homo sapiens
  CDR3 for beta chain variable domain of TCR clone 223683 (TRBV5-1, TRBJ2-5)
CASSLGLETQYC

SEQ ID NO: 447367 - protein, 14 aa, Homo sapiens
  CDR3 for alpha chain variable domain of TCR clone 223684 (TRAV35, TRAJ50)
CAGHRQTSYDKVIF

SEQ ID NO: 447368 - protein, 13 aa, Homo sapiens
  CDR3 for beta chain variable domain of TCR clone 223684 (TRBV7-7, TRBJ2-3)
CASSLSRADTQDF

SEQ ID NO: 447369 - protein, 15 aa, Homo sapiens
  CDR3 for alpha chain variable domain of TCR clone 223685 (TRAV12-2, TRAJ56)
CAVNPFTGANSKLTF

SEQ ID NO: 447370 - protein, 17 aa, Homo sapiens
  CDR3 for beta chain variable domain of TCR clone 223685 (TRBV7-9, TRBJ1-5)
CASSASQGGYSNQPQHF

SEQ ID NO: 447371 - protein, 12 aa, Homo sapiens
  CDR3 for alpha chain variable domain of TCR clone 223686 (TRAV8-3, TRAJ20)
CAVGANDYKLSF

SEQ ID NO: 447372 - protein, 13 aa, Homo sapiens
  CDR3 for beta chain variable domain of TCR clone 223686 (TRBV2, TRBJ2-5)
CASGTPYQETQYF

SEQ ID NO: 447373 - protein, 13 aa, Homo sapiens
  CDR3 for alpha chain variable domain of TCR clone 223687 (TRAV26-2, TRAJ43)
CILRAVNNNDMRF

SEQ ID NO: 447374 - protein, 13 aa, Homo sapiens
  CDR3 for beta chain variable domain of TCR clone 223687 (TRBV18, TRBJ2-5)
CASSLQGQETQYF

SEQ ID NO: 447375 - protein, 14 aa, Homo sapiens
  CDR3 for alpha chain variable domain of TCR clone 223688 (TRAV35, TRAJ22)
CAGHLSGSARQLTF

SEQ ID NO: 447376 - protein, 16 aa, Homo sapiens
  CDR3 for beta chain variable domain of TCR clone 223688 (TRBV7-9, TRBJ2-3)
CASSPWREVGTDTQYF

SEQ ID NO: 447377 - protein, 14 aa, Homo sapiens
  CDR3 for alpha chain variable domain of TCR clone 223689 (TRAV12-1, TRAJ49)
CVVRSSNTGNQFYF

SEQ ID NO: 447378 - protein, 14 aa, Homo sapiens
  CDR3 for beta chain variable domain of TCR clone 223689 (TRBV9, TRBJ2-1)
CASRGAGPYNEQFF

SEQ ID NO: 447379 - protein, 12 aa, Homo sapiens
  CDR3 for alpha chain variable domain of TCR clone 223690 (TRAV13-2, TRAJ23)
CAERPRGGKLIF

SEQ ID NO: 447380 - protein, 15 aa, Homo sapiens
  CDR3 for beta chain variable domain of TCR clone 223690 (TRBV7-9, TRBJ1-6)
CASSSPGRGNSPLHF

SEQ ID NO: 447381 - protein, 13 aa, Homo sapiens
  CDR3 for alpha chain variable domain of TCR clone 223691 (TRAV2, TRAJ40)
CAVVTSGTYKYIF

SEQ ID NO: 447382 - protein, 16 aa, Homo sapiens
  CDR3 for beta chain variable domain of TCR clone 223691 (TRBV11-2, TRBJ2-3)
CASSSRTSGGAGTQYF

SEQ ID NO: 447383 - protein, 14 aa, Homo sapiens
  CDR3 for alpha chain variable domain of TCR clone 223692 (TRAV12-2, TRAJ13)
CAVKKTGGYLKVTS

SEQ ID NO: 447384 - protein, 12 aa, Homo sapiens
  CDR3 for beta chain variable domain of TCR clone 223692 (TRBV12-4, TRBJ2-7)
CASSLGGYEQYF

SEQ ID NO: 447385 - protein, 12 aa, Homo sapiens
  CDR3 for alpha chain variable domain of TCR clone 223693 (TRAV25, TRAJ11)
CAGASGYSTLTF

SEQ ID NO: 447386 - protein, 13 aa, Homo sapiens
  CDR3 for beta chain variable domain of TCR clone 223693 (TRBV5-8, TRBJ2-3)
CRQLGQGTDTQYF

SEQ ID NO: 447387 - protein, 17 aa, Homo sapiens
  CDR3 for alpha chain variable domain of TCR clone 223694 (TRAV3, TRAJ42)
CAVRDRDYGASQGNPIF

SEQ ID NO: 447388 - protein, 15 aa, Homo sapiens
  CDR3 for beta chain variable domain of TCR clone 223694 (TRBV6-6, TRBJ2-7)
CASSYSYGGSYEQYF

SEQ ID NO: 447389 - protein, 14 aa, Homo sapiens
  CDR3 for alpha chain variable domain of TCR clone 223695 (TRAV12-2, TRAJ11)
CAVEGGSGYSTLTF

SEQ ID NO: 447390 - protein, 15 aa, Homo sapiens
  CDR3 for beta chain variable domain of TCR clone 223695 (TRBV4-3, TRBJ2-7)
CASSQDLGSSYEQYF

SEQ ID NO: 447391 - protein, 13 aa, Homo sapiens
  CDR3 for alpha chain variable domain of TCR clone 223696 (TRAV12-1, TRAJ39)
CVALNNAGNMLTF

SEQ ID NO: 447392 - protein, 15 aa, Homo sapiens
  CDR3 for beta chain variable domain of TCR clone 223696 (TRBV14, TRBJ2-5)
RASSRRGGVQETQYF

SEQ ID NO: 447393 - protein, 13 aa, Homo sapiens
  CDR3 for alpha chain variable domain of TCR clone 223697 (TRAV20, TRAJ37)
CTGCSSNTGKLIF

SEQ ID NO: 447394 - protein, 21 aa, Homo sapiens
  CDR3 for beta chain variable domain of TCR clone 223697 (TRBV4-2, TRBJ2-3)
PCSQKTRPCISVPAAPDTQYF

SEQ ID NO: 447395 - protein, 13 aa, Homo sapiens
  CDR3 for alpha chain variable domain of TCR clone 223698 (TRAV30, TRAJ24)
CGTVTDSWGKLQF

SEQ ID NO: 447396 - protein, 15 aa, Homo sapiens
  CDR3 for beta chain variable domain of TCR clone 223698 (TRBV19, TRBJ1-1)
CASTSGQIQNTEAFC

SEQ ID NO: 447397 - protein, 11 aa, Homo sapiens
  CDR3 for alpha chain variable domain of TCR clone 223699 (TRAV2, TRAJ13)
CASGGYQKVTF

SEQ ID NO: 447398 - protein, 13 aa, Homo sapiens
  CDR3 for beta chain variable domain of TCR clone 223699 (TRBV19, TRBJ1-2)
CASSVPGQDGYVF

SEQ ID NO: 447399 - protein, 14 aa, Homo sapiens
  CDR3 for alpha chain variable domain of TCR clone 223700 (TRAV12-3, TRAJ12)
CAMSRMDSSDKLIF

SEQ ID NO: 447400 - protein, 14 aa, Homo sapiens
  CDR3 for beta chain variable domain of TCR clone 223700 (TRBV20-1, TRBJ1-4)
CSARSGQSNEKLFF

SEQ ID NO: 447401 - protein, 11 aa, Homo sapiens
  CDR3 for alpha chain variable domain of TCR clone 223701 (TRAV12-3, TRAJ27)
CAMANPGKSTF

SEQ ID NO: 447402 - protein, 13 aa, Homo sapiens
  CDR3 for beta chain variable domain of TCR clone 223701 (TRBV20-1, TRBJ1-1)
CSARVGGNTEAFF

SEQ ID NO: 447403 - protein, 15 aa, Homo sapiens
  CDR3 for alpha chain variable domain of TCR clone 223702 (TRAV8-3, TRAJ44)
CAVGAGAGTASKLTL

SEQ ID NO: 447404 - protein, 12 aa, Homo sapiens
  CDR3 for beta chain variable domain of TCR clone 223702 (TRBV7-8, TRBJ2-4)
CASSLGGNIQYF

SEQ ID NO: 447405 - protein, 12 aa, Homo sapiens
  CDR3 for alpha chain variable domain of TCR clone 223703 (TRAV21, TRAJ23)
CAVMLQGGKLIF

SEQ ID NO: 447406 - protein, 12 aa, Homo sapiens
  CDR3 for beta chain variable domain of TCR clone 223703 (TRBV19, TRBJ2-1)
CASSRQGAEQFF

SEQ ID NO: 447407 - protein, 14 aa, Homo sapiens
  CDR3 for alpha chain variable domain of TCR clone 223704 (TRAV4, TRAJ17)
CLVGDMAAGNKLTF

SEQ ID NO: 447408 - protein, 13 aa, Homo sapiens
  CDR3 for beta chain variable domain of TCR clone 223704 (TRBV18, TRBJ2-7)
CASQSRGGYEQYL

SEQ ID NO: 447409 - protein, 15 aa, Homo sapiens
  CDR3 for alpha chain variable domain of TCR clone 223705 (TRAV17, TRAJ57)
CATDWTPGGPEKLVF

SEQ ID NO: 447410 - protein, 15 aa, Homo sapiens
  CDR3 for beta chain variable domain of TCR clone 223705 (TRBV27, TRBJ2-1)
CASSLAGGPFNEQFF

SEQ ID NO: 447411 - protein, 14 aa, Homo sapiens
  CDR3 for alpha chain variable domain of TCR clone 223706 (TRAV4, TRAJ17)
CLVGDMAAGNKLTF

SEQ ID NO: 447412 - protein, 14 aa, Homo sapiens
  CDR3 for beta chain variable domain of TCR clone 223706 (TRBV4-1, TRBJ2-7)
CASSTVAGGDEQYF

SEQ ID NO: 447413 - protein, 16 aa, Homo sapiens
  CDR3 for alpha chain variable domain of TCR clone 223707 (TRAV26-1, TRAJ32)
CIVRTTYGGATNKPIF

SEQ ID NO: 447414 - protein, 14 aa, Homo sapiens
  CDR3 for beta chain variable domain of TCR clone 223707 (TRBV27, TRBJ1-1)
CASSLLSGLSEAFF

SEQ ID NO: 447415 - protein, 17 aa, Homo sapiens
  CDR3 for alpha chain variable domain of TCR clone 223708 (TRAV4, TRAJ18)
CLVGERSVGSTLGRLYF

SEQ ID NO: 447416 - protein, 14 aa, Homo sapiens
  CDR3 for beta chain variable domain of TCR clone 223708 (TRBV19, TRBJ2-7)
CASSMGQGAIEQYF

SEQ ID NO: 447417 - protein, 20 aa, Homo sapiens
  CDR3 for alpha chain variable domain of TCR clone 223709 (TRAV30, TRAJ54)
SAAQSRSETQVVQGAQTLVF

SEQ ID NO: 447418 - protein, 11 aa, Homo sapiens
  CDR3 for beta chain variable domain of TCR clone 223709 (TRBV25-1, TRBJ2-4)
CQSRDQNIQYF

SEQ ID NO: 447419 - protein, 17 aa, Homo sapiens
  CDR3 for alpha chain variable domain of TCR clone 223710 (TRAV3, TRAJ12)
CAVRDGRRMDSSYKLIF

SEQ ID NO: 447420 - protein, 16 aa, Homo sapiens
  CDR3 for beta chain variable domain of TCR clone 223710 (TRBV9, TRBJ2-2)
CASSAMGKGNTGELFF

SEQ ID NO: 447421 - protein, 15 aa, Homo sapiens
  CDR3 for alpha chain variable domain of TCR clone 223711 (TRAV3, TRAJ9)
CAVRARNTGGFKTNF

SEQ ID NO: 447422 - protein, 14 aa, Homo sapiens
  CDR3 for beta chain variable domain of TCR clone 223711 (TRBV7-9, TRBJ2-1)
CASSPRDSLYEQFF

SEQ ID NO: 447423 - protein, 14 aa, Homo sapiens
  CDR3 for alpha chain variable domain of TCR clone 223712 (TRAV12-2, TRAJ8)
CAVKENTGFQKLVF

SEQ ID NO: 447424 - protein, 16 aa, Homo sapiens
  CDR3 for beta chain variable domain of TCR clone 223712 (TRBV12-5, TRBJ2-5)
CASGPRTSGNQETQYF

SEQ ID NO: 447425 - protein, 20 aa, Homo sapiens
  CDR3 for alpha chain variable domain of TCR clone 223713 (TRAV26-1, TRAJ42)
CCVLLHRQTYHGGSQGNLIF

SEQ ID NO: 447426 - protein, 16 aa, Homo sapiens
  CDR3 for beta chain variable domain of TCR clone 223713 (TRBV7-3, TRBJ2-2)
CASSLKRGTLSGELFF

SEQ ID NO: 447427 - protein, 17 aa, Homo sapiens
  CDR3 for alpha chain variable domain of TCR clone 223714 (TRAV4, TRAJ18)
CLVDERSVGSTLGRLYF

SEQ ID NO: 447428 - protein, 14 aa, Homo sapiens
  CDR3 for beta chain variable domain of TCR clone 223714 (TRBV6-5, TRBJ1-2)
CASSYDGTGGGYTF

SEQ ID NO: 447429 - protein, 12 aa, Homo sapiens
  CDR3 for alpha chain variable domain of TCR clone 223715 (TRAV9-2, TRAJ26)
CALRGYDQNFVF

SEQ ID NO: 447430 - protein, 12 aa, Homo sapiens
  CDR3 for beta chain variable domain of TCR clone 223715 (TRBV29-1, TRBJ2-3)
CSVTGGADTQYF

SEQ ID NO: 447431 - protein, 12 aa, Homo sapiens
  CDR3 for alpha chain variable domain of TCR clone 223716 (TRAV13-2, TRAJ39)
CAENNAGNMLTF

SEQ ID NO: 447432 - protein, 17 aa, Homo sapiens
  CDR3 for beta chain variable domain of TCR clone 223716 (TRBV7-8, TRBJ2-6)
CASSAGTGGAGANVLTF

SEQ ID NO: 447433 - protein, 14 aa, Homo sapiens
  CDR3 for alpha chain variable domain of TCR clone 223717 (TRAV12-3, TRAJ29)
CAMNLLSGNQPLVF

SEQ ID NO: 447434 - protein, 16 aa, Homo sapiens
  CDR3 for beta chain variable domain of TCR clone 223717 (TRBV28, TRBJ2-7)
CASSSGTSGRGYEQYF

SEQ ID NO: 447435 - protein, 13 aa, Homo sapiens
  CDR3 for alpha chain variable domain of TCR clone 223718 (TRAV30, TRAJ24)
CGTVTDSWGKLQF

SEQ ID NO: 447436 - protein, 14 aa, Homo sapiens
  CDR3 for beta chain variable domain of TCR clone 223718 (TRBV6-3, TRBJ2-2)
CASTYTPDTGDLFF

SEQ ID NO: 447437 - protein, 15 aa, Homo sapiens
  CDR3 for alpha chain variable domain of TCR clone 223719 (TRAV8-1, TRAJ6)
CAVNTPPGGGYIPTF

SEQ ID NO: 447438 - protein, 14 aa, Homo sapiens
  CDR3 for beta chain variable domain of TCR clone 223719 (TRBV12-4, TRBJ2-1)
CASSLAQGASEQFF

SEQ ID NO: 447439 - protein, 14 aa, Homo sapiens
  CDR3 for alpha chain variable domain of TCR clone 223720 (TRAV3, TRAJ34)
CAVRAPGNTDKHIF

SEQ ID NO: 447440 - protein, 15 aa, Homo sapiens
  CDR3 for beta chain variable domain of TCR clone 223720 (TRBV27, TRBJ1-4)
CASSNRRGFNEKLFF

SEQ ID NO: 447441 - protein, 15 aa, Homo sapiens
  CDR3 for alpha chain variable domain of TCR clone 223721 (TRAV17, TRAJ13)
CATYAGSVGYQKVTF

SEQ ID NO: 447442 - protein, 17 aa, Homo sapiens
  CDR3 for beta chain variable domain of TCR clone 223721 (TRBV11-2, TRBJ2-1)
CASSLYPPGVEYNEQFF

SEQ ID NO: 447443 - protein, 14 aa, Homo sapiens
  CDR3 for alpha chain variable domain of TCR clone 223722 (TRAV12-2, TRAJ17)
CAVLFKAAGNKLTF

SEQ ID NO: 447444 - protein, 16 aa, Homo sapiens
  CDR3 for beta chain variable domain of TCR clone 223722 (TRBV7-7, TRBJ2-1)
CASSLASGTSYNEQFF

SEQ ID NO: 447445 - protein, 11 aa, Homo sapiens
  CDR3 for alpha chain variable domain of TCR clone 223723 (TRAV13-1, TRAJ15)
CAATPGTALIF

SEQ ID NO: 447446 - protein, 16 aa, Homo sapiens
  CDR3 for beta chain variable domain of TCR clone 223723 (TRBV7-3, TRBJ2-2)
CASSLKRGTLSGELFF

SEQ ID NO: 447447 - protein, 16 aa, Homo sapiens
  CDR3 for alpha chain variable domain of TCR clone 223724 (TRAV3, TRAJ37)
CAVRPHGSGNTGKLIF

SEQ ID NO: 447448 - protein, 16 aa, Homo sapiens
  CDR3 for beta chain variable domain of TCR clone 223724 (TRBV9, TRBJ1-2)
CASSVDEKVSPYGYTF

SEQ ID NO: 447449 - protein, 17 aa, Homo sapiens
  CDR3 for alpha chain variable domain of TCR clone 223725 (TRAV13-1, TRAJ52)
CAASSGAGGTSYGKLTF

SEQ ID NO: 447450 - protein, 17 aa, Homo sapiens
  CDR3 for beta chain variable domain of TCR clone 223725 (TRBV7-9, TRBJ2-1)
CASSLVASYPSYNEQFF

SEQ ID NO: 447451 - protein, 16 aa, Homo sapiens
  CDR3 for alpha chain variable domain of TCR clone 223726 (TRAV12-1, TRAJ48)
CVVNMVSNFGNEKLTF

SEQ ID NO: 447452 - protein, 18 aa, Homo sapiens
  CDR3 for beta chain variable domain of TCR clone 223726 (TRBV11-2, TRBJ2-6)
CASSLNPCPGTGANVLTF

SEQ ID NO: 447453 - protein, 14 aa, Homo sapiens
  CDR3 for alpha chain variable domain of TCR clone 223727 (TRAV8-1, TRAJ13)
CAVKRSGGYQKVTF

SEQ ID NO: 447454 - protein, 14 aa, Homo sapiens
  CDR3 for beta chain variable domain of TCR clone 223727 (TRBV12-5, TRBJ2-5)
CACGSRTHQETQYF

SEQ ID NO: 447455 - protein, 14 aa, Homo sapiens
  CDR3 for alpha chain variable domain of TCR clone 223728 (TRAV1-2, TRAJ16)
CAVNRFSDGQKLLF

SEQ ID NO: 447456 - protein, 16 aa, Homo sapiens
  CDR3 for beta chain variable domain of TCR clone 223728 (TRBV11-2, TRBJ2-2)
CASSTHRGSDTGELFF

SEQ ID NO: 447457 - protein, 15 aa, Homo sapiens
  CDR3 for alpha chain variable domain of TCR clone 223729 (TRAV8-3, TRAJ27)
CAVGPSKTNAGKSTF

SEQ ID NO: 447458 - protein, 14 aa, Homo sapiens
  CDR3 for beta chain variable domain of TCR clone 223729 (TRBV4-2, TRBJ2-5)
CASSQDRGRETQYF

SEQ ID NO: 447459 - protein, 15 aa, Homo sapiens
  CDR3 for alpha chain variable domain of TCR clone 223730 (TRAV3, TRAJ22)
CAVRDRGGSARQLTF

SEQ ID NO: 447460 - protein, 12 aa, Homo sapiens
  CDR3 for beta chain variable domain of TCR clone 223730 (TRBV7-9, TRBJ2-5)
CASSPNIETQYF

SEQ ID NO: 447461 - protein, 16 aa, Homo sapiens
  CDR3 for alpha chain variable domain of TCR clone 223731 (TRAV30, TRAJ24)
CGTEIVDADSWGKFQF

SEQ ID NO: 447462 - protein, 13 aa, Homo sapiens
  CDR3 for beta chain variable domain of TCR clone 223731 (TRBV29-1, TRBJ2-3)
CSATRGGRDTQYF

SEQ ID NO: 447463 - protein, 12 aa, Homo sapiens
  CDR3 for alpha chain variable domain of TCR clone 223732 (TRAV12-3, TRAJ17)
CAMTLTGNKLTF

SEQ ID NO: 447464 - protein, 15 aa, Homo sapiens
  CDR3 for beta chain variable domain of TCR clone 223732 (TRBV20-1, TRBJ2-7)
CSARDWVSGVDEQYF

SEQ ID NO: 447465 - protein, 15 aa, Homo sapiens
  CDR3 for alpha chain variable domain of TCR clone 223733 (TRAV17, TRAJ57)
CATGPSQGVSEKLVF

SEQ ID NO: 447466 - protein, 15 aa, Homo sapiens
  CDR3 for beta chain variable domain of TCR clone 223733 (TRBV6-3, TRBJ2-7)
CASNSPGTVFYEQYF

SEQ ID NO: 447467 - protein, 15 aa, Homo sapiens
  CDR3 for alpha chain variable domain of TCR clone 223734 (TRAV6, TRAJ4)
YALGGFSGGYNKLIF

SEQ ID NO: 447468 - protein, 13 aa, Homo sapiens
  CDR3 for beta chain variable domain of TCR clone 223734 (TRBV19, TRBJ1-2)
CASSVPGQDGYTF

SEQ ID NO: 447469 - protein, 14 aa, Homo sapiens
  CDR3 for alpha chain variable domain of TCR clone 223735 (TRAV1-2, TRAJ8)
CAVREDTGFQKLVF

SEQ ID NO: 447470 - protein, 16 aa, Homo sapiens
  CDR3 for beta chain variable domain of TCR clone 223735 (TRBV7-2, TRBJ2-5)
CASSPWTAGGQETQYF

SEQ ID NO: 447471 - protein, 13 aa, Homo sapiens
  CDR3 for alpha chain variable domain of TCR clone 223736 (TRAV38-2/DV8, TRAJ49)
CAYRRRTGNQFYF

SEQ ID NO: 447472 - protein, 15 aa, Homo sapiens
  CDR3 for beta chain variable domain of TCR clone 223736 (TRBV24-1, TRBJ1-1)
CATSDPKTVNTEAFF

SEQ ID NO: 447473 - protein, 15 aa, Homo sapiens
  CDR3 for alpha chain variable domain of TCR clone 223737 (TRAV3, TRAJ5)
CAVRDLYPGRRALTF

SEQ ID NO: 447474 - protein, 16 aa, Homo sapiens
  CDR3 for beta chain variable domain of TCR clone 223737 (TRBV20-1, TRBJ1-4)
CSAPGQGLLTNEKLFF

SEQ ID NO: 447475 - protein, 15 aa, Homo sapiens
  CDR3 for alpha chain variable domain of TCR clone 223738 (TRAV2, TRAJ9)
CAVAAVNTGGFKTIV

SEQ ID NO: 447476 - protein, 14 aa, Homo sapiens
  CDR3 for beta chain variable domain of TCR clone 223738 (TRBV7-8, TRBJ2-5)
CASSATGGKETQYF

SEQ ID NO: 447477 - protein, 15 aa, Homo sapiens
  CDR3 for alpha chain variable domain of TCR clone 223739 (TRAV22, TRAJ45)
CAAKYSGGGADGLTF

SEQ ID NO: 447478 - protein, 12 aa, Homo sapiens
  CDR3 for beta chain variable domain of TCR clone 223739 (TRBV11-2, TRBJ2-2)
CASSLGGGELFF

SEQ ID NO: 447479 - protein, 15 aa, Homo sapiens
  CDR3 for alpha chain variable domain of TCR clone 223740 (TRAV8-2, TRAJ40)
CVVLGTTSGTYKYIF

SEQ ID NO: 447480 - protein, 13 aa, Homo sapiens
  CDR3 for beta chain variable domain of TCR clone 223740 (TRBV19, TRBJ1-2)
CASSVPGQDGYIF

SEQ ID NO: 447481 - protein, 13 aa, Homo sapiens
  CDR3 for alpha chain variable domain of TCR clone 223741 (TRAV17, TRAJ40)
CATDEGGTYKYIF

SEQ ID NO: 447482 - protein, 14 aa, Homo sapiens
  CDR3 for beta chain variable domain of TCR clone 223741 (TRBV7-2, TRBJ2-7)
CASSLPPGQGPQYF

SEQ ID NO: 447483 - protein, 11 aa, Homo sapiens
  CDR3 for alpha chain variable domain of TCR clone 223742 (TRAV17, TRAJ9)
CATTGGFKTIF

SEQ ID NO: 447484 - protein, 16 aa, Homo sapiens
  CDR3 for beta chain variable domain of TCR clone 223742 (TRBV4-2, TRBJ1-1)
CASSPSPGRAAPEAFF

SEQ ID NO: 447485 - protein, 17 aa, Homo sapiens
  CDR3 for alpha chain variable domain of TCR clone 223743 (TRAV9-2, TRAJ10)
CSLTVTILTGGGNKLTF

SEQ ID NO: 447486 - protein, 17 aa, Homo sapiens
  CDR3 for beta chain variable domain of TCR clone 223743 (TRBV6-3, TRBJ1-1)
CASSYSGRGRRNTEAFF

SEQ ID NO: 447487 - protein, 17 aa, Homo sapiens
  CDR3 for alpha chain variable domain of TCR clone 223744 (TRAV3, TRAJ42)
CAVKDRDYGGSQGNLIF

SEQ ID NO: 447488 - protein, 15 aa, Homo sapiens
  CDR3 for beta chain variable domain of TCR clone 223744 (TRBV6-5, TRBJ2-1)
CASSYDAGAGNEQFF

SEQ ID NO: 447489 - protein, 13 aa, Homo sapiens
  CDR3 for alpha chain variable domain of TCR clone 223745 (TRAV2, TRAJ15)
CAVASQAGTALIF

SEQ ID NO: 447490 - protein, 15 aa, Homo sapiens
  CDR3 for beta chain variable domain of TCR clone 223745 (TRBV7-2, TRBJ2-1)
CASTHGTGIYNEQFF

SEQ ID NO: 447491 - protein, 12 aa, Homo sapiens
  CDR3 for alpha chain variable domain of TCR clone 223746 (TRAV8-3, TRAJ41)
CAVGALGYALNF

SEQ ID NO: 447492 - protein, 16 aa, Homo sapiens
  CDR3 for beta chain variable domain of TCR clone 223746 (TRBV7-6, TRBJ2-3)
CASSVSRGEGTDTQYF

SEQ ID NO: 447493 - protein, 15 aa, Homo sapiens
  CDR3 for alpha chain variable domain of TCR clone 223747 (TRAV12-3, TRAJ6)
CAMSATKGGSYIPTF

SEQ ID NO: 447494 - protein, 16 aa, Homo sapiens
  CDR3 for beta chain variable domain of TCR clone 223747 (TRBV27, TRBJ2-5)
CASSFGPGGTKETQYF

SEQ ID NO: 447495 - protein, 14 aa, Homo sapiens
  CDR3 for alpha chain variable domain of TCR clone 223748 (TRAV17, TRAJ56)
CATVPAGANSKLTF

SEQ ID NO: 447496 - protein, 11 aa, Homo sapiens
  CDR3 for beta chain variable domain of TCR clone 223748 (TRBV6-3, TRBJ2-7)
CASSFSYEQYF

SEQ ID NO: 447497 - protein, 23 aa, Homo sapiens
  CDR3 for alpha chain variable domain of TCR clone 223749 (TRAV26-1, TRAJ38)
CIADNAGNNHIQNPDPAVYQLRD

SEQ ID NO: 447498 - protein, 13 aa, Homo sapiens
  CDR3 for beta chain variable domain of TCR clone 223749 (TRBV20-1, TRBJ1-1)
CSARGWGNTEAFF

SEQ ID NO: 447499 - protein, 10 aa, Homo sapiens
  CDR3 for alpha chain variable domain of TCR clone 223750 (TRAV12-2, TRAJ52)
RSTSYGKLTF

SEQ ID NO: 447500 - protein, 11 aa, Homo sapiens
  CDR3 for beta chain variable domain of TCR clone 223750 (TRBV11-2, TRBJ2-2)
CPSSLPGELFF

SEQ ID NO: 447501 - protein, 10 aa, Homo sapiens
  CDR3 for alpha chain variable domain of TCR clone 223751 (TRAV36/DV7, TRAJ38)
CAANNRKLIW

SEQ ID NO: 447502 - protein, 15 aa, Homo sapiens
  CDR3 for beta chain variable domain of TCR clone 223751 (TRBV20-1, TRBJ2-7)
CSARDRVAGMDEQYF

SEQ ID NO: 447503 - protein, 13 aa, Homo sapiens
  CDR3 for alpha chain variable domain of TCR clone 223752 (TRAV13-2, TRAJ48)
CAEMDFGNEKLTF

SEQ ID NO: 447504 - protein, 15 aa, Homo sapiens
  CDR3 for beta chain variable domain of TCR clone 223752 (TRBV4-1, TRBJ2-7)
CASSQNTGRLYEQYF

SEQ ID NO: 447505 - protein, 13 aa, Homo sapiens
  CDR3 for alpha chain variable domain of TCR clone 223753 (TRAV25, TRAJ30)
CAGRVDRDDKIIF

SEQ ID NO: 447506 - protein, 17 aa, Homo sapiens
  CDR3 for beta chain variable domain of TCR clone 223753 (TRBV7-9, TRBJ2-6)
CASSFGAGYSGANVLTF

SEQ ID NO: 447507 - protein, 13 aa, Homo sapiens
  CDR3 for alpha chain variable domain of TCR clone 223754 (TRAV8-6, TRAJ49)
CAVITNTGNQFYF

SEQ ID NO: 447508 - protein, 14 aa, Homo sapiens
  CDR3 for beta chain variable domain of TCR clone 223754 (TRBV5-1, TRBJ2-7)
CASSRWESLYEQYF

SEQ ID NO: 447509 - protein, 11 aa, Homo sapiens
  CDR3 for alpha chain variable domain of TCR clone 223755 (TRAV12-1, TRAJ34)
CVVNKGRELIF

SEQ ID NO: 447510 - protein, 12 aa, Homo sapiens
  CDR3 for beta chain variable domain of TCR clone 223755 (TRBV2, TRBJ2-1)
CAYGPPGKEQFF

SEQ ID NO: 447511 - protein, 13 aa, Homo sapiens
  CDR3 for alpha chain variable domain of TCR clone 223756 (TRAV13-1, TRAJ21)
CAASIYNFNKFYF

SEQ ID NO: 447512 - protein, 17 aa, Homo sapiens
  CDR3 for beta chain variable domain of TCR clone 223756 (TRBV7-9, TRBJ2-2)
CASSLGVAGMNTGELFF

SEQ ID NO: 447513 - protein, 14 aa, Homo sapiens
  CDR3 for alpha chain variable domain of TCR clone 223757 (TRAV16, TRAJ37)
CALDISGNTGKLIF

SEQ ID NO: 447514 - protein, 14 aa, Homo sapiens
  CDR3 for beta chain variable domain of TCR clone 223757 (TRBV7-6, TRBJ2-7)
CASSFRQGADEQDF

SEQ ID NO: 447515 - protein, 14 aa, Homo sapiens
  CDR3 for alpha chain variable domain of TCR clone 223758 (TRAV38-1, TRAJ45)
CASHSGGGADGLTF

SEQ ID NO: 447516 - protein, 15 aa, Homo sapiens
  CDR3 for beta chain variable domain of TCR clone 223758 (TRBV10-2, TRBJ2-6)
CASSEQGTGANVLPF

SEQ ID NO: 447517 - protein, 13 aa, Homo sapiens
  CDR3 for alpha chain variable domain of TCR clone 223759 (TRAV1-1, TRAJ9)
CAAKNTGGFKTIF

SEQ ID NO: 447518 - protein, 15 aa, Homo sapiens
  CDR3 for beta chain variable domain of TCR clone 223759 (TRBV20-1, TRBJ2-7)
CSARDRVSGMDEQYF

SEQ ID NO: 447519 - protein, 17 aa, Homo sapiens
  CDR3 for alpha chain variable domain of TCR clone 223760 (TRAV3, TRAJ6)
CAVRDGPRAGGSYIPTF

SEQ ID NO: 447520 - protein, 13 aa, Homo sapiens
  CDR3 for beta chain variable domain of TCR clone 223760 (TRBV2, TRBJ2-1)
CASSGTSGGEQFF

SEQ ID NO: 447521 - protein, 14 aa, Homo sapiens
  CDR3 for alpha chain variable domain of TCR clone 223761 (TRAV9-2, TRAJ38)
CALSRAGNNRKLIW

SEQ ID NO: 447522 - protein, 14 aa, Homo sapiens
  CDR3 for beta chain variable domain of TCR clone 223761 (TRBV27, TRBJ2-5)
CASSSLKGWETQYF

SEQ ID NO: 447523 - protein, 14 aa, Homo sapiens
  CDR3 for alpha chain variable domain of TCR clone 223762 (TRAV20, TRAJ20)
CAVRRGYNDYKLSF

SEQ ID NO: 447524 - protein, 13 aa, Homo sapiens
  CDR3 for beta chain variable domain of TCR clone 223762 (TRBV19, TRBJ2-5)
CASSETTPETQYF

SEQ ID NO: 447525 - protein, 16 aa, Homo sapiens
  CDR3 for alpha chain variable domain of TCR clone 223763 (TRAV3, TRAJ10)
CAVRDMRAGGGNKLTF

SEQ ID NO: 447526 - protein, 13 aa, Homo sapiens
  CDR3 for beta chain variable domain of TCR clone 223763 (TRBV6-3, TRBJ2-3)
CASTLQGIDTQYF

SEQ ID NO: 447527 - protein, 11 aa, Homo sapiens
  CDR3 for alpha chain variable domain of TCR clone 223764 (TRAV2, TRAJ13)
CASGGYQKVTF

SEQ ID NO: 447528 - protein, 17 aa, Homo sapiens
  CDR3 for beta chain variable domain of TCR clone 223764 (TRBV11-2, TRBJ2-1)
CAGSLYPPGVEYNEQFF

SEQ ID NO: 447529 - protein, 13 aa, Homo sapiens
  CDR3 for alpha chain variable domain of TCR clone 223765 (TRAV2, TRAJ40)
CAVVTSGTYKYIF

SEQ ID NO: 447530 - protein, 13 aa, Homo sapiens
  CDR3 for beta chain variable domain of TCR clone 223765 (TRBV7-9, TRBJ2-1)
CASSLDVGNEQFF

SEQ ID NO: 447531 - protein, 15 aa, Homo sapiens
  CDR3 for alpha chain variable domain of TCR clone 223766 (TRAV12-3, TRAJ42)
CAMITSVGSQGNLIF

SEQ ID NO: 447532 - protein, 11 aa, Homo sapiens
  CDR3 for beta chain variable domain of TCR clone 223766 (TRBV19, TRBJ1-1)
CASSIGSEDFF

SEQ ID NO: 447533 - protein, 16 aa, Homo sapiens
  CDR3 for alpha chain variable domain of TCR clone 223767 (TRAV12-3, TRAJ53)
CAMSPGSGGSNYKLTF

SEQ ID NO: 447534 - protein, 12 aa, Homo sapiens
  CDR3 for beta chain variable domain of TCR clone 223767 (TRBV7-3, TRBJ2-1)
CASSFINNEQFF

SEQ ID NO: 447535 - protein, 14 aa, Homo sapiens
  CDR3 for alpha chain variable domain of TCR clone 223768 (TRAV1-2, TRAJ17)
CALRRGAAGNKLTF

SEQ ID NO: 447536 - protein, 14 aa, Homo sapiens
  CDR3 for beta chain variable domain of TCR clone 223768 (TRBV7-2, TRBJ2-7)
CASSPKTSFYEQYF

SEQ ID NO: 447537 - protein, 14 aa, Homo sapiens
  CDR3 for alpha chain variable domain of TCR clone 223769 (TRAV12-1, TRAJ17)
CVVNYKDAGSKLTF

SEQ ID NO: 447538 - protein, 17 aa, Homo sapiens
  CDR3 for beta chain variable domain of TCR clone 223769 (TRBV20-1, TRBJ2-1)
CSASSSGLAGSYNEQFF

SEQ ID NO: 447539 - protein, 11 aa, Homo sapiens
  CDR3 for alpha chain variable domain of TCR clone 223770 (TRAV22, TRAJ30)
CAGNRDDKIIF

SEQ ID NO: 447540 - protein, 20 aa, Homo sapiens
  CDR3 for beta chain variable domain of TCR clone 223770 (TRBV28, TRBJ2-1)
CASTPIGRSPGLAGGNEQFF

SEQ ID NO: 447541 - protein, 13 aa, Homo sapiens
  CDR3 for alpha chain variable domain of TCR clone 223771 (TRAV26-1, TRAJ30)
CIVNLNRDDKIIF

SEQ ID NO: 447542 - protein, 16 aa, Homo sapiens
  CDR3 for beta chain variable domain of TCR clone 223771 (TRBV16, TRBJ2-7)
CASSRPAGGSSYEQYF

SEQ ID NO: 447543 - protein, 13 aa, Homo sapiens
  CDR3 for alpha chain variable domain of TCR clone 223772 (TRAV13-1, TRAJ36)
CAARVTGANNLFF

SEQ ID NO: 447544 - protein, 13 aa, Homo sapiens
  CDR3 for beta chain variable domain of TCR clone 223772 (TRBV7-9, TRBJ1-2)
CASSLKQNYGYTF

SEQ ID NO: 447545 - protein, 15 aa, Homo sapiens
  CDR3 for alpha chain variable domain of TCR clone 223773 (TRAV10, TRAJ39)
CGVSASGNAGNMLTF

SEQ ID NO: 447546 - protein, 13 aa, Homo sapiens
  CDR3 for beta chain variable domain of TCR clone 223773 (TRBV18, TRBJ2-7)
CASQSGGGYEQYF

SEQ ID NO: 447547 - protein, 15 aa, Homo sapiens
  CDR3 for alpha chain variable domain of TCR clone 223774 (TRAV3, TRAJ5)
CAVRDLDTGRSALTF

SEQ ID NO: 447548 - protein, 15 aa, Homo sapiens
  CDR3 for beta chain variable domain of TCR clone 223774 (TRBV20-1, TRBJ2-1)
CSARSPGGPGNEQFF

SEQ ID NO: 447549 - protein, 17 aa, Homo sapiens
  CDR3 for alpha chain variable domain of TCR clone 223775 (TRAV3, TRAJ6)
CAVRDGPRAGGSYIPTF

SEQ ID NO: 447550 - protein, 14 aa, Homo sapiens
  CDR3 for beta chain variable domain of TCR clone 223775 (TRBV7-2, TRBJ2-7)
SASSPKTSFYEQYF

SEQ ID NO: 447551 - protein, 14 aa, Homo sapiens
  CDR3 for alpha chain variable domain of TCR clone 223776 (TRAV17, TRAJ22)
CATSPSGSARQLTF

SEQ ID NO: 447552 - protein, 12 aa, Homo sapiens
  CDR3 for beta chain variable domain of TCR clone 223776 (TRBV6-1, TRBJ2-7)
CASRTGRYEQYF

SEQ ID NO: 447553 - protein, 18 aa, Homo sapiens
  CDR3 for alpha chain variable domain of TCR clone 223777 (TRAV21, TRAJ52)
CAVRPSPAGGTSYGKLTF

SEQ ID NO: 447554 - protein, 19 aa, Homo sapiens
  CDR3 for beta chain variable domain of TCR clone 223777 (TRBV7-2, TRBJ2-3)
CASSFLSRKWGGGTDTQYF

SEQ ID NO: 447555 - protein, 14 aa, Homo sapiens
  CDR3 for alpha chain variable domain of TCR clone 223778 (TRAV3, TRAJ40)
CAVRARRGTYKYIF

SEQ ID NO: 447556 - protein, 15 aa, Homo sapiens
  CDR3 for beta chain variable domain of TCR clone 223778 (TRBV11-1, TRBJ1-3)
CASTDPRAFGNTIYF

SEQ ID NO: 447557 - protein, 15 aa, Homo sapiens
  CDR3 for alpha chain variable domain of TCR clone 223779 (TRAV1-2, TRAJ28)
CAVQYSVAGSYQLTF

SEQ ID NO: 447558 - protein, 13 aa, Homo sapiens
  CDR3 for beta chain variable domain of TCR clone 223779 (TRBV4-2, TRBJ1-1)
CASSQAGNTEAFF

SEQ ID NO: 447559 - protein, 14 aa, Homo sapiens
  CDR3 for alpha chain variable domain of TCR clone 223780 (TRAV8-3, TRAJ35)
CAVVPQGFGNVLHC

SEQ ID NO: 447560 - protein, 14 aa, Homo sapiens
  CDR3 for beta chain variable domain of TCR clone 223780 (TRBV7-2, TRBJ1-6)
CASSLQGANSPLHF

SEQ ID NO: 447561 - protein, 14 aa, Homo sapiens
  CDR3 for alpha chain variable domain of TCR clone 223781 (TRAV13-1, TRAJ35)
CAASKGGFGNAMHC

SEQ ID NO: 447562 - protein, 13 aa, Homo sapiens
  CDR3 for beta chain variable domain of TCR clone 223781 (TRBV7-3, TRBJ1-1)
CASSQDWGAEAFF

SEQ ID NO: 447563 - protein, 11 aa, Homo sapiens
  CDR3 for alpha chain variable domain of TCR clone 223782 (TRAV39, TRAJ27)
CAVVNAGKSTF

SEQ ID NO: 447564 - protein, 13 aa, Homo sapiens
  CDR3 for beta chain variable domain of TCR clone 223782 (TRBV7-3, TRBJ1-1)
CASSQDWGAEAFF

SEQ ID NO: 447565 - protein, 17 aa, Homo sapiens
  CDR3 for alpha chain variable domain of TCR clone 223783 (TRAV13-1, TRAJ31)
CAPRDRLMFGDGTQLVV

SEQ ID NO: 447566 - protein, 16 aa, Homo sapiens
  CDR3 for beta chain variable domain of TCR clone 223783 (TRBV20-1, TRBJ1-4)
CSAPGQGLLTNEKLFF

SEQ ID NO: 447567 - protein, 18 aa, Homo sapiens
  CDR3 for alpha chain variable domain of TCR clone 223784 (TRAV12-3, TRAJ52)
CAMSVGGAGGTSYGELTF

SEQ ID NO: 447568 - protein, 15 aa, Homo sapiens
  CDR3 for beta chain variable domain of TCR clone 223784 (TRBV6-5, TRBJ2-1)
CASSYDAGAGNEQFF

SEQ ID NO: 447569 - protein, 14 aa, Homo sapiens
  CDR3 for alpha chain variable domain of TCR clone 223785 (TRAV12-1, TRAJ10)
CVVNSAGGGNKINF

SEQ ID NO: 447570 - protein, 14 aa, Homo sapiens
  CDR3 for beta chain variable domain of TCR clone 223785 (TRBV12-4, TRBJ1-1)
CASSLGTGGTEAFF

SEQ ID NO: 447571 - protein, 14 aa, Homo sapiens
  CDR3 for alpha chain variable domain of TCR clone 223786 (TRAV1-2, TRAJ8)
CAVREETGFQKLVF

SEQ ID NO: 447572 - protein, 16 aa, Homo sapiens
  CDR3 for beta chain variable domain of TCR clone 223786 (TRBV5-7, TRBJ2-5)
CASTLAPAGGRETQYF

SEQ ID NO: 447573 - protein, 10 aa, Homo sapiens
  CDR3 for alpha chain variable domain of TCR clone 223787 (TRAV25, TRAJ17)
CQAAGNKLTF

SEQ ID NO: 447574 - protein, 15 aa, Homo sapiens
  CDR3 for beta chain variable domain of TCR clone 223787 (TRBV7-3, TRBJ2-7)
CASSLTPTGYDEQYF

SEQ ID NO: 447575 - protein, 18 aa, Homo sapiens
  CDR3 for alpha chain variable domain of TCR clone 223788 (TRAV1-2, TRAJ18)
CAVRDMGDRGSTLGRLYF

SEQ ID NO: 447576 - protein, 16 aa, Homo sapiens
  CDR3 for beta chain variable domain of TCR clone 223788 (TRBV29-1, TRBJ1-2)
CSVEANRHIANYGYTF

SEQ ID NO: 447577 - protein, 13 aa, Homo sapiens
  CDR3 for alpha chain variable domain of TCR clone 223789 (TRAV27, TRAJ45)
CRSSAGGADGLTF

SEQ ID NO: 447578 - protein, 15 aa, Homo sapiens
  CDR3 for beta chain variable domain of TCR clone 223789 (TRBV9, TRBJ2-2)
CASSDFAGASGELFF

SEQ ID NO: 447579 - protein, 12 aa, Homo sapiens
  CDR3 for alpha chain variable domain of TCR clone 223790 (TRAV13-1, TRAJ43)
CAASIGDNDMRF

SEQ ID NO: 447580 - protein, 17 aa, Homo sapiens
  CDR3 for beta chain variable domain of TCR clone 223790 (TRBV11-3, TRBJ2-3)
CASSPGSSRGRTDTQYF

SEQ ID NO: 447581 - protein, 16 aa, Homo sapiens
  CDR3 for alpha chain variable domain of TCR clone 223791 (TRAV26-1, TRAJ53)
CIVRVAMGGSKYKLTF

SEQ ID NO: 447582 - protein, 12 aa, Homo sapiens
  CDR3 for beta chain variable domain of TCR clone 223791 (TRBV7-9, TRBJ1-5)
CASSPQGQHQHF

SEQ ID NO: 447583 - protein, 16 aa, Homo sapiens
  CDR3 for alpha chain variable domain of TCR clone 223792 (TRAV3, TRAJ37)
CAVRVRGSGNTGKLIF

SEQ ID NO: 447584 - protein, 13 aa, Homo sapiens
  CDR3 for beta chain variable domain of TCR clone 223792 (TRBV7-9, TRBJ1-2)
CASSLKQNYGYIF

SEQ ID NO: 447585 - protein, 14 aa, Homo sapiens
  CDR3 for alpha chain variable domain of TCR clone 223793 (TRAV9-2, TRAJ39)
CALYIYNAGNMLTF

SEQ ID NO: 447586 - protein, 12 aa, Homo sapiens
  CDR3 for beta chain variable domain of TCR clone 223793 (TRBV18, TRBJ1-4)
CASSPSREKLFF

SEQ ID NO: 447587 - protein, 13 aa, Homo sapiens
  CDR3 for alpha chain variable domain of TCR clone 223794 (TRAV27, TRAJ40)
CAGPPSGTYKYIF

SEQ ID NO: 447588 - protein, 15 aa, Homo sapiens
  CDR3 for beta chain variable domain of TCR clone 223794 (TRBV2, TRBJ2-1)
CASSEARSAYNEQFF

SEQ ID NO: 447589 - protein, 11 aa, Homo sapiens
  CDR3 for alpha chain variable domain of TCR clone 223795 (TRAV2, TRAJ13)
CASGGYQKVTF

SEQ ID NO: 447590 - protein, 14 aa, Homo sapiens
  CDR3 for beta chain variable domain of TCR clone 223795 (TRBV6-3, TRBJ1-1)
CASSNLLPGAEAFF

SEQ ID NO: 447591 - protein, 14 aa, Homo sapiens
  CDR3 for alpha chain variable domain of TCR clone 223796 (TRAV12-3, TRAJ10)
SHLPLTGGGNKLTF

SEQ ID NO: 447592 - protein, 17 aa, Homo sapiens
  CDR3 for beta chain variable domain of TCR clone 223796 (TRBV28, TRBJ2-7)
CASSPLHRASGVYEQYF

SEQ ID NO: 447593 - protein, 12 aa, Homo sapiens
  CDR3 for alpha chain variable domain of TCR clone 223797 (TRAV1-2, TRAJ33)
CAALDSNYQLIC

SEQ ID NO: 447594 - protein, 14 aa, Homo sapiens
  CDR3 for beta chain variable domain of TCR clone 223797 (TRBV20-1, TRBJ2-1)
CSAQIGGSANEQFF

SEQ ID NO: 447595 - protein, 14 aa, Homo sapiens
  CDR3 for alpha chain variable domain of TCR clone 223798 (TRAV27, TRAJ15)
CAGFANQAGTALIF

SEQ ID NO: 447596 - protein, 14 aa, Homo sapiens
  CDR3 for beta chain variable domain of TCR clone 223798 (TRBV12-5, TRBJ2-5)
CASGSRTHQETQYF

SEQ ID NO: 447597 - protein, 16 aa, Homo sapiens
  CDR3 for alpha chain variable domain of TCR clone 223799 (TRAV16, TRAJ4)
CALSRMFPGGYNKLIF

SEQ ID NO: 447598 - protein, 16 aa, Homo sapiens
  CDR3 for beta chain variable domain of TCR clone 223799 (TRBV24-1, TRBJ2-3)
SATSDPGTGATDTQYF

SEQ ID NO: 447599 - protein, 18 aa, Homo sapiens
  CDR3 for alpha chain variable domain of TCR clone 223800 (TRAV21, TRAJ52)
FAVRPSPAGGTSYGKLTF

SEQ ID NO: 447600 - protein, 17 aa, Homo sapiens
  CDR3 for beta chain variable domain of TCR clone 223800 (TRBV13, TRBJ2-3)
CASSLPRVAGGRNTQYF

SEQ ID NO: 447601 - protein, 16 aa, Homo sapiens
  CDR3 for alpha chain variable domain of TCR clone 223801 (TRAV1-2, TRAJ10)
CAVRGVLTGGGNKLTF

SEQ ID NO: 447602 - protein, 16 aa, Homo sapiens
  CDR3 for beta chain variable domain of TCR clone 223801 (TRBV28, TRBJ2-6)
CASSNRRGSGANVLTF

SEQ ID NO: 447603 - protein, 14 aa, Homo sapiens
  CDR3 for alpha chain variable domain of TCR clone 223802 (TRAV4, TRAJ9)
CLVGSGTGGFKTIF

SEQ ID NO: 447604 - protein, 15 aa, Homo sapiens
  CDR3 for beta chain variable domain of TCR clone 223802 (TRBV7-3, TRBJ2-7)
CASSPPVALNYEQYF

SEQ ID NO: 447605 - protein, 16 aa, Homo sapiens
  CDR3 for alpha chain variable domain of TCR clone 223803 (TRAV30, TRAJ24)
CGTEIVDADSWGKFQF

SEQ ID NO: 447606 - protein, 18 aa, Homo sapiens
  CDR3 for beta chain variable domain of TCR clone 223803 (TRBV11-2, TRBJ2-3)
CASSLGGGSRGAPNTQYF

SEQ ID NO: 447607 - protein, 10 aa, Homo sapiens
  CDR3 for alpha chain variable domain of TCR clone 223804 (TRAV12-2, TRAJ10)
CAVNRVLTGG

SEQ ID NO: 447608 - protein, 14 aa, Homo sapiens
  CDR3 for beta chain variable domain of TCR clone 223804 (TRBV12-5, TRBJ2-5)
CASGSRTHQETQYF

SEQ ID NO: 447609 - protein, 10 aa, Homo sapiens
  CDR3 for alpha chain variable domain of TCR clone 223805 (TRAV16, TRAJ16)
CPGQKLLFAR

SEQ ID NO: 447610 - protein, 16 aa, Homo sapiens
  CDR3 for beta chain variable domain of TCR clone 223805 (TRBV7-3, TRBJ2-1)
CASSLEGYRSYNEQFF

SEQ ID NO: 447611 - protein, 13 aa, Homo sapiens
  CDR3 for alpha chain variable domain of TCR clone 223806 (TRAV8-4, TRAJ48)
CAVSLFGNEKLTF

SEQ ID NO: 447612 - protein, 15 aa, Homo sapiens
  CDR3 for beta chain variable domain of TCR clone 223806 (TRBV20-1, TRBJ2-7)
CSARKVLAESYEQSF

SEQ ID NO: 447613 - protein, 15 aa, Homo sapiens
  CDR3 for alpha chain variable domain of TCR clone 223807 (TRAV3, TRAJ5)
CAVRDLDTGRRALTF

SEQ ID NO: 447614 - protein, 12 aa, Homo sapiens
  CDR3 for beta chain variable domain of TCR clone 223807 (TRBV11-2, TRBJ2-2)
RASSLGGGELFF

SEQ ID NO: 447615 - protein, 12 aa, Homo sapiens
  CDR3 for alpha chain variable domain of TCR clone 223808 (TRAV1-1, TRAJ8)
CAGGTGFQKLVF

SEQ ID NO: 447616 - protein, 10 aa, Homo sapiens
  CDR3 for beta chain variable domain of TCR clone 223808 (TRBV7-2, TRBJ2-2)
CASRRPGQTP

SEQ ID NO: 447617 - protein, 13 aa, Homo sapiens
  CDR3 for alpha chain variable domain of TCR clone 223809 (TRAV8-4, TRAJ30)
CAVSVNRDDKIIF

SEQ ID NO: 447618 - protein, 14 aa, Homo sapiens
  CDR3 for beta chain variable domain of TCR clone 223809 (TRBV5-1, TRBJ2-7)
CASSRGESLYEQYF

SEQ ID NO: 447619 - protein, 13 aa, Homo sapiens
  CDR3 for alpha chain variable domain of TCR clone 223810 (TRAV17, TRAJ31)
CATDENNDARLMF

SEQ ID NO: 447620 - protein, 14 aa, Homo sapiens
  CDR3 for beta chain variable domain of TCR clone 223810 (TRBV11-2, TRBJ2-1)
CASSPSRQGGGQFF

SEQ ID NO: 447621 - protein, 11 aa, Homo sapiens
  CDR3 for alpha chain variable domain of TCR clone 223811 (TRAV2, TRAJ13)
CASGGYQKVTF

SEQ ID NO: 447622 - protein, 14 aa, Homo sapiens
  CDR3 for beta chain variable domain of TCR clone 223811 (TRBV7-3, TRBJ2-1)
CASSLTGGANEQFF

SEQ ID NO: 447623 - protein, 13 aa, Homo sapiens
  CDR3 for alpha chain variable domain of TCR clone 223812 (TRAV13-2, TRAJ8)
CASMNTGFQKLVF

SEQ ID NO: 447624 - protein, 17 aa, Homo sapiens
  CDR3 for beta chain variable domain of TCR clone 223812 (TRBV28, TRBJ2-1)
CASSSARQALTYNEQFF

SEQ ID NO: 447625 - protein, 13 aa, Homo sapiens
  CDR3 for alpha chain variable domain of TCR clone 223813 (TRAV12-3, TRAJ13)
CAMTSGCYQKVTF

SEQ ID NO: 447626 - protein, 13 aa, Homo sapiens
  CDR3 for beta chain variable domain of TCR clone 223813 (TRBV7-9, TRBJ1-2)
CASSLKQNYGYTF

SEQ ID NO: 447627 - protein, 12 aa, Homo sapiens
  CDR3 for alpha chain variable domain of TCR clone 223814 (TRAV12-3, TRAJ20)
CAMVRGDDKLSF

SEQ ID NO: 447628 - protein, 16 aa, Homo sapiens
  CDR3 for beta chain variable domain of TCR clone 223814 (TRBV5-1, TRBJ2-3)
CASSLGLAVYTDTQYF

SEQ ID NO: 447629 - protein, 14 aa, Homo sapiens
  CDR3 for alpha chain variable domain of TCR clone 223815 (TRAV38-1, TRAJ45)
CAYYSGGGADGLTL

SEQ ID NO: 447630 - protein, 20 aa, Homo sapiens
  CDR3 for beta chain variable domain of TCR clone 223815 (TRBV28, TRBJ2-1)
CATTPIGRSPGLAGGNEQFF

SEQ ID NO: 447631 - protein, 12 aa, Homo sapiens
  CDR3 for alpha chain variable domain of TCR clone 223816 (TRAV2, TRAJ37)
CAVAGNTGNLIF

SEQ ID NO: 447632 - protein, 17 aa, Homo sapiens
  CDR3 for beta chain variable domain of TCR clone 223816 (TRBV28, TRBJ2-5)
CASSTPEGDALQETQYF

SEQ ID NO: 447633 - protein, 14 aa, Homo sapiens
  CDR3 for alpha chain variable domain of TCR clone 223817 (TRAV26-1, TRAJ40)
CIVRVARGTYKYIF

SEQ ID NO: 447634 - protein, 14 aa, Homo sapiens
  CDR3 for beta chain variable domain of TCR clone 223817 (TRBV7-3, TRBJ2-7)
CVSSLKADSYEQYF

SEQ ID NO: 447635 - protein, 13 aa, Homo sapiens
  CDR3 for alpha chain variable domain of TCR clone 223818 (TRAV27, TRAJ40)
CAGVLASTDKYIF

SEQ ID NO: 447636 - protein, 16 aa, Homo sapiens
  CDR3 for beta chain variable domain of TCR clone 223818 (TRBV11-3, TRBJ2-3)
CASSSISGAGTDTQYF

SEQ ID NO: 447637 - protein, 12 aa, Homo sapiens
  CDR3 for alpha chain variable domain of TCR clone 223819 (TRAV2, TRAJ9)
CAVGAGGFKTIF

SEQ ID NO: 447638 - protein, 13 aa, Homo sapiens
  CDR3 for beta chain variable domain of TCR clone 223819 (TRBV18, TRBJ1-1)
CASSGGRNTEAFF

SEQ ID NO: 447639 - protein, 14 aa, Homo sapiens
  CDR3 for alpha chain variable domain of TCR clone 223820 (TRAV13-2, TRAJ9)
CAENSFTGGFKTIF

SEQ ID NO: 447640 - protein, 16 aa, Homo sapiens
  CDR3 for beta chain variable domain of TCR clone 223820 (TRBV7-3, TRBJ2-2)
CASSLKRGTLSGELFF

SEQ ID NO: 447641 - protein, 17 aa, Homo sapiens
  CDR3 for alpha chain variable domain of TCR clone 223821 (TRAV22, TRAJ53)
CALEFSNSGVSNYKLTF

SEQ ID NO: 447642 - protein, 15 aa, Homo sapiens
  CDR3 for beta chain variable domain of TCR clone 223821 (TRBV29-1, TRBJ2-1)
CSVPTGLALYNEQFF

SEQ ID NO: 447643 - protein, 16 aa, Homo sapiens
  CDR3 for alpha chain variable domain of TCR clone 223822 (TRAV30, TRAJ24)
CGTEIVDADSCGKFQF

SEQ ID NO: 447644 - protein, 14 aa, Homo sapiens
  CDR3 for beta chain variable domain of TCR clone 223822 (TRBV19, TRBJ2-1)
CASPTFVLSGEQFF

SEQ ID NO: 447645 - protein, 15 aa, Homo sapiens
  CDR3 for alpha chain variable domain of TCR clone 223823 (TRAV8-4, TRAJ15)
CAVSDPVQAGTALTF

SEQ ID NO: 447646 - protein, 14 aa, Homo sapiens
  CDR3 for beta chain variable domain of TCR clone 223823 (TRBV7-2, TRBJ1-3)
CASSLSRSGNTIYF

SEQ ID NO: 447647 - protein, 14 aa, Homo sapiens
  CDR3 for alpha chain variable domain of TCR clone 223824 (TRAV9-2, TRAJ22)
CALTDASSARQLTF

SEQ ID NO: 447648 - protein, 16 aa, Homo sapiens
  CDR3 for beta chain variable domain of TCR clone 223824 (TRBV11-2, TRBJ2-7)
CASSTVTAPKTYEQYF

SEQ ID NO: 447649 - protein, 15 aa, Homo sapiens
  CDR3 for alpha chain variable domain of TCR clone 223825 (TRAV21, TRAJ37)
CAVRPTLSNTGKLIF

SEQ ID NO: 447650 - protein, 15 aa, Homo sapiens
  CDR3 for beta chain variable domain of TCR clone 223825 (TRBV7-9, TRBJ2-7)
CASSPGGGLTYEQYF

SEQ ID NO: 447651 - protein, 16 aa, Homo sapiens
  CDR3 for alpha chain variable domain of TCR clone 223826 (TRAV12-3, TRAJ53)
CAMSPGSGGSNYKQTF

SEQ ID NO: 447652 - protein, 13 aa, Homo sapiens
  CDR3 for beta chain variable domain of TCR clone 223826 (TRBV7-9, TRBJ1-2)
CASSLKQNYGYTF

SEQ ID NO: 447653 - protein, 13 aa, Homo sapiens
  CDR3 for alpha chain variable domain of TCR clone 223827 (TRAV12-3, TRAJ9)
CAMRHTGGFKTIF

SEQ ID NO: 447654 - protein, 14 aa, Homo sapiens
  CDR3 for beta chain variable domain of TCR clone 223827 (TRBV11-2, TRBJ2-7)
CASSSTGEGYEQYF

SEQ ID NO: 447655 - protein, 15 aa, Homo sapiens
  CDR3 for alpha chain variable domain of TCR clone 223828 (TRAV12-1, TRAJ48)
CVVNKVNFGNEKLTF

SEQ ID NO: 447656 - protein, 15 aa, Homo sapiens
  CDR3 for beta chain variable domain of TCR clone 223828 (TRBV5-5, TRBJ1-5)
CASSLKGGGEQPQHF

SEQ ID NO: 447657 - protein, 14 aa, Homo sapiens
  CDR3 for alpha chain variable domain of TCR clone 223829 (TRAV17, TRAJ33)
CATDARRSNYQLIC

SEQ ID NO: 447658 - protein, 14 aa, Homo sapiens
  CDR3 for beta chain variable domain of TCR clone 223829 (TRBV25-1, TRBJ1-4)
CASSGGGQPEKLFF

SEQ ID NO: 447659 - protein, 11 aa, Homo sapiens
  CDR3 for alpha chain variable domain of TCR clone 223830 (TRAV17, TRAJ36)
CAPTGANNIFF

SEQ ID NO: 447660 - protein, 12 aa, Homo sapiens
  CDR3 for beta chain variable domain of TCR clone 223830 (TRBV29-1, TRBJ2-3)
CSVTGGADTQYF

SEQ ID NO: 447661 - protein, 15 aa, Homo sapiens
  CDR3 for alpha chain variable domain of TCR clone 223831 (TRAV3, TRAJ15)
CALRPANQAGTALIF

SEQ ID NO: 447662 - protein, 14 aa, Homo sapiens
  CDR3 for beta chain variable domain of TCR clone 223831 (TRBV4-1, TRBJ2-2)
CASSQAVNTGELFF

SEQ ID NO: 447663 - protein, 16 aa, Homo sapiens
  CDR3 for alpha chain variable domain of TCR clone 223832 (TRAV38-1, TRAJ32)
CAFMKGGGGATNKLIF

SEQ ID NO: 447664 - protein, 13 aa, Homo sapiens
  CDR3 for beta chain variable domain of TCR clone 223832 (TRBV20-1, TRBJ2-7)
CSAREAFQETQYF

SEQ ID NO: 447665 - protein, 10 aa, Homo sapiens
  CDR3 for alpha chain variable domain of TCR clone 223833 (TRAV13-1, TRAJ27)
CAPLARPINL

SEQ ID NO: 447666 - protein, 13 aa, Homo sapiens
  CDR3 for beta chain variable domain of TCR clone 223833 (TRBV7-3, TRBJ1-1)
CASSQDWGAEAFF

SEQ ID NO: 447667 - protein, 15 aa, Homo sapiens
  CDR3 for alpha chain variable domain of TCR clone 223834 (TRAV2, TRAJ11)
CAVGGRNSGYSTPTF

SEQ ID NO: 447668 - protein, 14 aa, Homo sapiens
  CDR3 for beta chain variable domain of TCR clone 223834 (TRBV20-1, TRBJ2-1)
CSAQIGGSANEQFF

SEQ ID NO: 447669 - protein, 17 aa, Homo sapiens
  CDR3 for alpha chain variable domain of TCR clone 223835 (TRAV3, TRAJ12)
CAVRDGGRMDSSYKLIC

SEQ ID NO: 447670 - protein, 13 aa, Homo sapiens
  CDR3 for beta chain variable domain of TCR clone 223835 (TRBV7-3, TRBJ1-1)
CASSQDWGAEAFF

SEQ ID NO: 447671 - protein, 11 aa, Homo sapiens
  CDR3 for alpha chain variable domain of TCR clone 223836 (TRAV4, TRAJ23)
CLVAPGGKLIF

SEQ ID NO: 447672 - protein, 14 aa, Homo sapiens
  CDR3 for beta chain variable domain of TCR clone 223836 (TRBV20-1, TRBJ1-1)
CSAMGGTANTEAFF

SEQ ID NO: 447673 - protein, 17 aa, Homo sapiens
  CDR3 for alpha chain variable domain of TCR clone 223837 (TRAV3, TRAJ12)
CAVGDGGRMDSSYKLIF

SEQ ID NO: 447674 - protein, 13 aa, Homo sapiens
  CDR3 for beta chain variable domain of TCR clone 223837 (TRBV4-2, TRBJ1-1)
CASSQAGNTEAFF

SEQ ID NO: 447675 - protein, 15 aa, Homo sapiens
  CDR3 for alpha chain variable domain of TCR clone 223838 (TRAV3, TRAJ5)
CAVRDLDTGRRALTF

SEQ ID NO: 447676 - protein, 15 aa, Homo sapiens
  CDR3 for beta chain variable domain of TCR clone 223838 (TRBV20-1, TRBJ2-1)
CSARSPGGPGNEKFV

SEQ ID NO: 447677 - protein, 16 aa, Homo sapiens
  CDR3 for alpha chain variable domain of TCR clone 223839 (TRAV30, TRAJ24)
CGTEIVDADSWGKFQF

SEQ ID NO: 447678 - protein, 13 aa, Homo sapiens
  CDR3 for beta chain variable domain of TCR clone 223839 (TRBV7-7, TRBJ2-5)
CASSLRAIETQYF

SEQ ID NO: 447679 - protein, 12 aa, Homo sapiens
  CDR3 for alpha chain variable domain of TCR clone 223840 (TRAV8-2, TRAJ5)
CVVSDIGRALTF

SEQ ID NO: 447680 - protein, 14 aa, Homo sapiens
  CDR3 for beta chain variable domain of TCR clone 223840 (TRBV19, TRBJ2-7)
CASNFRDKFTGMYF

SEQ ID NO: 447681 - protein, 15 aa, Homo sapiens
  CDR3 for alpha chain variable domain of TCR clone 223841 (TRAV26-1, TRAJ56)
CIVRVDNGANSKLTF

SEQ ID NO: 447682 - protein, 15 aa, Homo sapiens
  CDR3 for beta chain variable domain of TCR clone 223841 (TRBV20-1, TRBJ2-7)
CSAGDPTEVGHEQYF

SEQ ID NO: 447683 - protein, 13 aa, Homo sapiens
  CDR3 for alpha chain variable domain of TCR clone 223842 (TRAV21, TRAJ10)
CAVRPGGGNKLTF

SEQ ID NO: 447684 - protein, 12 aa, Homo sapiens
  CDR3 for beta chain variable domain of TCR clone 223842 (TRBV3-1, TRBJ2-1)
CASSQGSSGQFF

SEQ ID NO: 447685 - protein, 12 aa, Homo sapiens
  CDR3 for alpha chain variable domain of TCR clone 223843 (TRAV4, TRAJ6)
CLAPGGSYLPTF

SEQ ID NO: 447686 - protein, 17 aa, Homo sapiens
  CDR3 for beta chain variable domain of TCR clone 223843 (TRBV20-1, TRBJ2-2)
CSASGSGQGGLTGELFF

SEQ ID NO: 447687 - protein, 16 aa, Homo sapiens
  CDR3 for alpha chain variable domain of TCR clone 223844 (TRAV12-2, TRAJ50)
CAVGTATQTSYDKVIF

SEQ ID NO: 447688 - protein, 12 aa, Homo sapiens
  CDR3 for beta chain variable domain of TCR clone 223844 (TRBV12-4, TRBJ1-5)
CASSLGRQPQHF

SEQ ID NO: 447689 - protein, 11 aa, Homo sapiens
  CDR3 for alpha chain variable domain of TCR clone 223845 (TRAV12-1, TRAJ34)
CVVNKGRELIF

SEQ ID NO: 447690 - protein, 15 aa, Homo sapiens
  CDR3 for beta chain variable domain of TCR clone 223845 (TRBV7-9, TRBJ1-6)
CASSSPGRGNSPLHF

SEQ ID NO: 447691 - protein, 12 aa, Homo sapiens
  CDR3 for alpha chain variable domain of TCR clone 223846 (TRAV30, TRAJ39)
CGRGNAGNMITF

SEQ ID NO: 447692 - protein, 15 aa, Homo sapiens
  CDR3 for beta chain variable domain of TCR clone 223846 (TRBV5-1, TRBJ1-1)
CASSWTGRGNTEAFF

SEQ ID NO: 447693 - protein, 14 aa, Homo sapiens
  CDR3 for alpha chain variable domain of TCR clone 223847 (TRAV1-2, TRAJ16)
CAVNRFSDGQKLLF

SEQ ID NO: 447694 - protein, 15 aa, Homo sapiens
  CDR3 for beta chain variable domain of TCR clone 223847 (TRBV20-1, TRBJ2-7)
CSARDRVSGMDGQYF

SEQ ID NO: 447695 - protein, 15 aa, Homo sapiens
  CDR3 for alpha chain variable domain of TCR clone 223848 (TRAV13-1, TRAJ11)
CAASNRNSGYSTLTF

SEQ ID NO: 447696 - protein, 11 aa, Homo sapiens
  CDR3 for beta chain variable domain of TCR clone 223848 (TRBV20-1, TRBJ2-7)
CSAILSYEQYF

SEQ ID NO: 447697 - protein, 15 aa, Homo sapiens
  CDR3 for alpha chain variable domain of TCR clone 223849 (TRAV21, TRAJ53)
CATLNSRGSNYKLTF

SEQ ID NO: 447698 - protein, 15 aa, Homo sapiens
  CDR3 for beta chain variable domain of TCR clone 223849 (TRBV5-1, TRBJ2-1)
CASSPPRAPYNEQFF

SEQ ID NO: 447699 - protein, 15 aa, Homo sapiens
  CDR3 for alpha chain variable domain of TCR clone 223850 (TRAV12-1, TRAJ44)
CVVDTPQGTASKLTF

SEQ ID NO: 447700 - protein, 15 aa, Homo sapiens
  CDR3 for beta chain variable domain of TCR clone 223850 (TRBV11-3, TRBJ2-7)
CASGPGPASSYEQYF

SEQ ID NO: 447701 - protein, 17 aa, Homo sapiens
  CDR3 for alpha chain variable domain of TCR clone 223851 (TRAV8-6, TRAJ8)
CAVKEGIENAGFQKLVS

SEQ ID NO: 447702 - protein, 12 aa, Homo sapiens
  CDR3 for beta chain variable domain of TCR clone 223851 (TRBV19, TRBJ1-4)
CASKDWPGGLFF

SEQ ID NO: 447703 - protein, 19 aa, Homo sapiens
  CDR3 for alpha chain variable domain of TCR clone 223852 (TRAV26-1, TRAJ38)
CIADNAGNNHIQNPDPAVF

SEQ ID NO: 447704 - protein, 13 aa, Homo sapiens
  CDR3 for beta chain variable domain of TCR clone 223852 (TRBV20-1, TRBJ1-1)
CSARGGGNTEAFF

SEQ ID NO: 447705 - protein, 14 aa, Homo sapiens
  CDR3 for alpha chain variable domain of TCR clone 223853 (TRAV17, TRAJ16)
CATADCSDVQKLLF

SEQ ID NO: 447706 - protein, 12 aa, Homo sapiens
  CDR3 for beta chain variable domain of TCR clone 223853 (TRBV24-1, TRBJ1-1)
CATLYPDTEAFF

SEQ ID NO: 447707 - protein, 12 aa, Homo sapiens
  CDR3 for alpha chain variable domain of TCR clone 223854 (TRAV12-1, TRAJ21)
CAGVRQLQQILL

SEQ ID NO: 447708 - protein, 14 aa, Homo sapiens
  CDR3 for beta chain variable domain of TCR clone 223854 (TRBV7-9, TRBJ1-4)
CASSLEGQSEKLFF

SEQ ID NO: 447709 - protein, 12 aa, Homo sapiens
  CDR3 for alpha chain variable domain of TCR clone 223855 (TRAV1-1, TRAJ8)
CAVGPGFQKLVF

SEQ ID NO: 447710 - protein, 15 aa, Homo sapiens
  CDR3 for beta chain variable domain of TCR clone 223855 (TRBV7-9, TRBJ1-4)
CASSRTGGFNEKLFF

SEQ ID NO: 447711 - protein, 12 aa, Homo sapiens
  CDR3 for alpha chain variable domain of TCR clone 223856 (TRAV21, TRAJ31)
CAVWGNNARLMF

SEQ ID NO: 447712 - protein, 16 aa, Homo sapiens
  CDR3 for beta chain variable domain of TCR clone 223856 (TRBV27, TRBJ2-5)
CAISYGPGGQKETQYF

SEQ ID NO: 447713 - protein, 14 aa, Homo sapiens
  CDR3 for alpha chain variable domain of TCR clone 223857 (TRAV8-3, TRAJ4)
CAVGAAGGYNKLIF

SEQ ID NO: 447714 - protein, 15 aa, Homo sapiens
  CDR3 for beta chain variable domain of TCR clone 223857 (TRBV9, TRBJ1-6)
CASSVAGKGDSPLHF

SEQ ID NO: 447715 - protein, 14 aa, Homo sapiens
  CDR3 for alpha chain variable domain of TCR clone 223858 (TRAV12-2, TRAJ32)
CAHPESGVTNKLIF

SEQ ID NO: 447716 - protein, 14 aa, Homo sapiens
  CDR3 for beta chain variable domain of TCR clone 223858 (TRBV4-2, TRBJ2-3)
CASRETRAAGMQYF

SEQ ID NO: 447717 - protein, 17 aa, Homo sapiens
  CDR3 for alpha chain variable domain of TCR clone 223859 (TRAV3, TRAJ38)
CAVRDCLNSGNNRKLIW

SEQ ID NO: 447718 - protein, 15 aa, Homo sapiens
  CDR3 for beta chain variable domain of TCR clone 223859 (TRBV27, TRBJ2-1)
CASSNGGGSSNEQFF

SEQ ID NO: 447719 - protein, 14 aa, Homo sapiens
  CDR3 for alpha chain variable domain of TCR clone 223860 (TRAV16, TRAJ37)
CALDISGNTGKLIF

SEQ ID NO: 447720 - protein, 13 aa, Homo sapiens
  CDR3 for beta chain variable domain of TCR clone 223860 (TRBV7-3, TRBJ1-1)
CASSQDWGAEAFF

SEQ ID NO: 447721 - protein, 14 aa, Homo sapiens
  CDR3 for alpha chain variable domain of TCR clone 223861 (TRAV35, TRAJ53)
CAGNSGGSNYKMTF

SEQ ID NO: 447722 - protein, 15 aa, Homo sapiens
  CDR3 for beta chain variable domain of TCR clone 223861 (TRBV7-9, TRBJ2-1)
CASSLGWGRANEQFF

SEQ ID NO: 447723 - protein, 16 aa, Homo sapiens
  CDR3 for alpha chain variable domain of TCR clone 223862 (TRAV26-1, TRAJ36)
CIVRVPDQTGANNLSF

SEQ ID NO: 447724 - protein, 15 aa, Homo sapiens
  CDR3 for beta chain variable domain of TCR clone 223862 (TRBV19, TRBJ2-4)
CASRGPRRGENIQYF

SEQ ID NO: 447725 - protein, 13 aa, Homo sapiens
  CDR3 for alpha chain variable domain of TCR clone 223863 (TRAV8-6, TRAJ34)
CAVSDQGTDKLIF

SEQ ID NO: 447726 - protein, 12 aa, Homo sapiens
  CDR3 for beta chain variable domain of TCR clone 223863 (TRBV11-2, TRBJ2-1)
CASSPGNNEQFF

SEQ ID NO: 447727 - protein, 15 aa, Homo sapiens
  CDR3 for alpha chain variable domain of TCR clone 223864 (TRAV8-3, TRAJ11)
CAVGLVNSGYSTLTF

SEQ ID NO: 447728 - protein, 16 aa, Homo sapiens
  CDR3 for beta chain variable domain of TCR clone 223864 (TRBV7-9, TRBJ1-2)
CASSLGFSAGEDGYTF

SEQ ID NO: 447729 - protein, 16 aa, Homo sapiens
  CDR3 for alpha chain variable domain of TCR clone 223865 (TRAV23/DV6, TRAJ9)
CAASIGGNTGGFKTIF

SEQ ID NO: 447730 - protein, 16 aa, Homo sapiens
  CDR3 for beta chain variable domain of TCR clone 223865 (TRBV4-3, TRBJ1-4)
CASSQVVDRLREKLFF

SEQ ID NO: 447731 - protein, 13 aa, Homo sapiens
  CDR3 for alpha chain variable domain of TCR clone 223866 (TRAV17, TRAJ54)
CATSWGGAQKLVF

SEQ ID NO: 447732 - protein, 15 aa, Homo sapiens
  CDR3 for beta chain variable domain of TCR clone 223866 (TRBV4-3, TRBJ2-3)
CASRPSLRSTDTQYF

SEQ ID NO: 447733 - protein, 14 aa, Homo sapiens
  CDR3 for alpha chain variable domain of TCR clone 223867 (TRAV12-3, TRAJ57)
CAMSAWGGSEKLVF

SEQ ID NO: 447734 - protein, 14 aa, Homo sapiens
  CDR3 for beta chain variable domain of TCR clone 223867 (TRBV7-2, TRBJ2-7)
CASSFLGRVYEQYF

SEQ ID NO: 447735 - protein, 14 aa, Homo sapiens
  CDR3 for alpha chain variable domain of TCR clone 223868 (TRAV12-2, TRAJ32)
CAHPESGPTNKLIF

SEQ ID NO: 447736 - protein, 14 aa, Homo sapiens
  CDR3 for beta chain variable domain of TCR clone 223868 (TRBV4-2, TRBJ2-3)
CASRETRAPGMQYF

SEQ ID NO: 447737 - protein, 14 aa, Homo sapiens
  CDR3 for alpha chain variable domain of TCR clone 223869 (TRAV16, TRAJ33)
CALSAMDSNYQLIW

SEQ ID NO: 447738 - protein, 15 aa, Homo sapiens
  CDR3 for beta chain variable domain of TCR clone 223869 (TRBV28, TRBJ2-7)
CASSLEACPIYEQYF

SEQ ID NO: 447739 - protein, 11 aa, Homo sapiens
  CDR3 for alpha chain variable domain of TCR clone 223870 (TRAV2, TRAJ13)
CASGGYQKVTF

SEQ ID NO: 447740 - protein, 16 aa, Homo sapiens
  CDR3 for beta chain variable domain of TCR clone 223870 (TRBV6-1, TRBJ2-5)
CASSETLDRGAETQYF

SEQ ID NO: 447741 - protein, 14 aa, Homo sapiens
  CDR3 for alpha chain variable domain of TCR clone 223871 (TRAV16, TRAJ17)
CALSGRAAGNKLTF

SEQ ID NO: 447742 - protein, 14 aa, Homo sapiens
  CDR3 for beta chain variable domain of TCR clone 223871 (TRBV7-8, TRBJ2-3)
CASSLEAGTDTQYF

SEQ ID NO: 447743 - protein, 12 aa, Homo sapiens
  CDR3 for alpha chain variable domain of TCR clone 223872 (TRAV17, TRAJ30)
CVPERRDDKIIF

SEQ ID NO: 447744 - protein, 14 aa, Homo sapiens
  CDR3 for beta chain variable domain of TCR clone 223872 (TRBV7-7, TRBJ2-2)
CASGRDRSTGELFF

SEQ ID NO: 447745 - protein, 14 aa, Homo sapiens
  CDR3 for alpha chain variable domain of TCR clone 223873 (TRAV2, TRAJ37)
TTVPGASNTGKLIF

SEQ ID NO: 447746 - protein, 14 aa, Homo sapiens
  CDR3 for beta chain variable domain of TCR clone 223873 (TRBV7-8, TRBJ2-7)
CASSLWQSSYEQYF

SEQ ID NO: 447747 - protein, 13 aa, Homo sapiens
  CDR3 for alpha chain variable domain of TCR clone 223874 (TRAV30, TRAJ49)
CGTDPNTGNQFYF

SEQ ID NO: 447748 - protein, 14 aa, Homo sapiens
  CDR3 for beta chain variable domain of TCR clone 223874 (TRBV29-1, TRBJ2-1)
CSVEFRGIPFEQFF

SEQ ID NO: 447749 - protein, 17 aa, Homo sapiens
  CDR3 for alpha chain variable domain of TCR clone 223875 (TRAV13-1, TRAJ31)
CAPRDRLMFGDGTQLVV

SEQ ID NO: 447750 - protein, 12 aa, Homo sapiens
  CDR3 for beta chain variable domain of TCR clone 223875 (TRBV7-9, TRBJ2-7)
CASSLEGYAQYF

SEQ ID NO: 447751 - protein, 15 aa, Homo sapiens
  CDR3 for alpha chain variable domain of TCR clone 223876 (TRAV26-1, TRAJ39)
CIVRVARNAGHMLTF

SEQ ID NO: 447752 - protein, 16 aa, Homo sapiens
  CDR3 for beta chain variable domain of TCR clone 223876 (TRBV5-1, TRBJ2-1)
CASSLTLAGGRNEQFF

SEQ ID NO: 447753 - protein, 15 aa, Homo sapiens
  CDR3 for alpha chain variable domain of TCR clone 223877 (TRAV8-3, TRAJ41)
CAVGSNSNSGYALNF

SEQ ID NO: 447754 - protein, 17 aa, Homo sapiens
  CDR3 for beta chain variable domain of TCR clone 223877 (TRBV25-1, TRBJ2-1)
CASSAYVQGRWVYEQFF

SEQ ID NO: 447755 - protein, 19 aa, Homo sapiens
  CDR3 for alpha chain variable domain of TCR clone 223878 (TRAV38-1, TRAJ37)
CDVFLCFHLWLWQHRQLIF

SEQ ID NO: 447756 - protein, 12 aa, Homo sapiens
  CDR3 for beta chain variable domain of TCR clone 223878 (TRBV7-9, TRBJ2-7)
CASSLEGYEQYF

SEQ ID NO: 447757 - protein, 13 aa, Homo sapiens
  CDR3 for alpha chain variable domain of TCR clone 223879 (TRAV38-2/DV8, TRAJ34)
CAYRTWNTDKLIF

SEQ ID NO: 447758 - protein, 15 aa, Homo sapiens
  CDR3 for beta chain variable domain of TCR clone 223879 (TRBV2, TRBJ2-1)
CASSEARSAYNEQFF

SEQ ID NO: 447759 - protein, 13 aa, Homo sapiens
  CDR3 for alpha chain variable domain of TCR clone 223880 (TRAV21, TRAJ42)
CAVGGGSQGNLIF

SEQ ID NO: 447760 - protein, 11 aa, Homo sapiens
  CDR3 for beta chain variable domain of TCR clone 223880 (TRBV7-2, TRBJ1-1)
CASSINTEAFF

SEQ ID NO: 447761 - protein, 19 aa, Homo sapiens
  CDR3 for alpha chain variable domain of TCR clone 223881 (TRAV36/DV7, TRAJ37)
CAVFSSNTGKLNLWARDNF

SEQ ID NO: 447762 - protein, 16 aa, Homo sapiens
  CDR3 for beta chain variable domain of TCR clone 223881 (TRBV3-1, TRBJ2-5)
CASSPGQFNGFGTQYF

SEQ ID NO: 447763 - protein, 12 aa, Homo sapiens
  CDR3 for alpha chain variable domain of TCR clone 223882 (TRAV13-2, TRAJ49)
CAETDTGNQFYF

SEQ ID NO: 447764 - protein, 14 aa, Homo sapiens
  CDR3 for beta chain variable domain of TCR clone 223882 (TRBV7-9, TRBJ2-5)
CVSSPRPSGETQYF

SEQ ID NO: 447765 - protein, 13 aa, Homo sapiens
  CDR3 for alpha chain variable domain of TCR clone 223883 (TRAV29/DV5, TRAJ47)
CAASAEYGNKLVF

SEQ ID NO: 447766 - protein, 17 aa, Homo sapiens
  CDR3 for beta chain variable domain of TCR clone 223883 (TRBV13, TRBJ2-3)
CASSLSRVAGGRNTQYF

SEQ ID NO: 447767 - protein, 12 aa, Homo sapiens
  CDR3 for alpha chain variable domain of TCR clone 223884 (TRAV40, TRAJ20)
CLRGLNDYKLSF

SEQ ID NO: 447768 - protein, 14 aa, Homo sapiens
  CDR3 for beta chain variable domain of TCR clone 223884 (TRBV19, TRBJ2-1)
CASSSGRDHNEQFF

SEQ ID NO: 447769 - protein, 14 aa, Homo sapiens
  CDR3 for alpha chain variable domain of TCR clone 223885 (TRAV8-2, TRAJ6)
CVVISAGGSYIPKF

SEQ ID NO: 447770 - protein, 16 aa, Homo sapiens
  CDR3 for beta chain variable domain of TCR clone 223885 (TRBV7-6, TRBJ2-6)
CASSLPGLSGANVLTF

SEQ ID NO: 447771 - protein, 14 aa, Homo sapiens
  CDR3 for alpha chain variable domain of TCR clone 223886 (TRAV2, TRAJ37)
CAVDFTSNTGKLIF

SEQ ID NO: 447772 - protein, 13 aa, Homo sapiens
  CDR3 for beta chain variable domain of TCR clone 223886 (TRBV4-1, TRBJ2-2)
CASSQENTGELFV

SEQ ID NO: 447773 - protein, 15 aa, Homo sapiens
  CDR3 for alpha chain variable domain of TCR clone 223887 (TRAV8-3, TRAJ45)
WASAYSGGGADGLTF

SEQ ID NO: 447774 - protein, 13 aa, Homo sapiens
  CDR3 for beta chain variable domain of TCR clone 223887 (TRBV10-3, TRBJ2-7)
CASKLAVNYEQYF

SEQ ID NO: 447775 - protein, 15 aa, Homo sapiens
  CDR3 for alpha chain variable domain of TCR clone 223888 (TRAV13-1, TRAJ17)
CAASIERAAGNKPTF

SEQ ID NO: 447776 - protein, 12 aa, Homo sapiens
  CDR3 for beta chain variable domain of TCR clone 223888 (TRBV5-7, TRBJ1-1)
CASSLGRGKAFF

SEQ ID NO: 447777 - protein, 14 aa, Homo sapiens
  CDR3 for alpha chain variable domain of TCR clone 223889 (TRAV12-1, TRAJ3)
CGAARYSSASKIIF

SEQ ID NO: 447778 - protein, 17 aa, Homo sapiens
  CDR3 for beta chain variable domain of TCR clone 223889 (TRBV13, TRBJ2-3)
CASSLSRVAGRRNTQYF

SEQ ID NO: 447779 - protein, 12 aa, Homo sapiens
  CDR3 for alpha chain variable domain of TCR clone 223890 (TRAV8-6, TRAJ36)
CAVSDWLGQTTA

SEQ ID NO: 447780 - protein, 11 aa, Homo sapiens
  CDR3 for beta chain variable domain of TCR clone 223890 (TRBV19, TRBJ2-7)
CASSILGEQYF

SEQ ID NO: 447781 - protein, 16 aa, Homo sapiens
  CDR3 for alpha chain variable domain of TCR clone 223891 (TRAV21, TRAJ37)
CAVRTAGSSNTGKLIF

SEQ ID NO: 447782 - protein, 13 aa, Homo sapiens
  CDR3 for beta chain variable domain of TCR clone 223891 (TRBV7-9, TRBJ2-5)
CASLPSERETQYF

SEQ ID NO: 447783 - protein, 15 aa, Homo sapiens
  CDR3 for alpha chain variable domain of TCR clone 223892 (TRAV38-1, TRAJ37)
CAFIFGSGNTGKLIF

SEQ ID NO: 447784 - protein, 12 aa, Homo sapiens
  CDR3 for beta chain variable domain of TCR clone 223892 (TRBV18, TRBJ2-5)
CASSPNQETQYF

SEQ ID NO: 447785 - protein, 14 aa, Homo sapiens
  CDR3 for alpha chain variable domain of TCR clone 223893 (TRAV12-2, TRAJ13)
CAVKKTGGYHKVTF

SEQ ID NO: 447786 - protein, 12 aa, Homo sapiens
  CDR3 for beta chain variable domain of TCR clone 223893 (TRBV12-4, TRBJ1-2)
CASSFIWLHLRF

SEQ ID NO: 447787 - protein, 10 aa, Homo sapiens
  CDR3 for alpha chain variable domain of TCR clone 223894 (TRAV16, TRAJ22)
SAMYLRQLTF

SEQ ID NO: 447788 - protein, 15 aa, Homo sapiens
  CDR3 for beta chain variable domain of TCR clone 223894 (TRBV5-1, TRBJ2-1)
CASSPPRAPYNEQLF

SEQ ID NO: 447789 - protein, 14 aa, Homo sapiens
  CDR3 for alpha chain variable domain of TCR clone 223895 (TRAV8-6, TRAJ49)
CAVSDPGTGNQFYF

SEQ ID NO: 447790 - protein, 15 aa, Homo sapiens
  CDR3 for beta chain variable domain of TCR clone 223895 (TRBV6-3, TRBJ2-7)
CASSSPGTVFYEQYF

SEQ ID NO: 447791 - protein, 15 aa, Homo sapiens
  CDR3 for alpha chain variable domain of TCR clone 223896 (TRAV8-3, TRAJ45)
CALSYSGGGADGLTF

SEQ ID NO: 447792 - protein, 13 aa, Homo sapiens
  CDR3 for beta chain variable domain of TCR clone 223896 (TRBV10-3, TRBJ2-7)
CASKLAVNYEQYL

SEQ ID NO: 447793 - protein, 16 aa, Homo sapiens
  CDR3 for alpha chain variable domain of TCR clone 223897 (TRAV30, TRAJ24)
CGTELVDADSWGKFQF

SEQ ID NO: 447794 - protein, 18 aa, Homo sapiens
  CDR3 for beta chain variable domain of TCR clone 223897 (TRBV11-2, TRBJ2-3)
CASSLGGASRGAPNTQYF

SEQ ID NO: 447795 - protein, 14 aa, Homo sapiens
  CDR3 for alpha chain variable domain of TCR clone 223898 (TRAV23/DV6, TRAJ4)
CAAPSSGGYNNLIF

SEQ ID NO: 447796 - protein, 16 aa, Homo sapiens
  CDR3 for beta chain variable domain of TCR clone 223898 (TRBV19, TRBJ1-1)
CASRFGGPVTGTEAFF

SEQ ID NO: 447797 - protein, 13 aa, Homo sapiens
  CDR3 for alpha chain variable domain of TCR clone 223899 (TRAV1-2, TRAJ9)
CAALSTGGFKTIF

SEQ ID NO: 447798 - protein, 20 aa, Homo sapiens
  CDR3 for beta chain variable domain of TCR clone 223899 (TRBV28, TRBJ2-1)
CASTPIGRSPGLAGGNEQFF

SEQ ID NO: 447799 - protein, 13 aa, Homo sapiens
  CDR3 for alpha chain variable domain of TCR clone 223900 (TRAV23/DV6, TRAJ35)
CAAQLGFGNVLPC

SEQ ID NO: 447800 - protein, 15 aa, Homo sapiens
  CDR3 for beta chain variable domain of TCR clone 223900 (TRBV27, TRBJ2-2)
CASSKQGASTGELFF

SEQ ID NO: 447801 - protein, 16 aa, Homo sapiens
  CDR3 for alpha chain variable domain of TCR clone 223901 (TRAV13-1, TRAJ13)
CTAFFSGVTRKLPLEL

SEQ ID NO: 447802 - protein, 15 aa, Homo sapiens
  CDR3 for beta chain variable domain of TCR clone 223901 (TRBV7-8, TRBJ2-1)
CASSLADSLYNEQFF

SEQ ID NO: 447803 - protein, 15 aa, Homo sapiens
  CDR3 for alpha chain variable domain of TCR clone 223902 (TRAV35, TRAJ40)
CAGQLGTSGTYKYIF

SEQ ID NO: 447804 - protein, 19 aa, Homo sapiens
  CDR3 for beta chain variable domain of TCR clone 223902 (TRBV23-1, TRBJ2-7)
CASILLRDRARAVLRAAHQ

SEQ ID NO: 447805 - protein, 14 aa, Homo sapiens
  CDR3 for alpha chain variable domain of TCR clone 223903 (TRAV16, TRAJ42)
CALLAGGSQGNLIF

SEQ ID NO: 447806 - protein, 12 aa, Homo sapiens
  CDR3 for beta chain variable domain of TCR clone 223903 (TRBV11-2, TRBJ2-2)
CASSLGGGELFF

SEQ ID NO: 447807 - protein, 17 aa, Homo sapiens
  CDR3 for alpha chain variable domain of TCR clone 223904 (TRAV12-2, TRAJ42)
CAVSILNYGGSPGNLIF

SEQ ID NO: 447808 - protein, 16 aa, Homo sapiens
  CDR3 for beta chain variable domain of TCR clone 223904 (TRBV5-1, TRBJ1-1)
CASSSGGNSLNTEAFF

SEQ ID NO: 447809 - protein, 10 aa, Homo sapiens
  CDR3 for alpha chain variable domain of TCR clone 223905 (TRAV30, TRAJ48)
CGIGNEKSTF

SEQ ID NO: 447810 - protein, 14 aa, Homo sapiens
  CDR3 for beta chain variable domain of TCR clone 223905 (TRBV7-6, TRBJ2-3)
CASSVAGGTDTQYF

SEQ ID NO: 447811 - protein, 14 aa, Homo sapiens
  CDR3 for alpha chain variable domain of TCR clone 223906 (TRAV1-2, TRAJ16)
CAVNRFSDGPKLLF

SEQ ID NO: 447812 - protein, 16 aa, Homo sapiens
  CDR3 for beta chain variable domain of TCR clone 223906 (TRBV7-3, TRBJ2-3)
CASSLSGYRPEDTQYF

SEQ ID NO: 447813 - protein, 17 aa, Homo sapiens
  CDR3 for alpha chain variable domain of TCR clone 223907 (TRAV3, TRAJ38)
CAVRDCLNAGNKRKLIW

SEQ ID NO: 447814 - protein, 13 aa, Homo sapiens
  CDR3 for beta chain variable domain of TCR clone 223907 (TRBV23-1, TRBJ1-4)
CASRGKFNEKLFF

SEQ ID NO: 447815 - protein, 13 aa, Homo sapiens
  CDR3 for alpha chain variable domain of TCR clone 223908 (TRAV21, TRAJ20)
CAVGLRVDYKLSF

SEQ ID NO: 447816 - protein, 15 aa, Homo sapiens
  CDR3 for beta chain variable domain of TCR clone 223908 (TRBV7-8, TRBJ2-1)
CASSLADSLYNEQFL

SEQ ID NO: 447817 - protein, 15 aa, Homo sapiens
  CDR3 for alpha chain variable domain of TCR clone 223909 (TRAV17, TRAJ57)
CATGPSQGGSKKLVF

SEQ ID NO: 447818 - protein, 13 aa, Homo sapiens
  CDR3 for beta chain variable domain of TCR clone 223909 (TRBV27, TRBJ1-4)
CASSLMGDEKLFF

SEQ ID NO: 447819 - protein, 14 aa, Homo sapiens
  CDR3 for alpha chain variable domain of TCR clone 223910 (TRAV8-2, TRAJ4)
CVVSPSGGYNKLIF

SEQ ID NO: 447820 - protein, 15 aa, Homo sapiens
  CDR3 for beta chain variable domain of TCR clone 223910 (TRBV4-1, TRBJ1-4)
CASSDTEGTNERLFF

SEQ ID NO: 447821 - protein, 16 aa, Homo sapiens
  CDR3 for alpha chain variable domain of TCR clone 223911 (TRAV38-1, TRAJ56)
CAFMKRQTGANSKLTF

SEQ ID NO: 447822 - protein, 16 aa, Homo sapiens
  CDR3 for beta chain variable domain of TCR clone 223911 (TRBV28, TRBJ2-1)
CASSSPEYPRDNEQFF

SEQ ID NO: 447823 - protein, 12 aa, Homo sapiens
  CDR3 for alpha chain variable domain of TCR clone 223912 (TRAV1-2, TRAJ17)
CAVRAAGNKLTF

SEQ ID NO: 447824 - protein, 16 aa, Homo sapiens
  CDR3 for beta chain variable domain of TCR clone 223912 (TRBV12-4, TRBJ1-5)
CASSRPVGGSNQPQHF

SEQ ID NO: 447825 - protein, 12 aa, Homo sapiens
  CDR3 for alpha chain variable domain of TCR clone 223913 (TRAV13-1, TRAJ53)
AASGGSNYKLTF

SEQ ID NO: 447826 - protein, 16 aa, Homo sapiens
  CDR3 for beta chain variable domain of TCR clone 223913 (TRBV28, TRBJ2-6)
CASSNRRGSGANVLPF

SEQ ID NO: 447827 - protein, 16 aa, Homo sapiens
  CDR3 for alpha chain variable domain of TCR clone 223914 (TRAV3, TRAJ10)
CAVRDMRAGGGNKLTF

SEQ ID NO: 447828 - protein, 16 aa, Homo sapiens
  CDR3 for beta chain variable domain of TCR clone 223914 (TRBV4-2, TRBJ2-3)
CASSQDGARGGVKQYF

SEQ ID NO: 447829 - protein, 13 aa, Homo sapiens
  CDR3 for alpha chain variable domain of TCR clone 223915 (TRAV8-6, TRAJ21)
CALSPSSLNKFYF

SEQ ID NO: 447830 - protein, 14 aa, Homo sapiens
  CDR3 for beta chain variable domain of TCR clone 223915 (TRBV7-9, TRBJ2-5)
CASSLDTAQETHYF

SEQ ID NO: 447831 - protein, 13 aa, Homo sapiens
  CDR3 for alpha chain variable domain of TCR clone 223916 (TRAV12-1, TRAJ6)
CVVFPGGSYIPTF

SEQ ID NO: 447832 - protein, 15 aa, Homo sapiens
  CDR3 for beta chain variable domain of TCR clone 223916 (TRBV7-2, TRBJ2-1)
CASSFSGGIYNEQFF

SEQ ID NO: 447833 - protein, 11 aa, Homo sapiens
  CDR3 for alpha chain variable domain of TCR clone 223917 (TRAV3, TRAJ17)
PRGAAGNKLTF

SEQ ID NO: 447834 - protein, 12 aa, Homo sapiens
  CDR3 for beta chain variable domain of TCR clone 223917 (TRBV11-2, TRBJ2-2)
CASSRGGGELFF

SEQ ID NO: 447835 - protein, 13 aa, Homo sapiens
  CDR3 for alpha chain variable domain of TCR clone 223918 (TRAV2, TRAJ15)
CAVASQAGTTLIF

SEQ ID NO: 447836 - protein, 16 aa, Homo sapiens
  CDR3 for beta chain variable domain of TCR clone 223918 (TRBV20-1, TRBJ1-4)
CSAPGQGLLTNEKLFF

SEQ ID NO: 447837 - protein, 13 aa, Homo sapiens
  CDR3 for alpha chain variable domain of TCR clone 223919 (TRAV17, TRAJ29)
CATDAFRKHTSCL

SEQ ID NO: 447838 - protein, 13 aa, Homo sapiens
  CDR3 for beta chain variable domain of TCR clone 223919 (TRBV5-7, TRBJ2-6)
CASTSSGDNVLTF

SEQ ID NO: 447839 - protein, 15 aa, Homo sapiens
  CDR3 for alpha chain variable domain of TCR clone 223920 (TRAV20, TRAJ16)
CAVQIRFSDGQKLLL

SEQ ID NO: 447840 - protein, 17 aa, Homo sapiens
  CDR3 for beta chain variable domain of TCR clone 223920 (TRBV4-1, TRBJ2-3)
CASSQGYVSGGTDTQYF

SEQ ID NO: 447841 - protein, 17 aa, Homo sapiens
  CDR3 for alpha chain variable domain of TCR clone 223921 (TRAV8-3, TRAJ42)
CAVGNPEERRSQGNLIF

SEQ ID NO: 447842 - protein, 22 aa, Homo sapiens
  CDR3 for beta chain variable domain of TCR clone 223921 (TRBV11-2, TRBJ1-4)
CASSLDITRRGIPRKDNEKLFF

SEQ ID NO: 447843 - protein, 14 aa, Homo sapiens
  CDR3 for alpha chain variable domain of TCR clone 223922 (TRAV3, TRAJ6)
CAVRDWGGSYIPTF

SEQ ID NO: 447844 - protein, 17 aa, Homo sapiens
  CDR3 for beta chain variable domain of TCR clone 223922 (TRBV6-9, TRBJ2-1)
CASRLSGRFESYNEQFF

SEQ ID NO: 447845 - protein, 16 aa, Homo sapiens
  CDR3 for alpha chain variable domain of TCR clone 223923 (TRAV22, TRAJ45)
CAVERGKRGGADGLTF

SEQ ID NO: 447846 - protein, 17 aa, Homo sapiens
  CDR3 for beta chain variable domain of TCR clone 223923 (TRBV13, TRBJ2-3)
CASSLSRVAGGRNTQYF

SEQ ID NO: 447847 - protein, 17 aa, Homo sapiens
  CDR3 for alpha chain variable domain of TCR clone 223924 (TRAV3, TRAJ42)
CAVRDRDYGGSQGNLIF

SEQ ID NO: 447848 - protein, 15 aa, Homo sapiens
  CDR3 for beta chain variable domain of TCR clone 223924 (TRBV6-6, TRBJ2-7)
CASSYSYGGTYEQYF

SEQ ID NO: 447849 - protein, 13 aa, Homo sapiens
  CDR3 for alpha chain variable domain of TCR clone 223925 (TRAV17, TRAJ13)
FATDSGGYQKVTF

SEQ ID NO: 447850 - protein, 14 aa, Homo sapiens
  CDR3 for beta chain variable domain of TCR clone 223925 (TRBV6-1, TRBJ1-1)
CASTPLQMNTEAFF

SEQ ID NO: 447851 - protein, 13 aa, Homo sapiens
  CDR3 for alpha chain variable domain of TCR clone 223926 (TRAV21, TRAJ15)
CAVRNQAGTSLIF

SEQ ID NO: 447852 - protein, 16 aa, Homo sapiens
  CDR3 for beta chain variable domain of TCR clone 223926 (TRBV20-1, TRBJ2-5)
CSPGGTSGGYMETQYF

SEQ ID NO: 447853 - protein, 12 aa, Homo sapiens
  CDR3 for alpha chain variable domain of TCR clone 223927 (TRAV12-3, TRAJ5)
CAMDTGRRALTF

SEQ ID NO: 447854 - protein, 14 aa, Homo sapiens
  CDR3 for beta chain variable domain of TCR clone 223927 (TRBV20-1, TRBJ2-3)
CSARDYGLTDTQYF

SEQ ID NO: 447855 - protein, 12 aa, Homo sapiens
  CDR3 for alpha chain variable domain of TCR clone 223928 (TRAV30, TRAJ43)
CGTEERGNDMRF

SEQ ID NO: 447856 - protein, 16 aa, Homo sapiens
  CDR3 for beta chain variable domain of TCR clone 223928 (TRBV7-9, TRBJ1-2)
CASSLSFSSGEDGYTF

SEQ ID NO: 447857 - protein, 13 aa, Homo sapiens
  CDR3 for alpha chain variable domain of TCR clone 223929 (TRAV2, TRAJ40)
CAVVTSGTYKYIF

SEQ ID NO: 447858 - protein, 19 aa, Homo sapiens
  CDR3 for beta chain variable domain of TCR clone 223929 (TRBV25-1, TRBJ2-2)
CAILVYRVDRGRKTGGLFF

SEQ ID NO: 447859 - protein, 16 aa, Homo sapiens
  CDR3 for alpha chain variable domain of TCR clone 223930 (TRAV3, TRAJ21)
FAVRDIERGNFNKFYF

SEQ ID NO: 447860 - protein, 13 aa, Homo sapiens
  CDR3 for beta chain variable domain of TCR clone 223930 (TRBV10-2, TRBJ2-5)
CASSVGPQETQYF

SEQ ID NO: 447861 - protein, 14 aa, Homo sapiens
  CDR3 for alpha chain variable domain of TCR clone 223931 (TRAV9-2, TRAJ39)
CALYIYNSGNMLTF

SEQ ID NO: 447862 - protein, 15 aa, Homo sapiens
  CDR3 for beta chain variable domain of TCR clone 223931 (TRBV28, TRBJ1-3)
CASSMGWASGNTIYF

SEQ ID NO: 447863 - protein, 14 aa, Homo sapiens
  CDR3 for alpha chain variable domain of TCR clone 223932 (TRAV17, TRAJ57)
WATDPQGGSEKLVF

SEQ ID NO: 447864 - protein, 16 aa, Homo sapiens
  CDR3 for beta chain variable domain of TCR clone 223932 (TRBV20-1, TRBJ1-4)
CSAPGQGLLTNEKLFF

SEQ ID NO: 447865 - protein, 13 aa, Homo sapiens
  CDR3 for alpha chain variable domain of TCR clone 223933 (TRAV25, TRAJ26)
CAGLDNYGQNFVF

SEQ ID NO: 447866 - protein, 15 aa, Homo sapiens
  CDR3 for beta chain variable domain of TCR clone 223933 (TRBV10-3, TRBJ2-1)
CAIRNGTSGHNEQFF

SEQ ID NO: 447867 - protein, 10 aa, Homo sapiens
  CDR3 for alpha chain variable domain of TCR clone 223934 (TRAV23/DV6, TRAJ57)
CAASSTLSQG

SEQ ID NO: 447868 - protein, 15 aa, Homo sapiens
  CDR3 for beta chain variable domain of TCR clone 223934 (TRBV7-2, TRBJ2-7)
CASSLKGALTYEQYF

SEQ ID NO: 447869 - protein, 15 aa, Homo sapiens
  CDR3 for alpha chain variable domain of TCR clone 223935 (TRAV13-1, TRAJ36)
CAAGIRQTGANNLFF

SEQ ID NO: 447870 - protein, 17 aa, Homo sapiens
  CDR3 for beta chain variable domain of TCR clone 223935 (TRBV20-1, TRBJ2-2)
CSARDRTSGRHTGELFF

SEQ ID NO: 447871 - protein, 11 aa, Homo sapiens
  CDR3 for alpha chain variable domain of TCR clone 223936 (TRAV3, TRAJ21)
CAVGDCNKFYF

SEQ ID NO: 447872 - protein, 16 aa, Homo sapiens
  CDR3 for beta chain variable domain of TCR clone 223936 (TRBV19, TRBJ2-1)
CASSKAGPSSYNEQFF

SEQ ID NO: 447873 - protein, 15 aa, Homo sapiens
  CDR3 for alpha chain variable domain of TCR clone 223937 (TRAV12-3, TRAJ22)
CAMRSSPGSARQLTF

SEQ ID NO: 447874 - protein, 18 aa, Homo sapiens
  CDR3 for beta chain variable domain of TCR clone 223937 (TRBV27, TRBJ2-1)
CASRRSGRGESSGNEQFF

SEQ ID NO: 447875 - protein, 23 aa, Homo sapiens
  CDR3 for alpha chain variable domain of TCR clone 223938 (TRAV26-1, TRAJ38)
CIADNAGNNHIQNPDPAVYQLSD

SEQ ID NO: 447876 - protein, 15 aa, Homo sapiens
  CDR3 for beta chain variable domain of TCR clone 223938 (TRBV2, TRBJ2-1)
CASSEEREGDNEQFF

SEQ ID NO: 447877 - protein, 16 aa, Homo sapiens
  CDR3 for alpha chain variable domain of TCR clone 223939 (TRAV3, TRAJ21)
CAVRDIERGNFNKFYF

SEQ ID NO: 447878 - protein, 14 aa, Homo sapiens
  CDR3 for beta chain variable domain of TCR clone 223939 (TRBV27, TRBJ1-5)
CASSLDPRNQPQHF

SEQ ID NO: 447879 - protein, 16 aa, Homo sapiens
  CDR3 for alpha chain variable domain of TCR clone 223940 (TRAV12-3, TRAJ28)
CAMRANSGAGSYPLTF

SEQ ID NO: 447880 - protein, 16 aa, Homo sapiens
  CDR3 for beta chain variable domain of TCR clone 223940 (TRBV7-2, TRBJ1-3)
CASSRLEASSGNTIYC

SEQ ID NO: 447881 - protein, 13 aa, Homo sapiens
  CDR3 for alpha chain variable domain of TCR clone 223941 (TRAV30, TRAJ27)
CGTGITNAGKSTF

SEQ ID NO: 447882 - protein, 13 aa, Homo sapiens
  CDR3 for beta chain variable domain of TCR clone 223941 (TRBV7-8, TRBJ2-7)
CASSLTGGREQYF

SEQ ID NO: 447883 - protein, 13 aa, Homo sapiens
  CDR3 for alpha chain variable domain of TCR clone 223942 (TRAV27, TRAJ40)
SAGPPSGTYKYIF

SEQ ID NO: 447884 - protein, 13 aa, Homo sapiens
  CDR3 for beta chain variable domain of TCR clone 223942 (TRBV28, TRBJ1-2)
CAGRDRGNYGYTF

SEQ ID NO: 447885 - protein, 12 aa, Homo sapiens
  CDR3 for alpha chain variable domain of TCR clone 223943 (TRAV12-2, TRAJ10)
WGVTGGGNKLTF

SEQ ID NO: 447886 - protein, 14 aa, Homo sapiens
  CDR3 for beta chain variable domain of TCR clone 223943 (TRBV7-8, TRBJ2-3)
CASSLEAGTDTQYF

SEQ ID NO: 447887 - protein, 16 aa, Homo sapiens
  CDR3 for alpha chain variable domain of TCR clone 223944 (TRAV8-3, TRAJ38)
CAVGASNAGNNRKLIG

SEQ ID NO: 447888 - protein, 15 aa, Homo sapiens
  CDR3 for beta chain variable domain of TCR clone 223944 (TRBV11-3, TRBJ1-3)
CASSLFGPSGNTIYF

SEQ ID NO: 447889 - protein, 14 aa, Homo sapiens
  CDR3 for alpha chain variable domain of TCR clone 223945 (TRAV17, TRAJ11)
CATDTSLGYSTLTF

SEQ ID NO: 447890 - protein, 13 aa, Homo sapiens
  CDR3 for beta chain variable domain of TCR clone 223945 (TRBV19, TRBJ2-5)
CASRDSRRETQYF

SEQ ID NO: 447891 - protein, 13 aa, Homo sapiens
  CDR3 for alpha chain variable domain of TCR clone 223946 (TRAV36/DV7, TRAJ37)
CAVFSSNTGKLIF

SEQ ID NO: 447892 - protein, 12 aa, Homo sapiens
  CDR3 for beta chain variable domain of TCR clone 223946 (TRBV11-2, TRBJ2-2)
CASSLGGGELFL

SEQ ID NO: 447893 - protein, 15 aa, Homo sapiens
  CDR3 for alpha chain variable domain of TCR clone 223947 (TRAV8-3, TRAJ27)
CAVGPSKTNAGKSTF

SEQ ID NO: 447894 - protein, 18 aa, Homo sapiens
  CDR3 for beta chain variable domain of TCR clone 223947 (TRBV12-4, TRBJ2-4)
CASSRTGAVDVAKNIQYF

SEQ ID NO: 447895 - protein, 12 aa, Homo sapiens
  CDR3 for alpha chain variable domain of TCR clone 223948 (TRAV16, TRAJ12)
CAHGDSSDKLIF

SEQ ID NO: 447896 - protein, 12 aa, Homo sapiens
  CDR3 for beta chain variable domain of TCR clone 223948 (TRBV28, TRBJ2-1)
CASSRLVGEQFF

SEQ ID NO: 447897 - protein, 11 aa, Homo sapiens
  CDR3 for alpha chain variable domain of TCR clone 223949 (TRAV17, TRAJ43)
CATDNNNDMCF

SEQ ID NO: 447898 - protein, 15 aa, Homo sapiens
  CDR3 for beta chain variable domain of TCR clone 223949 (TRBV20-1, TRBJ1-2)
CSAIRTGAFNYGYTF

SEQ ID NO: 447899 - protein, 15 aa, Homo sapiens
  CDR3 for alpha chain variable domain of TCR clone 223950 (TRAV10, TRAJ44)
CVVSGATDNASKLTF

SEQ ID NO: 447900 - protein, 15 aa, Homo sapiens
  CDR3 for beta chain variable domain of TCR clone 223950 (TRBV12-4, TRBJ1-5)
CASTRQGSGNQPQHF

SEQ ID NO: 447901 - protein, 15 aa, Homo sapiens
  CDR3 for alpha chain variable domain of TCR clone 223951 (TRAV27, TRAJ38)
CAARRNAGNNRKLIW

SEQ ID NO: 447902 - protein, 16 aa, Homo sapiens
  CDR3 for beta chain variable domain of TCR clone 223951 (TRBV5-5, TRBJ2-2)
CASSGRREGATGELFF

SEQ ID NO: 447903 - protein, 13 aa, Homo sapiens
  CDR3 for alpha chain variable domain of TCR clone 223952 (TRAV13-1, TRAJ21)
CAASIYNFNKFYF

SEQ ID NO: 447904 - protein, 15 aa, Homo sapiens
  CDR3 for beta chain variable domain of TCR clone 223952 (TRBV5-5, TRBJ1-5)
CASSVKGGGEQPQHF

SEQ ID NO: 447905 - protein, 14 aa, Homo sapiens
  CDR3 for alpha chain variable domain of TCR clone 223953 (TRAV12-1, TRAJ17)
CVVNPKAAGNKLTF

SEQ ID NO: 447906 - protein, 16 aa, Homo sapiens
  CDR3 for beta chain variable domain of TCR clone 223953 (TRBV19, TRBJ2-2)
CASRSPGTGATGELFF

SEQ ID NO: 447907 - protein, 17 aa, Homo sapiens
  CDR3 for alpha chain variable domain of TCR clone 223954 (TRAV3, TRAJ6)
CAVRDGPRAGGSYIPTF

SEQ ID NO: 447908 - protein, 12 aa, Homo sapiens
  CDR3 for beta chain variable domain of TCR clone 223954 (TRBV11-2, TRBJ2-2)
CATSLGGGELFF

SEQ ID NO: 447909 - protein, 13 aa, Homo sapiens
  CDR3 for alpha chain variable domain of TCR clone 223955 (TRAV12-2, TRAJ13)
CAAARGGYQKVTF

SEQ ID NO: 447910 - protein, 12 aa, Homo sapiens
  CDR3 for beta chain variable domain of TCR clone 223955 (TRBV11-2, TRBJ2-1)
CASSPGNNEQFF

SEQ ID NO: 447911 - protein, 14 aa, Homo sapiens
  CDR3 for alpha chain variable domain of TCR clone 223956 (TRAV23/DV6, TRAJ36)
CAASRRTGANNLFF

SEQ ID NO: 447912 - protein, 14 aa, Homo sapiens
  CDR3 for beta chain variable domain of TCR clone 223956 (TRBV13, TRBJ2-5)
CASSLGRGQETQYF

SEQ ID NO: 447913 - protein, 15 aa, Homo sapiens
  CDR3 for alpha chain variable domain of TCR clone 223957 (TRAV3, TRAJ29)
CAVRDPLSGNTPLVF

SEQ ID NO: 447914 - protein, 17 aa, Homo sapiens
  CDR3 for beta chain variable domain of TCR clone 223957 (TRBV7-2, TRBJ2-7)
CASSLGSGTSGRYEQYF

SEQ ID NO: 447915 - protein, 15 aa, Homo sapiens
  CDR3 for alpha chain variable domain of TCR clone 223958 (TRAV21, TRAJ53)
CATLNSGGSNYKLTF

SEQ ID NO: 447916 - protein, 12 aa, Homo sapiens
  CDR3 for beta chain variable domain of TCR clone 223958 (TRBV14, TRBJ1-1)
CASSQLKGLAFF

SEQ ID NO: 447917 - protein, 13 aa, Homo sapiens
  CDR3 for alpha chain variable domain of TCR clone 223959 (TRAV23/DV6, TRAJ34)
CAAIENNTDKLIF

SEQ ID NO: 447918 - protein, 18 aa, Homo sapiens
  CDR3 for beta chain variable domain of TCR clone 223959 (TRBV20-1, TRBJ2-6)
CSAEMTPTHGSGANVLTF

SEQ ID NO: 447919 - protein, 19 aa, Homo sapiens
  CDR3 for alpha chain variable domain of TCR clone 223960 (TRAV26-1, TRAJ52)
CIVRVANNAGGTSYGKLTF

SEQ ID NO: 447920 - protein, 14 aa, Homo sapiens
  CDR3 for beta chain variable domain of TCR clone 223960 (TRBV19, TRBJ1-2)
CASSIGAGCYGYTF

SEQ ID NO: 447921 - protein, 16 aa, Homo sapiens
  CDR3 for alpha chain variable domain of TCR clone 223961 (TRAV35, TRAJ28)
CAGHKYSGAGSYQLTF

SEQ ID NO: 447922 - protein, 13 aa, Homo sapiens
  CDR3 for beta chain variable domain of TCR clone 223961 (TRBV19, TRBJ1-2)
CASSQGQVYGYTF

SEQ ID NO: 447923 - protein, 12 aa, Homo sapiens
  CDR3 for alpha chain variable domain of TCR clone 223962 (TRAV17, TRAJ39)
CATGAAGNMLTF

SEQ ID NO: 447924 - protein, 15 aa, Homo sapiens
  CDR3 for beta chain variable domain of TCR clone 223962 (TRBV7-6, TRBJ2-1)
CASSSLAGEGNEQFF

SEQ ID NO: 447925 - protein, 13 aa, Homo sapiens
  CDR3 for alpha chain variable domain of TCR clone 223963 (TRAV30, TRAJ26)
CGTEIPLGQNFVF

SEQ ID NO: 447926 - protein, 14 aa, Homo sapiens
  CDR3 for beta chain variable domain of TCR clone 223963 (TRBV19, TRBJ2-1)
CASPTFVLSGEQFF

SEQ ID NO: 447927 - protein, 12 aa, Homo sapiens
  CDR3 for alpha chain variable domain of TCR clone 223964 (TRAV30, TRAJ39)
CGRGNAGNMLTF

SEQ ID NO: 447928 - protein, 15 aa, Homo sapiens
  CDR3 for beta chain variable domain of TCR clone 223964 (TRBV7-3, TRBJ2-1)
CASSPTGGGEVEQFF

SEQ ID NO: 447929 - protein, 18 aa, Homo sapiens
  CDR3 for alpha chain variable domain of TCR clone 223965 (TRAV29/DV5, TRAJ52)
CAAGFRGAGGTSYGKLTF

SEQ ID NO: 447930 - protein, 12 aa, Homo sapiens
  CDR3 for beta chain variable domain of TCR clone 223965 (TRBV11-2, TRBJ2-2)
CASSLPTGELFF

SEQ ID NO: 447931 - protein, 13 aa, Homo sapiens
  CDR3 for alpha chain variable domain of TCR clone 223966 (TRAV29/DV5, TRAJ47)
CAASAEYGNKLVF

SEQ ID NO: 447932 - protein, 13 aa, Homo sapiens
  CDR3 for beta chain variable domain of TCR clone 223966 (TRBV19, TRBJ1-1)
CASSITGESEAFF

SEQ ID NO: 447933 - protein, 11 aa, Homo sapiens
  CDR3 for alpha chain variable domain of TCR clone 223967 (TRAV3, TRAJ21)
CAAGNFNKFYF

SEQ ID NO: 447934 - protein, 16 aa, Homo sapiens
  CDR3 for beta chain variable domain of TCR clone 223967 (TRBV19, TRBJ2-1)
CASSRAGPSSYNEQFF

SEQ ID NO: 447935 - protein, 17 aa, Homo sapiens
  CDR3 for alpha chain variable domain of TCR clone 223968 (TRAV38-2/DV8, TRAJ28)
CAYRFAYSGAGSYQLSF

SEQ ID NO: 447936 - protein, 16 aa, Homo sapiens
  CDR3 for beta chain variable domain of TCR clone 223968 (TRBV7-3, TRBJ2-2)
CASSLKRGTLSGELFF

SEQ ID NO: 447937 - protein, 15 aa, Homo sapiens
  CDR3 for alpha chain variable domain of TCR clone 223969 (TRAV14/DV4, TRAJ38)
CAMRERAGNNRKLIW

SEQ ID NO: 447938 - protein, 14 aa, Homo sapiens
  CDR3 for beta chain variable domain of TCR clone 223969 (TRBV19, TRBJ2-1)
CASPTFVLSGEQFF

SEQ ID NO: 447939 - protein, 22 aa, Homo sapiens
  CDR3 for alpha chain variable domain of TCR clone 223970 (TRAV34, TRAJ52)
STSVEQTRRSNAGGTSYGKLTF

SEQ ID NO: 447940 - protein, 14 aa, Homo sapiens
  CDR3 for beta chain variable domain of TCR clone 223970 (TRBV18, TRBJ2-1)
CASSPGSSYNEQFF

SEQ ID NO: 447941 - protein, 12 aa, Homo sapiens
  CDR3 for alpha chain variable domain of TCR clone 223971 (TRAV12-1, TRAJ31)
CVVNDNNSRLMF

SEQ ID NO: 447942 - protein, 15 aa, Homo sapiens
  CDR3 for beta chain variable domain of TCR clone 223971 (TRBV3-1, TRBJ2-5)
CASSQEVRLEETQYF

SEQ ID NO: 447943 - protein, 18 aa, Homo sapiens
  CDR3 for alpha chain variable domain of TCR clone 223972 (TRAV21, TRAJ52)
GAVRPSPAGGTSYEKLTF

SEQ ID NO: 447944 - protein, 13 aa, Homo sapiens
  CDR3 for beta chain variable domain of TCR clone 223972 (TRBV7-3, TRBJ1-1)
CASSQDWGAEAFF

SEQ ID NO: 447945 - protein, 15 aa, Homo sapiens
  CDR3 for alpha chain variable domain of TCR clone 223973 (TRAV25, TRAJ53)
CAATGGGGSNYKLTF

SEQ ID NO: 447946 - protein, 15 aa, Homo sapiens
  CDR3 for beta chain variable domain of TCR clone 223973 (TRBV11-2, TRBJ2-1)
CASSKNRGLIYEQFF

SEQ ID NO: 447947 - protein, 14 aa, Homo sapiens
  CDR3 for alpha chain variable domain of TCR clone 223974 (TRAV1-2, TRAJ8)
CAVREDTGFQKLVF

SEQ ID NO: 447948 - protein, 14 aa, Homo sapiens
  CDR3 for beta chain variable domain of TCR clone 223974 (TRBV4-2, TRBJ2-7)
CASSPNRAPYEQYF

SEQ ID NO: 447949 - protein, 18 aa, Homo sapiens
  CDR3 for alpha chain variable domain of TCR clone 223975 (TRAV12-2, TRAJ37)
SPVIQPPTFSSNTGKLIF

SEQ ID NO: 447950 - protein, 15 aa, Homo sapiens
  CDR3 for beta chain variable domain of TCR clone 223975 (TRBV4-2, TRBJ1-4)
CASSRTHATNEKLFF

SEQ ID NO: 447951 - protein, 13 aa, Homo sapiens
  CDR3 for alpha chain variable domain of TCR clone 223976 (TRAV2, TRAJ40)
CAVVTSGTYKYIF

SEQ ID NO: 447952 - protein, 15 aa, Homo sapiens
  CDR3 for beta chain variable domain of TCR clone 223976 (TRBV18, TRBJ2-1)
CASSPPSASYNERFF

SEQ ID NO: 447953 - protein, 15 aa, Homo sapiens
  CDR3 for alpha chain variable domain of TCR clone 223977 (TRAV3, TRAJ40)
CAVRDVTSGTYKYIL

SEQ ID NO: 447954 - protein, 13 aa, Homo sapiens
  CDR3 for beta chain variable domain of TCR clone 223977 (TRBV7-9, TRBJ1-2)
CASSLKQNYGYTF

SEQ ID NO: 447955 - protein, 14 aa, Homo sapiens
  CDR3 for alpha chain variable domain of TCR clone 223978 (TRAV9-2, TRAJ39)
CALYIYNAGNMLTF

SEQ ID NO: 447956 - protein, 15 aa, Homo sapiens
  CDR3 for beta chain variable domain of TCR clone 223978 (TRBV11-2, TRBJ2-1)
CASSKNRGLIYEQFF

SEQ ID NO: 447957 - protein, 14 aa, Homo sapiens
  CDR3 for alpha chain variable domain of TCR clone 223979 (TRAV13-1, TRAJ20)
CAARPRSNDYKLSF

SEQ ID NO: 447958 - protein, 13 aa, Homo sapiens
  CDR3 for beta chain variable domain of TCR clone 223979 (TRBV20-1, TRBJ1-1)
CSAPPGGHTEAFF

SEQ ID NO: 447959 - protein, 11 aa, Homo sapiens
  CDR3 for alpha chain variable domain of TCR clone 223980 (TRAV2, TRAJ33)
CAVESNYQLIW

SEQ ID NO: 447960 - protein, 15 aa, Homo sapiens
  CDR3 for beta chain variable domain of TCR clone 223980 (TRBV19, TRBJ1-1)
CASTSGQIHNTEAFV

SEQ ID NO: 447961 - protein, 11 aa, Homo sapiens
  CDR3 for alpha chain variable domain of TCR clone 223981 (TRAV1-2, TRAJ20)
CAVSNDYKLSF

SEQ ID NO: 447962 - protein, 16 aa, Homo sapiens
  CDR3 for beta chain variable domain of TCR clone 223981 (TRBV29-1, TRBJ2-6)
CSVEDIIYSGANVLTF

SEQ ID NO: 447963 - protein, 12 aa, Homo sapiens
  CDR3 for alpha chain variable domain of TCR clone 223982 (TRAV12-3, TRAJ41)
CAMSYSGYALNF

SEQ ID NO: 447964 - protein, 13 aa, Homo sapiens
  CDR3 for beta chain variable domain of TCR clone 223982 (TRBV19, TRBJ1-5)
CASSMRGYQPQHF

SEQ ID NO: 447965 - protein, 18 aa, Homo sapiens
  CDR3 for alpha chain variable domain of TCR clone 223983 (TRAV27, TRAJ13)
CAGAKSDSGGYQKVTLEL

SEQ ID NO: 447966 - protein, 15 aa, Homo sapiens
  CDR3 for beta chain variable domain of TCR clone 223983 (TRBV29-1, TRBJ2-1)
CSVGRHALFYNEQFF

SEQ ID NO: 447967 - protein, 14 aa, Homo sapiens
  CDR3 for alpha chain variable domain of TCR clone 223984 (TRAV12-1, TRAJ30)
CVVNIGGRDDNIIF

SEQ ID NO: 447968 - protein, 13 aa, Homo sapiens
  CDR3 for beta chain variable domain of TCR clone 223984 (TRBV12-5, TRBJ2-1)
CASGLGRGNEQFF

SEQ ID NO: 447969 - protein, 18 aa, Homo sapiens
  CDR3 for alpha chain variable domain of TCR clone 223985 (TRAV26-2, TRAJ54)
CIPRDVEVGIQGAQKLVF

SEQ ID NO: 447970 - protein, 16 aa, Homo sapiens
  CDR3 for beta chain variable domain of TCR clone 223985 (TRBV6-1, TRBJ2-5)
CASSETLDRGAETQYF

SEQ ID NO: 447971 - protein, 14 aa, Homo sapiens
  CDR3 for alpha chain variable domain of TCR clone 223986 (TRAV26-1, TRAJ49)
CIVRLTNTGNQFYF

SEQ ID NO: 447972 - protein, 15 aa, Homo sapiens
  CDR3 for beta chain variable domain of TCR clone 223986 (TRBV20-1, TRBJ2-7)
CSARDRVSGMDEQYF

SEQ ID NO: 447973 - protein, 14 aa, Homo sapiens
  CDR3 for alpha chain variable domain of TCR clone 223987 (TRAV2, TRAJ9)
CAVEHRSGGFKTIF

SEQ ID NO: 447974 - protein, 17 aa, Homo sapiens
  CDR3 for beta chain variable domain of TCR clone 223987 (TRBV13, TRBJ2-3)
CASSLSRVAGGRNTQYF

SEQ ID NO: 447975 - protein, 11 aa, Homo sapiens
  CDR3 for alpha chain variable domain of TCR clone 223988 (TRAV2, TRAJ13)
CAHGGYQKVTF

SEQ ID NO: 447976 - protein, 13 aa, Homo sapiens
  CDR3 for beta chain variable domain of TCR clone 223988 (TRBV27, TRBJ1-4)
CASSLMGDEKLFF

SEQ ID NO: 447977 - protein, 12 aa, Homo sapiens
  CDR3 for alpha chain variable domain of TCR clone 223989 (TRAV17, TRAJ20)
CATDSNDYKLSF

SEQ ID NO: 447978 - protein, 16 aa, Homo sapiens
  CDR3 for beta chain variable domain of TCR clone 223989 (TRBV7-2, TRBJ1-2)
CASSSNQGRRGHGDTF

SEQ ID NO: 447979 - protein, 12 aa, Homo sapiens
  CDR3 for alpha chain variable domain of TCR clone 223990 (TRAV12-3, TRAJ17)
CAMTLTGNKLTF

SEQ ID NO: 447980 - protein, 13 aa, Homo sapiens
  CDR3 for beta chain variable domain of TCR clone 223990 (TRBV20-1, TRBJ1-5)
CSASWGRSQPQHF

SEQ ID NO: 447981 - protein, 15 aa, Homo sapiens
  CDR3 for alpha chain variable domain of TCR clone 223991 (TRAV3, TRAJ9)
CAVRARNTGGLKTIF

SEQ ID NO: 447982 - protein, 15 aa, Homo sapiens
  CDR3 for beta chain variable domain of TCR clone 223991 (TRBV27, TRBJ1-1)
CASSPYADPYTEAFF

SEQ ID NO: 447983 - protein, 11 aa, Homo sapiens
  CDR3 for alpha chain variable domain of TCR clone 223992 (TRAV16, TRAJ20)
CALSEGFKAAL

SEQ ID NO: 447984 - protein, 13 aa, Homo sapiens
  CDR3 for beta chain variable domain of TCR clone 223992 (TRBV7-3, TRBJ2-1)
CASSLDSYNEKFF

SEQ ID NO: 447985 - protein, 15 aa, Homo sapiens
  CDR3 for alpha chain variable domain of TCR clone 223993 (TRAV9-2, TRAJ50)
CALSGMKTSYDKVIF

SEQ ID NO: 447986 - protein, 15 aa, Homo sapiens
  CDR3 for beta chain variable domain of TCR clone 223993 (TRBV2, TRBJ2-1)
CASSEEREGDNEQFF

SEQ ID NO: 447987 - protein, 17 aa, Homo sapiens
  CDR3 for alpha chain variable domain of TCR clone 223994 (TRAV3, TRAJ42)
CALRDRDYGGSQGNLIF

SEQ ID NO: 447988 - protein, 13 aa, Homo sapiens
  CDR3 for beta chain variable domain of TCR clone 223994 (TRBV10-3, TRBJ2-7)
CASKLAVNYEQYF

SEQ ID NO: 447989 - protein, 12 aa, Homo sapiens
  CDR3 for alpha chain variable domain of TCR clone 223995 (TRAV12-1, TRAJ34)
CLVTLNTDKLIF

SEQ ID NO: 447990 - protein, 14 aa, Homo sapiens
  CDR3 for beta chain variable domain of TCR clone 223995 (TRBV19, TRBJ1-1)
CASLRTGLNTEAFF

SEQ ID NO: 447991 - protein, 11 aa, Homo sapiens
  CDR3 for alpha chain variable domain of TCR clone 223996 (TRAV1-2, TRAJ40)
CAVPGTYKYIF

SEQ ID NO: 447992 - protein, 16 aa, Homo sapiens
  CDR3 for beta chain variable domain of TCR clone 223996 (TRBV29-1, TRBJ2-7)
CSVEVVGTSGSNEQYF

SEQ ID NO: 447993 - protein, 11 aa, Homo sapiens
  CDR3 for alpha chain variable domain of TCR clone 223997 (TRAV29/DV5, TRAJ31)
CAASYRDRLMF

SEQ ID NO: 447994 - protein, 19 aa, Homo sapiens
  CDR3 for beta chain variable domain of TCR clone 223997 (TRBV19, TRBJ2-5)
WASSIGQVTDFFLGETQYF

SEQ ID NO: 447995 - protein, 12 aa, Homo sapiens
  CDR3 for alpha chain variable domain of TCR clone 223998 (TRAV24, TRAJ26)
CAFFNYGQNFVF

SEQ ID NO: 447996 - protein, 18 aa, Homo sapiens
  CDR3 for beta chain variable domain of TCR clone 223998 (TRBV12-4, TRBJ2-2)
CASSLVAGTRGRTGELFF

SEQ ID NO: 447997 - protein, 16 aa, Homo sapiens
  CDR3 for alpha chain variable domain of TCR clone 223999 (TRAV30, TRAJ24)
CGTEIVDADSWGKFQF

SEQ ID NO: 447998 - protein, 11 aa, Homo sapiens
  CDR3 for beta chain variable domain of TCR clone 223999 (TRBV12-4, TRBJ2-3)
CASTATETQYF

SEQ ID NO: 447999 - protein, 15 aa, Homo sapiens
  CDR3 for alpha chain variable domain of TCR clone 224000 (TRAV12-3, TRAJ11)
CAMSEENSGYSTLTF

SEQ ID NO: 448000 - protein, 13 aa, Homo sapiens
  CDR3 for beta chain variable domain of TCR clone 224000 (TRBV12-4, TRBJ2-2)
CASSPLPPGELFF

SEQ ID NO: 448001 - protein, 13 aa, Homo sapiens
  CDR3 for alpha chain variable domain of TCR clone 224001 (TRAV29/DV5, TRAJ31)
CAASRNNNARLMV

SEQ ID NO: 448002 - protein, 15 aa, Homo sapiens
  CDR3 for beta chain variable domain of TCR clone 224001 (TRBV25-1, TRBJ1-4)
CASSPGDSTNEKLFF

SEQ ID NO: 448003 - protein, 17 aa, Homo sapiens
  CDR3 for alpha chain variable domain of TCR clone 224002 (TRAV4, TRAJ42)
CLVGVLNYGGSQGNLIF

SEQ ID NO: 448004 - protein, 12 aa, Homo sapiens
  CDR3 for beta chain variable domain of TCR clone 224002 (TRBV11-3, TRBJ2-3)
CASAFGGRSQYF

SEQ ID NO: 448005 - protein, 14 aa, Homo sapiens
  CDR3 for alpha chain variable domain of TCR clone 224003 (TRAV30, TRAJ33)
CGPVAPRSNYQLIW

SEQ ID NO: 448006 - protein, 16 aa, Homo sapiens
  CDR3 for beta chain variable domain of TCR clone 224003 (TRBV3-1, TRBJ2-5)
CASSPGQFNGFGTQYF

SEQ ID NO: 448007 - protein, 14 aa, Homo sapiens
  CDR3 for alpha chain variable domain of TCR clone 224004 (TRAV13-2, TRAJ15)
CAENPNQAGTALIF

SEQ ID NO: 448008 - protein, 16 aa, Homo sapiens
  CDR3 for beta chain variable domain of TCR clone 224004 (TRBV12-4, TRBJ1-2)
CASSPTATGKTRGCTF

SEQ ID NO: 448009 - protein, 11 aa, Homo sapiens
  CDR3 for alpha chain variable domain of TCR clone 224005 (TRAV35, TRAJ57)
GPQGGSEKLVL

SEQ ID NO: 448010 - protein, 16 aa, Homo sapiens
  CDR3 for beta chain variable domain of TCR clone 224005 (TRBV7-2, TRBJ1-5)
CASSWTGGPGNQPQHF

SEQ ID NO: 448011 - protein, 13 aa, Homo sapiens
  CDR3 for alpha chain variable domain of TCR clone 224006 (TRAV12-2, TRAJ4)
CAVFSGGYNKRIF

SEQ ID NO: 448012 - protein, 13 aa, Homo sapiens
  CDR3 for beta chain variable domain of TCR clone 224006 (TRBV19, TRBJ1-5)
CASSIDRDQPQHF

SEQ ID NO: 448013 - protein, 14 aa, Homo sapiens
  CDR3 for alpha chain variable domain of TCR clone 224007 (TRAV14/DV4, TRAJ15)
CAMRRDQAGTALIF

SEQ ID NO: 448014 - protein, 13 aa, Homo sapiens
  CDR3 for beta chain variable domain of TCR clone 224007 (TRBV15, TRBJ1-1)
CATSRGIQARAFF

SEQ ID NO: 448015 - protein, 15 aa, Homo sapiens
  CDR3 for alpha chain variable domain of TCR clone 224008 (TRAV8-3, TRAJ27)
CAVGPSKTNAGKSTI

SEQ ID NO: 448016 - protein, 15 aa, Homo sapiens
  CDR3 for beta chain variable domain of TCR clone 224008 (TRBV9, TRBJ1-6)
CASSVAGTGDSPLHF

SEQ ID NO: 448017 - protein, 13 aa, Homo sapiens
  CDR3 for alpha chain variable domain of TCR clone 224009 (TRAV3, TRAJ21)
CAVREPDFNKFYF

SEQ ID NO: 448018 - protein, 15 aa, Homo sapiens
  CDR3 for beta chain variable domain of TCR clone 224009 (TRBV6-3, TRBJ2-3)
RLIHYSVGQADTQYF

SEQ ID NO: 448019 - protein, 12 aa, Homo sapiens
  CDR3 for alpha chain variable domain of TCR clone 224010 (TRAV12-3, TRAJ17)
CAMTLTGNKLTC

SEQ ID NO: 448020 - protein, 20 aa, Homo sapiens
  CDR3 for beta chain variable domain of TCR clone 224010 (TRBV7-8, TRBJ2-2)
CASSHLFPGPTIHITGELFF

SEQ ID NO: 448021 - protein, 13 aa, Homo sapiens
  CDR3 for alpha chain variable domain of TCR clone 224011 (TRAV17, TRAJ29)
CATDAFRKHTSCL

SEQ ID NO: 448022 - protein, 13 aa, Homo sapiens
  CDR3 for beta chain variable domain of TCR clone 224011 (TRBV5-7, TRBJ2-6)
CASKSSGANVLTF

SEQ ID NO: 448023 - protein, 14 aa, Homo sapiens
  CDR3 for alpha chain variable domain of TCR clone 224012 (TRAV3, TRAJ9)
CAVRLNTGGFKTFC

SEQ ID NO: 448024 - protein, 15 aa, Homo sapiens
  CDR3 for beta chain variable domain of TCR clone 224012 (TRBV7-2, TRBJ2-1)
CASSLASGRVNEQFF

SEQ ID NO: 448025 - protein, 13 aa, Homo sapiens
  CDR3 for alpha chain variable domain of TCR clone 224013 (TRAV17, TRAJ5)
CALRGTGRRALTF

SEQ ID NO: 448026 - protein, 11 aa, Homo sapiens
  CDR3 for beta chain variable domain of TCR clone 224013 (TRBV6-3, TRBJ2-3)
CATGHADTQYF

SEQ ID NO: 448027 - protein, 11 aa, Homo sapiens
  CDR3 for alpha chain variable domain of TCR clone 224014 (TRAV21, TRAJ11)
CALNGYSTLTF

SEQ ID NO: 448028 - protein, 16 aa, Homo sapiens
  CDR3 for beta chain variable domain of TCR clone 224014 (TRBV19, TRBJ2-1)
CASSKAGPSSYNEQFF

SEQ ID NO: 448029 - protein, 16 aa, Homo sapiens
  CDR3 for alpha chain variable domain of TCR clone 224015 (TRAV4, TRAJ9)
CLVGDPNRPGGFKTIF

SEQ ID NO: 448030 - protein, 16 aa, Homo sapiens
  CDR3 for beta chain variable domain of TCR clone 224015 (TRBV28, TRBJ1-4)
CASSRPYRGRSEKLFF

SEQ ID NO: 448031 - protein, 14 aa, Homo sapiens
  CDR3 for alpha chain variable domain of TCR clone 224016 (TRAV2, TRAJ9)
CAVEDRSGGFKTIF

SEQ ID NO: 448032 - protein, 17 aa, Homo sapiens
  CDR3 for beta chain variable domain of TCR clone 224016 (TRBV7-8, TRBJ2-1)
CASSPPTGTLAYNEQFF

SEQ ID NO: 448033 - protein, 14 aa, Homo sapiens
  CDR3 for alpha chain variable domain of TCR clone 224017 (TRAV26-1, TRAJ39)
CIVRGSRAGNMLTF

SEQ ID NO: 448034 - protein, 16 aa, Homo sapiens
  CDR3 for beta chain variable domain of TCR clone 224017 (TRBV7-9, TRBJ2-5)
CASSPSGQGVKGTQYF

SEQ ID NO: 448035 - protein, 14 aa, Homo sapiens
  CDR3 for alpha chain variable domain of TCR clone 224018 (TRAV12-2, TRAJ11)
CAVNRESGYSTLTF

SEQ ID NO: 448036 - protein, 10 aa, Homo sapiens
  CDR3 for beta chain variable domain of TCR clone 224018 (TRBV20-1, TRBJ2-5)
CSARFEQQYF

SEQ ID NO: 448037 - protein, 14 aa, Homo sapiens
  CDR3 for alpha chain variable domain of TCR clone 224019 (TRAV9-2, TRAJ39)
CALYIYNAGNMLTF

SEQ ID NO: 448038 - protein, 13 aa, Homo sapiens
  CDR3 for beta chain variable domain of TCR clone 224019 (TRBV7-2, TRBJ2-2)
CASSLAVTGELLF

SEQ ID NO: 448039 - protein, 15 aa, Homo sapiens
  CDR3 for alpha chain variable domain of TCR clone 224020 (TRAV29/DV5, TRAJ53)
CSARYSGGSNYKLTF

SEQ ID NO: 448040 - protein, 15 aa, Homo sapiens
  CDR3 for beta chain variable domain of TCR clone 224020 (TRBV28, TRBJ2-1)
CASSLGTRLYNEQFF

SEQ ID NO: 448041 - protein, 17 aa, Homo sapiens
  CDR3 for alpha chain variable domain of TCR clone 224021 (TRAV3, TRAJ13)
CAVRDMRRTGGYQKVTF

SEQ ID NO: 448042 - protein, 16 aa, Homo sapiens
  CDR3 for beta chain variable domain of TCR clone 224021 (TRBV28, TRBJ2-1)
FASSSRVRDSYNEQFF

SEQ ID NO: 448043 - protein, 13 aa, Homo sapiens
  CDR3 for alpha chain variable domain of TCR clone 224022 (TRAV4, TRAJ22)
CLGGSGSARQLTF

SEQ ID NO: 448044 - protein, 17 aa, Homo sapiens
  CDR3 for beta chain variable domain of TCR clone 224022 (TRBV7-9, TRBJ1-6)
CASSSPDVEIHPSTLGT

SEQ ID NO: 448045 - protein, 14 aa, Homo sapiens
  CDR3 for alpha chain variable domain of TCR clone 224023 (TRAV1-2, TRAJ8)
CAVREDTGFQKPVF

SEQ ID NO: 448046 - protein, 15 aa, Homo sapiens
  CDR3 for beta chain variable domain of TCR clone 224023 (TRBV6-3, TRBJ2-7)
CASRSPGTVFYEQYF

SEQ ID NO: 448047 - protein, 16 aa, Homo sapiens
  CDR3 for alpha chain variable domain of TCR clone 224024 (TRAV30, TRAJ24)
CGTEIVDADSCGKFQF

SEQ ID NO: 448048 - protein, 15 aa, Homo sapiens
  CDR3 for beta chain variable domain of TCR clone 224024 (TRBV27, TRBJ2-1)
CASSNRGGSSNEQFF

SEQ ID NO: 448049 - protein, 12 aa, Homo sapiens
  CDR3 for alpha chain variable domain of TCR clone 224025 (TRAV35, TRAJ13)
GGPLGGYQKVTF

SEQ ID NO: 448050 - protein, 14 aa, Homo sapiens
  CDR3 for beta chain variable domain of TCR clone 224025 (TRBV19, TRBJ2-2)
CASSMVGLSGELFF

SEQ ID NO: 448051 - protein, 13 aa, Homo sapiens
  CDR3 for alpha chain variable domain of TCR clone 224026 (TRAV39, TRAJ58)
CAGEETSGSRLTF

SEQ ID NO: 448052 - protein, 15 aa, Homo sapiens
  CDR3 for beta chain variable domain of TCR clone 224026 (TRBV18, TRBJ2-1)
CASSPPSASYNEQFF

SEQ ID NO: 448053 - protein, 14 aa, Homo sapiens
  CDR3 for alpha chain variable domain of TCR clone 224027 (TRAV38-1, TRAJ45)
CAYYSGGGADGRTF

SEQ ID NO: 448054 - protein, 15 aa, Homo sapiens
  CDR3 for beta chain variable domain of TCR clone 224027 (TRBV11-2, TRBJ2-1)
CASSKNRGLIYEQFF

SEQ ID NO: 448055 - protein, 17 aa, Homo sapiens
  CDR3 for alpha chain variable domain of TCR clone 224028 (TRAV3, TRAJ42)
CAVGDRDYGGSQGNLIF

SEQ ID NO: 448056 - protein, 14 aa, Homo sapiens
  CDR3 for beta chain variable domain of TCR clone 224028 (TRBV25-1, TRBJ1-1)
CASTHLGGNTEAFF

SEQ ID NO: 448057 - protein, 13 aa, Homo sapiens
  CDR3 for alpha chain variable domain of TCR clone 224029 (TRAV27, TRAJ53)
CAPSGGSNYKLTF

SEQ ID NO: 448058 - protein, 13 aa, Homo sapiens
  CDR3 for beta chain variable domain of TCR clone 224029 (TRBV24-1, TRBJ2-2)
CATAEPNTGELFF

SEQ ID NO: 448059 - protein, 12 aa, Homo sapiens
  CDR3 for alpha chain variable domain of TCR clone 224030 (TRAV12-3, TRAJ17)
CAMTLTGNKLTF

SEQ ID NO: 448060 - protein, 15 aa, Homo sapiens
  CDR3 for beta chain variable domain of TCR clone 224030 (TRBV7-2, TRBJ2-3)
CASSLVVRGPDTQYF

SEQ ID NO: 448061 - protein, 12 aa, Homo sapiens
  CDR3 for alpha chain variable domain of TCR clone 224031 (TRAV36/DV7, TRAJ54)
CAVVRGAQKLVF

SEQ ID NO: 448062 - protein, 13 aa, Homo sapiens
  CDR3 for beta chain variable domain of TCR clone 224031 (TRBV18, TRBJ2-3)
CASSTGRTDTQYF

SEQ ID NO: 448063 - protein, 20 aa, Homo sapiens
  CDR3 for alpha chain variable domain of TCR clone 224032 (TRAV12-2, TRAJ52)
SPVIQPPARAGGTSYGKLTF

SEQ ID NO: 448064 - protein, 14 aa, Homo sapiens
  CDR3 for beta chain variable domain of TCR clone 224032 (TRBV19, TRBJ2-1)
CASPTFVLSGEQFF

SEQ ID NO: 448065 - protein, 12 aa, Homo sapiens
  CDR3 for alpha chain variable domain of TCR clone 224033 (TRAV17, TRAJ39)
CVTGAAGNMLTF

SEQ ID NO: 448066 - protein, 14 aa, Homo sapiens
  CDR3 for beta chain variable domain of TCR clone 224033 (TRBV7-3, TRBJ1-1)
CASSLKGGNTEAFF

SEQ ID NO: 448067 - protein, 14 aa, Homo sapiens
  CDR3 for alpha chain variable domain of TCR clone 224034 (TRAV3, TRAJ17)
FAVRDAAAGNKRTF

SEQ ID NO: 448068 - protein, 13 aa, Homo sapiens
  CDR3 for beta chain variable domain of TCR clone 224034 (TRBV2, TRBJ1-1)
CASSVSGYTEAFF

SEQ ID NO: 448069 - protein, 17 aa, Homo sapiens
  CDR3 for alpha chain variable domain of TCR clone 224035 (TRAV3, TRAJ6)
CAVRDGPRAGGSYIPTF

SEQ ID NO: 448070 - protein, 13 aa, Homo sapiens
  CDR3 for beta chain variable domain of TCR clone 224035 (TRBV10-3, TRBJ2-7)
CASKLAVNYEQYL

SEQ ID NO: 448071 - protein, 12 aa, Homo sapiens
  CDR3 for alpha chain variable domain of TCR clone 224036 (TRAV35, TRAJ54)
CAGQEGAQKLVF

SEQ ID NO: 448072 - protein, 13 aa, Homo sapiens
  CDR3 for beta chain variable domain of TCR clone 224036 (TRBV7-2, TRBJ2-2)
CASSLAVTGELFF

SEQ ID NO: 448073 - protein, 14 aa, Homo sapiens
  CDR3 for alpha chain variable domain of TCR clone 224037 (TRAV16, TRAJ32)
CALKSGGATNKLIF

SEQ ID NO: 448074 - protein, 15 aa, Homo sapiens
  CDR3 for beta chain variable domain of TCR clone 224037 (TRBV5-1, TRBJ2-1)
CASSPPRAPYNEQFF

SEQ ID NO: 448075 - protein, 12 aa, Homo sapiens
  CDR3 for alpha chain variable domain of TCR clone 224038 (TRAV2, TRAJ3)
CAVRCSASKIIF

SEQ ID NO: 448076 - protein, 15 aa, Homo sapiens
  CDR3 for beta chain variable domain of TCR clone 224038 (TRBV15, TRBJ2-5)
CATSRDGGPQETQYF

SEQ ID NO: 448077 - protein, 16 aa, Homo sapiens
  CDR3 for alpha chain variable domain of TCR clone 224039 (TRAV26-1, )
CIDIQNPDPAVYQLRD

SEQ ID NO: 448078 - protein, 19 aa, Homo sapiens
  CDR3 for beta chain variable domain of TCR clone 224039 (TRBV19, TRBJ2-5)
CASSIGQVTDVCLGETQYF

SEQ ID NO: 448079 - protein, 17 aa, Homo sapiens
  CDR3 for alpha chain variable domain of TCR clone 224040 (TRAV3, TRAJ42)
CAVRDRDYGGSQGNLIF

SEQ ID NO: 448080 - protein, 16 aa, Homo sapiens
  CDR3 for beta chain variable domain of TCR clone 224040 (TRBV4-2, TRBJ2-1)
CASSQELRGGLNEQFF

SEQ ID NO: 448081 - protein, 15 aa, Homo sapiens
  CDR3 for alpha chain variable domain of TCR clone 224041 (TRAV8-3, TRAJ45)
CAPSYSGGGADALTF

SEQ ID NO: 448082 - protein, 13 aa, Homo sapiens
  CDR3 for beta chain variable domain of TCR clone 224041 (TRBV10-3, TRBJ2-7)
CASKLAVNYEQYF

SEQ ID NO: 448083 - protein, 19 aa, Homo sapiens
  CDR3 for alpha chain variable domain of TCR clone 224042 (TRAV25, TRAJ20)
TATQTTDVGILPHDYKLSF

SEQ ID NO: 448084 - protein, 16 aa, Homo sapiens
  CDR3 for beta chain variable domain of TCR clone 224042 (TRBV19, TRBJ2-1)
CASSKAGPSSYNEQFF

SEQ ID NO: 448085 - protein, 12 aa, Homo sapiens
  CDR3 for alpha chain variable domain of TCR clone 224043 (TRAV8-3, TRAJ43)
CAVGAGNNDMRF

SEQ ID NO: 448086 - protein, 14 aa, Homo sapiens
  CDR3 for beta chain variable domain of TCR clone 224043 (TRBV19, TRBJ2-1)
CASPTFVLSGEQFF

SEQ ID NO: 448087 - protein, 23 aa, Homo sapiens
  CDR3 for alpha chain variable domain of TCR clone 224044 (TRAV26-1, TRAJ38)
CIADNAGNNHIQNPDPAVDQLRD

SEQ ID NO: 448088 - protein, 13 aa, Homo sapiens
  CDR3 for beta chain variable domain of TCR clone 224044 (TRBV5-4, TRBJ1-1)
CASSVDLGTEAFF

SEQ ID NO: 448089 - protein, 16 aa, Homo sapiens
  CDR3 for alpha chain variable domain of TCR clone 224045 (TRAV17, TRAJ53)
SATDALSGGSNYKLTF

SEQ ID NO: 448090 - protein, 12 aa, Homo sapiens
  CDR3 for beta chain variable domain of TCR clone 224045 (TRBV5-1, TRBJ2-7)
CASSFRGYEQYF

SEQ ID NO: 448091 - protein, 11 aa, Homo sapiens
  CDR3 for alpha chain variable domain of TCR clone 224046 (TRAV3, TRAJ21)
CAVGNFTKFYF

SEQ ID NO: 448092 - protein, 16 aa, Homo sapiens
  CDR3 for beta chain variable domain of TCR clone 224046 (TRBV19, TRBJ2-1)
CASSRAGPSAYNEQFF

SEQ ID NO: 448093 - protein, 17 aa, Homo sapiens
  CDR3 for alpha chain variable domain of TCR clone 224047 (TRAV8-1, TRAJ43)
CAVTHDMRFGAGTRLTV

SEQ ID NO: 448094 - protein, 17 aa, Homo sapiens
  CDR3 for beta chain variable domain of TCR clone 224047 (TRBV5-4, TRBJ2-1)
CASSSAGGRGPYNEQFF

SEQ ID NO: 448095 - protein, 13 aa, Homo sapiens
  CDR3 for alpha chain variable domain of TCR clone 224048 (TRAV13-1, TRAJ15)
CAALYQAGTALIF

SEQ ID NO: 448096 - protein, 14 aa, Homo sapiens
  CDR3 for beta chain variable domain of TCR clone 224048 (TRBV11-2, TRBJ1-5)
CASSSRTGNQPQHF

SEQ ID NO: 448097 - protein, 15 aa, Homo sapiens
  CDR3 for alpha chain variable domain of TCR clone 224049 (TRAV29/DV5, TRAJ24)
CAASGATDSWGKFQV

SEQ ID NO: 448098 - protein, 12 aa, Homo sapiens
  CDR3 for beta chain variable domain of TCR clone 224049 (TRBV11-2, TRBJ2-2)
CASSLPTGEPFF

SEQ ID NO: 448099 - protein, 12 aa, Homo sapiens
  CDR3 for alpha chain variable domain of TCR clone 224050 (TRAV3, TRAJ9)
CAVLPAGFKTIF

SEQ ID NO: 448100 - protein, 14 aa, Homo sapiens
  CDR3 for beta chain variable domain of TCR clone 224050 (TRBV6-1, TRBJ1-3)
CASVQGGGGNTIYF

SEQ ID NO: 448101 - protein, 15 aa, Homo sapiens
  CDR3 for alpha chain variable domain of TCR clone 224051 (TRAV2, TRAJ9)
CAVEDRGTGGFKTIF

SEQ ID NO: 448102 - protein, 15 aa, Homo sapiens
  CDR3 for beta chain variable domain of TCR clone 224051 (TRBV5-1, TRBJ1-1)
CASSLSDLGGTEAFF

SEQ ID NO: 448103 - protein, 12 aa, Homo sapiens
  CDR3 for alpha chain variable domain of TCR clone 224052 (TRAV13-1, TRAJ42)
SVLRGSQGNLIF

SEQ ID NO: 448104 - protein, 13 aa, Homo sapiens
  CDR3 for beta chain variable domain of TCR clone 224052 (TRBV2, TRBJ1-4)
CASSEIGVEKLFF

SEQ ID NO: 448105 - protein, 12 aa, Homo sapiens
  CDR3 for alpha chain variable domain of TCR clone 224053 (TRAV22, TRAJ9)
CALHTGGFKTIF

SEQ ID NO: 448106 - protein, 16 aa, Homo sapiens
  CDR3 for beta chain variable domain of TCR clone 224053 (TRBV7-3, TRBJ2-2)
GGTQPCIQWNTGELFF

SEQ ID NO: 448107 - protein, 18 aa, Homo sapiens
  CDR3 for alpha chain variable domain of TCR clone 224054 (TRAV9-2, TRAJ52)
CALSRDNAGGTSYGKLTF

SEQ ID NO: 448108 - protein, 15 aa, Homo sapiens
  CDR3 for beta chain variable domain of TCR clone 224054 (TRBV20-1, TRBJ1-1)
CSASRGVTGNTEAFF

SEQ ID NO: 448109 - protein, 14 aa, Homo sapiens
  CDR3 for alpha chain variable domain of TCR clone 224055 (TRAV2, TRAJ9)
CAVEDRCGGFKTIF

SEQ ID NO: 448110 - protein, 16 aa, Homo sapiens
  CDR3 for beta chain variable domain of TCR clone 224055 (TRBV20-1, TRBJ2-2)
CSARDDRVGLTGELFF

SEQ ID NO: 448111 - protein, 14 aa, Homo sapiens
  CDR3 for alpha chain variable domain of TCR clone 224056 (TRAV17, TRAJ11)
CATDTSRGYSTLTF

SEQ ID NO: 448112 - protein, 13 aa, Homo sapiens
  CDR3 for beta chain variable domain of TCR clone 224056 (TRBV19, TRBJ2-5)
CASRDSRRETRYF

SEQ ID NO: 448113 - protein, 12 aa, Homo sapiens
  CDR3 for alpha chain variable domain of TCR clone 224057 (TRAV13-1, TRAJ48)
CAANFGNEKLNF

SEQ ID NO: 448114 - protein, 14 aa, Homo sapiens
  CDR3 for beta chain variable domain of TCR clone 224057 (TRBV7-2, TRBJ2-7)
CASSPKTSFYEQYF

SEQ ID NO: 448115 - protein, 14 aa, Homo sapiens
  CDR3 for alpha chain variable domain of TCR clone 224058 (TRAV1-1, TRAJ27)
CAVIYNTNAGKSTF

SEQ ID NO: 448116 - protein, 14 aa, Homo sapiens
  CDR3 for beta chain variable domain of TCR clone 224058 (TRBV6-3, TRBJ2-7)
CQRFPGTVFYEQYF

SEQ ID NO: 448117 - protein, 16 aa, Homo sapiens
  CDR3 for alpha chain variable domain of TCR clone 224059 (TRAV22, TRAJ45)
CAVEGGKRGGADGLTF

SEQ ID NO: 448118 - protein, 15 aa, Homo sapiens
  CDR3 for beta chain variable domain of TCR clone 224059 (TRBV4-2, TRBJ1-1)
CASSQQGAGDTEAFF

SEQ ID NO: 448119 - protein, 16 aa, Homo sapiens
  CDR3 for alpha chain variable domain of TCR clone 224060 (TRAV12-2, TRAJ13)
CAVKKTGGTRKVPLEL

SEQ ID NO: 448120 - protein, 15 aa, Homo sapiens
  CDR3 for beta chain variable domain of TCR clone 224060 (TRBV27, TRBJ2-1)
CASSNGGGSSNEQFF

SEQ ID NO: 448121 - protein, 16 aa, Homo sapiens
  CDR3 for alpha chain variable domain of TCR clone 224061 (TRAV12-2, TRAJ32)
CAVNLGQCGATNRLIF

SEQ ID NO: 448122 - protein, 15 aa, Homo sapiens
  CDR3 for beta chain variable domain of TCR clone 224061 (TRBV20-1, TRBJ2-7)
CSARGPLAGGREQYF

SEQ ID NO: 448123 - protein, 16 aa, Homo sapiens
  CDR3 for alpha chain variable domain of TCR clone 224062 (TRAV12-2, TRAJ48)
CAVNPTSNFRNEKLTF

SEQ ID NO: 448124 - protein, 12 aa, Homo sapiens
  CDR3 for beta chain variable domain of TCR clone 224062 (TRBV9, TRBJ2-3)
CASSLRAGTQYF

SEQ ID NO: 448125 - protein, 14 aa, Homo sapiens
  CDR3 for alpha chain variable domain of TCR clone 224063 (TRAV1-2, TRAJ16)
VAVNRFSVGQKLLF

SEQ ID NO: 448126 - protein, 15 aa, Homo sapiens
  CDR3 for beta chain variable domain of TCR clone 224063 (TRBV7-9, TRBJ1-6)
CASSSPGRGNSPLHF

SEQ ID NO: 448127 - protein, 17 aa, Homo sapiens
  CDR3 for alpha chain variable domain of TCR clone 224064 (TRAV4, TRAJ18)
CLVGERSVGATLGRLYF

SEQ ID NO: 448128 - protein, 14 aa, Homo sapiens
  CDR3 for beta chain variable domain of TCR clone 224064 (TRBV6-5, TRBJ1-2)
CASSYDGTGGGYTF

SEQ ID NO: 448129 - protein, 14 aa, Homo sapiens
  CDR3 for alpha chain variable domain of TCR clone 224065 (TRAV9-2, TRAJ39)
CALYIYNAVNMLTF

SEQ ID NO: 448130 - protein, 14 aa, Homo sapiens
  CDR3 for beta chain variable domain of TCR clone 224065 (TRBV7-2, TRBJ2-7)
CASRSQGAAYEQYF

SEQ ID NO: 448131 - protein, 15 aa, Homo sapiens
  CDR3 for alpha chain variable domain of TCR clone 224066 (TRAV12-1, TRAJ9)
CVVSFGDTGGFKTFF

SEQ ID NO: 448132 - protein, 13 aa, Homo sapiens
  CDR3 for beta chain variable domain of TCR clone 224066 (TRBV2, TRBJ1-4)
CASSERAGEKLFF

SEQ ID NO: 448133 - protein, 16 aa, Homo sapiens
  CDR3 for alpha chain variable domain of TCR clone 224067 (TRAV1-1, TRAJ29)
RAVRSTRNSGNTPLVF

SEQ ID NO: 448134 - protein, 14 aa, Homo sapiens
  CDR3 for beta chain variable domain of TCR clone 224067 (TRBV6-1, TRBJ1-3)
CASVQGGGGYTIYF

SEQ ID NO: 448135 - protein, 13 aa, Homo sapiens
  CDR3 for alpha chain variable domain of TCR clone 224068 (TRAV8-3, TRAJ33)
CAVGIDSNYQLIW

SEQ ID NO: 448136 - protein, 17 aa, Homo sapiens
  CDR3 for beta chain variable domain of TCR clone 224068 (TRBV13, TRBJ2-3)
CASSLSRVAGGRNTQYF

SEQ ID NO: 448137 - protein, 13 aa, Homo sapiens
  CDR3 for alpha chain variable domain of TCR clone 224069 (TRAV27, TRAJ40)
CAGPTSGTYKYIF

SEQ ID NO: 448138 - protein, 18 aa, Homo sapiens
  CDR3 for beta chain variable domain of TCR clone 224069 (TRBV3-1, TRBJ2-7)
CASSRISAGGRSSYEQYF

SEQ ID NO: 448139 - protein, 13 aa, Homo sapiens
  CDR3 for alpha chain variable domain of TCR clone 224070 (TRAV30, TRAJ26)
CGTEIPLGQNFVF

SEQ ID NO: 448140 - protein, 16 aa, Homo sapiens
  CDR3 for beta chain variable domain of TCR clone 224070 (TRBV6-1, TRBJ1-5)
CASSDIAGQSNQPQHF

SEQ ID NO: 448141 - protein, 13 aa, Homo sapiens
  CDR3 for alpha chain variable domain of TCR clone 224071 (TRAV8-1, TRAJ28)
CAVSGAGSYRLTV

SEQ ID NO: 448142 - protein, 14 aa, Homo sapiens
  CDR3 for beta chain variable domain of TCR clone 224071 (TRBV19, TRBJ2-5)
CASSMTGQQETQYF

SEQ ID NO: 448143 - protein, 12 aa, Homo sapiens
  CDR3 for alpha chain variable domain of TCR clone 224072 (TRAV22, TRAJ20)
CAVGGNDYQLSF

SEQ ID NO: 448144 - protein, 13 aa, Homo sapiens
  CDR3 for beta chain variable domain of TCR clone 224072 (TRBV9, TRBJ1-1)
CASSVGTGTEAFF

SEQ ID NO: 448145 - protein, 13 aa, Homo sapiens
  CDR3 for alpha chain variable domain of TCR clone 224073 (TRAV12-3, TRAJ47)
CAMKKEYGNKLDF

SEQ ID NO: 448146 - protein, 15 aa, Homo sapiens
  CDR3 for beta chain variable domain of TCR clone 224073 (TRBV20-1, TRBJ2-7)
CSARDRVSGMDEQYF

SEQ ID NO: 448147 - protein, 14 aa, Homo sapiens
  CDR3 for alpha chain variable domain of TCR clone 224074 (TRAV26-1, TRAJ38)
CIADNAGNNRKLIW

SEQ ID NO: 448148 - protein, 17 aa, Homo sapiens
  CDR3 for beta chain variable domain of TCR clone 224074 (TRBV7-7, TRBJ1-4)
CASSLVGQGASNEKLFF

SEQ ID NO: 448149 - protein, 15 aa, Homo sapiens
  CDR3 for alpha chain variable domain of TCR clone 224075 (TRAV8-4, TRAJ3)
CAVTGENLVQQCFQD

SEQ ID NO: 448150 - protein, 18 aa, Homo sapiens
  CDR3 for beta chain variable domain of TCR clone 224075 (TRBV6-6, TRBJ1-3)
CASSYSKWDSISGNTIYF

SEQ ID NO: 448151 - protein, 14 aa, Homo sapiens
  CDR3 for alpha chain variable domain of TCR clone 224076 (TRAV12-3, TRAJ9)
CAMSPNTGGFKTIF

SEQ ID NO: 448152 - protein, 12 aa, Homo sapiens
  CDR3 for beta chain variable domain of TCR clone 224076 (TRBV19, TRBJ1-5)
CASSIAQQPQDF

SEQ ID NO: 448153 - protein, 11 aa, Homo sapiens
  CDR3 for alpha chain variable domain of TCR clone 224077 (TRAV3, TRAJ21)
CAMGNFNKFYF

SEQ ID NO: 448154 - protein, 16 aa, Homo sapiens
  CDR3 for beta chain variable domain of TCR clone 224077 (TRBV19, TRBJ2-1)
CASSKAGPSSYNDQFF

SEQ ID NO: 448155 - protein, 13 aa, Homo sapiens
  CDR3 for alpha chain variable domain of TCR clone 224078 (TRAV8-3, TRAJ28)
CAVGAVGSYQLTF

SEQ ID NO: 448156 - protein, 16 aa, Homo sapiens
  CDR3 for beta chain variable domain of TCR clone 224078 (TRBV7-3, TRBJ2-3)
CASSLSGYRPEDTQYF

SEQ ID NO: 448157 - protein, 12 aa, Homo sapiens
  CDR3 for alpha chain variable domain of TCR clone 224079 (TRAV1-1, TRAJ20)
CAVREDDCKLSF

SEQ ID NO: 448158 - protein, 15 aa, Homo sapiens
  CDR3 for beta chain variable domain of TCR clone 224079 (TRBV5-7, TRBJ2-7)
CASSLPGQVFYEQYF

SEQ ID NO: 448159 - protein, 13 aa, Homo sapiens
  CDR3 for alpha chain variable domain of TCR clone 224080 (TRAV27, TRAJ45)
CRSSGGGADGLTF

SEQ ID NO: 448160 - protein, 14 aa, Homo sapiens
  CDR3 for beta chain variable domain of TCR clone 224080 (TRBV11-2, TRBJ2-3)
CASSRLARTDTQHF

SEQ ID NO: 448161 - protein, 12 aa, Homo sapiens
  CDR3 for alpha chain variable domain of TCR clone 224081 (TRAV24, TRAJ26)
CAFSNYGQNFVF

SEQ ID NO: 448162 - protein, 19 aa, Homo sapiens
  CDR3 for beta chain variable domain of TCR clone 224081 (TRBV7-2, TRBJ2-3)
CASSPGLAGGGLTTDTQYF

SEQ ID NO: 448163 - protein, 13 aa, Homo sapiens
  CDR3 for alpha chain variable domain of TCR clone 224082 (TRAV3, TRAJ21)
CAVREPDFNQFYF

SEQ ID NO: 448164 - protein, 17 aa, Homo sapiens
  CDR3 for beta chain variable domain of TCR clone 224082 (TRBV7-8, TRBJ2-6)
CASSAGTGGAGANVLTF

SEQ ID NO: 448165 - protein, 13 aa, Homo sapiens
  CDR3 for alpha chain variable domain of TCR clone 224083 (TRAV21, TRAJ20)
CAVGLRVDYKLSF

SEQ ID NO: 448166 - protein, 13 aa, Homo sapiens
  CDR3 for beta chain variable domain of TCR clone 224083 (TRBV6-1, TRBJ1-1)
CTSSRQGNTEAFF

SEQ ID NO: 448167 - protein, 13 aa, Homo sapiens
  CDR3 for alpha chain variable domain of TCR clone 224084 (TRAV13-1, TRAJ39)
CAASIWAGNMLTF

SEQ ID NO: 448168 - protein, 15 aa, Homo sapiens
  CDR3 for beta chain variable domain of TCR clone 224084 (TRBV27, TRBJ1-1)
CASSPYADPYTEAFF

SEQ ID NO: 448169 - protein, 12 aa, Homo sapiens
  CDR3 for alpha chain variable domain of TCR clone 224085 (TRAV35, TRAJ30)
CAGLNRDDKIIF

SEQ ID NO: 448170 - protein, 14 aa, Homo sapiens
  CDR3 for beta chain variable domain of TCR clone 224085 (TRBV18, TRBJ2-7)
CASSPRGGAYEQYF

SEQ ID NO: 448171 - protein, 12 aa, Homo sapiens
  CDR3 for alpha chain variable domain of TCR clone 224086 (TRAV12-3, TRAJ43)
CAISPNNNDMRF

SEQ ID NO: 448172 - protein, 15 aa, Homo sapiens
  CDR3 for beta chain variable domain of TCR clone 224086 (TRBV27, TRBJ1-4)
CASSPRHATNEKLFF

SEQ ID NO: 448173 - protein, 13 aa, Homo sapiens
  CDR3 for alpha chain variable domain of TCR clone 224087 (TRAV2, TRAJ36)
CAVDQTGANNLFF

SEQ ID NO: 448174 - protein, 12 aa, Homo sapiens
  CDR3 for beta chain variable domain of TCR clone 224087 (TRBV19, TRBJ1-1)
CASMNRYAEAVF

SEQ ID NO: 448175 - protein, 16 aa, Homo sapiens
  CDR3 for alpha chain variable domain of TCR clone 224088 (TRAV12-3, TRAJ53)
CTMSPGSGGSNYKLTF

SEQ ID NO: 448176 - protein, 15 aa, Homo sapiens
  CDR3 for beta chain variable domain of TCR clone 224088 (TRBV20-1, TRBJ2-7)
CSARDRVSGMDEQYF

SEQ ID NO: 448177 - protein, 12 aa, Homo sapiens
  CDR3 for alpha chain variable domain of TCR clone 224089 (TRAV12-3, TRAJ41)
CAMSYSGYALNF

SEQ ID NO: 448178 - protein, 13 aa, Homo sapiens
  CDR3 for beta chain variable domain of TCR clone 224089 (TRBV7-3, TRBJ2-1)
GASSLDSYNEQFF

SEQ ID NO: 448179 - protein, 17 aa, Homo sapiens
  CDR3 for alpha chain variable domain of TCR clone 224090 (TRAV29/DV5, TRAJ52)
CSASSGAGGTSYGKLTF

SEQ ID NO: 448180 - protein, 15 aa, Homo sapiens
  CDR3 for beta chain variable domain of TCR clone 224090 (TRBV2, TRBJ2-1)
CASSELAGSYNEQFF

SEQ ID NO: 448181 - protein, 14 aa, Homo sapiens
  CDR3 for alpha chain variable domain of TCR clone 224091 (TRAV2, TRAJ9)
CAVEDRSGGFKTIF

SEQ ID NO: 448182 - protein, 14 aa, Homo sapiens
  CDR3 for beta chain variable domain of TCR clone 224091 (TRBV7-9, TRBJ2-1)
CASRPTGLRNEQFF

SEQ ID NO: 448183 - protein, 15 aa, Homo sapiens
  CDR3 for alpha chain variable domain of TCR clone 224092 (TRAV8-3, TRAJ45)
CASSYSGGGADGLTF

SEQ ID NO: 448184 - protein, 15 aa, Homo sapiens
  CDR3 for beta chain variable domain of TCR clone 224092 (TRBV27, TRBJ1-4)
RASSPRHATNEKLFF

SEQ ID NO: 448185 - protein, 14 aa, Homo sapiens
  CDR3 for alpha chain variable domain of TCR clone 224093 (TRAV13-2, TRAJ57)
CAENFQGGSEKLVF

SEQ ID NO: 448186 - protein, 14 aa, Homo sapiens
  CDR3 for beta chain variable domain of TCR clone 224093 (TRBV19, TRBJ2-1)
CASPTFVLSGEQFF

SEQ ID NO: 448187 - protein, 15 aa, Homo sapiens
  CDR3 for alpha chain variable domain of TCR clone 224094 (TRAV8-3, TRAJ6)
CAVGPLGGGSYIPTF

SEQ ID NO: 448188 - protein, 17 aa, Homo sapiens
  CDR3 for beta chain variable domain of TCR clone 224094 (TRBV5-1, TRBJ2-2)
CASSLAGLSGGTGELFF

SEQ ID NO: 448189 - protein, 14 aa, Homo sapiens
  CDR3 for alpha chain variable domain of TCR clone 224095 (TRAV12-1, TRAJ3)
CGAARYSSASKIIF

SEQ ID NO: 448190 - protein, 16 aa, Homo sapiens
  CDR3 for beta chain variable domain of TCR clone 224095 (TRBV4-3, TRBJ2-2)
CASSHLQGSGTGDLFF

SEQ ID NO: 448191 - protein, 14 aa, Homo sapiens
  CDR3 for alpha chain variable domain of TCR clone 224096 (TRAV12-2, TRAJ40)
CAAKIPSGTYKYIF

SEQ ID NO: 448192 - protein, 13 aa, Homo sapiens
  CDR3 for beta chain variable domain of TCR clone 224096 (TRBV20-1, TRBJ1-1)
QCTNTDWGTEAFF

SEQ ID NO: 448193 - protein, 18 aa, Homo sapiens
  CDR3 for alpha chain variable domain of TCR clone 224097 (TRAV26-2, TRAJ45)
CILRVDTYSGGGADGLTF

SEQ ID NO: 448194 - protein, 16 aa, Homo sapiens
  CDR3 for beta chain variable domain of TCR clone 224097 (TRBV2, TRBJ1-4)
CASNLLQGATNAKLFF

SEQ ID NO: 448195 - protein, 18 aa, Homo sapiens
  CDR3 for alpha chain variable domain of TCR clone 224098 (TRAV12-3, TRAJ52)
CAISRTNAGGTSYGKLTF

SEQ ID NO: 448196 - protein, 15 aa, Homo sapiens
  CDR3 for beta chain variable domain of TCR clone 224098 (TRBV19, TRBJ1-2)
CASSVGQVLNYGYTF

SEQ ID NO: 448197 - protein, 10 aa, Homo sapiens
  CDR3 for alpha chain variable domain of TCR clone 224099 (TRAV30, TRAJ48)
CGIGNEKLTF

SEQ ID NO: 448198 - protein, 13 aa, Homo sapiens
  CDR3 for beta chain variable domain of TCR clone 224099 (TRBV20-1, TRBJ1-6)
CSAPLGVGSPLHF

SEQ ID NO: 448199 - protein, 15 aa, Homo sapiens
  CDR3 for alpha chain variable domain of TCR clone 224100 (TRAV16, TRAJ17)
CALSGNKAAGTKLTF

SEQ ID NO: 448200 - protein, 15 aa, Homo sapiens
  CDR3 for beta chain variable domain of TCR clone 224100 (TRBV7-3, TRBJ2-1)
CASSPTGGGEVEQFF

SEQ ID NO: 448201 - protein, 13 aa, Homo sapiens
  CDR3 for alpha chain variable domain of TCR clone 224101 (TRAV23/DV6, TRAJ10)
ASVLTGGGKKLTF

SEQ ID NO: 448202 - protein, 13 aa, Homo sapiens
  CDR3 for beta chain variable domain of TCR clone 224101 (TRBV11-1, TRBJ1-2)
CASVGSWGYGYTF

SEQ ID NO: 448203 - protein, 16 aa, Homo sapiens
  CDR3 for alpha chain variable domain of TCR clone 224102 (TRAV12-3, TRAJ28)
CAMRANSGAGSYQLTF

SEQ ID NO: 448204 - protein, 14 aa, Homo sapiens
  CDR3 for beta chain variable domain of TCR clone 224102 (TRBV7-9, TRBJ2-1)
CASSPRDSLYEQFF

SEQ ID NO: 448205 - protein, 13 aa, Homo sapiens
  CDR3 for alpha chain variable domain of TCR clone 224103 (TRAV12-1, TRAJ17)
CGNYKAAGNKLTF

SEQ ID NO: 448206 - protein, 17 aa, Homo sapiens
  CDR3 for beta chain variable domain of TCR clone 224103 (TRBV20-1, TRBJ2-1)
CSASSSGLAGSYNEQFF

SEQ ID NO: 448207 - protein, 14 aa, Homo sapiens
  CDR3 for alpha chain variable domain of TCR clone 224104 (TRAV2, TRAJ9)
CAVEDRSVGFKTIF

SEQ ID NO: 448208 - protein, 15 aa, Homo sapiens
  CDR3 for beta chain variable domain of TCR clone 224104 (TRBV7-3, TRBJ2-6)
CASSRTGTGANVLTF

SEQ ID NO: 448209 - protein, 11 aa, Homo sapiens
  CDR3 for alpha chain variable domain of TCR clone 224105 (TRAV12-1, TRAJ34)
CVVIKGRELIF

SEQ ID NO: 448210 - protein, 12 aa, Homo sapiens
  CDR3 for beta chain variable domain of TCR clone 224105 (TRBV2, TRBJ2-1)
CAYGPPGNEQFF

SEQ ID NO: 448211 - protein, 12 aa, Homo sapiens
  CDR3 for alpha chain variable domain of TCR clone 224106 (TRAV13-1, TRAJ15)
CAASQAGTALSF

SEQ ID NO: 448212 - protein, 14 aa, Homo sapiens
  CDR3 for beta chain variable domain of TCR clone 224106 (TRBV19, TRBJ2-1)
CASPTFVLSGEQFF

SEQ ID NO: 448213 - protein, 16 aa, Homo sapiens
  CDR3 for alpha chain variable domain of TCR clone 224107 (TRAV30, TRAJ24)
CGTEIVDADSWGKFQF

SEQ ID NO: 448214 - protein, 19 aa, Homo sapiens
  CDR3 for beta chain variable domain of TCR clone 224107 (TRBV4-2, TRBJ2-5)
CASSPIKTGPGAKQETQYF

SEQ ID NO: 448215 - protein, 12 aa, Homo sapiens
  CDR3 for alpha chain variable domain of TCR clone 224108 (TRAV16, TRAJ26)
CALRSYGQNFVF

SEQ ID NO: 448216 - protein, 12 aa, Homo sapiens
  CDR3 for beta chain variable domain of TCR clone 224108 (TRBV18, TRBJ1-1)
CASSPGGTEAFF

SEQ ID NO: 448217 - protein, 15 aa, Homo sapiens
  CDR3 for alpha chain variable domain of TCR clone 224109 (TRAV34, TRAJ38)
CGADFTPGNNRKLIW

SEQ ID NO: 448218 - protein, 14 aa, Homo sapiens
  CDR3 for beta chain variable domain of TCR clone 224109 (TRBV25-1, TRBJ1-1)
CASTHLGGNTESFF

SEQ ID NO: 448219 - protein, 14 aa, Homo sapiens
  CDR3 for alpha chain variable domain of TCR clone 224110 (TRAV1-1, TRAJ27)
CAVIYNTNAGKSTF

SEQ ID NO: 448220 - protein, 14 aa, Homo sapiens
  CDR3 for beta chain variable domain of TCR clone 224110 (TRBV6-5, TRBJ1-2)
CASSYGGTGGGYTF

SEQ ID NO: 448221 - protein, 12 aa, Homo sapiens
  CDR3 for alpha chain variable domain of TCR clone 224111 (TRAV21, TRAJ3)
CCFYSSASKIIF

SEQ ID NO: 448222 - protein, 13 aa, Homo sapiens
  CDR3 for beta chain variable domain of TCR clone 224111 (TRBV19, TRBJ1-2)
CASSVPGQDGYTF

SEQ ID NO: 448223 - protein, 14 aa, Homo sapiens
  CDR3 for alpha chain variable domain of TCR clone 224112 (TRAV26-1, TRAJ34)
CIVRVAYNTDKLIF

SEQ ID NO: 448224 - protein, 12 aa, Homo sapiens
  CDR3 for beta chain variable domain of TCR clone 224112 (TRBV2, TRBJ2-4)
CASQGDSGIQYF

SEQ ID NO: 448225 - protein, 16 aa, Homo sapiens
  CDR3 for alpha chain variable domain of TCR clone 224113 (TRAV30, TRAJ24)
CGTEIVDADSWGKFQF

SEQ ID NO: 448226 - protein, 15 aa, Homo sapiens
  CDR3 for beta chain variable domain of TCR clone 224113 (TRBV19, TRBJ2-7)
CASRPTPGLSIEQYF

SEQ ID NO: 448227 - protein, 15 aa, Homo sapiens
  CDR3 for alpha chain variable domain of TCR clone 224114 (TRAV13-2, TRAJ45)
CAENNSGGGADGLTF

SEQ ID NO: 448228 - protein, 13 aa, Homo sapiens
  CDR3 for beta chain variable domain of TCR clone 224114 (TRBV25-1, TRBJ2-6)
CASRGPWANVLTF

SEQ ID NO: 448229 - protein, 15 aa, Homo sapiens
  CDR3 for alpha chain variable domain of TCR clone 224115 (TRAV26-1, TRAJ29)
CIVRVEGSGNTPLAF

SEQ ID NO: 448230 - protein, 13 aa, Homo sapiens
  CDR3 for beta chain variable domain of TCR clone 224115 (TRBV10-3, TRBJ2-7)
CASKLAVNYEQYF

SEQ ID NO: 448231 - protein, 18 aa, Homo sapiens
  CDR3 for alpha chain variable domain of TCR clone 224116 (TRAV21, TRAJ52)
CAVRPSPAGGTSFGKLPF

SEQ ID NO: 448232 - protein, 17 aa, Homo sapiens
  CDR3 for beta chain variable domain of TCR clone 224116 (TRBV13, TRBJ2-3)
CASSLSRVAGGRNTQYF

SEQ ID NO: 448233 - protein, 13 aa, Homo sapiens
  CDR3 for alpha chain variable domain of TCR clone 224117 (TRAV13-1, TRAJ5)
CAASDTGRRALTF

SEQ ID NO: 448234 - protein, 11 aa, Homo sapiens
  CDR3 for beta chain variable domain of TCR clone 224117 (TRBV28, TRBJ2-3)
CQQLYRDTQYF

SEQ ID NO: 448235 - protein, 14 aa, Homo sapiens
  CDR3 for alpha chain variable domain of TCR clone 224118 (TRAV12-3, TRAJ10)
SHLPLTGGGNKLTF

SEQ ID NO: 448236 - protein, 15 aa, Homo sapiens
  CDR3 for beta chain variable domain of TCR clone 224118 (TRBV5-1, TRBJ2-6)
CASSLEGSGANVLTF

SEQ ID NO: 448237 - protein, 12 aa, Homo sapiens
  CDR3 for alpha chain variable domain of TCR clone 224119 (TRAV8-6, TRAJ8)
CAVTPGFQQLVF

SEQ ID NO: 448238 - protein, 16 aa, Homo sapiens
  CDR3 for beta chain variable domain of TCR clone 224119 (TRBV7-3, TRBJ2-2)
CASSLKRGTLSGELFF

SEQ ID NO: 448239 - protein, 16 aa, Homo sapiens
  CDR3 for alpha chain variable domain of TCR clone 224120 (TRAV26-1, TRAJ41)
CIVRVAVANSGYALNF

SEQ ID NO: 448240 - protein, 15 aa, Homo sapiens
  CDR3 for beta chain variable domain of TCR clone 224120 (TRBV5-1, TRBJ1-5)
CASSLSGNSNQPQHF

SEQ ID NO: 448241 - protein, 13 aa, Homo sapiens
  CDR3 for alpha chain variable domain of TCR clone 224121 (TRAV2, TRAJ34)
CAVEEDNTDKLIF

SEQ ID NO: 448242 - protein, 14 aa, Homo sapiens
  CDR3 for beta chain variable domain of TCR clone 224121 (TRBV7-2, TRBJ2-7)
CASSPKTSFYEQYF

SEQ ID NO: 448243 - protein, 13 aa, Homo sapiens
  CDR3 for alpha chain variable domain of TCR clone 224122 (TRAV1-2, TRAJ9)
CAALNTGGFKTIF

SEQ ID NO: 448244 - protein, 13 aa, Homo sapiens
  CDR3 for beta chain variable domain of TCR clone 224122 (TRBV19, TRBJ1-2)
CASSVPGQDAYTF

SEQ ID NO: 448245 - protein, 15 aa, Homo sapiens
  CDR3 for alpha chain variable domain of TCR clone 224123 (TRAV2, TRAJ15)
CAVEDRGQAGTALIF

SEQ ID NO: 448246 - protein, 15 aa, Homo sapiens
  CDR3 for beta chain variable domain of TCR clone 224123 (TRBV5-1, TRBJ2-3)
CASSSTSGSTDTQYF

SEQ ID NO: 448247 - protein, 15 aa, Homo sapiens
  CDR3 for alpha chain variable domain of TCR clone 224124 (TRAV1-2, TRAJ28)
CAVQYSGAGSSQLTF

SEQ ID NO: 448248 - protein, 12 aa, Homo sapiens
  CDR3 for beta chain variable domain of TCR clone 224124 (TRBV7-8, TRBJ2-7)
CASSLGDREQYF

SEQ ID NO: 448249 - protein, 11 aa, Homo sapiens
  CDR3 for alpha chain variable domain of TCR clone 224125 (TRAV12-2, TRAJ31)
CAVTRWARLMF

SEQ ID NO: 448250 - protein, 17 aa, Homo sapiens
  CDR3 for beta chain variable domain of TCR clone 224125 (TRBV19, TRBJ2-7)
CASSIGGGSSTSSTSGR

SEQ ID NO: 448251 - protein, 12 aa, Homo sapiens
  CDR3 for alpha chain variable domain of TCR clone 224126 (TRAV21, TRAJ33)
CAKMDSNYKLIW

SEQ ID NO: 448252 - protein, 13 aa, Homo sapiens
  CDR3 for beta chain variable domain of TCR clone 224126 (TRBV12-4, TRBJ2-5)
CASSPGTEETQYF

SEQ ID NO: 448253 - protein, 17 aa, Homo sapiens
  CDR3 for alpha chain variable domain of TCR clone 224127 (TRAV26-1, TRAJ58)
CIVRVRAEETSGSRLTF

SEQ ID NO: 448254 - protein, 18 aa, Homo sapiens
  CDR3 for beta chain variable domain of TCR clone 224127 (TRBV7-9, TRBJ2-7)
CASSLTTSGSRTWYEQYF

SEQ ID NO: 448255 - protein, 20 aa, Homo sapiens
  CDR3 for alpha chain variable domain of TCR clone 224128 (TRAV8-3, TRAJ4)
CAVGVLFCWLQSADFCSRDQ

SEQ ID NO: 448256 - protein, 14 aa, Homo sapiens
  CDR3 for beta chain variable domain of TCR clone 224128 (TRBV7-9, TRBJ2-3)
CASSLEDGTDTQYF

SEQ ID NO: 448257 - protein, 12 aa, Homo sapiens
  CDR3 for alpha chain variable domain of TCR clone 224129 (TRAV27, TRAJ42)
CAGGGSQGNLIF

SEQ ID NO: 448258 - protein, 12 aa, Homo sapiens
  CDR3 for beta chain variable domain of TCR clone 224129 (TRBV11-2, TRBJ2-2)
CASSLGGGELFF

SEQ ID NO: 448259 - protein, 17 aa, Homo sapiens
  CDR3 for alpha chain variable domain of TCR clone 224130 (TRAV17, TRAJ24)
CATANSMTTDSWGKLQF

SEQ ID NO: 448260 - protein, 16 aa, Homo sapiens
  CDR3 for beta chain variable domain of TCR clone 224130 (TRBV19, TRBJ1-1)
CASRFGGPVTGTEAFF

SEQ ID NO: 448261 - protein, 16 aa, Homo sapiens
  CDR3 for alpha chain variable domain of TCR clone 224131 (TRAV1-2, TRAJ40)
CAVRVSRTSGTYKYIF

SEQ ID NO: 448262 - protein, 14 aa, Homo sapiens
  CDR3 for beta chain variable domain of TCR clone 224131 (TRBV4-1, TRBJ2-3)
CASSQDSGTDTQYF

SEQ ID NO: 448263 - protein, 13 aa, Homo sapiens
  CDR3 for alpha chain variable domain of TCR clone 224132 (TRAV35, TRAJ53)
CAGQESSHYKLTF

SEQ ID NO: 448264 - protein, 11 aa, Homo sapiens
  CDR3 for beta chain variable domain of TCR clone 224132 (TRBV29-1, TRBJ2-5)
CGEDRTGTQYF

SEQ ID NO: 448265 - protein, 12 aa, Homo sapiens
  CDR3 for alpha chain variable domain of TCR clone 224133 (TRAV17, TRAJ30)
CATDARDDKIIF

SEQ ID NO: 448266 - protein, 15 aa, Homo sapiens
  CDR3 for beta chain variable domain of TCR clone 224133 (TRBV9, TRBJ1-6)
CASSVAGTGDSPLHF

SEQ ID NO: 448267 - protein, 15 aa, Homo sapiens
  CDR3 for alpha chain variable domain of TCR clone 224134 (TRAV26-2, TRAJ26)
CILRDFDNYGQNFVF

SEQ ID NO: 448268 - protein, 14 aa, Homo sapiens
  CDR3 for beta chain variable domain of TCR clone 224134 (TRBV29-1, TRBJ2-5)
CSFWTPCAGETQYF

SEQ ID NO: 448269 - protein, 13 aa, Homo sapiens
  CDR3 for alpha chain variable domain of TCR clone 224135 (TRAV12-3, TRAJ33)
CAMSVNSNYQLIW

SEQ ID NO: 448270 - protein, 16 aa, Homo sapiens
  CDR3 for beta chain variable domain of TCR clone 224135 (TRBV13, TRBJ2-5)
CASSVRTGGSWETQYF

SEQ ID NO: 448271 - protein, 17 aa, Homo sapiens
  CDR3 for alpha chain variable domain of TCR clone 224136 (TRAV23/DV6, TRAJ57)
CAASSTLSQGGSEKLVF

SEQ ID NO: 448272 - protein, 13 aa, Homo sapiens
  CDR3 for beta chain variable domain of TCR clone 224136 (TRBV25-1, TRBJ1-1)
CQHPPVGNTGAFF

SEQ ID NO: 448273 - protein, 13 aa, Homo sapiens
  CDR3 for alpha chain variable domain of TCR clone 224137 (TRAV13-1, TRAJ37)
FAAVSGNTGKLIF

SEQ ID NO: 448274 - protein, 17 aa, Homo sapiens
  CDR3 for beta chain variable domain of TCR clone 224137 (TRBV10-2, TRBJ1-6)
CASSENRGSSYNSPLHF

SEQ ID NO: 448275 - protein, 15 aa, Homo sapiens
  CDR3 for alpha chain variable domain of TCR clone 224138 (TRAV21, TRAJ41)
CAVSDNSNSGYALNF

SEQ ID NO: 448276 - protein, 17 aa, Homo sapiens
  CDR3 for beta chain variable domain of TCR clone 224138 (TRBV13, TRBJ2-3)
CASSLSRVAGGRNTQYF

SEQ ID NO: 448277 - protein, 13 aa, Homo sapiens
  CDR3 for alpha chain variable domain of TCR clone 224139 (TRAV13-1, TRAJ53)
CAASKGSNYKLTF

SEQ ID NO: 448278 - protein, 16 aa, Homo sapiens
  CDR3 for beta chain variable domain of TCR clone 224139 (TRBV13, TRBJ2-2)
CASSPRTGEHTGELFF

SEQ ID NO: 448279 - protein, 13 aa, Homo sapiens
  CDR3 for alpha chain variable domain of TCR clone 224140 (TRAV12-1, TRAJ49)
CVVSKSTGNQFYF

SEQ ID NO: 448280 - protein, 13 aa, Homo sapiens
  CDR3 for beta chain variable domain of TCR clone 224140 (TRBV7-2, TRBJ2-4)
CASSREHANIQYF

SEQ ID NO: 448281 - protein, 15 aa, Homo sapiens
  CDR3 for alpha chain variable domain of TCR clone 224141 (TRAV14/DV4, TRAJ33)
CAMREGRDSNYQLIW

SEQ ID NO: 448282 - protein, 15 aa, Homo sapiens
  CDR3 for beta chain variable domain of TCR clone 224141 (TRBV5-5, TRBJ1-5)
CASSSTPGSNQPQHC

SEQ ID NO: 448283 - protein, 15 aa, Homo sapiens
  CDR3 for alpha chain variable domain of TCR clone 224142 (TRAV12-3, TRAJ27)
CATRAYNTNAGKSTF

SEQ ID NO: 448284 - protein, 13 aa, Homo sapiens
  CDR3 for beta chain variable domain of TCR clone 224142 (TRBV11-2, TRBJ2-5)
CASSRGPAETQYF

SEQ ID NO: 448285 - protein, 13 aa, Homo sapiens
  CDR3 for alpha chain variable domain of TCR clone 224143 (TRAV8-3, TRAJ48)
CAVVRFGNEKLTF

SEQ ID NO: 448286 - protein, 16 aa, Homo sapiens
  CDR3 for beta chain variable domain of TCR clone 224143 (TRBV20-1, TRBJ2-5)
CSARDFASGFQETQYF

SEQ ID NO: 448287 - protein, 14 aa, Homo sapiens
  CDR3 for alpha chain variable domain of TCR clone 224144 (TRAV26-1, TRAJ45)
CIEVTGGGADGLTF

SEQ ID NO: 448288 - protein, 15 aa, Homo sapiens
  CDR3 for beta chain variable domain of TCR clone 224144 (TRBV7-2, TRBJ1-2)
CASSPRAGWNYGYTF

SEQ ID NO: 448289 - protein, 14 aa, Homo sapiens
  CDR3 for alpha chain variable domain of TCR clone 224145 (TRAV8-6, TRAJ29)
CAVSGWAGNTPLVF

SEQ ID NO: 448290 - protein, 15 aa, Homo sapiens
  CDR3 for beta chain variable domain of TCR clone 224145 (TRBV7-3, TRBJ2-2)
CQQLKAGDLVRGAVF

SEQ ID NO: 448291 - protein, 15 aa, Homo sapiens
  CDR3 for alpha chain variable domain of TCR clone 224146 (TRAV2, TRAJ9)
CAVAALNTGGLKTTF

SEQ ID NO: 448292 - protein, 15 aa, Homo sapiens
  CDR3 for beta chain variable domain of TCR clone 224146 (TRBV6-3, TRBJ2-7)
CASSSPGTVFYEQYF

SEQ ID NO: 448293 - protein, 14 aa, Homo sapiens
  CDR3 for alpha chain variable domain of TCR clone 224147 (TRAV4, TRAJ26)
VLVGPHNYGQNFVF

SEQ ID NO: 448294 - protein, 17 aa, Homo sapiens
  CDR3 for beta chain variable domain of TCR clone 224147 (TRBV24-1, TRBJ2-1)
CATSDVSTSGTYNEQFF

SEQ ID NO: 448295 - protein, 10 aa, Homo sapiens
  CDR3 for alpha chain variable domain of TCR clone 224148 (TRAV13-1, TRAJ7)
LIGGNNRLAF

SEQ ID NO: 448296 - protein, 15 aa, Homo sapiens
  CDR3 for beta chain variable domain of TCR clone 224148 (TRBV7-9, TRBJ1-1)
CASSLLEQGGTEAVF

SEQ ID NO: 448297 - protein, 14 aa, Homo sapiens
  CDR3 for alpha chain variable domain of TCR clone 224149 (TRAV17, TRAJ50)
CATMMKTSYDKVIF

SEQ ID NO: 448298 - protein, 13 aa, Homo sapiens
  CDR3 for beta chain variable domain of TCR clone 224149 (TRBV6-1, TRBJ2-2)
CANSGHNTGELFF

SEQ ID NO: 448299 - protein, 13 aa, Homo sapiens
  CDR3 for alpha chain variable domain of TCR clone 224150 (TRAV12-2, TRAJ52)
CAAHGTSYGKRTF

SEQ ID NO: 448300 - protein, 15 aa, Homo sapiens
  CDR3 for beta chain variable domain of TCR clone 224150 (TRBV10-3, TRBJ2-7)
CAISTCSGVKGEQYF

SEQ ID NO: 448301 - protein, 14 aa, Homo sapiens
  CDR3 for alpha chain variable domain of TCR clone 224151 (TRAV13-1, TRAJ44)
CAAKATGTASKLTF

SEQ ID NO: 448302 - protein, 13 aa, Homo sapiens
  CDR3 for beta chain variable domain of TCR clone 224151 (TRBV15, TRBJ1-1)
CATSRIRNTEAFF

SEQ ID NO: 448303 - protein, 15 aa, Homo sapiens
  CDR3 for alpha chain variable domain of TCR clone 224152 (TRAV8-3, TRAJ32)
CAVGPYVGATNKLIF

SEQ ID NO: 448304 - protein, 14 aa, Homo sapiens
  CDR3 for beta chain variable domain of TCR clone 224152 (TRBV29-1, TRBJ2-2)
CSVLAETNTGELFF

SEQ ID NO: 448305 - protein, 13 aa, Homo sapiens
  CDR3 for alpha chain variable domain of TCR clone 224153 (TRAV13-1, TRAJ33)
CAAWTDSNYHLIW

SEQ ID NO: 448306 - protein, 17 aa, Homo sapiens
  CDR3 for beta chain variable domain of TCR clone 224153 (TRBV13, TRBJ2-3)
CASSLSRVVGGRNTQYF

SEQ ID NO: 448307 - protein, 14 aa, Homo sapiens
  CDR3 for alpha chain variable domain of TCR clone 224154 (TRAV8-4, TRAJ5)
CAVSTDTGRRALTV

SEQ ID NO: 448308 - protein, 14 aa, Homo sapiens
  CDR3 for beta chain variable domain of TCR clone 224154 (TRBV5-1, TRBJ2-2)
CASSLGRGSGELFF

SEQ ID NO: 448309 - protein, 15 aa, Homo sapiens
  CDR3 for alpha chain variable domain of TCR clone 224155 (TRAV12-3, TRAJ6)
CAMSATTGGSSIPTF

SEQ ID NO: 448310 - protein, 17 aa, Homo sapiens
  CDR3 for beta chain variable domain of TCR clone 224155 (TRBV13, TRBJ2-3)
CASSLSRVAGGRNTQYF

SEQ ID NO: 448311 - protein, 14 aa, Homo sapiens
  CDR3 for alpha chain variable domain of TCR clone 224156 (TRAV26-1, TRAJ45)
CIEGTGGGADGLTF

SEQ ID NO: 448312 - protein, 13 aa, Homo sapiens
  CDR3 for beta chain variable domain of TCR clone 224156 (TRBV7-6, TRBJ1-2)
CASSLVADYGYSF

SEQ ID NO: 448313 - protein, 13 aa, Homo sapiens
  CDR3 for alpha chain variable domain of TCR clone 224157 (TRAV12-1, TRAJ16)
CVVNTRNGQKLLF

SEQ ID NO: 448314 - protein, 14 aa, Homo sapiens
  CDR3 for beta chain variable domain of TCR clone 224157 (TRBV7-2, TRBJ2-7)
CASRSQGAAYEQYF

SEQ ID NO: 448315 - protein, 13 aa, Homo sapiens
  CDR3 for alpha chain variable domain of TCR clone 224158 (TRAV16, TRAJ34)
CALISYNTDKLIF

SEQ ID NO: 448316 - protein, 16 aa, Homo sapiens
  CDR3 for beta chain variable domain of TCR clone 224158 (TRBV2, TRBJ2-5)
CASSETQGVGEETQYF

SEQ ID NO: 448317 - protein, 15 aa, Homo sapiens
  CDR3 for alpha chain variable domain of TCR clone 224159 (TRAV2, TRAJ15)
CAVGDRGQAGTALIF

SEQ ID NO: 448318 - protein, 17 aa, Homo sapiens
  CDR3 for beta chain variable domain of TCR clone 224159 (TRBV5-1, TRBJ2-5)
CASSFNPERGDQETQYF

SEQ ID NO: 448319 - protein, 15 aa, Homo sapiens
  CDR3 for alpha chain variable domain of TCR clone 224160 (TRAV38-2/DV8, TRAJ26)
CAYRSRDNYGQNFFF

SEQ ID NO: 448320 - protein, 14 aa, Homo sapiens
  CDR3 for beta chain variable domain of TCR clone 224160 (TRBV29-1, TRBJ1-3)
CSVADRVVGNTIYF

SEQ ID NO: 448321 - protein, 14 aa, Homo sapiens
  CDR3 for alpha chain variable domain of TCR clone 224161 (TRAV38-1, TRAJ48)
CSFMANFGNEKLTF

SEQ ID NO: 448322 - protein, 16 aa, Homo sapiens
  CDR3 for beta chain variable domain of TCR clone 224161 (TRBV4-1, TRBJ2-7)
CASRPSGGGADNEQYF

SEQ ID NO: 448323 - protein, 12 aa, Homo sapiens
  CDR3 for alpha chain variable domain of TCR clone 224162 (TRAV12-2, TRAJ45)
CAVTGVSYGLTF

SEQ ID NO: 448324 - protein, 14 aa, Homo sapiens
  CDR3 for beta chain variable domain of TCR clone 224162 (TRBV5-5, TRBJ2-7)
CASSLGQGTYEQYF

SEQ ID NO: 448325 - protein, 14 aa, Homo sapiens
  CDR3 for alpha chain variable domain of TCR clone 224163 (TRAV12-1, TRAJ17)
CVVNYKAAGNRLTF

SEQ ID NO: 448326 - protein, 12 aa, Homo sapiens
  CDR3 for beta chain variable domain of TCR clone 224163 (TRBV5-1, TRBJ2-5)
CASSFSWETQYF

SEQ ID NO: 448327 - protein, 13 aa, Homo sapiens
  CDR3 for alpha chain variable domain of TCR clone 224164 (TRAV16, TRAJ27)
CALRRTNAGKSTF

SEQ ID NO: 448328 - protein, 11 aa, Homo sapiens
  CDR3 for beta chain variable domain of TCR clone 224164 (TRBV11-2, TRBJ2-2)
CASSLPGELFF

SEQ ID NO: 448329 - protein, 12 aa, Homo sapiens
  CDR3 for alpha chain variable domain of TCR clone 224165 (TRAV21, TRAJ31)
CAVWGNNARLMF

SEQ ID NO: 448330 - protein, 12 aa, Homo sapiens
  CDR3 for beta chain variable domain of TCR clone 224165 (TRBV11-2, TRBJ2-1)
CASSPGNNEQFF

SEQ ID NO: 448331 - protein, 14 aa, Homo sapiens
  CDR3 for alpha chain variable domain of TCR clone 224166 (TRAV12-2, TRAJ11)
CAVEGGSGYSTLTF

SEQ ID NO: 448332 - protein, 13 aa, Homo sapiens
  CDR3 for beta chain variable domain of TCR clone 224166 (TRBV12-5, TRBJ2-3)
CASGDRQSDTQYF

SEQ ID NO: 448333 - protein, 13 aa, Homo sapiens
  CDR3 for alpha chain variable domain of TCR clone 224167 (TRAV17, TRAJ9)
CATDHTVGFKTIF

SEQ ID NO: 448334 - protein, 16 aa, Homo sapiens
  CDR3 for beta chain variable domain of TCR clone 224167 (TRBV7-7, TRBJ2-1)
CASSLASGTSYNEQFF

SEQ ID NO: 448335 - protein, 15 aa, Homo sapiens
  CDR3 for alpha chain variable domain of TCR clone 224168 (TRAV3, TRAJ5)
CAVRDLDTGRRALTF

SEQ ID NO: 448336 - protein, 13 aa, Homo sapiens
  CDR3 for beta chain variable domain of TCR clone 224168 (TRBV12-4, TRBJ2-7)
CAGSPTETYEQYL

SEQ ID NO: 448337 - protein, 15 aa, Homo sapiens
  CDR3 for alpha chain variable domain of TCR clone 224169 (TRAV29/DV5, TRAJ8)
CAASVRNTGFQKLVF

SEQ ID NO: 448338 - protein, 13 aa, Homo sapiens
  CDR3 for beta chain variable domain of TCR clone 224169 (TRBV2, TRBJ2-3)
CASIIPASDTQYF

SEQ ID NO: 448339 - protein, 12 aa, Homo sapiens
  CDR3 for alpha chain variable domain of TCR clone 224170 (TRAV12-1, TRAJ40)
FVVYSGTYKYIF

SEQ ID NO: 448340 - protein, 17 aa, Homo sapiens
  CDR3 for beta chain variable domain of TCR clone 224170 (TRBV11-3, TRBJ1-5)
CASSPLTGLRGNQPQHF

SEQ ID NO: 448341 - protein, 11 aa, Homo sapiens
  CDR3 for alpha chain variable domain of TCR clone 224171 (TRAV8-4, TRAJ54)
CAVSEVLGAQA

SEQ ID NO: 448342 - protein, 13 aa, Homo sapiens
  CDR3 for beta chain variable domain of TCR clone 224171 (TRBV27, TRBJ2-7)
CASSFVSSYEQYF

SEQ ID NO: 448343 - protein, 15 aa, Homo sapiens
  CDR3 for alpha chain variable domain of TCR clone 224172 (TRAV8-4, TRAJ47)
CAVSDPEEYGNKLVF

SEQ ID NO: 448344 - protein, 15 aa, Homo sapiens
  CDR3 for beta chain variable domain of TCR clone 224172 (TRBV7-2, TRBJ2-7)
CASSLAVGQVYEQYF

SEQ ID NO: 448345 - protein, 14 aa, Homo sapiens
  CDR3 for alpha chain variable domain of TCR clone 224173 (TRAV1-1, TRAJ27)
CAVIYNTNASKSTF

SEQ ID NO: 448346 - protein, 15 aa, Homo sapiens
  CDR3 for beta chain variable domain of TCR clone 224173 (TRBV6-3, TRBJ2-7)
CASSSPGTVFYEQYF

SEQ ID NO: 448347 - protein, 17 aa, Homo sapiens
  CDR3 for alpha chain variable domain of TCR clone 224174 (TRAV3, TRAJ6)
CAVRDGPRAGGSYILTF

SEQ ID NO: 448348 - protein, 15 aa, Homo sapiens
  CDR3 for beta chain variable domain of TCR clone 224174 (TRBV12-4, TRBJ2-5)
CASSLGGQGRETQYF

SEQ ID NO: 448349 - protein, 12 aa, Homo sapiens
  CDR3 for alpha chain variable domain of TCR clone 224175 (TRAV13-2, TRAJ23)
CAERHRGGKLIF

SEQ ID NO: 448350 - protein, 16 aa, Homo sapiens
  CDR3 for beta chain variable domain of TCR clone 224175 (TRBV20-1, TRBJ1-4)
CSAPGQGLLTNEKQFF

SEQ ID NO: 448351 - protein, 16 aa, Homo sapiens
  CDR3 for alpha chain variable domain of TCR clone 224176 (TRAV27, TRAJ53)
CAAPEGSGGSNYKLTF

SEQ ID NO: 448352 - protein, 13 aa, Homo sapiens
  CDR3 for beta chain variable domain of TCR clone 224176 (TRBV6-5, TRBJ2-7)
CASSGGSFYEQYF

SEQ ID NO: 448353 - protein, 18 aa, Homo sapiens
  CDR3 for alpha chain variable domain of TCR clone 224177 (TRAV13-1, TRAJ52)
CAAKNPNAGGTSYGKLTF

SEQ ID NO: 448354 - protein, 15 aa, Homo sapiens
  CDR3 for beta chain variable domain of TCR clone 224177 (TRBV27, TRBJ2-1)
CASGNGGGSSNEQFF

SEQ ID NO: 448355 - protein, 13 aa, Homo sapiens
  CDR3 for alpha chain variable domain of TCR clone 224178 (TRAV2, TRAJ40)
CAVVTSGTYEYLF

SEQ ID NO: 448356 - protein, 15 aa, Homo sapiens
  CDR3 for beta chain variable domain of TCR clone 224178 (TRBV11-3, TRBJ2-3)
CASLKDGREGDTQYF

SEQ ID NO: 448357 - protein, 17 aa, Homo sapiens
  CDR3 for alpha chain variable domain of TCR clone 224179 (TRAV16, TRAJ58)
CITVLSNGETSGSRLTF

SEQ ID NO: 448358 - protein, 17 aa, Homo sapiens
  CDR3 for beta chain variable domain of TCR clone 224179 (TRBV18, TRBJ2-1)
CASSKGLSGGADNERFF

SEQ ID NO: 448359 - protein, 12 aa, Homo sapiens
  CDR3 for alpha chain variable domain of TCR clone 224180 (TRAV12-2, TRAJ21)
CAVRYNSNKFYF

SEQ ID NO: 448360 - protein, 14 aa, Homo sapiens
  CDR3 for beta chain variable domain of TCR clone 224180 (TRBV28, TRBJ2-1)
CASSYYTAYNEQFF

SEQ ID NO: 448361 - protein, 11 aa, Homo sapiens
  CDR3 for alpha chain variable domain of TCR clone 224181 (TRAV39, TRAJ33)
CAVDPWLATIS

SEQ ID NO: 448362 - protein, 16 aa, Homo sapiens
  CDR3 for beta chain variable domain of TCR clone 224181 (TRBV18, TRBJ1-4)
CASSPLVGDRAEKLFF

SEQ ID NO: 448363 - protein, 14 aa, Homo sapiens
  CDR3 for alpha chain variable domain of TCR clone 224182 (TRAV8-3, TRAJ4)
CAGGAAGSYNKLIF

SEQ ID NO: 448364 - protein, 15 aa, Homo sapiens
  CDR3 for beta chain variable domain of TCR clone 224182 (TRBV6-5, TRBJ2-1)
RASSYDAGAGNEQFF

SEQ ID NO: 448365 - protein, 22 aa, Homo sapiens
  CDR3 for alpha chain variable domain of TCR clone 224183 (TRAV27, )
CAARRNAGKNHIQNPDPAVYQL

SEQ ID NO: 448366 - protein, 13 aa, Homo sapiens
  CDR3 for beta chain variable domain of TCR clone 224183 (TRBV12-5, TRBJ2-3)
CASGDRQSDTQYF

SEQ ID NO: 448367 - protein, 22 aa, Homo sapiens
  CDR3 for alpha chain variable domain of TCR clone 224184 (TRAV8-3, TRAJ42)
CAVGPNYGGSKEISSLEKALNS

SEQ ID NO: 448368 - protein, 15 aa, Homo sapiens
  CDR3 for beta chain variable domain of TCR clone 224184 (TRBV27, TRBJ2-7)
CASSTAGTGSYEQYF

SEQ ID NO: 448369 - protein, 13 aa, Homo sapiens
  CDR3 for alpha chain variable domain of TCR clone 224185 (TRAV12-3, TRAJ7)
CAMSASGNNRRAF

SEQ ID NO: 448370 - protein, 14 aa, Homo sapiens
  CDR3 for beta chain variable domain of TCR clone 224185 (TRBV13, TRBJ2-5)
CASSLGPRGETQYF

SEQ ID NO: 448371 - protein, 13 aa, Homo sapiens
  CDR3 for alpha chain variable domain of TCR clone 224186 (TRAV13-1, TRAJ29)
CAASIGLNTPLVF

SEQ ID NO: 448372 - protein, 12 aa, Homo sapiens
  CDR3 for beta chain variable domain of TCR clone 224186 (TRBV7-9, TRBJ2-7)
CASSLEGYEQYF

SEQ ID NO: 448373 - protein, 14 aa, Homo sapiens
  CDR3 for alpha chain variable domain of TCR clone 224187 (TRAV9-2, TRAJ39)
CALYIYNAGNMLTF

SEQ ID NO: 448374 - protein, 16 aa, Homo sapiens
  CDR3 for beta chain variable domain of TCR clone 224187 (TRBV29-1, TRBJ2-2)
CSVETRASGNTGELFF

SEQ ID NO: 448375 - protein, 13 aa, Homo sapiens
  CDR3 for alpha chain variable domain of TCR clone 224188 (TRAV12-3, TRAJ21)
CAPGPHNFNKFYF

SEQ ID NO: 448376 - protein, 17 aa, Homo sapiens
  CDR3 for beta chain variable domain of TCR clone 224188 (TRBV13, TRBJ2-3)
CASSLSRVAGGRNTQYF

SEQ ID NO: 448377 - protein, 18 aa, Homo sapiens
  CDR3 for alpha chain variable domain of TCR clone 224189 (TRAV13-1, TRAJ52)
CAASKRSAGGTSYGKLTF

SEQ ID NO: 448378 - protein, 12 aa, Homo sapiens
  CDR3 for beta chain variable domain of TCR clone 224189 (TRBV14, TRBJ2-7)
CASSSLKGEQYF

SEQ ID NO: 448379 - protein, 13 aa, Homo sapiens
  CDR3 for alpha chain variable domain of TCR clone 224190 (TRAV1-2, TRAJ11)
CAVRREGYSTLTF

SEQ ID NO: 448380 - protein, 11 aa, Homo sapiens
  CDR3 for beta chain variable domain of TCR clone 224190 (TRBV29-1, TRBJ2-5)
CSEDRTGTQYF

SEQ ID NO: 448381 - protein, 16 aa, Homo sapiens
  CDR3 for alpha chain variable domain of TCR clone 224191 (TRAV21, TRAJ45)
CAVSWGSGGGADGLTF

SEQ ID NO: 448382 - protein, 14 aa, Homo sapiens
  CDR3 for beta chain variable domain of TCR clone 224191 (TRBV4-2, TRBJ1-2)
CASSTGGSNYGYTF

SEQ ID NO: 448383 - protein, 13 aa, Homo sapiens
  CDR3 for alpha chain variable domain of TCR clone 224192 (TRAV3, TRAJ21)
CAVRGPDFNKFYF

SEQ ID NO: 448384 - protein, 18 aa, Homo sapiens
  CDR3 for beta chain variable domain of TCR clone 224192 (TRBV6-6, TRBJ1-3)
CASSYSKWDSISGNTIYF

SEQ ID NO: 448385 - protein, 16 aa, Homo sapiens
  CDR3 for alpha chain variable domain of TCR clone 224193 (TRAV1-2, TRAJ10)
CAVRGVLTGGGNKLTF

SEQ ID NO: 448386 - protein, 12 aa, Homo sapiens
  CDR3 for beta chain variable domain of TCR clone 224193 (TRBV7-8, TRBJ2-7)
CASSRGAREQYF

SEQ ID NO: 448387 - protein, 13 aa, Homo sapiens
  CDR3 for alpha chain variable domain of TCR clone 224194 (TRAV17, TRAJ5)
CALRGTGRRALTF

SEQ ID NO: 448388 - protein, 16 aa, Homo sapiens
  CDR3 for beta chain variable domain of TCR clone 224194 (TRBV7-6, TRBJ2-1)
CASSAPGPSPYNEQFF

SEQ ID NO: 448389 - protein, 21 aa, Homo sapiens
  CDR3 for alpha chain variable domain of TCR clone 224195 (TRAV1-1, TRAJ6)
CAVRREEATYLHLEEEPALLF

SEQ ID NO: 448390 - protein, 15 aa, Homo sapiens
  CDR3 for beta chain variable domain of TCR clone 224195 (TRBV6-6, TRBJ2-1)
CAARQGVSSYNEQFF

SEQ ID NO: 448391 - protein, 12 aa, Homo sapiens
  CDR3 for alpha chain variable domain of TCR clone 224196 (TRAV17, TRAJ20)
CATDSNDYKLSF

SEQ ID NO: 448392 - protein, 14 aa, Homo sapiens
  CDR3 for beta chain variable domain of TCR clone 224196 (TRBV7-2, TRBJ2-7)
CASSLPPGQGPQYF

SEQ ID NO: 448393 - protein, 14 aa, Homo sapiens
  CDR3 for alpha chain variable domain of TCR clone 224197 (TRAV13-1, TRAJ35)
CAASKGGFGNVLNC

SEQ ID NO: 448394 - protein, 13 aa, Homo sapiens
  CDR3 for beta chain variable domain of TCR clone 224197 (TRBV7-3, TRBJ1-1)
CARSQDWGAEAFF

SEQ ID NO: 448395 - protein, 16 aa, Homo sapiens
  CDR3 for alpha chain variable domain of TCR clone 224198 (TRAV3, TRAJ10)
CAVRDMRAGGVNKLTF

SEQ ID NO: 448396 - protein, 15 aa, Homo sapiens
  CDR3 for beta chain variable domain of TCR clone 224198 (TRBV20-1, TRBJ2-7)
CSAESGTSGAYEQYF

SEQ ID NO: 448397 - protein, 12 aa, Homo sapiens
  CDR3 for alpha chain variable domain of TCR clone 224199 (TRAV27, TRAJ35)
CAGEDFGNVLHC

SEQ ID NO: 448398 - protein, 17 aa, Homo sapiens
  CDR3 for beta chain variable domain of TCR clone 224199 (TRBV5-1, TRBJ1-6)
CASSPSLQGSDNSPLHF

SEQ ID NO: 448399 - protein, 15 aa, Homo sapiens
  CDR3 for alpha chain variable domain of TCR clone 224200 (TRAV17, TRAJ57)
CATGPSQGGSEKLVF

SEQ ID NO: 448400 - protein, 12 aa, Homo sapiens
  CDR3 for beta chain variable domain of TCR clone 224200 (TRBV29-1, TRBJ2-3)
CSVTGGADTQYF

SEQ ID NO: 448401 - protein, 15 aa, Homo sapiens
  CDR3 for alpha chain variable domain of TCR clone 224201 (TRAV8-4, TRAJ40)
CAVSSITSGTCKYIF

SEQ ID NO: 448402 - protein, 13 aa, Homo sapiens
  CDR3 for beta chain variable domain of TCR clone 224201 (TRBV2, TRBJ2-1)
CATSRGTDNEQFF

SEQ ID NO: 448403 - protein, 12 aa, Homo sapiens
  CDR3 for alpha chain variable domain of TCR clone 224202 (TRAV27, TRAJ21)
CAGVRQLQQILL

SEQ ID NO: 448404 - protein, 14 aa, Homo sapiens
  CDR3 for beta chain variable domain of TCR clone 224202 (TRBV18, TRBJ2-5)
CASSPGVSQETQYF

SEQ ID NO: 448405 - protein, 13 aa, Homo sapiens
  CDR3 for alpha chain variable domain of TCR clone 224203 (TRAV3, TRAJ20)
CAVRDTARYKLSF

SEQ ID NO: 448406 - protein, 15 aa, Homo sapiens
  CDR3 for beta chain variable domain of TCR clone 224203 (TRBV5-1, TRBJ2-2)
CASSSQGGNTGELFF

SEQ ID NO: 448407 - protein, 15 aa, Homo sapiens
  CDR3 for alpha chain variable domain of TCR clone 224204 (TRAV34, TRAJ38)
CGADFTPANNRKLIW

SEQ ID NO: 448408 - protein, 12 aa, Homo sapiens
  CDR3 for beta chain variable domain of TCR clone 224204 (TRBV7-9, TRBJ2-7)
CATRTDAYEQYF

SEQ ID NO: 448409 - protein, 13 aa, Homo sapiens
  CDR3 for alpha chain variable domain of TCR clone 224205 (TRAV3, TRAJ20)
CAVRSLNDYKLSF

SEQ ID NO: 448410 - protein, 14 aa, Homo sapiens
  CDR3 for beta chain variable domain of TCR clone 224205 (TRBV13, TRBJ2-5)
CASSLERVGGTQYF

SEQ ID NO: 448411 - protein, 14 aa, Homo sapiens
  CDR3 for alpha chain variable domain of TCR clone 224206 (TRAV3, TRAJ21)
CAVESQANFNKFYF

SEQ ID NO: 448412 - protein, 15 aa, Homo sapiens
  CDR3 for beta chain variable domain of TCR clone 224206 (TRBV7-6, TRBJ1-5)
CASSQSSGINQPQHF

SEQ ID NO: 448413 - protein, 14 aa, Homo sapiens
  CDR3 for alpha chain variable domain of TCR clone 224207 (TRAV1-2, TRAJ8)
CAVREDTGFQKPVF

SEQ ID NO: 448414 - protein, 14 aa, Homo sapiens
  CDR3 for beta chain variable domain of TCR clone 224207 (TRBV28, TRBJ2-1)
CASSFDSVSDEQFF

SEQ ID NO: 448415 - protein, 13 aa, Homo sapiens
  CDR3 for alpha chain variable domain of TCR clone 224208 (TRAV13-1, TRAJ53)
CAASKGSNYKLTF

SEQ ID NO: 448416 - protein, 13 aa, Homo sapiens
  CDR3 for beta chain variable domain of TCR clone 224208 (TRBV29-1, TRBJ2-5)
GSVTIASEETQYF

SEQ ID NO: 448417 - protein, 14 aa, Homo sapiens
  CDR3 for alpha chain variable domain of TCR clone 224209 (TRAV12-3, TRAJ57)
CAMSAWGGSEKLVF

SEQ ID NO: 448418 - protein, 15 aa, Homo sapiens
  CDR3 for beta chain variable domain of TCR clone 224209 (TRBV5-1, TRBJ2-3)
CASSVTSGSTDTQYF

SEQ ID NO: 448419 - protein, 11 aa, Homo sapiens
  CDR3 for alpha chain variable domain of TCR clone 224210 (TRAV17, TRAJ49)
CATDAGNQFYF

SEQ ID NO: 448420 - protein, 16 aa, Homo sapiens
  CDR3 for beta chain variable domain of TCR clone 224210 (TRBV7-2, TRBJ1-2)
CASSSTSGTSLGGYTF

SEQ ID NO: 448421 - protein, 14 aa, Homo sapiens
  CDR3 for alpha chain variable domain of TCR clone 224211 (TRAV2, TRAJ9)
CAVEDRGGGFKTIF

SEQ ID NO: 448422 - protein, 17 aa, Homo sapiens
  CDR3 for beta chain variable domain of TCR clone 224211 (TRBV15, TRBJ1-5)
CATSRAPPGTRNQPQHF

SEQ ID NO: 448423 - protein, 13 aa, Homo sapiens
  CDR3 for alpha chain variable domain of TCR clone 224212 (TRAV23/DV6, TRAJ45)
CAARRGGADGLTF

SEQ ID NO: 448424 - protein, 14 aa, Homo sapiens
  CDR3 for beta chain variable domain of TCR clone 224212 (TRBV7-2, TRBJ2-3)
CASSLARGTDTQYV

SEQ ID NO: 448425 - protein, 14 aa, Homo sapiens
  CDR3 for alpha chain variable domain of TCR clone 224213 (TRAV1-2, TRAJ8)
CAVSEDTGFQKLAF

SEQ ID NO: 448426 - protein, 15 aa, Homo sapiens
  CDR3 for beta chain variable domain of TCR clone 224213 (TRBV12-4, TRBJ2-5)
CASSPPTGRQETQYF

SEQ ID NO: 448427 - protein, 17 aa, Homo sapiens
  CDR3 for alpha chain variable domain of TCR clone 224214 (TRAV23/DV6, )
CAADIQNPDPAVHQLRD

SEQ ID NO: 448428 - protein, 14 aa, Homo sapiens
  CDR3 for beta chain variable domain of TCR clone 224214 (TRBV5-7, TRBJ1-6)
CASSFAGHNSPLHF

SEQ ID NO: 448429 - protein, 14 aa, Homo sapiens
  CDR3 for alpha chain variable domain of TCR clone 224215 (TRAV12-2, TRAJ40)
CAVKIPSGPYKYIF

SEQ ID NO: 448430 - protein, 20 aa, Homo sapiens
  CDR3 for beta chain variable domain of TCR clone 224215 (TRBV28, TRBJ2-1)
CASTPIGRSPGLAGGNEQFF

SEQ ID NO: 448431 - protein, 17 aa, Homo sapiens
  CDR3 for alpha chain variable domain of TCR clone 224216 (TRAV3, TRAJ12)
FAVRDGGRMDSSYKLIF

SEQ ID NO: 448432 - protein, 16 aa, Homo sapiens
  CDR3 for beta chain variable domain of TCR clone 224216 (TRBV9, TRBJ2-2)
CASSAMGKGNTGELFF

SEQ ID NO: 448433 - protein, 12 aa, Homo sapiens
  CDR3 for alpha chain variable domain of TCR clone 224217 (TRAV8-3, TRAJ45)
CASSYSGGVLTD

SEQ ID NO: 448434 - protein, 13 aa, Homo sapiens
  CDR3 for beta chain variable domain of TCR clone 224217 (TRBV10-3, TRBJ2-7)
CASKLAVNYEQYF

SEQ ID NO: 448435 - protein, 13 aa, Homo sapiens
  CDR3 for alpha chain variable domain of TCR clone 224218 (TRAV6, TRAJ16)
CALDDSDGQKPLF

SEQ ID NO: 448436 - protein, 14 aa, Homo sapiens
  CDR3 for beta chain variable domain of TCR clone 224218 (TRBV12-4, TRBJ1-6)
CASNLQGKGSPLHF

SEQ ID NO: 448437 - protein, 13 aa, Homo sapiens
  CDR3 for alpha chain variable domain of TCR clone 224219 (TRAV10, TRAJ45)
GGYSGGGADGLTS

SEQ ID NO: 448438 - protein, 14 aa, Homo sapiens
  CDR3 for beta chain variable domain of TCR clone 224219 (TRBV7-8, TRBJ2-3)
CASSLEAGTDTQYF

SEQ ID NO: 448439 - protein, 13 aa, Homo sapiens
  CDR3 for alpha chain variable domain of TCR clone 224220 (TRAV21, TRAJ36)
CAVIQTGANNLFF

SEQ ID NO: 448440 - protein, 13 aa, Homo sapiens
  CDR3 for beta chain variable domain of TCR clone 224220 (TRBV29-1, TRBJ2-3)
CSATRGGRDTQYF

SEQ ID NO: 448441 - protein, 17 aa, Homo sapiens
  CDR3 for alpha chain variable domain of TCR clone 224221 (TRAV3, TRAJ6)
CAVRDGPRAGGSYIPTF

SEQ ID NO: 448442 - protein, 16 aa, Homo sapiens
  CDR3 for beta chain variable domain of TCR clone 224221 (TRBV10-3, TRBJ2-1)
CAIRGGGRGDYNERFF

SEQ ID NO: 448443 - protein, 13 aa, Homo sapiens
  CDR3 for alpha chain variable domain of TCR clone 224222 (TRAV2, TRAJ40)
CAVVTSGTYKYIF

SEQ ID NO: 448444 - protein, 13 aa, Homo sapiens
  CDR3 for beta chain variable domain of TCR clone 224222 (TRBV19, TRBJ2-1)
CASPTFVLSGEQF

SEQ ID NO: 448445 - protein, 14 aa, Homo sapiens
  CDR3 for alpha chain variable domain of TCR clone 224223 (TRAV17, TRAJ57)
CATDAQGGSEKLVS

SEQ ID NO: 448446 - protein, 16 aa, Homo sapiens
  CDR3 for beta chain variable domain of TCR clone 224223 (TRBV20-1, TRBJ1-4)
CSAPGQGLLTNEKLFF

SEQ ID NO: 448447 - protein, 18 aa, Homo sapiens
  CDR3 for alpha chain variable domain of TCR clone 224224 (TRAV21, TRAJ52)
CAVRPSPAGGTSYRKLTF

SEQ ID NO: 448448 - protein, 17 aa, Homo sapiens
  CDR3 for beta chain variable domain of TCR clone 224224 (TRBV13, TRBJ2-3)
CASSRSRVAGGRNTQYF

SEQ ID NO: 448449 - protein, 16 aa, Homo sapiens
  CDR3 for alpha chain variable domain of TCR clone 224225 (TRAV1-2, TRAJ16)
CAVNRFQMARSCSLQG

SEQ ID NO: 448450 - protein, 16 aa, Homo sapiens
  CDR3 for beta chain variable domain of TCR clone 224225 (TRBV12-5, TRBJ2-5)
CASGPRTSGNQETQYF

SEQ ID NO: 448451 - protein, 13 aa, Homo sapiens
  CDR3 for alpha chain variable domain of TCR clone 224226 (TRAV2, TRAJ15)
CAVASQAGTTLIF

SEQ ID NO: 448452 - protein, 15 aa, Homo sapiens
  CDR3 for beta chain variable domain of TCR clone 224226 (TRBV7-3, TRBJ2-2)
CASSETGQGTGELFF

SEQ ID NO: 448453 - protein, 15 aa, Homo sapiens
  CDR3 for alpha chain variable domain of TCR clone 224227 (TRAV27, TRAJ53)
CRAINSGGSNYKLTF

SEQ ID NO: 448454 - protein, 14 aa, Homo sapiens
  CDR3 for beta chain variable domain of TCR clone 224227 (TRBV7-3, TRBJ2-1)
CASSLAGGANEQFF

SEQ ID NO: 448455 - protein, 11 aa, Homo sapiens
  CDR3 for alpha chain variable domain of TCR clone 224228 (TRAV3, TRAJ21)
CAVGNFNKFYF

SEQ ID NO: 448456 - protein, 17 aa, Homo sapiens
  CDR3 for beta chain variable domain of TCR clone 224228 (TRBV20-1, TRBJ2-1)
CSASSSGLAGSYNEQSF

SEQ ID NO: 448457 - protein, 13 aa, Homo sapiens
  CDR3 for alpha chain variable domain of TCR clone 224229 (TRAV2, TRAJ40)
CSVVTSGTYKYIF

SEQ ID NO: 448458 - protein, 14 aa, Homo sapiens
  CDR3 for beta chain variable domain of TCR clone 224229 (TRBV4-1, TRBJ2-3)
CASSQDWSTDTQYF

SEQ ID NO: 448459 - protein, 16 aa, Homo sapiens
  CDR3 for alpha chain variable domain of TCR clone 224230 (TRAV3, TRAJ23)
CAVKIGFYNQGGKLIF

SEQ ID NO: 448460 - protein, 17 aa, Homo sapiens
  CDR3 for beta chain variable domain of TCR clone 224230 (TRBV10-3, TRBJ2-6)
CAISESTAPSGANVLTF

SEQ ID NO: 448461 - protein, 14 aa, Homo sapiens
  CDR3 for alpha chain variable domain of TCR clone 224231 (TRAV9-2, TRAJ39)
CALYIYNAGNMLTF

SEQ ID NO: 448462 - protein, 13 aa, Homo sapiens
  CDR3 for beta chain variable domain of TCR clone 224231 (TRBV4-2, TRBJ1-1)
CASRQAGNTEAFF

SEQ ID NO: 448463 - protein, 13 aa, Homo sapiens
  CDR3 for alpha chain variable domain of TCR clone 224232 (TRAV35, TRAJ33)
CAGLMDSNYQLIW

SEQ ID NO: 448464 - protein, 14 aa, Homo sapiens
  CDR3 for beta chain variable domain of TCR clone 224232 (TRBV11-2, TRBJ2-1)
CASSLGGSFNEQFF

SEQ ID NO: 448465 - protein, 16 aa, Homo sapiens
  CDR3 for alpha chain variable domain of TCR clone 224233 (TRAV13-1, TRAJ37)
CAASSLGSSNTGKLIF

SEQ ID NO: 448466 - protein, 14 aa, Homo sapiens
  CDR3 for beta chain variable domain of TCR clone 224233 (TRBV12-5, TRBJ2-5)
CASGSRTHQETQYF

SEQ ID NO: 448467 - protein, 13 aa, Homo sapiens
  CDR3 for alpha chain variable domain of TCR clone 224234 (TRAV14/DV4, TRAJ20)
CAMRESHDYKLSF

SEQ ID NO: 448468 - protein, 15 aa, Homo sapiens
  CDR3 for beta chain variable domain of TCR clone 224234 (TRBV7-9, TRBJ1-1)
CASSRPGTANTEAFF

SEQ ID NO: 448469 - protein, 12 aa, Homo sapiens
  CDR3 for alpha chain variable domain of TCR clone 224235 (TRAV12-3, TRAJ20)
CAMVRGYYKLSF

SEQ ID NO: 448470 - protein, 17 aa, Homo sapiens
  CDR3 for beta chain variable domain of TCR clone 224235 (TRBV28, TRBJ2-5)
CASSTPEGDALQETQYF

SEQ ID NO: 448471 - protein, 14 aa, Homo sapiens
  CDR3 for alpha chain variable domain of TCR clone 224236 (TRAV26-1, TRAJ34)
CIVRVAYNTDKPIF

SEQ ID NO: 448472 - protein, 19 aa, Homo sapiens
  CDR3 for beta chain variable domain of TCR clone 224236 (TRBV25-1, TRBJ2-2)
CAILVYRVDRGRKTGELFL

SEQ ID NO: 448473 - protein, 13 aa, Homo sapiens
  CDR3 for alpha chain variable domain of TCR clone 224237 (TRAV12-1, TRAJ11)
GVLTRGGYSTLTF

SEQ ID NO: 448474 - protein, 13 aa, Homo sapiens
  CDR3 for beta chain variable domain of TCR clone 224237 (TRBV20-1, TRBJ1-2)
CSARDQGAYGYTF

SEQ ID NO: 448475 - protein, 13 aa, Homo sapiens
  CDR3 for alpha chain variable domain of TCR clone 224238 (TRAV2, TRAJ16)
CAVERSDGQKLLF

SEQ ID NO: 448476 - protein, 15 aa, Homo sapiens
  CDR3 for beta chain variable domain of TCR clone 224238 (TRBV20-1, TRBJ2-5)
SSAIKGQGSQETQYF

SEQ ID NO: 448477 - protein, 18 aa, Homo sapiens
  CDR3 for alpha chain variable domain of TCR clone 224239 (TRAV13-1, TRAJ52)
CAASKRSAGGTSYVKLTF

SEQ ID NO: 448478 - protein, 12 aa, Homo sapiens
  CDR3 for beta chain variable domain of TCR clone 224239 (TRBV20-1, TRBJ2-3)
CSARVGTDTQYF

SEQ ID NO: 448479 - protein, 14 aa, Homo sapiens
  CDR3 for alpha chain variable domain of TCR clone 224240 (TRAV13-1, TRAJ9)
CAASALTGGFKTIF

SEQ ID NO: 448480 - protein, 13 aa, Homo sapiens
  CDR3 for beta chain variable domain of TCR clone 224240 (TRBV20-1, TRBJ1-1)
CSAGTVGNTDALF

SEQ ID NO: 448481 - protein, 16 aa, Homo sapiens
  CDR3 for alpha chain variable domain of TCR clone 224241 (TRAV21, TRAJ45)
CAVEAPRGDQEEVLTE

SEQ ID NO: 448482 - protein, 10 aa, Homo sapiens
  CDR3 for beta chain variable domain of TCR clone 224241 (TRBV4-1, TRBJ2-7)
SRGDRHEQYF

SEQ ID NO: 448483 - protein, 13 aa, Homo sapiens
  CDR3 for alpha chain variable domain of TCR clone 224242 (TRAV2, TRAJ21)
CAVEDLNFNKFYF

SEQ ID NO: 448484 - protein, 12 aa, Homo sapiens
  CDR3 for beta chain variable domain of TCR clone 224242 (TRBV11-2, TRBJ2-1)
CASSPGNNEQFF

SEQ ID NO: 448485 - protein, 12 aa, Homo sapiens
  CDR3 for alpha chain variable domain of TCR clone 224243 (TRAV17, TRAJ20)
CATDRYDYKLSS

SEQ ID NO: 448486 - protein, 14 aa, Homo sapiens
  CDR3 for beta chain variable domain of TCR clone 224243 (TRBV19, TRBJ2-1)
CASPTFVLSGEQFF

SEQ ID NO: 448487 - protein, 11 aa, Homo sapiens
  CDR3 for alpha chain variable domain of TCR clone 224244 (TRAV1-2, TRAJ31)
CAVKNNVRLMF

SEQ ID NO: 448488 - protein, 12 aa, Homo sapiens
  CDR3 for beta chain variable domain of TCR clone 224244 (TRBV20-1, TRBJ2-5)
CSAPRSQETQYF

SEQ ID NO: 448489 - protein, 14 aa, Homo sapiens
  CDR3 for alpha chain variable domain of TCR clone 224245 (TRAV9-2, TRAJ39)
CALYIYNAGNMLTF

SEQ ID NO: 448490 - protein, 14 aa, Homo sapiens
  CDR3 for beta chain variable domain of TCR clone 224245 (TRBV4-2, TRBJ1-2)
CASSPGGSNYGYTF

SEQ ID NO: 448491 - protein, 16 aa, Homo sapiens
  CDR3 for alpha chain variable domain of TCR clone 224246 (TRAV8-3, TRAJ8)
WAVPRDGNTGFQKLVF

SEQ ID NO: 448492 - protein, 14 aa, Homo sapiens
  CDR3 for beta chain variable domain of TCR clone 224246 (TRBV28, TRBJ1-1)
CASSESGRGTEAFF

SEQ ID NO: 448493 - protein, 16 aa, Homo sapiens
  CDR3 for alpha chain variable domain of TCR clone 224247 (TRAV3, TRAJ37)
CAVRGKGSGNKGKLIF

SEQ ID NO: 448494 - protein, 13 aa, Homo sapiens
  CDR3 for beta chain variable domain of TCR clone 224247 (TRBV4-2, TRBJ1-1)
CASSQAGNTEAFF

SEQ ID NO: 448495 - protein, 15 aa, Homo sapiens
  CDR3 for alpha chain variable domain of TCR clone 224248 (TRAV1-2, TRAJ30)
CAVRPHGNRDDKIIF

SEQ ID NO: 448496 - protein, 14 aa, Homo sapiens
  CDR3 for beta chain variable domain of TCR clone 224248 (TRBV7-2, TRBJ2-7)
CASSPKTSFYEQYF

SEQ ID NO: 448497 - protein, 12 aa, Homo sapiens
  CDR3 for alpha chain variable domain of TCR clone 224249 (TRAV12-3, TRAJ3)
CAIDSSASKIIF

SEQ ID NO: 448498 - protein, 17 aa, Homo sapiens
  CDR3 for beta chain variable domain of TCR clone 224249 (TRBV7-9, TRBJ2-3)
CASSLGDAGAYPDTQYF

SEQ ID NO: 448499 - protein, 13 aa, Homo sapiens
  CDR3 for alpha chain variable domain of TCR clone 224250 (TRAV26-2, TRAJ43)
CILRAVNNNDMRF

SEQ ID NO: 448500 - protein, 11 aa, Homo sapiens
  CDR3 for beta chain variable domain of TCR clone 224250 (TRBV4-1, TRBJ2-7)
CASSGPYEQYF

SEQ ID NO: 448501 - protein, 16 aa, Homo sapiens
  CDR3 for alpha chain variable domain of TCR clone 224251 (TRAV12-3, TRAJ58)
CAMTDTEETSGSRLTF

SEQ ID NO: 448502 - protein, 12 aa, Homo sapiens
  CDR3 for beta chain variable domain of TCR clone 224251 (TRBV7-9, TRBJ2-7)
CASSLEGYEQYF

SEQ ID NO: 448503 - protein, 14 aa, Homo sapiens
  CDR3 for alpha chain variable domain of TCR clone 224252 (TRAV12-1, TRAJ9)
CVVTGDTGGFKTIF

SEQ ID NO: 448504 - protein, 16 aa, Homo sapiens
  CDR3 for beta chain variable domain of TCR clone 224252 (TRBV29-1, TRBJ1-2)
CSVGANRDIANYGYTF

SEQ ID NO: 448505 - protein, 15 aa, Homo sapiens
  CDR3 for alpha chain variable domain of TCR clone 224253 (TRAV12-2, TRAJ23)
CAVKPIYNQGGKLIF

SEQ ID NO: 448506 - protein, 16 aa, Homo sapiens
  CDR3 for beta chain variable domain of TCR clone 224253 (TRBV19, TRBJ2-1)
CASSKAGPSSYNEQFF

SEQ ID NO: 448507 - protein, 16 aa, Homo sapiens
  CDR3 for alpha chain variable domain of TCR clone 224254 (TRAV3, TRAJ37)
CAVRPHGSGNTGTLIS

SEQ ID NO: 448508 - protein, 17 aa, Homo sapiens
  CDR3 for beta chain variable domain of TCR clone 224254 (TRBV5-1, TRBJ2-5)
CASSPVALGQNQETQYF

SEQ ID NO: 448509 - protein, 16 aa, Homo sapiens
  CDR3 for alpha chain variable domain of TCR clone 224255 (TRAV30, TRAJ24)
CGTEIVDADSWGKFKF

SEQ ID NO: 448510 - protein, 14 aa, Homo sapiens
  CDR3 for beta chain variable domain of TCR clone 224255 (TRBV12-5, TRBJ2-5)
CSSGSRTHQETQYF

SEQ ID NO: 448511 - protein, 15 aa, Homo sapiens
  CDR3 for alpha chain variable domain of TCR clone 224256 (TRAV23/DV6, TRAJ15)
CAALPAGGNCSDLSE

SEQ ID NO: 448512 - protein, 14 aa, Homo sapiens
  CDR3 for beta chain variable domain of TCR clone 224256 (TRBV7-9, TRBJ1-2)
CASSRQGANYGYTF

SEQ ID NO: 448513 - protein, 13 aa, Homo sapiens
  CDR3 for alpha chain variable domain of TCR clone 224257 (TRAV8-3, TRAJ43)
CAVGPDNNNDMRF

SEQ ID NO: 448514 - protein, 14 aa, Homo sapiens
  CDR3 for beta chain variable domain of TCR clone 224257 (TRBV7-2, TRBJ1-6)
CASSLSSSPLHLGM

SEQ ID NO: 448515 - protein, 17 aa, Homo sapiens
  CDR3 for alpha chain variable domain of TCR clone 224258 (TRAV26-1, TRAJ53)
CIVRVDDSGGSNYKLTL

SEQ ID NO: 448516 - protein, 15 aa, Homo sapiens
  CDR3 for beta chain variable domain of TCR clone 224258 (TRBV20-1, TRBJ2-7)
CSARVPAAYSYEQYF

SEQ ID NO: 448517 - protein, 14 aa, Homo sapiens
  CDR3 for alpha chain variable domain of TCR clone 224259 (TRAV12-3, TRAJ57)
CAMSAWGGSEKLVF

SEQ ID NO: 448518 - protein, 13 aa, Homo sapiens
  CDR3 for beta chain variable domain of TCR clone 224259 (TRBV15, TRBJ2-7)
CATSTTGHYEQYF

SEQ ID NO: 448519 - protein, 13 aa, Homo sapiens
  CDR3 for alpha chain variable domain of TCR clone 224260 (TRAV8-3, TRAJ28)
CAVGAVGRYQRTF

SEQ ID NO: 448520 - protein, 16 aa, Homo sapiens
  CDR3 for beta chain variable domain of TCR clone 224260 (TRBV12-5, TRBJ2-5)
CASGPRTSGNQETQYF

SEQ ID NO: 448521 - protein, 13 aa, Homo sapiens
  CDR3 for alpha chain variable domain of TCR clone 224261 (TRAV2, TRAJ40)
CAVVTSGTYKYIF

SEQ ID NO: 448522 - protein, 16 aa, Homo sapiens
  CDR3 for beta chain variable domain of TCR clone 224261 (TRBV15, TRBJ2-1)
CHQQRLGLAGNNEQFF

SEQ ID NO: 448523 - protein, 14 aa, Homo sapiens
  CDR3 for alpha chain variable domain of TCR clone 224262 (TRAV23/DV6, TRAJ13)
CAASDSGGYQKVTF

SEQ ID NO: 448524 - protein, 15 aa, Homo sapiens
  CDR3 for beta chain variable domain of TCR clone 224262 (TRBV20-1, TRBJ2-7)
CSARDRVSGMDEQYF

SEQ ID NO: 448525 - protein, 15 aa, Homo sapiens
  CDR3 for alpha chain variable domain of TCR clone 224263 (TRAV26-1, TRAJ29)
CIVRVEGSGNTPLVF

SEQ ID NO: 448526 - protein, 14 aa, Homo sapiens
  CDR3 for beta chain variable domain of TCR clone 224263 (TRBV7-9, TRBJ1-5)
CQQRGHQLNQPQHF

SEQ ID NO: 448527 - protein, 13 aa, Homo sapiens
  CDR3 for alpha chain variable domain of TCR clone 224264 (TRAV13-2, TRAJ48)
CAEMDFGNEKLTF

SEQ ID NO: 448528 - protein, 14 aa, Homo sapiens
  CDR3 for beta chain variable domain of TCR clone 224264 (TRBV19, TRBJ1-4)
CASAIEAEGEKLFF

SEQ ID NO: 448529 - protein, 14 aa, Homo sapiens
  CDR3 for alpha chain variable domain of TCR clone 224265 (TRAV12-2, TRAJ13)
CAVKKPGGYQKVTF

SEQ ID NO: 448530 - protein, 13 aa, Homo sapiens
  CDR3 for beta chain variable domain of TCR clone 224265 (TRBV10-3, TRBJ2-7)
CASKLAVNYEQYF

SEQ ID NO: 448531 - protein, 12 aa, Homo sapiens
  CDR3 for alpha chain variable domain of TCR clone 224266 (TRAV10, TRAJ34)
CLVSGKHRQAHL

SEQ ID NO: 448532 - protein, 14 aa, Homo sapiens
  CDR3 for beta chain variable domain of TCR clone 224266 (TRBV19, TRBJ2-1)
CASPTFVLSGEQFF

SEQ ID NO: 448533 - protein, 13 aa, Homo sapiens
  CDR3 for alpha chain variable domain of TCR clone 224267 (TRAV13-1, TRAJ5)
CAARVTGRRALTF

SEQ ID NO: 448534 - protein, 15 aa, Homo sapiens
  CDR3 for beta chain variable domain of TCR clone 224267 (TRBV7-9, TRBJ2-7)
CASSPGGGLTSEQYF

SEQ ID NO: 448535 - protein, 14 aa, Homo sapiens
  CDR3 for alpha chain variable domain of TCR clone 224268 (TRAV12-2, TRAJ13)
CAVKKTGGDQKVTF

SEQ ID NO: 448536 - protein, 15 aa, Homo sapiens
  CDR3 for beta chain variable domain of TCR clone 224268 (TRBV6-3, TRBJ2-7)
CASSSPGTVFYEQYF

SEQ ID NO: 448537 - protein, 15 aa, Homo sapiens
  CDR3 for alpha chain variable domain of TCR clone 224269 (TRAV13-1, TRAJ27)
CAARELNTNAGKSTF

SEQ ID NO: 448538 - protein, 14 aa, Homo sapiens
  CDR3 for beta chain variable domain of TCR clone 224269 (TRBV6-5, TRBJ1-3)
CASSYRSSGNTIYF

SEQ ID NO: 448539 - protein, 14 aa, Homo sapiens
  CDR3 for alpha chain variable domain of TCR clone 224270 (TRAV26-1, TRAJ39)
CIVRGSRAGNMLTF

SEQ ID NO: 448540 - protein, 15 aa, Homo sapiens
  CDR3 for beta chain variable domain of TCR clone 224270 (TRBV10-1, TRBJ2-3)
CASSATSGGFDTQYF

SEQ ID NO: 448541 - protein, 15 aa, Homo sapiens
  CDR3 for alpha chain variable domain of TCR clone 224271 (TRAV2, TRAJ37)
CAVEDGSGNTGKLIF

SEQ ID NO: 448542 - protein, 13 aa, Homo sapiens
  CDR3 for beta chain variable domain of TCR clone 224271 (TRBV20-1, TRBJ1-6)
CSTFREGNSPLHF

SEQ ID NO: 448543 - protein, 13 aa, Homo sapiens
  CDR3 for alpha chain variable domain of TCR clone 224272 (TRAV27, TRAJ45)
CRSSGGGADGLTF

SEQ ID NO: 448544 - protein, 14 aa, Homo sapiens
  CDR3 for beta chain variable domain of TCR clone 224272 (TRBV6-6, TRBJ2-7)
CASSDSGAGYEQYF

SEQ ID NO: 448545 - protein, 14 aa, Homo sapiens
  CDR3 for alpha chain variable domain of TCR clone 224273 (TRAV1-2, TRAJ16)
RAVNRFSDGQKLLF

SEQ ID NO: 448546 - protein, 16 aa, Homo sapiens
  CDR3 for beta chain variable domain of TCR clone 224273 (TRBV18, TRBJ1-4)
CASSLQTVATNEKLFF

SEQ ID NO: 448547 - protein, 14 aa, Homo sapiens
  CDR3 for alpha chain variable domain of TCR clone 224274 (TRAV1-2, TRAJ8)
CAVREDTGFQKLVF

SEQ ID NO: 448548 - protein, 14 aa, Homo sapiens
  CDR3 for beta chain variable domain of TCR clone 224274 (TRBV5-1, TRBJ1-1)
CASSLVSINTEAVF

SEQ ID NO: 448549 - protein, 12 aa, Homo sapiens
  CDR3 for alpha chain variable domain of TCR clone 224275 (TRAV21, TRAJ11)
CVVRGGNSTLTF

SEQ ID NO: 448550 - protein, 15 aa, Homo sapiens
  CDR3 for beta chain variable domain of TCR clone 224275 (TRBV6-1, TRBJ2-7)
CASSEPIAATTEQYF

SEQ ID NO: 448551 - protein, 15 aa, Homo sapiens
  CDR3 for alpha chain variable domain of TCR clone 224276 (TRAV17, TRAJ54)
CATTRSEQGAQKLVF

SEQ ID NO: 448552 - protein, 17 aa, Homo sapiens
  CDR3 for beta chain variable domain of TCR clone 224276 (TRBV11-2, TRBJ2-1)
CASSLYPPRVEYNEQFF

SEQ ID NO: 448553 - protein, 14 aa, Homo sapiens
  CDR3 for alpha chain variable domain of TCR clone 224277 (TRAV8-2, TRAJ39)
CVVSAQNAGNMLTF

SEQ ID NO: 448554 - protein, 14 aa, Homo sapiens
  CDR3 for beta chain variable domain of TCR clone 224277 (TRBV7-2, TRBJ2-7)
CASSPKTSFYEQYF

SEQ ID NO: 448555 - protein, 14 aa, Homo sapiens
  CDR3 for alpha chain variable domain of TCR clone 224278 (TRAV12-2, TRAJ24)
CAVSPADSWGKLQF

SEQ ID NO: 448556 - protein, 12 aa, Homo sapiens
  CDR3 for beta chain variable domain of TCR clone 224278 (TRBV3-1, TRBJ2-1)
CASSQGSSGQFF

SEQ ID NO: 448557 - protein, 13 aa, Homo sapiens
  CDR3 for alpha chain variable domain of TCR clone 224279 (TRAV30, TRAJ39)
CGTEKNAGNMLNF

SEQ ID NO: 448558 - protein, 12 aa, Homo sapiens
  CDR3 for beta chain variable domain of TCR clone 224279 (TRBV12-4, TRBJ2-5)
CASSSAQETQFF

SEQ ID NO: 448559 - protein, 13 aa, Homo sapiens
  CDR3 for alpha chain variable domain of TCR clone 224280 (TRAV13-1, TRAJ22)
CAASRGSARQLTF

SEQ ID NO: 448560 - protein, 13 aa, Homo sapiens
  CDR3 for beta chain variable domain of TCR clone 224280 (TRBV11-3, TRBJ2-3)
CASSHDTKDTQYF

SEQ ID NO: 448561 - protein, 13 aa, Homo sapiens
  CDR3 for alpha chain variable domain of TCR clone 224281 (TRAV2, TRAJ40)
CAVVASGTYKYTF

SEQ ID NO: 448562 - protein, 14 aa, Homo sapiens
  CDR3 for beta chain variable domain of TCR clone 224281 (TRBV19, TRBJ2-1)
CASPTFVLSGEQFF

SEQ ID NO: 448563 - protein, 14 aa, Homo sapiens
  CDR3 for alpha chain variable domain of TCR clone 224282 (TRAV12-2, TRAJ33)
CAVKRARSNYQLIW

SEQ ID NO: 448564 - protein, 14 aa, Homo sapiens
  CDR3 for beta chain variable domain of TCR clone 224282 (TRBV13, TRBJ2-7)
CASSLKGASYEQYI

SEQ ID NO: 448565 - protein, 19 aa, Homo sapiens
  CDR3 for alpha chain variable domain of TCR clone 224283 (TRAV27, TRAJ53)
ASTSVQSRNSGVSNYKLTF

SEQ ID NO: 448566 - protein, 14 aa, Homo sapiens
  CDR3 for beta chain variable domain of TCR clone 224283 (TRBV11-1, TRBJ2-7)
CASTFAVPSYEQYF

SEQ ID NO: 448567 - protein, 23 aa, Homo sapiens
  CDR3 for alpha chain variable domain of TCR clone 224284 (TRAV12-1, TRAJ26)
CVVNSWVTMVRILSLFPEPDCPC

SEQ ID NO: 448568 - protein, 13 aa, Homo sapiens
  CDR3 for beta chain variable domain of TCR clone 224284 (TRBV10-3, TRBJ2-7)
CASKLAVNYEQYF

SEQ ID NO: 448569 - protein, 15 aa, Homo sapiens
  CDR3 for alpha chain variable domain of TCR clone 224285 (TRAV4, TRAJ39)
CLVGPNNNAGNMLTF

SEQ ID NO: 448570 - protein, 16 aa, Homo sapiens
  CDR3 for beta chain variable domain of TCR clone 224285 (TRBV18, TRBJ2-1)
FASSPPSGGGNNEQFF

SEQ ID NO: 448571 - protein, 14 aa, Homo sapiens
  CDR3 for alpha chain variable domain of TCR clone 224286 (TRAV12-3, TRAJ9)
CAMSTNTGGSKTIF

SEQ ID NO: 448572 - protein, 12 aa, Homo sapiens
  CDR3 for beta chain variable domain of TCR clone 224286 (TRBV11-2, TRBJ2-2)
CASSLGGGELFF

SEQ ID NO: 448573 - protein, 14 aa, Homo sapiens
  CDR3 for alpha chain variable domain of TCR clone 224287 (TRAV20, TRAJ42)
CAVQARGSQGNLIF

SEQ ID NO: 448574 - protein, 15 aa, Homo sapiens
  CDR3 for beta chain variable domain of TCR clone 224287 (TRBV2, TRBJ2-1)
CASSDLAGSYNEQFF

SEQ ID NO: 448575 - protein, 17 aa, Homo sapiens
  CDR3 for alpha chain variable domain of TCR clone 224288 (TRAV12-3, TRAJ6)
CAMSARGGAGGSSIPTC

SEQ ID NO: 448576 - protein, 12 aa, Homo sapiens
  CDR3 for beta chain variable domain of TCR clone 224288 (TRBV12-4, TRBJ2-3)
CASSTLPDTQYF

SEQ ID NO: 448577 - protein, 15 aa, Homo sapiens
  CDR3 for alpha chain variable domain of TCR clone 224289 (TRAV14/DV4, TRAJ26)
CAMREGQNYGQNFVF

SEQ ID NO: 448578 - protein, 12 aa, Homo sapiens
  CDR3 for beta chain variable domain of TCR clone 224289 (TRBV24-1, TRBJ2-2)
CHSDWSTGELFF

SEQ ID NO: 448579 - protein, 11 aa, Homo sapiens
  CDR3 for alpha chain variable domain of TCR clone 224290 (TRAV17, TRAJ9)
CGFTGGFKTIF

SEQ ID NO: 448580 - protein, 14 aa, Homo sapiens
  CDR3 for beta chain variable domain of TCR clone 224290 (TRBV13, TRBJ2-7)
CASSLKGASYEQYF

SEQ ID NO: 448581 - protein, 13 aa, Homo sapiens
  CDR3 for alpha chain variable domain of TCR clone 224291 (TRAV3, TRAJ29)
CAVRDWGNTPLVF

SEQ ID NO: 448582 - protein, 15 aa, Homo sapiens
  CDR3 for beta chain variable domain of TCR clone 224291 (TRBV12-4, TRBJ2-5)
CASIGRTEEGETQYF

SEQ ID NO: 448583 - protein, 11 aa, Homo sapiens
  CDR3 for alpha chain variable domain of TCR clone 224292 (TRAV1-1, TRAJ23)
CAVRQGGRLIF

SEQ ID NO: 448584 - protein, 20 aa, Homo sapiens
  CDR3 for beta chain variable domain of TCR clone 224292 (TRBV7-8, TRBJ2-2)
CASSHLFPGPTIHTTGELFF

SEQ ID NO: 448585 - protein, 12 aa, Homo sapiens
  CDR3 for alpha chain variable domain of TCR clone 224293 (TRAV8-3, TRAJ26)
CAGDNYGQNFVF

SEQ ID NO: 448586 - protein, 15 aa, Homo sapiens
  CDR3 for beta chain variable domain of TCR clone 224293 (TRBV6-5, TRBJ1-2)
CASSYSQAFNYGYTF

SEQ ID NO: 448587 - protein, 12 aa, Homo sapiens
  CDR3 for alpha chain variable domain of TCR clone 224294 (TRAV36/DV7, TRAJ43)
CAVGLWDNDMRF

SEQ ID NO: 448588 - protein, 15 aa, Homo sapiens
  CDR3 for beta chain variable domain of TCR clone 224294 (TRBV4-1, TRBJ2-3)
CASSRGQGIPDTQYF

SEQ ID NO: 448589 - protein, 15 aa, Homo sapiens
  CDR3 for alpha chain variable domain of TCR clone 224295 (TRAV1-2, TRAJ13)
CAVRGSSGGYQKVTF

SEQ ID NO: 448590 - protein, 15 aa, Homo sapiens
  CDR3 for beta chain variable domain of TCR clone 224295 (TRBV11-3, TRBJ1-3)
CASSLSGTSGNTIYF

SEQ ID NO: 448591 - protein, 12 aa, Homo sapiens
  CDR3 for alpha chain variable domain of TCR clone 224296 (TRAV13-2, TRAJ23)
CAERPRGGKLIF

SEQ ID NO: 448592 - protein, 16 aa, Homo sapiens
  CDR3 for beta chain variable domain of TCR clone 224296 (TRBV2, TRBJ2-3)
CASSTSVEGVTDTQYF

SEQ ID NO: 448593 - protein, 23 aa, Homo sapiens
  CDR3 for alpha chain variable domain of TCR clone 224297 (TRAV12-2, TRAJ36)
SLLIRDSQPSDSATLERANNLFF

SEQ ID NO: 448594 - protein, 13 aa, Homo sapiens
  CDR3 for beta chain variable domain of TCR clone 224297 (TRBV10-3, TRBJ2-7)
CASKLAVNYEQYF

SEQ ID NO: 448595 - protein, 16 aa, Homo sapiens
  CDR3 for alpha chain variable domain of TCR clone 224298 (TRAV12-1, TRAJ8)
CVVNGRGNTGFKKLVF

SEQ ID NO: 448596 - protein, 13 aa, Homo sapiens
  CDR3 for beta chain variable domain of TCR clone 224298 (TRBV19, TRBJ2-5)
CASSMGGAGTQYF

SEQ ID NO: 448597 - protein, 15 aa, Homo sapiens
  CDR3 for alpha chain variable domain of TCR clone 224299 (TRAV17, TRAJ54)
CATTRSQQGAQKLVF

SEQ ID NO: 448598 - protein, 16 aa, Homo sapiens
  CDR3 for beta chain variable domain of TCR clone 224299 (TRBV12-4, TRBJ2-3)
CASSLRLAETTDTQYF

SEQ ID NO: 448599 - protein, 16 aa, Homo sapiens
  CDR3 for alpha chain variable domain of TCR clone 224300 (TRAV12-3, TRAJ53)
CAMSPGSGGSNDKLTF

SEQ ID NO: 448600 - protein, 11 aa, Homo sapiens
  CDR3 for beta chain variable domain of TCR clone 224300 (TRBV29-1, TRBJ2-5)
FSEDRTGTQYF

SEQ ID NO: 448601 - protein, 13 aa, Homo sapiens
  CDR3 for alpha chain variable domain of TCR clone 224301 (TRAV21, TRAJ24)
GLMTTDSWGKLQF

SEQ ID NO: 448602 - protein, 14 aa, Homo sapiens
  CDR3 for beta chain variable domain of TCR clone 224301 (TRBV7-2, TRBJ2-7)
CASRSQGAAYEQYF

SEQ ID NO: 448603 - protein, 14 aa, Homo sapiens
  CDR3 for alpha chain variable domain of TCR clone 224302 (TRAV38-2/DV8, TRAJ21)
CAYRRRDNFNKFYF

SEQ ID NO: 448604 - protein, 12 aa, Homo sapiens
  CDR3 for beta chain variable domain of TCR clone 224302 (TRBV12-5, TRBJ2-5)
CASGQGVETQYF

SEQ ID NO: 448605 - protein, 17 aa, Homo sapiens
  CDR3 for alpha chain variable domain of TCR clone 224303 (TRAV23/DV6, TRAJ57)
CAASSTLSQGGSEKLVL

SEQ ID NO: 448606 - protein, 14 aa, Homo sapiens
  CDR3 for beta chain variable domain of TCR clone 224303 (TRBV4-1, TRBJ2-5)
CASSQYRDQETQYF

SEQ ID NO: 448607 - protein, 13 aa, Homo sapiens
  CDR3 for alpha chain variable domain of TCR clone 224304 (TRAV12-1, TRAJ39)
CVALNNAGNMLTF

SEQ ID NO: 448608 - protein, 14 aa, Homo sapiens
  CDR3 for beta chain variable domain of TCR clone 224304 (TRBV11-2, TRBJ1-2)
CASSLGTANYGYTF

SEQ ID NO: 448609 - protein, 22 aa, Homo sapiens
  CDR3 for alpha chain variable domain of TCR clone 224305 (TRAV21, TRAJ39)
AASRPGDSATPKGAKAGNMLTF

SEQ ID NO: 448610 - protein, 14 aa, Homo sapiens
  CDR3 for beta chain variable domain of TCR clone 224305 (TRBV11-2, TRBJ2-7)
CASSLGAGAYEQYF

SEQ ID NO: 448611 - protein, 14 aa, Homo sapiens
  CDR3 for alpha chain variable domain of TCR clone 224306 (TRAV13-1, TRAJ35)
CAASKGGFGNVLHC

SEQ ID NO: 448612 - protein, 13 aa, Homo sapiens
  CDR3 for beta chain variable domain of TCR clone 224306 (TRBV29-1, TRBJ2-1)
CSVEGGRVNEQFF

SEQ ID NO: 448613 - protein, 14 aa, Homo sapiens
  CDR3 for alpha chain variable domain of TCR clone 224307 (TRAV16, TRAJ37)
CALDISGNTVKLIF

SEQ ID NO: 448614 - protein, 11 aa, Homo sapiens
  CDR3 for beta chain variable domain of TCR clone 224307 (TRBV6-1, TRBJ2-1)
CASISSNEQFF

SEQ ID NO: 448615 - protein, 13 aa, Homo sapiens
  CDR3 for alpha chain variable domain of TCR clone 224308 (TRAV13-1, TRAJ5)
CAASDTGRRALTL

SEQ ID NO: 448616 - protein, 12 aa, Homo sapiens
  CDR3 for beta chain variable domain of TCR clone 224308 (TRBV28, TRBJ2-3)
CGSSLCRDTQFF

SEQ ID NO: 448617 - protein, 18 aa, Homo sapiens
  CDR3 for alpha chain variable domain of TCR clone 224309 (TRAV8-1, TRAJ5)
CAVKTEQPGRRAGEHLLL

SEQ ID NO: 448618 - protein, 13 aa, Homo sapiens
  CDR3 for beta chain variable domain of TCR clone 224309 (TRBV12-5, TRBJ2-3)
CASGDRQSDTQYF

SEQ ID NO: 448619 - protein, 14 aa, Homo sapiens
  CDR3 for alpha chain variable domain of TCR clone 224310 (TRAV21, TRAJ58)
CAVRRGRRGSRLTF

SEQ ID NO: 448620 - protein, 15 aa, Homo sapiens
  CDR3 for beta chain variable domain of TCR clone 224310 (TRBV15, TRBJ1-5)
CATSRDPVSNQPQHF

SEQ ID NO: 448621 - protein, 14 aa, Homo sapiens
  CDR3 for alpha chain variable domain of TCR clone 224311 (TRAV12-3, TRAJ10)
SHLPLTGGGNKLNF

SEQ ID NO: 448622 - protein, 12 aa, Homo sapiens
  CDR3 for beta chain variable domain of TCR clone 224311 (TRBV7-3, TRBJ2-5)
CASSSPGGTQYF

SEQ ID NO: 448623 - protein, 14 aa, Homo sapiens
  CDR3 for alpha chain variable domain of TCR clone 224312 (TRAV35, TRAJ22)
CAGLRPGSTRQLTF

SEQ ID NO: 448624 - protein, 13 aa, Homo sapiens
  CDR3 for beta chain variable domain of TCR clone 224312 (TRBV20-1, TRBJ2-7)
CSATHTSGYEQYF

SEQ ID NO: 448625 - protein, 16 aa, Homo sapiens
  CDR3 for alpha chain variable domain of TCR clone 224313 (TRAV35, TRAJ28)
CAGQRYSGAGSYRLTF

SEQ ID NO: 448626 - protein, 16 aa, Homo sapiens
  CDR3 for beta chain variable domain of TCR clone 224313 (TRBV12-5, TRBJ2-5)
CASGPRTSGNQETQYF

SEQ ID NO: 448627 - protein, 13 aa, Homo sapiens
  CDR3 for alpha chain variable domain of TCR clone 224314 (TRAV8-3, TRAJ28)
CAVGAVGSYQLTF

SEQ ID NO: 448628 - protein, 13 aa, Homo sapiens
  CDR3 for beta chain variable domain of TCR clone 224314 (TRBV11-2, TRBJ1-2)
CASSLDRGETTMA

SEQ ID NO: 448629 - protein, 16 aa, Homo sapiens
  CDR3 for alpha chain variable domain of TCR clone 224315 (TRAV30, TRAJ24)
CGTEIVDADSWGKFQF

SEQ ID NO: 448630 - protein, 15 aa, Homo sapiens
  CDR3 for beta chain variable domain of TCR clone 224315 (TRBV19, TRBJ2-4)
CASSIGLAGANIQYF

SEQ ID NO: 448631 - protein, 13 aa, Homo sapiens
  CDR3 for alpha chain variable domain of TCR clone 224316 (TRAV2, TRAJ40)
CAVVTSGTCKYIF

SEQ ID NO: 448632 - protein, 16 aa, Homo sapiens
  CDR3 for beta chain variable domain of TCR clone 224316 (TRBV2, TRBJ2-1)
CASSVGGSLSYNEQFF

SEQ ID NO: 448633 - protein, 15 aa, Homo sapiens
  CDR3 for alpha chain variable domain of TCR clone 224317 (TRAV8-3, TRAJ45)
CASSYSGGGADGLTF

SEQ ID NO: 448634 - protein, 15 aa, Homo sapiens
  CDR3 for beta chain variable domain of TCR clone 224317 (TRBV27, TRBJ1-4)
CASSPRHATIEKLFF

SEQ ID NO: 448635 - protein, 11 aa, Homo sapiens
  CDR3 for alpha chain variable domain of TCR clone 224318 (TRAV12-2, TRAJ30)
CAVGRDDTIIF

SEQ ID NO: 448636 - protein, 17 aa, Homo sapiens
  CDR3 for beta chain variable domain of TCR clone 224318 (TRBV7-3, TRBJ2-3)
CASSLMKRMRGADTQYF

SEQ ID NO: 448637 - protein, 13 aa, Homo sapiens
  CDR3 for alpha chain variable domain of TCR clone 224319 (TRAV12-1, TRAJ6)
CVVFPGGSYIPTF

SEQ ID NO: 448638 - protein, 12 aa, Homo sapiens
  CDR3 for beta chain variable domain of TCR clone 224319 (TRBV5-1, TRBJ2-7)
CASSLDSYEQYF

SEQ ID NO: 448639 - protein, 14 aa, Homo sapiens
  CDR3 for alpha chain variable domain of TCR clone 224320 (TRAV21, TRAJ37)
CAVKGSSNTGKLIF

SEQ ID NO: 448640 - protein, 15 aa, Homo sapiens
  CDR3 for beta chain variable domain of TCR clone 224320 (TRBV20-1, TRBJ2-7)
CSARDRVSGMDEQYF

SEQ ID NO: 448641 - protein, 18 aa, Homo sapiens
  CDR3 for alpha chain variable domain of TCR clone 224321 (TRAV8-4, TRAJ52)
CAVTRANAGCTSYGKLTF

SEQ ID NO: 448642 - protein, 12 aa, Homo sapiens
  CDR3 for beta chain variable domain of TCR clone 224321 (TRBV11-2, TRBJ2-2)
CASSLPTGELFF

SEQ ID NO: 448643 - protein, 18 aa, Homo sapiens
  CDR3 for alpha chain variable domain of TCR clone 224322 (TRAV13-1, TRAJ52)
CAAKNPNAGGTSYGKMTC

SEQ ID NO: 448644 - protein, 15 aa, Homo sapiens
  CDR3 for beta chain variable domain of TCR clone 224322 (TRBV2, TRBJ2-2)
CAGSSETVGTGELFF

SEQ ID NO: 448645 - protein, 14 aa, Homo sapiens
  CDR3 for alpha chain variable domain of TCR clone 224323 (TRAV25, TRAJ27)
CAGEHLTNAGKSTF

SEQ ID NO: 448646 - protein, 13 aa, Homo sapiens
  CDR3 for beta chain variable domain of TCR clone 224323 (TRBV11-2, TRBJ2-7)
CASSPLGSYEQYF

SEQ ID NO: 448647 - protein, 12 aa, Homo sapiens
  CDR3 for alpha chain variable domain of TCR clone 224324 (TRAV13-2, TRAJ8)
CAPWLGFKKLVF

SEQ ID NO: 448648 - protein, 15 aa, Homo sapiens
  CDR3 for beta chain variable domain of TCR clone 224324 (TRBV7-2, TRBJ2-1)
CASSSGLAGGNEQFF

SEQ ID NO: 448649 - protein, 15 aa, Homo sapiens
  CDR3 for alpha chain variable domain of TCR clone 224325 (TRAV8-4, TRAJ37)
CAVSTRSGNTGKLIF

SEQ ID NO: 448650 - protein, 20 aa, Homo sapiens
  CDR3 for beta chain variable domain of TCR clone 224325 (TRBV7-8, TRBJ2-2)
CASSHFFPGPTIHITGELFF

SEQ ID NO: 448651 - protein, 13 aa, Homo sapiens
  CDR3 for alpha chain variable domain of TCR clone 224326 (TRAV17, TRAJ22)
CAHHSGSARQLTF

SEQ ID NO: 448652 - protein, 16 aa, Homo sapiens
  CDR3 for beta chain variable domain of TCR clone 224326 (TRBV4-1, TRBJ1-2)
CASSQDAGQVLYGYNF

SEQ ID NO: 448653 - protein, 16 aa, Homo sapiens
  CDR3 for alpha chain variable domain of TCR clone 224327 (TRAV3, TRAJ42)
CAVRDIEGGGQGNLIF

SEQ ID NO: 448654 - protein, 15 aa, Homo sapiens
  CDR3 for beta chain variable domain of TCR clone 224327 (TRBV9, TRBJ2-2)
CASSDFAGASGELFF

SEQ ID NO: 448655 - protein, 12 aa, Homo sapiens
  CDR3 for alpha chain variable domain of TCR clone 224328 (TRAV12-3, TRAJ17)
CAMTLTGNKLTF

SEQ ID NO: 448656 - protein, 13 aa, Homo sapiens
  CDR3 for beta chain variable domain of TCR clone 224328 (TRBV7-8, TRBJ2-1)
CASSAGTGNEQFF

SEQ ID NO: 448657 - protein, 14 aa, Homo sapiens
  CDR3 for alpha chain variable domain of TCR clone 224329 (TRAV12-3, TRAJ15)
CAMIPPQAGTALIF

SEQ ID NO: 448658 - protein, 12 aa, Homo sapiens
  CDR3 for beta chain variable domain of TCR clone 224329 (TRBV11-2, TRBJ2-2)
CASSLGGGGLFF

SEQ ID NO: 448659 - protein, 13 aa, Homo sapiens
  CDR3 for alpha chain variable domain of TCR clone 224330 (TRAV13-1, TRAJ39)
CAASIVMQATCSP

SEQ ID NO: 448660 - protein, 14 aa, Homo sapiens
  CDR3 for beta chain variable domain of TCR clone 224330 (TRBV18, TRBJ2-7)
CASSPRGGAYEQYF

SEQ ID NO: 448661 - protein, 16 aa, Homo sapiens
  CDR3 for alpha chain variable domain of TCR clone 224331 (TRAV12-3, TRAJ53)
CAMSVGSGGSNYKLTF

SEQ ID NO: 448662 - protein, 13 aa, Homo sapiens
  CDR3 for beta chain variable domain of TCR clone 224331 (TRBV12-4, TRBJ2-7)
CASSPTETYEQYF

SEQ ID NO: 448663 - protein, 16 aa, Homo sapiens
  CDR3 for alpha chain variable domain of TCR clone 224332 (TRAV12-3, TRAJ53)
YAMSPGRGGSNYKLTF

SEQ ID NO: 448664 - protein, 11 aa, Homo sapiens
  CDR3 for beta chain variable domain of TCR clone 224332 (TRBV29-1, TRBJ2-5)
CSEDRTGTQYF

SEQ ID NO: 448665 - protein, 14 aa, Homo sapiens
  CDR3 for alpha chain variable domain of TCR clone 224333 (TRAV13-1, TRAJ44)
CAAKATGTASKLTF

SEQ ID NO: 448666 - protein, 13 aa, Homo sapiens
  CDR3 for beta chain variable domain of TCR clone 224333 (TRBV7-7, TRBJ2-3)
CASSLSRADTQYF

SEQ ID NO: 448667 - protein, 14 aa, Homo sapiens
  CDR3 for alpha chain variable domain of TCR clone 224334 (TRAV13-2, TRAJ32)
CAENYGGATNKLIF

SEQ ID NO: 448668 - protein, 17 aa, Homo sapiens
  CDR3 for beta chain variable domain of TCR clone 224334 (TRBV7-8, TRBJ2-6)
CASSAGTVGAGANVLTF

SEQ ID NO: 448669 - protein, 12 aa, Homo sapiens
  CDR3 for alpha chain variable domain of TCR clone 224335 (TRAV22, TRAJ22)
CAPGGSARQLTF

SEQ ID NO: 448670 - protein, 22 aa, Homo sapiens
  CDR3 for beta chain variable domain of TCR clone 224335 (TRBV15, TRBJ1-6)
AWGTQPCTCVPPRGGLNSPLHF

SEQ ID NO: 448671 - protein, 15 aa, Homo sapiens
  CDR3 for alpha chain variable domain of TCR clone 224336 (TRAV27, TRAJ38)
CAARRNAGNNRKLIW

SEQ ID NO: 448672 - protein, 13 aa, Homo sapiens
  CDR3 for beta chain variable domain of TCR clone 224336 (TRBV12-5, TRBJ2-3)
CASGARQSDTQYF

SEQ ID NO: 448673 - protein, 14 aa, Homo sapiens
  CDR3 for alpha chain variable domain of TCR clone 224337 (TRAV13-1, TRAJ35)
CAASKGGFGNVLHC

SEQ ID NO: 448674 - protein, 14 aa, Homo sapiens
  CDR3 for beta chain variable domain of TCR clone 224337 (TRBV3-1, TRBJ2-5)
CASSQGPDQETQYF

SEQ ID NO: 448675 - protein, 21 aa, Homo sapiens
  CDR3 for alpha chain variable domain of TCR clone 224338 (TRAV8-2, TRAJ26)
CVVTLLLGSEFCLWSRNQIVR

SEQ ID NO: 448676 - protein, 15 aa, Homo sapiens
  CDR3 for beta chain variable domain of TCR clone 224338 (TRBV11-2, TRBJ2-2)
CASSSDRVYAGELFF

SEQ ID NO: 448677 - protein, 18 aa, Homo sapiens
  CDR3 for alpha chain variable domain of TCR clone 224339 (TRAV21, TRAJ52)
CAVRPSPAGGTSYGKLTF

SEQ ID NO: 448678 - protein, 16 aa, Homo sapiens
  CDR3 for beta chain variable domain of TCR clone 224339 (TRBV28, TRBJ2-3)
CASSFFRDPRLGTQYF

SEQ ID NO: 448679 - protein, 16 aa, Homo sapiens
  CDR3 for alpha chain variable domain of TCR clone 224340 (TRAV23/DV6, TRAJ9)
CAASIGGNTGGFTNIF

SEQ ID NO: 448680 - protein, 14 aa, Homo sapiens
  CDR3 for beta chain variable domain of TCR clone 224340 (TRBV9, TRBJ2-7)
CASSVGVGSYEQYF

SEQ ID NO: 448681 - protein, 11 aa, Homo sapiens
  CDR3 for alpha chain variable domain of TCR clone 224341 (TRAV35, TRAJ22)
CAGPGVGQLTF

SEQ ID NO: 448682 - protein, 14 aa, Homo sapiens
  CDR3 for beta chain variable domain of TCR clone 224341 (TRBV7-2, TRBJ2-7)
CASSPKTSFYEQYF

SEQ ID NO: 448683 - protein, 12 aa, Homo sapiens
  CDR3 for alpha chain variable domain of TCR clone 224342 (TRAV12-3, TRAJ17)
CAMTLTGNKLTF

SEQ ID NO: 448684 - protein, 15 aa, Homo sapiens
  CDR3 for beta chain variable domain of TCR clone 224342 (TRBV20-1, TRBJ2-7)
GSARDRVSGKDEQYF

SEQ ID NO: 448685 - protein, 14 aa, Homo sapiens
  CDR3 for alpha chain variable domain of TCR clone 224343 (TRAV13-1, TRAJ35)
CAASKGGFGNVLHC

SEQ ID NO: 448686 - protein, 19 aa, Homo sapiens
  CDR3 for beta chain variable domain of TCR clone 224343 (TRBV7-2, TRBJ2-3)
CASSFLSRNWGGGTDTQYF

SEQ ID NO: 448687 - protein, 14 aa, Homo sapiens
  CDR3 for alpha chain variable domain of TCR clone 224344 (TRAV8-6, TRAJ54)
CAVTEGRGAQKLVF

SEQ ID NO: 448688 - protein, 14 aa, Homo sapiens
  CDR3 for beta chain variable domain of TCR clone 224344 (TRBV27, TRBJ2-7)
CASSIGQGGQKQYF

SEQ ID NO: 448689 - protein, 22 aa, Homo sapiens
  CDR3 for alpha chain variable domain of TCR clone 224345 (TRAV13-1, TRAJ35)
CAASKGGFGNVLHCGSCPQVIV

SEQ ID NO: 448690 - protein, 13 aa, Homo sapiens
  CDR3 for beta chain variable domain of TCR clone 224345 (TRBV7-3, TRBJ1-1)
CASSQDWGAEAFF

SEQ ID NO: 448691 - protein, 15 aa, Homo sapiens
  CDR3 for alpha chain variable domain of TCR clone 224346 (TRAV21, TRAJ24)
CAARSSTDSWEKLQF

SEQ ID NO: 448692 - protein, 13 aa, Homo sapiens
  CDR3 for beta chain variable domain of TCR clone 224346 (TRBV11-2, TRBJ2-5)
CASSSTGEETQCF

SEQ ID NO: 448693 - protein, 11 aa, Homo sapiens
  CDR3 for alpha chain variable domain of TCR clone 224347 (TRAV13-1, TRAJ49)
CACGGGNQFYF

SEQ ID NO: 448694 - protein, 16 aa, Homo sapiens
  CDR3 for beta chain variable domain of TCR clone 224347 (TRBV11-2, TRBJ2-2)
CASSLRTGNLIEELFF

SEQ ID NO: 448695 - protein, 12 aa, Homo sapiens
  CDR3 for alpha chain variable domain of TCR clone 224348 (TRAV16, TRAJ8)
CALLGGFQKLVF

SEQ ID NO: 448696 - protein, 15 aa, Homo sapiens
  CDR3 for beta chain variable domain of TCR clone 224348 (TRBV6-1, TRBJ1-5)
CASIPDRLGNQPQHF

SEQ ID NO: 448697 - protein, 14 aa, Homo sapiens
  CDR3 for alpha chain variable domain of TCR clone 224349 (TRAV1-1, TRAJ27)
CAVIYNTNAGKSTF

SEQ ID NO: 448698 - protein, 13 aa, Homo sapiens
  CDR3 for beta chain variable domain of TCR clone 224349 (TRBV13, TRBJ2-5)
CASSPEVGETQYF

SEQ ID NO: 448699 - protein, 13 aa, Homo sapiens
  CDR3 for alpha chain variable domain of TCR clone 224350 (TRAV23/DV6, TRAJ29)
CAASMEGNTPLVF

SEQ ID NO: 448700 - protein, 15 aa, Homo sapiens
  CDR3 for beta chain variable domain of TCR clone 224350 (TRBV20-1, TRBJ2-1)
CSARGRGLSYNEQFF

SEQ ID NO: 448701 - protein, 16 aa, Homo sapiens
  CDR3 for alpha chain variable domain of TCR clone 224351 (TRAV3, TRAJ37)
CAVRGKGSGNTGKLIF

SEQ ID NO: 448702 - protein, 13 aa, Homo sapiens
  CDR3 for beta chain variable domain of TCR clone 224351 (TRBV14, TRBJ2-7)
CGSSQDRRYEQYF

SEQ ID NO: 448703 - protein, 15 aa, Homo sapiens
  CDR3 for alpha chain variable domain of TCR clone 224352 (TRAV35, TRAJ40)
CAGQLGTSGTYKYIF

SEQ ID NO: 448704 - protein, 14 aa, Homo sapiens
  CDR3 for beta chain variable domain of TCR clone 224352 (TRBV7-3, TRBJ2-1)
GAGSLAGGTNEQFF

SEQ ID NO: 448705 - protein, 14 aa, Homo sapiens
  CDR3 for alpha chain variable domain of TCR clone 224353 (TRAV17, TRAJ57)
CATDPQGGSEKLVF

SEQ ID NO: 448706 - protein, 18 aa, Homo sapiens
  CDR3 for beta chain variable domain of TCR clone 224353 (TRBV6-6, TRBJ1-3)
CASSYSKWDSIPGYTIYF

SEQ ID NO: 448707 - protein, 14 aa, Homo sapiens
  CDR3 for alpha chain variable domain of TCR clone 224354 (TRAV16, TRAJ29)
CALTRNSGNTPLVF

SEQ ID NO: 448708 - protein, 15 aa, Homo sapiens
  CDR3 for beta chain variable domain of TCR clone 224354 (TRBV20-1, TRBJ2-7)
CSARDRVSGMDEQYF

SEQ ID NO: 448709 - protein, 13 aa, Homo sapiens
  CDR3 for alpha chain variable domain of TCR clone 224355 (TRAV30, TRAJ6)
CGFIEGGSYIPTF

SEQ ID NO: 448710 - protein, 16 aa, Homo sapiens
  CDR3 for beta chain variable domain of TCR clone 224355 (TRBV7-6, TRBJ2-3)
CASSARTSIGTDTQYF

SEQ ID NO: 448711 - protein, 22 aa, Homo sapiens
  CDR3 for alpha chain variable domain of TCR clone 224356 (TRAV8-3, TRAJ32)
CAVEVVLQTSSSLELALCLLSS

SEQ ID NO: 448712 - protein, 12 aa, Homo sapiens
  CDR3 for beta chain variable domain of TCR clone 224356 (TRBV29-1, TRBJ2-2)
CSVDKYTGELFF

SEQ ID NO: 448713 - protein, 14 aa, Homo sapiens
  CDR3 for alpha chain variable domain of TCR clone 224357 (TRAV13-1, TRAJ28)
CAASKGSGSYQLTF

SEQ ID NO: 448714 - protein, 19 aa, Homo sapiens
  CDR3 for beta chain variable domain of TCR clone 224357 (TRBV28, TRBJ2-4)
CASSFQPGGPAHSKNIQYF

SEQ ID NO: 448715 - protein, 15 aa, Homo sapiens
  CDR3 for alpha chain variable domain of TCR clone 224358 (TRAV21, TRAJ53)
CATLNSGGSNYKLTF

SEQ ID NO: 448716 - protein, 13 aa, Homo sapiens
  CDR3 for beta chain variable domain of TCR clone 224358 (TRBV7-9, TRBJ2-3)
CASSTGSTDTQYF

SEQ ID NO: 448717 - protein, 14 aa, Homo sapiens
  CDR3 for alpha chain variable domain of TCR clone 224359 (TRAV2, TRAJ9)
CAVEDRCGGFKTIF

SEQ ID NO: 448718 - protein, 17 aa, Homo sapiens
  CDR3 for beta chain variable domain of TCR clone 224359 (TRBV7-8, TRBJ2-6)
CASSAGTGGAGANVLTF

SEQ ID NO: 448719 - protein, 14 aa, Homo sapiens
  CDR3 for alpha chain variable domain of TCR clone 224360 (TRAV1-1, TRAJ23)
CAVSIYNQGGKLIF

SEQ ID NO: 448720 - protein, 14 aa, Homo sapiens
  CDR3 for beta chain variable domain of TCR clone 224360 (TRBV18, TRBJ2-5)
CASSPGVSQETQYF

SEQ ID NO: 448721 - protein, 11 aa, Homo sapiens
  CDR3 for alpha chain variable domain of TCR clone 224361 (TRAV21, TRAJ41)
CAVRSGYALNF

SEQ ID NO: 448722 - protein, 13 aa, Homo sapiens
  CDR3 for beta chain variable domain of TCR clone 224361 (TRBV7-9, TRBJ1-2)
CASSLEQNYGYTV

SEQ ID NO: 448723 - protein, 18 aa, Homo sapiens
  CDR3 for alpha chain variable domain of TCR clone 224362 (TRAV12-2, )
CAVEDIQNPDPAGYQLRD

SEQ ID NO: 448724 - protein, 13 aa, Homo sapiens
  CDR3 for beta chain variable domain of TCR clone 224362 (TRBV12-4, TRBJ1-1)
CASSPGTGFEAFF

SEQ ID NO: 448725 - protein, 16 aa, Homo sapiens
  CDR3 for alpha chain variable domain of TCR clone 224363 (TRAV30, TRAJ24)
CGTEIVDADSWWKFQF

SEQ ID NO: 448726 - protein, 18 aa, Homo sapiens
  CDR3 for beta chain variable domain of TCR clone 224363 (TRBV11-2, TRBJ2-6)
CASSLNPFLGTGANVLTF

SEQ ID NO: 448727 - protein, 14 aa, Homo sapiens
  CDR3 for alpha chain variable domain of TCR clone 224364 (TRAV1-2, TRAJ16)
CAVNRLSDGQKLLF

SEQ ID NO: 448728 - protein, 16 aa, Homo sapiens
  CDR3 for beta chain variable domain of TCR clone 224364 (TRBV12-5, TRBJ2-5)
CASGPRTSGNHETQYF

SEQ ID NO: 448729 - protein, 13 aa, Homo sapiens
  CDR3 for alpha chain variable domain of TCR clone 224365 (TRAV16, TRAJ58)
CALSIPSGSRLTF

SEQ ID NO: 448730 - protein, 14 aa, Homo sapiens
  CDR3 for beta chain variable domain of TCR clone 224365 (TRBV12-5, TRBJ2-5)
CASGPRTHQETQYF

SEQ ID NO: 448731 - protein, 14 aa, Homo sapiens
  CDR3 for alpha chain variable domain of TCR clone 224366 (TRAV3, TRAJ34)
CAVRAPGNTDKLIF

SEQ ID NO: 448732 - protein, 17 aa, Homo sapiens
  CDR3 for beta chain variable domain of TCR clone 224366 (TRBV20-1, TRBJ2-7)
CSAAPGIARGISYEQYF

SEQ ID NO: 448733 - protein, 14 aa, Homo sapiens
  CDR3 for alpha chain variable domain of TCR clone 224367 (TRAV12-3, TRAJ28)
CATNSGAGSYQLTF

SEQ ID NO: 448734 - protein, 17 aa, Homo sapiens
  CDR3 for beta chain variable domain of TCR clone 224367 (TRBV13, TRBJ2-3)
CASSLSRVAGGRNTQYF

SEQ ID NO: 448735 - protein, 11 aa, Homo sapiens
  CDR3 for alpha chain variable domain of TCR clone 224368 (TRAV16, TRAJ20)
CALSEGFKAAL

SEQ ID NO: 448736 - protein, 13 aa, Homo sapiens
  CDR3 for beta chain variable domain of TCR clone 224368 (TRBV7-3, TRBJ2-1)
CARSLDSYNEQFF

SEQ ID NO: 448737 - protein, 16 aa, Homo sapiens
  CDR3 for alpha chain variable domain of TCR clone 224369 (TRAV12-3, TRAJ53)
CAMSPGSGGSNYKLTF

SEQ ID NO: 448738 - protein, 18 aa, Homo sapiens
  CDR3 for beta chain variable domain of TCR clone 224369 (TRBV7-7, TRBJ2-1)
CASSLALTSGRSYNEQFV

SEQ ID NO: 448739 - protein, 13 aa, Homo sapiens
  CDR3 for alpha chain variable domain of TCR clone 224370 (TRAV21, TRAJ27)
CAARPGNAGKSTF

SEQ ID NO: 448740 - protein, 14 aa, Homo sapiens
  CDR3 for beta chain variable domain of TCR clone 224370 (TRBV10-3, TRBJ1-2)
CAISAGGRVDGYTF

SEQ ID NO: 448741 - protein, 16 aa, Homo sapiens
  CDR3 for alpha chain variable domain of TCR clone 224371 (TRAV12-3, TRAJ53)
CAMSPGSGGSNYKLTF

SEQ ID NO: 448742 - protein, 20 aa, Homo sapiens
  CDR3 for beta chain variable domain of TCR clone 224371 (TRBV7-8, TRBJ2-2)
CASSHLFPGPTIHITGELFF

SEQ ID NO: 448743 - protein, 15 aa, Homo sapiens
  CDR3 for alpha chain variable domain of TCR clone 224372 (TRAV21, TRAJ53)
CATLNSGGSNYKLTF

SEQ ID NO: 448744 - protein, 13 aa, Homo sapiens
  CDR3 for beta chain variable domain of TCR clone 224372 (TRBV19, TRBJ2-2)
CASKVSAAGELFF

SEQ ID NO: 448745 - protein, 13 aa, Homo sapiens
  CDR3 for alpha chain variable domain of TCR clone 224373 (TRAV26-2, TRAJ43)
CILRAVNKNDMRF

SEQ ID NO: 448746 - protein, 14 aa, Homo sapiens
  CDR3 for beta chain variable domain of TCR clone 224373 (TRBV19, TRBJ2-1)
CASPTFVLSGEQFF

SEQ ID NO: 448747 - protein, 14 aa, Homo sapiens
  CDR3 for alpha chain variable domain of TCR clone 224374 (TRAV12-3, TRAJ41)
CAMSAGNSGYALNF

SEQ ID NO: 448748 - protein, 11 aa, Homo sapiens
  CDR3 for beta chain variable domain of TCR clone 224374 (TRBV7-2, TRBJ2-3)
CASGSSDTQYF

SEQ ID NO: 448749 - protein, 13 aa, Homo sapiens
  CDR3 for alpha chain variable domain of TCR clone 224375 (TRAV24, TRAJ44)
CALLTGTASKLTF

SEQ ID NO: 448750 - protein, 15 aa, Homo sapiens
  CDR3 for beta chain variable domain of TCR clone 224375 (TRBV7-2, TRBJ2-1)
CASSFQADEYNEQFF

SEQ ID NO: 448751 - protein, 14 aa, Homo sapiens
  CDR3 for alpha chain variable domain of TCR clone 224376 (TRAV8-4, TRAJ9)
CAVRGNTGGFKTIF

SEQ ID NO: 448752 - protein, 15 aa, Homo sapiens
  CDR3 for beta chain variable domain of TCR clone 224376 (TRBV10-2, TRBJ2-6)
CASSEQGTGANVLTF

SEQ ID NO: 448753 - protein, 14 aa, Homo sapiens
  CDR3 for alpha chain variable domain of TCR clone 224377 (TRAV1-2, TRAJ8)
CAVRDDTGFQKLVF

SEQ ID NO: 448754 - protein, 12 aa, Homo sapiens
  CDR3 for beta chain variable domain of TCR clone 224377 (TRBV7-8, TRBJ2-7)
CASSLGDREQYF

SEQ ID NO: 448755 - protein, 14 aa, Homo sapiens
  CDR3 for alpha chain variable domain of TCR clone 224378 (TRAV12-2, TRAJ40)
CAVKIPSGTYKYIF

SEQ ID NO: 448756 - protein, 16 aa, Homo sapiens
  CDR3 for beta chain variable domain of TCR clone 224378 (TRBV7-9, TRBJ2-3)
CASSLPRTSSTDTQYF

SEQ ID NO: 448757 - protein, 15 aa, Homo sapiens
  CDR3 for alpha chain variable domain of TCR clone 224379 (TRAV13-1, TRAJ17)
CAASIERAAGNNLTF

SEQ ID NO: 448758 - protein, 17 aa, Homo sapiens
  CDR3 for beta chain variable domain of TCR clone 224379 (TRBV13, TRBJ2-3)
CASSLSRVAGGRNTQYF

SEQ ID NO: 448759 - protein, 15 aa, Homo sapiens
  CDR3 for alpha chain variable domain of TCR clone 224380 (TRAV23/DV6, TRAJ30)
CAASSQESRDDKIIF

SEQ ID NO: 448760 - protein, 17 aa, Homo sapiens
  CDR3 for beta chain variable domain of TCR clone 224380 (TRBV4-3, TRBJ2-1)
CASRQFSSGRASGEQFF

SEQ ID NO: 448761 - protein, 14 aa, Homo sapiens
  CDR3 for alpha chain variable domain of TCR clone 224381 (TRAV35, TRAJ22)
CAGLRPGSARQMTF

SEQ ID NO: 448762 - protein, 13 aa, Homo sapiens
  CDR3 for beta chain variable domain of TCR clone 224381 (TRBV20-1, TRBJ2-7)
CSATHTSGYEQYF

SEQ ID NO: 448763 - protein, 14 aa, Homo sapiens
  CDR3 for alpha chain variable domain of TCR clone 224382 (TRAV8-6, TRAJ54)
CAVSPALGAQKLVF

SEQ ID NO: 448764 - protein, 15 aa, Homo sapiens
  CDR3 for beta chain variable domain of TCR clone 224382 (TRBV4-1, TRBJ1-6)
CASSAGQGYKSPLHF

SEQ ID NO: 448765 - protein, 14 aa, Homo sapiens
  CDR3 for alpha chain variable domain of TCR clone 224383 (TRAV17, TRAJ57)
CATEAQGGSEKLVF

SEQ ID NO: 448766 - protein, 15 aa, Homo sapiens
  CDR3 for beta chain variable domain of TCR clone 224383 (TRBV7-9, TRBJ2-2)
CASRRTGGRTGELFF

SEQ ID NO: 448767 - protein, 15 aa, Homo sapiens
  CDR3 for alpha chain variable domain of TCR clone 224384 (TRAV8-2, TRAJ24)
CVVSDRTDSWGKLQV

SEQ ID NO: 448768 - protein, 11 aa, Homo sapiens
  CDR3 for beta chain variable domain of TCR clone 224384 (TRBV20-1, TRBJ1-2)
CSVQGAGGYTF

SEQ ID NO: 448769 - protein, 14 aa, Homo sapiens
  CDR3 for alpha chain variable domain of TCR clone 224385 (TRAV2, TRAJ9)
CAVEDRSGGFKTIF

SEQ ID NO: 448770 - protein, 16 aa, Homo sapiens
  CDR3 for beta chain variable domain of TCR clone 224385 (TRBV7-8, TRBJ2-4)
CASSAERTLAKNIQYF

SEQ ID NO: 448771 - protein, 21 aa, Homo sapiens
  CDR3 for alpha chain variable domain of TCR clone 224386 (TRAV12-1, TRAJ32)
SSVIQPPTSMNYGGATNKLIF

SEQ ID NO: 448772 - protein, 15 aa, Homo sapiens
  CDR3 for beta chain variable domain of TCR clone 224386 (TRBV7-9, TRBJ2-2)
CASGPLDTLHGELFF

SEQ ID NO: 448773 - protein, 14 aa, Homo sapiens
  CDR3 for alpha chain variable domain of TCR clone 224387 (TRAV8-1, TRAJ23)
CAVGTYNQGGKLIF

SEQ ID NO: 448774 - protein, 16 aa, Homo sapiens
  CDR3 for beta chain variable domain of TCR clone 224387 (TRBV18, TRBJ1-5)
CASSPSTGNSNQPQHF

SEQ ID NO: 448775 - protein, 16 aa, Homo sapiens
  CDR3 for alpha chain variable domain of TCR clone 224388 (TRAV12-2, TRAJ43)
CAGYDMRFGAGTRLTV

SEQ ID NO: 448776 - protein, 16 aa, Homo sapiens
  CDR3 for beta chain variable domain of TCR clone 224388 (TRBV2, TRBJ2-4)
CASSEAPGGEQNIQYF

SEQ ID NO: 448777 - protein, 12 aa, Homo sapiens
  CDR3 for alpha chain variable domain of TCR clone 224389 (TRAV13-1, TRAJ48)
CAANFGNEKLTL

SEQ ID NO: 448778 - protein, 12 aa, Homo sapiens
  CDR3 for beta chain variable domain of TCR clone 224389 (TRBV11-2, TRBJ2-1)
CASSPGNNEQFF

SEQ ID NO: 448779 - protein, 11 aa, Homo sapiens
  CDR3 for alpha chain variable domain of TCR clone 224390 (TRAV3, TRAJ21)
CAVGDFNKFYF

SEQ ID NO: 448780 - protein, 13 aa, Homo sapiens
  CDR3 for beta chain variable domain of TCR clone 224390 (TRBV19, TRBJ1-2)
CASSVPGQDGYTF

SEQ ID NO: 448781 - protein, 11 aa, Homo sapiens
  CDR3 for alpha chain variable domain of TCR clone 224391 (TRAV2, TRAJ13)
CASGGYQKVTF

SEQ ID NO: 448782 - protein, 16 aa, Homo sapiens
  CDR3 for beta chain variable domain of TCR clone 224391 (TRBV2, TRBJ1-4)
CASNLLQGATNEKLFF

SEQ ID NO: 448783 - protein, 14 aa, Homo sapiens
  CDR3 for alpha chain variable domain of TCR clone 224392 (TRAV35, TRAJ13)
CAGSPSGCYQKVTF

SEQ ID NO: 448784 - protein, 17 aa, Homo sapiens
  CDR3 for beta chain variable domain of TCR clone 224392 (TRBV7-6, TRBJ2-5)
CASSPGLADPWGETQYV

SEQ ID NO: 448785 - protein, 15 aa, Homo sapiens
  CDR3 for alpha chain variable domain of TCR clone 224393 (TRAV12-3, TRAJ5)
CAMSGLGPGRRALTF

SEQ ID NO: 448786 - protein, 15 aa, Homo sapiens
  CDR3 for beta chain variable domain of TCR clone 224393 (TRBV19, TRBJ1-1)
CASTSGQIQNTEAFF

SEQ ID NO: 448787 - protein, 13 aa, Homo sapiens
  CDR3 for alpha chain variable domain of TCR clone 224394 (TRAV12-3, TRAJ53)
CAMRGGSNYKLTF

SEQ ID NO: 448788 - protein, 15 aa, Homo sapiens
  CDR3 for beta chain variable domain of TCR clone 224394 (TRBV2, TRBJ2-1)
CASQARLVMIGEQFF

SEQ ID NO: 448789 - protein, 16 aa, Homo sapiens
  CDR3 for alpha chain variable domain of TCR clone 224395 (TRAV19, TRAJ35)
CALKRDVEGFGNVMHC

SEQ ID NO: 448790 - protein, 14 aa, Homo sapiens
  CDR3 for beta chain variable domain of TCR clone 224395 (TRBV7-9, TRBJ1-1)
CASTPLQSYTEAFF

SEQ ID NO: 448791 - protein, 15 aa, Homo sapiens
  CDR3 for alpha chain variable domain of TCR clone 224396 (TRAV10, TRAJ6)
CVVRPRTGGSYIPTF

SEQ ID NO: 448792 - protein, 13 aa, Homo sapiens
  CDR3 for beta chain variable domain of TCR clone 224396 (TRBV7-9, TRBJ1-2)
CASSLKQNYGDTF

SEQ ID NO: 448793 - protein, 14 aa, Homo sapiens
  CDR3 for alpha chain variable domain of TCR clone 224397 (TRAV1-2, TRAJ16)
CAVNRFSDGQKLLF

SEQ ID NO: 448794 - protein, 17 aa, Homo sapiens
  CDR3 for beta chain variable domain of TCR clone 224397 (TRBV7-9, TRBJ1-1)
CASSLGIAGAENTEAFF

SEQ ID NO: 448795 - protein, 13 aa, Homo sapiens
  CDR3 for alpha chain variable domain of TCR clone 224398 (TRAV13-2, TRAJ48)
CAEMDFGNEKLTF

SEQ ID NO: 448796 - protein, 15 aa, Homo sapiens
  CDR3 for beta chain variable domain of TCR clone 224398 (TRBV7-9, TRBJ1-6)
CASSPPGRGNSPLDF

SEQ ID NO: 448797 - protein, 14 aa, Homo sapiens
  CDR3 for alpha chain variable domain of TCR clone 224399 (TRAV12-2, TRAJ13)
CAVKKTGGYQKITF

SEQ ID NO: 448798 - protein, 17 aa, Homo sapiens
  CDR3 for beta chain variable domain of TCR clone 224399 (TRBV4-1, TRBJ1-5)
CASSQQPPTVANQPQHF

SEQ ID NO: 448799 - protein, 14 aa, Homo sapiens
  CDR3 for alpha chain variable domain of TCR clone 224400 (TRAV1-2, TRAJ16)
CAVNRFSDGQKLLF

SEQ ID NO: 448800 - protein, 14 aa, Homo sapiens
  CDR3 for beta chain variable domain of TCR clone 224400 (TRBV28, TRBJ2-5)
CASSSGTAQETQYF

SEQ ID NO: 448801 - protein, 14 aa, Homo sapiens
  CDR3 for alpha chain variable domain of TCR clone 224401 (TRAV12-1, TRAJ30)
CVVNIGGRDDKIIF

SEQ ID NO: 448802 - protein, 15 aa, Homo sapiens
  CDR3 for beta chain variable domain of TCR clone 224401 (TRBV5-1, TRBJ2-6)
CASSLDPSGANVLTF

SEQ ID NO: 448803 - protein, 14 aa, Homo sapiens
  CDR3 for alpha chain variable domain of TCR clone 224402 (TRAV12-2, TRAJ17)
CSVLFKAAGNKLTF

SEQ ID NO: 448804 - protein, 17 aa, Homo sapiens
  CDR3 for beta chain variable domain of TCR clone 224402 (TRBV11-2, TRBJ2-1)
CASSLYPPGVEYNEQFF

SEQ ID NO: 448805 - protein, 20 aa, Homo sapiens
  CDR3 for alpha chain variable domain of TCR clone 224403 (TRAV1-1, TRAJ39)
CLLLPRCESSAYNAGDMLTF

SEQ ID NO: 448806 - protein, 13 aa, Homo sapiens
  CDR3 for beta chain variable domain of TCR clone 224403 (TRBV12-4, TRBJ1-5)
CASSPDRAQPQHF

SEQ ID NO: 448807 - protein, 14 aa, Homo sapiens
  CDR3 for alpha chain variable domain of TCR clone 224404 (TRAV1-2, TRAJ8)
CAVREDTGFQKLVF

SEQ ID NO: 448808 - protein, 14 aa, Homo sapiens
  CDR3 for beta chain variable domain of TCR clone 224404 (TRBV7-2, TRBJ2-1)
CASSPPGAPNEQFL

SEQ ID NO: 448809 - protein, 15 aa, Homo sapiens
  CDR3 for alpha chain variable domain of TCR clone 224405 (TRAV3, TRAJ5)
CAVRDRKTGRRALTF

SEQ ID NO: 448810 - protein, 14 aa, Homo sapiens
  CDR3 for beta chain variable domain of TCR clone 224405 (TRBV7-8, TRBJ2-7)
CASSPKTSFYEQYF

SEQ ID NO: 448811 - protein, 14 aa, Homo sapiens
  CDR3 for alpha chain variable domain of TCR clone 224406 (TRAV41, TRAJ54)
CAVRSNQGAQKRVF

SEQ ID NO: 448812 - protein, 15 aa, Homo sapiens
  CDR3 for beta chain variable domain of TCR clone 224406 (TRBV20-1, TRBJ2-7)
CSAESGTSGAYEQYF

SEQ ID NO: 448813 - protein, 16 aa, Homo sapiens
  CDR3 for alpha chain variable domain of TCR clone 224407 (TRAV3, TRAJ10)
CAVRDMRAGGGNQLTF

SEQ ID NO: 448814 - protein, 20 aa, Homo sapiens
  CDR3 for beta chain variable domain of TCR clone 224407 (TRBV11-3, TRBJ2-7)
CASSQRTSGSLRAVLRAGHQ

SEQ ID NO: 448815 - protein, 14 aa, Homo sapiens
  CDR3 for alpha chain variable domain of TCR clone 224408 (TRAV17, TRAJ45)
CATASGGGADGLTF

SEQ ID NO: 448816 - protein, 15 aa, Homo sapiens
  CDR3 for beta chain variable domain of TCR clone 224408 (TRBV11-2, TRBJ2-1)
CASSRNRGLMYDQFF

SEQ ID NO: 448817 - protein, 14 aa, Homo sapiens
  CDR3 for alpha chain variable domain of TCR clone 224409 (TRAV12-2, TRAJ15)
CATHTGQAGTALIF

SEQ ID NO: 448818 - protein, 17 aa, Homo sapiens
  CDR3 for beta chain variable domain of TCR clone 224409 (TRBV5-5, TRBJ1-2)
CASSLGSLDGQSEGYTF

SEQ ID NO: 448819 - protein, 15 aa, Homo sapiens
  CDR3 for alpha chain variable domain of TCR clone 224410 (TRAV23/DV6, TRAJ44)
CAARTLTGTASKLTF

SEQ ID NO: 448820 - protein, 16 aa, Homo sapiens
  CDR3 for beta chain variable domain of TCR clone 224410 (TRBV2, TRBJ2-7)
CASSEPWTGPSYEQYF

SEQ ID NO: 448821 - protein, 10 aa, Homo sapiens
  CDR3 for alpha chain variable domain of TCR clone 224411 (TRAV3, TRAJ30)
CAVREIEIIF

SEQ ID NO: 448822 - protein, 12 aa, Homo sapiens
  CDR3 for beta chain variable domain of TCR clone 224411 (TRBV20-1, TRBJ2-3)
CSADGSGDTQYF

SEQ ID NO: 448823 - protein, 16 aa, Homo sapiens
  CDR3 for alpha chain variable domain of TCR clone 224412 (TRAV30, TRAJ24)
CGTEIVDAGSWGKFQF

SEQ ID NO: 448824 - protein, 13 aa, Homo sapiens
  CDR3 for beta chain variable domain of TCR clone 224412 (TRBV11-2, TRBJ2-5)
CASSSTGEETQYF

SEQ ID NO: 448825 - protein, 14 aa, Homo sapiens
  CDR3 for alpha chain variable domain of TCR clone 224413 (TRAV12-3, TRAJ42)
CAMNYGGSQGNLIF

SEQ ID NO: 448826 - protein, 13 aa, Homo sapiens
  CDR3 for beta chain variable domain of TCR clone 224413 (TRBV2, TRBJ2-3)
CASILAGGQGQYF

SEQ ID NO: 448827 - protein, 16 aa, Homo sapiens
  CDR3 for alpha chain variable domain of TCR clone 224414 (TRAV12-2, TRAJ28)
CAVITNSGAGSYQLTF

SEQ ID NO: 448828 - protein, 13 aa, Homo sapiens
  CDR3 for beta chain variable domain of TCR clone 224414 (TRBV10-3, TRBJ2-7)
CASKLAVNYEQYF

SEQ ID NO: 448829 - protein, 13 aa, Homo sapiens
  CDR3 for alpha chain variable domain of TCR clone 224415 (TRAV17, TRAJ15)
CATDARAGTALIF

SEQ ID NO: 448830 - protein, 15 aa, Homo sapiens
  CDR3 for beta chain variable domain of TCR clone 224415 (TRBV20-1, TRBJ2-7)
RSARDRVSGMDEQYF

SEQ ID NO: 448831 - protein, 14 aa, Homo sapiens
  CDR3 for alpha chain variable domain of TCR clone 224416 (TRAV8-2, TRAJ37)
CVVSISGNTGKLLF

SEQ ID NO: 448832 - protein, 11 aa, Homo sapiens
  CDR3 for beta chain variable domain of TCR clone 224416 (TRBV12-4, TRBJ2-3)
CASTATDTQYF

SEQ ID NO: 448833 - protein, 13 aa, Homo sapiens
  CDR3 for alpha chain variable domain of TCR clone 224417 (TRAV12-1, TRAJ11)
CVVNQAGYSTLTF

SEQ ID NO: 448834 - protein, 14 aa, Homo sapiens
  CDR3 for beta chain variable domain of TCR clone 224417 (TRBV3-1, TRBJ2-5)
CASSQGPDQETQYF

SEQ ID NO: 448835 - protein, 13 aa, Homo sapiens
  CDR3 for alpha chain variable domain of TCR clone 224418 (TRAV27, TRAJ45)
CRSSGGGADGLTF

SEQ ID NO: 448836 - protein, 14 aa, Homo sapiens
  CDR3 for beta chain variable domain of TCR clone 224418 (TRBV2, TRBJ1-1)
CASRSGTMNTEAFF

SEQ ID NO: 448837 - protein, 17 aa, Homo sapiens
  CDR3 for alpha chain variable domain of TCR clone 224419 (TRAV3, TRAJ38)
CAVRDCLNAGNNRKLIW

SEQ ID NO: 448838 - protein, 12 aa, Homo sapiens
  CDR3 for beta chain variable domain of TCR clone 224419 (TRBV5-1, TRBJ2-7)
CASSLDSYEQYF

SEQ ID NO: 448839 - protein, 13 aa, Homo sapiens
  CDR3 for alpha chain variable domain of TCR clone 224420 (TRAV29/DV5, TRAJ44)
CAASTGTASKLTF

SEQ ID NO: 448840 - protein, 13 aa, Homo sapiens
  CDR3 for beta chain variable domain of TCR clone 224420 (TRBV19, TRBJ2-7)
CASRKAGGGEQYF

SEQ ID NO: 448841 - protein, 16 aa, Homo sapiens
  CDR3 for alpha chain variable domain of TCR clone 224421 (TRAV30, TRAJ24)
CGTEIVDADSWGKFQF

SEQ ID NO: 448842 - protein, 12 aa, Homo sapiens
  CDR3 for beta chain variable domain of TCR clone 224421 (TRBV6-3, TRBJ2-7)
CASSPTPYEQYF

SEQ ID NO: 448843 - protein, 15 aa, Homo sapiens
  CDR3 for alpha chain variable domain of TCR clone 224422 (TRAV3, TRAJ5)
CAVRDLDTGRGALTC

SEQ ID NO: 448844 - protein, 13 aa, Homo sapiens
  CDR3 for beta chain variable domain of TCR clone 224422 (TRBV12-4, TRBJ2-7)
CASSPTETYEQYF

SEQ ID NO: 448845 - protein, 14 aa, Homo sapiens
  CDR3 for alpha chain variable domain of TCR clone 224423 (TRAV12-1, TRAJ30)
CVVNIGGRDAKIIF

SEQ ID NO: 448846 - protein, 13 aa, Homo sapiens
  CDR3 for beta chain variable domain of TCR clone 224423 (TRBV12-5, TRBJ2-1)
CASGLGRGNEQFF

SEQ ID NO: 448847 - protein, 15 aa, Homo sapiens
  CDR3 for alpha chain variable domain of TCR clone 224424 (TRAV3, TRAJ3)
CAVRDGHSSASKIIF

SEQ ID NO: 448848 - protein, 16 aa, Homo sapiens
  CDR3 for beta chain variable domain of TCR clone 224424 (TRBV7-3, TRBJ2-2)
CASSLKRGTLSGELLF

SEQ ID NO: 448849 - protein, 13 aa, Homo sapiens
  CDR3 for alpha chain variable domain of TCR clone 224425 (TRAV36/DV7, TRAJ29)
CAVEPSGITPLVF

SEQ ID NO: 448850 - protein, 11 aa, Homo sapiens
  CDR3 for beta chain variable domain of TCR clone 224425 (TRBV19, TRBJ2-7)
CASGNSYEQYF

SEQ ID NO: 448851 - protein, 14 aa, Homo sapiens
  CDR3 for alpha chain variable domain of TCR clone 224426 (TRAV8-3, TRAJ4)
CAVGAAGGYNKLIF

SEQ ID NO: 448852 - protein, 11 aa, Homo sapiens
  CDR3 for beta chain variable domain of TCR clone 224426 (TRBV29-1, TRBJ1-4)
CSVSSGEKLFF

SEQ ID NO: 448853 - protein, 14 aa, Homo sapiens
  CDR3 for alpha chain variable domain of TCR clone 224427 (TRAV26-1, TRAJ38)
CIADNAGNKRKLIW

SEQ ID NO: 448854 - protein, 13 aa, Homo sapiens
  CDR3 for beta chain variable domain of TCR clone 224427 (TRBV2, TRBJ1-5)
CATAGPGNQPQHF

SEQ ID NO: 448855 - protein, 12 aa, Homo sapiens
  CDR3 for alpha chain variable domain of TCR clone 224428 (TRAV3, TRAJ20)
CAVRDPDYKLSY

SEQ ID NO: 448856 - protein, 13 aa, Homo sapiens
  CDR3 for beta chain variable domain of TCR clone 224428 (TRBV9, TRBJ2-1)
CASSVGQGGEQFF

SEQ ID NO: 448857 - protein, 17 aa, Homo sapiens
  CDR3 for alpha chain variable domain of TCR clone 224429 (TRAV12-3, TRAJ52)
CASPPFAGGTSYGKLTF

SEQ ID NO: 448858 - protein, 14 aa, Homo sapiens
  CDR3 for beta chain variable domain of TCR clone 224429 (TRBV4-1, TRBJ2-2)
CASSQAVNTGELFF

SEQ ID NO: 448859 - protein, 12 aa, Homo sapiens
  CDR3 for alpha chain variable domain of TCR clone 224430 (TRAV21, TRAJ43)
CSVSWNNNDMRF

SEQ ID NO: 448860 - protein, 15 aa, Homo sapiens
  CDR3 for beta chain variable domain of TCR clone 224430 (TRBV20-1, TRBJ2-1)
CSASPPSGGYNEQFF

SEQ ID NO: 448861 - protein, 16 aa, Homo sapiens
  CDR3 for alpha chain variable domain of TCR clone 224431 (TRAV14/DV4, TRAJ54)
CAMREGRIQGAQKLVF

SEQ ID NO: 448862 - protein, 15 aa, Homo sapiens
  CDR3 for beta chain variable domain of TCR clone 224431 (TRBV20-1, TRBJ2-7)
CSARDRVAGMDEQYF

SEQ ID NO: 448863 - protein, 11 aa, Homo sapiens
  CDR3 for alpha chain variable domain of TCR clone 224432 (TRAV3, TRAJ21)
CAVGNFDKLYF

SEQ ID NO: 448864 - protein, 17 aa, Homo sapiens
  CDR3 for beta chain variable domain of TCR clone 224432 (TRBV24-1, TRBJ2-1)
CATSDVSTSGTYNEQFF

SEQ ID NO: 448865 - protein, 11 aa, Homo sapiens
  CDR3 for alpha chain variable domain of TCR clone 224433 (TRAV4, TRAJ31)
CLVGDNARLMF

SEQ ID NO: 448866 - protein, 13 aa, Homo sapiens
  CDR3 for beta chain variable domain of TCR clone 224433 (TRBV19, TRBJ1-1)
CASSPSNGGEAFF

SEQ ID NO: 448867 - protein, 13 aa, Homo sapiens
  CDR3 for alpha chain variable domain of TCR clone 224434 (TRAV13-2, TRAJ48)
CAEMDFGNEKLTF

SEQ ID NO: 448868 - protein, 13 aa, Homo sapiens
  CDR3 for beta chain variable domain of TCR clone 224434 (TRBV15, TRBJ2-7)
CATSTTGHYEQYF

SEQ ID NO: 448869 - protein, 14 aa, Homo sapiens
  CDR3 for alpha chain variable domain of TCR clone 224435 (TRAV12-1, TRAJ3)
CGAARYSSASKIIF

SEQ ID NO: 448870 - protein, 15 aa, Homo sapiens
  CDR3 for beta chain variable domain of TCR clone 224435 (TRBV12-4, TRBJ2-5)
CASSPPTGLQETQYF

SEQ ID NO: 448871 - protein, 15 aa, Homo sapiens
  CDR3 for alpha chain variable domain of TCR clone 224436 (TRAV38-1, TRAJ37)
CAFIFGSGNTGKLIF

SEQ ID NO: 448872 - protein, 16 aa, Homo sapiens
  CDR3 for beta chain variable domain of TCR clone 224436 (TRBV19, TRBJ2-2)
CASRSPGTGATGELFF

SEQ ID NO: 448873 - protein, 12 aa, Homo sapiens
  CDR3 for alpha chain variable domain of TCR clone 224437 (TRAV12-2, TRAJ21)
CAVRYNCNKFYF

SEQ ID NO: 448874 - protein, 14 aa, Homo sapiens
  CDR3 for beta chain variable domain of TCR clone 224437 (TRBV28, TRBJ2-1)
CASSYYTAYNEQFF

SEQ ID NO: 448875 - protein, 14 aa, Homo sapiens
  CDR3 for alpha chain variable domain of TCR clone 224438 (TRAV12-3, TRAJ29)
CAMILISGNTPLVF

SEQ ID NO: 448876 - protein, 16 aa, Homo sapiens
  CDR3 for beta chain variable domain of TCR clone 224438 (TRBV28, TRBJ2-7)
CASSSGTSGRGYEQYF

SEQ ID NO: 448877 - protein, 11 aa, Homo sapiens
  CDR3 for alpha chain variable domain of TCR clone 224439 (TRAV35, TRAJ13)
VPLLGVTKVTF

SEQ ID NO: 448878 - protein, 17 aa, Homo sapiens
  CDR3 for beta chain variable domain of TCR clone 224439 (TRBV7-6, TRBJ2-5)
CASSPGLADPWGETQYF

SEQ ID NO: 448879 - protein, 14 aa, Homo sapiens
  CDR3 for alpha chain variable domain of TCR clone 224440 (TRAV8-3, TRAJ39)
CAVGVNNAGNMLTF

SEQ ID NO: 448880 - protein, 13 aa, Homo sapiens
  CDR3 for beta chain variable domain of TCR clone 224440 (TRBV3-1, TRBJ2-5)
CASSPVLSETQYF

SEQ ID NO: 448881 - protein, 13 aa, Homo sapiens
  CDR3 for alpha chain variable domain of TCR clone 224441 (TRAV35, TRAJ39)
CAGRNNAGNMLTF

SEQ ID NO: 448882 - protein, 14 aa, Homo sapiens
  CDR3 for beta chain variable domain of TCR clone 224441 (TRBV5-4, TRBJ2-1)
CASSLEGNYNEQFF

SEQ ID NO: 448883 - protein, 21 aa, Homo sapiens
  CDR3 for alpha chain variable domain of TCR clone 224442 (TRAV1-1, TRAJ6)
CAVRREEATYLHLEEEPALLF

SEQ ID NO: 448884 - protein, 15 aa, Homo sapiens
  CDR3 for beta chain variable domain of TCR clone 224442 (TRBV6-6, TRBJ2-1)
CATRQGVSSYNEQFV

SEQ ID NO: 448885 - protein, 16 aa, Homo sapiens
  CDR3 for alpha chain variable domain of TCR clone 224443 (TRAV30, TRAJ24)
CGTEIVDADSWGKFQF

SEQ ID NO: 448886 - protein, 14 aa, Homo sapiens
  CDR3 for beta chain variable domain of TCR clone 224443 (TRBV12-5, TRBJ2-5)
CASGSRTNQETQYL

SEQ ID NO: 448887 - protein, 18 aa, Homo sapiens
  CDR3 for alpha chain variable domain of TCR clone 224444 (TRAV21, TRAJ52)
CAVRPSPAGGTSYGKLTF

SEQ ID NO: 448888 - protein, 15 aa, Homo sapiens
  CDR3 for beta chain variable domain of TCR clone 224444 (TRBV28, TRBJ2-5)
CDSSSGRTIQETQYF

SEQ ID NO: 448889 - protein, 14 aa, Homo sapiens
  CDR3 for alpha chain variable domain of TCR clone 224445 (TRAV17, TRAJ22)
CATVLSGYARQLTF

SEQ ID NO: 448890 - protein, 14 aa, Homo sapiens
  CDR3 for beta chain variable domain of TCR clone 224445 (TRBV12-4, TRBJ2-5)
CASSLGDRGETQYF

SEQ ID NO: 448891 - protein, 16 aa, Homo sapiens
  CDR3 for alpha chain variable domain of TCR clone 224446 (TRAV4, TRAJ18)
CCVLLLGGSTLGRLYF

SEQ ID NO: 448892 - protein, 14 aa, Homo sapiens
  CDR3 for beta chain variable domain of TCR clone 224446 (TRBV18, TRBJ1-2)
CASSPAGRDYGYTF

SEQ ID NO: 448893 - protein, 15 aa, Homo sapiens
  CDR3 for alpha chain variable domain of TCR clone 224447 (TRAV26-1, TRAJ29)
CIVRVEGSGNTPLVF

SEQ ID NO: 448894 - protein, 14 aa, Homo sapiens
  CDR3 for beta chain variable domain of TCR clone 224447 (TRBV25-1, TRBJ1-1)
CASTHLGGNTEALF

SEQ ID NO: 448895 - protein, 15 aa, Homo sapiens
  CDR3 for alpha chain variable domain of TCR clone 224448 (TRAV17, TRAJ22)
CATVAPSGSARQLTF

SEQ ID NO: 448896 - protein, 16 aa, Homo sapiens
  CDR3 for beta chain variable domain of TCR clone 224448 (TRBV10-3, TRBJ2-7)
CAISADFADRHYEQFF

SEQ ID NO: 448897 - protein, 14 aa, Homo sapiens
  CDR3 for alpha chain variable domain of TCR clone 224449 (TRAV1-2, TRAJ16)
CAVNRISDGQKLLF

SEQ ID NO: 448898 - protein, 14 aa, Homo sapiens
  CDR3 for beta chain variable domain of TCR clone 224449 (TRBV23-1, TRBJ2-5)
CASSFLRSQETQYF

SEQ ID NO: 448899 - protein, 15 aa, Homo sapiens
  CDR3 for alpha chain variable domain of TCR clone 224450 (TRAV34, TRAJ38)
CGADFTPGNNRKLIW

SEQ ID NO: 448900 - protein, 16 aa, Homo sapiens
  CDR3 for beta chain variable domain of TCR clone 224450 (TRBV6-1, TRBJ2-3)
CASSELIGQGTDTQYF

SEQ ID NO: 448901 - protein, 15 aa, Homo sapiens
  CDR3 for alpha chain variable domain of TCR clone 224451 (TRAV8-3, TRAJ27)
CDVGPSKTNAGKSTF

SEQ ID NO: 448902 - protein, 13 aa, Homo sapiens
  CDR3 for beta chain variable domain of TCR clone 224451 (TRBV20-1, TRBJ1-1)
CSAPLGGGTEAFF

SEQ ID NO: 448903 - protein, 15 aa, Homo sapiens
  CDR3 for alpha chain variable domain of TCR clone 224452 (TRAV3, TRAJ10)
CAVRDGTGGGNKTTF

SEQ ID NO: 448904 - protein, 15 aa, Homo sapiens
  CDR3 for beta chain variable domain of TCR clone 224452 (TRBV4-2, TRBJ1-4)
CASSLVQREVEKLFF

SEQ ID NO: 448905 - protein, 11 aa, Homo sapiens
  CDR3 for alpha chain variable domain of TCR clone 224453 (TRAV13-1, TRAJ5)
SAPKGRRALTF

SEQ ID NO: 448906 - protein, 15 aa, Homo sapiens
  CDR3 for beta chain variable domain of TCR clone 224453 (TRBV11-2, TRBJ1-1)
CASSSRSSLLLSVDK

SEQ ID NO: 448907 - protein, 16 aa, Homo sapiens
  CDR3 for alpha chain variable domain of TCR clone 224454 (TRAV16, TRAJ4)
CALSRMFYGGYNKLIF

SEQ ID NO: 448908 - protein, 19 aa, Homo sapiens
  CDR3 for beta chain variable domain of TCR clone 224454 (TRBV28, TRBJ2-7)
CASSYSGTSRLGWVYEQYF

SEQ ID NO: 448909 - protein, 15 aa, Homo sapiens
  CDR3 for alpha chain variable domain of TCR clone 224455 (TRAV20, TRAJ4)
CAVTMFSGGYNKLIF

SEQ ID NO: 448910 - protein, 14 aa, Homo sapiens
  CDR3 for beta chain variable domain of TCR clone 224455 (TRBV25-1, TRBJ1-1)
CASTHLGGNTEAFF

SEQ ID NO: 448911 - protein, 12 aa, Homo sapiens
  CDR3 for alpha chain variable domain of TCR clone 224456 (TRAV17, TRAJ49)
CATATTGNQFYF

SEQ ID NO: 448912 - protein, 18 aa, Homo sapiens
  CDR3 for beta chain variable domain of TCR clone 224456 (TRBV11-2, TRBJ2-6)
CASSLNPLLGTGANVLTF

SEQ ID NO: 448913 - protein, 14 aa, Homo sapiens
  CDR3 for alpha chain variable domain of TCR clone 224457 (TRAV27, TRAJ23)
CAGLSYNQGGKLIF

SEQ ID NO: 448914 - protein, 15 aa, Homo sapiens
  CDR3 for beta chain variable domain of TCR clone 224457 (TRBV19, TRBJ2-2)
CASSRNRGVTGELFF

SEQ ID NO: 448915 - protein, 13 aa, Homo sapiens
  CDR3 for alpha chain variable domain of TCR clone 224458 (TRAV12-1, TRAJ36)
CGDAQTGANNLFF

SEQ ID NO: 448916 - protein, 18 aa, Homo sapiens
  CDR3 for beta chain variable domain of TCR clone 224458 (TRBV11-2, TRBJ2-3)
CASSLGGASRGAPNTQYF

SEQ ID NO: 448917 - protein, 10 aa, Homo sapiens
  CDR3 for alpha chain variable domain of TCR clone 224459 (TRAV36/DV7, TRAJ31)
CAVGEARLMF

SEQ ID NO: 448918 - protein, 14 aa, Homo sapiens
  CDR3 for beta chain variable domain of TCR clone 224459 (TRBV7-2, TRBJ2-7)
CASRSQGAAYEQYF

SEQ ID NO: 448919 - protein, 14 aa, Homo sapiens
  CDR3 for alpha chain variable domain of TCR clone 224460 (TRAV1-2, TRAJ16)
CAVNRFSDGQKLLF

SEQ ID NO: 448920 - protein, 14 aa, Homo sapiens
  CDR3 for beta chain variable domain of TCR clone 224460 (TRBV25-1, TRBJ1-1)
CASTHLVGNTEAFF

SEQ ID NO: 448921 - protein, 15 aa, Homo sapiens
  CDR3 for alpha chain variable domain of TCR clone 224461 (TRAV13-1, TRAJ17)
CAASIERAAGNKLTF

SEQ ID NO: 448922 - protein, 13 aa, Homo sapiens
  CDR3 for beta chain variable domain of TCR clone 224461 (TRBV10-3, TRBJ2-7)
CASKLAVNHEQYF

SEQ ID NO: 448923 - protein, 13 aa, Homo sapiens
  CDR3 for alpha chain variable domain of TCR clone 224462 (TRAV12-3, TRAJ7)
CAMTPYGNNRLAF

SEQ ID NO: 448924 - protein, 12 aa, Homo sapiens
  CDR3 for beta chain variable domain of TCR clone 224462 (TRBV19, TRBJ1-5)
CASSIAQQPQHF

SEQ ID NO: 448925 - protein, 16 aa, Homo sapiens
  CDR3 for alpha chain variable domain of TCR clone 224463 (TRAV30, TRAJ24)
CGTEIVDADSWGKFQV

SEQ ID NO: 448926 - protein, 14 aa, Homo sapiens
  CDR3 for beta chain variable domain of TCR clone 224463 (TRBV7-8, TRBJ2-3)
CASSLEAGTDTQYF

SEQ ID NO: 448927 - protein, 15 aa, Homo sapiens
  CDR3 for alpha chain variable domain of TCR clone 224464 (TRAV38-1, TRAJ45)
CAFMKGGGGADGLIV

SEQ ID NO: 448928 - protein, 13 aa, Homo sapiens
  CDR3 for beta chain variable domain of TCR clone 224464 (TRBV7-9, TRBJ1-2)
CASSLKQNYGYTF

SEQ ID NO: 448929 - protein, 15 aa, Homo sapiens
  CDR3 for alpha chain variable domain of TCR clone 224465 (TRAV30, TRAJ32)
CGTEILGGATNNLIF

SEQ ID NO: 448930 - protein, 17 aa, Homo sapiens
  CDR3 for beta chain variable domain of TCR clone 224465 (TRBV5-4, TRBJ2-1)
CASSSAGGRGPYNEQFF

SEQ ID NO: 448931 - protein, 12 aa, Homo sapiens
  CDR3 for alpha chain variable domain of TCR clone 224466 (TRAV2, TRAJ9)
CAVGAGGFKTIF

SEQ ID NO: 448932 - protein, 14 aa, Homo sapiens
  CDR3 for beta chain variable domain of TCR clone 224466 (TRBV6-1, TRBJ1-3)
CASVQGGAGNTIYF

SEQ ID NO: 448933 - protein, 14 aa, Homo sapiens
  CDR3 for alpha chain variable domain of TCR clone 224467 (TRAV16, TRAJ32)
CSKRYRGATNKLIF

SEQ ID NO: 448934 - protein, 12 aa, Homo sapiens
  CDR3 for beta chain variable domain of TCR clone 224467 (TRBV7-9, TRBJ2-7)
CATRTDAYEQYF

SEQ ID NO: 448935 - protein, 12 aa, Homo sapiens
  CDR3 for alpha chain variable domain of TCR clone 224468 (TRAV3, TRAJ20)
CAVRDPDYKLSF

SEQ ID NO: 448936 - protein, 14 aa, Homo sapiens
  CDR3 for beta chain variable domain of TCR clone 224468 (TRBV5-1, TRBJ2-5)
CASSLAGKQETQYF

SEQ ID NO: 448937 - protein, 16 aa, Homo sapiens
  CDR3 for alpha chain variable domain of TCR clone 224469 (TRAV12-3, TRAJ53)
CAMSPGSGGSHYKLTF

SEQ ID NO: 448938 - protein, 11 aa, Homo sapiens
  CDR3 for beta chain variable domain of TCR clone 224469 (TRBV29-1, TRBJ2-5)
RSEDRTGTQYF

SEQ ID NO: 448939 - protein, 13 aa, Homo sapiens
  CDR3 for alpha chain variable domain of TCR clone 224470 (TRAV38-2/DV8, TRAJ34)
CAYRNYNTDKLIF

SEQ ID NO: 448940 - protein, 15 aa, Homo sapiens
  CDR3 for beta chain variable domain of TCR clone 224470 (TRBV20-1, TRBJ2-5)
CSGEGTGGLQETQFF

SEQ ID NO: 448941 - protein, 18 aa, Homo sapiens
  CDR3 for alpha chain variable domain of TCR clone 224471 (TRAV21, TRAJ53)
CAVKGGENSGGRNYKLTF

SEQ ID NO: 448942 - protein, 14 aa, Homo sapiens
  CDR3 for beta chain variable domain of TCR clone 224471 (TRBV11-3, TRBJ1-5)
LTGDRLYYNQPQHF

SEQ ID NO: 448943 - protein, 10 aa, Homo sapiens
  CDR3 for alpha chain variable domain of TCR clone 224472 (TRAV26-1, TRAJ22)
CIAGSRQLTF

SEQ ID NO: 448944 - protein, 16 aa, Homo sapiens
  CDR3 for beta chain variable domain of TCR clone 224472 (TRBV11-2, TRBJ2-1)
CASARGSYSHHNEQFF

SEQ ID NO: 448945 - protein, 15 aa, Homo sapiens
  CDR3 for alpha chain variable domain of TCR clone 224473 (TRAV8-4, TRAJ37)
CAVTYGSSNTGKLTF

SEQ ID NO: 448946 - protein, 15 aa, Homo sapiens
  CDR3 for beta chain variable domain of TCR clone 224473 (TRBV19, TRBJ1-6)
CASSTQGAVGSPLYF

SEQ ID NO: 448947 - protein, 14 aa, Homo sapiens
  CDR3 for alpha chain variable domain of TCR clone 224474 (TRAV12-3, TRAJ10)
SHLPLTGGGNKLTF

SEQ ID NO: 448948 - protein, 14 aa, Homo sapiens
  CDR3 for beta chain variable domain of TCR clone 224474 (TRBV18, TRBJ2-7)
CASSPGGGAYEQYF

SEQ ID NO: 448949 - protein, 14 aa, Homo sapiens
  CDR3 for alpha chain variable domain of TCR clone 224475 (TRAV1-2, TRAJ8)
CAVREDTGFRKLVF

SEQ ID NO: 448950 - protein, 13 aa, Homo sapiens
  CDR3 for beta chain variable domain of TCR clone 224475 (TRBV12-4, TRBJ2-5)
CASSPGTEETQYF

SEQ ID NO: 448951 - protein, 14 aa, Homo sapiens
  CDR3 for alpha chain variable domain of TCR clone 224476 (TRAV2, TRAJ9)
CSVEDRSGGVKTIF

SEQ ID NO: 448952 - protein, 15 aa, Homo sapiens
  CDR3 for beta chain variable domain of TCR clone 224476 (TRBV2, TRBJ2-1)
CASSELAGSYNEQFF

SEQ ID NO: 448953 - protein, 12 aa, Homo sapiens
  CDR3 for alpha chain variable domain of TCR clone 224477 (TRAV13-1, TRAJ21)
CAAKEGFNKFYF

SEQ ID NO: 448954 - protein, 13 aa, Homo sapiens
  CDR3 for beta chain variable domain of TCR clone 224477 (TRBV7-9, TRBJ2-1)
CASSLGTVNEQFI

SEQ ID NO: 448955 - protein, 12 aa, Homo sapiens
  CDR3 for alpha chain variable domain of TCR clone 224478 (TRAV25, TRAJ20)
CAGRSNDYKISF

SEQ ID NO: 448956 - protein, 15 aa, Homo sapiens
  CDR3 for beta chain variable domain of TCR clone 224478 (TRBV7-6, TRBJ2-7)
CASSGRRDTFGEQYF

SEQ ID NO: 448957 - protein, 11 aa, Homo sapiens
  CDR3 for alpha chain variable domain of TCR clone 224479 (TRAV13-1, TRAJ39)
CASHAGNMLTF

SEQ ID NO: 448958 - protein, 18 aa, Homo sapiens
  CDR3 for beta chain variable domain of TCR clone 224479 (TRBV18, TRBJ2-3)
CASSYTSGAAGGTDTQYF

SEQ ID NO: 448959 - protein, 11 aa, Homo sapiens
  CDR3 for alpha chain variable domain of TCR clone 224480 (TRAV26-1, TRAJ27)
CIDPNAGKSTF

SEQ ID NO: 448960 - protein, 11 aa, Homo sapiens
  CDR3 for beta chain variable domain of TCR clone 224480 (TRBV12-4, TRBJ2-3)
CASTATDTQYF

SEQ ID NO: 448961 - protein, 13 aa, Homo sapiens
  CDR3 for alpha chain variable domain of TCR clone 224481 (TRAV8-3, TRAJ36)
CAVGATGANNLSF

SEQ ID NO: 448962 - protein, 13 aa, Homo sapiens
  CDR3 for beta chain variable domain of TCR clone 224481 (TRBV12-4, TRBJ1-2)
CASSLRQGKGYTF

SEQ ID NO: 448963 - protein, 14 aa, Homo sapiens
  CDR3 for alpha chain variable domain of TCR clone 224482 (TRAV2, TRAJ37)
CAVEGSSNTGKLIF

SEQ ID NO: 448964 - protein, 13 aa, Homo sapiens
  CDR3 for beta chain variable domain of TCR clone 224482 (TRBV19, TRBJ1-2)
CASSVPGQDGYTF

SEQ ID NO: 448965 - protein, 16 aa, Homo sapiens
  CDR3 for alpha chain variable domain of TCR clone 224483 (TRAV27, TRAJ13)
CAGAKSASGGYQQVTF

SEQ ID NO: 448966 - protein, 15 aa, Homo sapiens
  CDR3 for beta chain variable domain of TCR clone 224483 (TRBV29-1, TRBJ2-1)
CSVGRHALFYNEQFF

SEQ ID NO: 448967 - protein, 13 aa, Homo sapiens
  CDR3 for alpha chain variable domain of TCR clone 224484 (TRAV27, TRAJ6)
CAGGTRGSYIPTF

SEQ ID NO: 448968 - protein, 14 aa, Homo sapiens
  CDR3 for beta chain variable domain of TCR clone 224484 (TRBV6-3, TRBJ1-1)
CASSYQRRVTEAFF

SEQ ID NO: 448969 - protein, 15 aa, Homo sapiens
  CDR3 for alpha chain variable domain of TCR clone 224485 (TRAV12-1, TRAJ31)
CVVNPARDNNARLMF

SEQ ID NO: 448970 - protein, 13 aa, Homo sapiens
  CDR3 for beta chain variable domain of TCR clone 224485 (TRBV10-3, TRBJ2-7)
CASKLAVNYEQYF

SEQ ID NO: 448971 - protein, 12 aa, Homo sapiens
  CDR3 for alpha chain variable domain of TCR clone 224486 (TRAV2, TRAJ34)
CAVERNTDKLIF

SEQ ID NO: 448972 - protein, 14 aa, Homo sapiens
  CDR3 for beta chain variable domain of TCR clone 224486 (TRBV7-9, TRBJ2-1)
CASSDKSGYNEQFF

SEQ ID NO: 448973 - protein, 14 aa, Homo sapiens
  CDR3 for alpha chain variable domain of TCR clone 224487 (TRAV12-3, TRAJ42)
CAMNYGGSQGNLIF

SEQ ID NO: 448974 - protein, 13 aa, Homo sapiens
  CDR3 for beta chain variable domain of TCR clone 224487 (TRBV4-1, TRBJ2-7)
CASSQGQAYEQYF

SEQ ID NO: 448975 - protein, 13 aa, Homo sapiens
  CDR3 for alpha chain variable domain of TCR clone 224488 (TRAV23/DV6, TRAJ12)
CSPRVDSSYKLIF

SEQ ID NO: 448976 - protein, 12 aa, Homo sapiens
  CDR3 for beta chain variable domain of TCR clone 224488 (TRBV7-8, TRBJ2-7)
CASSLGDREQYF

SEQ ID NO: 448977 - protein, 13 aa, Homo sapiens
  CDR3 for alpha chain variable domain of TCR clone 224489 (TRAV12-2, TRAJ12)
CAVNWDSSYKLIF

SEQ ID NO: 448978 - protein, 16 aa, Homo sapiens
  CDR3 for beta chain variable domain of TCR clone 224489 (TRBV4-3, TRBJ2-7)
CASSHSWTGETYEQYF

SEQ ID NO: 448979 - protein, 13 aa, Homo sapiens
  CDR3 for alpha chain variable domain of TCR clone 224490 (TRAV12-3, TRAJ47)
CAMKKEYGNKLVF

SEQ ID NO: 448980 - protein, 16 aa, Homo sapiens
  CDR3 for beta chain variable domain of TCR clone 224490 (TRBV3-1, TRBJ2-6)
GASSLTWVSGANVLTF

SEQ ID NO: 448981 - protein, 11 aa, Homo sapiens
  CDR3 for alpha chain variable domain of TCR clone 224491 (TRAV12-2, TRAJ43)
CASPIGNDMRF

SEQ ID NO: 448982 - protein, 14 aa, Homo sapiens
  CDR3 for beta chain variable domain of TCR clone 224491 (TRBV7-8, TRBJ2-1)
CATERERSYNEQFF

SEQ ID NO: 448983 - protein, 14 aa, Homo sapiens
  CDR3 for alpha chain variable domain of TCR clone 224492 (TRAV2, TRAJ9)
CAVEDRSGGFKTIF

SEQ ID NO: 448984 - protein, 14 aa, Homo sapiens
  CDR3 for beta chain variable domain of TCR clone 224492 (TRBV4-3, TRBJ1-1)
CASSQGWNPARAFF

SEQ ID NO: 448985 - protein, 14 aa, Homo sapiens
  CDR3 for alpha chain variable domain of TCR clone 224493 (TRAV26-1, TRAJ34)
CIVRVAYKPDKLIF

SEQ ID NO: 448986 - protein, 15 aa, Homo sapiens
  CDR3 for beta chain variable domain of TCR clone 224493 (TRBV7-9, TRBJ1-4)
CASSRTGGFNEKLFF

SEQ ID NO: 448987 - protein, 15 aa, Homo sapiens
  CDR3 for alpha chain variable domain of TCR clone 224494 (TRAV4, TRAJ39)
CLVGPNNNAGNMLTF

SEQ ID NO: 448988 - protein, 15 aa, Homo sapiens
  CDR3 for beta chain variable domain of TCR clone 224494 (TRBV7-2, TRBJ2-2)
CASSLYGGTTGELFF

SEQ ID NO: 448989 - protein, 14 aa, Homo sapiens
  CDR3 for alpha chain variable domain of TCR clone 224495 (TRAV26-1, TRAJ38)
CIADNAGNNLKLIW

SEQ ID NO: 448990 - protein, 15 aa, Homo sapiens
  CDR3 for beta chain variable domain of TCR clone 224495 (TRBV27, TRBJ2-1)
CASSNGGGSSNEQFF

SEQ ID NO: 448991 - protein, 14 aa, Homo sapiens
  CDR3 for alpha chain variable domain of TCR clone 224496 (TRAV2, TRAJ41)
CAVGTSNSGYALNF

SEQ ID NO: 448992 - protein, 13 aa, Homo sapiens
  CDR3 for beta chain variable domain of TCR clone 224496 (TRBV4-1, TRBJ2-1)
CTSSQEVQYEQFF

SEQ ID NO: 448993 - protein, 15 aa, Homo sapiens
  CDR3 for alpha chain variable domain of TCR clone 224497 (TRAV8-3, TRAJ7)
CAVGSISYGNNRLAF

SEQ ID NO: 448994 - protein, 13 aa, Homo sapiens
  CDR3 for beta chain variable domain of TCR clone 224497 (TRBV19, TRBJ1-3)
CASRLSLGNTIYF

SEQ ID NO: 448995 - protein, 13 aa, Homo sapiens
  CDR3 for alpha chain variable domain of TCR clone 224498 (TRAV8-3, TRAJ28)
CAVGAVGSYQLTF

SEQ ID NO: 448996 - protein, 14 aa, Homo sapiens
  CDR3 for beta chain variable domain of TCR clone 224498 (TRBV25-1, TRBJ1-1)
CARTHLGGNTEAFF

SEQ ID NO: 448997 - protein, 13 aa, Homo sapiens
  CDR3 for alpha chain variable domain of TCR clone 224499 (TRAV39, TRAJ48)
CVAVNFGNEKLTF

SEQ ID NO: 448998 - protein, 12 aa, Homo sapiens
  CDR3 for beta chain variable domain of TCR clone 224499 (TRBV5-5, TRBJ2-5)
CASSYFGETQYF

SEQ ID NO: 448999 - protein, 14 aa, Homo sapiens
  CDR3 for alpha chain variable domain of TCR clone 224500 (TRAV12-3, TRAJ10)
SHLPLTGGGNKLTF

SEQ ID NO: 449000 - protein, 16 aa, Homo sapiens
  CDR3 for beta chain variable domain of TCR clone 224500 (TRBV25-1, TRBJ2-3)
CASSLRGFSGTDTQYF

SEQ ID NO: 449001 - protein, 14 aa, Homo sapiens
  CDR3 for alpha chain variable domain of TCR clone 224501 (TRAV12-2, TRAJ13)
CAVKNTGGYQKVTF

SEQ ID NO: 449002 - protein, 13 aa, Homo sapiens
  CDR3 for beta chain variable domain of TCR clone 224501 (TRBV20-1, TRBJ1-1)
CSARLGQGTEAFF

SEQ ID NO: 449003 - protein, 10 aa, Homo sapiens
  CDR3 for alpha chain variable domain of TCR clone 224502 (TRAV1-2, TRAJ20)
CLPNDYKLSF

SEQ ID NO: 449004 - protein, 16 aa, Homo sapiens
  CDR3 for beta chain variable domain of TCR clone 224502 (TRBV20-1, TRBJ1-1)
CSARDRMGGMNTEAFF

SEQ ID NO: 449005 - protein, 18 aa, Homo sapiens
  CDR3 for alpha chain variable domain of TCR clone 224503 (TRAV29/DV5, TRAJ52)
CAAGFRGAGGTSYGKLTF

SEQ ID NO: 449006 - protein, 19 aa, Homo sapiens
  CDR3 for beta chain variable domain of TCR clone 224503 (TRBV19, TRBJ2-2)
CASTRPGLAGGRVTGELFF

SEQ ID NO: 449007 - protein, 13 aa, Homo sapiens
  CDR3 for alpha chain variable domain of TCR clone 224504 (TRAV27, TRAJ49)
CAPRPYTGNQFYF

SEQ ID NO: 449008 - protein, 13 aa, Homo sapiens
  CDR3 for beta chain variable domain of TCR clone 224504 (TRBV6-5, TRBJ2-5)
CASSPQGGETQYF

SEQ ID NO: 449009 - protein, 17 aa, Homo sapiens
  CDR3 for alpha chain variable domain of TCR clone 224505 (TRAV3, TRAJ6)
CAVRDGTRAGGSYIPTF

SEQ ID NO: 449010 - protein, 13 aa, Homo sapiens
  CDR3 for beta chain variable domain of TCR clone 224505 (TRBV4-1, TRBJ2-2)
CASSQENTGELFF

SEQ ID NO: 449011 - protein, 12 aa, Homo sapiens
  CDR3 for alpha chain variable domain of TCR clone 224506 (TRAV8-3, TRAJ26)
CAGDNYGQNFVF

SEQ ID NO: 449012 - protein, 13 aa, Homo sapiens
  CDR3 for beta chain variable domain of TCR clone 224506 (TRBV28, TRBJ1-2)
CASSPGNRNGYTF

SEQ ID NO: 449013 - protein, 15 aa, Homo sapiens
  CDR3 for alpha chain variable domain of TCR clone 224507 (TRAV12-3, TRAJ6)
CAMSAASGGSYIPTF

SEQ ID NO: 449014 - protein, 13 aa, Homo sapiens
  CDR3 for beta chain variable domain of TCR clone 224507 (TRBV20-1, TRBJ1-2)
CSASTERIYGFTF

SEQ ID NO: 449015 - protein, 11 aa, Homo sapiens
  CDR3 for alpha chain variable domain of TCR clone 224508 (TRAV3, TRAJ21)
CAVGNFNKFYF

SEQ ID NO: 449016 - protein, 17 aa, Homo sapiens
  CDR3 for beta chain variable domain of TCR clone 224508 (TRBV7-6, TRBJ2-5)
CASSSPQAGDPSETQYF

SEQ ID NO: 449017 - protein, 13 aa, Homo sapiens
  CDR3 for alpha chain variable domain of TCR clone 224509 (TRAV29/DV5, TRAJ31)
SAASRNNNARLMF

SEQ ID NO: 449018 - protein, 12 aa, Homo sapiens
  CDR3 for beta chain variable domain of TCR clone 224509 (TRBV14, TRBJ2-7)
CASSSLKGEQYF

SEQ ID NO: 449019 - protein, 12 aa, Homo sapiens
  CDR3 for alpha chain variable domain of TCR clone 224510 (TRAV12-3, TRAJ17)
CAVTLTGNELTF

SEQ ID NO: 449020 - protein, 15 aa, Homo sapiens
  CDR3 for beta chain variable domain of TCR clone 224510 (TRBV20-1, TRBJ2-7)
CSARDRVSGMDEQYF

SEQ ID NO: 449021 - protein, 16 aa, Homo sapiens
  CDR3 for alpha chain variable domain of TCR clone 224511 (TRAV12-3, TRAJ53)
CALSPGSGGSNYKLTF

SEQ ID NO: 449022 - protein, 13 aa, Homo sapiens
  CDR3 for beta chain variable domain of TCR clone 224511 (TRBV7-2, TRBJ2-5)
CASSQTSVETQYF

SEQ ID NO: 449023 - protein, 13 aa, Homo sapiens
  CDR3 for alpha chain variable domain of TCR clone 224512 (TRAV36/DV7, TRAJ7)
CAGTRYGNYRLAF

SEQ ID NO: 449024 - protein, 14 aa, Homo sapiens
  CDR3 for beta chain variable domain of TCR clone 224512 (TRBV19, TRBJ2-1)
CASPTFVLSGEQFF

SEQ ID NO: 449025 - protein, 14 aa, Homo sapiens
  CDR3 for alpha chain variable domain of TCR clone 224513 (TRAV12-2, TRAJ45)
CAVYSGGGADGLTF

SEQ ID NO: 449026 - protein, 15 aa, Homo sapiens
  CDR3 for beta chain variable domain of TCR clone 224513 (TRBV5-1, TRBJ2-1)
CASSLEGLAANEQFF

SEQ ID NO: 449027 - protein, 13 aa, Homo sapiens
  CDR3 for alpha chain variable domain of TCR clone 224514 (TRAV13-1, TRAJ8)
CAASVRGFQKLVF

SEQ ID NO: 449028 - protein, 14 aa, Homo sapiens
  CDR3 for beta chain variable domain of TCR clone 224514 (TRBV7-2, TRBJ2-1)
CASSLVQGRNEQFF

SEQ ID NO: 449029 - protein, 14 aa, Homo sapiens
  CDR3 for alpha chain variable domain of TCR clone 224515 (TRAV12-3, TRAJ10)
SHLPLTGGGNKLTF

SEQ ID NO: 449030 - protein, 16 aa, Homo sapiens
  CDR3 for beta chain variable domain of TCR clone 224515 (TRBV7-2, TRBJ2-7)
CASSFPLAGGPLEQYF

SEQ ID NO: 449031 - protein, 16 aa, Homo sapiens
  CDR3 for alpha chain variable domain of TCR clone 224516 (TRAV6, TRAJ37)
CALDIFGSSNTGKLIF

SEQ ID NO: 449032 - protein, 14 aa, Homo sapiens
  CDR3 for beta chain variable domain of TCR clone 224516 (TRBV5-7, TRBJ2-7)
CASSLRAATYEQYF

SEQ ID NO: 449033 - protein, 17 aa, Homo sapiens
  CDR3 for alpha chain variable domain of TCR clone 224517 (TRAV8-3, TRAJ34)
CAIPGKLIFGTGTRLQV

SEQ ID NO: 449034 - protein, 12 aa, Homo sapiens
  CDR3 for beta chain variable domain of TCR clone 224517 (TRBV11-2, TRBJ2-5)
CASSLGQETQYF

SEQ ID NO: 449035 - protein, 18 aa, Homo sapiens
  CDR3 for alpha chain variable domain of TCR clone 224518 (TRAV21, TRAJ52)
CAVRPSPAVGTSYGKLTF

SEQ ID NO: 449036 - protein, 16 aa, Homo sapiens
  CDR3 for beta chain variable domain of TCR clone 224518 (TRBV13, TRBJ2-3)
CQQPLQGSGGRNTQYF

SEQ ID NO: 449037 - protein, 15 aa, Homo sapiens
  CDR3 for alpha chain variable domain of TCR clone 224519 (TRAV8-2, TRAJ16)
GVVSDGFSDGQKLLF

SEQ ID NO: 449038 - protein, 12 aa, Homo sapiens
  CDR3 for beta chain variable domain of TCR clone 224519 (TRBV12-4, TRBJ2-7)
CASSLGGYEQYF

SEQ ID NO: 449039 - protein, 11 aa, Homo sapiens
  CDR3 for alpha chain variable domain of TCR clone 224520 (TRAV13-1, TRAJ6)
CATLGSYIPTF

SEQ ID NO: 449040 - protein, 13 aa, Homo sapiens
  CDR3 for beta chain variable domain of TCR clone 224520 (TRBV6-6, TRBJ2-1)
CASSLHQGGEQFF

SEQ ID NO: 449041 - protein, 11 aa, Homo sapiens
  CDR3 for alpha chain variable domain of TCR clone 224521 (TRAV21, TRAJ23)
CAPQRRGKLIF

SEQ ID NO: 449042 - protein, 14 aa, Homo sapiens
  CDR3 for beta chain variable domain of TCR clone 224521 (TRBV12-4, TRBJ1-1)
CASTSTGHDTEAFF

SEQ ID NO: 449043 - protein, 12 aa, Homo sapiens
  CDR3 for alpha chain variable domain of TCR clone 224522 (TRAV25, TRAJ30)
CAGKNRDDKSIF

SEQ ID NO: 449044 - protein, 11 aa, Homo sapiens
  CDR3 for beta chain variable domain of TCR clone 224522 (TRBV12-4, TRBJ2-7)
CATPEKGEQYF

SEQ ID NO: 449045 - protein, 12 aa, Homo sapiens
  CDR3 for alpha chain variable domain of TCR clone 224523 (TRAV3, TRAJ39)
CAVIEWSNMVTF

SEQ ID NO: 449046 - protein, 14 aa, Homo sapiens
  CDR3 for beta chain variable domain of TCR clone 224523 (TRBV7-8, TRBJ2-3)
CASSFPDGQDTQYF

SEQ ID NO: 449047 - protein, 14 aa, Homo sapiens
  CDR3 for alpha chain variable domain of TCR clone 224524 (TRAV2, TRAJ39)
CAVEGDNAGNMLTF

SEQ ID NO: 449048 - protein, 16 aa, Homo sapiens
  CDR3 for beta chain variable domain of TCR clone 224524 (TRBV28, TRBJ2-4)
CTSVPALRARGNIQYF

SEQ ID NO: 449049 - protein, 14 aa, Homo sapiens
  CDR3 for alpha chain variable domain of TCR clone 224525 (TRAV1-2, TRAJ16)
CAVNRFSACQKLLF

SEQ ID NO: 449050 - protein, 15 aa, Homo sapiens
  CDR3 for beta chain variable domain of TCR clone 224525 (TRBV7-9, TRBJ1-6)
CASSSPGRGNSPLHF

SEQ ID NO: 449051 - protein, 12 aa, Homo sapiens
  CDR3 for alpha chain variable domain of TCR clone 224526 (TRAV30, TRAJ43)
CGTEERGNDMRS

SEQ ID NO: 449052 - protein, 18 aa, Homo sapiens
  CDR3 for beta chain variable domain of TCR clone 224526 (TRBV7-9, TRBJ2-7)
CASSLTTSGSRTWYEQYF

SEQ ID NO: 449053 - protein, 12 aa, Homo sapiens
  CDR3 for alpha chain variable domain of TCR clone 224527 (TRAV21, TRAJ33)
CAKMDSNYQLIW

SEQ ID NO: 449054 - protein, 16 aa, Homo sapiens
  CDR3 for beta chain variable domain of TCR clone 224527 (TRBV6-1, TRBJ2-1)
CSSILRQGSSYNEQFF

SEQ ID NO: 449055 - protein, 13 aa, Homo sapiens
  CDR3 for alpha chain variable domain of TCR clone 224528 (TRAV4, TRAJ34)
CLVCDYNTDKLIF

SEQ ID NO: 449056 - protein, 23 aa, Homo sapiens
  CDR3 for beta chain variable domain of TCR clone 224528 (TRBV4-2, TRBJ2-3)
CASSQDPPRASSISGGRGDTQYF

SEQ ID NO: 449057 - protein, 15 aa, Homo sapiens
  CDR3 for alpha chain variable domain of TCR clone 224529 (TRAV14/DV4, TRAJ26)
CAMREGQNYGQNFGF

SEQ ID NO: 449058 - protein, 14 aa, Homo sapiens
  CDR3 for beta chain variable domain of TCR clone 224529 (TRBV19, TRBJ1-1)
CASTGHRLNTEAFF

SEQ ID NO: 449059 - protein, 12 aa, Homo sapiens
  CDR3 for alpha chain variable domain of TCR clone 224530 (TRAV12-1, TRAJ40)
CVFYSGTYKYIF

SEQ ID NO: 449060 - protein, 12 aa, Homo sapiens
  CDR3 for beta chain variable domain of TCR clone 224530 (TRBV7-9, TRBJ2-7)
CASSFGSYEQYF

SEQ ID NO: 449061 - protein, 13 aa, Homo sapiens
  CDR3 for alpha chain variable domain of TCR clone 224531 (TRAV3, TRAJ27)
CAVRPLGAGKSTF

SEQ ID NO: 449062 - protein, 17 aa, Homo sapiens
  CDR3 for beta chain variable domain of TCR clone 224531 (TRBV18, TRBJ1-5)
CASSPTMGQGTNQPQHF

SEQ ID NO: 449063 - protein, 16 aa, Homo sapiens
  CDR3 for alpha chain variable domain of TCR clone 224532 (TRAV3, TRAJ4)
CAVRPSPYGGYNKLIF

SEQ ID NO: 449064 - protein, 12 aa, Homo sapiens
  CDR3 for beta chain variable domain of TCR clone 224532 (TRBV7-9, TRBJ2-7)
CASSQGVYEQYF

SEQ ID NO: 449065 - protein, 15 aa, Homo sapiens
  CDR3 for alpha chain variable domain of TCR clone 224533 (TRAV8-4, TRAJ3)
CAVTGENLVQRCFQD

SEQ ID NO: 449066 - protein, 16 aa, Homo sapiens
  CDR3 for beta chain variable domain of TCR clone 224533 (TRBV4-2, TRBJ1-1)
CASSQAGFGMNTEAFF

SEQ ID NO: 449067 - protein, 12 aa, Homo sapiens
  CDR3 for alpha chain variable domain of TCR clone 224534 (TRAV17, TRAJ26)
CATVGYGQNFVF

SEQ ID NO: 449068 - protein, 16 aa, Homo sapiens
  CDR3 for beta chain variable domain of TCR clone 224534 (TRBV7-9, TRBJ2-1)
CASSSPQGTTRNEQFF

SEQ ID NO: 449069 - protein, 15 aa, Homo sapiens
  CDR3 for alpha chain variable domain of TCR clone 224535 (TRAV27, TRAJ53)
CAGGDSGGSNYKLTF

SEQ ID NO: 449070 - protein, 15 aa, Homo sapiens
  CDR3 for beta chain variable domain of TCR clone 224535 (TRBV11-3, TRBJ2-2)
CASSLGGRPTGELFF

SEQ ID NO: 449071 - protein, 14 aa, Homo sapiens
  CDR3 for alpha chain variable domain of TCR clone 224536 (TRAV20, TRAJ21)
CPYPTTSTNFTLDL

SEQ ID NO: 449072 - protein, 16 aa, Homo sapiens
  CDR3 for beta chain variable domain of TCR clone 224536 (TRBV5-1, TRBJ2-2)
CASSFGDRPNTGDLFF

SEQ ID NO: 449073 - protein, 14 aa, Homo sapiens
  CDR3 for alpha chain variable domain of TCR clone 224537 (TRAV2, TRAJ9)
CAVEDRSGCFKTIF

SEQ ID NO: 449074 - protein, 13 aa, Homo sapiens
  CDR3 for beta chain variable domain of TCR clone 224537 (TRBV19, TRBJ1-2)
CASSVPGQDGYTF

SEQ ID NO: 449075 - protein, 15 aa, Homo sapiens
  CDR3 for alpha chain variable domain of TCR clone 224538 (TRAV21, TRAJ53)
CATLNSGGSNYKLTF

SEQ ID NO: 449076 - protein, 18 aa, Homo sapiens
  CDR3 for beta chain variable domain of TCR clone 224538 (TRBV12-4, TRBJ2-2)
CASSLVAGTRGRTGELFF

SEQ ID NO: 449077 - protein, 15 aa, Homo sapiens
  CDR3 for alpha chain variable domain of TCR clone 224539 (TRAV3, TRAJ22)
CAVRDRGGSARQLTF

SEQ ID NO: 449078 - protein, 12 aa, Homo sapiens
  CDR3 for beta chain variable domain of TCR clone 224539 (TRBV6-1, TRBJ2-7)
CASSDYSYEQYF

SEQ ID NO: 449079 - protein, 13 aa, Homo sapiens
  CDR3 for alpha chain variable domain of TCR clone 224540 (TRAV13-2, TRAJ22)
CRDPSVSARQLTL

SEQ ID NO: 449080 - protein, 15 aa, Homo sapiens
  CDR3 for beta chain variable domain of TCR clone 224540 (TRBV11-3, TRBJ2-1)
CASSLAGQTYNEQFF

SEQ ID NO: 449081 - protein, 14 aa, Homo sapiens
  CDR3 for alpha chain variable domain of TCR clone 224541 (TRAV16, TRAJ54)
CALSLIQGAQKLVV

SEQ ID NO: 449082 - protein, 17 aa, Homo sapiens
  CDR3 for beta chain variable domain of TCR clone 224541 (TRBV11-2, TRBJ2-4)
CASSSVGPGGHRNSQYF

SEQ ID NO: 449083 - protein, 13 aa, Homo sapiens
  CDR3 for alpha chain variable domain of TCR clone 224542 (TRAV8-3, TRAJ36)
CAVGANGANNFFF

SEQ ID NO: 449084 - protein, 15 aa, Homo sapiens
  CDR3 for beta chain variable domain of TCR clone 224542 (TRBV7-2, TRBJ1-2)
CASSPRAGWNYGYTF

SEQ ID NO: 449085 - protein, 13 aa, Homo sapiens
  CDR3 for alpha chain variable domain of TCR clone 224543 (TRAV12-2, TRAJ45)
CAVNRGGADGLTF

SEQ ID NO: 449086 - protein, 16 aa, Homo sapiens
  CDR3 for beta chain variable domain of TCR clone 224543 (TRBV2, TRBJ1-1)
CASSTTLGGASTEAFF

SEQ ID NO: 449087 - protein, 15 aa, Homo sapiens
  CDR3 for alpha chain variable domain of TCR clone 224544 (TRAV13-1, TRAJ8)
CAASIPNTGFQKLVF

SEQ ID NO: 449088 - protein, 13 aa, Homo sapiens
  CDR3 for beta chain variable domain of TCR clone 224544 (TRBV5-4, TRBJ1-1)
CACSFQVNTEAFF

SEQ ID NO: 449089 - protein, 10 aa, Homo sapiens
  CDR3 for alpha chain variable domain of TCR clone 224545 (TRAV26-1, TRAJ22)
RSGSARQLTF

SEQ ID NO: 449090 - protein, 14 aa, Homo sapiens
  CDR3 for beta chain variable domain of TCR clone 224545 (TRBV7-2, TRBJ2-7)
CASSPKTSFYEQYF

SEQ ID NO: 449091 - protein, 13 aa, Homo sapiens
  CDR3 for alpha chain variable domain of TCR clone 224546 (TRAV2, TRAJ40)
CAVVTSGTYKYIL

SEQ ID NO: 449092 - protein, 14 aa, Homo sapiens
  CDR3 for beta chain variable domain of TCR clone 224546 (TRBV11-3, TRBJ2-3)
CSLKDGREGDTQYF

SEQ ID NO: 449093 - protein, 16 aa, Homo sapiens
  CDR3 for alpha chain variable domain of TCR clone 224547 (TRAV38-2/DV8, TRAJ45)
CAYTTTSGGGADGLTF

SEQ ID NO: 449094 - protein, 15 aa, Homo sapiens
  CDR3 for beta chain variable domain of TCR clone 224547 (TRBV7-9, TRBJ1-4)
CASSARTGGNEKLFF

SEQ ID NO: 449095 - protein, 16 aa, Homo sapiens
  CDR3 for alpha chain variable domain of TCR clone 224548 (TRAV30, TRAJ24)
CGTEIVDADSWGKFQF

SEQ ID NO: 449096 - protein, 18 aa, Homo sapiens
  CDR3 for beta chain variable domain of TCR clone 224548 (TRBV7-9, TRBJ2-5)
CASSLVGGEETVLRARHA

SEQ ID NO: 449097 - protein, 14 aa, Homo sapiens
  CDR3 for alpha chain variable domain of TCR clone 224549 (TRAV21, TRAJ35)
CAGMPIGFGNGLHC

SEQ ID NO: 449098 - protein, 12 aa, Homo sapiens
  CDR3 for beta chain variable domain of TCR clone 224549 (TRBV7-9, TRBJ2-7)
CASSIKREEQYF

SEQ ID NO: 449099 - protein, 13 aa, Homo sapiens
  CDR3 for alpha chain variable domain of TCR clone 224550 (TRAV1-2, TRAJ31)
CAVRGYNNARLMF

SEQ ID NO: 449100 - protein, 15 aa, Homo sapiens
  CDR3 for beta chain variable domain of TCR clone 224550 (TRBV5-7, TRBJ2-7)
CASSLGPGRGHEQSF

SEQ ID NO: 449101 - protein, 15 aa, Homo sapiens
  CDR3 for alpha chain variable domain of TCR clone 224551 (TRAV29/DV5, TRAJ57)
CAASLLRGGSEKLVF

SEQ ID NO: 449102 - protein, 17 aa, Homo sapiens
  CDR3 for beta chain variable domain of TCR clone 224551 (TRBV5-1, TRBJ1-3)
CASSLEGDLETPYILER

SEQ ID NO: 449103 - protein, 10 aa, Homo sapiens
  CDR3 for alpha chain variable domain of TCR clone 224552 (TRAV23/DV6, TRAJ42)
CAASSTNYGG

SEQ ID NO: 449104 - protein, 18 aa, Homo sapiens
  CDR3 for beta chain variable domain of TCR clone 224552 (TRBV20-1, TRBJ2-6)
CSAETTPTHGSGANVLTF

SEQ ID NO: 449105 - protein, 11 aa, Homo sapiens
  CDR3 for alpha chain variable domain of TCR clone 224553 (TRAV1-2, TRAJ11)
CAVRGYSTLTF

SEQ ID NO: 449106 - protein, 15 aa, Homo sapiens
  CDR3 for beta chain variable domain of TCR clone 224553 (TRBV3-1, TRBJ2-2)
CASSQDWTRAGELFF

SEQ ID NO: 449107 - protein, 10 aa, Homo sapiens
  CDR3 for alpha chain variable domain of TCR clone 224554 (TRAV13-2, TRAJ43)
STYNNNDMRF

SEQ ID NO: 449108 - protein, 15 aa, Homo sapiens
  CDR3 for beta chain variable domain of TCR clone 224554 (TRBV7-9, TRBJ2-2)
CASGPLDTFPGELFF

SEQ ID NO: 449109 - protein, 12 aa, Homo sapiens
  CDR3 for alpha chain variable domain of TCR clone 224555 (TRAV8-3, TRAJ41)
CAVGALGYALNF

SEQ ID NO: 449110 - protein, 16 aa, Homo sapiens
  CDR3 for beta chain variable domain of TCR clone 224555 (TRBV7-6, TRBJ2-3)
CARSDSRGEGTDTQYF

SEQ ID NO: 449111 - protein, 12 aa, Homo sapiens
  CDR3 for alpha chain variable domain of TCR clone 224556 (TRAV12-3, TRAJ17)
CAMTLTGNKITF

SEQ ID NO: 449112 - protein, 15 aa, Homo sapiens
  CDR3 for beta chain variable domain of TCR clone 224556 (TRBV20-1, TRBJ2-7)
CSARDRVYGMDEQYF

SEQ ID NO: 449113 - protein, 15 aa, Homo sapiens
  CDR3 for alpha chain variable domain of TCR clone 224557 (TRAV26-1, TRAJ40)
CIVRVTTSGTYKYIF

SEQ ID NO: 449114 - protein, 18 aa, Homo sapiens
  CDR3 for beta chain variable domain of TCR clone 224557 (TRBV25-1, TRBJ1-2)
CASSGLQNGQGLIFGYTF

SEQ ID NO: 449115 - protein, 14 aa, Homo sapiens
  CDR3 for alpha chain variable domain of TCR clone 224558 (TRAV3, TRAJ9)
CAVRLNTGGFKTIF

SEQ ID NO: 449116 - protein, 17 aa, Homo sapiens
  CDR3 for beta chain variable domain of TCR clone 224558 (TRBV20-1, TRBJ2-1)
CSASSSGLAGSYNEQFF

SEQ ID NO: 449117 - protein, 20 aa, Homo sapiens
  CDR3 for alpha chain variable domain of TCR clone 224559 (TRAV12-3, TRAJ41)
SLFIRDSLPSDSATPEALNF

SEQ ID NO: 449118 - protein, 13 aa, Homo sapiens
  CDR3 for beta chain variable domain of TCR clone 224559 (TRBV10-3, TRBJ2-3)
CAIRDTGADTQYF

SEQ ID NO: 449119 - protein, 12 aa, Homo sapiens
  CDR3 for alpha chain variable domain of TCR clone 224560 (TRAV21, TRAJ11)
CAATSGYSTLTF

SEQ ID NO: 449120 - protein, 13 aa, Homo sapiens
  CDR3 for beta chain variable domain of TCR clone 224560 (TRBV11-2, TRBJ1-1)
CASSLGRNTEAFF

SEQ ID NO: 449121 - protein, 12 aa, Homo sapiens
  CDR3 for alpha chain variable domain of TCR clone 224561 (TRAV21, TRAJ29)
CCEDSGNTPLVF

SEQ ID NO: 449122 - protein, 15 aa, Homo sapiens
  CDR3 for beta chain variable domain of TCR clone 224561 (TRBV7-2, TRBJ2-3)
CASSSTGLETDTQYF

SEQ ID NO: 449123 - protein, 12 aa, Homo sapiens
  CDR3 for alpha chain variable domain of TCR clone 224562 (TRAV12-1, TRAJ6)
CVVSERSYIPTF

SEQ ID NO: 449124 - protein, 13 aa, Homo sapiens
  CDR3 for beta chain variable domain of TCR clone 224562 (TRBV10-3, TRBJ1-2)
CAISERDGYGYTF

SEQ ID NO: 449125 - protein, 11 aa, Homo sapiens
  CDR3 for alpha chain variable domain of TCR clone 224563 (TRAV20, TRAJ34)
CTRDNTDKLIV

SEQ ID NO: 449126 - protein, 15 aa, Homo sapiens
  CDR3 for beta chain variable domain of TCR clone 224563 (TRBV2, TRBJ2-1)
CASSVTSEGTDEQFF

SEQ ID NO: 449127 - protein, 12 aa, Homo sapiens
  CDR3 for alpha chain variable domain of TCR clone 224564 (TRAV3, TRAJ43)
CAVRDPNNDMRF

SEQ ID NO: 449128 - protein, 12 aa, Homo sapiens
  CDR3 for beta chain variable domain of TCR clone 224564 (TRBV12-4, TRBJ2-7)
CASRLGGYEQYF

SEQ ID NO: 449129 - protein, 14 aa, Homo sapiens
  CDR3 for alpha chain variable domain of TCR clone 224565 (TRAV12-2, TRAJ17)
CAVNIKAAVNKLTF

SEQ ID NO: 449130 - protein, 16 aa, Homo sapiens
  CDR3 for beta chain variable domain of TCR clone 224565 (TRBV20-1, TRBJ2-6)
CSASSQGYDGANVLTF

SEQ ID NO: 449131 - protein, 14 aa, Homo sapiens
  CDR3 for alpha chain variable domain of TCR clone 224566 (TRAV8-4, TRAJ16)
CAVSPVGRWPEAAL

SEQ ID NO: 449132 - protein, 15 aa, Homo sapiens
  CDR3 for beta chain variable domain of TCR clone 224566 (TRBV11-3, TRBJ2-7)
CASSPRPASSYEQYF

SEQ ID NO: 449133 - protein, 14 aa, Homo sapiens
  CDR3 for alpha chain variable domain of TCR clone 224567 (TRAV1-2, TRAJ16)
CAVNRFSAGQKLLF

SEQ ID NO: 449134 - protein, 15 aa, Homo sapiens
  CDR3 for beta chain variable domain of TCR clone 224567 (TRBV7-9, TRBJ1-6)
CASSSTGRGNSPLHF

SEQ ID NO: 449135 - protein, 14 aa, Homo sapiens
  CDR3 for alpha chain variable domain of TCR clone 224568 (TRAV12-2, TRAJ41)
CAVNRANSGYALNF

SEQ ID NO: 449136 - protein, 13 aa, Homo sapiens
  CDR3 for beta chain variable domain of TCR clone 224568 (TRBV7-9, TRBJ1-2)
CASSLKQNYGYTC

SEQ ID NO: 449137 - protein, 15 aa, Homo sapiens
  CDR3 for alpha chain variable domain of TCR clone 224569 (TRAV12-2, TRAJ57)
CAVSRGQGGSEKRVF

SEQ ID NO: 449138 - protein, 15 aa, Homo sapiens
  CDR3 for beta chain variable domain of TCR clone 224569 (TRBV11-2, TRBJ1-6)
CASTGFGTAVSPLHF

SEQ ID NO: 449139 - protein, 17 aa, Homo sapiens
  CDR3 for alpha chain variable domain of TCR clone 224570 (TRAV26-1, TRAJ46)
IASSASEKKSSGDKLTF

SEQ ID NO: 449140 - protein, 16 aa, Homo sapiens
  CDR3 for beta chain variable domain of TCR clone 224570 (TRBV27, TRBJ2-2)
CASSFRGLVRTGELFF

SEQ ID NO: 449141 - protein, 17 aa, Homo sapiens
  CDR3 for alpha chain variable domain of TCR clone 224571 (TRAV1-2, TRAJ9)
CLLPLCCLKSGGFKTIF

SEQ ID NO: 449142 - protein, 13 aa, Homo sapiens
  CDR3 for beta chain variable domain of TCR clone 224571 (TRBV19, TRBJ1-2)
CASSVPGQDGYTF

SEQ ID NO: 449143 - protein, 14 aa, Homo sapiens
  CDR3 for alpha chain variable domain of TCR clone 224572 (TRAV1-2, TRAJ8)
CAVREDTGFQKLVF

SEQ ID NO: 449144 - protein, 15 aa, Homo sapiens
  CDR3 for beta chain variable domain of TCR clone 224572 (TRBV7-9, TRBJ1-6)
CASSSPGRGKSPLHF

SEQ ID NO: 449145 - protein, 11 aa, Homo sapiens
  CDR3 for alpha chain variable domain of TCR clone 224573 (TRAV17, TRAJ36)
CAPTGANDLFF

SEQ ID NO: 449146 - protein, 12 aa, Homo sapiens
  CDR3 for beta chain variable domain of TCR clone 224573 (TRBV29-1, TRBJ2-3)
CSVTGGADTQYF

SEQ ID NO: 449147 - protein, 12 aa, Homo sapiens
  CDR3 for alpha chain variable domain of TCR clone 224574 (TRAV13-1, TRAJ17)
CAARTAGNKLTF

SEQ ID NO: 449148 - protein, 14 aa, Homo sapiens
  CDR3 for beta chain variable domain of TCR clone 224574 (TRBV19, TRBJ2-1)
CASPTFVLSGEQFF

SEQ ID NO: 449149 - protein, 20 aa, Homo sapiens
  CDR3 for alpha chain variable domain of TCR clone 224575 (TRAV12-3, TRAJ41)
SLFIRDSQPSDSATPEALNS

SEQ ID NO: 449150 - protein, 14 aa, Homo sapiens
  CDR3 for beta chain variable domain of TCR clone 224575 (TRBV11-2, TRBJ2-5)
CASSRTGGIETQYF

SEQ ID NO: 449151 - protein, 14 aa, Homo sapiens
  CDR3 for alpha chain variable domain of TCR clone 224576 (TRAV2, TRAJ20)
CAVEDGTNDYKLSF

SEQ ID NO: 449152 - protein, 13 aa, Homo sapiens
  CDR3 for beta chain variable domain of TCR clone 224576 (TRBV7-2, TRBJ1-1)
CASSRNTSTEAFF

SEQ ID NO: 449153 - protein, 13 aa, Homo sapiens
  CDR3 for alpha chain variable domain of TCR clone 224577 (TRAV12-1, TRAJ42)
CGGVGGSQGNLIF

SEQ ID NO: 449154 - protein, 15 aa, Homo sapiens
  CDR3 for beta chain variable domain of TCR clone 224577 (TRBV7-9, TRBJ2-7)
CASSLALAEAYEQYF

SEQ ID NO: 449155 - protein, 13 aa, Homo sapiens
  CDR3 for alpha chain variable domain of TCR clone 224578 (TRAV35, TRAJ42)
CAGFPGSQGNLIF

SEQ ID NO: 449156 - protein, 12 aa, Homo sapiens
  CDR3 for beta chain variable domain of TCR clone 224578 (TRBV7-2, TRBJ1-6)
CASSLSSSPLHY

SEQ ID NO: 449157 - protein, 15 aa, Homo sapiens
  CDR3 for alpha chain variable domain of TCR clone 224579 (TRAV17, TRAJ23)
CATDAEDNQGGKLIF

SEQ ID NO: 449158 - protein, 11 aa, Homo sapiens
  CDR3 for beta chain variable domain of TCR clone 224579 (TRBV2, TRBJ2-1)
CKREGYNEQFF

SEQ ID NO: 449159 - protein, 17 aa, Homo sapiens
  CDR3 for alpha chain variable domain of TCR clone 224580 (TRAV3, TRAJ6)
CAVRDGPRAGGSHIPPF

SEQ ID NO: 449160 - protein, 14 aa, Homo sapiens
  CDR3 for beta chain variable domain of TCR clone 224580 (TRBV7-2, TRBJ2-7)
CASSPKTSFYEQYF

SEQ ID NO: 449161 - protein, 13 aa, Homo sapiens
  CDR3 for alpha chain variable domain of TCR clone 224581 (TRAV13-1, TRAJ15)
CAVLYQAGTALIF

SEQ ID NO: 449162 - protein, 16 aa, Homo sapiens
  CDR3 for beta chain variable domain of TCR clone 224581 (TRBV5-5, TRBJ1-4)
CASSLVAALLGEKLFF

SEQ ID NO: 449163 - protein, 17 aa, Homo sapiens
  CDR3 for alpha chain variable domain of TCR clone 224582 (TRAV3, TRAJ12)
CAVRDGGRMDSSYKLIF

SEQ ID NO: 449164 - protein, 17 aa, Homo sapiens
  CDR3 for beta chain variable domain of TCR clone 224582 (TRBV7-3, TRBJ2-3)
RASSLMKRMRGADTQYF

SEQ ID NO: 449165 - protein, 14 aa, Homo sapiens
  CDR3 for alpha chain variable domain of TCR clone 224583 (TRAV13-1, TRAJ35)
CAASKGGFGNVLHC

SEQ ID NO: 449166 - protein, 16 aa, Homo sapiens
  CDR3 for beta chain variable domain of TCR clone 224583 (TRBV2, TRBJ2-3)
CASSTSVEGVTDTQYF

SEQ ID NO: 449167 - protein, 14 aa, Homo sapiens
  CDR3 for alpha chain variable domain of TCR clone 224584 (TRAV12-2, TRAJ40)
CAVKIPSGTYKYTF

SEQ ID NO: 449168 - protein, 14 aa, Homo sapiens
  CDR3 for beta chain variable domain of TCR clone 224584 (TRBV20-1, TRBJ1-1)
CSAQARIGGTEAFF

SEQ ID NO: 449169 - protein, 12 aa, Homo sapiens
  CDR3 for alpha chain variable domain of TCR clone 224585 (TRAV12-3, TRAJ17)
CAMTLTGSKLTF

SEQ ID NO: 449170 - protein, 13 aa, Homo sapiens
  CDR3 for beta chain variable domain of TCR clone 224585 (TRBV7-3, TRBJ1-1)
CASSQDWGAEAFF

SEQ ID NO: 449171 - protein, 14 aa, Homo sapiens
  CDR3 for alpha chain variable domain of TCR clone 224586 (TRAV3, TRAJ48)
CAVRLSFGNETLTF

SEQ ID NO: 449172 - protein, 13 aa, Homo sapiens
  CDR3 for beta chain variable domain of TCR clone 224586 (TRBV10-3, TRBJ2-7)
CASKLAVNYEQYF

SEQ ID NO: 449173 - protein, 14 aa, Homo sapiens
  CDR3 for alpha chain variable domain of TCR clone 224587 (TRAV1-1, TRAJ27)
YAVIYNTNAGKSTF

SEQ ID NO: 449174 - protein, 15 aa, Homo sapiens
  CDR3 for beta chain variable domain of TCR clone 224587 (TRBV7-2, TRBJ2-1)
CASSSGLAGGNEQFF

SEQ ID NO: 449175 - protein, 14 aa, Homo sapiens
  CDR3 for alpha chain variable domain of TCR clone 224588 (TRAV3, TRAJ9)
CAVRLNTGGFKTIF

SEQ ID NO: 449176 - protein, 12 aa, Homo sapiens
  CDR3 for beta chain variable domain of TCR clone 224588 (TRBV28, TRBJ2-3)
CASSLYRDTQYF

SEQ ID NO: 449177 - protein, 13 aa, Homo sapiens
  CDR3 for alpha chain variable domain of TCR clone 224589 (TRAV12-3, TRAJ35)
CAMAIGFGNVLHF

SEQ ID NO: 449178 - protein, 15 aa, Homo sapiens
  CDR3 for beta chain variable domain of TCR clone 224589 (TRBV20-1, TRBJ2-1)
CSARGSGTDYNEQFF

SEQ ID NO: 449179 - protein, 11 aa, Homo sapiens
  CDR3 for alpha chain variable domain of TCR clone 224590 (TRAV2, TRAJ13)
CASGGYQKVTF

SEQ ID NO: 449180 - protein, 17 aa, Homo sapiens
  CDR3 for beta chain variable domain of TCR clone 224590 (TRBV4-1, TRBJ2-3)
CASSQGYVSGGTDTQYF

SEQ ID NO: 449181 - protein, 15 aa, Homo sapiens
  CDR3 for alpha chain variable domain of TCR clone 224591 (TRAV13-1, TRAJ36)
CAASIRQTGANNLFF

SEQ ID NO: 449182 - protein, 14 aa, Homo sapiens
  CDR3 for beta chain variable domain of TCR clone 224591 (TRBV6-1, TRBJ1-3)
CARVQGGGGNTIYF

SEQ ID NO: 449183 - protein, 14 aa, Homo sapiens
  CDR3 for alpha chain variable domain of TCR clone 224592 (TRAV12-3, TRAJ12)
CAMSALDSSYKLIF

SEQ ID NO: 449184 - protein, 20 aa, Homo sapiens
  CDR3 for beta chain variable domain of TCR clone 224592 (TRBV28, TRBJ2-1)
CASTPIGRSPGLAGGNEQFF

SEQ ID NO: 449185 - protein, 15 aa, Homo sapiens
  CDR3 for alpha chain variable domain of TCR clone 224593 (TRAV12-1, TRAJ45)
CVVLSGGGGADGLTV

SEQ ID NO: 449186 - protein, 12 aa, Homo sapiens
  CDR3 for beta chain variable domain of TCR clone 224593 (TRBV12-5, TRBJ2-5)
CASGQGVETQCF

SEQ ID NO: 449187 - protein, 14 aa, Homo sapiens
  CDR3 for alpha chain variable domain of TCR clone 224594 (TRAV8-3, TRAJ4)
CSGGAAGGYNKLIF

SEQ ID NO: 449188 - protein, 17 aa, Homo sapiens
  CDR3 for beta chain variable domain of TCR clone 224594 (TRBV13, TRBJ2-3)
CASSLSRVAGGRNTQYF

SEQ ID NO: 449189 - protein, 16 aa, Homo sapiens
  CDR3 for alpha chain variable domain of TCR clone 224595 (TRAV13-1, TRAJ45)
CAARGSRKGGADGLTF

SEQ ID NO: 449190 - protein, 16 aa, Homo sapiens
  CDR3 for beta chain variable domain of TCR clone 224595 (TRBV5-1, TRBJ2-7)
CASSLEGLAGLYEQYF

SEQ ID NO: 449191 - protein, 14 aa, Homo sapiens
  CDR3 for alpha chain variable domain of TCR clone 224596 (TRAV17, TRAJ15)
CATGPNQAGTALIF

SEQ ID NO: 449192 - protein, 13 aa, Homo sapiens
  CDR3 for beta chain variable domain of TCR clone 224596 (TRBV2, TRBJ1-5)
CATAGPGNQPQHF

SEQ ID NO: 449193 - protein, 13 aa, Homo sapiens
  CDR3 for alpha chain variable domain of TCR clone 224597 (TRAV12-1, TRAJ39)
CVALNNAGNMLTF

SEQ ID NO: 449194 - protein, 13 aa, Homo sapiens
  CDR3 for beta chain variable domain of TCR clone 224597 (TRBV18, TRBJ1-1)
CASSPETKPEAFF

SEQ ID NO: 449195 - protein, 14 aa, Homo sapiens
  CDR3 for alpha chain variable domain of TCR clone 224598 (TRAV26-1, TRAJ39)
CIVRGSRAGNMLTF

SEQ ID NO: 449196 - protein, 15 aa, Homo sapiens
  CDR3 for beta chain variable domain of TCR clone 224598 (TRBV7-9, TRBJ1-5)
CASSQGHQPNQPRHF

SEQ ID NO: 449197 - protein, 13 aa, Homo sapiens
  CDR3 for alpha chain variable domain of TCR clone 224599 (TRAV3, TRAJ21)
CAVREPDFNKFYF

SEQ ID NO: 449198 - protein, 16 aa, Homo sapiens
  CDR3 for beta chain variable domain of TCR clone 224599 (TRBV20-1, TRBJ2-1)
CSARDSLGAVYNEQFF

SEQ ID NO: 449199 - protein, 15 aa, Homo sapiens
  CDR3 for alpha chain variable domain of TCR clone 224600 (TRAV2, TRAJ22)
CAVPSRGGSARQLTF

SEQ ID NO: 449200 - protein, 17 aa, Homo sapiens
  CDR3 for beta chain variable domain of TCR clone 224600 (TRBV4-2, TRBJ1-1)
CASTQFGGGSGNTEAFF

SEQ ID NO: 449201 - protein, 19 aa, Homo sapiens
  CDR3 for alpha chain variable domain of TCR clone 224601 (TRAV26-1, TRAJ52)
CIVRAHRNAGGTSYGKMTF

SEQ ID NO: 449202 - protein, 13 aa, Homo sapiens
  CDR3 for beta chain variable domain of TCR clone 224601 (TRBV19, TRBJ2-7)
CASRKAGGSEQYF

SEQ ID NO: 449203 - protein, 18 aa, Homo sapiens
  CDR3 for alpha chain variable domain of TCR clone 224602 (TRAV21, TRAJ52)
CAVRPSPPGGTSYRKLTF

SEQ ID NO: 449204 - protein, 17 aa, Homo sapiens
  CDR3 for beta chain variable domain of TCR clone 224602 (TRBV13, TRBJ2-3)
CASSLSRVAGGRNTQYF

SEQ ID NO: 449205 - protein, 14 aa, Homo sapiens
  CDR3 for alpha chain variable domain of TCR clone 224603 (TRAV1-2, TRAJ8)
CAVREDTGFQKLVF

SEQ ID NO: 449206 - protein, 16 aa, Homo sapiens
  CDR3 for beta chain variable domain of TCR clone 224603 (TRBV4-2, TRBJ2-7)
CASSQEGLANSYEQYF

SEQ ID NO: 449207 - protein, 15 aa, Homo sapiens
  CDR3 for alpha chain variable domain of TCR clone 224604 (TRAV27, TRAJ38)
CAARRNAGNNRKLIW

SEQ ID NO: 449208 - protein, 15 aa, Homo sapiens
  CDR3 for beta chain variable domain of TCR clone 224604 (TRBV19, TRBJ1-1)
CASSKTGSTNTEAFF

SEQ ID NO: 449209 - protein, 12 aa, Homo sapiens
  CDR3 for alpha chain variable domain of TCR clone 224605 (TRAV22, TRAJ7)
FAASYGNNRLAF

SEQ ID NO: 449210 - protein, 16 aa, Homo sapiens
  CDR3 for beta chain variable domain of TCR clone 224605 (TRBV11-2, TRBJ2-7)
CASSPTTGGVSYEQYF

SEQ ID NO: 449211 - protein, 13 aa, Homo sapiens
  CDR3 for alpha chain variable domain of TCR clone 224606 (TRAV12-2, TRAJ47)
CAVFMEYGNNLVF

SEQ ID NO: 449212 - protein, 14 aa, Homo sapiens
  CDR3 for beta chain variable domain of TCR clone 224606 (TRBV4-1, TRBJ1-5)
CASSQGPTNQPQHF

SEQ ID NO: 449213 - protein, 12 aa, Homo sapiens
  CDR3 for alpha chain variable domain of TCR clone 224607 (TRAV12-3, TRAJ17)
CAMTLTGNKLTF

SEQ ID NO: 449214 - protein, 13 aa, Homo sapiens
  CDR3 for beta chain variable domain of TCR clone 224607 (TRBV7-9, TRBJ2-1)
CASSLDVGNEQFF

SEQ ID NO: 449215 - protein, 14 aa, Homo sapiens
  CDR3 for alpha chain variable domain of TCR clone 224608 (TRAV13-1, TRAJ39)
CAASYNNAGNMLTF

SEQ ID NO: 449216 - protein, 14 aa, Homo sapiens
  CDR3 for beta chain variable domain of TCR clone 224608 (TRBV7-2, TRBJ2-7)
CASRSQGAAYEQYF

SEQ ID NO: 449217 - protein, 14 aa, Homo sapiens
  CDR3 for alpha chain variable domain of TCR clone 224609 (TRAV8-2, TRAJ4)
CVVSPSGGYNELIF

SEQ ID NO: 449218 - protein, 14 aa, Homo sapiens
  CDR3 for beta chain variable domain of TCR clone 224609 (TRBV12-4, TRBJ1-1)
CASSLGTGGTEAFF

SEQ ID NO: 449219 - protein, 12 aa, Homo sapiens
  CDR3 for alpha chain variable domain of TCR clone 224610 (TRAV13-1, TRAJ48)
CAANFGNEKLTF

SEQ ID NO: 449220 - protein, 15 aa, Homo sapiens
  CDR3 for beta chain variable domain of TCR clone 224610 (TRBV2, TRBJ2-1)
CASSELAGSYNEQFF

SEQ ID NO: 449221 - protein, 18 aa, Homo sapiens
  CDR3 for alpha chain variable domain of TCR clone 224611 (TRAV13-1, TRAJ52)
CAAKNPNARGTSYGKLTF

SEQ ID NO: 449222 - protein, 18 aa, Homo sapiens
  CDR3 for beta chain variable domain of TCR clone 224611 (TRBV4-1, TRBJ1-4)
CASSPRTGGAWTNEKLFF

SEQ ID NO: 449223 - protein, 22 aa, Homo sapiens
  CDR3 for alpha chain variable domain of TCR clone 224612 (TRAV1-2, TRAJ18)
CAVRGEAQPWGGYTLGGTQLTV

SEQ ID NO: 449224 - protein, 14 aa, Homo sapiens
  CDR3 for beta chain variable domain of TCR clone 224612 (TRBV7-2, TRBJ2-7)
CASSFKGQDHEQYF

SEQ ID NO: 449225 - protein, 17 aa, Homo sapiens
  CDR3 for alpha chain variable domain of TCR clone 224613 (TRAV12-2, TRAJ22)
CAVYRIPFSGSARQLTF

SEQ ID NO: 449226 - protein, 13 aa, Homo sapiens
  CDR3 for beta chain variable domain of TCR clone 224613 (TRBV11-3, TRBJ1-1)
CASSSNRDTEAFF

SEQ ID NO: 449227 - protein, 11 aa, Homo sapiens
  CDR3 for alpha chain variable domain of TCR clone 224614 (TRAV12-3, TRAJ27)
CAMANAGKSTF

SEQ ID NO: 449228 - protein, 15 aa, Homo sapiens
  CDR3 for beta chain variable domain of TCR clone 224614 (TRBV6-3, TRBJ2-7)
CASSSPGTVFYDQYF

SEQ ID NO: 449229 - protein, 15 aa, Homo sapiens
  CDR3 for alpha chain variable domain of TCR clone 224615 (TRAV12-1, TRAJ44)
CVADLPTGTASKLTF

SEQ ID NO: 449230 - protein, 13 aa, Homo sapiens
  CDR3 for beta chain variable domain of TCR clone 224615 (TRBV6-5, TRBJ2-5)
CASGPQGGETRYF

SEQ ID NO: 449231 - protein, 16 aa, Homo sapiens
  CDR3 for alpha chain variable domain of TCR clone 224616 (TRAV16, TRAJ52)
CALSGVGGTSYGKLTF

SEQ ID NO: 449232 - protein, 16 aa, Homo sapiens
  CDR3 for beta chain variable domain of TCR clone 224616 (TRBV7-3, TRBJ2-2)
CASSLKRGTLSGELFF

SEQ ID NO: 449233 - protein, 10 aa, Homo sapiens
  CDR3 for alpha chain variable domain of TCR clone 224617 (TRAV16, TRAJ22)
SAMYLRQLTF

SEQ ID NO: 449234 - protein, 14 aa, Homo sapiens
  CDR3 for beta chain variable domain of TCR clone 224617 (TRBV7-2, TRBJ2-5)
CASSFTQGQETQYF

SEQ ID NO: 449235 - protein, 15 aa, Homo sapiens
  CDR3 for alpha chain variable domain of TCR clone 224618 (TRAV17, TRAJ57)
CATGPSQGGSEKLVF

SEQ ID NO: 449236 - protein, 14 aa, Homo sapiens
  CDR3 for beta chain variable domain of TCR clone 224618 (TRBV4-1, TRBJ2-2)
CASIQAVNTGELFF

SEQ ID NO: 449237 - protein, 14 aa, Homo sapiens
  CDR3 for alpha chain variable domain of TCR clone 224619 (TRAV9-2, TRAJ39)
CALYIYNAGNMPTF

SEQ ID NO: 449238 - protein, 14 aa, Homo sapiens
  CDR3 for beta chain variable domain of TCR clone 224619 (TRBV7-9, TRBJ2-1)
CASSPRDSLYEQFF

SEQ ID NO: 449239 - protein, 14 aa, Homo sapiens
  CDR3 for alpha chain variable domain of TCR clone 224620 (TRAV1-2, TRAJ8)
CAVREDTGFQKLVF

SEQ ID NO: 449240 - protein, 13 aa, Homo sapiens
  CDR3 for beta chain variable domain of TCR clone 224620 (TRBV20-1, TRBJ2-5)
CSAATELQETQYF

SEQ ID NO: 449241 - protein, 15 aa, Homo sapiens
  CDR3 for alpha chain variable domain of TCR clone 224621 (TRAV3, TRAJ5)
CAVRDLDTGRRTLTF

SEQ ID NO: 449242 - protein, 12 aa, Homo sapiens
  CDR3 for beta chain variable domain of TCR clone 224621 (TRBV5-4, TRBJ2-7)
CASSLEAYEQYF

SEQ ID NO: 449243 - protein, 13 aa, Homo sapiens
  CDR3 for alpha chain variable domain of TCR clone 224622 (TRAV6, TRAJ33)
CALPMDRNYQLIW

SEQ ID NO: 449244 - protein, 15 aa, Homo sapiens
  CDR3 for beta chain variable domain of TCR clone 224622 (TRBV11-2, TRBJ2-2)
CASRGLAANTGELFF

SEQ ID NO: 449245 - protein, 14 aa, Homo sapiens
  CDR3 for alpha chain variable domain of TCR clone 224623 (TRAV38-1, TRAJ45)
CAYYSGGGADGLTF

SEQ ID NO: 449246 - protein, 20 aa, Homo sapiens
  CDR3 for beta chain variable domain of TCR clone 224623 (TRBV28, TRBJ2-1)
CASTPIVRSPGLAGGNEQFF

SEQ ID NO: 449247 - protein, 11 aa, Homo sapiens
  CDR3 for alpha chain variable domain of TCR clone 224624 (TRAV12-2, TRAJ49)
CALQGGNQVYF

SEQ ID NO: 449248 - protein, 14 aa, Homo sapiens
  CDR3 for beta chain variable domain of TCR clone 224624 (TRBV7-2, TRBJ2-7)
CASSPKTSFYEQYF

SEQ ID NO: 449249 - protein, 16 aa, Homo sapiens
  CDR3 for alpha chain variable domain of TCR clone 224625 (TRAV12-2, TRAJ18)
CAVTTDRGSTPGRLSF

SEQ ID NO: 449250 - protein, 14 aa, Homo sapiens
  CDR3 for beta chain variable domain of TCR clone 224625 (TRBV4-2, TRBJ1-5)
CASSQDSINQPQHF

SEQ ID NO: 449251 - protein, 16 aa, Homo sapiens
  CDR3 for alpha chain variable domain of TCR clone 224626 (TRAV12-1, TRAJ12)
CVVNTLLMDSSYKLIF

SEQ ID NO: 449252 - protein, 12 aa, Homo sapiens
  CDR3 for beta chain variable domain of TCR clone 224626 (TRBV11-2, TRBJ2-1)
CASSVQREGQFF

SEQ ID NO: 449253 - protein, 18 aa, Homo sapiens
  CDR3 for alpha chain variable domain of TCR clone 224627 (TRAV29/DV5, TRAJ52)
CAAGFRGAGGTSYGKLLF

SEQ ID NO: 449254 - protein, 13 aa, Homo sapiens
  CDR3 for beta chain variable domain of TCR clone 224627 (TRBV24-1, TRBJ2-3)
CATSFGGTDTQYF

SEQ ID NO: 449255 - protein, 12 aa, Homo sapiens
  CDR3 for alpha chain variable domain of TCR clone 224628 (TRAV8-3, TRAJ20)
CAVGANDYKLSF

SEQ ID NO: 449256 - protein, 15 aa, Homo sapiens
  CDR3 for beta chain variable domain of TCR clone 224628 (TRBV19, TRBJ2-2)
CQPISRDRATGELFI

SEQ ID NO: 449257 - protein, 16 aa, Homo sapiens
  CDR3 for alpha chain variable domain of TCR clone 224629 (TRAV12-1, TRAJ4)
CVVRRLPAGGYNKLIF

SEQ ID NO: 449258 - protein, 14 aa, Homo sapiens
  CDR3 for beta chain variable domain of TCR clone 224629 (TRBV25-1, TRBJ1-1)
CASTHLGGNTEAFF

SEQ ID NO: 449259 - protein, 16 aa, Homo sapiens
  CDR3 for alpha chain variable domain of TCR clone 224630 (TRAV20, TRAJ52)
CAVLPDGGTSYGKLTF

SEQ ID NO: 449260 - protein, 15 aa, Homo sapiens
  CDR3 for beta chain variable domain of TCR clone 224630 (TRBV27, TRBJ2-1)
CASSNGGGSSNEQFF

SEQ ID NO: 449261 - protein, 15 aa, Homo sapiens
  CDR3 for alpha chain variable domain of TCR clone 224631 (TRAV8-6, TRAJ6)
CAVSFISGGSYIPTF

SEQ ID NO: 449262 - protein, 13 aa, Homo sapiens
  CDR3 for beta chain variable domain of TCR clone 224631 (TRBV29-1, TRBJ2-1)
CSVEGGRVNEQFF

SEQ ID NO: 449263 - protein, 11 aa, Homo sapiens
  CDR3 for alpha chain variable domain of TCR clone 224632 (TRAV12-3, TRAJ27)
CAMAKAGKSTF

SEQ ID NO: 449264 - protein, 12 aa, Homo sapiens
  CDR3 for beta chain variable domain of TCR clone 224632 (TRBV12-4, TRBJ2-7)
CASSLGGYEQYF

SEQ ID NO: 449265 - protein, 12 aa, Homo sapiens
  CDR3 for alpha chain variable domain of TCR clone 224633 (TRAV27, TRAJ33)
FAGDGSNYQLIW

SEQ ID NO: 449266 - protein, 15 aa, Homo sapiens
  CDR3 for beta chain variable domain of TCR clone 224633 (TRBV4-2, TRBJ1-1)
CASSQEDLPRTEAFF

SEQ ID NO: 449267 - protein, 14 aa, Homo sapiens
  CDR3 for alpha chain variable domain of TCR clone 224634 (TRAV14/DV4, TRAJ22)
CAMSPSGSARQLTF

SEQ ID NO: 449268 - protein, 13 aa, Homo sapiens
  CDR3 for beta chain variable domain of TCR clone 224634 (TRBV12-4, TRBJ1-2)
CASSLRQGKGYTF

SEQ ID NO: 449269 - protein, 12 aa, Homo sapiens
  CDR3 for alpha chain variable domain of TCR clone 224635 (TRAV12-2, TRAJ9)
CAVYNGGFKTIF

SEQ ID NO: 449270 - protein, 14 aa, Homo sapiens
  CDR3 for beta chain variable domain of TCR clone 224635 (TRBV6-1, TRBJ1-5)
CASSETGMEQPQHV

SEQ ID NO: 449271 - protein, 19 aa, Homo sapiens
  CDR3 for alpha chain variable domain of TCR clone 224636 (TRAV2, TRAJ20)
ILQVREADAAVYRDCKLSF

SEQ ID NO: 449272 - protein, 14 aa, Homo sapiens
  CDR3 for beta chain variable domain of TCR clone 224636 (TRBV7-2, TRBJ2-5)
CASSPRGSSETQYF

SEQ ID NO: 449273 - protein, 16 aa, Homo sapiens
  CDR3 for alpha chain variable domain of TCR clone 224637 (TRAV14/DV4, TRAJ54)
CAMREGVIQGAQKLVF

SEQ ID NO: 449274 - protein, 15 aa, Homo sapiens
  CDR3 for beta chain variable domain of TCR clone 224637 (TRBV7-6, TRBJ1-5)
CASSQSSGINQPQHF

SEQ ID NO: 449275 - protein, 13 aa, Homo sapiens
  CDR3 for alpha chain variable domain of TCR clone 224638 (TRAV35, TRAJ49)
CAGRLNTGNQFYF

SEQ ID NO: 449276 - protein, 17 aa, Homo sapiens
  CDR3 for beta chain variable domain of TCR clone 224638 (TRBV6-1, TRBJ2-1)
CASSEGGWGQFCNEQFF

SEQ ID NO: 449277 - protein, 14 aa, Homo sapiens
  CDR3 for alpha chain variable domain of TCR clone 224639 (TRAV8-3, TRAJ4)
CAVGAAGGYNKLIF

SEQ ID NO: 449278 - protein, 15 aa, Homo sapiens
  CDR3 for beta chain variable domain of TCR clone 224639 (TRBV11-3, TRBJ2-3)
CASLKDGREGDTQNF

SEQ ID NO: 449279 - protein, 14 aa, Homo sapiens
  CDR3 for alpha chain variable domain of TCR clone 224640 (TRAV21, TRAJ28)
CTVGSGAGSYQLTF

SEQ ID NO: 449280 - protein, 14 aa, Homo sapiens
  CDR3 for beta chain variable domain of TCR clone 224640 (TRBV18, TRBJ1-4)
CASSPGPNGEKLFF

SEQ ID NO: 449281 - protein, 15 aa, Homo sapiens
  CDR3 for alpha chain variable domain of TCR clone 224641 (TRAV8-3, TRAJ15)
CAVGAPNQAGTALCF

SEQ ID NO: 449282 - protein, 14 aa, Homo sapiens
  CDR3 for beta chain variable domain of TCR clone 224641 (TRBV20-1, TRBJ2-1)
CSPNDEASYNEQFF

SEQ ID NO: 449283 - protein, 15 aa, Homo sapiens
  CDR3 for alpha chain variable domain of TCR clone 224642 (TRAV8-2, TRAJ16)
CVVSDGFSDGQKLLF

SEQ ID NO: 449284 - protein, 19 aa, Homo sapiens
  CDR3 for beta chain variable domain of TCR clone 224642 (TRBV25-1, TRBJ2-2)
CAILVYRVDRGRKTGELFF

SEQ ID NO: 449285 - protein, 13 aa, Homo sapiens
  CDR3 for alpha chain variable domain of TCR clone 224643 (TRAV13-1, TRAJ26)
CAIVFGPGTRLSV

SEQ ID NO: 449286 - protein, 15 aa, Homo sapiens
  CDR3 for beta chain variable domain of TCR clone 224643 (TRBV28, TRBJ1-3)
CASSMGWASGNTIYF

SEQ ID NO: 449287 - protein, 13 aa, Homo sapiens
  CDR3 for alpha chain variable domain of TCR clone 224644 (TRAV2, TRAJ29)
CAAQNSGNTPRVF

SEQ ID NO: 449288 - protein, 14 aa, Homo sapiens
  CDR3 for beta chain variable domain of TCR clone 224644 (TRBV7-9, TRBJ2-4)
CASSLAMGGNSQYF

SEQ ID NO: 449289 - protein, 15 aa, Homo sapiens
  CDR3 for alpha chain variable domain of TCR clone 224645 (TRAV8-1, TRAJ5)
CAVRPQDTGRRALTF

SEQ ID NO: 449290 - protein, 14 aa, Homo sapiens
  CDR3 for beta chain variable domain of TCR clone 224645 (TRBV28, TRBJ2-7)
CASRPTTGAYEQYF

SEQ ID NO: 449291 - protein, 10 aa, Homo sapiens
  CDR3 for alpha chain variable domain of TCR clone 224646 (TRAV8-4, TRAJ43)
CAVSADDMRF

SEQ ID NO: 449292 - protein, 14 aa, Homo sapiens
  CDR3 for beta chain variable domain of TCR clone 224646 (TRBV20-1, TRBJ1-1)
CSAQTRIGGTEAFF

SEQ ID NO: 449293 - protein, 21 aa, Homo sapiens
  CDR3 for alpha chain variable domain of TCR clone 224647 (TRAV1-1, TRAJ30)
CLLLLRCEREGGENRDDKIIF

SEQ ID NO: 449294 - protein, 17 aa, Homo sapiens
  CDR3 for beta chain variable domain of TCR clone 224647 (TRBV20-1, TRBJ2-2)
CSARDRTSGRHTGELFF

SEQ ID NO: 449295 - protein, 13 aa, Homo sapiens
  CDR3 for alpha chain variable domain of TCR clone 224648 (TRAV27, TRAJ16)
CAGACSDGQKLLF

SEQ ID NO: 449296 - protein, 15 aa, Homo sapiens
  CDR3 for beta chain variable domain of TCR clone 224648 (TRBV19, TRBJ1-1)
CASTSGQIQNTEAFF

SEQ ID NO: 449297 - protein, 14 aa, Homo sapiens
  CDR3 for alpha chain variable domain of TCR clone 224649 (TRAV8-3, TRAJ9)
CAVASNTGGFKTIF

SEQ ID NO: 449298 - protein, 14 aa, Homo sapiens
  CDR3 for beta chain variable domain of TCR clone 224649 (TRBV7-3, TRBJ2-2)
CASSSGGYTGELFF

SEQ ID NO: 449299 - protein, 14 aa, Homo sapiens
  CDR3 for alpha chain variable domain of TCR clone 224650 (TRAV12-2, TRAJ29)
CAVRRNSGNTPLVF

SEQ ID NO: 449300 - protein, 13 aa, Homo sapiens
  CDR3 for beta chain variable domain of TCR clone 224650 (TRBV12-4, TRBJ2-1)
CASSHYTDKEQFF

SEQ ID NO: 449301 - protein, 11 aa, Homo sapiens
  CDR3 for alpha chain variable domain of TCR clone 224651 (TRAV3, TRAJ32)
CDVREGIMVVL

SEQ ID NO: 449302 - protein, 13 aa, Homo sapiens
  CDR3 for beta chain variable domain of TCR clone 224651 (TRBV2, TRBJ1-1)
CASSEGGNTEAFF

SEQ ID NO: 449303 - protein, 13 aa, Homo sapiens
  CDR3 for alpha chain variable domain of TCR clone 224652 (TRAV29/DV5, TRAJ44)
CAASTGTASKLTF

SEQ ID NO: 449304 - protein, 15 aa, Homo sapiens
  CDR3 for beta chain variable domain of TCR clone 224652 (TRBV7-2, TRBJ2-1)
CASSSGLAGGNEQFF

SEQ ID NO: 449305 - protein, 12 aa, Homo sapiens
  CDR3 for alpha chain variable domain of TCR clone 224653 (TRAV2, TRAJ33)
CAVPDNNYQLIW

SEQ ID NO: 449306 - protein, 15 aa, Homo sapiens
  CDR3 for beta chain variable domain of TCR clone 224653 (TRBV10-2, TRBJ2-6)
CASSEQGTGANVLTF

SEQ ID NO: 449307 - protein, 16 aa, Homo sapiens
  CDR3 for alpha chain variable domain of TCR clone 224654 (TRAV8-4, TRAJ9)
CAVTLNTGGFKNYLWS

SEQ ID NO: 449308 - protein, 15 aa, Homo sapiens
  CDR3 for beta chain variable domain of TCR clone 224654 (TRBV7-9, TRBJ2-2)
CASSPETGAGGELFF

SEQ ID NO: 449309 - protein, 11 aa, Homo sapiens
  CDR3 for alpha chain variable domain of TCR clone 224655 (TRAV12-1, TRAJ21)
CVVNNFNKFYF

SEQ ID NO: 449310 - protein, 14 aa, Homo sapiens
  CDR3 for beta chain variable domain of TCR clone 224655 (TRBV15, TRBJ1-5)
CATSTEQSNQPQHF

SEQ ID NO: 449311 - protein, 13 aa, Homo sapiens
  CDR3 for alpha chain variable domain of TCR clone 224656 (TRAV2, TRAJ40)
CAVVTSGTYKYIF

SEQ ID NO: 449312 - protein, 13 aa, Homo sapiens
  CDR3 for beta chain variable domain of TCR clone 224656 (TRBV19, TRBJ2-1)
CQSDFLLSGEQFF

SEQ ID NO: 449313 - protein, 11 aa, Homo sapiens
  CDR3 for alpha chain variable domain of TCR clone 224657 (TRAV2, TRAJ13)
CASGGYQKVTF

SEQ ID NO: 449314 - protein, 14 aa, Homo sapiens
  CDR3 for beta chain variable domain of TCR clone 224657 (TRBV28, TRBJ1-1)
CASSLWWSLAEAFF

SEQ ID NO: 449315 - protein, 17 aa, Homo sapiens
  CDR3 for alpha chain variable domain of TCR clone 224658 (TRAV3, TRAJ6)
CAVRDGPRAGGSYIPQF

SEQ ID NO: 449316 - protein, 14 aa, Homo sapiens
  CDR3 for beta chain variable domain of TCR clone 224658 (TRBV7-2, TRBJ2-7)
CASSPKTSCYEQYF

SEQ ID NO: 449317 - protein, 11 aa, Homo sapiens
  CDR3 for alpha chain variable domain of TCR clone 224659 (TRAV35, TRAJ34)
CWARNTDKLIF

SEQ ID NO: 449318 - protein, 14 aa, Homo sapiens
  CDR3 for beta chain variable domain of TCR clone 224659 (TRBV5-1, TRBJ2-7)
CASSRGESFYEQYF

SEQ ID NO: 449319 - protein, 18 aa, Homo sapiens
  CDR3 for alpha chain variable domain of TCR clone 224660 (TRAV12-3, TRAJ52)
CAMSVGGAGGTSYGKLTF

SEQ ID NO: 449320 - protein, 16 aa, Homo sapiens
  CDR3 for beta chain variable domain of TCR clone 224660 (TRBV27, TRBJ2-1)
CASRPPHYVGLDEQFF

SEQ ID NO: 449321 - protein, 12 aa, Homo sapiens
  CDR3 for alpha chain variable domain of TCR clone 224661 (TRAV3, TRAJ9)
CAVLPAGFKTIF

SEQ ID NO: 449322 - protein, 14 aa, Homo sapiens
  CDR3 for beta chain variable domain of TCR clone 224661 (TRBV25-1, TRBJ1-1)
CASTHLGGNTEAFS

SEQ ID NO: 449323 - protein, 18 aa, Homo sapiens
  CDR3 for alpha chain variable domain of TCR clone 224662 (TRAV21, TRAJ52)
CAVRPSPAGGTSYGKLTF

SEQ ID NO: 449324 - protein, 13 aa, Homo sapiens
  CDR3 for beta chain variable domain of TCR clone 224662 (TRBV13, TRBJ2-3)
ASRVAGGRNTQYF

SEQ ID NO: 449325 - protein, 15 aa, Homo sapiens
  CDR3 for alpha chain variable domain of TCR clone 224663 (TRAV20, TRAJ24)
CAVQAAPDSWGKFQF

SEQ ID NO: 449326 - protein, 14 aa, Homo sapiens
  CDR3 for beta chain variable domain of TCR clone 224663 (TRBV20-1, TRBJ1-1)
CSARDREQGSEAFF

SEQ ID NO: 449327 - protein, 17 aa, Homo sapiens
  CDR3 for alpha chain variable domain of TCR clone 224664 (TRAV1-2, TRAJ26)
CAVRDLITMVRILSLVP

SEQ ID NO: 449328 - protein, 13 aa, Homo sapiens
  CDR3 for beta chain variable domain of TCR clone 224664 (TRBV19, TRBJ1-2)
CASSQGQVYGYTF

SEQ ID NO: 449329 - protein, 13 aa, Homo sapiens
  CDR3 for alpha chain variable domain of TCR clone 224665 (TRAV12-1, TRAJ29)
CVVVSSGNTPLVF

SEQ ID NO: 449330 - protein, 17 aa, Homo sapiens
  CDR3 for beta chain variable domain of TCR clone 224665 (TRBV7-9, TRBJ2-1)
CASSLVASYPSYNEQFF

SEQ ID NO: 449331 - protein, 17 aa, Homo sapiens
  CDR3 for alpha chain variable domain of TCR clone 224666 (TRAV13-1, TRAJ28)
CAASPPYSGAGSYQLTF

SEQ ID NO: 449332 - protein, 14 aa, Homo sapiens
  CDR3 for beta chain variable domain of TCR clone 224666 (TRBV4-2, TRBJ2-1)
CASGLDRAYNEQFF

SEQ ID NO: 449333 - protein, 18 aa, Homo sapiens
  CDR3 for alpha chain variable domain of TCR clone 224667 (TRAV21, TRAJ52)
CAVRPSPAGGTSYGTLTF

SEQ ID NO: 449334 - protein, 15 aa, Homo sapiens
  CDR3 for beta chain variable domain of TCR clone 224667 (TRBV19, TRBJ1-1)
CASTSGQIQNTEASF

SEQ ID NO: 449335 - protein, 12 aa, Homo sapiens
  CDR3 for alpha chain variable domain of TCR clone 224668 (TRAV13-1, TRAJ48)
CAANFGNEKLTF

SEQ ID NO: 449336 - protein, 16 aa, Homo sapiens
  CDR3 for beta chain variable domain of TCR clone 224668 (TRBV20-1, TRBJ2-7)
CSASTSGRLSSYEQYF

SEQ ID NO: 449337 - protein, 13 aa, Homo sapiens
  CDR3 for alpha chain variable domain of TCR clone 224669 (TRAV13-1, TRAJ22)
CAASRGSARQLTF

SEQ ID NO: 449338 - protein, 15 aa, Homo sapiens
  CDR3 for beta chain variable domain of TCR clone 224669 (TRBV28, TRBJ2-3)
CAPTFRDWSTDTQYF

SEQ ID NO: 449339 - protein, 12 aa, Homo sapiens
  CDR3 for alpha chain variable domain of TCR clone 224670 (TRAV3, TRAJ20)
CAVRDGDYKLSF

SEQ ID NO: 449340 - protein, 12 aa, Homo sapiens
  CDR3 for beta chain variable domain of TCR clone 224670 (TRBV29-1, TRBJ2-3)
CSVTGGADTQYF

SEQ ID NO: 449341 - protein, 15 aa, Homo sapiens
  CDR3 for alpha chain variable domain of TCR clone 224671 (TRAV3, TRAJ22)
CAVRDQGGSARQLTF

SEQ ID NO: 449342 - protein, 14 aa, Homo sapiens
  CDR3 for beta chain variable domain of TCR clone 224671 (TRBV19, TRBJ1-5)
CASSLGLIGQPQHF

SEQ ID NO: 449343 - protein, 13 aa, Homo sapiens
  CDR3 for alpha chain variable domain of TCR clone 224672 (TRAV13-1, TRAJ48)
CAAASFGNEKLTF

SEQ ID NO: 449344 - protein, 14 aa, Homo sapiens
  CDR3 for beta chain variable domain of TCR clone 224672 (TRBV18, TRBJ2-1)
CASSPGNSETEQFF

SEQ ID NO: 449345 - protein, 13 aa, Homo sapiens
  CDR3 for alpha chain variable domain of TCR clone 224673 (TRAV12-3, TRAJ16)
CAMTRPDGQKLLF

SEQ ID NO: 449346 - protein, 18 aa, Homo sapiens
  CDR3 for beta chain variable domain of TCR clone 224673 (TRBV28, TRBJ1-3)
CASSTAGDRTAMGNTIYF

SEQ ID NO: 449347 - protein, 18 aa, Homo sapiens
  CDR3 for alpha chain variable domain of TCR clone 224674 (TRAV27, TRAJ52)
CAGEMIRAGGTSYGKLTF

SEQ ID NO: 449348 - protein, 17 aa, Homo sapiens
  CDR3 for beta chain variable domain of TCR clone 224674 (TRBV5-5, TRBJ2-7)
CASSADRGGSPGNEQYF

SEQ ID NO: 449349 - protein, 16 aa, Homo sapiens
  CDR3 for alpha chain variable domain of TCR clone 224675 (TRAV26-1, TRAJ23)
CIARPHGNNQGGKLIF

SEQ ID NO: 449350 - protein, 13 aa, Homo sapiens
  CDR3 for beta chain variable domain of TCR clone 224675 (TRBV27, TRBJ2-7)
CASSLTTGYEQYF

SEQ ID NO: 449351 - protein, 16 aa, Homo sapiens
  CDR3 for alpha chain variable domain of TCR clone 224676 (TRAV27, TRAJ57)
CAGALGTQGGSEKLVF

SEQ ID NO: 449352 - protein, 13 aa, Homo sapiens
  CDR3 for beta chain variable domain of TCR clone 224676 (TRBV7-2, TRBJ2-4)
CASSLAEGGIQYF

SEQ ID NO: 449353 - protein, 14 aa, Homo sapiens
  CDR3 for alpha chain variable domain of TCR clone 224677 (TRAV9-2, TRAJ39)
CALYIYNAGNMLTF

SEQ ID NO: 449354 - protein, 14 aa, Homo sapiens
  CDR3 for beta chain variable domain of TCR clone 224677 (TRBV4-1, TRBJ1-1)
CASSPKAGNTEAFF

SEQ ID NO: 449355 - protein, 14 aa, Homo sapiens
  CDR3 for alpha chain variable domain of TCR clone 224678 (TRAV2, TRAJ41)
CAVGTSNSGYAPNF

SEQ ID NO: 449356 - protein, 13 aa, Homo sapiens
  CDR3 for beta chain variable domain of TCR clone 224678 (TRBV4-1, TRBJ2-1)
CASSQEVQYEQFF

SEQ ID NO: 449357 - protein, 14 aa, Homo sapiens
  CDR3 for alpha chain variable domain of TCR clone 224679 (TRAV1-2, TRAJ16)
CAVNRFSDGQKLLF

SEQ ID NO: 449358 - protein, 15 aa, Homo sapiens
  CDR3 for beta chain variable domain of TCR clone 224679 (TRBV4-2, TRBJ1-1)
CAISQQGAGDTEAFF

SEQ ID NO: 449359 - protein, 16 aa, Homo sapiens
  CDR3 for alpha chain variable domain of TCR clone 224680 (TRAV8-3, TRAJ13)
CAVGAYPSGGYQKVTF

SEQ ID NO: 449360 - protein, 14 aa, Homo sapiens
  CDR3 for beta chain variable domain of TCR clone 224680 (TRBV19, TRBJ1-2)
CASSVLGYNYGYTF

SEQ ID NO: 449361 - protein, 15 aa, Homo sapiens
  CDR3 for alpha chain variable domain of TCR clone 224681 (TRAV26-2, TRAJ28)
CILVESGAGSYQLTF

SEQ ID NO: 449362 - protein, 13 aa, Homo sapiens
  CDR3 for beta chain variable domain of TCR clone 224681 (TRBV7-3, TRBJ1-1)
CASSQDWGAEAFF

SEQ ID NO: 449363 - protein, 18 aa, Homo sapiens
  CDR3 for alpha chain variable domain of TCR clone 224682 (TRAV26-1, TRAJ52)
CIVRVGGAGGTSYGKLTF

SEQ ID NO: 449364 - protein, 13 aa, Homo sapiens
  CDR3 for beta chain variable domain of TCR clone 224682 (TRBV7-3, TRBJ1-2)
CASSLKRGYGYTF

SEQ ID NO: 449365 - protein, 15 aa, Homo sapiens
  CDR3 for alpha chain variable domain of TCR clone 224683 (TRAV12-1, TRAJ44)
CVVNINTGTASKLTF

SEQ ID NO: 449366 - protein, 10 aa, Homo sapiens
  CDR3 for beta chain variable domain of TCR clone 224683 (TRBV6-4, TRBJ2-1)
CASVYNEQFF

SEQ ID NO: 449367 - protein, 14 aa, Homo sapiens
  CDR3 for alpha chain variable domain of TCR clone 224684 (TRAV12-1, TRAJ4)
CVGDFSGGYNKLIF

SEQ ID NO: 449368 - protein, 16 aa, Homo sapiens
  CDR3 for beta chain variable domain of TCR clone 224684 (TRBV12-5, TRBJ2-5)
CASGPRTSGNQETQYF

SEQ ID NO: 449369 - protein, 13 aa, Homo sapiens
  CDR3 for alpha chain variable domain of TCR clone 224685 (TRAV17, TRAJ34)
CATDRYNTDKLIF

SEQ ID NO: 449370 - protein, 15 aa, Homo sapiens
  CDR3 for beta chain variable domain of TCR clone 224685 (TRBV20-1, TRBJ2-3)
CSATGTNGFTDTQYF

SEQ ID NO: 449371 - protein, 13 aa, Homo sapiens
  CDR3 for alpha chain variable domain of TCR clone 224686 (TRAV27, TRAJ29)
CAGAHSGNTPIVF

SEQ ID NO: 449372 - protein, 15 aa, Homo sapiens
  CDR3 for beta chain variable domain of TCR clone 224686 (TRBV15, TRBJ1-4)
CATSRDMGSYEKLFF

SEQ ID NO: 449373 - protein, 13 aa, Homo sapiens
  CDR3 for alpha chain variable domain of TCR clone 224687 (TRAV13-2, TRAJ13)
CVERPGGYQKVTF

SEQ ID NO: 449374 - protein, 14 aa, Homo sapiens
  CDR3 for beta chain variable domain of TCR clone 224687 (TRBV23-1, TRBJ2-5)
CASSFLRSQETQYF

SEQ ID NO: 449375 - protein, 15 aa, Homo sapiens
  CDR3 for alpha chain variable domain of TCR clone 224688 (TRAV26-1, TRAJ52)
CIVSDLGTSSGKLTF

SEQ ID NO: 449376 - protein, 15 aa, Homo sapiens
  CDR3 for beta chain variable domain of TCR clone 224688 (TRBV6-5, TRBJ2-7)
CASSASGRWSYEQYF

SEQ ID NO: 449377 - protein, 16 aa, Homo sapiens
  CDR3 for alpha chain variable domain of TCR clone 224689 (TRAV12-2, TRAJ32)
CAVHMNYGGATNKLIF

SEQ ID NO: 449378 - protein, 16 aa, Homo sapiens
  CDR3 for beta chain variable domain of TCR clone 224689 (TRBV7-8, TRBJ2-3)
CASSTEGQRETDTQYF

SEQ ID NO: 449379 - protein, 18 aa, Homo sapiens
  CDR3 for alpha chain variable domain of TCR clone 224690 (TRAV21, TRAJ52)
CAVRPSPAGGTSYGKLTF

SEQ ID NO: 449380 - protein, 13 aa, Homo sapiens
  CDR3 for beta chain variable domain of TCR clone 224690 (TRBV20-1, TRBJ1-1)
CSAGTVGNTEAFF

SEQ ID NO: 449381 - protein, 15 aa, Homo sapiens
  CDR3 for alpha chain variable domain of TCR clone 224691 (TRAV1-2, TRAJ17)
CAVGGYGAAGNKLTF

SEQ ID NO: 449382 - protein, 23 aa, Homo sapiens
  CDR3 for beta chain variable domain of TCR clone 224691 (TRBV11-2, TRBJ2-5)
CASSSPGGEGAASRDPVLRARHA

SEQ ID NO: 449383 - protein, 14 aa, Homo sapiens
  CDR3 for alpha chain variable domain of TCR clone 224692 (TRAV2, TRAJ37)
CAVDFTSNTGKLIF

SEQ ID NO: 449384 - protein, 15 aa, Homo sapiens
  CDR3 for beta chain variable domain of TCR clone 224692 (TRBV11-2, TRBJ2-7)
CASSRDRGLPYEQYF

SEQ ID NO: 449385 - protein, 14 aa, Homo sapiens
  CDR3 for alpha chain variable domain of TCR clone 224693 (TRAV8-3, TRAJ39)
CAVGANNAGNMLTF

SEQ ID NO: 449386 - protein, 15 aa, Homo sapiens
  CDR3 for beta chain variable domain of TCR clone 224693 (TRBV4-3, TRBJ1-1)
CASSQELGRGTDAFF

SEQ ID NO: 449387 - protein, 15 aa, Homo sapiens
  CDR3 for alpha chain variable domain of TCR clone 224694 (TRAV4, TRAJ39)
CLVGPNNNAGNMLTL

SEQ ID NO: 449388 - protein, 13 aa, Homo sapiens
  CDR3 for beta chain variable domain of TCR clone 224694 (TRBV11-2, TRBJ2-5)
WASSSTGEETQYF

SEQ ID NO: 449389 - protein, 11 aa, Homo sapiens
  CDR3 for alpha chain variable domain of TCR clone 224695 (TRAV2, TRAJ13)
CASGGYQKATF

SEQ ID NO: 449390 - protein, 16 aa, Homo sapiens
  CDR3 for beta chain variable domain of TCR clone 224695 (TRBV7-9, TRBJ1-2)
CASSLGFSSGEDGYTF

SEQ ID NO: 449391 - protein, 17 aa, Homo sapiens
  CDR3 for alpha chain variable domain of TCR clone 224696 (TRAV21, TRAJ10)
CAVRVYILTGGGNKLTF

SEQ ID NO: 449392 - protein, 13 aa, Homo sapiens
  CDR3 for beta chain variable domain of TCR clone 224696 (TRBV7-7, TRBJ2-2)
CASSLTSAGELFF

SEQ ID NO: 449393 - protein, 13 aa, Homo sapiens
  CDR3 for alpha chain variable domain of TCR clone 224697 (TRAV12-2, TRAJ42)
CAVKRGSQGNLIS

SEQ ID NO: 449394 - protein, 14 aa, Homo sapiens
  CDR3 for beta chain variable domain of TCR clone 224697 (TRBV25-1, TRBJ1-1)
CASTHLGGNTEAFF

SEQ ID NO: 449395 - protein, 14 aa, Homo sapiens
  CDR3 for alpha chain variable domain of TCR clone 224698 (TRAV12-1, TRAJ17)
CVVNHKAAGSKLTF

SEQ ID NO: 449396 - protein, 17 aa, Homo sapiens
  CDR3 for beta chain variable domain of TCR clone 224698 (TRBV20-1, TRBJ2-1)
CSASSSGLAGSYNEQFF

SEQ ID NO: 449397 - protein, 12 aa, Homo sapiens
  CDR3 for alpha chain variable domain of TCR clone 224699 (TRAV4, TRAJ6)
CLAPGGSYIPTF

SEQ ID NO: 449398 - protein, 17 aa, Homo sapiens
  CDR3 for beta chain variable domain of TCR clone 224699 (TRBV20-1, TRBJ2-2)
CSASGSGQGGLTGEVFF

SEQ ID NO: 449399 - protein, 12 aa, Homo sapiens
  CDR3 for alpha chain variable domain of TCR clone 224700 (TRAV12-3, TRAJ17)
CAMTLTGNKLTF

SEQ ID NO: 449400 - protein, 13 aa, Homo sapiens
  CDR3 for beta chain variable domain of TCR clone 224700 (TRBV4-1, TRBJ2-2)
CACRQGAYGELFF

SEQ ID NO: 449401 - protein, 18 aa, Homo sapiens
  CDR3 for alpha chain variable domain of TCR clone 224701 (TRAV26-1, TRAJ27)
CIVRPSFNYTTNAGKSTF

SEQ ID NO: 449402 - protein, 14 aa, Homo sapiens
  CDR3 for beta chain variable domain of TCR clone 224701 (TRBV10-3, TRBJ1-6)
CAISVDGDESPLHF

SEQ ID NO: 449403 - protein, 13 aa, Homo sapiens
  CDR3 for alpha chain variable domain of TCR clone 224702 (TRAV12-1, TRAJ22)
CVVPSGSARLLTF

SEQ ID NO: 449404 - protein, 15 aa, Homo sapiens
  CDR3 for beta chain variable domain of TCR clone 224702 (TRBV11-3, TRBJ2-7)
CASSPGPASSYEQYF

SEQ ID NO: 449405 - protein, 18 aa, Homo sapiens
  CDR3 for alpha chain variable domain of TCR clone 224703 (TRAV21, TRAJ52)
CAVRPSPAGGTSFGKLTF

SEQ ID NO: 449406 - protein, 13 aa, Homo sapiens
  CDR3 for beta chain variable domain of TCR clone 224703 (TRBV20-1, TRBJ2-5)
CSAREAFQETQYF

SEQ ID NO: 449407 - protein, 17 aa, Homo sapiens
  CDR3 for alpha chain variable domain of TCR clone 224704 (TRAV3, TRAJ6)
CAVRDGPRAGGSYIPPL

SEQ ID NO: 449408 - protein, 13 aa, Homo sapiens
  CDR3 for beta chain variable domain of TCR clone 224704 (TRBV20-1, TRBJ1-1)
CSARGGGNTEAFF

SEQ ID NO: 449409 - protein, 15 aa, Homo sapiens
  CDR3 for alpha chain variable domain of TCR clone 224705 (TRAV25, TRAJ53)
CAATGGGSSNYKLTF

SEQ ID NO: 449410 - protein, 19 aa, Homo sapiens
  CDR3 for beta chain variable domain of TCR clone 224705 (TRBV7-2, TRBJ2-3)
CASSFLSRKWGGGTDTQYF

SEQ ID NO: 449411 - protein, 12 aa, Homo sapiens
  CDR3 for alpha chain variable domain of TCR clone 224706 (TRAV12-1, TRAJ40)
CVFYSGAYKYIF

SEQ ID NO: 449412 - protein, 12 aa, Homo sapiens
  CDR3 for beta chain variable domain of TCR clone 224706 (TRBV7-3, TRBJ2-1)
CASSFINNEQFF

SEQ ID NO: 449413 - protein, 13 aa, Homo sapiens
  CDR3 for alpha chain variable domain of TCR clone 224707 (TRAV38-1, TRAJ42)
CARVGGSQGNLIF

SEQ ID NO: 449414 - protein, 17 aa, Homo sapiens
  CDR3 for beta chain variable domain of TCR clone 224707 (TRBV20-1, TRBJ2-1)
CSARDPLAGVWDNEQFF

SEQ ID NO: 449415 - protein, 14 aa, Homo sapiens
  CDR3 for alpha chain variable domain of TCR clone 224708 (TRAV12-3, TRAJ10)
SHLPLTGGGNKLTF

SEQ ID NO: 449416 - protein, 15 aa, Homo sapiens
  CDR3 for beta chain variable domain of TCR clone 224708 (TRBV9, TRBJ1-6)
CASSVAGTGDSALHF

SEQ ID NO: 449417 - protein, 16 aa, Homo sapiens
  CDR3 for alpha chain variable domain of TCR clone 224709 (TRAV30, TRAJ24)
CGTEIVDADSWGKFQF

SEQ ID NO: 449418 - protein, 12 aa, Homo sapiens
  CDR3 for beta chain variable domain of TCR clone 224709 (TRBV3-1, TRBJ2-7)
CASSQVRYEQYF

SEQ ID NO: 449419 - protein, 14 aa, Homo sapiens
  CDR3 for alpha chain variable domain of TCR clone 224710 (TRAV1-2, TRAJ16)
CAVNRFPDGQKLLF

SEQ ID NO: 449420 - protein, 14 aa, Homo sapiens
  CDR3 for beta chain variable domain of TCR clone 224710 (TRBV7-3, TRBJ1-1)
CASSLKGGNTEAFF

SEQ ID NO: 449421 - protein, 11 aa, Homo sapiens
  CDR3 for alpha chain variable domain of TCR clone 224711 (TRAV35, TRAJ30)
CAGPGDDKIIF

SEQ ID NO: 449422 - protein, 18 aa, Homo sapiens
  CDR3 for beta chain variable domain of TCR clone 224711 (TRBV7-6, TRBJ2-1)
CASSPRTSGMSSYNEQFY

SEQ ID NO: 449423 - protein, 17 aa, Homo sapiens
  CDR3 for alpha chain variable domain of TCR clone 224712 (TRAV3, TRAJ38)
CAVRGCLNAGNNRKLIW

SEQ ID NO: 449424 - protein, 16 aa, Homo sapiens
  CDR3 for beta chain variable domain of TCR clone 224712 (TRBV20-1, TRBJ1-4)
CSAPGQGLLTNEELFF

SEQ ID NO: 449425 - protein, 17 aa, Homo sapiens
  CDR3 for alpha chain variable domain of TCR clone 224713 (TRAV1-2, TRAJ31)
CAFFRCQTHVWRWNLAG

SEQ ID NO: 449426 - protein, 13 aa, Homo sapiens
  CDR3 for beta chain variable domain of TCR clone 224713 (TRBV7-9, TRBJ1-2)
CASSLKQNYGYTF

SEQ ID NO: 449427 - protein, 13 aa, Homo sapiens
  CDR3 for alpha chain variable domain of TCR clone 224714 (TRAV35, TRAJ15)
CAGLNQAGTALIF

SEQ ID NO: 449428 - protein, 15 aa, Homo sapiens
  CDR3 for beta chain variable domain of TCR clone 224714 (TRBV28, TRBJ1-1)
CASTSTRGLNTEAFF

SEQ ID NO: 449429 - protein, 13 aa, Homo sapiens
  CDR3 for alpha chain variable domain of TCR clone 224715 (TRAV12-3, TRAJ33)
CAMSVNSNHQLIW

SEQ ID NO: 449430 - protein, 11 aa, Homo sapiens
  CDR3 for beta chain variable domain of TCR clone 224715 (TRBV7-3, TRBJ2-5)
CASSLSETQYF

SEQ ID NO: 449431 - protein, 17 aa, Homo sapiens
  CDR3 for alpha chain variable domain of TCR clone 224716 (TRAV26-1, TRAJ53)
CIVRVDDSGGSNYKLTF

SEQ ID NO: 449432 - protein, 15 aa, Homo sapiens
  CDR3 for beta chain variable domain of TCR clone 224716 (TRBV2, TRBJ2-3)
CASSDFEKATDTQYF

SEQ ID NO: 449433 - protein, 15 aa, Homo sapiens
  CDR3 for alpha chain variable domain of TCR clone 224717 (TRAV21, TRAJ53)
CATLNSGGSNYKLTF

SEQ ID NO: 449434 - protein, 13 aa, Homo sapiens
  CDR3 for beta chain variable domain of TCR clone 224717 (TRBV4-1, TRBJ2-1)
CASSQEVQYEQFF

SEQ ID NO: 449435 - protein, 18 aa, Homo sapiens
  CDR3 for alpha chain variable domain of TCR clone 224718 (TRAV13-1, TRAJ52)
CAAKNPNAGGTSYGKLTF

SEQ ID NO: 449436 - protein, 16 aa, Homo sapiens
  CDR3 for beta chain variable domain of TCR clone 224718 (TRBV5-7, TRBJ2-7)
CASSSPGGRTPYEQYF

SEQ ID NO: 449437 - protein, 14 aa, Homo sapiens
  CDR3 for alpha chain variable domain of TCR clone 224719 (TRAV1-2, TRAJ16)
CAVNRFSDGQKLLF

SEQ ID NO: 449438 - protein, 13 aa, Homo sapiens
  CDR3 for beta chain variable domain of TCR clone 224719 (TRBV11-2, TRBJ1-1)
CASSSTRNTEAFF

SEQ ID NO: 449439 - protein, 12 aa, Homo sapiens
  CDR3 for alpha chain variable domain of TCR clone 224720 (TRAV3, TRAJ27)
CAVRDGAGKSTF

SEQ ID NO: 449440 - protein, 15 aa, Homo sapiens
  CDR3 for beta chain variable domain of TCR clone 224720 (TRBV13, TRBJ2-2)
CSSGYRGRRTGELFF

SEQ ID NO: 449441 - protein, 15 aa, Homo sapiens
  CDR3 for alpha chain variable domain of TCR clone 224721 (TRAV8-3, TRAJ11)
CAVGLLNSGYSTLTF

SEQ ID NO: 449442 - protein, 23 aa, Homo sapiens
  CDR3 for beta chain variable domain of TCR clone 224721 (TRBV7-9, TRBJ1-2)
EAQLEKSRLLSDRFSSGGDGYTF

SEQ ID NO: 449443 - protein, 13 aa, Homo sapiens
  CDR3 for alpha chain variable domain of TCR clone 224722 (TRAV21, TRAJ27)
RAARPGNAGKSTF

SEQ ID NO: 449444 - protein, 13 aa, Homo sapiens
  CDR3 for beta chain variable domain of TCR clone 224722 (TRBV19, TRBJ2-2)
CASSIWSTGELFF

SEQ ID NO: 449445 - protein, 17 aa, Homo sapiens
  CDR3 for alpha chain variable domain of TCR clone 224723 (TRAV13-1, TRAJ28)
CAASPPYSGAGSYQLTF

SEQ ID NO: 449446 - protein, 14 aa, Homo sapiens
  CDR3 for beta chain variable domain of TCR clone 224723 (TRBV11-2, TRBJ2-7)
CASSLELEGYEQYF

SEQ ID NO: 449447 - protein, 23 aa, Homo sapiens
  CDR3 for alpha chain variable domain of TCR clone 224724 (TRAV26-1, TRAJ38)
CIADNAGNNHIQNPDPAGYQLRD

SEQ ID NO: 449448 - protein, 13 aa, Homo sapiens
  CDR3 for beta chain variable domain of TCR clone 224724 (TRBV20-1, TRBJ1-1)
CSARGGGNTESFF

SEQ ID NO: 449449 - protein, 14 aa, Homo sapiens
  CDR3 for alpha chain variable domain of TCR clone 224725 (TRAV17, TRAJ35)
CATDRPGFGNVLHC

SEQ ID NO: 449450 - protein, 14 aa, Homo sapiens
  CDR3 for beta chain variable domain of TCR clone 224725 (TRBV7-8, TRBJ2-3)
CASSLGAGTDTQYF

SEQ ID NO: 449451 - protein, 15 aa, Homo sapiens
  CDR3 for alpha chain variable domain of TCR clone 224726 (TRAV8-1, TRAJ8)
CAVNAMNTGFQKLVF

SEQ ID NO: 449452 - protein, 12 aa, Homo sapiens
  CDR3 for beta chain variable domain of TCR clone 224726 (TRBV7-8, TRBJ2-7)
CASSLGDREQYF

SEQ ID NO: 449453 - protein, 14 aa, Homo sapiens
  CDR3 for alpha chain variable domain of TCR clone 224727 (TRAV8-4, TRAJ54)
CAVSEVLGAQKLVF

SEQ ID NO: 449454 - protein, 16 aa, Homo sapiens
  CDR3 for beta chain variable domain of TCR clone 224727 (TRBV10-3, TRBJ2-1)
CAISGVGDGGGGEQFF

SEQ ID NO: 449455 - protein, 12 aa, Homo sapiens
  CDR3 for alpha chain variable domain of TCR clone 224728 (TRAV38-1, TRAJ20)
CAFIWNDCKLSF

SEQ ID NO: 449456 - protein, 14 aa, Homo sapiens
  CDR3 for beta chain variable domain of TCR clone 224728 (TRBV19, TRBJ2-1)
CASSMGSGATEQFF

SEQ ID NO: 449457 - protein, 14 aa, Homo sapiens
  CDR3 for alpha chain variable domain of TCR clone 224729 (TRAV12-3, TRAJ10)
SHLPLTGGGNKLTF

SEQ ID NO: 449458 - protein, 13 aa, Homo sapiens
  CDR3 for beta chain variable domain of TCR clone 224729 (TRBV12-4, TRBJ2-1)
CASSSRAYNEQFF

SEQ ID NO: 449459 - protein, 15 aa, Homo sapiens
  CDR3 for alpha chain variable domain of TCR clone 224730 (TRAV3, TRAJ5)
CAGRDFDTGRRALTF

SEQ ID NO: 449460 - protein, 13 aa, Homo sapiens
  CDR3 for beta chain variable domain of TCR clone 224730 (TRBV12-4, TRBJ2-7)
CASSPTETYEQYF

SEQ ID NO: 449461 - protein, 12 aa, Homo sapiens
  CDR3 for alpha chain variable domain of TCR clone 224731 (TRAV21, TRAJ6)
CAVKGGSYIPTF

SEQ ID NO: 449462 - protein, 13 aa, Homo sapiens
  CDR3 for beta chain variable domain of TCR clone 224731 (TRBV11-2, TRBJ1-1)
RASSFTENTEAFF

SEQ ID NO: 449463 - protein, 10 aa, Homo sapiens
  CDR3 for alpha chain variable domain of TCR clone 224732 (TRAV16, TRAJ22)
SAMYLRQLTF

SEQ ID NO: 449464 - protein, 11 aa, Homo sapiens
  CDR3 for beta chain variable domain of TCR clone 224732 (TRBV7-2, TRBJ2-3)
CASSSSDTQYF

SEQ ID NO: 449465 - protein, 12 aa, Homo sapiens
  CDR3 for alpha chain variable domain of TCR clone 224733 (TRAV3, TRAJ31)
CAVRDGNARLMF

SEQ ID NO: 449466 - protein, 15 aa, Homo sapiens
  CDR3 for beta chain variable domain of TCR clone 224733 (TRBV7-3, TRBJ2-2)
CASSETGQGTGELFF

SEQ ID NO: 449467 - protein, 13 aa, Homo sapiens
  CDR3 for alpha chain variable domain of TCR clone 224734 (TRAV17, TRAJ9)
CATDYTGGFKTIF

SEQ ID NO: 449468 - protein, 15 aa, Homo sapiens
  CDR3 for beta chain variable domain of TCR clone 224734 (TRBV7-2, TRBJ2-1)
CASSSGLAGGNEQFF

SEQ ID NO: 449469 - protein, 13 aa, Homo sapiens
  CDR3 for alpha chain variable domain of TCR clone 224735 (TRAV17, TRAJ9)
CATDYTGGFKTIF

SEQ ID NO: 449470 - protein, 16 aa, Homo sapiens
  CDR3 for beta chain variable domain of TCR clone 224735 (TRBV20-1, TRBJ2-4)
CSATSLAELAKNIQYF

SEQ ID NO: 449471 - protein, 13 aa, Homo sapiens
  CDR3 for alpha chain variable domain of TCR clone 224736 (TRAV12-2, TRAJ10)
CAVPTGGGNKLTF

SEQ ID NO: 449472 - protein, 14 aa, Homo sapiens
  CDR3 for beta chain variable domain of TCR clone 224736 (TRBV6-1, TRBJ1-3)
CVSVQGGGGNTIYF

SEQ ID NO: 449473 - protein, 15 aa, Homo sapiens
  CDR3 for alpha chain variable domain of TCR clone 224737 (TRAV20, TRAJ53)
CAVQAGGGSNYKLTF

SEQ ID NO: 449474 - protein, 12 aa, Homo sapiens
  CDR3 for beta chain variable domain of TCR clone 224737 (TRBV7-8, TRBJ2-7)
CASSLGDREQYF

SEQ ID NO: 449475 - protein, 15 aa, Homo sapiens
  CDR3 for alpha chain variable domain of TCR clone 224738 (TRAV23/DV6, TRAJ13)
CAASIGSGGYQKVTF

SEQ ID NO: 449476 - protein, 15 aa, Homo sapiens
  CDR3 for beta chain variable domain of TCR clone 224738 (TRBV6-1, TRBJ1-3)
CASSDFGFSGNTIYF

SEQ ID NO: 449477 - protein, 11 aa, Homo sapiens
  CDR3 for alpha chain variable domain of TCR clone 224739 (TRAV1-1, TRAJ23)
CAVRQGGKLIF

SEQ ID NO: 449478 - protein, 16 aa, Homo sapiens
  CDR3 for beta chain variable domain of TCR clone 224739 (TRBV15, TRBJ2-7)
CATSRDRGRRRGEQYF

SEQ ID NO: 449479 - protein, 14 aa, Homo sapiens
  CDR3 for alpha chain variable domain of TCR clone 224740 (TRAV23/DV6, TRAJ17)
CAASIGAAGNKLTF

SEQ ID NO: 449480 - protein, 13 aa, Homo sapiens
  CDR3 for beta chain variable domain of TCR clone 224740 (TRBV7-3, TRBJ1-1)
CASSQDWGAEAFF

SEQ ID NO: 449481 - protein, 10 aa, Homo sapiens
  CDR3 for alpha chain variable domain of TCR clone 224741 (TRAV12-1, TRAJ23)
CVVSGGKLIF

SEQ ID NO: 449482 - protein, 16 aa, Homo sapiens
  CDR3 for beta chain variable domain of TCR clone 224741 (TRBV9, TRBJ1-2)
CASSVEERVSPYGYTF

SEQ ID NO: 449483 - protein, 16 aa, Homo sapiens
  CDR3 for alpha chain variable domain of TCR clone 224742 (TRAV35, TRAJ28)
CAGQKYSGSGSYQLTF

SEQ ID NO: 449484 - protein, 13 aa, Homo sapiens
  CDR3 for beta chain variable domain of TCR clone 224742 (TRBV19, TRBJ1-2)
CASSQGQVYGYTF

SEQ ID NO: 449485 - protein, 13 aa, Homo sapiens
  CDR3 for alpha chain variable domain of TCR clone 224743 (TRAV13-2, TRAJ48)
CAEMDSGNEKLTF

SEQ ID NO: 449486 - protein, 15 aa, Homo sapiens
  CDR3 for beta chain variable domain of TCR clone 224743 (TRBV7-9, TRBJ1-6)
CASSSPGRGNSPLRF

SEQ ID NO: 449487 - protein, 13 aa, Homo sapiens
  CDR3 for alpha chain variable domain of TCR clone 224744 (TRAV26-1, TRAJ35)
CIVSPVWGKCCIA

SEQ ID NO: 449488 - protein, 17 aa, Homo sapiens
  CDR3 for beta chain variable domain of TCR clone 224744 (TRBV7-9, TRBJ2-7)
CASSFDGSRGGAYEQYF

SEQ ID NO: 449489 - protein, 17 aa, Homo sapiens
  CDR3 for alpha chain variable domain of TCR clone 224745 (TRAV8-6, TRAJ58)
CAVSSWVGETSGSRLTS

SEQ ID NO: 449490 - protein, 15 aa, Homo sapiens
  CDR3 for beta chain variable domain of TCR clone 224745 (TRBV20-1, TRBJ2-7)
CSARDRVSGMDEQYF

SEQ ID NO: 449491 - protein, 10 aa, Homo sapiens
  CDR3 for alpha chain variable domain of TCR clone 224746 (TRAV26-1, TRAJ22)
CIVSLNFFWF

SEQ ID NO: 449492 - protein, 17 aa, Homo sapiens
  CDR3 for beta chain variable domain of TCR clone 224746 (TRBV13, TRBJ2-3)
CASSLSRVAGGRNTQYF

SEQ ID NO: 449493 - protein, 15 aa, Homo sapiens
  CDR3 for alpha chain variable domain of TCR clone 224747 (TRAV27, TRAJ38)
CAGRFNAGNNRKLIW

SEQ ID NO: 449494 - protein, 13 aa, Homo sapiens
  CDR3 for beta chain variable domain of TCR clone 224747 (TRBV4-2, TRBJ1-1)
CASSQAGNTEAFF

SEQ ID NO: 449495 - protein, 13 aa, Homo sapiens
  CDR3 for alpha chain variable domain of TCR clone 224748 (TRAV17, TRAJ29)
CATDAFRKHTSCL

SEQ ID NO: 449496 - protein, 15 aa, Homo sapiens
  CDR3 for beta chain variable domain of TCR clone 224748 (TRBV20-1, TRBJ2-7)
CSARDRVSGMDEQYF

SEQ ID NO: 449497 - protein, 14 aa, Homo sapiens
  CDR3 for alpha chain variable domain of TCR clone 224749 (TRAV2, TRAJ9)
CAVEERSGGFKTIF

SEQ ID NO: 449498 - protein, 17 aa, Homo sapiens
  CDR3 for beta chain variable domain of TCR clone 224749 (TRBV7-8, TRBJ2-6)
CASSAGTGGAGANVLTL

SEQ ID NO: 449499 - protein, 13 aa, Homo sapiens
  CDR3 for alpha chain variable domain of TCR clone 224750 (TRAV12-2, TRAJ20)
CAVYPSNDYKLSF

SEQ ID NO: 449500 - protein, 16 aa, Homo sapiens
  CDR3 for beta chain variable domain of TCR clone 224750 (TRBV19, TRBJ2-2)
CASSPSGGLNTGELFF

SEQ ID NO: 449501 - protein, 10 aa, Homo sapiens
  CDR3 for alpha chain variable domain of TCR clone 224751 (TRAV19, TRAJ45)
PGGGADGLTF

SEQ ID NO: 449502 - protein, 14 aa, Homo sapiens
  CDR3 for beta chain variable domain of TCR clone 224751 (TRBV7-2, TRBJ2-7)
CASSLYPGRYEQYF

SEQ ID NO: 449503 - protein, 12 aa, Homo sapiens
  CDR3 for alpha chain variable domain of TCR clone 224752 (TRAV16, TRAJ10)
CSRTGGGNKLTF

SEQ ID NO: 449504 - protein, 15 aa, Homo sapiens
  CDR3 for beta chain variable domain of TCR clone 224752 (TRBV28, TRBJ2-7)
CASSLISGGSYEQYF

SEQ ID NO: 449505 - protein, 11 aa, Homo sapiens
  CDR3 for alpha chain variable domain of TCR clone 224753 (TRAV2, TRAJ13)
CDSVGYQKVTF

SEQ ID NO: 449506 - protein, 11 aa, Homo sapiens
  CDR3 for beta chain variable domain of TCR clone 224753 (TRBV5-6, TRBJ2-5)
CASSLERTQYF

SEQ ID NO: 449507 - protein, 14 aa, Homo sapiens
  CDR3 for alpha chain variable domain of TCR clone 224754 (TRAV12-2, TRAJ40)
CAVKIPSGTYKNIF

SEQ ID NO: 449508 - protein, 14 aa, Homo sapiens
  CDR3 for beta chain variable domain of TCR clone 224754 (TRBV20-1, TRBJ1-1)
CNAQTRIGGTEAFF

SEQ ID NO: 449509 - protein, 13 aa, Homo sapiens
  CDR3 for alpha chain variable domain of TCR clone 224755 (TRAV2, TRAJ29)
CAAGNSGNTPLVF

SEQ ID NO: 449510 - protein, 16 aa, Homo sapiens
  CDR3 for beta chain variable domain of TCR clone 224755 (TRBV7-9, TRBJ1-2)
SASSPGGGAINYGYTF

SEQ ID NO: 449511 - protein, 14 aa, Homo sapiens
  CDR3 for alpha chain variable domain of TCR clone 224756 (TRAV17, TRAJ56)
CATVPAGVNSKLTF

SEQ ID NO: 449512 - protein, 13 aa, Homo sapiens
  CDR3 for beta chain variable domain of TCR clone 224756 (TRBV12-4, TRBJ2-2)
CASSITGSGELFF

SEQ ID NO: 449513 - protein, 18 aa, Homo sapiens
  CDR3 for alpha chain variable domain of TCR clone 224757 (TRAV12-3, TRAJ52)
CAMSRTDAGGTSYGKLTF

SEQ ID NO: 449514 - protein, 15 aa, Homo sapiens
  CDR3 for beta chain variable domain of TCR clone 224757 (TRBV19, TRBJ1-2)
CASSVGQVLNYGYTF

SEQ ID NO: 449515 - protein, 13 aa, Homo sapiens
  CDR3 for alpha chain variable domain of TCR clone 224758 (TRAV1-2, TRAJ9)
CAALNTGGFKTIF

SEQ ID NO: 449516 - protein, 14 aa, Homo sapiens
  CDR3 for beta chain variable domain of TCR clone 224758 (TRBV7-3, TRBJ2-1)
CASSLAGGTNEQFV

SEQ ID NO: 449517 - protein, 13 aa, Homo sapiens
  CDR3 for alpha chain variable domain of TCR clone 224759 (TRAV2, TRAJ21)
CAVEDLNFNKFYF

SEQ ID NO: 449518 - protein, 15 aa, Homo sapiens
  CDR3 for beta chain variable domain of TCR clone 224759 (TRBV28, TRBJ2-5)
CASSPGQGSIEPQYF

SEQ ID NO: 449519 - protein, 16 aa, Homo sapiens
  CDR3 for alpha chain variable domain of TCR clone 224760 (TRAV1-2, TRAJ10)
CAVRGVLTGGGNKLTF

SEQ ID NO: 449520 - protein, 18 aa, Homo sapiens
  CDR3 for beta chain variable domain of TCR clone 224760 (TRBV28, TRBJ2-3)
CASSSGLAEATSTDTQYF

SEQ ID NO: 449521 - protein, 14 aa, Homo sapiens
  CDR3 for alpha chain variable domain of TCR clone 224761 (TRAV26-1, TRAJ48)
CIVRVGFGNEKLTC

SEQ ID NO: 449522 - protein, 13 aa, Homo sapiens
  CDR3 for beta chain variable domain of TCR clone 224761 (TRBV11-3, TRBJ2-3)
CASSHDTKDAQYF

SEQ ID NO: 449523 - protein, 14 aa, Homo sapiens
  CDR3 for alpha chain variable domain of TCR clone 224762 (TRAV1-2, TRAJ8)
CAVREETGFQKLVF

SEQ ID NO: 449524 - protein, 12 aa, Homo sapiens
  CDR3 for beta chain variable domain of TCR clone 224762 (TRBV24-1, TRBJ1-1)
CATLYPDTEAFF

SEQ ID NO: 449525 - protein, 14 aa, Homo sapiens
  CDR3 for alpha chain variable domain of TCR clone 224763 (TRAV38-2/DV8, TRAJ23)
CAYRSQNQGGKLIF

SEQ ID NO: 449526 - protein, 13 aa, Homo sapiens
  CDR3 for beta chain variable domain of TCR clone 224763 (TRBV24-1, TRBJ2-1)
CATSAGPCNEQFF

SEQ ID NO: 449527 - protein, 14 aa, Homo sapiens
  CDR3 for alpha chain variable domain of TCR clone 224764 (TRAV2, TRAJ29)
CAVTPPSGNTPLVF

SEQ ID NO: 449528 - protein, 13 aa, Homo sapiens
  CDR3 for beta chain variable domain of TCR clone 224764 (TRBV11-2, TRBJ2-1)
CASSLGLAGERFF

SEQ ID NO: 449529 - protein, 13 aa, Homo sapiens
  CDR3 for alpha chain variable domain of TCR clone 224765 (TRAV21, TRAJ15)
CAVPNQAGTALIF

SEQ ID NO: 449530 - protein, 15 aa, Homo sapiens
  CDR3 for beta chain variable domain of TCR clone 224765 (TRBV12-4, TRBJ2-7)
CASSRGLAGTYEQHF

SEQ ID NO: 449531 - protein, 15 aa, Homo sapiens
  CDR3 for alpha chain variable domain of TCR clone 224766 (TRAV8-2, TRAJ16)
CVVSDGFSDGQKLHF

SEQ ID NO: 449532 - protein, 14 aa, Homo sapiens
  CDR3 for beta chain variable domain of TCR clone 224766 (TRBV7-3, TRBJ1-1)
CASSLGTGYTEAFF

SEQ ID NO: 449533 - protein, 13 aa, Homo sapiens
  CDR3 for alpha chain variable domain of TCR clone 224767 (TRAV2, TRAJ40)
CAVVISGTYKYIF

SEQ ID NO: 449534 - protein, 14 aa, Homo sapiens
  CDR3 for beta chain variable domain of TCR clone 224767 (TRBV19, TRBJ2-1)
CASPTVVLSGEQFF

SEQ ID NO: 449535 - protein, 12 aa, Homo sapiens
  CDR3 for alpha chain variable domain of TCR clone 224768 (TRAV12-2, TRAJ21)
CAPSDNFNKFYF

SEQ ID NO: 449536 - protein, 14 aa, Homo sapiens
  CDR3 for beta chain variable domain of TCR clone 224768 (TRBV12-4, TRBJ1-1)
CASSLGTGGTEAFF

SEQ ID NO: 449537 - protein, 15 aa, Homo sapiens
  CDR3 for alpha chain variable domain of TCR clone 224769 (TRAV35, TRAJ23)
CAGPLGNNQGGKLIF

SEQ ID NO: 449538 - protein, 14 aa, Homo sapiens
  CDR3 for beta chain variable domain of TCR clone 224769 (TRBV7-9, TRBJ1-1)
CASTALQSYTEAFF

SEQ ID NO: 449539 - protein, 15 aa, Homo sapiens
  CDR3 for alpha chain variable domain of TCR clone 224770 (TRAV8-4, TRAJ3)
CAVTGENLVQQCFQD

SEQ ID NO: 449540 - protein, 13 aa, Homo sapiens
  CDR3 for beta chain variable domain of TCR clone 224770 (TRBV5-7, TRBJ2-6)
CASTSSGANVLTF

SEQ ID NO: 449541 - protein, 17 aa, Homo sapiens
  CDR3 for alpha chain variable domain of TCR clone 224771 (TRAV23/DV6, TRAJ12)
CAAIELGALDSSYKLIF

SEQ ID NO: 449542 - protein, 15 aa, Homo sapiens
  CDR3 for beta chain variable domain of TCR clone 224771 (TRBV12-4, TRBJ2-5)
CASTLNSGRGETQYF

SEQ ID NO: 449543 - protein, 11 aa, Homo sapiens
  CDR3 for alpha chain variable domain of TCR clone 224772 (TRAV3, TRAJ21)
CAVGNFNKFYL

SEQ ID NO: 449544 - protein, 15 aa, Homo sapiens
  CDR3 for beta chain variable domain of TCR clone 224772 (TRBV12-4, TRBJ1-2)
CASRLGVAGNYGYTF

SEQ ID NO: 449545 - protein, 16 aa, Homo sapiens
  CDR3 for alpha chain variable domain of TCR clone 224773 (TRAV3, TRAJ37)
CAVRPRGSGNTGKLIF

SEQ ID NO: 449546 - protein, 11 aa, Homo sapiens
  CDR3 for beta chain variable domain of TCR clone 224773 (TRBV10-3, TRBJ2-7)
CAISEGLEQYF

SEQ ID NO: 449547 - protein, 15 aa, Homo sapiens
  CDR3 for alpha chain variable domain of TCR clone 224774 (TRAV8-3, TRAJ45)
CASSYSGGGADGLTF

SEQ ID NO: 449548 - protein, 16 aa, Homo sapiens
  CDR3 for beta chain variable domain of TCR clone 224774 (TRBV7-2, TRBJ2-3)
CASSLVALYSTDTQYF

SEQ ID NO: 449549 - protein, 11 aa, Homo sapiens
  CDR3 for alpha chain variable domain of TCR clone 224775 (TRAV3, TRAJ21)
CAVGNFNKFYF

SEQ ID NO: 449550 - protein, 15 aa, Homo sapiens
  CDR3 for beta chain variable domain of TCR clone 224775 (TRBV5-1, TRBJ2-2)
CASSSQGGNTGELFF

SEQ ID NO: 449551 - protein, 14 aa, Homo sapiens
  CDR3 for alpha chain variable domain of TCR clone 224776 (TRAV9-2, TRAJ39)
CALYIYNAGNMLTF

SEQ ID NO: 449552 - protein, 14 aa, Homo sapiens
  CDR3 for beta chain variable domain of TCR clone 224776 (TRBV7-9, TRBJ2-5)
CASSSPPGTETQYF

SEQ ID NO: 449553 - protein, 16 aa, Homo sapiens
  CDR3 for alpha chain variable domain of TCR clone 224777 (TRAV30, TRAJ26)
CGTESVGDNYGQNFVF

SEQ ID NO: 449554 - protein, 13 aa, Homo sapiens
  CDR3 for beta chain variable domain of TCR clone 224777 (TRBV19, TRBJ1-2)
CESSISEGYGYTF

SEQ ID NO: 449555 - protein, 14 aa, Homo sapiens
  CDR3 for alpha chain variable domain of TCR clone 224778 (TRAV8-1, TRAJ5)
CAVSMDTGRRALTF

SEQ ID NO: 449556 - protein, 15 aa, Homo sapiens
  CDR3 for beta chain variable domain of TCR clone 224778 (TRBV19, TRBJ2-4)
CASRGPRRGENKQYF

SEQ ID NO: 449557 - protein, 14 aa, Homo sapiens
  CDR3 for alpha chain variable domain of TCR clone 224779 (TRAV13-1, TRAJ22)
CAASYSGSARQLTF

SEQ ID NO: 449558 - protein, 13 aa, Homo sapiens
  CDR3 for beta chain variable domain of TCR clone 224779 (TRBV6-3, TRBJ1-2)
CASSRTGDYGYTF

SEQ ID NO: 449559 - protein, 16 aa, Homo sapiens
  CDR3 for alpha chain variable domain of TCR clone 224780 (TRAV8-3, TRAJ18)
CAVALDRGSTLGRLYF

SEQ ID NO: 449560 - protein, 15 aa, Homo sapiens
  CDR3 for beta chain variable domain of TCR clone 224780 (TRBV28, TRBJ2-1)
CASSIIAGGRSEQFF

SEQ ID NO: 449561 - protein, 15 aa, Homo sapiens
  CDR3 for alpha chain variable domain of TCR clone 224781 (TRAV12-1, TRAJ42)
CVVKTGGGSQGNLIF

SEQ ID NO: 449562 - protein, 17 aa, Homo sapiens
  CDR3 for beta chain variable domain of TCR clone 224781 (TRBV4-1, TRBJ1-4)
CASSQEGPRGVEEKLFF

SEQ ID NO: 449563 - protein, 22 aa, Homo sapiens
  CDR3 for alpha chain variable domain of TCR clone 224782 (TRAV8-3, TRAJ32)
CAVEVVLQTSSSLGLALCLLST

SEQ ID NO: 449564 - protein, 12 aa, Homo sapiens
  CDR3 for beta chain variable domain of TCR clone 224782 (TRBV7-8, TRBJ2-7)
CASSLGDREQYF

SEQ ID NO: 449565 - protein, 15 aa, Homo sapiens
  CDR3 for alpha chain variable domain of TCR clone 224783 (TRAV20, TRAJ53)
CAVQASGGSYYKLTF

SEQ ID NO: 449566 - protein, 12 aa, Homo sapiens
  CDR3 for beta chain variable domain of TCR clone 224783 (TRBV7-8, TRBJ2-7)
CASSLSDIGQYF

SEQ ID NO: 449567 - protein, 13 aa, Homo sapiens
  CDR3 for alpha chain variable domain of TCR clone 224784 (TRAV8-3, TRAJ48)
CAVFPFGNEKLTF

SEQ ID NO: 449568 - protein, 12 aa, Homo sapiens
  CDR3 for beta chain variable domain of TCR clone 224784 (TRBV11-2, TRBJ2-2)
CASSLGGGELFF

SEQ ID NO: 449569 - protein, 16 aa, Homo sapiens
  CDR3 for alpha chain variable domain of TCR clone 224785 (TRAV26-1, TRAJ33)
CIVPFWGEESNYQLIW

SEQ ID NO: 449570 - protein, 14 aa, Homo sapiens
  CDR3 for beta chain variable domain of TCR clone 224785 (TRBV6-3, TRBJ1-1)
CASSYHSKNTEAFF

SEQ ID NO: 449571 - protein, 18 aa, Homo sapiens
  CDR3 for alpha chain variable domain of TCR clone 224786 (TRAV13-1, TRAJ52)
CTAKNPNAGGNSYGKLTF

SEQ ID NO: 449572 - protein, 15 aa, Homo sapiens
  CDR3 for beta chain variable domain of TCR clone 224786 (TRBV6-1, TRBJ2-3)
CASSERGGITDTQYF

SEQ ID NO: 449573 - protein, 16 aa, Homo sapiens
  CDR3 for alpha chain variable domain of TCR clone 224787 (TRAV3, TRAJ37)
CAVRPHGSGNTGKLIF

SEQ ID NO: 449574 - protein, 13 aa, Homo sapiens
  CDR3 for beta chain variable domain of TCR clone 224787 (TRBV12-4, TRBJ2-7)
CASSLSGVYEQYF

SEQ ID NO: 449575 - protein, 15 aa, Homo sapiens
  CDR3 for alpha chain variable domain of TCR clone 224788 (TRAV23/DV6, TRAJ38)
CAARSNAGNNRKLIW

SEQ ID NO: 449576 - protein, 16 aa, Homo sapiens
  CDR3 for beta chain variable domain of TCR clone 224788 (TRBV10-2, TRBJ1-5)
CASSRNRDYSKQPQHF

SEQ ID NO: 449577 - protein, 15 aa, Homo sapiens
  CDR3 for alpha chain variable domain of TCR clone 224789 (TRAV21, TRAJ24)
CAARSSTGSWGKLQF

SEQ ID NO: 449578 - protein, 13 aa, Homo sapiens
  CDR3 for beta chain variable domain of TCR clone 224789 (TRBV11-2, TRBJ2-5)
CASSSTGEETQYL

SEQ ID NO: 449579 - protein, 11 aa, Homo sapiens
  CDR3 for alpha chain variable domain of TCR clone 224790 (TRAV23/DV6, TRAJ58)
CAARLLRGETS

SEQ ID NO: 449580 - protein, 15 aa, Homo sapiens
  CDR3 for beta chain variable domain of TCR clone 224790 (TRBV9, TRBJ1-6)
CASSVAGTGDSPLHL

SEQ ID NO: 449581 - protein, 13 aa, Homo sapiens
  CDR3 for alpha chain variable domain of TCR clone 224791 (TRAV1-2, TRAJ9)
CAALNTGGFKTIF

SEQ ID NO: 449582 - protein, 13 aa, Homo sapiens
  CDR3 for beta chain variable domain of TCR clone 224791 (TRBV5-1, TRBJ1-1)
CASSADWDTEAFF

SEQ ID NO: 449583 - protein, 12 aa, Homo sapiens
  CDR3 for alpha chain variable domain of TCR clone 224792 (TRAV16, TRAJ56)
CAPTGANSKLAF

SEQ ID NO: 449584 - protein, 17 aa, Homo sapiens
  CDR3 for beta chain variable domain of TCR clone 224792 (TRBV27, TRBJ2-6)
CASSLTGFASGANVLTF

SEQ ID NO: 449585 - protein, 17 aa, Homo sapiens
  CDR3 for alpha chain variable domain of TCR clone 224793 (TRAV27, TRAJ18)
CAGLHRGRGSTLGRLDF

SEQ ID NO: 449586 - protein, 14 aa, Homo sapiens
  CDR3 for beta chain variable domain of TCR clone 224793 (TRBV20-1, TRBJ1-5)
CSARGRGSNQPQHF

SEQ ID NO: 449587 - protein, 17 aa, Homo sapiens
  CDR3 for alpha chain variable domain of TCR clone 224794 (TRAV3, TRAJ42)
CAVRDRDYGGSQGNLIF

SEQ ID NO: 449588 - protein, 15 aa, Homo sapiens
  CDR3 for beta chain variable domain of TCR clone 224794 (TRBV6-6, TRBJ2-7)
CDCSYSYGGSYEQYF

SEQ ID NO: 449589 - protein, 15 aa, Homo sapiens
  CDR3 for alpha chain variable domain of TCR clone 224795 (TRAV17, TRAJ57)
CATGPSQGRSEKLVF

SEQ ID NO: 449590 - protein, 18 aa, Homo sapiens
  CDR3 for beta chain variable domain of TCR clone 224795 (TRBV7-9, TRBJ2-7)
CASSLTTSGSRTWYEQYF

SEQ ID NO: 449591 - protein, 16 aa, Homo sapiens
  CDR3 for alpha chain variable domain of TCR clone 224796 (TRAV12-1, TRAJ43)
CVVNPPRFGAGTRLTV

SEQ ID NO: 449592 - protein, 16 aa, Homo sapiens
  CDR3 for beta chain variable domain of TCR clone 224796 (TRBV27, TRBJ2-2)
CASSSTGGGDTGELFF

SEQ ID NO: 449593 - protein, 14 aa, Homo sapiens
  CDR3 for alpha chain variable domain of TCR clone 224797 (TRAV29/DV5, TRAJ36)
CAARSKTGANNPFF

SEQ ID NO: 449594 - protein, 14 aa, Homo sapiens
  CDR3 for beta chain variable domain of TCR clone 224797 (TRBV12-5, TRBJ2-5)
CASGSRTHQETQYF

SEQ ID NO: 449595 - protein, 12 aa, Homo sapiens
  CDR3 for alpha chain variable domain of TCR clone 224798 (TRAV12-3, TRAJ3)
CAIDSVASKIIF

SEQ ID NO: 449596 - protein, 17 aa, Homo sapiens
  CDR3 for beta chain variable domain of TCR clone 224798 (TRBV7-9, TRBJ2-3)
CASSLEEAGEYPDTQYF

SEQ ID NO: 449597 - protein, 14 aa, Homo sapiens
  CDR3 for alpha chain variable domain of TCR clone 224799 (TRAV26-1, TRAJ38)
CIADNAGKNRKLIW

SEQ ID NO: 449598 - protein, 17 aa, Homo sapiens
  CDR3 for beta chain variable domain of TCR clone 224799 (TRBV7-9, TRBJ2-3)
CASSPTVAGDLTDTQYF

SEQ ID NO: 449599 - protein, 18 aa, Homo sapiens
  CDR3 for alpha chain variable domain of TCR clone 224800 (TRAV13-1, TRAJ45)
CAASIGVYSGGGADVLTF

SEQ ID NO: 449600 - protein, 13 aa, Homo sapiens
  CDR3 for beta chain variable domain of TCR clone 224800 (TRBV27, TRBJ1-1)
CASSYATNTEAFF

SEQ ID NO: 449601 - protein, 14 aa, Homo sapiens
  CDR3 for alpha chain variable domain of TCR clone 224801 (TRAV26-1, TRAJ38)
CIADNAGNNRKLIR

SEQ ID NO: 449602 - protein, 15 aa, Homo sapiens
  CDR3 for beta chain variable domain of TCR clone 224801 (TRBV20-1, TRBJ1-1)
CSASRGVTGNTEAFF

SEQ ID NO: 449603 - protein, 11 aa, Homo sapiens
  CDR3 for alpha chain variable domain of TCR clone 224802 (TRAV35, TRAJ30)
CAGPGDDKIIF

SEQ ID NO: 449604 - protein, 14 aa, Homo sapiens
  CDR3 for beta chain variable domain of TCR clone 224802 (TRBV7-6, TRBJ1-6)
CASSQAEGGSTLHF

SEQ ID NO: 449605 - protein, 13 aa, Homo sapiens
  CDR3 for alpha chain variable domain of TCR clone 224803 (TRAV12-3, TRAJ13)
CAMGTGGYQKVTF

SEQ ID NO: 449606 - protein, 15 aa, Homo sapiens
  CDR3 for beta chain variable domain of TCR clone 224803 (TRBV28, TRBJ2-5)
CASSPPWSYQETQYF

SEQ ID NO: 449607 - protein, 14 aa, Homo sapiens
  CDR3 for alpha chain variable domain of TCR clone 224804 (TRAV35, TRAJ33)
CAGSSQDSNYQLIW

SEQ ID NO: 449608 - protein, 15 aa, Homo sapiens
  CDR3 for beta chain variable domain of TCR clone 224804 (TRBV20-1, TRBJ2-7)
CSAESGTSGAYEQHF

SEQ ID NO: 449609 - protein, 16 aa, Homo sapiens
  CDR3 for alpha chain variable domain of TCR clone 224805 (TRAV3, TRAJ37)
CAVRGKGSGNPGKLIF

SEQ ID NO: 449610 - protein, 15 aa, Homo sapiens
  CDR3 for beta chain variable domain of TCR clone 224805 (TRBV18, TRBJ2-1)
CASSPPSASYNEQFF

SEQ ID NO: 449611 - protein, 14 aa, Homo sapiens
  CDR3 for alpha chain variable domain of TCR clone 224806 (TRAV20, TRAJ56)
CAVQFGGANSKLTF

SEQ ID NO: 449612 - protein, 13 aa, Homo sapiens
  CDR3 for beta chain variable domain of TCR clone 224806 (TRBV4-1, TRBJ2-2)
RASSQENTGELFF

SEQ ID NO: 449613 - protein, 13 aa, Homo sapiens
  CDR3 for alpha chain variable domain of TCR clone 224807 (TRAV22, TRAJ29)
CAVGGSGNTPLVF

SEQ ID NO: 449614 - protein, 13 aa, Homo sapiens
  CDR3 for beta chain variable domain of TCR clone 224807 (TRBV19, TRBJ1-2)
CASSVPGQDGYTF

SEQ ID NO: 449615 - protein, 11 aa, Homo sapiens
  CDR3 for alpha chain variable domain of TCR clone 224808 (TRAV26-1, TRAJ37)
CIVRVGRKLIF

SEQ ID NO: 449616 - protein, 14 aa, Homo sapiens
  CDR3 for beta chain variable domain of TCR clone 224808 (TRBV25-1, TRBJ1-1)
CASTHLGGNTEASF

SEQ ID NO: 449617 - protein, 19 aa, Homo sapiens
  CDR3 for alpha chain variable domain of TCR clone 224809 (TRAV27, TRAJ57)
CAGVRRADLKSWSLERVRN

SEQ ID NO: 449618 - protein, 11 aa, Homo sapiens
  CDR3 for beta chain variable domain of TCR clone 224809 (TRBV11-2, TRBJ1-1)
CASSINTEAFF

SEQ ID NO: 449619 - protein, 15 aa, Homo sapiens
  CDR3 for alpha chain variable domain of TCR clone 224810 (TRAV12-2, TRAJ53)
CAVNGGGGSNYKLTF

SEQ ID NO: 449620 - protein, 14 aa, Homo sapiens
  CDR3 for beta chain variable domain of TCR clone 224810 (TRBV4-1, TRBJ2-2)
CASSQAVNTGDLFF

SEQ ID NO: 449621 - protein, 10 aa, Homo sapiens
  CDR3 for alpha chain variable domain of TCR clone 224811 (TRAV8-4, TRAJ43)
CAVSADDMRF

SEQ ID NO: 449622 - protein, 16 aa, Homo sapiens
  CDR3 for beta chain variable domain of TCR clone 224811 (TRBV12-4, TRBJ1-5)
CASSSGPRGSNQPQHF

SEQ ID NO: 449623 - protein, 14 aa, Homo sapiens
  CDR3 for alpha chain variable domain of TCR clone 224812 (TRAV1-1, TRAJ28)
CAAPSGAGSYQLTF

SEQ ID NO: 449624 - protein, 15 aa, Homo sapiens
  CDR3 for beta chain variable domain of TCR clone 224812 (TRBV7-2, TRBJ1-2)
CASSLVSGGDYSYTF

SEQ ID NO: 449625 - protein, 12 aa, Homo sapiens
  CDR3 for alpha chain variable domain of TCR clone 224813 (TRAV12-3, TRAJ17)
CAMTLTGNKLTF

SEQ ID NO: 449626 - protein, 14 aa, Homo sapiens
  CDR3 for beta chain variable domain of TCR clone 224813 (TRBV5-1, TRBJ2-2)
CASSLIWIPGELFF

SEQ ID NO: 449627 - protein, 15 aa, Homo sapiens
  CDR3 for alpha chain variable domain of TCR clone 224814 (TRAV12-2, TRAJ53)
CAVNGGGGSNYKLTF

SEQ ID NO: 449628 - protein, 16 aa, Homo sapiens
  CDR3 for beta chain variable domain of TCR clone 224814 (TRBV7-9, TRBJ1-2)
CASSLGFSAGEDGYIF

SEQ ID NO: 449629 - protein, 11 aa, Homo sapiens
  CDR3 for alpha chain variable domain of TCR clone 224815 (TRAV21, TRAJ34)
CAHYKTDKLIF

SEQ ID NO: 449630 - protein, 15 aa, Homo sapiens
  CDR3 for beta chain variable domain of TCR clone 224815 (TRBV6-3, TRBJ2-7)
CASSSPGTVFYEQYF

SEQ ID NO: 449631 - protein, 18 aa, Homo sapiens
  CDR3 for alpha chain variable domain of TCR clone 224816 (TRAV21, TRAJ52)
CAVSPSPAGGTSYGKLTF

SEQ ID NO: 449632 - protein, 17 aa, Homo sapiens
  CDR3 for beta chain variable domain of TCR clone 224816 (TRBV13, TRBJ2-3)
CASSLPRVAGGRNTQYF

SEQ ID NO: 449633 - protein, 14 aa, Homo sapiens
  CDR3 for alpha chain variable domain of TCR clone 224817 (TRAV1-2, TRAJ4)
CAVRSPGGYNKLIF

SEQ ID NO: 449634 - protein, 13 aa, Homo sapiens
  CDR3 for beta chain variable domain of TCR clone 224817 (TRBV7-9, TRBJ1-2)
CASSLKQNYGYTF

SEQ ID NO: 449635 - protein, 12 aa, Homo sapiens
  CDR3 for alpha chain variable domain of TCR clone 224818 (TRAV12-2, TRAJ20)
CAVRPSDYKLSF

SEQ ID NO: 449636 - protein, 14 aa, Homo sapiens
  CDR3 for beta chain variable domain of TCR clone 224818 (TRBV6-1, TRBJ2-7)
CASKRARPDYEQYF

SEQ ID NO: 449637 - protein, 14 aa, Homo sapiens
  CDR3 for alpha chain variable domain of TCR clone 224819 (TRAV12-2, TRAJ13)
CAVEKTGGYQKVTF

SEQ ID NO: 449638 - protein, 13 aa, Homo sapiens
  CDR3 for beta chain variable domain of TCR clone 224819 (TRBV28, TRBJ2-7)
CASKAGGVYEQYF

SEQ ID NO: 449639 - protein, 16 aa, Homo sapiens
  CDR3 for alpha chain variable domain of TCR clone 224820 (TRAV12-2, TRAJ32)
CAVNLGQGGATKKLIF

SEQ ID NO: 449640 - protein, 13 aa, Homo sapiens
  CDR3 for beta chain variable domain of TCR clone 224820 (TRBV9, TRBJ2-2)
CASSPRPAGELFF

SEQ ID NO: 449641 - protein, 14 aa, Homo sapiens
  CDR3 for alpha chain variable domain of TCR clone 224821 (TRAV13-1, TRAJ5)
CAAHPDTGRRALTF

SEQ ID NO: 449642 - protein, 17 aa, Homo sapiens
  CDR3 for beta chain variable domain of TCR clone 224821 (TRBV20-1, TRBJ2-2)
CSASGSGQGGLTGELFF

SEQ ID NO: 449643 - protein, 13 aa, Homo sapiens
  CDR3 for alpha chain variable domain of TCR clone 224822 (TRAV26-2, TRAJ57)
CIPSRGGSEKLVF

SEQ ID NO: 449644 - protein, 17 aa, Homo sapiens
  CDR3 for beta chain variable domain of TCR clone 224822 (TRBV11-2, TRBJ2-1)
CASSLYPPGVEYNEQFF

SEQ ID NO: 449645 - protein, 14 aa, Homo sapiens
  CDR3 for alpha chain variable domain of TCR clone 224823 (TRAV27, TRAJ49)
CAGRPEGTGNQFYF

SEQ ID NO: 449646 - protein, 16 aa, Homo sapiens
  CDR3 for beta chain variable domain of TCR clone 224823 (TRBV12-5, TRBJ2-5)
CANGPRTSGNQETQYF

SEQ ID NO: 449647 - protein, 15 aa, Homo sapiens
  CDR3 for alpha chain variable domain of TCR clone 224824 (TRAV12-3, TRAJ10)
CASYILTGGGNKLTF

SEQ ID NO: 449648 - protein, 15 aa, Homo sapiens
  CDR3 for beta chain variable domain of TCR clone 224824 (TRBV7-2, TRBJ1-6)
CPSSLGPDRGMPLHF

SEQ ID NO: 449649 - protein, 16 aa, Homo sapiens
  CDR3 for alpha chain variable domain of TCR clone 224825 (TRAV30, TRAJ24)
CGTEIVDADSWGKFQF

SEQ ID NO: 449650 - protein, 12 aa, Homo sapiens
  CDR3 for beta chain variable domain of TCR clone 224825 (TRBV18, TRBJ2-1)
CASSSDEDEQFF

SEQ ID NO: 449651 - protein, 16 aa, Homo sapiens
  CDR3 for alpha chain variable domain of TCR clone 224826 (TRAV3, TRAJ10)
CAVRDMRAGGGNKLTF

SEQ ID NO: 449652 - protein, 13 aa, Homo sapiens
  CDR3 for beta chain variable domain of TCR clone 224826 (TRBV4-2, TRBJ1-1)
CASSQAGNSEAFF

SEQ ID NO: 449653 - protein, 12 aa, Homo sapiens
  CDR3 for alpha chain variable domain of TCR clone 224827 (TRAV12-3, TRAJ17)
CAMTLTGNKLTF

SEQ ID NO: 449654 - protein, 12 aa, Homo sapiens
  CDR3 for beta chain variable domain of TCR clone 224827 (TRBV11-2, TRBJ2-2)
CASSIPTGELFL

SEQ ID NO: 449655 - protein, 11 aa, Homo sapiens
  CDR3 for alpha chain variable domain of TCR clone 224828 (TRAV21, TRAJ34)
CAHYHTDKLIF

SEQ ID NO: 449656 - protein, 13 aa, Homo sapiens
  CDR3 for beta chain variable domain of TCR clone 224828 (TRBV20-1, TRBJ2-7)
CSADPGATYEQYF

SEQ ID NO: 449657 - protein, 16 aa, Homo sapiens
  CDR3 for alpha chain variable domain of TCR clone 224829 (TRAV16, TRAJ37)
CSKWPDGSSNTGKLIF

SEQ ID NO: 449658 - protein, 13 aa, Homo sapiens
  CDR3 for beta chain variable domain of TCR clone 224829 (TRBV7-2, TRBJ2-2)
CACSLAVTGELFF

SEQ ID NO: 449659 - protein, 11 aa, Homo sapiens
  CDR3 for alpha chain variable domain of TCR clone 224830 (TRAV1-2, TRAJ20)
CAVANDYKLSF

SEQ ID NO: 449660 - protein, 15 aa, Homo sapiens
  CDR3 for beta chain variable domain of TCR clone 224830 (TRBV18, TRBJ2-1)
CASLPDRGRDNEQFF

SEQ ID NO: 449661 - protein, 14 aa, Homo sapiens
  CDR3 for alpha chain variable domain of TCR clone 224831 (TRAV35, TRAJ50)
CAGHRKTSYDKVIF

SEQ ID NO: 449662 - protein, 14 aa, Homo sapiens
  CDR3 for beta chain variable domain of TCR clone 224831 (TRBV7-3, TRBJ2-1)
CASSLAGGTNEQFF

SEQ ID NO: 449663 - protein, 14 aa, Homo sapiens
  CDR3 for alpha chain variable domain of TCR clone 224832 (TRAV16, TRAJ39)
CALSKNNAGNMLTF

SEQ ID NO: 449664 - protein, 15 aa, Homo sapiens
  CDR3 for beta chain variable domain of TCR clone 224832 (TRBV7-9, TRBJ1-3)
CASSFRGSPGNTIYF

SEQ ID NO: 449665 - protein, 13 aa, Homo sapiens
  CDR3 for alpha chain variable domain of TCR clone 224833 (TRAV12-1, TRAJ26)
CVVRRNYGQNFVF

SEQ ID NO: 449666 - protein, 14 aa, Homo sapiens
  CDR3 for beta chain variable domain of TCR clone 224833 (TRBV6-1, TRBJ1-3)
CASVQVGGGNTIYF

SEQ ID NO: 449667 - protein, 17 aa, Homo sapiens
  CDR3 for alpha chain variable domain of TCR clone 224834 (TRAV23/DV6, TRAJ57)
CAASSTLSQGGSEKLVF

SEQ ID NO: 449668 - protein, 13 aa, Homo sapiens
  CDR3 for beta chain variable domain of TCR clone 224834 (TRBV12-4, TRBJ1-2)
CASSSGPNYGYTF

SEQ ID NO: 449669 - protein, 14 aa, Homo sapiens
  CDR3 for alpha chain variable domain of TCR clone 224835 (TRAV12-2, TRAJ13)
CAVKKTGGYQKVTF

SEQ ID NO: 449670 - protein, 17 aa, Homo sapiens
  CDR3 for beta chain variable domain of TCR clone 224835 (TRBV20-1, TRBJ2-1)
CSASSSGLGDPTMSSSS

SEQ ID NO: 449671 - protein, 18 aa, Homo sapiens
  CDR3 for alpha chain variable domain of TCR clone 224836 (TRAV26-1, TRAJ42)
CIVRPSMEEAKEISSLEK

SEQ ID NO: 449672 - protein, 16 aa, Homo sapiens
  CDR3 for beta chain variable domain of TCR clone 224836 (TRBV7-3, TRBJ2-2)
CASSLKRGTLSGELFF

SEQ ID NO: 449673 - protein, 13 aa, Homo sapiens
  CDR3 for alpha chain variable domain of TCR clone 224837 (TRAV25, TRAJ40)
CAGSASGTYKYNF

SEQ ID NO: 449674 - protein, 14 aa, Homo sapiens
  CDR3 for beta chain variable domain of TCR clone 224837 (TRBV7-2, TRBJ2-7)
CASRSQGAAYEQYF

SEQ ID NO: 449675 - protein, 15 aa, Homo sapiens
  CDR3 for alpha chain variable domain of TCR clone 224838 (TRAV3, TRAJ20)
CAVRDIKLSDYKLSF

SEQ ID NO: 449676 - protein, 14 aa, Homo sapiens
  CDR3 for beta chain variable domain of TCR clone 224838 (TRBV7-2, TRBJ2-7)
CASSPKTSFYEQYF

SEQ ID NO: 449677 - protein, 14 aa, Homo sapiens
  CDR3 for alpha chain variable domain of TCR clone 224839 (TRAV12-1, TRAJ3)
CVVNPGSSASKIIF

SEQ ID NO: 449678 - protein, 18 aa, Homo sapiens
  CDR3 for beta chain variable domain of TCR clone 224839 (TRBV4-2, TRBJ1-2)
CASSQDKVGHTVNDGYTF

SEQ ID NO: 449679 - protein, 12 aa, Homo sapiens
  CDR3 for alpha chain variable domain of TCR clone 224840 (TRAV9-2, TRAJ9)
CAMNTGGFITIF

SEQ ID NO: 449680 - protein, 17 aa, Homo sapiens
  CDR3 for beta chain variable domain of TCR clone 224840 (TRBV28, TRBJ2-5)
CASSRQGGLAGAETQYF

SEQ ID NO: 449681 - protein, 15 aa, Homo sapiens
  CDR3 for alpha chain variable domain of TCR clone 224841 (TRAV26-1, TRAJ22)
CIVRVSFWFCKATDL

SEQ ID NO: 449682 - protein, 13 aa, Homo sapiens
  CDR3 for beta chain variable domain of TCR clone 224841 (TRBV7-2, TRBJ2-7)
CASSSPSGSEQYF

SEQ ID NO: 449683 - protein, 13 aa, Homo sapiens
  CDR3 for alpha chain variable domain of TCR clone 224842 (TRAV12-3, TRAJ47)
CAMKKEYGKKLVF

SEQ ID NO: 449684 - protein, 16 aa, Homo sapiens
  CDR3 for beta chain variable domain of TCR clone 224842 (TRBV3-1, TRBJ2-6)
CASSLTWVSGANVLTF

SEQ ID NO: 449685 - protein, 15 aa, Homo sapiens
  CDR3 for alpha chain variable domain of TCR clone 224843 (TRAV8-3, TRAJ40)
CAAPSLCSGTYRYLF

SEQ ID NO: 449686 - protein, 12 aa, Homo sapiens
  CDR3 for beta chain variable domain of TCR clone 224843 (TRBV11-2, TRBJ2-2)
CASSLGGGELFF

SEQ ID NO: 449687 - protein, 12 aa, Homo sapiens
  CDR3 for alpha chain variable domain of TCR clone 224844 (TRAV12-3, TRAJ17)
CAMTLTGNKLTF

SEQ ID NO: 449688 - protein, 15 aa, Homo sapiens
  CDR3 for beta chain variable domain of TCR clone 224844 (TRBV20-1, TRBJ2-7)
CIARDRVSEMDEQYF

SEQ ID NO: 449689 - protein, 11 aa, Homo sapiens
  CDR3 for alpha chain variable domain of TCR clone 224845 (TRAV1-1, TRAJ23)
CAVRQGGKLIF

SEQ ID NO: 449690 - protein, 12 aa, Homo sapiens
  CDR3 for beta chain variable domain of TCR clone 224845 (TRBV28, TRBJ2-5)
CASSPVSETQYF

SEQ ID NO: 449691 - protein, 14 aa, Homo sapiens
  CDR3 for alpha chain variable domain of TCR clone 224846 (TRAV1-2, TRAJ16)
CAVNRFSDDQKLLF

SEQ ID NO: 449692 - protein, 18 aa, Homo sapiens
  CDR3 for beta chain variable domain of TCR clone 224846 (TRBV20-1, TRBJ2-6)
CSAETTPTHGSGANVLTF

SEQ ID NO: 449693 - protein, 14 aa, Homo sapiens
  CDR3 for alpha chain variable domain of TCR clone 224847 (TRAV8-3, TRAJ39)
CAVGANNAGNMLTF

SEQ ID NO: 449694 - protein, 17 aa, Homo sapiens
  CDR3 for beta chain variable domain of TCR clone 224847 (TRBV7-2, TRBJ1-4)
CASSFKAGPTTNEKLFF

SEQ ID NO: 449695 - protein, 12 aa, Homo sapiens
  CDR3 for alpha chain variable domain of TCR clone 224848 (TRAV13-1, TRAJ48)
CAANFGTEKLTF

SEQ ID NO: 449696 - protein, 13 aa, Homo sapiens
  CDR3 for beta chain variable domain of TCR clone 224848 (TRBV7-3, TRBJ1-1)
CASSQDWGAEAFF

SEQ ID NO: 449697 - protein, 15 aa, Homo sapiens
  CDR3 for alpha chain variable domain of TCR clone 224849 (TRAV3, TRAJ20)
CAVRDIKLSDYKLSF

SEQ ID NO: 449698 - protein, 14 aa, Homo sapiens
  CDR3 for beta chain variable domain of TCR clone 224849 (TRBV2, TRBJ1-5)
CASSENRGGQPQHF

SEQ ID NO: 449699 - protein, 14 aa, Homo sapiens
  CDR3 for alpha chain variable domain of TCR clone 224850 (TRAV8-6, TRAJ9)
CAVRLNTGGFKTIF

SEQ ID NO: 449700 - protein, 14 aa, Homo sapiens
  CDR3 for beta chain variable domain of TCR clone 224850 (TRBV27, TRBJ2-7)
CASSWTAENYEQYF

SEQ ID NO: 449701 - protein, 14 aa, Homo sapiens
  CDR3 for alpha chain variable domain of TCR clone 224851 (TRAV1-2, TRAJ16)
CAVNRFSDGQKLLF

SEQ ID NO: 449702 - protein, 14 aa, Homo sapiens
  CDR3 for beta chain variable domain of TCR clone 224851 (TRBV7-9, TRBJ2-1)
CASSPRDCLYEQFF

SEQ ID NO: 449703 - protein, 12 aa, Homo sapiens
  CDR3 for alpha chain variable domain of TCR clone 224852 (TRAV8-3, TRAJ26)
CAGDNYGQNFVF

SEQ ID NO: 449704 - protein, 14 aa, Homo sapiens
  CDR3 for beta chain variable domain of TCR clone 224852 (TRBV19, TRBJ2-7)
CASSMGQGAIEQYF

SEQ ID NO: 449705 - protein, 16 aa, Homo sapiens
  CDR3 for alpha chain variable domain of TCR clone 224853 (TRAV4, TRAJ22)
CLVGDLYSGSARQLTF

SEQ ID NO: 449706 - protein, 16 aa, Homo sapiens
  CDR3 for beta chain variable domain of TCR clone 224853 (TRBV7-9, TRBJ2-1)
CASSDVAGGSYNEPFF

SEQ ID NO: 449707 - protein, 13 aa, Homo sapiens
  CDR3 for alpha chain variable domain of TCR clone 224854 (TRAV12-2, TRAJ40)
CAVKRTGTYKYIF

SEQ ID NO: 449708 - protein, 13 aa, Homo sapiens
  CDR3 for beta chain variable domain of TCR clone 224854 (TRBV24-1, TRBJ2-2)
CATTATRTGELFF

SEQ ID NO: 449709 - protein, 13 aa, Homo sapiens
  CDR3 for alpha chain variable domain of TCR clone 224855 (TRAV2, TRAJ24)
CAVTTDSWGKLQF

SEQ ID NO: 449710 - protein, 14 aa, Homo sapiens
  CDR3 for beta chain variable domain of TCR clone 224855 (TRBV13, TRBJ2-5)
CASSLGRGEETQYF

SEQ ID NO: 449711 - protein, 14 aa, Homo sapiens
  CDR3 for alpha chain variable domain of TCR clone 224856 (TRAV26-1, TRAJ48)
FIVRVGFGNEKLTF

SEQ ID NO: 449712 - protein, 13 aa, Homo sapiens
  CDR3 for beta chain variable domain of TCR clone 224856 (TRBV11-3, TRBJ2-3)
CASSHDTKDTQYF

SEQ ID NO: 449713 - protein, 14 aa, Homo sapiens
  CDR3 for alpha chain variable domain of TCR clone 224857 (TRAV12-2, TRAJ53)
CAVKGGGSNYKLTF

SEQ ID NO: 449714 - protein, 13 aa, Homo sapiens
  CDR3 for beta chain variable domain of TCR clone 224857 (TRBV11-2, TRBJ2-5)
CASSSTGEETQYF

SEQ ID NO: 449715 - protein, 16 aa, Homo sapiens
  CDR3 for alpha chain variable domain of TCR clone 224858 (TRAV14/DV4, TRAJ21)
CAMREGPENNFNKFYF

SEQ ID NO: 449716 - protein, 12 aa, Homo sapiens
  CDR3 for beta chain variable domain of TCR clone 224858 (TRBV29-1, TRBJ2-2)
CSVEKYTGELFF

SEQ ID NO: 449717 - protein, 15 aa, Homo sapiens
  CDR3 for alpha chain variable domain of TCR clone 224859 (TRAV3, TRAJ20)
CAVRDIKLSDYKVSF

SEQ ID NO: 449718 - protein, 15 aa, Homo sapiens
  CDR3 for beta chain variable domain of TCR clone 224859 (TRBV7-9, TRBJ1-6)
CASSSPGRGNSPLHF

SEQ ID NO: 449719 - protein, 14 aa, Homo sapiens
  CDR3 for alpha chain variable domain of TCR clone 224860 (TRAV12-1, TRAJ17)
CVVNYKAAGNKLTF

SEQ ID NO: 449720 - protein, 15 aa, Homo sapiens
  CDR3 for beta chain variable domain of TCR clone 224860 (TRBV7-6, TRBJ2-3)
CASSYLAGEEDTQYF

SEQ ID NO: 449721 - protein, 13 aa, Homo sapiens
  CDR3 for alpha chain variable domain of TCR clone 224861 (TRAV12-3, TRAJ9)
CAMRNTGGFKTIF

SEQ ID NO: 449722 - protein, 16 aa, Homo sapiens
  CDR3 for beta chain variable domain of TCR clone 224861 (TRBV19, TRBJ2-1)
CASSIDGSFAYNEQFV

SEQ ID NO: 449723 - protein, 15 aa, Homo sapiens
  CDR3 for alpha chain variable domain of TCR clone 224862 (TRAV8-3, TRAJ40)
CAVGGRTSGTYNYIF

SEQ ID NO: 449724 - protein, 14 aa, Homo sapiens
  CDR3 for beta chain variable domain of TCR clone 224862 (TRBV19, TRBJ2-1)
CASPTFVLSGEQFF

SEQ ID NO: 449725 - protein, 19 aa, Homo sapiens
  CDR3 for alpha chain variable domain of TCR clone 224863 (TRAV1-2, TRAJ26)
CLLPLCCERPDNYGQNFGF

SEQ ID NO: 449726 - protein, 13 aa, Homo sapiens
  CDR3 for beta chain variable domain of TCR clone 224863 (TRBV10-3, TRBJ2-7)
CASKLAVNYEQYF

SEQ ID NO: 449727 - protein, 13 aa, Homo sapiens
  CDR3 for alpha chain variable domain of TCR clone 224864 (TRAV23/DV6, TRAJ47)
CAASMTRGNKLVS

SEQ ID NO: 449728 - protein, 13 aa, Homo sapiens
  CDR3 for beta chain variable domain of TCR clone 224864 (TRBV9, TRBJ2-2)
CASSTFSSGELFF

SEQ ID NO: 449729 - protein, 13 aa, Homo sapiens
  CDR3 for alpha chain variable domain of TCR clone 224865 (TRAV26-2, TRAJ54)
CIPRVGGAQKLVF

SEQ ID NO: 449730 - protein, 16 aa, Homo sapiens
  CDR3 for beta chain variable domain of TCR clone 224865 (TRBV4-1, TRBJ1-1)
CASSSMSERTNTEAFF

SEQ ID NO: 449731 - protein, 11 aa, Homo sapiens
  CDR3 for alpha chain variable domain of TCR clone 224866 (TRAV17, TRAJ9)
CGFTGGFKSMF

SEQ ID NO: 449732 - protein, 18 aa, Homo sapiens
  CDR3 for beta chain variable domain of TCR clone 224866 (TRBV12-4, TRBJ2-2)
CASSLVAGTRGRTGELFF

SEQ ID NO: 449733 - protein, 15 aa, Homo sapiens
  CDR3 for alpha chain variable domain of TCR clone 224867 (TRAV13-2, TRAJ32)
CAENTHGGATNKLIF

SEQ ID NO: 449734 - protein, 11 aa, Homo sapiens
  CDR3 for beta chain variable domain of TCR clone 224867 (TRBV29-1, TRBJ2-5)
CSEDRTGTQYF

SEQ ID NO: 449735 - protein, 11 aa, Homo sapiens
  CDR3 for alpha chain variable domain of TCR clone 224868 (TRAV27, TRAJ47)
CAGAYGNKLVF

SEQ ID NO: 449736 - protein, 14 aa, Homo sapiens
  CDR3 for beta chain variable domain of TCR clone 224868 (TRBV7-9, TRBJ2-1)
CASSPRDSLYEQFF

SEQ ID NO: 449737 - protein, 10 aa, Homo sapiens
  CDR3 for alpha chain variable domain of TCR clone 224869 (TRAV12-2, TRAJ22)
CAVNETQLTF

SEQ ID NO: 449738 - protein, 13 aa, Homo sapiens
  CDR3 for beta chain variable domain of TCR clone 224869 (TRBV6-5, TRBJ2-6)
CASSTCGPLRLDF

SEQ ID NO: 449739 - protein, 15 aa, Homo sapiens
  CDR3 for alpha chain variable domain of TCR clone 224870 (TRAV3, TRAJ22)
CAVRDGGGSARHLTF

SEQ ID NO: 449740 - protein, 14 aa, Homo sapiens
  CDR3 for beta chain variable domain of TCR clone 224870 (TRBV20-1, TRBJ2-1)
CSAQIGGSANEQFF

SEQ ID NO: 449741 - protein, 12 aa, Homo sapiens
  CDR3 for alpha chain variable domain of TCR clone 224871 (TRAV8-4, TRAJ37)
CAKSSNTGKLIF

SEQ ID NO: 449742 - protein, 20 aa, Homo sapiens
  CDR3 for beta chain variable domain of TCR clone 224871 (TRBV7-8, TRBJ2-2)
CASSHLFPGPTIHITGELFF

SEQ ID NO: 449743 - protein, 14 aa, Homo sapiens
  CDR3 for alpha chain variable domain of TCR clone 224872 (TRAV12-3, TRAJ9)
CAMSPNTGGFKTIF

SEQ ID NO: 449744 - protein, 14 aa, Homo sapiens
  CDR3 for beta chain variable domain of TCR clone 224872 (TRBV7-3, TRBJ2-7)
CASSLSGVSYEQYF

SEQ ID NO: 449745 - protein, 12 aa, Homo sapiens
  CDR3 for alpha chain variable domain of TCR clone 224873 (TRAV29/DV5, TRAJ34)
CSASGNTDKLIF

SEQ ID NO: 449746 - protein, 16 aa, Homo sapiens
  CDR3 for beta chain variable domain of TCR clone 224873 (TRBV12-4, TRBJ1-5)
CASRQPVEGSNQPQHF

SEQ ID NO: 449747 - protein, 15 aa, Homo sapiens
  CDR3 for alpha chain variable domain of TCR clone 224874 (TRAV13-1, TRAJ44)
CAASRNTGTASKLTF

SEQ ID NO: 449748 - protein, 15 aa, Homo sapiens
  CDR3 for beta chain variable domain of TCR clone 224874 (TRBV11-2, TRBJ1-6)
CASSSPGRGNSPLHF

SEQ ID NO: 449749 - protein, 14 aa, Homo sapiens
  CDR3 for alpha chain variable domain of TCR clone 224875 (TRAV13-1, TRAJ35)
CAASKGGFGNVLHC

SEQ ID NO: 449750 - protein, 17 aa, Homo sapiens
  CDR3 for beta chain variable domain of TCR clone 224875 (TRBV5-1, TRBJ2-5)
CASSLLGLAANQETQYF

SEQ ID NO: 449751 - protein, 17 aa, Homo sapiens
  CDR3 for alpha chain variable domain of TCR clone 224876 (TRAV8-6, TRAJ58)
CAVSSWVGETSGSRLTF

SEQ ID NO: 449752 - protein, 14 aa, Homo sapiens
  CDR3 for beta chain variable domain of TCR clone 224876 (TRBV4-2, TRBJ2-1)
CASGLDRAYDEQFF

SEQ ID NO: 449753 - protein, 14 aa, Homo sapiens
  CDR3 for alpha chain variable domain of TCR clone 224877 (TRAV12-2, TRAJ44)
CAVNPAGTASKLTF

SEQ ID NO: 449754 - protein, 18 aa, Homo sapiens
  CDR3 for beta chain variable domain of TCR clone 224877 (TRBV20-1, TRBJ1-6)
AASTSAVPPVGVGSPLHF

SEQ ID NO: 449755 - protein, 12 aa, Homo sapiens
  CDR3 for alpha chain variable domain of TCR clone 224878 (TRAV13-1, TRAJ53)
AAGGGSNYKLTF

SEQ ID NO: 449756 - protein, 15 aa, Homo sapiens
  CDR3 for beta chain variable domain of TCR clone 224878 (TRBV5-1, TRBJ2-1)
WASSPPRAPYNEQFF

SEQ ID NO: 449757 - protein, 14 aa, Homo sapiens
  CDR3 for alpha chain variable domain of TCR clone 224879 (TRAV1-2, TRAJ16)
CAVNRCSDGQKLLF

SEQ ID NO: 449758 - protein, 16 aa, Homo sapiens
  CDR3 for beta chain variable domain of TCR clone 224879 (TRBV4-1, TRBJ1-1)
CASSQDAGMGNTEAFF

SEQ ID NO: 449759 - protein, 16 aa, Homo sapiens
  CDR3 for alpha chain variable domain of TCR clone 224880 (TRAV21, TRAJ52)
CAVTNAGGASYGKLTF

SEQ ID NO: 449760 - protein, 11 aa, Homo sapiens
  CDR3 for beta chain variable domain of TCR clone 224880 (TRBV2, TRBJ1-1)
CASREGTEAFF

SEQ ID NO: 449761 - protein, 14 aa, Homo sapiens
  CDR3 for alpha chain variable domain of TCR clone 224881 (TRAV13-1, TRAJ4)
CAASFSGGYNKPIF

SEQ ID NO: 449762 - protein, 14 aa, Homo sapiens
  CDR3 for beta chain variable domain of TCR clone 224881 (TRBV6-1, TRBJ1-3)
CASVQGGGRNTIYF

SEQ ID NO: 449763 - protein, 11 aa, Homo sapiens
  CDR3 for alpha chain variable domain of TCR clone 224882 (TRAV12-2, TRAJ33)
CAVGSNYPLIW

SEQ ID NO: 449764 - protein, 11 aa, Homo sapiens
  CDR3 for beta chain variable domain of TCR clone 224882 (TRBV7-9, TRBJ2-3)
CASSPTDTQYF

SEQ ID NO: 449765 - protein, 14 aa, Homo sapiens
  CDR3 for alpha chain variable domain of TCR clone 224883 (TRAV38-1, TRAJ40)
CALRPTSGNYKYIF

SEQ ID NO: 449766 - protein, 16 aa, Homo sapiens
  CDR3 for beta chain variable domain of TCR clone 224883 (TRBV7-3, TRBJ2-1)
CASSLEGYRSYNEQFF

SEQ ID NO: 449767 - protein, 14 aa, Homo sapiens
  CDR3 for alpha chain variable domain of TCR clone 224884 (TRAV38-1, TRAJ40)
CALRPTSGTYKYIF

SEQ ID NO: 449768 - protein, 19 aa, Homo sapiens
  CDR3 for beta chain variable domain of TCR clone 224884 (TRBV9, TRBJ1-3)
CASSSTLEGSGTLGNTIYF

SEQ ID NO: 449769 - protein, 12 aa, Homo sapiens
  CDR3 for alpha chain variable domain of TCR clone 224885 (TRAV12-3, TRAJ17)
CAMTLKGNKLTF

SEQ ID NO: 449770 - protein, 12 aa, Homo sapiens
  CDR3 for beta chain variable domain of TCR clone 224885 (TRBV11-2, TRBJ2-7)
CASSLPTYEQYF

SEQ ID NO: 449771 - protein, 14 aa, Homo sapiens
  CDR3 for alpha chain variable domain of TCR clone 224886 (TRAV2, TRAJ9)
CAVEDRSGGFKTIF

SEQ ID NO: 449772 - protein, 14 aa, Homo sapiens
  CDR3 for beta chain variable domain of TCR clone 224886 (TRBV4-3, TRBJ2-2)
CASSQGHVTGELFF

SEQ ID NO: 449773 - protein, 10 aa, Homo sapiens
  CDR3 for alpha chain variable domain of TCR clone 224887 (TRAV12-1, TRAJ20)
CAIYFQRLQA

SEQ ID NO: 449774 - protein, 12 aa, Homo sapiens
  CDR3 for beta chain variable domain of TCR clone 224887 (TRBV7-2, TRBJ1-5)
CASSLWSQPQHF

SEQ ID NO: 449775 - protein, 16 aa, Homo sapiens
  CDR3 for alpha chain variable domain of TCR clone 224888 (TRAV30, TRAJ24)
CGTEIVDADSWGKSQF

SEQ ID NO: 449776 - protein, 15 aa, Homo sapiens
  CDR3 for beta chain variable domain of TCR clone 224888 (TRBV6-1, TRBJ2-4)
CASSEAVWTINIQYF

SEQ ID NO: 449777 - protein, 13 aa, Homo sapiens
  CDR3 for alpha chain variable domain of TCR clone 224889 (TRAV12-3, TRAJ33)
CAMSLNSNYQLIW

SEQ ID NO: 449778 - protein, 16 aa, Homo sapiens
  CDR3 for beta chain variable domain of TCR clone 224889 (TRBV19, TRBJ2-1)
CASSKAGPSSYNEQFF

SEQ ID NO: 449779 - protein, 14 aa, Homo sapiens
  CDR3 for alpha chain variable domain of TCR clone 224890 (TRAV17, TRAJ8)
CATDLNTGFQKLVF

SEQ ID NO: 449780 - protein, 14 aa, Homo sapiens
  CDR3 for beta chain variable domain of TCR clone 224890 (TRBV25-1, TRBJ1-1)
CASTHLGGNTEAFF

SEQ ID NO: 449781 - protein, 13 aa, Homo sapiens
  CDR3 for alpha chain variable domain of TCR clone 224891 (TRAV2, TRAJ40)
CAVVNSGTYKYIF

SEQ ID NO: 449782 - protein, 15 aa, Homo sapiens
  CDR3 for beta chain variable domain of TCR clone 224891 (TRBV20-1, TRBJ2-1)
CSARSPGGPGNEQFF

SEQ ID NO: 449783 - protein, 17 aa, Homo sapiens
  CDR3 for alpha chain variable domain of TCR clone 224892 (TRAV14/DV4, TRAJ32)
CAMRERSFGGATNKLIF

SEQ ID NO: 449784 - protein, 11 aa, Homo sapiens
  CDR3 for beta chain variable domain of TCR clone 224892 (TRBV12-4, TRBJ2-3)
CASTATDTQYF

SEQ ID NO: 449785 - protein, 14 aa, Homo sapiens
  CDR3 for alpha chain variable domain of TCR clone 224893 (TRAV26-1, TRAJ44)
CIVSNTGTASKLTF

SEQ ID NO: 449786 - protein, 16 aa, Homo sapiens
  CDR3 for beta chain variable domain of TCR clone 224893 (TRBV12-5, TRBJ2-5)
CASGPRTSGNQETQYF

SEQ ID NO: 449787 - protein, 11 aa, Homo sapiens
  CDR3 for alpha chain variable domain of TCR clone 224894 (TRAV2, TRAJ13)
CASGVYQKVTF

SEQ ID NO: 449788 - protein, 15 aa, Homo sapiens
  CDR3 for beta chain variable domain of TCR clone 224894 (TRBV11-3, TRBJ2-3)
CASLKDGREGDTQYF

SEQ ID NO: 449789 - protein, 11 aa, Homo sapiens
  CDR3 for alpha chain variable domain of TCR clone 224895 (TRAV4, TRAJ31)
CLVGYNARLMF

SEQ ID NO: 449790 - protein, 14 aa, Homo sapiens
  CDR3 for beta chain variable domain of TCR clone 224895 (TRBV2, TRBJ1-5)
CASSEAAGGQPQHF

SEQ ID NO: 449791 - protein, 12 aa, Homo sapiens
  CDR3 for alpha chain variable domain of TCR clone 224896 (TRAV16, TRAJ27)
CALNHQCRQINL

SEQ ID NO: 449792 - protein, 16 aa, Homo sapiens
  CDR3 for beta chain variable domain of TCR clone 224896 (TRBV28, TRBJ2-7)
CASSLFFETGGPEQYF

SEQ ID NO: 449793 - protein, 16 aa, Homo sapiens
  CDR3 for alpha chain variable domain of TCR clone 224897 (TRAV30, TRAJ42)
CGTSKNYGGIQGNLIF

SEQ ID NO: 449794 - protein, 14 aa, Homo sapiens
  CDR3 for beta chain variable domain of TCR clone 224897 (TRBV19, TRBJ1-5)
CASNSYGTHQPQHF

SEQ ID NO: 449795 - protein, 12 aa, Homo sapiens
  CDR3 for alpha chain variable domain of TCR clone 224898 (TRAV27, TRAJ34)
CAGAKNTDKLIF

SEQ ID NO: 449796 - protein, 13 aa, Homo sapiens
  CDR3 for beta chain variable domain of TCR clone 224898 (TRBV4-1, TRBJ2-1)
CASGQEVQYEQFF

SEQ ID NO: 449797 - protein, 13 aa, Homo sapiens
  CDR3 for alpha chain variable domain of TCR clone 224899 (TRAV12-1, TRAJ21)
SVVIGDNFNKFYF

SEQ ID NO: 449798 - protein, 14 aa, Homo sapiens
  CDR3 for beta chain variable domain of TCR clone 224899 (TRBV7-3, TRBJ2-2)
CASSLYPLTGELFF

SEQ ID NO: 449799 - protein, 13 aa, Homo sapiens
  CDR3 for alpha chain variable domain of TCR clone 224900 (TRAV1-1, TRAJ9)
CAAKNTGGFKTIF

SEQ ID NO: 449800 - protein, 16 aa, Homo sapiens
  CDR3 for beta chain variable domain of TCR clone 224900 (TRBV5-1, TRBJ2-7)
CASSLEGLAGLYEQYF

SEQ ID NO: 449801 - protein, 12 aa, Homo sapiens
  CDR3 for alpha chain variable domain of TCR clone 224901 (TRAV8-3, TRAJ26)
CAGDNDGQNFVF

SEQ ID NO: 449802 - protein, 16 aa, Homo sapiens
  CDR3 for beta chain variable domain of TCR clone 224901 (TRBV20-1, TRBJ1-4)
CSAPGQGLLTNEKLFF

SEQ ID NO: 449803 - protein, 12 aa, Homo sapiens
  CDR3 for alpha chain variable domain of TCR clone 224902 (TRAV21, TRAJ33)
CGKMDSNYQLIW

SEQ ID NO: 449804 - protein, 14 aa, Homo sapiens
  CDR3 for beta chain variable domain of TCR clone 224902 (TRBV2, TRBJ2-7)
CASSRTAGGYEQYF

SEQ ID NO: 449805 - protein, 15 aa, Homo sapiens
  CDR3 for alpha chain variable domain of TCR clone 224903 (TRAV26-1, TRAJ24)
CINVGATDSWGKLQF

SEQ ID NO: 449806 - protein, 14 aa, Homo sapiens
  CDR3 for beta chain variable domain of TCR clone 224903 (TRBV25-1, TRBJ1-1)
CASTHLGGNTEAFF

SEQ ID NO: 449807 - protein, 15 aa, Homo sapiens
  CDR3 for alpha chain variable domain of TCR clone 224904 (TRAV8-3, TRAJ45)
CASSYSGGGADGLTF

SEQ ID NO: 449808 - protein, 17 aa, Homo sapiens
  CDR3 for beta chain variable domain of TCR clone 224904 (TRBV20-1, TRBJ2-1)
CSAPPRLAGTRYNEQFF

SEQ ID NO: 449809 - protein, 18 aa, Homo sapiens
  CDR3 for alpha chain variable domain of TCR clone 224905 (TRAV1-2, TRAJ18)
CAVRDMGDRGSTLGRLYF

SEQ ID NO: 449810 - protein, 16 aa, Homo sapiens
  CDR3 for beta chain variable domain of TCR clone 224905 (TRBV29-1, TRBJ1-2)
CSVQANRDIANYGYTF

SEQ ID NO: 449811 - protein, 18 aa, Homo sapiens
  CDR3 for alpha chain variable domain of TCR clone 224906 (TRAV40, TRAJ42)
SSGSRLLNYGGSQGNLIF

SEQ ID NO: 449812 - protein, 12 aa, Homo sapiens
  CDR3 for beta chain variable domain of TCR clone 224906 (TRBV2, TRBJ2-1)
CAKREGYNEQFF

SEQ ID NO: 449813 - protein, 13 aa, Homo sapiens
  CDR3 for alpha chain variable domain of TCR clone 224907 (TRAV13-1, TRAJ6)
CAASKGGSYIPTF

SEQ ID NO: 449814 - protein, 14 aa, Homo sapiens
  CDR3 for beta chain variable domain of TCR clone 224907 (TRBV7-2, TRBJ2-1)
SASSLGVGYNEQFF

SEQ ID NO: 449815 - protein, 15 aa, Homo sapiens
  CDR3 for alpha chain variable domain of TCR clone 224908 (TRAV23/DV6, TRAJ44)
CAAMKPTGPASKLTF

SEQ ID NO: 449816 - protein, 16 aa, Homo sapiens
  CDR3 for beta chain variable domain of TCR clone 224908 (TRBV28, TRBJ2-5)
CATSGWPSRLKETQYF

SEQ ID NO: 449817 - protein, 14 aa, Homo sapiens
  CDR3 for alpha chain variable domain of TCR clone 224909 (TRAV1-1, TRAJ35)
RAVRSIGFGNVLHC

SEQ ID NO: 449818 - protein, 14 aa, Homo sapiens
  CDR3 for beta chain variable domain of TCR clone 224909 (TRBV5-7, TRBJ2-7)
CASSGGLSSYEQYF

SEQ ID NO: 449819 - protein, 15 aa, Homo sapiens
  CDR3 for alpha chain variable domain of TCR clone 224910 (TRAV3, TRAJ22)
CAVRDRGGSARQLTF

SEQ ID NO: 449820 - protein, 11 aa, Homo sapiens
  CDR3 for beta chain variable domain of TCR clone 224910 (TRBV7-8, TRBJ2-1)
CQQLGHNEQFF

SEQ ID NO: 449821 - protein, 14 aa, Homo sapiens
  CDR3 for alpha chain variable domain of TCR clone 224911 (TRAV12-2, TRAJ13)
CAVKKTGGYQQVTF

SEQ ID NO: 449822 - protein, 15 aa, Homo sapiens
  CDR3 for beta chain variable domain of TCR clone 224911 (TRBV12-4, TRBJ2-5)
CASSPPTGLQETQYF

SEQ ID NO: 449823 - protein, 15 aa, Homo sapiens
  CDR3 for alpha chain variable domain of TCR clone 224912 (TRAV8-2, TRAJ40)
CVVLGTTSGTYKYIF

SEQ ID NO: 449824 - protein, 14 aa, Homo sapiens
  CDR3 for beta chain variable domain of TCR clone 224912 (TRBV3-1, TRBJ2-5)
CASSQGPDQETQYF

SEQ ID NO: 449825 - protein, 13 aa, Homo sapiens
  CDR3 for alpha chain variable domain of TCR clone 224913 (TRAV13-1, TRAJ37)
CAARSGNTGKLIF

SEQ ID NO: 449826 - protein, 14 aa, Homo sapiens
  CDR3 for beta chain variable domain of TCR clone 224913 (TRBV12-4, TRBJ2-3)
CASSLGQGTYTQYF

SEQ ID NO: 449827 - protein, 17 aa, Homo sapiens
  CDR3 for alpha chain variable domain of TCR clone 224914 (TRAV12-3, TRAJ6)
CAMSARGGAGGSYIPTF

SEQ ID NO: 449828 - protein, 14 aa, Homo sapiens
  CDR3 for beta chain variable domain of TCR clone 224914 (TRBV19, TRBJ2-1)
CASPAFVLSGEQFF

SEQ ID NO: 449829 - protein, 15 aa, Homo sapiens
  CDR3 for alpha chain variable domain of TCR clone 224915 (TRAV8-2, TRAJ16)
CVVSDGFSDGQKLLC

SEQ ID NO: 449830 - protein, 16 aa, Homo sapiens
  CDR3 for beta chain variable domain of TCR clone 224915 (TRBV7-3, TRBJ1-1)
CASSLGTGYTEAFLDK

SEQ ID NO: 449831 - protein, 13 aa, Homo sapiens
  CDR3 for alpha chain variable domain of TCR clone 224916 (TRAV27, TRAJ11)
CAGARSGYSTLTF

SEQ ID NO: 449832 - protein, 16 aa, Homo sapiens
  CDR3 for beta chain variable domain of TCR clone 224916 (TRBV10-2, TRBJ2-2)
CASSESRDRGSVELFF

SEQ ID NO: 449833 - protein, 16 aa, Homo sapiens
  CDR3 for alpha chain variable domain of TCR clone 224917 (TRAV30, TRAJ24)
CGTEIVDADSWGKFQF

SEQ ID NO: 449834 - protein, 19 aa, Homo sapiens
  CDR3 for beta chain variable domain of TCR clone 224917 (TRBV25-1, TRBJ2-2)
CAVLVYRVDRGRKTGELFF

SEQ ID NO: 449835 - protein, 14 aa, Homo sapiens
  CDR3 for alpha chain variable domain of TCR clone 224918 (TRAV12-2, TRAJ44)
CAVNTAGTASKLTF

SEQ ID NO: 449836 - protein, 14 aa, Homo sapiens
  CDR3 for beta chain variable domain of TCR clone 224918 (TRBV20-1, TRBJ1-6)
SAVPPLGVGSPLHF

SEQ ID NO: 449837 - protein, 12 aa, Homo sapiens
  CDR3 for alpha chain variable domain of TCR clone 224919 (TRAV8-3, TRAJ26)
CASDNYGKNFVF

SEQ ID NO: 449838 - protein, 15 aa, Homo sapiens
  CDR3 for beta chain variable domain of TCR clone 224919 (TRBV9, TRBJ2-1)
CASSLAGSSYNEQFF

SEQ ID NO: 449839 - protein, 13 aa, Homo sapiens
  CDR3 for alpha chain variable domain of TCR clone 224920 (TRAV12-1, TRAJ40)
CVVPTSGTYKYIF

SEQ ID NO: 449840 - protein, 14 aa, Homo sapiens
  CDR3 for beta chain variable domain of TCR clone 224920 (TRBV5-1, TRBJ2-5)
CASSFWGAQETQYF

SEQ ID NO: 449841 - protein, 14 aa, Homo sapiens
  CDR3 for alpha chain variable domain of TCR clone 224921 (TRAV8-3, TRAJ39)
CAVGANNAGNILTS

SEQ ID NO: 449842 - protein, 12 aa, Homo sapiens
  CDR3 for beta chain variable domain of TCR clone 224921 (TRBV28, TRBJ1-3)
CASVSSGNTIYF

SEQ ID NO: 449843 - protein, 12 aa, Homo sapiens
  CDR3 for alpha chain variable domain of TCR clone 224922 (TRAV12-3, TRAJ17)
CAMTLTGNKLTF

SEQ ID NO: 449844 - protein, 13 aa, Homo sapiens
  CDR3 for beta chain variable domain of TCR clone 224922 (TRBV7-7, TRBJ2-2)
CASSLTGAGELFF

SEQ ID NO: 449845 - protein, 13 aa, Homo sapiens
  CDR3 for alpha chain variable domain of TCR clone 224923 (TRAV17, TRAJ41)
CATGRNSGYALNF

SEQ ID NO: 449846 - protein, 14 aa, Homo sapiens
  CDR3 for beta chain variable domain of TCR clone 224923 (TRBV19, TRBJ2-1)
CASPTFVLSGEQFF

SEQ ID NO: 449847 - protein, 15 aa, Homo sapiens
  CDR3 for alpha chain variable domain of TCR clone 224924 (TRAV26-1, TRAJ23)
CIVRVAGYQGGKLIF

SEQ ID NO: 449848 - protein, 14 aa, Homo sapiens
  CDR3 for beta chain variable domain of TCR clone 224924 (TRBV28, TRBJ2-1)
STSGRANSYNEQFF

SEQ ID NO: 449849 - protein, 14 aa, Homo sapiens
  CDR3 for alpha chain variable domain of TCR clone 224925 (TRAV35, TRAJ28)
CAGRRGGWSYQLTF

SEQ ID NO: 449850 - protein, 15 aa, Homo sapiens
  CDR3 for beta chain variable domain of TCR clone 224925 (TRBV5-1, TRBJ2-1)
CASSPPRASYNEQFF

SEQ ID NO: 449851 - protein, 15 aa, Homo sapiens
  CDR3 for alpha chain variable domain of TCR clone 224926 (TRAV26-1, TRAJ4)
CIVRGFSGGYNKLIF

SEQ ID NO: 449852 - protein, 15 aa, Homo sapiens
  CDR3 for beta chain variable domain of TCR clone 224926 (TRBV27, TRBJ2-2)
CASRPVSTNTGELFF

SEQ ID NO: 449853 - protein, 15 aa, Homo sapiens
  CDR3 for alpha chain variable domain of TCR clone 224927 (TRAV3, TRAJ20)
CAVRDIKLIDYKLSF

SEQ ID NO: 449854 - protein, 18 aa, Homo sapiens
  CDR3 for beta chain variable domain of TCR clone 224927 (TRBV20-1, TRBJ2-5)
CSQTGDSGRLGGKETQYF

SEQ ID NO: 449855 - protein, 12 aa, Homo sapiens
  CDR3 for alpha chain variable domain of TCR clone 224928 (TRAV12-2, TRAJ10)
WGVTGGGNKLTF

SEQ ID NO: 449856 - protein, 14 aa, Homo sapiens
  CDR3 for beta chain variable domain of TCR clone 224928 (TRBV12-4, TRBJ1-1)
CASSLRSSGAEAFF

SEQ ID NO: 449857 - protein, 14 aa, Homo sapiens
  CDR3 for alpha chain variable domain of TCR clone 224929 (TRAV29/DV5, TRAJ43)
CAAIHSYNNNDLRF

SEQ ID NO: 449858 - protein, 14 aa, Homo sapiens
  CDR3 for beta chain variable domain of TCR clone 224929 (TRBV12-4, TRBJ2-5)
CASSSTEGTKTQYF

SEQ ID NO: 449859 - protein, 13 aa, Homo sapiens
  CDR3 for alpha chain variable domain of TCR clone 224930 (TRAV1-2, TRAJ13)
CAVNSGGYQKVTF

SEQ ID NO: 449860 - protein, 14 aa, Homo sapiens
  CDR3 for beta chain variable domain of TCR clone 224930 (TRBV4-1, TRBJ1-5)
CASSPKGDNQDQHF

SEQ ID NO: 449861 - protein, 14 aa, Homo sapiens
  CDR3 for alpha chain variable domain of TCR clone 224931 (TRAV1-2, TRAJ29)
CAVRELTSATPLVF

SEQ ID NO: 449862 - protein, 14 aa, Homo sapiens
  CDR3 for beta chain variable domain of TCR clone 224931 (TRBV3-1, TRBJ2-5)
CASSQGPDQVTQYF

SEQ ID NO: 449863 - protein, 12 aa, Homo sapiens
  CDR3 for alpha chain variable domain of TCR clone 224932 (TRAV23/DV6, TRAJ49)
CAATYTGNQFYF

SEQ ID NO: 449864 - protein, 11 aa, Homo sapiens
  CDR3 for beta chain variable domain of TCR clone 224932 (TRBV7-8, TRBJ2-7)
CASSLSLEQYF

SEQ ID NO: 449865 - protein, 17 aa, Homo sapiens
  CDR3 for alpha chain variable domain of TCR clone 224933 (TRAV3, TRAJ38)
CAVRDCLNAGNNRKLIW

SEQ ID NO: 449866 - protein, 13 aa, Homo sapiens
  CDR3 for beta chain variable domain of TCR clone 224933 (TRBV23-1, TRBJ1-4)
CASRGEFNEKLFF

SEQ ID NO: 449867 - protein, 13 aa, Homo sapiens
  CDR3 for alpha chain variable domain of TCR clone 224934 (TRAV12-2, TRAJ39)
CAVNNNAGNMLTF

SEQ ID NO: 449868 - protein, 16 aa, Homo sapiens
  CDR3 for beta chain variable domain of TCR clone 224934 (TRBV7-9, TRBJ1-2)
CASSLGFSSGEDGYTF

SEQ ID NO: 449869 - protein, 14 aa, Homo sapiens
  CDR3 for alpha chain variable domain of TCR clone 224935 (TRAV12-3, TRAJ9)
CAMSPNTGGFKTIF

SEQ ID NO: 449870 - protein, 13 aa, Homo sapiens
  CDR3 for beta chain variable domain of TCR clone 224935 (TRBV19, TRBJ1-5)
CASSIGGNQPQHF

SEQ ID NO: 449871 - protein, 12 aa, Homo sapiens
  CDR3 for alpha chain variable domain of TCR clone 224936 (TRAV12-1, TRAJ6)
CVVSERSYIPTF

SEQ ID NO: 449872 - protein, 16 aa, Homo sapiens
  CDR3 for beta chain variable domain of TCR clone 224936 (TRBV7-3, TRBJ2-1)
CASSLWPSGSPVLRAR

SEQ ID NO: 449873 - protein, 14 aa, Homo sapiens
  CDR3 for alpha chain variable domain of TCR clone 224937 (TRAV35, TRAJ22)
CAGLRPGSARQLTF

SEQ ID NO: 449874 - protein, 13 aa, Homo sapiens
  CDR3 for beta chain variable domain of TCR clone 224937 (TRBV20-1, TRBJ2-7)
CSATHTSGFEQYF

SEQ ID NO: 449875 - protein, 14 aa, Homo sapiens
  CDR3 for alpha chain variable domain of TCR clone 224938 (TRAV1-1, TRAJ27)
CAFSETPMQADQPL

SEQ ID NO: 449876 - protein, 17 aa, Homo sapiens
  CDR3 for beta chain variable domain of TCR clone 224938 (TRBV20-1, TRBJ2-3)
CSARDPKGVSATDTQYF

SEQ ID NO: 449877 - protein, 15 aa, Homo sapiens
  CDR3 for alpha chain variable domain of TCR clone 224939 (TRAV26-1, TRAJ44)
CIARVPFGTASKLTF

SEQ ID NO: 449878 - protein, 17 aa, Homo sapiens
  CDR3 for beta chain variable domain of TCR clone 224939 (TRBV24-1, TRBJ2-4)
CATSDAEARGARNIQYF

SEQ ID NO: 449879 - protein, 12 aa, Homo sapiens
  CDR3 for alpha chain variable domain of TCR clone 224940 (TRAV12-2, TRAJ4)
GWPEGGYNKLIF

SEQ ID NO: 449880 - protein, 12 aa, Homo sapiens
  CDR3 for beta chain variable domain of TCR clone 224940 (TRBV6-3, TRBJ2-7)
CASSLTPYEQYF

SEQ ID NO: 449881 - protein, 21 aa, Homo sapiens
  CDR3 for alpha chain variable domain of TCR clone 224941 (TRAV8-3, TRAJ6)
CAVGGEEATYLHLEEEPALLF

SEQ ID NO: 449882 - protein, 14 aa, Homo sapiens
  CDR3 for beta chain variable domain of TCR clone 224941 (TRBV5-1, TRBJ2-7)
CASSREESLYEQYF

SEQ ID NO: 449883 - protein, 18 aa, Homo sapiens
  CDR3 for alpha chain variable domain of TCR clone 224942 (TRAV12-3, TRAJ52)
CAMSVGGAGGTSYGKLTF

SEQ ID NO: 449884 - protein, 14 aa, Homo sapiens
  CDR3 for beta chain variable domain of TCR clone 224942 (TRBV7-9, TRBJ2-1)
CASSLGVADNEQFF

SEQ ID NO: 449885 - protein, 17 aa, Homo sapiens
  CDR3 for alpha chain variable domain of TCR clone 224943 (TRAV3, TRAJ6)
CAVRDGPRAGGSYIPTF

SEQ ID NO: 449886 - protein, 14 aa, Homo sapiens
  CDR3 for beta chain variable domain of TCR clone 224943 (TRBV7-2, TRBJ2-7)
CASSPKTSFYERYF

SEQ ID NO: 449887 - protein, 14 aa, Homo sapiens
  CDR3 for alpha chain variable domain of TCR clone 224944 (TRAV12-2, TRAJ53)
CAVKGGRSNYKLTF

SEQ ID NO: 449888 - protein, 17 aa, Homo sapiens
  CDR3 for beta chain variable domain of TCR clone 224944 (TRBV7-2, TRBJ1-4)
CASSFKAGPTTNEKLFF

SEQ ID NO: 449889 - protein, 17 aa, Homo sapiens
  CDR3 for alpha chain variable domain of TCR clone 224945 (TRAV3, TRAJ6)
CAVRDGPRAGGSYIPTF

SEQ ID NO: 449890 - protein, 13 aa, Homo sapiens
  CDR3 for beta chain variable domain of TCR clone 224945 (TRBV4-2, TRBJ1-2)
CASSLSASGGYTF

SEQ ID NO: 449891 - protein, 16 aa, Homo sapiens
  CDR3 for alpha chain variable domain of TCR clone 224946 (TRAV16, TRAJ52)
CALSAAGGTSYGKLTF

SEQ ID NO: 449892 - protein, 17 aa, Homo sapiens
  CDR3 for beta chain variable domain of TCR clone 224946 (TRBV11-2, TRBJ2-1)
CASSLYTPGVEYNEQFF

SEQ ID NO: 449893 - protein, 15 aa, Homo sapiens
  CDR3 for alpha chain variable domain of TCR clone 224947 (TRAV8-3, TRAJ23)
CAVGDRYNQGGKLIF

SEQ ID NO: 449894 - protein, 14 aa, Homo sapiens
  CDR3 for beta chain variable domain of TCR clone 224947 (TRBV7-8, TRBJ2-3)
GASSLEAGTDTQYF

SEQ ID NO: 449895 - protein, 14 aa, Homo sapiens
  CDR3 for alpha chain variable domain of TCR clone 224948 (TRAV12-2, TRAJ13)
CAVKKTGGYQKVTL

SEQ ID NO: 449896 - protein, 14 aa, Homo sapiens
  CDR3 for beta chain variable domain of TCR clone 224948 (TRBV5-5, TRBJ2-7)
CASSLGQGTYEQYF

SEQ ID NO: 449897 - protein, 17 aa, Homo sapiens
  CDR3 for alpha chain variable domain of TCR clone 224949 (TRAV38-2/DV8, TRAJ23)
CALSRKLIFGQGTELSV

SEQ ID NO: 449898 - protein, 17 aa, Homo sapiens
  CDR3 for beta chain variable domain of TCR clone 224949 (TRBV5-4, TRBJ2-1)
CGSSSAGGRGPYNEQFF

SEQ ID NO: 449899 - protein, 14 aa, Homo sapiens
  CDR3 for alpha chain variable domain of TCR clone 224950 (TRAV1-2, TRAJ16)
CAVNRFSDGQKLLL

SEQ ID NO: 449900 - protein, 13 aa, Homo sapiens
  CDR3 for beta chain variable domain of TCR clone 224950 (TRBV3-1, TRBJ2-2)
CASLARGSGELFF

SEQ ID NO: 449901 - protein, 13 aa, Homo sapiens
  CDR3 for alpha chain variable domain of TCR clone 224951 (TRAV21, TRAJ36)
CAVIKTGANNLFF

SEQ ID NO: 449902 - protein, 13 aa, Homo sapiens
  CDR3 for beta chain variable domain of TCR clone 224951 (TRBV29-1, TRBJ2-3)
CSATLGGRDTQYF

SEQ ID NO: 449903 - protein, 13 aa, Homo sapiens
  CDR3 for alpha chain variable domain of TCR clone 224952 (TRAV12-2, TRAJ4)
CAGFSGGYNKLIF

SEQ ID NO: 449904 - protein, 16 aa, Homo sapiens
  CDR3 for beta chain variable domain of TCR clone 224952 (TRBV24-1, TRBJ1-1)
CATSIPRGDTEAFLDK

SEQ ID NO: 449905 - protein, 17 aa, Homo sapiens
  CDR3 for alpha chain variable domain of TCR clone 224953 (TRAV35, TRAJ28)
CAGFQVYSGAGSYQLTF

SEQ ID NO: 449906 - protein, 15 aa, Homo sapiens
  CDR3 for beta chain variable domain of TCR clone 224953 (TRBV2, TRBJ1-2)
CASSEIGGANYGYTF

SEQ ID NO: 449907 - protein, 16 aa, Homo sapiens
  CDR3 for alpha chain variable domain of TCR clone 224954 (TRAV38-2/DV8, TRAJ57)
CAYRSVGQGGSEKLVF

SEQ ID NO: 449908 - protein, 13 aa, Homo sapiens
  CDR3 for beta chain variable domain of TCR clone 224954 (TRBV7-3, TRBJ1-2)
CASSLKRGYGYTF

SEQ ID NO: 449909 - protein, 15 aa, Homo sapiens
  CDR3 for alpha chain variable domain of TCR clone 224955 (TRAV8-6, TRAJ6)
CAVRDASGGSYITTF

SEQ ID NO: 449910 - protein, 13 aa, Homo sapiens
  CDR3 for beta chain variable domain of TCR clone 224955 (TRBV2, TRBJ2-2)
CASRAWRTGELFF

SEQ ID NO: 449911 - protein, 19 aa, Homo sapiens
  CDR3 for alpha chain variable domain of TCR clone 224956 (TRAV1-1, TRAJ13)
CLLLLRCEGESVGYQKVTF

SEQ ID NO: 449912 - protein, 19 aa, Homo sapiens
  CDR3 for beta chain variable domain of TCR clone 224956 (TRBV14, TRBJ2-1)
CASSQDQLWEAPEYNEQFF

SEQ ID NO: 449913 - protein, 15 aa, Homo sapiens
  CDR3 for alpha chain variable domain of TCR clone 224957 (TRAV17, TRAJ40)
CATVSSTSGTYKYIF

SEQ ID NO: 449914 - protein, 18 aa, Homo sapiens
  CDR3 for beta chain variable domain of TCR clone 224957 (TRBV7-9, TRBJ2-7)
CASSLTTSGSRTWYEQYF

SEQ ID NO: 449915 - protein, 14 aa, Homo sapiens
  CDR3 for alpha chain variable domain of TCR clone 224958 (TRAV26-1, TRAJ39)
CIVRVGNAGNMLTF

SEQ ID NO: 449916 - protein, 11 aa, Homo sapiens
  CDR3 for beta chain variable domain of TCR clone 224958 (TRBV29-1, TRBJ2-5)
CSEDRTGTQYF

SEQ ID NO: 449917 - protein, 18 aa, Homo sapiens
  CDR3 for alpha chain variable domain of TCR clone 224959 (TRAV21, TRAJ52)
CAVRPSPAGGTSYGKMSF

SEQ ID NO: 449918 - protein, 14 aa, Homo sapiens
  CDR3 for beta chain variable domain of TCR clone 224959 (TRBV12-4, TRBJ2-5)
CASGSRTHQETQYF

SEQ ID NO: 449919 - protein, 14 aa, Homo sapiens
  CDR3 for alpha chain variable domain of TCR clone 224960 (TRAV3, TRAJ9)
CAVRLNTGGVKTIF

SEQ ID NO: 449920 - protein, 17 aa, Homo sapiens
  CDR3 for beta chain variable domain of TCR clone 224960 (TRBV11-2, TRBJ2-1)
CASSLYPPGVEYNEQFF

SEQ ID NO: 449921 - protein, 16 aa, Homo sapiens
  CDR3 for alpha chain variable domain of TCR clone 224961 (TRAV8-3, TRAJ48)
CAVGLISNFGKEKLTF

SEQ ID NO: 449922 - protein, 13 aa, Homo sapiens
  CDR3 for beta chain variable domain of TCR clone 224961 (TRBV20-1, TRBJ1-5)
CSASWGRSQPQHF

SEQ ID NO: 449923 - protein, 15 aa, Homo sapiens
  CDR3 for alpha chain variable domain of TCR clone 224962 (TRAV13-2, TRAJ32)
CAENTHGGATNKLIF

SEQ ID NO: 449924 - protein, 14 aa, Homo sapiens
  CDR3 for beta chain variable domain of TCR clone 224962 (TRBV5-1, TRBJ2-7)
CASSRGESLYEQYF

SEQ ID NO: 449925 - protein, 14 aa, Homo sapiens
  CDR3 for alpha chain variable domain of TCR clone 224963 (TRAV8-3, TRAJ39)
CAVGANNAGNMLTF

SEQ ID NO: 449926 - protein, 13 aa, Homo sapiens
  CDR3 for beta chain variable domain of TCR clone 224963 (TRBV3-1, TRBJ2-5)
CASSPVLSETQYL

SEQ ID NO: 449927 - protein, 12 aa, Homo sapiens
  CDR3 for alpha chain variable domain of TCR clone 224964 (TRAV1-2, TRAJ29)
CAVPSGNTPLVF

SEQ ID NO: 449928 - protein, 11 aa, Homo sapiens
  CDR3 for beta chain variable domain of TCR clone 224964 (TRBV10-3, TRBJ2-7)
CAISEGLEQYF

SEQ ID NO: 449929 - protein, 11 aa, Homo sapiens
  CDR3 for alpha chain variable domain of TCR clone 224965 (TRAV26-1, TRAJ37)
CIVRVGRKIIF

SEQ ID NO: 449930 - protein, 13 aa, Homo sapiens
  CDR3 for beta chain variable domain of TCR clone 224965 (TRBV12-4, TRBJ2-7)
CASSFVPTAEQYF

SEQ ID NO: 449931 - protein, 16 aa, Homo sapiens
  CDR3 for alpha chain variable domain of TCR clone 224966 (TRAV17, TRAJ52)
CATGIIGGTSYGKLTF

SEQ ID NO: 449932 - protein, 15 aa, Homo sapiens
  CDR3 for beta chain variable domain of TCR clone 224966 (TRBV7-9, TRBJ2-7)
CASSPGGGLTYEQYF

SEQ ID NO: 449933 - protein, 16 aa, Homo sapiens
  CDR3 for alpha chain variable domain of TCR clone 224967 (TRAV23/DV6, TRAJ9)
CAACIGGNTGGFKTIF

SEQ ID NO: 449934 - protein, 13 aa, Homo sapiens
  CDR3 for beta chain variable domain of TCR clone 224967 (TRBV7-9, TRBJ1-2)
CASSLKQNYGYTF

SEQ ID NO: 449935 - protein, 15 aa, Homo sapiens
  CDR3 for alpha chain variable domain of TCR clone 224968 (TRAV17, TRAJ4)
CATGTWSGGYNKLIF

SEQ ID NO: 449936 - protein, 16 aa, Homo sapiens
  CDR3 for beta chain variable domain of TCR clone 224968 (TRBV20-1, TRBJ1-4)
CSAPGQGLLTNEKLVF

SEQ ID NO: 449937 - protein, 15 aa, Homo sapiens
  CDR3 for alpha chain variable domain of TCR clone 224969 (TRAV27, TRAJ50)
CAGVGRGTSSDQVIF

SEQ ID NO: 449938 - protein, 14 aa, Homo sapiens
  CDR3 for beta chain variable domain of TCR clone 224969 (TRBV7-2, TRBJ1-1)
CASSFYDLNTEAFF

SEQ ID NO: 449939 - protein, 12 aa, Homo sapiens
  CDR3 for alpha chain variable domain of TCR clone 224970 (TRAV1-2, TRAJ9)
CAGYTGGFKTIF

SEQ ID NO: 449940 - protein, 12 aa, Homo sapiens
  CDR3 for beta chain variable domain of TCR clone 224970 (TRBV11-2, TRBJ2-2)
CASSLGGGELFF

SEQ ID NO: 449941 - protein, 15 aa, Homo sapiens
  CDR3 for alpha chain variable domain of TCR clone 224971 (TRAV13-1, TRAJ48)
CAPLGSNFGNEKLTF

SEQ ID NO: 449942 - protein, 15 aa, Homo sapiens
  CDR3 for beta chain variable domain of TCR clone 224971 (TRBV7-2, TRBJ2-1)
CASSSGLAGGNEQFF

SEQ ID NO: 449943 - protein, 16 aa, Homo sapiens
  CDR3 for alpha chain variable domain of TCR clone 224972 (TRAV16, TRAJ57)
CAPYLITQGGSEKLVF

SEQ ID NO: 449944 - protein, 17 aa, Homo sapiens
  CDR3 for beta chain variable domain of TCR clone 224972 (TRBV24-1, TRBJ2-4)
CATSAAEARGVRNIQYF

SEQ ID NO: 449945 - protein, 11 aa, Homo sapiens
  CDR3 for alpha chain variable domain of TCR clone 224973 (TRAV2, TRAJ33)
CAVDSNYQLIW

SEQ ID NO: 449946 - protein, 15 aa, Homo sapiens
  CDR3 for beta chain variable domain of TCR clone 224973 (TRBV19, TRBJ1-2)
CASSVGEVLNYGYTF

SEQ ID NO: 449947 - protein, 13 aa, Homo sapiens
  CDR3 for alpha chain variable domain of TCR clone 224974 (TRAV26-2, TRAJ54)
CIPRVGGAQKLVF

SEQ ID NO: 449948 - protein, 16 aa, Homo sapiens
  CDR3 for beta chain variable domain of TCR clone 224974 (TRBV4-1, TRBJ1-1)
CDSSSMSERPNTGAYF

SEQ ID NO: 449949 - protein, 13 aa, Homo sapiens
  CDR3 for alpha chain variable domain of TCR clone 224975 (TRAV12-1, TRAJ11)
CVVKRAGYSTLTF

SEQ ID NO: 449950 - protein, 15 aa, Homo sapiens
  CDR3 for beta chain variable domain of TCR clone 224975 (TRBV7-3, TRBJ2-2)
CASSETGQGTGELFF

SEQ ID NO: 449951 - protein, 12 aa, Homo sapiens
  CDR3 for alpha chain variable domain of TCR clone 224976 (TRAV3, TRAJ26)
CAVRDYGQNFVF

SEQ ID NO: 449952 - protein, 16 aa, Homo sapiens
  CDR3 for beta chain variable domain of TCR clone 224976 (TRBV11-2, TRBJ1-2)
SASSPSRREANYGYTF

SEQ ID NO: 449953 - protein, 14 aa, Homo sapiens
  CDR3 for alpha chain variable domain of TCR clone 224977 (TRAV8-3, TRAJ39)
CAVGATNAGNMLTF

SEQ ID NO: 449954 - protein, 15 aa, Homo sapiens
  CDR3 for beta chain variable domain of TCR clone 224977 (TRBV4-3, TRBJ1-1)
CASSQELGRGTEAFF

SEQ ID NO: 449955 - protein, 17 aa, Homo sapiens
  CDR3 for alpha chain variable domain of TCR clone 224978 (TRAV23/DV6, TRAJ58)
CAARLLRGETSGPRLTF

SEQ ID NO: 449956 - protein, 13 aa, Homo sapiens
  CDR3 for beta chain variable domain of TCR clone 224978 (TRBV6-4, TRBJ1-5)
CASSADRNQPQHF

SEQ ID NO: 449957 - protein, 15 aa, Homo sapiens
  CDR3 for alpha chain variable domain of TCR clone 224979 (TRAV8-6, TRAJ11)
CAVNFMNSGYSTLTF

SEQ ID NO: 449958 - protein, 14 aa, Homo sapiens
  CDR3 for beta chain variable domain of TCR clone 224979 (TRBV19, TRBJ2-7)
CASSMGQGAIEQYF

SEQ ID NO: 449959 - protein, 13 aa, Homo sapiens
  CDR3 for alpha chain variable domain of TCR clone 224980 (TRAV4, TRAJ42)
CLVGGGSQGNRIL

SEQ ID NO: 449960 - protein, 15 aa, Homo sapiens
  CDR3 for beta chain variable domain of TCR clone 224980 (TRBV11-1, TRBJ2-7)
CASSLNYGASYEQYF

SEQ ID NO: 449961 - protein, 15 aa, Homo sapiens
  CDR3 for alpha chain variable domain of TCR clone 224981 (TRAV3, TRAJ17)
CAVRDTGAVGNKLNF

SEQ ID NO: 449962 - protein, 14 aa, Homo sapiens
  CDR3 for beta chain variable domain of TCR clone 224981 (TRBV6-3, TRBJ1-1)
CASSNLLPGAEAFF

SEQ ID NO: 449963 - protein, 12 aa, Homo sapiens
  CDR3 for alpha chain variable domain of TCR clone 224982 (TRAV13-1, TRAJ49)
CAASPMGNQFYF

SEQ ID NO: 449964 - protein, 14 aa, Homo sapiens
  CDR3 for beta chain variable domain of TCR clone 224982 (TRBV13, TRBJ2-5)
CASSLERVGETQYF

SEQ ID NO: 449965 - protein, 16 aa, Homo sapiens
  CDR3 for alpha chain variable domain of TCR clone 224983 (TRAV23/DV6, TRAJ13)
CAASFSFSGGYQKVTF

SEQ ID NO: 449966 - protein, 16 aa, Homo sapiens
  CDR3 for beta chain variable domain of TCR clone 224983 (TRBV7-3, TRBJ2-1)
CASSLEGYRAYNEQFF

SEQ ID NO: 449967 - protein, 15 aa, Homo sapiens
  CDR3 for alpha chain variable domain of TCR clone 224984 (TRAV26-1, TRAJ44)
FIVRANTGTASKLTF

SEQ ID NO: 449968 - protein, 16 aa, Homo sapiens
  CDR3 for beta chain variable domain of TCR clone 224984 (TRBV7-7, TRBJ2-1)
CASSLASGTSYNEQFL

SEQ ID NO: 449969 - protein, 11 aa, Homo sapiens
  CDR3 for alpha chain variable domain of TCR clone 224985 (TRAV17, TRAJ36)
CAPTGANNLFF

SEQ ID NO: 449970 - protein, 15 aa, Homo sapiens
  CDR3 for beta chain variable domain of TCR clone 224985 (TRBV7-9, TRBJ1-6)
CASSSPGRGNSPLHF

SEQ ID NO: 449971 - protein, 10 aa, Homo sapiens
  CDR3 for alpha chain variable domain of TCR clone 224986 (TRAV25, TRAJ17)
CQAAGNKLTF

SEQ ID NO: 449972 - protein, 13 aa, Homo sapiens
  CDR3 for beta chain variable domain of TCR clone 224986 (TRBV6-5, TRBJ2-2)
CASSLPGVGELFC

SEQ ID NO: 449973 - protein, 16 aa, Homo sapiens
  CDR3 for alpha chain variable domain of TCR clone 224987 (TRAV30, TRAJ24)
CGTEIVYADSWGKFQC

SEQ ID NO: 449974 - protein, 13 aa, Homo sapiens
  CDR3 for beta chain variable domain of TCR clone 224987 (TRBV7-2, TRBJ1-4)
CASSLAGLEKLFF

SEQ ID NO: 449975 - protein, 13 aa, Homo sapiens
  CDR3 for alpha chain variable domain of TCR clone 224988 (TRAV9-2, TRAJ9)
YALSDRGGFNTIF

SEQ ID NO: 449976 - protein, 14 aa, Homo sapiens
  CDR3 for beta chain variable domain of TCR clone 224988 (TRBV20-1, TRBJ2-2)
CSAPDTANTGELFF

SEQ ID NO: 449977 - protein, 20 aa, Homo sapiens
  CDR3 for alpha chain variable domain of TCR clone 224989 (TRAV14/DV4, TRAJ22)
CAMREGPFSISSGSARQITF

SEQ ID NO: 449978 - protein, 13 aa, Homo sapiens
  CDR3 for beta chain variable domain of TCR clone 224989 (TRBV4-2, TRBJ2-3)
CASSQDWQHTQYF

SEQ ID NO: 449979 - protein, 18 aa, Homo sapiens
  CDR3 for alpha chain variable domain of TCR clone 224990 (TRAV1-2, TRAJ18)
CAVRDMGDRGSTPGRLYF

SEQ ID NO: 449980 - protein, 16 aa, Homo sapiens
  CDR3 for beta chain variable domain of TCR clone 224990 (TRBV29-1, TRBJ1-2)
CSVEANRYIANYGYTF

SEQ ID NO: 449981 - protein, 16 aa, Homo sapiens
  CDR3 for alpha chain variable domain of TCR clone 224991 (TRAV3, TRAJ3)
CAVRDRGKSSASKIIF

SEQ ID NO: 449982 - protein, 13 aa, Homo sapiens
  CDR3 for beta chain variable domain of TCR clone 224991 (TRBV10-3, TRBJ2-7)
CASKLAVNYEQYF

SEQ ID NO: 449983 - protein, 14 aa, Homo sapiens
  CDR3 for alpha chain variable domain of TCR clone 224992 (TRAV20, TRAJ42)
CAVQAGGRQGKLIF

SEQ ID NO: 449984 - protein, 14 aa, Homo sapiens
  CDR3 for beta chain variable domain of TCR clone 224992 (TRBV28, TRBJ1-2)
CASRIQGANYGYTF

SEQ ID NO: 449985 - protein, 13 aa, Homo sapiens
  CDR3 for alpha chain variable domain of TCR clone 224993 (TRAV29/DV5, TRAJ44)
CAASTGTASKLTF

SEQ ID NO: 449986 - protein, 13 aa, Homo sapiens
  CDR3 for beta chain variable domain of TCR clone 224993 (TRBV7-9, TRBJ2-2)
CASSLDPTGELFF

SEQ ID NO: 449987 - protein, 14 aa, Homo sapiens
  CDR3 for alpha chain variable domain of TCR clone 224994 (TRAV17, TRAJ57)
CATDPQCGSEKLVF

SEQ ID NO: 449988 - protein, 15 aa, Homo sapiens
  CDR3 for beta chain variable domain of TCR clone 224994 (TRBV5-1, TRBJ2-7)
CASSLDLTSSYEQYF

SEQ ID NO: 449989 - protein, 16 aa, Homo sapiens
  CDR3 for alpha chain variable domain of TCR clone 224995 (TRAV30, TRAJ24)
CGTEIVDADSWGKFPF

SEQ ID NO: 449990 - protein, 14 aa, Homo sapiens
  CDR3 for beta chain variable domain of TCR clone 224995 (TRBV19, TRBJ2-1)
CASPTFVLSGEQFF

SEQ ID NO: 449991 - protein, 15 aa, Homo sapiens
  CDR3 for alpha chain variable domain of TCR clone 224996 (TRAV27, TRAJ53)
CAGVVGGGSNYKLTF

SEQ ID NO: 449992 - protein, 13 aa, Homo sapiens
  CDR3 for beta chain variable domain of TCR clone 224996 (TRBV7-2, TRBJ2-2)
CASSLAVTGELFF

SEQ ID NO: 449993 - protein, 10 aa, Homo sapiens
  CDR3 for alpha chain variable domain of TCR clone 224997 (TRAV30, TRAJ48)
CGIGNEKLTF

SEQ ID NO: 449994 - protein, 16 aa, Homo sapiens
  CDR3 for beta chain variable domain of TCR clone 224997 (TRBV19, TRBJ2-1)
CASSMGGGSSYNEQFF

SEQ ID NO: 449995 - protein, 17 aa, Homo sapiens
  CDR3 for alpha chain variable domain of TCR clone 224998 (TRAV3, TRAJ6)
CAVRDGPRAGGSYIPTF

SEQ ID NO: 449996 - protein, 14 aa, Homo sapiens
  CDR3 for beta chain variable domain of TCR clone 224998 (TRBV19, TRBJ1-1)
CASRRGQGNTEAFF

SEQ ID NO: 449997 - protein, 12 aa, Homo sapiens
  CDR3 for alpha chain variable domain of TCR clone 224999 (TRAV12-3, TRAJ32)
CAGGGATNKLIF

SEQ ID NO: 449998 - protein, 15 aa, Homo sapiens
  CDR3 for beta chain variable domain of TCR clone 224999 (TRBV4-3, TRBJ2-1)
CASSQASAIYNEQFF

SEQ ID NO: 449999 - protein, 13 aa, Homo sapiens
  CDR3 for alpha chain variable domain of TCR clone 225000 (TRAV35, TRAJ48)
GRSRVFGNGKLTF

SEQ ID NO: 450000 - protein, 14 aa, Homo sapiens
  CDR3 for beta chain variable domain of TCR clone 225000 (TRBV20-1, TRBJ2-5)
CSALVPGYQETQYF

SEQ ID NO: 450001 - protein, 11 aa, Homo sapiens
  CDR3 for alpha chain variable domain of TCR clone 225001 (TRAV21, TRAJ48)
CAVDGNEKLTF

SEQ ID NO: 450002 - protein, 16 aa, Homo sapiens
  CDR3 for beta chain variable domain of TCR clone 225001 (TRBV12-4, TRBJ1-5)
CTSSSGPRGSNQPQHF

SEQ ID NO: 450003 - protein, 14 aa, Homo sapiens
  CDR3 for alpha chain variable domain of TCR clone 225002 (TRAV8-2, TRAJ4)
CVVSPSGGYNKLIF

SEQ ID NO: 450004 - protein, 11 aa, Homo sapiens
  CDR3 for beta chain variable domain of TCR clone 225002 (TRBV7-9, TRBJ2-3)
CASSGPDTQYF

SEQ ID NO: 450005 - protein, 12 aa, Homo sapiens
  CDR3 for alpha chain variable domain of TCR clone 225003 (TRAV20, TRAJ34)
CAVKDNTDKLIF

SEQ ID NO: 450006 - protein, 14 aa, Homo sapiens
  CDR3 for beta chain variable domain of TCR clone 225003 (TRBV7-9, TRBJ2-7)
CASSRSGGPYEQYF

SEQ ID NO: 450007 - protein, 20 aa, Homo sapiens
  CDR3 for alpha chain variable domain of TCR clone 225004 (TRAV8-3, TRAJ44)
LSTSVLWVRLYTGTASKLNF

SEQ ID NO: 450008 - protein, 16 aa, Homo sapiens
  CDR3 for beta chain variable domain of TCR clone 225004 (TRBV6-4, TRBJ1-2)
CASSEAVGDPNYGYTF

SEQ ID NO: 450009 - protein, 16 aa, Homo sapiens
  CDR3 for alpha chain variable domain of TCR clone 225005 (TRAV23/DV6, TRAJ57)
CAASPTLSQAGSEKLF

SEQ ID NO: 450010 - protein, 14 aa, Homo sapiens
  CDR3 for beta chain variable domain of TCR clone 225005 (TRBV25-1, TRBJ1-1)
RASTHLGGNTEAFF

SEQ ID NO: 450011 - protein, 13 aa, Homo sapiens
  CDR3 for alpha chain variable domain of TCR clone 225006 (TRAV12-2, TRAJ20)
CAVYPSNDYKLSF

SEQ ID NO: 450012 - protein, 15 aa, Homo sapiens
  CDR3 for beta chain variable domain of TCR clone 225006 (TRBV27, TRBJ2-5)
CASSLYPRGGATQYF

SEQ ID NO: 450013 - protein, 15 aa, Homo sapiens
  CDR3 for alpha chain variable domain of TCR clone 225007 (TRAV8-6, TRAJ9)
CAVSDRDTGGFKTIF

SEQ ID NO: 450014 - protein, 16 aa, Homo sapiens
  CDR3 for beta chain variable domain of TCR clone 225007 (TRBV19, TRBJ2-3)
CASSPEWDRATDTQYF

SEQ ID NO: 450015 - protein, 14 aa, Homo sapiens
  CDR3 for alpha chain variable domain of TCR clone 225008 (TRAV27, TRAJ22)
CAGLPSGSARQLTF

SEQ ID NO: 450016 - protein, 16 aa, Homo sapiens
  CDR3 for beta chain variable domain of TCR clone 225008 (TRBV7-3, TRBJ2-2)
CASSLKRGTLSGELSF

SEQ ID NO: 450017 - protein, 14 aa, Homo sapiens
  CDR3 for alpha chain variable domain of TCR clone 225009 (TRAV26-2, TRAJ32)
CCVGYGGATNKLLF

SEQ ID NO: 450018 - protein, 13 aa, Homo sapiens
  CDR3 for beta chain variable domain of TCR clone 225009 (TRBV12-5, TRBJ2-3)
CASGDRQSDTQYF

SEQ ID NO: 450019 - protein, 14 aa, Homo sapiens
  CDR3 for alpha chain variable domain of TCR clone 225010 (TRAV13-1, TRAJ35)
CAASKGGFGSMLHC

SEQ ID NO: 450020 - protein, 16 aa, Homo sapiens
  CDR3 for beta chain variable domain of TCR clone 225010 (TRBV7-3, TRBJ2-2)
CASSLKRGTLSGELFF

SEQ ID NO: 450021 - protein, 18 aa, Homo sapiens
  CDR3 for alpha chain variable domain of TCR clone 225011 (TRAV8-3, TRAJ4)
WVRDPTSNYPGGYTKLIF

SEQ ID NO: 450022 - protein, 13 aa, Homo sapiens
  CDR3 for beta chain variable domain of TCR clone 225011 (TRBV20-1, TRBJ1-2)
CSATGIQGSGYTF

SEQ ID NO: 450023 - protein, 13 aa, Homo sapiens
  CDR3 for alpha chain variable domain of TCR clone 225012 (TRAV30, TRAJ24)
CGTVTDSWGKLQF

SEQ ID NO: 450024 - protein, 14 aa, Homo sapiens
  CDR3 for beta chain variable domain of TCR clone 225012 (TRBV18, TRBJ2-5)
CASSPGVSQETQYF

SEQ ID NO: 450025 - protein, 13 aa, Homo sapiens
  CDR3 for alpha chain variable domain of TCR clone 225013 (TRAV20, TRAJ48)
CAVQVVGNENLTF

SEQ ID NO: 450026 - protein, 19 aa, Homo sapiens
  CDR3 for beta chain variable domain of TCR clone 225013 (TRBV2, TRBJ2-2)
CASSQPGLAGGGNTGELFF

SEQ ID NO: 450027 - protein, 15 aa, Homo sapiens
  CDR3 for alpha chain variable domain of TCR clone 225014 (TRAV21, TRAJ24)
CAARSSTDSWGKLQV

SEQ ID NO: 450028 - protein, 15 aa, Homo sapiens
  CDR3 for beta chain variable domain of TCR clone 225014 (TRBV19, TRBJ1-1)
CASTSGQIQNTEAFF

SEQ ID NO: 450029 - protein, 16 aa, Homo sapiens
  CDR3 for alpha chain variable domain of TCR clone 225015 (TRAV30, TRAJ24)
CGTEIADADSWGKFQF

SEQ ID NO: 450030 - protein, 14 aa, Homo sapiens
  CDR3 for beta chain variable domain of TCR clone 225015 (TRBV12-5, TRBJ2-5)
CASGSRTHQETQFF

SEQ ID NO: 450031 - protein, 14 aa, Homo sapiens
  CDR3 for alpha chain variable domain of TCR clone 225016 (TRAV1-2, TRAJ16)
CAVNRFSDGQKLLF

SEQ ID NO: 450032 - protein, 14 aa, Homo sapiens
  CDR3 for beta chain variable domain of TCR clone 225016 (TRBV18, TRBJ2-3)
CASSRDRGTDTQYF

SEQ ID NO: 450033 - protein, 12 aa, Homo sapiens
  CDR3 for alpha chain variable domain of TCR clone 225017 (TRAV8-3, TRAJ6)
CAVAGGSYIPTF

SEQ ID NO: 450034 - protein, 13 aa, Homo sapiens
  CDR3 for beta chain variable domain of TCR clone 225017 (TRBV27, TRBJ2-7)
CASSLTTGYEQYF

SEQ ID NO: 450035 - protein, 12 aa, Homo sapiens
  CDR3 for alpha chain variable domain of TCR clone 225018 (TRAV1-1, TRAJ26)
CAVASEELWSEF

SEQ ID NO: 450036 - protein, 16 aa, Homo sapiens
  CDR3 for beta chain variable domain of TCR clone 225018 (TRBV7-3, TRBJ2-3)
CASSPGGGAVTDTQYF

SEQ ID NO: 450037 - protein, 15 aa, Homo sapiens
  CDR3 for alpha chain variable domain of TCR clone 225019 (TRAV26-1, TRAJ44)
CIVRIGTGTASKLTF

SEQ ID NO: 450038 - protein, 15 aa, Homo sapiens
  CDR3 for beta chain variable domain of TCR clone 225019 (TRBV7-3, TRBJ2-2)
CASSETGQGTGELFF

SEQ ID NO: 450039 - protein, 12 aa, Homo sapiens
  CDR3 for alpha chain variable domain of TCR clone 225020 (TRAV12-1, TRAJ40)
CVVYSGTYKYIF

SEQ ID NO: 450040 - protein, 15 aa, Homo sapiens
  CDR3 for beta chain variable domain of TCR clone 225020 (TRBV7-9, TRBJ1-6)
CAGSSPGRGNSPLHF

SEQ ID NO: 450041 - protein, 19 aa, Homo sapiens
  CDR3 for alpha chain variable domain of TCR clone 225021 (TRAV14/DV4, TRAJ12)
CTSAMRELPWMDSSYKLIF

SEQ ID NO: 450042 - protein, 14 aa, Homo sapiens
  CDR3 for beta chain variable domain of TCR clone 225021 (TRBV20-1, TRBJ2-7)
CSARRSGSSYEQYF

SEQ ID NO: 450043 - protein, 13 aa, Homo sapiens
  CDR3 for alpha chain variable domain of TCR clone 225022 (TRAV20, TRAJ31)
CAVQAWNNARLMF

SEQ ID NO: 450044 - protein, 12 aa, Homo sapiens
  CDR3 for beta chain variable domain of TCR clone 225022 (TRBV29-1, TRBJ2-3)
CSVTGGADTQYF

SEQ ID NO: 450045 - protein, 13 aa, Homo sapiens
  CDR3 for alpha chain variable domain of TCR clone 225023 (TRAV8-3, TRAJ43)
CAVGPDNNNDMRF

SEQ ID NO: 450046 - protein, 12 aa, Homo sapiens
  CDR3 for beta chain variable domain of TCR clone 225023 (TRBV7-2, TRBJ1-6)
CASGLSSSPLHF

SEQ ID NO: 450047 - protein, 11 aa, Homo sapiens
  CDR3 for alpha chain variable domain of TCR clone 225024 (TRAV35, TRAJ34)
CWARNTDKLIF

SEQ ID NO: 450048 - protein, 12 aa, Homo sapiens
  CDR3 for beta chain variable domain of TCR clone 225024 (TRBV12-5, TRBJ2-5)
CASCQGVETQYF

SEQ ID NO: 450049 - protein, 17 aa, Homo sapiens
  CDR3 for alpha chain variable domain of TCR clone 225025 (TRAV36/DV7, TRAJ52)
CAVAQRAGGTSYGKLTF

SEQ ID NO: 450050 - protein, 12 aa, Homo sapiens
  CDR3 for beta chain variable domain of TCR clone 225025 (TRBV12-4, TRBJ2-7)
CASSLGGYEQYF

SEQ ID NO: 450051 - protein, 15 aa, Homo sapiens
  CDR3 for alpha chain variable domain of TCR clone 225026 (TRAV8-4, TRAJ3)
CAVTCENLVQQCFQD

SEQ ID NO: 450052 - protein, 16 aa, Homo sapiens
  CDR3 for beta chain variable domain of TCR clone 225026 (TRBV4-2, TRBJ1-1)
CASSQAGFGMNTEAFF

SEQ ID NO: 450053 - protein, 14 aa, Homo sapiens
  CDR3 for alpha chain variable domain of TCR clone 225027 (TRAV2, TRAJ9)
CAVEDRSGGFKTIF

SEQ ID NO: 450054 - protein, 13 aa, Homo sapiens
  CDR3 for beta chain variable domain of TCR clone 225027 (TRBV12-4, TRBJ1-5)
CDSSPDRAQPQHF

SEQ ID NO: 450055 - protein, 13 aa, Homo sapiens
  CDR3 for alpha chain variable domain of TCR clone 225028 (TRAV17, TRAJ9)
CATDYTGGFKAIF

SEQ ID NO: 450056 - protein, 19 aa, Homo sapiens
  CDR3 for beta chain variable domain of TCR clone 225028 (TRBV7-7, TRBJ2-3)
CASSFLSRNWGGGTDTQYF

SEQ ID NO: 450057 - protein, 16 aa, Homo sapiens
  CDR3 for alpha chain variable domain of TCR clone 225029 (TRAV12-3, TRAJ4)
CAMTRLFSGGYNKLIF

SEQ ID NO: 450058 - protein, 17 aa, Homo sapiens
  CDR3 for beta chain variable domain of TCR clone 225029 (TRBV25-1, TRBJ2-1)
CASSAYGQGRGVYEQFF

SEQ ID NO: 450059 - protein, 12 aa, Homo sapiens
  CDR3 for alpha chain variable domain of TCR clone 225030 (TRAV12-2, TRAJ42)
CAVGGSQGNLIF

SEQ ID NO: 450060 - protein, 16 aa, Homo sapiens
  CDR3 for beta chain variable domain of TCR clone 225030 (TRBV7-3, TRBJ2-2)
CARSLKRGTLSGELFF

SEQ ID NO: 450061 - protein, 14 aa, Homo sapiens
  CDR3 for alpha chain variable domain of TCR clone 225031 (TRAV17, TRAJ57)
CATDPQGGSEKLVF

SEQ ID NO: 450062 - protein, 14 aa, Homo sapiens
  CDR3 for beta chain variable domain of TCR clone 225031 (TRBV7-8, TRBJ2-7)
CAGSPRDRVYEQYF

SEQ ID NO: 450063 - protein, 17 aa, Homo sapiens
  CDR3 for alpha chain variable domain of TCR clone 225032 (TRAV12-2, TRAJ6)
CAPQGPPSAGGSYIPTF

SEQ ID NO: 450064 - protein, 16 aa, Homo sapiens
  CDR3 for beta chain variable domain of TCR clone 225032 (TRBV19, TRBJ2-2)
CASSTARASNTGELFF

SEQ ID NO: 450065 - protein, 13 aa, Homo sapiens
  CDR3 for alpha chain variable domain of TCR clone 225033 (TRAV27, TRAJ6)
CAGGTRGSYISTF

SEQ ID NO: 450066 - protein, 14 aa, Homo sapiens
  CDR3 for beta chain variable domain of TCR clone 225033 (TRBV6-1, TRBJ1-3)
CASVQGGGGNTIYF

SEQ ID NO: 450067 - protein, 12 aa, Homo sapiens
  CDR3 for alpha chain variable domain of TCR clone 225034 (TRAV35, TRAJ49)
CAGWNTGNQFYF

SEQ ID NO: 450068 - protein, 12 aa, Homo sapiens
  CDR3 for beta chain variable domain of TCR clone 225034 (TRBV11-2, TRBJ2-2)
CASSLGGGELFL

SEQ ID NO: 450069 - protein, 15 aa, Homo sapiens
  CDR3 for alpha chain variable domain of TCR clone 225035 (TRAV17, TRAJ37)
CATDGGSSNTGKLIF

SEQ ID NO: 450070 - protein, 14 aa, Homo sapiens
  CDR3 for beta chain variable domain of TCR clone 225035 (TRBV7-2, TRBJ2-7)
CASSPKTSFYEQYF

SEQ ID NO: 450071 - protein, 18 aa, Homo sapiens
  CDR3 for alpha chain variable domain of TCR clone 225036 (TRAV21, TRAJ52)
CAVRLYVEGGTSYGKLTF

SEQ ID NO: 450072 - protein, 17 aa, Homo sapiens
  CDR3 for beta chain variable domain of TCR clone 225036 (TRBV13, TRBJ2-3)
CASSLSRVAGGRNTQYF

SEQ ID NO: 450073 - protein, 13 aa, Homo sapiens
  CDR3 for alpha chain variable domain of TCR clone 225037 (TRAV12-1, TRAJ33)
CGYAPDSNYQLIC

SEQ ID NO: 450074 - protein, 15 aa, Homo sapiens
  CDR3 for beta chain variable domain of TCR clone 225037 (TRBV27, TRBJ2-1)
CASSNGGGSSNEQFF

SEQ ID NO: 450075 - protein, 11 aa, Homo sapiens
  CDR3 for alpha chain variable domain of TCR clone 225038 (TRAV12-2, TRAJ33)
CAVTSNNQLIW

SEQ ID NO: 450076 - protein, 14 aa, Homo sapiens
  CDR3 for beta chain variable domain of TCR clone 225038 (TRBV28, TRBJ2-2)
CASRIRSGTGELFF

SEQ ID NO: 450077 - protein, 13 aa, Homo sapiens
  CDR3 for alpha chain variable domain of TCR clone 225039 (TRAV13-2, TRAJ48)
CAEMDFGNEKLTF

SEQ ID NO: 450078 - protein, 15 aa, Homo sapiens
  CDR3 for beta chain variable domain of TCR clone 225039 (TRBV7-9, TRBJ1-6)
YDSSSPGRGNSPLHF

SEQ ID NO: 450079 - protein, 12 aa, Homo sapiens
  CDR3 for alpha chain variable domain of TCR clone 225040 (TRAV12-3, TRAJ17)
CAMTLTGNKLTF

SEQ ID NO: 450080 - protein, 13 aa, Homo sapiens
  CDR3 for beta chain variable domain of TCR clone 225040 (TRBV5-1, TRBJ2-7)
CASIGTDSYEQYF

SEQ ID NO: 450081 - protein, 13 aa, Homo sapiens
  CDR3 for alpha chain variable domain of TCR clone 225041 (TRAV3, TRAJ36)
CAVRDNGANKLFF

SEQ ID NO: 450082 - protein, 15 aa, Homo sapiens
  CDR3 for beta chain variable domain of TCR clone 225041 (TRBV24-1, TRBJ2-1)
CATSGSGGFYNEQFF

SEQ ID NO: 450083 - protein, 16 aa, Homo sapiens
  CDR3 for alpha chain variable domain of TCR clone 225042 (TRAV12-1, TRAJ53)
CVVTSVAGGSNYKMTF

SEQ ID NO: 450084 - protein, 16 aa, Homo sapiens
  CDR3 for beta chain variable domain of TCR clone 225042 (TRBV6-6, TRBJ2-3)
CASSCSHAGSTDTQYF

SEQ ID NO: 450085 - protein, 11 aa, Homo sapiens
  CDR3 for alpha chain variable domain of TCR clone 225043 (TRAV2, TRAJ13)
CASGGYQKVTF

SEQ ID NO: 450086 - protein, 13 aa, Homo sapiens
  CDR3 for beta chain variable domain of TCR clone 225043 (TRBV6-1, TRBJ1-1)
CTSSRQGNTEAFF

SEQ ID NO: 450087 - protein, 20 aa, Homo sapiens
  CDR3 for alpha chain variable domain of TCR clone 225044 (TRAV8-3, TRAJ44)
LSTSVLWVRLYTGTASKLTF

SEQ ID NO: 450088 - protein, 16 aa, Homo sapiens
  CDR3 for beta chain variable domain of TCR clone 225044 (TRBV28, TRBJ1-6)
CASSLIPGQRNSPLHF

SEQ ID NO: 450089 - protein, 13 aa, Homo sapiens
  CDR3 for alpha chain variable domain of TCR clone 225045 (TRAV1-2, TRAJ12)
CAVSMDSSYKLIF

SEQ ID NO: 450090 - protein, 14 aa, Homo sapiens
  CDR3 for beta chain variable domain of TCR clone 225045 (TRBV19, TRBJ2-1)
CASPTFVLSGEQFF

SEQ ID NO: 450091 - protein, 12 aa, Homo sapiens
  CDR3 for alpha chain variable domain of TCR clone 225046 (TRAV21, TRAJ23)
CAVGPQGGKLIF

SEQ ID NO: 450092 - protein, 13 aa, Homo sapiens
  CDR3 for beta chain variable domain of TCR clone 225046 (TRBV7-3, TRBJ1-1)
CASSQDWGAEAFF

SEQ ID NO: 450093 - protein, 16 aa, Homo sapiens
  CDR3 for alpha chain variable domain of TCR clone 225047 (TRAV30, TRAJ24)
CGTEIVDADSWGKFQF

SEQ ID NO: 450094 - protein, 14 aa, Homo sapiens
  CDR3 for beta chain variable domain of TCR clone 225047 (TRBV27, TRBJ2-7)
CASSLARGHYVQNF

SEQ ID NO: 450095 - protein, 16 aa, Homo sapiens
  CDR3 for alpha chain variable domain of TCR clone 225048 (TRAV17, TRAJ53)
CATDALSGGSNYKLPF

SEQ ID NO: 450096 - protein, 15 aa, Homo sapiens
  CDR3 for beta chain variable domain of TCR clone 225048 (TRBV20-1, TRBJ2-7)
CSARDRVSGMDEQYF

SEQ ID NO: 450097 - protein, 14 aa, Homo sapiens
  CDR3 for alpha chain variable domain of TCR clone 225049 (TRAV12-1, TRAJ43)
CVVNGRSNNNDMRF

SEQ ID NO: 450098 - protein, 14 aa, Homo sapiens
  CDR3 for beta chain variable domain of TCR clone 225049 (TRBV19, TRBJ2-7)
CASTVQGRPYEQYF

SEQ ID NO: 450099 - protein, 14 aa, Homo sapiens
  CDR3 for alpha chain variable domain of TCR clone 225050 (TRAV12-3, TRAJ10)
SHLPLTGGGNKLIF

SEQ ID NO: 450100 - protein, 13 aa, Homo sapiens
  CDR3 for beta chain variable domain of TCR clone 225050 (TRBV7-7, TRBJ2-5)
CASSRSGQETQYF

SEQ ID NO: 450101 - protein, 14 aa, Homo sapiens
  CDR3 for alpha chain variable domain of TCR clone 225051 (TRAV12-2, TRAJ36)
CAVKISTGANNLFF

SEQ ID NO: 450102 - protein, 14 aa, Homo sapiens
  CDR3 for beta chain variable domain of TCR clone 225051 (TRBV25-1, TRBJ1-2)
SASSDTTGVVGYSF

SEQ ID NO: 450103 - protein, 13 aa, Homo sapiens
  CDR3 for alpha chain variable domain of TCR clone 225052 (TRAV21, TRAJ27)
CAARPGNAGKSTF

SEQ ID NO: 450104 - protein, 14 aa, Homo sapiens
  CDR3 for beta chain variable domain of TCR clone 225052 (TRBV7-7, TRBJ2-3)
RASSLGTVTDTQYF

SEQ ID NO: 450105 - protein, 16 aa, Homo sapiens
  CDR3 for alpha chain variable domain of TCR clone 225053 (TRAV3, TRAJ37)
CAVRGKGSRNTGKLIF

SEQ ID NO: 450106 - protein, 20 aa, Homo sapiens
  CDR3 for beta chain variable domain of TCR clone 225053 (TRBV7-8, TRBJ2-2)
CASSHLFPGPTIHITGELFF

SEQ ID NO: 450107 - protein, 12 aa, Homo sapiens
  CDR3 for alpha chain variable domain of TCR clone 225054 (TRAV4, TRAJ26)
CLVGDYGQNFVF

SEQ ID NO: 450108 - protein, 16 aa, Homo sapiens
  CDR3 for beta chain variable domain of TCR clone 225054 (TRBV7-2, TRBJ1-2)
CACSSNQDRRGHGYTF

SEQ ID NO: 450109 - protein, 18 aa, Homo sapiens
  CDR3 for alpha chain variable domain of TCR clone 225055 (TRAV13-1, TRAJ52)
CAAKNPNAGGTSYGKLTF

SEQ ID NO: 450110 - protein, 15 aa, Homo sapiens
  CDR3 for beta chain variable domain of TCR clone 225055 (TRBV5-1, TRBJ2-3)
CASSVTSGSTDTLYF

SEQ ID NO: 450111 - protein, 16 aa, Homo sapiens
  CDR3 for alpha chain variable domain of TCR clone 225056 (TRAV3, TRAJ37)
CAVRGQGSGNTGKLIF

SEQ ID NO: 450112 - protein, 13 aa, Homo sapiens
  CDR3 for beta chain variable domain of TCR clone 225056 (TRBV14, TRBJ2-7)
CASSQGRRYEQYF

SEQ ID NO: 450113 - protein, 14 aa, Homo sapiens
  CDR3 for alpha chain variable domain of TCR clone 225057 (TRAV12-1, TRAJ17)
CVVNFKAAANKLTF

SEQ ID NO: 450114 - protein, 17 aa, Homo sapiens
  CDR3 for beta chain variable domain of TCR clone 225057 (TRBV20-1, TRBJ2-1)
CSASASGLAGSYNEQFF

SEQ ID NO: 450115 - protein, 16 aa, Homo sapiens
  CDR3 for alpha chain variable domain of TCR clone 225058 (TRAV3, TRAJ18)
CAVRDGRGSTLGRLYV

SEQ ID NO: 450116 - protein, 15 aa, Homo sapiens
  CDR3 for beta chain variable domain of TCR clone 225058 (TRBV7-9, TRBJ1-6)
FASSSPGRGNSPLHF

SEQ ID NO: 450117 - protein, 15 aa, Homo sapiens
  CDR3 for alpha chain variable domain of TCR clone 225059 (TRAV1-2, TRAJ28)
CAVQYSGAGSYRLTF

SEQ ID NO: 450118 - protein, 15 aa, Homo sapiens
  CDR3 for beta chain variable domain of TCR clone 225059 (TRBV9, TRBJ1-6)
CASSVAGTGDSPLHF

SEQ ID NO: 450119 - protein, 13 aa, Homo sapiens
  CDR3 for alpha chain variable domain of TCR clone 225060 (TRAV8-6, TRAJ21)
CAVSPSSLNKFYF

SEQ ID NO: 450120 - protein, 14 aa, Homo sapiens
  CDR3 for beta chain variable domain of TCR clone 225060 (TRBV7-9, TRBJ2-5)
CASSLDTAQETQYS

SEQ ID NO: 450121 - protein, 15 aa, Homo sapiens
  CDR3 for alpha chain variable domain of TCR clone 225061 (TRAV8-4, TRAJ47)
RAVSDPEEYGNKLVF

SEQ ID NO: 450122 - protein, 15 aa, Homo sapiens
  CDR3 for beta chain variable domain of TCR clone 225061 (TRBV11-2, TRBJ2-1)
CASSLGPDSYNEQFF

SEQ ID NO: 450123 - protein, 14 aa, Homo sapiens
  CDR3 for alpha chain variable domain of TCR clone 225062 (TRAV1-2, TRAJ16)
CAVNRFSDGQKLLF

SEQ ID NO: 450124 - protein, 14 aa, Homo sapiens
  CDR3 for beta chain variable domain of TCR clone 225062 (TRBV10-3, TRBJ2-5)
CAISERDYQETQYF

SEQ ID NO: 450125 - protein, 12 aa, Homo sapiens
  CDR3 for alpha chain variable domain of TCR clone 225063 (TRAV17, TRAJ4)
CATDGGYNKLIF

SEQ ID NO: 450126 - protein, 14 aa, Homo sapiens
  CDR3 for beta chain variable domain of TCR clone 225063 (TRBV2, TRBJ1-2)
CASSELQVNYGYTF

SEQ ID NO: 450127 - protein, 12 aa, Homo sapiens
  CDR3 for alpha chain variable domain of TCR clone 225064 (TRAV8-2, TRAJ13)
CVVSGGYQKVTF

SEQ ID NO: 450128 - protein, 14 aa, Homo sapiens
  CDR3 for beta chain variable domain of TCR clone 225064 (TRBV19, TRBJ2-7)
CASTVPGRPYEQYF

SEQ ID NO: 450129 - protein, 13 aa, Homo sapiens
  CDR3 for alpha chain variable domain of TCR clone 225065 (TRAV4, TRAJ42)
CLVGGGSQGNLTF

SEQ ID NO: 450130 - protein, 16 aa, Homo sapiens
  CDR3 for beta chain variable domain of TCR clone 225065 (TRBV5-1, TRBJ2-3)
CASSLQGRVGADTQYF

SEQ ID NO: 450131 - protein, 14 aa, Homo sapiens
  CDR3 for alpha chain variable domain of TCR clone 225066 (TRAV12-2, TRAJ40)
CAVNIPSGTYKYIF

SEQ ID NO: 450132 - protein, 13 aa, Homo sapiens
  CDR3 for beta chain variable domain of TCR clone 225066 (TRBV7-9, TRBJ1-2)
CASSLKQNYGYTF

SEQ ID NO: 450133 - protein, 15 aa, Homo sapiens
  CDR3 for alpha chain variable domain of TCR clone 225067 (TRAV21, TRAJ53)
CATLNSGGSNYKLTF

SEQ ID NO: 450134 - protein, 16 aa, Homo sapiens
  CDR3 for beta chain variable domain of TCR clone 225067 (TRBV9, TRBJ2-1)
CASSVGGGGKYNEQFF

SEQ ID NO: 450135 - protein, 14 aa, Homo sapiens
  CDR3 for alpha chain variable domain of TCR clone 225068 (TRAV13-1, TRAJ15)
CAASTNQAGTALIF

SEQ ID NO: 450136 - protein, 11 aa, Homo sapiens
  CDR3 for beta chain variable domain of TCR clone 225068 (TRBV7-2, TRBJ2-1)
CASSRRDNEFF

SEQ ID NO: 450137 - protein, 18 aa, Homo sapiens
  CDR3 for alpha chain variable domain of TCR clone 225069 (TRAV12-3, TRAJ52)
CAMSVGGAGGTSYGKLTF

SEQ ID NO: 450138 - protein, 14 aa, Homo sapiens
  CDR3 for beta chain variable domain of TCR clone 225069 (TRBV18, TRBJ2-7)
CASSPRGGSYEQYF

SEQ ID NO: 450139 - protein, 16 aa, Homo sapiens
  CDR3 for alpha chain variable domain of TCR clone 225070 (TRAV30, TRAJ24)
CGTEIVDADSWGKFQF

SEQ ID NO: 450140 - protein, 13 aa, Homo sapiens
  CDR3 for beta chain variable domain of TCR clone 225070 (TRBV11-2, TRBJ2-5)
CASSSTGEETKYF

SEQ ID NO: 450141 - protein, 12 aa, Homo sapiens
  CDR3 for alpha chain variable domain of TCR clone 225071 (TRAV23/DV6, TRAJ17)
CAAKAAGNKLTF

SEQ ID NO: 450142 - protein, 15 aa, Homo sapiens
  CDR3 for beta chain variable domain of TCR clone 225071 (TRBV7-2, TRBJ2-2)
CASSTRTGYTGELFF

SEQ ID NO: 450143 - protein, 11 aa, Homo sapiens
  CDR3 for alpha chain variable domain of TCR clone 225072 (TRAV1-1, TRAJ37)
CAVSPQGKLIF

SEQ ID NO: 450144 - protein, 15 aa, Homo sapiens
  CDR3 for beta chain variable domain of TCR clone 225072 (TRBV20-1, TRBJ2-7)
CSARDRVSGMDEQYF

SEQ ID NO: 450145 - protein, 13 aa, Homo sapiens
  CDR3 for alpha chain variable domain of TCR clone 225073 (TRAV27, TRAJ6)
CAGGTRGSYIPTF

SEQ ID NO: 450146 - protein, 15 aa, Homo sapiens
  CDR3 for beta chain variable domain of TCR clone 225073 (TRBV7-3, TRBJ2-2)
CASSETGQGTGELFF

SEQ ID NO: 450147 - protein, 14 aa, Homo sapiens
  CDR3 for alpha chain variable domain of TCR clone 225074 (TRAV34, TRAJ27)
CGALSNTNAGKSTF

SEQ ID NO: 450148 - protein, 14 aa, Homo sapiens
  CDR3 for beta chain variable domain of TCR clone 225074 (TRBV11-2, TRBJ2-5)
CASRPLAGRETQYF

SEQ ID NO: 450149 - protein, 17 aa, Homo sapiens
  CDR3 for alpha chain variable domain of TCR clone 225075 (TRAV13-1, TRAJ52)
CAASSGAGGTSYGKLTF

SEQ ID NO: 450150 - protein, 15 aa, Homo sapiens
  CDR3 for beta chain variable domain of TCR clone 225075 (TRBV2, TRBJ2-1)
CASSEPAESYNEQFF

SEQ ID NO: 450151 - protein, 12 aa, Homo sapiens
  CDR3 for alpha chain variable domain of TCR clone 225076 (TRAV3, TRAJ20)
CAVRDGDYKLSF

SEQ ID NO: 450152 - protein, 22 aa, Homo sapiens
  CDR3 for beta chain variable domain of TCR clone 225076 (TRBV7-2, TRBJ2-5)
RRTRPCISVPAACQGGGETQYF

SEQ ID NO: 450153 - protein, 14 aa, Homo sapiens
  CDR3 for alpha chain variable domain of TCR clone 225077 (TRAV3, TRAJ22)
CAVRDSGSARQLTF

SEQ ID NO: 450154 - protein, 15 aa, Homo sapiens
  CDR3 for beta chain variable domain of TCR clone 225077 (TRBV11-2, TRBJ2-5)
CASSLASYAGDTQYF

SEQ ID NO: 450155 - protein, 12 aa, Homo sapiens
  CDR3 for alpha chain variable domain of TCR clone 225078 (TRAV12-3, TRAJ21)
CAMFNNFNKFYF

SEQ ID NO: 450156 - protein, 16 aa, Homo sapiens
  CDR3 for beta chain variable domain of TCR clone 225078 (TRBV7-9, TRBJ1-2)
CASSLAPLRAAYGYSF

SEQ ID NO: 450157 - protein, 15 aa, Homo sapiens
  CDR3 for alpha chain variable domain of TCR clone 225079 (TRAV8-3, TRAJ45)
CASSYSGGGADGLTF

SEQ ID NO: 450158 - protein, 18 aa, Homo sapiens
  CDR3 for beta chain variable domain of TCR clone 225079 (TRBV5-1, TRBJ2-5)
CASSLLGKTSGIGETQYF

SEQ ID NO: 450159 - protein, 12 aa, Homo sapiens
  CDR3 for alpha chain variable domain of TCR clone 225080 (TRAV9-2, TRAJ26)
CALRGYGQNFVF

SEQ ID NO: 450160 - protein, 15 aa, Homo sapiens
  CDR3 for beta chain variable domain of TCR clone 225080 (TRBV7-2, TRBJ1-2)
CASSPRAGWNYGYTF

SEQ ID NO: 450161 - protein, 16 aa, Homo sapiens
  CDR3 for alpha chain variable domain of TCR clone 225081 (TRAV3, TRAJ37)
CAVRGKGSGNTGKLIF

SEQ ID NO: 450162 - protein, 13 aa, Homo sapiens
  CDR3 for beta chain variable domain of TCR clone 225081 (TRBV10-3, TRBJ2-7)
CAIRAGGPHEQYF

SEQ ID NO: 450163 - protein, 13 aa, Homo sapiens
  CDR3 for alpha chain variable domain of TCR clone 225082 (TRAV1-2, TRAJ11)
CAVRDSGYSTLTF

SEQ ID NO: 450164 - protein, 15 aa, Homo sapiens
  CDR3 for beta chain variable domain of TCR clone 225082 (TRBV4-3, TRBJ1-1)
CASSQELGRGTEAFF

SEQ ID NO: 450165 - protein, 13 aa, Homo sapiens
  CDR3 for alpha chain variable domain of TCR clone 225083 (TRAV23/DV6, TRAJ47)
CAASIRNGIGKQT

SEQ ID NO: 450166 - protein, 13 aa, Homo sapiens
  CDR3 for beta chain variable domain of TCR clone 225083 (TRBV19, TRBJ1-2)
CASSQGQVYGYTF

SEQ ID NO: 450167 - protein, 13 aa, Homo sapiens
  CDR3 for alpha chain variable domain of TCR clone 225084 (TRAV1-2, TRAJ9)
CAALNTGGFKTIF

SEQ ID NO: 450168 - protein, 14 aa, Homo sapiens
  CDR3 for beta chain variable domain of TCR clone 225084 (TRBV7-2, TRBJ2-7)
CASSVDPGGGEQYF

SEQ ID NO: 450169 - protein, 16 aa, Homo sapiens
  CDR3 for alpha chain variable domain of TCR clone 225085 (TRAV3, TRAJ37)
CAVRGKGSGKTGKLIF

SEQ ID NO: 450170 - protein, 13 aa, Homo sapiens
  CDR3 for beta chain variable domain of TCR clone 225085 (TRBV7-2, TRBJ2-2)
CASSSVRAGELFF

SEQ ID NO: 450171 - protein, 16 aa, Homo sapiens
  CDR3 for alpha chain variable domain of TCR clone 225086 (TRAV3, TRAJ10)
CAVRDMRAGGGNKPTF

SEQ ID NO: 450172 - protein, 15 aa, Homo sapiens
  CDR3 for beta chain variable domain of TCR clone 225086 (TRBV11-3, TRBJ1-6)
CASTGFGTAVSPLHF

SEQ ID NO: 450173 - protein, 14 aa, Homo sapiens
  CDR3 for alpha chain variable domain of TCR clone 225087 (TRAV2, TRAJ9)
CAVEDRSGGFTTIF

SEQ ID NO: 450174 - protein, 14 aa, Homo sapiens
  CDR3 for beta chain variable domain of TCR clone 225087 (TRBV18, TRBJ2-7)
CASSPRGGAYEQYF

SEQ ID NO: 450175 - protein, 17 aa, Homo sapiens
  CDR3 for alpha chain variable domain of TCR clone 225088 (TRAV8-3, TRAJ50)
CAVGAVDTETFYDKVIF

SEQ ID NO: 450176 - protein, 13 aa, Homo sapiens
  CDR3 for beta chain variable domain of TCR clone 225088 (TRBV7-9, TRBJ2-2)
CASSSAGTGELFF

SEQ ID NO: 450177 - protein, 12 aa, Homo sapiens
  CDR3 for alpha chain variable domain of TCR clone 225089 (TRAV21, TRAJ26)
CAVDNCGQNFVF

SEQ ID NO: 450178 - protein, 16 aa, Homo sapiens
  CDR3 for beta chain variable domain of TCR clone 225089 (TRBV7-9, TRBJ1-2)
CASSLGFSSGEDGYTF

SEQ ID NO: 450179 - protein, 16 aa, Homo sapiens
  CDR3 for alpha chain variable domain of TCR clone 225090 (TRAV8-3, TRAJ42)
CAVGEGNGGSQGNLIF

SEQ ID NO: 450180 - protein, 15 aa, Homo sapiens
  CDR3 for beta chain variable domain of TCR clone 225090 (TRBV5-1, TRBJ2-7)
CASSLMTSGSNEQYF

SEQ ID NO: 450181 - protein, 16 aa, Homo sapiens
  CDR3 for alpha chain variable domain of TCR clone 225091 (TRAV8-6, TRAJ32)
CAVSDPYVGATNKRIF

SEQ ID NO: 450182 - protein, 18 aa, Homo sapiens
  CDR3 for beta chain variable domain of TCR clone 225091 (TRBV4-2, TRBJ2-6)
CASSQLQGVLTGANVLTF

SEQ ID NO: 450183 - protein, 14 aa, Homo sapiens
  CDR3 for alpha chain variable domain of TCR clone 225092 (TRAV13-1, TRAJ13)
CAASRVGGYQKVTF

SEQ ID NO: 450184 - protein, 13 aa, Homo sapiens
  CDR3 for beta chain variable domain of TCR clone 225092 (TRBV10-3, TRBJ2-7)
CASKLAVNCEQYF

SEQ ID NO: 450185 - protein, 13 aa, Homo sapiens
  CDR3 for alpha chain variable domain of TCR clone 225093 (TRAV2, TRAJ40)
CAVVTSVTYKYIF

SEQ ID NO: 450186 - protein, 14 aa, Homo sapiens
  CDR3 for beta chain variable domain of TCR clone 225093 (TRBV7-2, TRBJ2-7)
CASSLKTSFYEQYF

SEQ ID NO: 450187 - protein, 13 aa, Homo sapiens
  CDR3 for alpha chain variable domain of TCR clone 225094 (TRAV29/DV5, TRAJ31)
CAASRNNNARLMV

SEQ ID NO: 450188 - protein, 14 aa, Homo sapiens
  CDR3 for beta chain variable domain of TCR clone 225094 (TRBV25-1, TRBJ1-1)
CASTHLGGNTEAFF

SEQ ID NO: 450189 - protein, 14 aa, Homo sapiens
  CDR3 for alpha chain variable domain of TCR clone 225095 (TRAV1-2, TRAJ16)
CAVNRFSDGQKLFF

SEQ ID NO: 450190 - protein, 12 aa, Homo sapiens
  CDR3 for beta chain variable domain of TCR clone 225095 (TRBV20-1, TRBJ1-5)
CSAAGWDQPQHF

SEQ ID NO: 450191 - protein, 17 aa, Homo sapiens
  CDR3 for alpha chain variable domain of TCR clone 225096 (TRAV4, TRAJ13)
CIVGVQGSSGGYQKVTF

SEQ ID NO: 450192 - protein, 15 aa, Homo sapiens
  CDR3 for beta chain variable domain of TCR clone 225096 (TRBV15, TRBJ1-2)
CATSRVRASGSGYTF

SEQ ID NO: 450193 - protein, 13 aa, Homo sapiens
  CDR3 for alpha chain variable domain of TCR clone 225097 (TRAV13-1, TRAJ21)
CAASIYNFNKFYF

SEQ ID NO: 450194 - protein, 16 aa, Homo sapiens
  CDR3 for beta chain variable domain of TCR clone 225097 (TRBV12-4, TRBJ2-5)
CASSFFVRGRQETQYL

SEQ ID NO: 450195 - protein, 13 aa, Homo sapiens
  CDR3 for alpha chain variable domain of TCR clone 225098 (TRAV2, TRAJ40)
CAVVTSGTYKYIF

SEQ ID NO: 450196 - protein, 16 aa, Homo sapiens
  CDR3 for beta chain variable domain of TCR clone 225098 (TRBV29-1, TRBJ1-2)
CSVEANRDIANYGCTF

SEQ ID NO: 450197 - protein, 16 aa, Homo sapiens
  CDR3 for alpha chain variable domain of TCR clone 225099 (TRAV30, TRAJ24)
CGTEIVDADSWGKFQF

SEQ ID NO: 450198 - protein, 14 aa, Homo sapiens
  CDR3 for beta chain variable domain of TCR clone 225099 (TRBV5-4, TRBJ2-2)
CASRLDGGTGELFS

SEQ ID NO: 450199 - protein, 12 aa, Homo sapiens
  CDR3 for alpha chain variable domain of TCR clone 225100 (TRAV38-2/DV8, TRAJ57)
CAWKGGSEKLVF

SEQ ID NO: 450200 - protein, 15 aa, Homo sapiens
  CDR3 for beta chain variable domain of TCR clone 225100 (TRBV20-1, TRBJ2-7)
CSARVPAAYFYEQYF

SEQ ID NO: 450201 - protein, 14 aa, Homo sapiens
  CDR3 for alpha chain variable domain of TCR clone 225101 (TRAV12-2, TRAJ13)
CAVKKTGGYQKVTF

SEQ ID NO: 450202 - protein, 16 aa, Homo sapiens
  CDR3 for beta chain variable domain of TCR clone 225101 (TRBV28, TRBJ1-5)
CASSFRGGYSNQPQHF

SEQ ID NO: 450203 - protein, 14 aa, Homo sapiens
  CDR3 for alpha chain variable domain of TCR clone 225102 (TRAV12-3, TRAJ3)
CNERGNSSASKIIF

SEQ ID NO: 450204 - protein, 16 aa, Homo sapiens
  CDR3 for beta chain variable domain of TCR clone 225102 (TRBV7-3, TRBJ2-2)
CASSLKRGTLSGELFF

SEQ ID NO: 450205 - protein, 14 aa, Homo sapiens
  CDR3 for alpha chain variable domain of TCR clone 225103 (TRAV13-2, TRAJ43)
CAEIPTYNNKDMRC

SEQ ID NO: 450206 - protein, 15 aa, Homo sapiens
  CDR3 for beta chain variable domain of TCR clone 225103 (TRBV7-9, TRBJ2-2)
CASGPLDTVPGELFF

SEQ ID NO: 450207 - protein, 11 aa, Homo sapiens
  CDR3 for alpha chain variable domain of TCR clone 225104 (TRAV3, TRAJ21)
CAVGNFNKFYF

SEQ ID NO: 450208 - protein, 17 aa, Homo sapiens
  CDR3 for beta chain variable domain of TCR clone 225104 (TRBV20-1, TRBJ2-1)
CSASSSWLAGSYNEQFF

SEQ ID NO: 450209 - protein, 13 aa, Homo sapiens
  CDR3 for alpha chain variable domain of TCR clone 225105 (TRAV27, TRAJ56)
CAGKPGANNKLTF

SEQ ID NO: 450210 - protein, 15 aa, Homo sapiens
  CDR3 for beta chain variable domain of TCR clone 225105 (TRBV6-1, TRBJ2-3)
CASSERWDSTDTQYF

SEQ ID NO: 450211 - protein, 14 aa, Homo sapiens
  CDR3 for alpha chain variable domain of TCR clone 225106 (TRAV1-2, TRAJ16)
CAVNRFSDGQKLLF

SEQ ID NO: 450212 - protein, 14 aa, Homo sapiens
  CDR3 for beta chain variable domain of TCR clone 225106 (TRBV27, TRBJ2-7)
CASATGAERREQYF

SEQ ID NO: 450213 - protein, 15 aa, Homo sapiens
  CDR3 for alpha chain variable domain of TCR clone 225107 (TRAV26-1, TRAJ53)
CIVRVEGGRNYKLTF

SEQ ID NO: 450214 - protein, 14 aa, Homo sapiens
  CDR3 for beta chain variable domain of TCR clone 225107 (TRBV4-3, TRBJ2-1)
CASSQDRWRGEQFF

SEQ ID NO: 450215 - protein, 15 aa, Homo sapiens
  CDR3 for alpha chain variable domain of TCR clone 225108 (TRAV17, TRAJ57)
CATGPSQGGSEKLVF

SEQ ID NO: 450216 - protein, 15 aa, Homo sapiens
  CDR3 for beta chain variable domain of TCR clone 225108 (TRBV15, TRBJ1-1)
CATSLQGGRNTEAFF

SEQ ID NO: 450217 - protein, 14 aa, Homo sapiens
  CDR3 for alpha chain variable domain of TCR clone 225109 (TRAV16, TRAJ37)
CALDISGNTGKLIF

SEQ ID NO: 450218 - protein, 14 aa, Homo sapiens
  CDR3 for beta chain variable domain of TCR clone 225109 (TRBV7-8, TRBJ2-3)
CASSLEAGTDTQYF

SEQ ID NO: 450219 - protein, 12 aa, Homo sapiens
  CDR3 for alpha chain variable domain of TCR clone 225110 (TRAV12-1, TRAJ31)
CVSWNYNARLMF

SEQ ID NO: 450220 - protein, 15 aa, Homo sapiens
  CDR3 for beta chain variable domain of TCR clone 225110 (TRBV7-2, TRBJ1-5)
CASSLDRGQDQPQHF

SEQ ID NO: 450221 - protein, 14 aa, Homo sapiens
  CDR3 for alpha chain variable domain of TCR clone 225111 (TRAV12-3, TRAJ43)
CAMSLGGAGTRLTV

SEQ ID NO: 450222 - protein, 13 aa, Homo sapiens
  CDR3 for beta chain variable domain of TCR clone 225111 (TRBV7-9, TRBJ1-2)
CTSSLKQNYGYTF

SEQ ID NO: 450223 - protein, 14 aa, Homo sapiens
  CDR3 for alpha chain variable domain of TCR clone 225112 (TRAV8-1, TRAJ23)
CAVGTYNQGGKLIF

SEQ ID NO: 450224 - protein, 14 aa, Homo sapiens
  CDR3 for beta chain variable domain of TCR clone 225112 (TRBV7-9, TRBJ2-1)
CASSPRDSLYEQFF

SEQ ID NO: 450225 - protein, 16 aa, Homo sapiens
  CDR3 for alpha chain variable domain of TCR clone 225113 (TRAV16, TRAJ4)
CALSRMFSGGYNKLIF

SEQ ID NO: 450226 - protein, 14 aa, Homo sapiens
  CDR3 for beta chain variable domain of TCR clone 225113 (TRBV4-1, TRBJ2-2)
CASSQAMNTGELFF

SEQ ID NO: 450227 - protein, 14 aa, Homo sapiens
  CDR3 for alpha chain variable domain of TCR clone 225114 (TRAV13-1, TRAJ44)
CAAKATGNASKLTF

SEQ ID NO: 450228 - protein, 16 aa, Homo sapiens
  CDR3 for beta chain variable domain of TCR clone 225114 (TRBV7-9, TRBJ2-6)
CASSLKGPLRANVLTF

SEQ ID NO: 450229 - protein, 12 aa, Homo sapiens
  CDR3 for alpha chain variable domain of TCR clone 225115 (TRAV12-2, TRAJ10)
WGVTGGGNKLTF

SEQ ID NO: 450230 - protein, 15 aa, Homo sapiens
  CDR3 for beta chain variable domain of TCR clone 225115 (TRBV20-1, TRBJ2-7)
CSARGPLAGGREQYF

SEQ ID NO: 450231 - protein, 11 aa, Homo sapiens
  CDR3 for alpha chain variable domain of TCR clone 225116 (TRAV12-2, TRAJ43)
CASPIGNYMRF

SEQ ID NO: 450232 - protein, 13 aa, Homo sapiens
  CDR3 for beta chain variable domain of TCR clone 225116 (TRBV7-3, TRBJ1-2)
CASSLKRGYGYTF

SEQ ID NO: 450233 - protein, 16 aa, Homo sapiens
  CDR3 for alpha chain variable domain of TCR clone 225117 (TRAV3, TRAJ37)
CAVRPHGSGTTGNLIF

SEQ ID NO: 450234 - protein, 16 aa, Homo sapiens
  CDR3 for beta chain variable domain of TCR clone 225117 (TRBV20-1, TRBJ1-4)
CSAPGQGLLTNEKLFF

SEQ ID NO: 450235 - protein, 11 aa, Homo sapiens
  CDR3 for alpha chain variable domain of TCR clone 225118 (TRAV12-3, TRAJ27)
CAMANAGKSTF

SEQ ID NO: 450236 - protein, 14 aa, Homo sapiens
  CDR3 for beta chain variable domain of TCR clone 225118 (TRBV4-1, TRBJ2-2)
CASSQAVNTVELFF

SEQ ID NO: 450237 - protein, 14 aa, Homo sapiens
  CDR3 for alpha chain variable domain of TCR clone 225119 (TRAV12-2, TRAJ40)
CAVKIPSGTYKYIF

SEQ ID NO: 450238 - protein, 14 aa, Homo sapiens
  CDR3 for beta chain variable domain of TCR clone 225119 (TRBV18, TRBJ1-1)
CASSPPTGRTEAFF

SEQ ID NO: 450239 - protein, 14 aa, Homo sapiens
  CDR3 for alpha chain variable domain of TCR clone 225120 (TRAV26-1, TRAJ54)
CIDPSQGGAQKLVF

SEQ ID NO: 450240 - protein, 15 aa, Homo sapiens
  CDR3 for beta chain variable domain of TCR clone 225120 (TRBV20-1, TRBJ2-7)
CSARDRVSGMDEQYF

SEQ ID NO: 450241 - protein, 14 aa, Homo sapiens
  CDR3 for alpha chain variable domain of TCR clone 225121 (TRAV1-2, TRAJ8)
CAVREDTGFQKLVF

SEQ ID NO: 450242 - protein, 15 aa, Homo sapiens
  CDR3 for beta chain variable domain of TCR clone 225121 (TRBV20-1, TRBJ2-5)
CSAGRLPSGQETQYF

SEQ ID NO: 450243 - protein, 14 aa, Homo sapiens
  CDR3 for alpha chain variable domain of TCR clone 225122 (TRAV1-2, TRAJ33)
CAVRAPDSNYQLIW

SEQ ID NO: 450244 - protein, 16 aa, Homo sapiens
  CDR3 for beta chain variable domain of TCR clone 225122 (TRBV12-4, TRBJ2-5)
CASSFFVRGRQETQYF

SEQ ID NO: 450245 - protein, 13 aa, Homo sapiens
  CDR3 for alpha chain variable domain of TCR clone 225123 (TRAV12-2, TRAJ20)
CAVYPSNDYKFSF

SEQ ID NO: 450246 - protein, 14 aa, Homo sapiens
  CDR3 for beta chain variable domain of TCR clone 225123 (TRBV19, TRBJ2-1)
CASPTFVLSGEQFF

SEQ ID NO: 450247 - protein, 15 aa, Homo sapiens
  CDR3 for alpha chain variable domain of TCR clone 225124 (TRAV17, TRAJ35)
CATAFVIGFGNVLHC

SEQ ID NO: 450248 - protein, 15 aa, Homo sapiens
  CDR3 for beta chain variable domain of TCR clone 225124 (TRBV7-9, TRBJ2-7)
CASSLALAEAYEQNF

SEQ ID NO: 450249 - protein, 16 aa, Homo sapiens
  CDR3 for alpha chain variable domain of TCR clone 225125 (TRAV27, TRAJ53)
CAAPEGSGGSNYKLTF

SEQ ID NO: 450250 - protein, 14 aa, Homo sapiens
  CDR3 for beta chain variable domain of TCR clone 225125 (TRBV4-3, TRBJ1-5)
CASSQGGQGWPQHC

SEQ ID NO: 450251 - protein, 12 aa, Homo sapiens
  CDR3 for alpha chain variable domain of TCR clone 225126 (TRAV13-1, TRAJ11)
GAADAGYSTLTF

SEQ ID NO: 450252 - protein, 14 aa, Homo sapiens
  CDR3 for beta chain variable domain of TCR clone 225126 (TRBV28, TRBJ1-1)
CASSESGRGTEAFF

SEQ ID NO: 450253 - protein, 15 aa, Homo sapiens
  CDR3 for alpha chain variable domain of TCR clone 225127 (TRAV21, TRAJ38)
CAVRQDAGNNRKLIG

SEQ ID NO: 450254 - protein, 16 aa, Homo sapiens
  CDR3 for beta chain variable domain of TCR clone 225127 (TRBV4-2, TRBJ1-1)
CASRPLDGGGDTEAFF

SEQ ID NO: 450255 - protein, 10 aa, Homo sapiens
  CDR3 for alpha chain variable domain of TCR clone 225128 (TRAV25, TRAJ20)
CAGNDYKLSF

SEQ ID NO: 450256 - protein, 18 aa, Homo sapiens
  CDR3 for beta chain variable domain of TCR clone 225128 (TRBV7-9, TRBJ2-7)
CASSLTTSGSRTWYEQYF

SEQ ID NO: 450257 - protein, 14 aa, Homo sapiens
  CDR3 for alpha chain variable domain of TCR clone 225129 (TRAV26-1, TRAJ29)
CIVSRGIRKHTSCL

SEQ ID NO: 450258 - protein, 15 aa, Homo sapiens
  CDR3 for beta chain variable domain of TCR clone 225129 (TRBV7-9, TRBJ1-5)
CASSQGHQPNQPQHF

SEQ ID NO: 450259 - protein, 14 aa, Homo sapiens
  CDR3 for alpha chain variable domain of TCR clone 225130 (TRAV1-2, TRAJ8)
CAVREDTGFQKLVL

SEQ ID NO: 450260 - protein, 15 aa, Homo sapiens
  CDR3 for beta chain variable domain of TCR clone 225130 (TRBV28, TRBJ2-1)
CASSIIAGGRSEQFF

SEQ ID NO: 450261 - protein, 15 aa, Homo sapiens
  CDR3 for alpha chain variable domain of TCR clone 225131 (TRAV8-2, TRAJ16)
CVVSDGFSVGQKLLF

SEQ ID NO: 450262 - protein, 14 aa, Homo sapiens
  CDR3 for beta chain variable domain of TCR clone 225131 (TRBV7-3, TRBJ1-1)
CASSLGTGYTEAFF

SEQ ID NO: 450263 - protein, 13 aa, Homo sapiens
  CDR3 for alpha chain variable domain of TCR clone 225132 (TRAV17, TRAJ9)
CATDYTGGFKTIF

SEQ ID NO: 450264 - protein, 14 aa, Homo sapiens
  CDR3 for beta chain variable domain of TCR clone 225132 (TRBV19, TRBJ2-5)
CASRMTGQQETQYF

SEQ ID NO: 450265 - protein, 13 aa, Homo sapiens
  CDR3 for alpha chain variable domain of TCR clone 225133 (TRAV21, TRAJ20)
CAGGVFADYKLSF

SEQ ID NO: 450266 - protein, 12 aa, Homo sapiens
  CDR3 for beta chain variable domain of TCR clone 225133 (TRBV12-4, TRBJ2-7)
CASSLGGYEQYF

SEQ ID NO: 450267 - protein, 15 aa, Homo sapiens
  CDR3 for alpha chain variable domain of TCR clone 225134 (TRAV16, TRAJ16)
CALQGGGSDGQKLLL

SEQ ID NO: 450268 - protein, 16 aa, Homo sapiens
  CDR3 for beta chain variable domain of TCR clone 225134 (TRBV7-2, TRBJ1-6)
CASSSFESSYNSPLHF

SEQ ID NO: 450269 - protein, 12 aa, Homo sapiens
  CDR3 for alpha chain variable domain of TCR clone 225135 (TRAV2, TRAJ10)
CASTGGGNKLTF

SEQ ID NO: 450270 - protein, 14 aa, Homo sapiens
  CDR3 for beta chain variable domain of TCR clone 225135 (TRBV7-2, TRBJ2-2)
CSSRGQGAAGELFF

SEQ ID NO: 450271 - protein, 14 aa, Homo sapiens
  CDR3 for alpha chain variable domain of TCR clone 225136 (TRAV1-2, TRAJ16)
CAVNRFSDGQKLLF

SEQ ID NO: 450272 - protein, 15 aa, Homo sapiens
  CDR3 for beta chain variable domain of TCR clone 225136 (TRBV28, TRBJ1-1)
CASSLLGRGNTEAFF

SEQ ID NO: 450273 - protein, 14 aa, Homo sapiens
  CDR3 for alpha chain variable domain of TCR clone 225137 (TRAV1-2, TRAJ8)
CSVREDTGFQKLVF

SEQ ID NO: 450274 - protein, 16 aa, Homo sapiens
  CDR3 for beta chain variable domain of TCR clone 225137 (TRBV19, TRBJ2-1)
CASSKAGPGSCNEQFF

SEQ ID NO: 450275 - protein, 13 aa, Homo sapiens
  CDR3 for alpha chain variable domain of TCR clone 225138 (TRAV13-2, TRAJ13)
CAERPGGYQKVTF

SEQ ID NO: 450276 - protein, 16 aa, Homo sapiens
  CDR3 for beta chain variable domain of TCR clone 225138 (TRBV18, TRBJ2-5)
WASSPPSSGGAKTQYF

SEQ ID NO: 450277 - protein, 14 aa, Homo sapiens
  CDR3 for alpha chain variable domain of TCR clone 225139 (TRAV8-3, TRAJ13)
CAVGVQEGYQKVTF

SEQ ID NO: 450278 - protein, 15 aa, Homo sapiens
  CDR3 for beta chain variable domain of TCR clone 225139 (TRBV3-1, TRBJ1-1)
CASKMRATMNTEAFF

SEQ ID NO: 450279 - protein, 15 aa, Homo sapiens
  CDR3 for alpha chain variable domain of TCR clone 225140 (TRAV3, TRAJ30)
CAVRDEYGRDDKIIF

SEQ ID NO: 450280 - protein, 16 aa, Homo sapiens
  CDR3 for beta chain variable domain of TCR clone 225140 (TRBV5-1, TRBJ2-5)
CASSLANHRGRETQCF

SEQ ID NO: 450281 - protein, 12 aa, Homo sapiens
  CDR3 for alpha chain variable domain of TCR clone 225141 (TRAV13-1, TRAJ21)
CAAKEGFNKFYF

SEQ ID NO: 450282 - protein, 16 aa, Homo sapiens
  CDR3 for beta chain variable domain of TCR clone 225141 (TRBV28, TRBJ2-1)
CASSSPEYPRDNEQFF

SEQ ID NO: 450283 - protein, 12 aa, Homo sapiens
  CDR3 for alpha chain variable domain of TCR clone 225142 (TRAV8-3, TRAJ20)
SAGGANDYKLSF

SEQ ID NO: 450284 - protein, 16 aa, Homo sapiens
  CDR3 for beta chain variable domain of TCR clone 225142 (TRBV19, TRBJ2-2)
CASRSPGTGATGELFF

SEQ ID NO: 450285 - protein, 10 aa, Homo sapiens
  CDR3 for alpha chain variable domain of TCR clone 225143 (TRAV26-1, TRAJ40)
CIAGTYKYIF

SEQ ID NO: 450286 - protein, 15 aa, Homo sapiens
  CDR3 for beta chain variable domain of TCR clone 225143 (TRBV19, TRBJ2-1)
RASSSPGVPLDEQFF

SEQ ID NO: 450287 - protein, 13 aa, Homo sapiens
  CDR3 for alpha chain variable domain of TCR clone 225144 (TRAV2, TRAJ40)
CAVVTSRTYKYIF

SEQ ID NO: 450288 - protein, 16 aa, Homo sapiens
  CDR3 for beta chain variable domain of TCR clone 225144 (TRBV19, TRBJ2-2)
CASRSPGTGATGELFF

SEQ ID NO: 450289 - protein, 13 aa, Homo sapiens
  CDR3 for alpha chain variable domain of TCR clone 225145 (TRAV23/DV6, TRAJ36)
CAASQTGANNLFF

SEQ ID NO: 450290 - protein, 13 aa, Homo sapiens
  CDR3 for beta chain variable domain of TCR clone 225145 (TRBV5-4, TRBJ1-5)
CASSLGGDQPQHF

SEQ ID NO: 450291 - protein, 15 aa, Homo sapiens
  CDR3 for alpha chain variable domain of TCR clone 225146 (TRAV17, TRAJ13)
CATDAGSGGYQKVTF

SEQ ID NO: 450292 - protein, 16 aa, Homo sapiens
  CDR3 for beta chain variable domain of TCR clone 225146 (TRBV11-2, TRBJ2-1)
CQQLIPPRGRVNEQFF

SEQ ID NO: 450293 - protein, 15 aa, Homo sapiens
  CDR3 for alpha chain variable domain of TCR clone 225147 (TRAV17, TRAJ13)
CATDAGSGGYQKVTF

SEQ ID NO: 450294 - protein, 17 aa, Homo sapiens
  CDR3 for beta chain variable domain of TCR clone 225147 (TRBV11-2, TRBJ2-1)
CASSIYPPGVEYNEQFF

SEQ ID NO: 450295 - protein, 17 aa, Homo sapiens
  CDR3 for alpha chain variable domain of TCR clone 225148 (TRAV26-2, TRAJ42)
CILRDVGYGGSQGNLIF

SEQ ID NO: 450296 - protein, 15 aa, Homo sapiens
  CDR3 for beta chain variable domain of TCR clone 225148 (TRBV12-4, TRBJ2-7)
CQQFDCGTGTYEQYF

SEQ ID NO: 450297 - protein, 16 aa, Homo sapiens
  CDR3 for alpha chain variable domain of TCR clone 225149 (TRAV30, TRAJ24)
CGTEIVDVDSWGKFQF

SEQ ID NO: 450298 - protein, 15 aa, Homo sapiens
  CDR3 for beta chain variable domain of TCR clone 225149 (TRBV20-1, TRBJ2-6)
CSARDRGPGANVLTF

SEQ ID NO: 450299 - protein, 11 aa, Homo sapiens
  CDR3 for alpha chain variable domain of TCR clone 225150 (TRAV1-2, TRAJ40)
CAVPGTYKYIF

SEQ ID NO: 450300 - protein, 13 aa, Homo sapiens
  CDR3 for beta chain variable domain of TCR clone 225150 (TRBV4-2, TRBJ1-1)
CAGSQAGNTEAFF

SEQ ID NO: 450301 - protein, 15 aa, Homo sapiens
  CDR3 for alpha chain variable domain of TCR clone 225151 (TRAV12-2, TRAJ43)
CAFDMPFGAGTRLTV

SEQ ID NO: 450302 - protein, 14 aa, Homo sapiens
  CDR3 for beta chain variable domain of TCR clone 225151 (TRBV20-1, TRBJ2-3)
RTSGGPGTTDTQYF

SEQ ID NO: 450303 - protein, 14 aa, Homo sapiens
  CDR3 for alpha chain variable domain of TCR clone 225152 (TRAV1-2, TRAJ16)
CAVNRFSDGQKLLL

SEQ ID NO: 450304 - protein, 14 aa, Homo sapiens
  CDR3 for beta chain variable domain of TCR clone 225152 (TRBV11-1, TRBJ2-7)
CASSFRQGSYEQYF

SEQ ID NO: 450305 - protein, 15 aa, Homo sapiens
  CDR3 for alpha chain variable domain of TCR clone 225153 (TRAV8-3, TRAJ45)
CAPSSSGGGADGLTF

SEQ ID NO: 450306 - protein, 17 aa, Homo sapiens
  CDR3 for beta chain variable domain of TCR clone 225153 (TRBV7-8, TRBJ1-2)
CASSLRPLQGHLYGYTF

SEQ ID NO: 450307 - protein, 16 aa, Homo sapiens
  CDR3 for alpha chain variable domain of TCR clone 225154 (TRAV3, TRAJ37)
CAVRVRGFGNTGKLIF

SEQ ID NO: 450308 - protein, 12 aa, Homo sapiens
  CDR3 for beta chain variable domain of TCR clone 225154 (TRBV11-2, TRBJ2-2)
CASSLGGGELFF

SEQ ID NO: 450309 - protein, 13 aa, Homo sapiens
  CDR3 for alpha chain variable domain of TCR clone 225155 (TRAV3, TRAJ41)
CPVSSNSGYALNF

SEQ ID NO: 450310 - protein, 14 aa, Homo sapiens
  CDR3 for beta chain variable domain of TCR clone 225155 (TRBV7-2, TRBJ2-7)
CASSPKTSFYEQYF

SEQ ID NO: 450311 - protein, 13 aa, Homo sapiens
  CDR3 for alpha chain variable domain of TCR clone 225156 (TRAV3, TRAJ21)
CAVREPDFDKFYF

SEQ ID NO: 450312 - protein, 14 aa, Homo sapiens
  CDR3 for beta chain variable domain of TCR clone 225156 (TRBV4-2, TRBJ2-1)
CASGLDRAYNEQFF

SEQ ID NO: 450313 - protein, 18 aa, Homo sapiens
  CDR3 for alpha chain variable domain of TCR clone 225157 (TRAV21, TRAJ52)
CAVRPSPAGGTSYGKLTL

SEQ ID NO: 450314 - protein, 17 aa, Homo sapiens
  CDR3 for beta chain variable domain of TCR clone 225157 (TRBV13, TRBJ2-3)
CASSLARVAGGRNTQYF

SEQ ID NO: 450315 - protein, 15 aa, Homo sapiens
  CDR3 for alpha chain variable domain of TCR clone 225158 (TRAV27, TRAJ38)
CAARRNAGNNRKLIW

SEQ ID NO: 450316 - protein, 13 aa, Homo sapiens
  CDR3 for beta chain variable domain of TCR clone 225158 (TRBV6-1, TRBJ1-1)
CASSRQGNTEAFF

SEQ ID NO: 450317 - protein, 13 aa, Homo sapiens
  CDR3 for alpha chain variable domain of TCR clone 225159 (TRAV25, TRAJ10)
CAGRTGGGNKLTF

SEQ ID NO: 450318 - protein, 17 aa, Homo sapiens
  CDR3 for beta chain variable domain of TCR clone 225159 (TRBV13, TRBJ2-3)
CASSLSRVAGGRNTQYF

SEQ ID NO: 450319 - protein, 13 aa, Homo sapiens
  CDR3 for alpha chain variable domain of TCR clone 225160 (TRAV39, TRAJ33)
CAANPDSNYQLIW

SEQ ID NO: 450320 - protein, 13 aa, Homo sapiens
  CDR3 for beta chain variable domain of TCR clone 225160 (TRBV18, TRBJ1-1)
CASAGGRNTEAFF

SEQ ID NO: 450321 - protein, 15 aa, Homo sapiens
  CDR3 for alpha chain variable domain of TCR clone 225161 (TRAV12-3, TRAJ49)
CAMAVTPNTGNQFYF

SEQ ID NO: 450322 - protein, 16 aa, Homo sapiens
  CDR3 for beta chain variable domain of TCR clone 225161 (TRBV4-2, TRBJ2-2)
CASRDGDSGTTEELFF

SEQ ID NO: 450323 - protein, 14 aa, Homo sapiens
  CDR3 for alpha chain variable domain of TCR clone 225162 (TRAV12-2, TRAJ40)
CAVKIPSGTYKYIF

SEQ ID NO: 450324 - protein, 15 aa, Homo sapiens
  CDR3 for beta chain variable domain of TCR clone 225162 (TRBV12-4, TRBJ2-5)
CASSGTGQAQETQYF

SEQ ID NO: 450325 - protein, 14 aa, Homo sapiens
  CDR3 for alpha chain variable domain of TCR clone 225163 (TRAV1-2, TRAJ8)
CAAREDTGFQKLVF

SEQ ID NO: 450326 - protein, 11 aa, Homo sapiens
  CDR3 for beta chain variable domain of TCR clone 225163 (TRBV29-1, TRBJ1-4)
CSVSSGEKLFF

SEQ ID NO: 450327 - protein, 13 aa, Homo sapiens
  CDR3 for alpha chain variable domain of TCR clone 225164 (TRAV12-1, TRAJ49)
CVVSKSTGNQFYF

SEQ ID NO: 450328 - protein, 14 aa, Homo sapiens
  CDR3 for beta chain variable domain of TCR clone 225164 (TRBV11-2, TRBJ1-2)
CSSSLGTANYGYTF

SEQ ID NO: 450329 - protein, 11 aa, Homo sapiens
  CDR3 for alpha chain variable domain of TCR clone 225165 (TRAV21, TRAJ34)
CAVTNTDKLIL

SEQ ID NO: 450330 - protein, 16 aa, Homo sapiens
  CDR3 for beta chain variable domain of TCR clone 225165 (TRBV18, TRBJ1-1)
CASSPGGGGRGGEAFF

SEQ ID NO: 450331 - protein, 12 aa, Homo sapiens
  CDR3 for alpha chain variable domain of TCR clone 225166 (TRAV1-1, TRAJ8)
CAGGAGFQKLVF

SEQ ID NO: 450332 - protein, 15 aa, Homo sapiens
  CDR3 for beta chain variable domain of TCR clone 225166 (TRBV7-9, TRBJ1-4)
CASSRTGGFNEKLFF

SEQ ID NO: 450333 - protein, 12 aa, Homo sapiens
  CDR3 for alpha chain variable domain of TCR clone 225167 (TRAV1-1, TRAJ16)
CAEMARSCSLQG

SEQ ID NO: 450334 - protein, 15 aa, Homo sapiens
  CDR3 for beta chain variable domain of TCR clone 225167 (TRBV11-2, TRBJ2-2)
CASSSDRVNAGELFF

SEQ ID NO: 450335 - protein, 16 aa, Homo sapiens
  CDR3 for alpha chain variable domain of TCR clone 225168 (TRAV1-2, TRAJ10)
CAVRGVLAGGGNKLTF

SEQ ID NO: 450336 - protein, 12 aa, Homo sapiens
  CDR3 for beta chain variable domain of TCR clone 225168 (TRBV7-8, TRBJ2-7)
CARSLGDREQYF

SEQ ID NO: 450337 - protein, 15 aa, Homo sapiens
  CDR3 for alpha chain variable domain of TCR clone 225169 (TRAV3, TRAJ17)
CAVSPKEAAGTKLTF

SEQ ID NO: 450338 - protein, 14 aa, Homo sapiens
  CDR3 for beta chain variable domain of TCR clone 225169 (TRBV5-1, TRBJ2-3)
CASSLFGPTDTQYF

SEQ ID NO: 450339 - protein, 13 aa, Homo sapiens
  CDR3 for alpha chain variable domain of TCR clone 225170 (TRAV26-1, TRAJ40)
CIVRVEGTYKYIF

SEQ ID NO: 450340 - protein, 14 aa, Homo sapiens
  CDR3 for beta chain variable domain of TCR clone 225170 (TRBV7-7, TRBJ2-2)
CATRQDSDTGELFF

SEQ ID NO: 450341 - protein, 15 aa, Homo sapiens
  CDR3 for alpha chain variable domain of TCR clone 225171 (TRAV8-3, TRAJ40)
CAAPSLGSGPSKYIF

SEQ ID NO: 450342 - protein, 16 aa, Homo sapiens
  CDR3 for beta chain variable domain of TCR clone 225171 (TRBV7-3, TRBJ2-3)
CASSLSGYRPEDTQYF

SEQ ID NO: 450343 - protein, 15 aa, Homo sapiens
  CDR3 for alpha chain variable domain of TCR clone 225172 (TRAV17, TRAJ16)
CATALRFSYCQKLLF

SEQ ID NO: 450344 - protein, 15 aa, Homo sapiens
  CDR3 for beta chain variable domain of TCR clone 225172 (TRBV20-1, TRBJ1-1)
CSASRGVTGNTEAFF

SEQ ID NO: 450345 - protein, 14 aa, Homo sapiens
  CDR3 for alpha chain variable domain of TCR clone 225173 (TRAV17, TRAJ37)
CATDGSSNTGKLIF

SEQ ID NO: 450346 - protein, 13 aa, Homo sapiens
  CDR3 for beta chain variable domain of TCR clone 225173 (TRBV11-2, TRBJ2-1)
CASSLDLVNEQYF

SEQ ID NO: 450347 - protein, 18 aa, Homo sapiens
  CDR3 for alpha chain variable domain of TCR clone 225174 (TRAV21, TRAJ52)
CAVRPSPAGGTRYGKLTF

SEQ ID NO: 450348 - protein, 13 aa, Homo sapiens
  CDR3 for beta chain variable domain of TCR clone 225174 (TRBV25-1, TRBJ2-5)
CASSESGRETQYF

SEQ ID NO: 450349 - protein, 19 aa, Homo sapiens
  CDR3 for alpha chain variable domain of TCR clone 225175 (TRAV2, TRAJ20)
ILQVREADAAVYRDCKLSF

SEQ ID NO: 450350 - protein, 15 aa, Homo sapiens
  CDR3 for beta chain variable domain of TCR clone 225175 (TRBV20-1, TRBJ2-5)
CSAEGTGGFQETQYF

SEQ ID NO: 450351 - protein, 15 aa, Homo sapiens
  CDR3 for alpha chain variable domain of TCR clone 225176 (TRAV17, TRAJ22)
CATVAPSGSARQLTF

SEQ ID NO: 450352 - protein, 16 aa, Homo sapiens
  CDR3 for beta chain variable domain of TCR clone 225176 (TRBV28, TRBJ2-2)
CASSLEGGSNTGELFF

SEQ ID NO: 450353 - protein, 11 aa, Homo sapiens
  CDR3 for alpha chain variable domain of TCR clone 225177 (TRAV2, TRAJ33)
CAVDSNYQLIW

SEQ ID NO: 450354 - protein, 15 aa, Homo sapiens
  CDR3 for beta chain variable domain of TCR clone 225177 (TRBV11-3, TRBJ2-7)
CASSPGPASSYEHYF

SEQ ID NO: 450355 - protein, 15 aa, Homo sapiens
  CDR3 for alpha chain variable domain of TCR clone 225178 (TRAV21, TRAJ32)
CAVNSYGGATNKLIF

SEQ ID NO: 450356 - protein, 18 aa, Homo sapiens
  CDR3 for beta chain variable domain of TCR clone 225178 (TRBV7-9, TRBJ2-1)
CASSTGRAEGCSYNEQFF

SEQ ID NO: 450357 - protein, 14 aa, Homo sapiens
  CDR3 for alpha chain variable domain of TCR clone 225179 (TRAV30, TRAJ33)
CGTVAPRSNYQLIW

SEQ ID NO: 450358 - protein, 15 aa, Homo sapiens
  CDR3 for beta chain variable domain of TCR clone 225179 (TRBV5-1, TRBJ2-1)
CASSPPRAPYNEQFF

SEQ ID NO: 450359 - protein, 15 aa, Homo sapiens
  CDR3 for alpha chain variable domain of TCR clone 225180 (TRAV3, TRAJ5)
CAVRDLDPGRRALTF

SEQ ID NO: 450360 - protein, 13 aa, Homo sapiens
  CDR3 for beta chain variable domain of TCR clone 225180 (TRBV12-4, TRBJ2-7)
CASRPTETYEQYF

SEQ ID NO: 450361 - protein, 19 aa, Homo sapiens
  CDR3 for alpha chain variable domain of TCR clone 225181 (TRAV38-1, TRAJ53)
CAFMKHGLESGGSNYKLTF

SEQ ID NO: 450362 - protein, 14 aa, Homo sapiens
  CDR3 for beta chain variable domain of TCR clone 225181 (TRBV12-5, TRBJ2-5)
CASGSRTHQETQYF

SEQ ID NO: 450363 - protein, 11 aa, Homo sapiens
  CDR3 for alpha chain variable domain of TCR clone 225182 (TRAV2, TRAJ13)
CASGGYQKVTF

SEQ ID NO: 450364 - protein, 13 aa, Homo sapiens
  CDR3 for beta chain variable domain of TCR clone 225182 (TRBV20-1, TRBJ1-1)
CIARVGGNTEAFF

SEQ ID NO: 450365 - protein, 14 aa, Homo sapiens
  CDR3 for alpha chain variable domain of TCR clone 225183 (TRAV1-2, TRAJ16)
CAVNRFSDGQKLLF

SEQ ID NO: 450366 - protein, 15 aa, Homo sapiens
  CDR3 for beta chain variable domain of TCR clone 225183 (TRBV5-1, TRBJ2-1)
CASSPGGLAGNEQFF

SEQ ID NO: 450367 - protein, 16 aa, Homo sapiens
  CDR3 for alpha chain variable domain of TCR clone 225184 (TRAV8-3, TRAJ18)
CAVALDRGSTLGRLYF

SEQ ID NO: 450368 - protein, 16 aa, Homo sapiens
  CDR3 for beta chain variable domain of TCR clone 225184 (TRBV13, TRBJ2-2)
CASSLGRGYGTGELFF

SEQ ID NO: 450369 - protein, 14 aa, Homo sapiens
  CDR3 for alpha chain variable domain of TCR clone 225185 (TRAV4, TRAJ30)
CLVGDMNRDAKIIF

SEQ ID NO: 450370 - protein, 16 aa, Homo sapiens
  CDR3 for beta chain variable domain of TCR clone 225185 (TRBV20-1, TRBJ1-4)
CSAPGQGLLTNEKLFF

SEQ ID NO: 450371 - protein, 13 aa, Homo sapiens
  CDR3 for alpha chain variable domain of TCR clone 225186 (TRAV8-3, TRAJ44)
CAVVPGTASKLTF

SEQ ID NO: 450372 - protein, 12 aa, Homo sapiens
  CDR3 for beta chain variable domain of TCR clone 225186 (TRBV28, TRBJ2-3)
CASSLYRDTQYF

SEQ ID NO: 450373 - protein, 13 aa, Homo sapiens
  CDR3 for alpha chain variable domain of TCR clone 225187 (TRAV26-1, TRAJ30)
CIVRVESNDKNIF

SEQ ID NO: 450374 - protein, 17 aa, Homo sapiens
  CDR3 for beta chain variable domain of TCR clone 225187 (TRBV13, TRBJ2-3)
CASSLSRVAGGRNTQYF

SEQ ID NO: 450375 - protein, 12 aa, Homo sapiens
  CDR3 for alpha chain variable domain of TCR clone 225188 (TRAV3, TRAJ26)
FAVRDYGQNFVF

SEQ ID NO: 450376 - protein, 16 aa, Homo sapiens
  CDR3 for beta chain variable domain of TCR clone 225188 (TRBV11-2, TRBJ1-2)
CASSTSGKEANYGYTF

SEQ ID NO: 450377 - protein, 14 aa, Homo sapiens
  CDR3 for alpha chain variable domain of TCR clone 225189 (TRAV38-1, TRAJ29)
CAFITPSGNTPLVF

SEQ ID NO: 450378 - protein, 14 aa, Homo sapiens
  CDR3 for beta chain variable domain of TCR clone 225189 (TRBV5-1, TRBJ1-1)
CASSRTTGDTEAFF

SEQ ID NO: 450379 - protein, 13 aa, Homo sapiens
  CDR3 for alpha chain variable domain of TCR clone 225190 (TRAV21, TRAJ20)
CAVGLRVDYKLSV

SEQ ID NO: 450380 - protein, 17 aa, Homo sapiens
  CDR3 for beta chain variable domain of TCR clone 225190 (TRBV11-3, TRBJ2-5)
CASSLPGVRGGKETQYF

SEQ ID NO: 450381 - protein, 16 aa, Homo sapiens
  CDR3 for alpha chain variable domain of TCR clone 225191 (TRAV3, TRAJ10)
CAVRDMMAGGGNKLTF

SEQ ID NO: 450382 - protein, 19 aa, Homo sapiens
  CDR3 for beta chain variable domain of TCR clone 225191 (TRBV4-3, TRBJ2-7)
CISAPAAKQPSGTPYEQYF

SEQ ID NO: 450383 - protein, 13 aa, Homo sapiens
  CDR3 for alpha chain variable domain of TCR clone 225192 (TRAV38-1, TRAJ42)
CARWGGSQGNLIF

SEQ ID NO: 450384 - protein, 12 aa, Homo sapiens
  CDR3 for beta chain variable domain of TCR clone 225192 (TRBV7-9, TRBJ1-1)
CASSLVRGEAFF

SEQ ID NO: 450385 - protein, 17 aa, Homo sapiens
  CDR3 for alpha chain variable domain of TCR clone 225193 (TRAV26-1, TRAJ53)
CIVRVDDIGGSNYKLTL

SEQ ID NO: 450386 - protein, 15 aa, Homo sapiens
  CDR3 for beta chain variable domain of TCR clone 225193 (TRBV20-1, TRBJ2-7)
CSARVPAAYFYEQYF

SEQ ID NO: 450387 - protein, 14 aa, Homo sapiens
  CDR3 for alpha chain variable domain of TCR clone 225194 (TRAV22, TRAJ6)
CAGVGPGGSYIPTF

SEQ ID NO: 450388 - protein, 15 aa, Homo sapiens
  CDR3 for beta chain variable domain of TCR clone 225194 (TRBV5-5, TRBJ1-5)
CASSLKGGGEQPQHF

SEQ ID NO: 450389 - protein, 13 aa, Homo sapiens
  CDR3 for alpha chain variable domain of TCR clone 225195 (TRAV2, TRAJ21)
CAVEDLNFNKFYF

SEQ ID NO: 450390 - protein, 11 aa, Homo sapiens
  CDR3 for beta chain variable domain of TCR clone 225195 (TRBV7-8, TRBJ2-7)
CASSLSLEQYF

SEQ ID NO: 450391 - protein, 14 aa, Homo sapiens
  CDR3 for alpha chain variable domain of TCR clone 225196 (TRAV3, TRAJ33)
CAVRDMGSNYQLIW

SEQ ID NO: 450392 - protein, 18 aa, Homo sapiens
  CDR3 for beta chain variable domain of TCR clone 225196 (TRBV6-5, TRBJ1-1)
CASSYSAPGGTGGTEAFF

SEQ ID NO: 450393 - protein, 16 aa, Homo sapiens
  CDR3 for alpha chain variable domain of TCR clone 225197 (TRAV13-1, TRAJ48)
CAASIFGNFGNEKLTF

SEQ ID NO: 450394 - protein, 16 aa, Homo sapiens
  CDR3 for beta chain variable domain of TCR clone 225197 (TRBV7-2, TRBJ2-6)
CASSERRAAGANVLTF

SEQ ID NO: 450395 - protein, 15 aa, Homo sapiens
  CDR3 for alpha chain variable domain of TCR clone 225198 (TRAV25, TRAJ52)
CAGTSGGTSYGKLTF

SEQ ID NO: 450396 - protein, 14 aa, Homo sapiens
  CDR3 for beta chain variable domain of TCR clone 225198 (TRBV7-2, TRBJ2-3)
CASSQTGSSYTQYF

SEQ ID NO: 450397 - protein, 13 aa, Homo sapiens
  CDR3 for alpha chain variable domain of TCR clone 225199 (TRAV26-1, TRAJ30)
CIVRVESNDKIIF

SEQ ID NO: 450398 - protein, 15 aa, Homo sapiens
  CDR3 for beta chain variable domain of TCR clone 225199 (TRBV6-1, TRBJ2-3)
CASSERGGIKDTQYF

SEQ ID NO: 450399 - protein, 15 aa, Homo sapiens
  CDR3 for alpha chain variable domain of TCR clone 225200 (TRAV8-4, TRAJ36)
CAVRKSWTGANNLFF

SEQ ID NO: 450400 - protein, 14 aa, Homo sapiens
  CDR3 for beta chain variable domain of TCR clone 225200 (TRBV19, TRBJ2-1)
CASPTFVLSGEQFF

SEQ ID NO: 450401 - protein, 13 aa, Homo sapiens
  CDR3 for alpha chain variable domain of TCR clone 225201 (TRAV3, TRAJ21)
CAVREPDFHKFYF

SEQ ID NO: 450402 - protein, 15 aa, Homo sapiens
  CDR3 for beta chain variable domain of TCR clone 225201 (TRBV20-1, TRBJ1-1)
CSASRGVTGNTEAFF

SEQ ID NO: 450403 - protein, 12 aa, Homo sapiens
  CDR3 for alpha chain variable domain of TCR clone 225202 (TRAV13-2, TRAJ8)
CAPWLGFQKLVF

SEQ ID NO: 450404 - protein, 18 aa, Homo sapiens
  CDR3 for beta chain variable domain of TCR clone 225202 (TRBV15, TRBJ2-3)
CATSRDGARSWDTDTQYF

SEQ ID NO: 450405 - protein, 11 aa, Homo sapiens
  CDR3 for alpha chain variable domain of TCR clone 225203 (TRAV23/DV6, TRAJ4)
APAGGYNKLLF

SEQ ID NO: 450406 - protein, 17 aa, Homo sapiens
  CDR3 for beta chain variable domain of TCR clone 225203 (TRBV20-1, TRBJ2-1)
CSAPDRGAGVAYNEQFF

SEQ ID NO: 450407 - protein, 14 aa, Homo sapiens
  CDR3 for alpha chain variable domain of TCR clone 225204 (TRAV8-4, TRAJ12)
CAVSPMDSRYKLIF

SEQ ID NO: 450408 - protein, 15 aa, Homo sapiens
  CDR3 for beta chain variable domain of TCR clone 225204 (TRBV5-5, TRBJ2-1)
CASSPEAETYNEQFF

SEQ ID NO: 450409 - protein, 14 aa, Homo sapiens
  CDR3 for alpha chain variable domain of TCR clone 225205 (TRAV13-1, TRAJ48)
CAASRSFGNEKLTF

SEQ ID NO: 450410 - protein, 15 aa, Homo sapiens
  CDR3 for beta chain variable domain of TCR clone 225205 (TRBV28, TRBJ2-5)
CASSPPWSYQETQYF

SEQ ID NO: 450411 - protein, 15 aa, Homo sapiens
  CDR3 for alpha chain variable domain of TCR clone 225206 (TRAV13-1, TRAJ17)
CAASIERAAGNKLTF

SEQ ID NO: 450412 - protein, 13 aa, Homo sapiens
  CDR3 for beta chain variable domain of TCR clone 225206 (TRBV12-4, TRBJ1-2)
CASSLDSNYGYTF

SEQ ID NO: 450413 - protein, 17 aa, Homo sapiens
  CDR3 for alpha chain variable domain of TCR clone 225207 (TRAV36/DV7, TRAJ52)
CAVAQRAGVTSYGKLTF

SEQ ID NO: 450414 - protein, 17 aa, Homo sapiens
  CDR3 for beta chain variable domain of TCR clone 225207 (TRBV20-1, TRBJ2-2)
CSASGSGQGGLTGELFF

SEQ ID NO: 450415 - protein, 13 aa, Homo sapiens
  CDR3 for alpha chain variable domain of TCR clone 225208 (TRAV2, TRAJ15)
CAVASHAGTALIF

SEQ ID NO: 450416 - protein, 13 aa, Homo sapiens
  CDR3 for beta chain variable domain of TCR clone 225208 (TRBV28, TRBJ2-7)
CASKAGGVYEQYF

SEQ ID NO: 450417 - protein, 12 aa, Homo sapiens
  CDR3 for alpha chain variable domain of TCR clone 225209 (TRAV12-2, TRAJ43)
CAVNVNDNDMRF

SEQ ID NO: 450418 - protein, 14 aa, Homo sapiens
  CDR3 for beta chain variable domain of TCR clone 225209 (TRBV25-1, TRBJ2-2)
CASSELGLPGELFF

SEQ ID NO: 450419 - protein, 14 aa, Homo sapiens
  CDR3 for alpha chain variable domain of TCR clone 225210 (TRAV8-2, TRAJ4)
CVVSPSGCYNKLIF

SEQ ID NO: 450420 - protein, 14 aa, Homo sapiens
  CDR3 for beta chain variable domain of TCR clone 225210 (TRBV10-3, TRBJ2-2)
CAISEVSHSGELFF

SEQ ID NO: 450421 - protein, 18 aa, Homo sapiens
  CDR3 for alpha chain variable domain of TCR clone 225211 (TRAV3, TRAJ17)
CAVRARRGGRSCRQQANF

SEQ ID NO: 450422 - protein, 14 aa, Homo sapiens
  CDR3 for beta chain variable domain of TCR clone 225211 (TRBV4-1, TRBJ2-2)
CVSSQAVNTGELFC

SEQ ID NO: 450423 - protein, 13 aa, Homo sapiens
  CDR3 for alpha chain variable domain of TCR clone 225212 (TRAV1-2, TRAJ9)
CAALNTGGFTTIF

SEQ ID NO: 450424 - protein, 13 aa, Homo sapiens
  CDR3 for beta chain variable domain of TCR clone 225212 (TRBV4-1, TRBJ2-1)
CASSQAGGDEQFF

SEQ ID NO: 450425 - protein, 16 aa, Homo sapiens
  CDR3 for alpha chain variable domain of TCR clone 225213 (TRAV21, TRAJ33)
CAVSPASMDSNYQLIW

SEQ ID NO: 450426 - protein, 16 aa, Homo sapiens
  CDR3 for beta chain variable domain of TCR clone 225213 (TRBV19, TRBJ2-1)
CASSKAGPSSYNEQFF

SEQ ID NO: 450427 - protein, 18 aa, Homo sapiens
  CDR3 for alpha chain variable domain of TCR clone 225214 (TRAV2, TRAJ32)
CCLLLCFHYGGATNKLIF

SEQ ID NO: 450428 - protein, 16 aa, Homo sapiens
  CDR3 for beta chain variable domain of TCR clone 225214 (TRBV7-9, TRBJ2-7)
CASSYPDREGGYEKYF

SEQ ID NO: 450429 - protein, 14 aa, Homo sapiens
  CDR3 for alpha chain variable domain of TCR clone 225215 (TRAV8-4, TRAJ38)
CARLNAGNNSKLIW

SEQ ID NO: 450430 - protein, 12 aa, Homo sapiens
  CDR3 for beta chain variable domain of TCR clone 225215 (TRBV6-1, TRBJ2-7)
CASSEPLYEQYF

SEQ ID NO: 450431 - protein, 14 aa, Homo sapiens
  CDR3 for alpha chain variable domain of TCR clone 225216 (TRAV12-2, TRAJ24)
CAVTPADSGGKLQF

SEQ ID NO: 450432 - protein, 13 aa, Homo sapiens
  CDR3 for beta chain variable domain of TCR clone 225216 (TRBV6-4, TRBJ1-5)
CASSADLNQPQHF

SEQ ID NO: 450433 - protein, 13 aa, Homo sapiens
  CDR3 for alpha chain variable domain of TCR clone 225217 (TRAV2, TRAJ40)
CAVVTSGTYKYIF

SEQ ID NO: 450434 - protein, 15 aa, Homo sapiens
  CDR3 for beta chain variable domain of TCR clone 225217 (TRBV10-2, TRBJ2-6)
CAGSEQGTGANVLTF

SEQ ID NO: 450435 - protein, 13 aa, Homo sapiens
  CDR3 for alpha chain variable domain of TCR clone 225218 (TRAV12-3, TRAJ9)
CAMRNTGGFKTIF

SEQ ID NO: 450436 - protein, 13 aa, Homo sapiens
  CDR3 for beta chain variable domain of TCR clone 225218 (TRBV20-1, TRBJ1-1)
CSARGGGNTEAFF

SEQ ID NO: 450437 - protein, 15 aa, Homo sapiens
  CDR3 for alpha chain variable domain of TCR clone 225219 (TRAV8-3, TRAJ6)
CAVGPLGGGSYIPTF

SEQ ID NO: 450438 - protein, 14 aa, Homo sapiens
  CDR3 for beta chain variable domain of TCR clone 225219 (TRBV19, TRBJ2-2)
CASSTGQGPGELFF

SEQ ID NO: 450439 - protein, 14 aa, Homo sapiens
  CDR3 for alpha chain variable domain of TCR clone 225220 (TRAV12-3, TRAJ42)
CARNYGGSQGNLIF

SEQ ID NO: 450440 - protein, 14 aa, Homo sapiens
  CDR3 for beta chain variable domain of TCR clone 225220 (TRBV7-2, TRBJ2-5)
CASSFTQGQETQYF

SEQ ID NO: 450441 - protein, 12 aa, Homo sapiens
  CDR3 for alpha chain variable domain of TCR clone 225221 (TRAV8-3, TRAJ13)
CAVGAGYQKVTF

SEQ ID NO: 450442 - protein, 14 aa, Homo sapiens
  CDR3 for beta chain variable domain of TCR clone 225221 (TRBV6-3, TRBJ2-7)
CASSYSVRVYEQYF

SEQ ID NO: 450443 - protein, 10 aa, Homo sapiens
  CDR3 for alpha chain variable domain of TCR clone 225222 (TRAV1-2, TRAJ20)
CALNDYKLSF

SEQ ID NO: 450444 - protein, 13 aa, Homo sapiens
  CDR3 for beta chain variable domain of TCR clone 225222 (TRBV11-3, TRBJ2-3)
CASRETGRDTQYF

SEQ ID NO: 450445 - protein, 15 aa, Homo sapiens
  CDR3 for alpha chain variable domain of TCR clone 225223 (TRAV27, TRAJ28)
ASTSHSGAGSYQLTF

SEQ ID NO: 450446 - protein, 15 aa, Homo sapiens
  CDR3 for beta chain variable domain of TCR clone 225223 (TRBV2, TRBJ2-2)
CASSRETGGTGELFF

SEQ ID NO: 450447 - protein, 16 aa, Homo sapiens
  CDR3 for alpha chain variable domain of TCR clone 225224 (TRAV8-3, TRAJ44)
CAVGPFILGTASKLTF

SEQ ID NO: 450448 - protein, 16 aa, Homo sapiens
  CDR3 for beta chain variable domain of TCR clone 225224 (TRBV11-2, TRBJ2-7)
CASSPTTGRVSYEQYF

SEQ ID NO: 450449 - protein, 14 aa, Homo sapiens
  CDR3 for alpha chain variable domain of TCR clone 225225 (TRAV35, TRAJ13)
CAGSPSGGYQKVPF

SEQ ID NO: 450450 - protein, 13 aa, Homo sapiens
  CDR3 for beta chain variable domain of TCR clone 225225 (TRBV29-1, TRBJ1-1)
CSVGDSRNTEAFF

SEQ ID NO: 450451 - protein, 13 aa, Homo sapiens
  CDR3 for alpha chain variable domain of TCR clone 225226 (TRAV27, TRAJ23)
CAGVLPKGGKLIF

SEQ ID NO: 450452 - protein, 14 aa, Homo sapiens
  CDR3 for beta chain variable domain of TCR clone 225226 (TRBV5-8, TRBJ2-3)
CASSLSPSTDTQYF

SEQ ID NO: 450453 - protein, 17 aa, Homo sapiens
  CDR3 for alpha chain variable domain of TCR clone 225227 (TRAV3, TRAJ6)
CAVRDGPRAGGSYIPTF

SEQ ID NO: 450454 - protein, 14 aa, Homo sapiens
  CDR3 for beta chain variable domain of TCR clone 225227 (TRBV20-1, TRBJ2-2)
CSASPGLGTGELFF

SEQ ID NO: 450455 - protein, 13 aa, Homo sapiens
  CDR3 for alpha chain variable domain of TCR clone 225228 (TRAV12-2, TRAJ42)
CAVKRGSQGNLIF

SEQ ID NO: 450456 - protein, 13 aa, Homo sapiens
  CDR3 for beta chain variable domain of TCR clone 225228 (TRBV7-9, TRBJ2-3)
CASSPGSTATQYF

SEQ ID NO: 450457 - protein, 21 aa, Homo sapiens
  CDR3 for alpha chain variable domain of TCR clone 225229 (TRAV17, TRAJ53)
TASRAADTASQGGGSNYKLTF

SEQ ID NO: 450458 - protein, 14 aa, Homo sapiens
  CDR3 for beta chain variable domain of TCR clone 225229 (TRBV7-9, TRBJ2-1)
CASSPRDSLYEQFF

SEQ ID NO: 450459 - protein, 12 aa, Homo sapiens
  CDR3 for alpha chain variable domain of TCR clone 225230 (TRAV26-1, TRAJ26)
CIVFIYAQNFVF

SEQ ID NO: 450460 - protein, 13 aa, Homo sapiens
  CDR3 for beta chain variable domain of TCR clone 225230 (TRBV27, TRBJ1-1)
CASSLSIGAEAFF

SEQ ID NO: 450461 - protein, 11 aa, Homo sapiens
  CDR3 for alpha chain variable domain of TCR clone 225231 (TRAV21, TRAJ33)
CAVLSNYQLIW

SEQ ID NO: 450462 - protein, 11 aa, Homo sapiens
  CDR3 for beta chain variable domain of TCR clone 225231 (TRBV24-1, TRBJ2-3)
CATASTDTQYF

SEQ ID NO: 450463 - protein, 13 aa, Homo sapiens
  CDR3 for alpha chain variable domain of TCR clone 225232 (TRAV2, TRAJ15)
CAVASQAGTALIF

SEQ ID NO: 450464 - protein, 16 aa, Homo sapiens
  CDR3 for beta chain variable domain of TCR clone 225232 (TRBV5-1, TRBJ2-5)
CASSLSLAGAQETQYF

SEQ ID NO: 450465 - protein, 14 aa, Homo sapiens
  CDR3 for alpha chain variable domain of TCR clone 225233 (TRAV2, TRAJ9)
CAVEDRSGGFKTNF

SEQ ID NO: 450466 - protein, 17 aa, Homo sapiens
  CDR3 for beta chain variable domain of TCR clone 225233 (TRBV11-2, TRBJ2-1)
CASSLYPPGVEYNEQFF

SEQ ID NO: 450467 - protein, 14 aa, Homo sapiens
  CDR3 for alpha chain variable domain of TCR clone 225234 (TRAV38-1, TRAJ38)
CAFMKHEVDRKLIW

SEQ ID NO: 450468 - protein, 17 aa, Homo sapiens
  CDR3 for beta chain variable domain of TCR clone 225234 (TRBV11-2, TRBJ2-1)
CASSLYPPGVEYNEQFF

SEQ ID NO: 450469 - protein, 16 aa, Homo sapiens
  CDR3 for alpha chain variable domain of TCR clone 225235 (TRAV21, TRAJ45)
CAVSWGSGGGADGLTF

SEQ ID NO: 450470 - protein, 16 aa, Homo sapiens
  CDR3 for beta chain variable domain of TCR clone 225235 (TRBV4-2, TRBJ1-2)
CISVPSPGGSNYGYTF

SEQ ID NO: 450471 - protein, 17 aa, Homo sapiens
  CDR3 for alpha chain variable domain of TCR clone 225236 (TRAV3, TRAJ6)
CAVRDGPRAGGSDIPTF

SEQ ID NO: 450472 - protein, 14 aa, Homo sapiens
  CDR3 for beta chain variable domain of TCR clone 225236 (TRBV14, TRBJ2-1)
CASSQVQGRGEQFF

SEQ ID NO: 450473 - protein, 12 aa, Homo sapiens
  CDR3 for alpha chain variable domain of TCR clone 225237 (TRAV1-2, TRAJ9)
CAVDTGGFKTIF

SEQ ID NO: 450474 - protein, 15 aa, Homo sapiens
  CDR3 for beta chain variable domain of TCR clone 225237 (TRBV7-8, TRBJ2-1)
CASSLAGGLYNEQFF

SEQ ID NO: 450475 - protein, 15 aa, Homo sapiens
  CDR3 for alpha chain variable domain of TCR clone 225238 (TRAV20, TRAJ58)
CAVQDLDTSGSRLTF

SEQ ID NO: 450476 - protein, 12 aa, Homo sapiens
  CDR3 for beta chain variable domain of TCR clone 225238 (TRBV9, TRBJ2-2)
CASSARTGELFF

SEQ ID NO: 450477 - protein, 16 aa, Homo sapiens
  CDR3 for alpha chain variable domain of TCR clone 225239 (TRAV30, TRAJ24)
CGTEIVDADSWGKLQF

SEQ ID NO: 450478 - protein, 14 aa, Homo sapiens
  CDR3 for beta chain variable domain of TCR clone 225239 (TRBV7-2, TRBJ1-1)
CASSFLTGTTEAFF

SEQ ID NO: 450479 - protein, 14 aa, Homo sapiens
  CDR3 for alpha chain variable domain of TCR clone 225240 (TRAV2, TRAJ20)
CAVEDVVNDYKLSF

SEQ ID NO: 450480 - protein, 13 aa, Homo sapiens
  CDR3 for beta chain variable domain of TCR clone 225240 (TRBV19, TRBJ2-7)
CASRKAGGSDQYF

SEQ ID NO: 450481 - protein, 13 aa, Homo sapiens
  CDR3 for alpha chain variable domain of TCR clone 225241 (TRAV3, TRAJ21)
CAAREQDFNKFYF

SEQ ID NO: 450482 - protein, 14 aa, Homo sapiens
  CDR3 for beta chain variable domain of TCR clone 225241 (TRBV5-5, TRBJ1-2)
CASSLDPYNYGYTF

SEQ ID NO: 450483 - protein, 15 aa, Homo sapiens
  CDR3 for alpha chain variable domain of TCR clone 225242 (TRAV21, TRAJ40)
CAVRPQTSGTYKYIF

SEQ ID NO: 450484 - protein, 16 aa, Homo sapiens
  CDR3 for beta chain variable domain of TCR clone 225242 (TRBV11-2, TRBJ2-1)
CASARGSYSHHNEQFF

SEQ ID NO: 450485 - protein, 10 aa, Homo sapiens
  CDR3 for alpha chain variable domain of TCR clone 225243 (TRAV23/DV6, TRAJ31)
CARGGARLMI

SEQ ID NO: 450486 - protein, 14 aa, Homo sapiens
  CDR3 for beta chain variable domain of TCR clone 225243 (TRBV12-5, TRBJ2-5)
CASGSRTHQETQYF

SEQ ID NO: 450487 - protein, 14 aa, Homo sapiens
  CDR3 for alpha chain variable domain of TCR clone 225244 (TRAV13-1, TRAJ35)
CAASKGGFGNVLHC

SEQ ID NO: 450488 - protein, 15 aa, Homo sapiens
  CDR3 for beta chain variable domain of TCR clone 225244 (TRBV7-3, TRBJ2-3)
CASSLTSGVGDTQYF

SEQ ID NO: 450489 - protein, 16 aa, Homo sapiens
  CDR3 for alpha chain variable domain of TCR clone 225245 (TRAV16, TRAJ52)
CALSAAGGTSYGQLTF

SEQ ID NO: 450490 - protein, 12 aa, Homo sapiens
  CDR3 for beta chain variable domain of TCR clone 225245 (TRBV12-4, TRBJ1-3)
CASSFSGNTIDF

SEQ ID NO: 450491 - protein, 15 aa, Homo sapiens
  CDR3 for alpha chain variable domain of TCR clone 225246 (TRAV10, TRAJ6)
CVVRPRTGGSYIPTS

SEQ ID NO: 450492 - protein, 15 aa, Homo sapiens
  CDR3 for beta chain variable domain of TCR clone 225246 (TRBV20-1, TRBJ2-7)
CSARDRVSGMDEQYF

SEQ ID NO: 450493 - protein, 15 aa, Homo sapiens
  CDR3 for alpha chain variable domain of TCR clone 225247 (TRAV12-3, TRAJ6)
CAMSATSGGSYIPTF

SEQ ID NO: 450494 - protein, 17 aa, Homo sapiens
  CDR3 for beta chain variable domain of TCR clone 225247 (TRBV5-1, TRBJ2-2)
CASSLQPGQGQAGELFF

SEQ ID NO: 450495 - protein, 16 aa, Homo sapiens
  CDR3 for alpha chain variable domain of TCR clone 225248 (TRAV12-2, TRAJ48)
CAVNPTSNFGNEKLTF

SEQ ID NO: 450496 - protein, 12 aa, Homo sapiens
  CDR3 for beta chain variable domain of TCR clone 225248 (TRBV9, TRBJ2-3)
CASSLQAGTQYF

SEQ ID NO: 450497 - protein, 19 aa, Homo sapiens
  CDR3 for alpha chain variable domain of TCR clone 225249 (TRAV2, TRAJ20)
ILQVREADAAVYRDCKLSF

SEQ ID NO: 450498 - protein, 18 aa, Homo sapiens
  CDR3 for beta chain variable domain of TCR clone 225249 (TRBV20-1, TRBJ2-3)
CNASGLAGGPGTTDTQYF

SEQ ID NO: 450499 - protein, 13 aa, Homo sapiens
  CDR3 for alpha chain variable domain of TCR clone 225250 (TRAV38-2/DV8, TRAJ34)
CAYRTWNTDKLIF

SEQ ID NO: 450500 - protein, 16 aa, Homo sapiens
  CDR3 for beta chain variable domain of TCR clone 225250 (TRBV25-1, TRBJ1-1)
CASSGDRDRGRIEAFF

SEQ ID NO: 450501 - protein, 10 aa, Homo sapiens
  CDR3 for alpha chain variable domain of TCR clone 225251 (TRAV30, TRAJ48)
CGMGNEKLTF

SEQ ID NO: 450502 - protein, 16 aa, Homo sapiens
  CDR3 for beta chain variable domain of TCR clone 225251 (TRBV5-5, TRBJ2-2)
CASSGRREGATGELFF

SEQ ID NO: 450503 - protein, 15 aa, Homo sapiens
  CDR3 for alpha chain variable domain of TCR clone 225252 (TRAV2, TRAJ9)
CAVEDRGTGGFKTIF

SEQ ID NO: 450504 - protein, 13 aa, Homo sapiens
  CDR3 for beta chain variable domain of TCR clone 225252 (TRBV28, TRBJ1-2)
CAGRDRGNYGYTF

SEQ ID NO: 450505 - protein, 12 aa, Homo sapiens
  CDR3 for alpha chain variable domain of TCR clone 225253 (TRAV4, TRAJ26)
CLVGDYGQNFVF

SEQ ID NO: 450506 - protein, 17 aa, Homo sapiens
  CDR3 for beta chain variable domain of TCR clone 225253 (TRBV14, TRBJ2-1)
CASSQDRRDSIYNEQFF

SEQ ID NO: 450507 - protein, 12 aa, Homo sapiens
  CDR3 for alpha chain variable domain of TCR clone 225254 (TRAV13-2, TRAJ8)
CAPWLGFQKLVF

SEQ ID NO: 450508 - protein, 14 aa, Homo sapiens
  CDR3 for beta chain variable domain of TCR clone 225254 (TRBV11-2, TRBJ1-2)
CASSLGTANYGYTF

SEQ ID NO: 450509 - protein, 16 aa, Homo sapiens
  CDR3 for alpha chain variable domain of TCR clone 225255 (TRAV30, TRAJ24)
CGTEIVYADSWGKFQF

SEQ ID NO: 450510 - protein, 13 aa, Homo sapiens
  CDR3 for beta chain variable domain of TCR clone 225255 (TRBV7-9, TRBJ1-2)
CASSLKQNYGYTF

SEQ ID NO: 450511 - protein, 17 aa, Homo sapiens
  CDR3 for alpha chain variable domain of TCR clone 225256 (TRAV3, TRAJ6)
CAVRDGPRAGGSYIATF

SEQ ID NO: 450512 - protein, 14 aa, Homo sapiens
  CDR3 for beta chain variable domain of TCR clone 225256 (TRBV11-2, TRBJ2-3)
CASSRLARTDTQYF

SEQ ID NO: 450513 - protein, 11 aa, Homo sapiens
  CDR3 for alpha chain variable domain of TCR clone 225257 (TRAV35, TRAJ34)
CWARNTDKLIF

SEQ ID NO: 450514 - protein, 13 aa, Homo sapiens
  CDR3 for beta chain variable domain of TCR clone 225257 (TRBV7-6, TRBJ1-2)
CASSLVADYGYTF

SEQ ID NO: 450515 - protein, 13 aa, Homo sapiens
  CDR3 for alpha chain variable domain of TCR clone 225258 (TRAV16, TRAJ54)
SLSGVQGAQKLVF

SEQ ID NO: 450516 - protein, 15 aa, Homo sapiens
  CDR3 for beta chain variable domain of TCR clone 225258 (TRBV18, TRBJ2-2)
CASSTSGLHTGELFF

SEQ ID NO: 450517 - protein, 15 aa, Homo sapiens
  CDR3 for alpha chain variable domain of TCR clone 225259 (TRAV20, TRAJ43)
CAVQAGKSSNNDMRF

SEQ ID NO: 450518 - protein, 15 aa, Homo sapiens
  CDR3 for beta chain variable domain of TCR clone 225259 (TRBV7-3, TRBJ2-2)
CASSLSRDNTGELFF

SEQ ID NO: 450519 - protein, 15 aa, Homo sapiens
  CDR3 for alpha chain variable domain of TCR clone 225260 (TRAV8-3, TRAJ28)
CAVAYSGAGSYQLTF

SEQ ID NO: 450520 - protein, 17 aa, Homo sapiens
  CDR3 for beta chain variable domain of TCR clone 225260 (TRBV19, TRBJ2-1)
CASSIWSAQPTHNEQFF

SEQ ID NO: 450521 - protein, 14 aa, Homo sapiens
  CDR3 for alpha chain variable domain of TCR clone 225261 (TRAV12-2, TRAJ32)
CAHPESGATNQLIF

SEQ ID NO: 450522 - protein, 14 aa, Homo sapiens
  CDR3 for beta chain variable domain of TCR clone 225261 (TRBV4-2, TRBJ2-3)
CASRETRAPGMQYF

SEQ ID NO: 450523 - protein, 18 aa, Homo sapiens
  CDR3 for alpha chain variable domain of TCR clone 225262 (TRAV13-1, TRAJ52)
FAASKRSAGVTSYGKLTF

SEQ ID NO: 450524 - protein, 13 aa, Homo sapiens
  CDR3 for beta chain variable domain of TCR clone 225262 (TRBV12-4, TRBJ1-2)
CASSLRQGKGYTF

SEQ ID NO: 450525 - protein, 14 aa, Homo sapiens
  CDR3 for alpha chain variable domain of TCR clone 225263 (TRAV1-2, TRAJ8)
CAVREDTGFQKLVF

SEQ ID NO: 450526 - protein, 16 aa, Homo sapiens
  CDR3 for beta chain variable domain of TCR clone 225263 (TRBV20-1, TRBJ2-4)
CSARAILAGQGYIQYF

SEQ ID NO: 450527 - protein, 16 aa, Homo sapiens
  CDR3 for alpha chain variable domain of TCR clone 225264 (TRAV12-3, TRAJ53)
CAMSPGSGGSNYKRTF

SEQ ID NO: 450528 - protein, 14 aa, Homo sapiens
  CDR3 for beta chain variable domain of TCR clone 225264 (TRBV7-2, TRBJ1-1)
CASSFLTGTTEAFF

SEQ ID NO: 450529 - protein, 14 aa, Homo sapiens
  CDR3 for alpha chain variable domain of TCR clone 225265 (TRAV12-1, TRAJ12)
CVVTRKDSSYKLIF

SEQ ID NO: 450530 - protein, 13 aa, Homo sapiens
  CDR3 for beta chain variable domain of TCR clone 225265 (TRBV20-1, TRBJ1-1)
CSARGGGNTEAFF

SEQ ID NO: 450531 - protein, 13 aa, Homo sapiens
  CDR3 for alpha chain variable domain of TCR clone 225266 (TRAV3, TRAJ21)
CAVREPDFNKFYF

SEQ ID NO: 450532 - protein, 13 aa, Homo sapiens
  CDR3 for beta chain variable domain of TCR clone 225266 (TRBV28, TRBJ2-1)
CASRSGGLNEQFF

SEQ ID NO: 450533 - protein, 15 aa, Homo sapiens
  CDR3 for alpha chain variable domain of TCR clone 225267 (TRAV27, TRAJ50)
CPGRERGTSYAKVIF

SEQ ID NO: 450534 - protein, 16 aa, Homo sapiens
  CDR3 for beta chain variable domain of TCR clone 225267 (TRBV10-3, TRBJ1-5)
CAISDQVGAPNQPQHF

SEQ ID NO: 450535 - protein, 16 aa, Homo sapiens
  CDR3 for alpha chain variable domain of TCR clone 225268 (TRAV3, TRAJ37)
CAVRPHGSGNTGKLIF

SEQ ID NO: 450536 - protein, 12 aa, Homo sapiens
  CDR3 for beta chain variable domain of TCR clone 225268 (TRBV2, TRBJ2-7)
CASSDPDYEQYF

SEQ ID NO: 450537 - protein, 14 aa, Homo sapiens
  CDR3 for alpha chain variable domain of TCR clone 225269 (TRAV16, TRAJ33)
CALSAMDSNYHLIW

SEQ ID NO: 450538 - protein, 16 aa, Homo sapiens
  CDR3 for beta chain variable domain of TCR clone 225269 (TRBV25-1, TRBJ2-7)
CASSELTGGGIYEQYF

SEQ ID NO: 450539 - protein, 14 aa, Homo sapiens
  CDR3 for alpha chain variable domain of TCR clone 225270 (TRAV4, TRAJ26)
CLVGPHIYGQNFVF

SEQ ID NO: 450540 - protein, 17 aa, Homo sapiens
  CDR3 for beta chain variable domain of TCR clone 225270 (TRBV24-1, TRBJ2-1)
CSTSDVSTSGTYNEQFF

SEQ ID NO: 450541 - protein, 15 aa, Homo sapiens
  CDR3 for alpha chain variable domain of TCR clone 225271 (TRAV8-3, TRAJ40)
CAVGPYTSGAYKYIF

SEQ ID NO: 450542 - protein, 16 aa, Homo sapiens
  CDR3 for beta chain variable domain of TCR clone 225271 (TRBV7-2, TRBJ2-7)
CASSLDPGGGSGEQYF

SEQ ID NO: 450543 - protein, 17 aa, Homo sapiens
  CDR3 for alpha chain variable domain of TCR clone 225272 (TRAV14/DV4, TRAJ28)
CAMRGTSSGAGIYQLTF

SEQ ID NO: 450544 - protein, 13 aa, Homo sapiens
  CDR3 for beta chain variable domain of TCR clone 225272 (TRBV28, TRBJ2-5)
CASSVAGGETQYF

SEQ ID NO: 450545 - protein, 18 aa, Homo sapiens
  CDR3 for alpha chain variable domain of TCR clone 225273 (TRAV21, TRAJ52)
CAVRPSPAGGTSYGKLTF

SEQ ID NO: 450546 - protein, 13 aa, Homo sapiens
  CDR3 for beta chain variable domain of TCR clone 225273 (TRBV7-3, TRBJ2-1)
CASSPVAYNEQFF

SEQ ID NO: 450547 - protein, 15 aa, Homo sapiens
  CDR3 for alpha chain variable domain of TCR clone 225274 (TRAV35, TRAJ58)
CAGRRQETSGSRLTF

SEQ ID NO: 450548 - protein, 14 aa, Homo sapiens
  CDR3 for beta chain variable domain of TCR clone 225274 (TRBV7-2, TRBJ1-1)
CASSFLTGTTEAFF

SEQ ID NO: 450549 - protein, 14 aa, Homo sapiens
  CDR3 for alpha chain variable domain of TCR clone 225275 (TRAV12-2, TRAJ5)
CAVNRSTGRRALTF

SEQ ID NO: 450550 - protein, 14 aa, Homo sapiens
  CDR3 for beta chain variable domain of TCR clone 225275 (TRBV18, TRBJ2-3)
CASSRDRGTDTQYF

SEQ ID NO: 450551 - protein, 15 aa, Homo sapiens
  CDR3 for alpha chain variable domain of TCR clone 225276 (TRAV17, TRAJ52)
CATEAGGTSYGQLTF

SEQ ID NO: 450552 - protein, 16 aa, Homo sapiens
  CDR3 for beta chain variable domain of TCR clone 225276 (TRBV20-1, TRBJ2-1)
CSAGRPAGGPYNEQFF

SEQ ID NO: 450553 - protein, 14 aa, Homo sapiens
  CDR3 for alpha chain variable domain of TCR clone 225277 (TRAV26-1, TRAJ38)
CIADNAGNNRKLIW

SEQ ID NO: 450554 - protein, 14 aa, Homo sapiens
  CDR3 for beta chain variable domain of TCR clone 225277 (TRBV4-1, TRBJ2-2)
CASSQAVNTGELVF

SEQ ID NO: 450555 - protein, 11 aa, Homo sapiens
  CDR3 for alpha chain variable domain of TCR clone 225278 (TRAV4, TRAJ23)
CLVAPGGKLIF

SEQ ID NO: 450556 - protein, 13 aa, Homo sapiens
  CDR3 for beta chain variable domain of TCR clone 225278 (TRBV7-9, TRBJ1-2)
CASSLKKNYGYTF

SEQ ID NO: 450557 - protein, 14 aa, Homo sapiens
  CDR3 for alpha chain variable domain of TCR clone 225279 (TRAV13-1, TRAJ39)
CAASPNNAGNMLTF

SEQ ID NO: 450558 - protein, 14 aa, Homo sapiens
  CDR3 for beta chain variable domain of TCR clone 225279 (TRBV7-2, TRBJ2-7)
CASSPKTSFYEQYF

SEQ ID NO: 450559 - protein, 14 aa, Homo sapiens
  CDR3 for alpha chain variable domain of TCR clone 225280 (TRAV12-1, TRAJ17)
CVVNHKAAGNKLTF

SEQ ID NO: 450560 - protein, 17 aa, Homo sapiens
  CDR3 for beta chain variable domain of TCR clone 225280 (TRBV20-1, TRBJ2-1)
CSASSSGLAGSYNEQFL

SEQ ID NO: 450561 - protein, 17 aa, Homo sapiens
  CDR3 for alpha chain variable domain of TCR clone 225281 (TRAV3, TRAJ12)
CAVRDGGMMDSSYKLIF

SEQ ID NO: 450562 - protein, 13 aa, Homo sapiens
  CDR3 for beta chain variable domain of TCR clone 225281 (TRBV13, TRBJ2-7)
CASSQGVSYEQYF

SEQ ID NO: 450563 - protein, 16 aa, Homo sapiens
  CDR3 for alpha chain variable domain of TCR clone 225282 (TRAV12-3, TRAJ53)
CAMSRGSGGSDYKLTF

SEQ ID NO: 450564 - protein, 11 aa, Homo sapiens
  CDR3 for beta chain variable domain of TCR clone 225282 (TRBV29-1, TRBJ2-5)
CSEDRTGTQYF

SEQ ID NO: 450565 - protein, 16 aa, Homo sapiens
  CDR3 for alpha chain variable domain of TCR clone 225283 (TRAV12-1, TRAJ48)
CVVNMGSNFGNEKLTF

SEQ ID NO: 450566 - protein, 18 aa, Homo sapiens
  CDR3 for beta chain variable domain of TCR clone 225283 (TRBV11-2, TRBJ2-6)
CASSLNPFLGTGANVLTF

SEQ ID NO: 450567 - protein, 15 aa, Homo sapiens
  CDR3 for alpha chain variable domain of TCR clone 225284 (TRAV13-1, TRAJ44)
CAASRGGGTASKLTF

SEQ ID NO: 450568 - protein, 14 aa, Homo sapiens
  CDR3 for beta chain variable domain of TCR clone 225284 (TRBV7-2, TRBJ2-5)
CASGPRGSSETQYF

SEQ ID NO: 450569 - protein, 11 aa, Homo sapiens
  CDR3 for alpha chain variable domain of TCR clone 225285 (TRAV12-2, TRAJ31)
CAVTRWARLMF

SEQ ID NO: 450570 - protein, 13 aa, Homo sapiens
  CDR3 for beta chain variable domain of TCR clone 225285 (TRBV12-5, TRBJ2-3)
CASGDRQSDTQYF

SEQ ID NO: 450571 - protein, 11 aa, Homo sapiens
  CDR3 for alpha chain variable domain of TCR clone 225286 (TRAV12-3, TRAJ27)
CAMANAGKSTF

SEQ ID NO: 450572 - protein, 13 aa, Homo sapiens
  CDR3 for beta chain variable domain of TCR clone 225286 (TRBV20-1, TRBJ1-1)
FSARVGGNTEAFF

SEQ ID NO: 450573 - protein, 14 aa, Homo sapiens
  CDR3 for alpha chain variable domain of TCR clone 225287 (TRAV12-3, TRAJ7)
CAMSEIGGNNRLAF

SEQ ID NO: 450574 - protein, 12 aa, Homo sapiens
  CDR3 for beta chain variable domain of TCR clone 225287 (TRBV5-4, TRBJ1-1)
CASSWDRREAFF

SEQ ID NO: 450575 - protein, 12 aa, Homo sapiens
  CDR3 for alpha chain variable domain of TCR clone 225288 (TRAV8-4, TRAJ43)
CAVSVNNNDMRF

SEQ ID NO: 450576 - protein, 14 aa, Homo sapiens
  CDR3 for beta chain variable domain of TCR clone 225288 (TRBV7-8, TRBJ2-7)
CASSPRDRVYEQYF

SEQ ID NO: 450577 - protein, 14 aa, Homo sapiens
  CDR3 for alpha chain variable domain of TCR clone 225289 (TRAV12-1, TRAJ17)
CVVNYKAAGNKITF

SEQ ID NO: 450578 - protein, 15 aa, Homo sapiens
  CDR3 for beta chain variable domain of TCR clone 225289 (TRBV7-2, TRBJ2-7)
CASSLALGSAYEQYF

SEQ ID NO: 450579 - protein, 14 aa, Homo sapiens
  CDR3 for alpha chain variable domain of TCR clone 225290 (TRAV17, TRAJ6)
CATNPAGGSYIPTF

SEQ ID NO: 450580 - protein, 15 aa, Homo sapiens
  CDR3 for beta chain variable domain of TCR clone 225290 (TRBV3-1, TRBJ2-5)
CASSANLGGPETQYF

SEQ ID NO: 450581 - protein, 13 aa, Homo sapiens
  CDR3 for alpha chain variable domain of TCR clone 225291 (TRAV8-6, TRAJ40)
CAVSVTGTYKYIF

SEQ ID NO: 450582 - protein, 17 aa, Homo sapiens
  CDR3 for beta chain variable domain of TCR clone 225291 (TRBV19, TRBJ2-7)
CASSISFYDSYPYEQYF

SEQ ID NO: 450583 - protein, 15 aa, Homo sapiens
  CDR3 for alpha chain variable domain of TCR clone 225292 (TRAV17, TRAJ16)
CATALRFSDGQKLLF

SEQ ID NO: 450584 - protein, 16 aa, Homo sapiens
  CDR3 for beta chain variable domain of TCR clone 225292 (TRBV7-8, TRBJ2-6)
CASRVGDSSGANVLTF

SEQ ID NO: 450585 - protein, 17 aa, Homo sapiens
  CDR3 for alpha chain variable domain of TCR clone 225293 (TRAV13-1, TRAJ53)
FAASWKSSGGSNYKLTF

SEQ ID NO: 450586 - protein, 19 aa, Homo sapiens
  CDR3 for beta chain variable domain of TCR clone 225293 (TRBV7-9, TRBJ2-1)
CASSHNRGALLRSYNEQFF

SEQ ID NO: 450587 - protein, 16 aa, Homo sapiens
  CDR3 for alpha chain variable domain of TCR clone 225294 (TRAV3, TRAJ37)
CAGRGKGSGNTGKLIF

SEQ ID NO: 450588 - protein, 14 aa, Homo sapiens
  CDR3 for beta chain variable domain of TCR clone 225294 (TRBV6-1, TRBJ1-3)
CASVQGGGGNTIYF

SEQ ID NO: 450589 - protein, 15 aa, Homo sapiens
  CDR3 for alpha chain variable domain of TCR clone 225295 (TRAV8-3, TRAJ45)
RASSYSGGGADGLTF

SEQ ID NO: 450590 - protein, 13 aa, Homo sapiens
  CDR3 for beta chain variable domain of TCR clone 225295 (TRBV10-3, TRBJ2-7)
CASKLAVNYEQYF

SEQ ID NO: 450591 - protein, 16 aa, Homo sapiens
  CDR3 for alpha chain variable domain of TCR clone 225296 (TRAV30, TRAJ24)
CGTEIVDADSWGKFQF

SEQ ID NO: 450592 - protein, 14 aa, Homo sapiens
  CDR3 for beta chain variable domain of TCR clone 225296 (TRBV19, TRBJ2-1)
CASGKSTQYNEQFF

SEQ ID NO: 450593 - protein, 15 aa, Homo sapiens
  CDR3 for alpha chain variable domain of TCR clone 225297 (TRAV35, TRAJ40)
CAGQLGTSGTYKYIF

SEQ ID NO: 450594 - protein, 14 aa, Homo sapiens
  CDR3 for beta chain variable domain of TCR clone 225297 (TRBV7-3, TRBJ2-1)
CASSLAGGTNKQFF

SEQ ID NO: 450595 - protein, 15 aa, Homo sapiens
  CDR3 for alpha chain variable domain of TCR clone 225298 (TRAV27, TRAJ38)
CAARRNADNNRKLIC

SEQ ID NO: 450596 - protein, 13 aa, Homo sapiens
  CDR3 for beta chain variable domain of TCR clone 225298 (TRBV12-5, TRBJ2-3)
CASGDRQSDTQYF

SEQ ID NO: 450597 - protein, 16 aa, Homo sapiens
  CDR3 for alpha chain variable domain of TCR clone 225299 (TRAV20, TRAJ22)
CAVQASSSGSARQLTF

SEQ ID NO: 450598 - protein, 13 aa, Homo sapiens
  CDR3 for beta chain variable domain of TCR clone 225299 (TRBV7-2, TRBJ2-5)
CASSQISVETQYF

SEQ ID NO: 450599 - protein, 14 aa, Homo sapiens
  CDR3 for alpha chain variable domain of TCR clone 225300 (TRAV35, TRAJ38)
FAGSNAGNNRKLIW

SEQ ID NO: 450600 - protein, 12 aa, Homo sapiens
  CDR3 for beta chain variable domain of TCR clone 225300 (TRBV19, TRBJ2-7)
CASTDRGYEQYF

SEQ ID NO: 450601 - protein, 13 aa, Homo sapiens
  CDR3 for alpha chain variable domain of TCR clone 225301 (TRAV23/DV6, TRAJ6)
CAAKTGGSYIPTL

SEQ ID NO: 450602 - protein, 15 aa, Homo sapiens
  CDR3 for beta chain variable domain of TCR clone 225301 (TRBV5-1, TRBJ1-2)
CASSSYGEFDYGYTF

SEQ ID NO: 450603 - protein, 14 aa, Homo sapiens
  CDR3 for alpha chain variable domain of TCR clone 225302 (TRAV13-1, TRAJ44)
CAAKATGTASKLTF

SEQ ID NO: 450604 - protein, 15 aa, Homo sapiens
  CDR3 for beta chain variable domain of TCR clone 225302 (TRBV7-8, TRBJ2-1)
CASSLARGLYNEQFF

SEQ ID NO: 450605 - protein, 13 aa, Homo sapiens
  CDR3 for alpha chain variable domain of TCR clone 225303 (TRAV25, TRAJ17)
CAGLRAAGNKLTF

SEQ ID NO: 450606 - protein, 14 aa, Homo sapiens
  CDR3 for beta chain variable domain of TCR clone 225303 (TRBV7-2, TRBJ1-1)
CASSFLTGTTEAFF

SEQ ID NO: 450607 - protein, 14 aa, Homo sapiens
  CDR3 for alpha chain variable domain of TCR clone 225304 (TRAV13-1, TRAJ44)
CAAKATGTASKLSF

SEQ ID NO: 450608 - protein, 14 aa, Homo sapiens
  CDR3 for beta chain variable domain of TCR clone 225304 (TRBV19, TRBJ2-2)
CASSTLHRSGELFF

SEQ ID NO: 450609 - protein, 13 aa, Homo sapiens
  CDR3 for alpha chain variable domain of TCR clone 225305 (TRAV17, TRAJ5)
CATMDTGRRALTF

SEQ ID NO: 450610 - protein, 14 aa, Homo sapiens
  CDR3 for beta chain variable domain of TCR clone 225305 (TRBV7-3, TRBJ2-1)
CASSLAGGTNEQFF

SEQ ID NO: 450611 - protein, 17 aa, Homo sapiens
  CDR3 for alpha chain variable domain of TCR clone 225306 (TRAV26-1, TRAJ58)
CIVRVGAEETSGSRLAF

SEQ ID NO: 450612 - protein, 18 aa, Homo sapiens
  CDR3 for beta chain variable domain of TCR clone 225306 (TRBV7-9, TRBJ2-7)
CASSLTTSGSRTWYEQYF

SEQ ID NO: 450613 - protein, 14 aa, Homo sapiens
  CDR3 for alpha chain variable domain of TCR clone 225307 (TRAV20, TRAJ22)
CAVQVSGSARQLTF

SEQ ID NO: 450614 - protein, 14 aa, Homo sapiens
  CDR3 for beta chain variable domain of TCR clone 225307 (TRBV12-4, TRBJ1-1)
CASSLGTGGTEAFF

SEQ ID NO: 450615 - protein, 13 aa, Homo sapiens
  CDR3 for alpha chain variable domain of TCR clone 225308 (TRAV8-6, TRAJ24)
CAVSSDSWGKLQF

SEQ ID NO: 450616 - protein, 15 aa, Homo sapiens
  CDR3 for beta chain variable domain of TCR clone 225308 (TRBV9, TRBJ1-6)
CASSVAGTGDSPLHF

SEQ ID NO: 450617 - protein, 14 aa, Homo sapiens
  CDR3 for alpha chain variable domain of TCR clone 225309 (TRAV17, TRAJ16)
CATADYSDGQKLLF

SEQ ID NO: 450618 - protein, 15 aa, Homo sapiens
  CDR3 for beta chain variable domain of TCR clone 225309 (TRBV18, TRBJ2-1)
CASSPPSASYNEQFF

SEQ ID NO: 450619 - protein, 20 aa, Homo sapiens
  CDR3 for alpha chain variable domain of TCR clone 225310 (TRAV4, TRAJ31)
CLVGERLQQCQTHVRRWNSA

SEQ ID NO: 450620 - protein, 19 aa, Homo sapiens
  CDR3 for beta chain variable domain of TCR clone 225310 (TRBV12-4, TRBJ2-1)
CASTLAFDPRDKEANEQFF

SEQ ID NO: 450621 - protein, 14 aa, Homo sapiens
  CDR3 for alpha chain variable domain of TCR clone 225311 (TRAV13-1, TRAJ28)
CAASKGAGSYQLTF

SEQ ID NO: 450622 - protein, 13 aa, Homo sapiens
  CDR3 for beta chain variable domain of TCR clone 225311 (TRBV7-9, TRBJ2-5)
CASLPSGRETQYF

SEQ ID NO: 450623 - protein, 19 aa, Homo sapiens
  CDR3 for alpha chain variable domain of TCR clone 225312 (TRAV3, TRAJ6)
CAVRDRNPSRSGGSYIPTF

SEQ ID NO: 450624 - protein, 15 aa, Homo sapiens
  CDR3 for beta chain variable domain of TCR clone 225312 (TRBV18, TRBJ2-7)
CASSPTFMDSYEQDF

SEQ ID NO: 450625 - protein, 15 aa, Homo sapiens
  CDR3 for alpha chain variable domain of TCR clone 225313 (TRAV21, TRAJ53)
CYTLNSGGSNYKLTF

SEQ ID NO: 450626 - protein, 15 aa, Homo sapiens
  CDR3 for beta chain variable domain of TCR clone 225313 (TRBV20-1, TRBJ2-7)
CSARDRVSGMDEQYF

SEQ ID NO: 450627 - protein, 15 aa, Homo sapiens
  CDR3 for alpha chain variable domain of TCR clone 225314 (TRAV25, TRAJ52)
CAGRPGGTSYGKLTF

SEQ ID NO: 450628 - protein, 12 aa, Homo sapiens
  CDR3 for beta chain variable domain of TCR clone 225314 (TRBV7-8, TRBJ2-7)
CASEGGPHGQYF

SEQ ID NO: 450629 - protein, 14 aa, Homo sapiens
  CDR3 for alpha chain variable domain of TCR clone 225315 (TRAV13-2, TRAJ17)
CAENSKAAGNKLTF

SEQ ID NO: 450630 - protein, 20 aa, Homo sapiens
  CDR3 for beta chain variable domain of TCR clone 225315 (TRBV7-8, TRBJ2-2)
CASSHLFPGPTIHITGELFF

SEQ ID NO: 450631 - protein, 14 aa, Homo sapiens
  CDR3 for alpha chain variable domain of TCR clone 225316 (TRAV3, TRAJ9)
CAVRGNAGGFTTIF

SEQ ID NO: 450632 - protein, 14 aa, Homo sapiens
  CDR3 for beta chain variable domain of TCR clone 225316 (TRBV15, TRBJ2-1)
CATSGVEDYNEQFF

SEQ ID NO: 450633 - protein, 17 aa, Homo sapiens
  CDR3 for alpha chain variable domain of TCR clone 225317 (TRAV12-2, TRAJ39)
CAVNNMLTFGGGPRLMV

SEQ ID NO: 450634 - protein, 16 aa, Homo sapiens
  CDR3 for beta chain variable domain of TCR clone 225317 (TRBV5-3, TRBJ2-2)
CARSFGTGTNTGELFF

SEQ ID NO: 450635 - protein, 13 aa, Homo sapiens
  CDR3 for alpha chain variable domain of TCR clone 225318 (TRAV8-6, TRAJ50)
CAVIKTSDDKVIF

SEQ ID NO: 450636 - protein, 15 aa, Homo sapiens
  CDR3 for beta chain variable domain of TCR clone 225318 (TRBV7-2, TRBJ2-2)
CASRRPGQNTGELFF

SEQ ID NO: 450637 - protein, 15 aa, Homo sapiens
  CDR3 for alpha chain variable domain of TCR clone 225319 (TRAV12-3, TRAJ53)
CNERPIEGSNYKLTF

SEQ ID NO: 450638 - protein, 17 aa, Homo sapiens
  CDR3 for beta chain variable domain of TCR clone 225319 (TRBV13, TRBJ2-3)
CASSLSRVAGGRNTQYF

SEQ ID NO: 450639 - protein, 12 aa, Homo sapiens
  CDR3 for alpha chain variable domain of TCR clone 225320 (TRAV13-1, TRAJ48)
CAANFGNEKLTF

SEQ ID NO: 450640 - protein, 18 aa, Homo sapiens
  CDR3 for beta chain variable domain of TCR clone 225320 (TRBV19, TRBJ2-6)
CASSADRAGSSGANVLTF

SEQ ID NO: 450641 - protein, 16 aa, Homo sapiens
  CDR3 for alpha chain variable domain of TCR clone 225321 (TRAV3, TRAJ40)
CAVRDRIASGTYKYIF

SEQ ID NO: 450642 - protein, 16 aa, Homo sapiens
  CDR3 for beta chain variable domain of TCR clone 225321 (TRBV6-1, TRBJ1-2)
CASSEANSIINYGDTV

SEQ ID NO: 450643 - protein, 14 aa, Homo sapiens
  CDR3 for alpha chain variable domain of TCR clone 225322 (TRAV21, TRAJ24)
CAVMTTDSWGKLQF

SEQ ID NO: 450644 - protein, 12 aa, Homo sapiens
  CDR3 for beta chain variable domain of TCR clone 225322 (TRBV28, TRBJ1-4)
CASRVGSAKLFF

SEQ ID NO: 450645 - protein, 15 aa, Homo sapiens
  CDR3 for alpha chain variable domain of TCR clone 225323 (TRAV3, TRAJ15)
CAVRPAHQAGTALIV

SEQ ID NO: 450646 - protein, 14 aa, Homo sapiens
  CDR3 for beta chain variable domain of TCR clone 225323 (TRBV4-1, TRBJ2-2)
CASSQAVNTGELFF

SEQ ID NO: 450647 - protein, 16 aa, Homo sapiens
  CDR3 for alpha chain variable domain of TCR clone 225324 (TRAV30, TRAJ24)
CGTEIVDADSWGKFQF

SEQ ID NO: 450648 - protein, 14 aa, Homo sapiens
  CDR3 for beta chain variable domain of TCR clone 225324 (TRBV12-4, TRBJ1-2)
CASSFVGTAYGYTF

SEQ ID NO: 450649 - protein, 12 aa, Homo sapiens
  CDR3 for alpha chain variable domain of TCR clone 225325 (TRAV12-1, TRAJ40)
CVVYSGTYKYTF

SEQ ID NO: 450650 - protein, 14 aa, Homo sapiens
  CDR3 for beta chain variable domain of TCR clone 225325 (TRBV19, TRBJ2-1)
CASPTFVLSGEQFF

SEQ ID NO: 450651 - protein, 14 aa, Homo sapiens
  CDR3 for alpha chain variable domain of TCR clone 225326 (TRAV12-3, TRAJ57)
CARALEGGSETLVF

SEQ ID NO: 450652 - protein, 17 aa, Homo sapiens
  CDR3 for beta chain variable domain of TCR clone 225326 (TRBV11-3, TRBJ2-3)
CASSLGLTGGGTDTQYF

SEQ ID NO: 450653 - protein, 18 aa, Homo sapiens
  CDR3 for alpha chain variable domain of TCR clone 225327 (TRAV21, TRAJ52)
CAVRPSPAGGTSYGNLTF

SEQ ID NO: 450654 - protein, 17 aa, Homo sapiens
  CDR3 for beta chain variable domain of TCR clone 225327 (TRBV13, TRBJ2-3)
CASSLARVAGGRNTQYF

SEQ ID NO: 450655 - protein, 11 aa, Homo sapiens
  CDR3 for alpha chain variable domain of TCR clone 225328 (TRAV12-2, TRAJ39)
CAVNNMLTFGG

SEQ ID NO: 450656 - protein, 12 aa, Homo sapiens
  CDR3 for beta chain variable domain of TCR clone 225328 (TRBV5-3, TRBJ2-2)
GASALYLCARSF

SEQ ID NO: 450657 - protein, 12 aa, Homo sapiens
  CDR3 for alpha chain variable domain of TCR clone 225329 (TRAV9-2, TRAJ36)
CALKKGANNLFF

SEQ ID NO: 450658 - protein, 12 aa, Homo sapiens
  CDR3 for beta chain variable domain of TCR clone 225329 (TRBV7-9, TRBJ2-7)
CASSIKREEQYF

SEQ ID NO: 450659 - protein, 14 aa, Homo sapiens
  CDR3 for alpha chain variable domain of TCR clone 225330 (TRAV12-1, TRAJ9)
CVVTGYTGGFKTIF

SEQ ID NO: 450660 - protein, 16 aa, Homo sapiens
  CDR3 for beta chain variable domain of TCR clone 225330 (TRBV12-5, TRBJ2-5)
CASGPRTSGNQETQYF

SEQ ID NO: 450661 - protein, 14 aa, Homo sapiens
  CDR3 for alpha chain variable domain of TCR clone 225331 (TRAV12-2, TRAJ44)
CAVNPAGTASKLTF

SEQ ID NO: 450662 - protein, 17 aa, Homo sapiens
  CDR3 for beta chain variable domain of TCR clone 225331 (TRBV7-3, TRBJ2-3)
CASSLMKRMRGADTQYF

SEQ ID NO: 450663 - protein, 16 aa, Homo sapiens
  CDR3 for alpha chain variable domain of TCR clone 225332 (TRAV12-3, TRAJ53)
CAMSPGSGGSNHKLTF

SEQ ID NO: 450664 - protein, 14 aa, Homo sapiens
  CDR3 for beta chain variable domain of TCR clone 225332 (TRBV4-2, TRBJ2-1)
CASGLDRAYNEQFF

SEQ ID NO: 450665 - protein, 15 aa, Homo sapiens
  CDR3 for alpha chain variable domain of TCR clone 225333 (TRAV3, TRAJ20)
CAVRDSRSNDYKLSF

SEQ ID NO: 450666 - protein, 12 aa, Homo sapiens
  CDR3 for beta chain variable domain of TCR clone 225333 (TRBV7-9, TRBJ2-7)
CATRTDAYEQYF

SEQ ID NO: 450667 - protein, 15 aa, Homo sapiens
  CDR3 for alpha chain variable domain of TCR clone 225334 (TRAV8-3, TRAJ45)
CASSYSGGGADGLTF

SEQ ID NO: 450668 - protein, 14 aa, Homo sapiens
  CDR3 for beta chain variable domain of TCR clone 225334 (TRBV7-8, TRBJ2-1)
CASSFFGGRNEQFF

SEQ ID NO: 450669 - protein, 12 aa, Homo sapiens
  CDR3 for alpha chain variable domain of TCR clone 225335 (TRAV29/DV5, TRAJ34)
CAARHNTDKLIF

SEQ ID NO: 450670 - protein, 15 aa, Homo sapiens
  CDR3 for beta chain variable domain of TCR clone 225335 (TRBV19, TRBJ2-7)
CASSPAGSGEALRYY

SEQ ID NO: 450671 - protein, 21 aa, Homo sapiens
  CDR3 for alpha chain variable domain of TCR clone 225336 (TRAV12-1, TRAJ32)
SSVIQPHTSMNYGGATNKLIF

SEQ ID NO: 450672 - protein, 18 aa, Homo sapiens
  CDR3 for beta chain variable domain of TCR clone 225336 (TRBV20-1, TRBJ2-3)
CSASGLAGGPGTTDTQYF

SEQ ID NO: 450673 - protein, 14 aa, Homo sapiens
  CDR3 for alpha chain variable domain of TCR clone 225337 (TRAV1-2, TRAJ8)
CAVREDTGFQKLVF

SEQ ID NO: 450674 - protein, 15 aa, Homo sapiens
  CDR3 for beta chain variable domain of TCR clone 225337 (TRBV7-9, TRBJ2-1)
CASSLGLAGGTEQFF

SEQ ID NO: 450675 - protein, 12 aa, Homo sapiens
  CDR3 for alpha chain variable domain of TCR clone 225338 (TRAV5, TRAJ27)
CAEITNAGKSTF

SEQ ID NO: 450676 - protein, 14 aa, Homo sapiens
  CDR3 for beta chain variable domain of TCR clone 225338 (TRBV12-5, TRBJ2-5)
CASGSRTHQETQDF

SEQ ID NO: 450677 - protein, 16 aa, Homo sapiens
  CDR3 for alpha chain variable domain of TCR clone 225339 (TRAV30, TRAJ24)
CGTEIVDDDSWGKFQF

SEQ ID NO: 450678 - protein, 14 aa, Homo sapiens
  CDR3 for beta chain variable domain of TCR clone 225339 (TRBV12-5, TRBJ2-5)
FAIGPRTHQETQYF

SEQ ID NO: 450679 - protein, 14 aa, Homo sapiens
  CDR3 for alpha chain variable domain of TCR clone 225340 (TRAV26-1, TRAJ39)
CSVFTNNAGNMLTF

SEQ ID NO: 450680 - protein, 15 aa, Homo sapiens
  CDR3 for beta chain variable domain of TCR clone 225340 (TRBV19, TRBJ2-4)
CASSLTGLTKNIQYF

SEQ ID NO: 450681 - protein, 19 aa, Homo sapiens
  CDR3 for alpha chain variable domain of TCR clone 225341 (TRAV26-1, TRAJ52)
CIVRAHRNAGGTSYGKLTF

SEQ ID NO: 450682 - protein, 15 aa, Homo sapiens
  CDR3 for beta chain variable domain of TCR clone 225341 (TRBV29-1, TRBJ2-1)
CSARDRKSSYNEQFF

SEQ ID NO: 450683 - protein, 14 aa, Homo sapiens
  CDR3 for alpha chain variable domain of TCR clone 225342 (TRAV2, TRAJ37)
CAVAFTSNTGELIF

SEQ ID NO: 450684 - protein, 15 aa, Homo sapiens
  CDR3 for beta chain variable domain of TCR clone 225342 (TRBV20-1, TRBJ1-1)
CSASRGVTGNTEAFF

SEQ ID NO: 450685 - protein, 16 aa, Homo sapiens
  CDR3 for alpha chain variable domain of TCR clone 225343 (TRAV12-3, TRAJ53)
CAMSPRSGGSNYKLTF

SEQ ID NO: 450686 - protein, 13 aa, Homo sapiens
  CDR3 for beta chain variable domain of TCR clone 225343 (TRBV7-3, TRBJ1-1)
CASSQDWGAEAFF

SEQ ID NO: 450687 - protein, 12 aa, Homo sapiens
  CDR3 for alpha chain variable domain of TCR clone 225344 (TRAV21, TRAJ23)
CAVMLQGGKLIF

SEQ ID NO: 450688 - protein, 14 aa, Homo sapiens
  CDR3 for beta chain variable domain of TCR clone 225344 (TRBV7-9, TRBJ1-4)
CPITEGEANEKLFF

SEQ ID NO: 450689 - protein, 13 aa, Homo sapiens
  CDR3 for alpha chain variable domain of TCR clone 225345 (TRAV8-3, TRAJ36)
CAVGATGANNLFF

SEQ ID NO: 450690 - protein, 13 aa, Homo sapiens
  CDR3 for beta chain variable domain of TCR clone 225345 (TRBV2, TRBJ1-1)
CASSAGRNTEAFF

SEQ ID NO: 450691 - protein, 12 aa, Homo sapiens
  CDR3 for alpha chain variable domain of TCR clone 225346 (TRAV30, TRAJ20)
CGTESNDYKLSF

SEQ ID NO: 450692 - protein, 15 aa, Homo sapiens
  CDR3 for beta chain variable domain of TCR clone 225346 (TRBV20-1, TRBJ2-7)
CSARARVSGMDEQYF

SEQ ID NO: 450693 - protein, 14 aa, Homo sapiens
  CDR3 for alpha chain variable domain of TCR clone 225347 (TRAV1-2, TRAJ8)
CAVREDTGFQRLVF

SEQ ID NO: 450694 - protein, 13 aa, Homo sapiens
  CDR3 for beta chain variable domain of TCR clone 225347 (TRBV20-1, TRBJ2-7)
CSARGRGAYEQYF

SEQ ID NO: 450695 - protein, 14 aa, Homo sapiens
  CDR3 for alpha chain variable domain of TCR clone 225348 (TRAV4, TRAJ17)
CLVCDPLVGNKLTF

SEQ ID NO: 450696 - protein, 20 aa, Homo sapiens
  CDR3 for beta chain variable domain of TCR clone 225348 (TRBV20-1, TRBJ2-1)
CSARPYSVAGGPSYYNEQFF

SEQ ID NO: 450697 - protein, 15 aa, Homo sapiens
  CDR3 for alpha chain variable domain of TCR clone 225349 (TRAV21, TRAJ53)
CATLNSGGSNYKLTF

SEQ ID NO: 450698 - protein, 13 aa, Homo sapiens
  CDR3 for beta chain variable domain of TCR clone 225349 (TRBV28, TRBJ1-5)
CASSDRGNQPQHF

SEQ ID NO: 450699 - protein, 17 aa, Homo sapiens
  CDR3 for alpha chain variable domain of TCR clone 225350 (TRAV3, TRAJ38)
CAVRDCLNAGNNRKLIW

SEQ ID NO: 450700 - protein, 17 aa, Homo sapiens
  CDR3 for beta chain variable domain of TCR clone 225350 (TRBV15, TRBJ1-5)
CATSRAPPGTRNQPQHF

SEQ ID NO: 450701 - protein, 14 aa, Homo sapiens
  CDR3 for alpha chain variable domain of TCR clone 225351 (TRAV38-1, TRAJ45)
CSYYSGGGADGLTF

SEQ ID NO: 450702 - protein, 14 aa, Homo sapiens
  CDR3 for beta chain variable domain of TCR clone 225351 (TRBV25-1, TRBJ1-1)
CASTHLGGNTEAFF

SEQ ID NO: 450703 - protein, 11 aa, Homo sapiens
  CDR3 for alpha chain variable domain of TCR clone 225352 (TRAV13-1, TRAJ15)
CSATPGTALIF

SEQ ID NO: 450704 - protein, 17 aa, Homo sapiens
  CDR3 for beta chain variable domain of TCR clone 225352 (TRBV13, TRBJ2-3)
CASGLSRVAGGRNTQYF

SEQ ID NO: 450705 - protein, 15 aa, Homo sapiens
  CDR3 for alpha chain variable domain of TCR clone 225353 (TRAV17, TRAJ42)
CATDHYGGSQGNIIF

SEQ ID NO: 450706 - protein, 13 aa, Homo sapiens
  CDR3 for beta chain variable domain of TCR clone 225353 (TRBV7-2, TRBJ1-5)
CASSFARNQPQHF

SEQ ID NO: 450707 - protein, 12 aa, Homo sapiens
  CDR3 for alpha chain variable domain of TCR clone 225354 (TRAV21, TRAJ49)
CAVRNTGNQFYF

SEQ ID NO: 450708 - protein, 15 aa, Homo sapiens
  CDR3 for beta chain variable domain of TCR clone 225354 (TRBV2, TRBJ2-1)
CATLPSGLPYNEQFF

SEQ ID NO: 450709 - protein, 14 aa, Homo sapiens
  CDR3 for alpha chain variable domain of TCR clone 225355 (TRAV17, TRAJ17)
CATDHRAAGNTLTF

SEQ ID NO: 450710 - protein, 14 aa, Homo sapiens
  CDR3 for beta chain variable domain of TCR clone 225355 (TRBV19, TRBJ1-5)
CASSIGGGGQPQHF

SEQ ID NO: 450711 - protein, 12 aa, Homo sapiens
  CDR3 for alpha chain variable domain of TCR clone 225356 (TRAV1-1, TRAJ39)
CAVPVVGNMLTF

SEQ ID NO: 450712 - protein, 20 aa, Homo sapiens
  CDR3 for beta chain variable domain of TCR clone 225356 (TRBV7-9, TRBJ2-2)
CASSHLFPGPTIHITGELFF

SEQ ID NO: 450713 - protein, 10 aa, Homo sapiens
  CDR3 for alpha chain variable domain of TCR clone 225357 (TRAV8-4, TRAJ43)
CAVSADDMRF

SEQ ID NO: 450714 - protein, 16 aa, Homo sapiens
  CDR3 for beta chain variable domain of TCR clone 225357 (TRBV19, TRBJ2-1)
CASSKAGPSSYNEQFF

SEQ ID NO: 450715 - protein, 15 aa, Homo sapiens
  CDR3 for alpha chain variable domain of TCR clone 225358 (TRAV12-2, TRAJ53)
CAVNGGGGSNYKLTF

SEQ ID NO: 450716 - protein, 19 aa, Homo sapiens
  CDR3 for beta chain variable domain of TCR clone 225358 (TRBV6-3, TRBJ1-2)
CASSYSKGRTGPPNYGYTF

SEQ ID NO: 450717 - protein, 14 aa, Homo sapiens
  CDR3 for alpha chain variable domain of TCR clone 225359 (TRAV21, TRAJ38)
CAVANAGNNRKLIW

SEQ ID NO: 450718 - protein, 14 aa, Homo sapiens
  CDR3 for beta chain variable domain of TCR clone 225359 (TRBV15, TRBJ1-2)
CATSRDFDRVGYTF

SEQ ID NO: 450719 - protein, 14 aa, Homo sapiens
  CDR3 for alpha chain variable domain of TCR clone 225360 (TRAV26-1, TRAJ40)
CIVKATSGTYKYIF

SEQ ID NO: 450720 - protein, 11 aa, Homo sapiens
  CDR3 for beta chain variable domain of TCR clone 225360 (TRBV24-1, TRBJ2-3)
CATASTDTQYF

SEQ ID NO: 450721 - protein, 12 aa, Homo sapiens
  CDR3 for alpha chain variable domain of TCR clone 225361 (TRAV13-1, TRAJ53)
CAAGGSNYKLTF

SEQ ID NO: 450722 - protein, 11 aa, Homo sapiens
  CDR3 for beta chain variable domain of TCR clone 225361 (TRBV2, TRBJ1-1)
CASREGTEDFF

SEQ ID NO: 450723 - protein, 11 aa, Homo sapiens
  CDR3 for alpha chain variable domain of TCR clone 225362 (TRAV17, TRAJ21)
CATGNFSKFYF

SEQ ID NO: 450724 - protein, 14 aa, Homo sapiens
  CDR3 for beta chain variable domain of TCR clone 225362 (TRBV12-4, TRBJ1-1)
CASSLGTGGTEAFF

SEQ ID NO: 450725 - protein, 16 aa, Homo sapiens
  CDR3 for alpha chain variable domain of TCR clone 225363 (TRAV3, TRAJ3)
CAVRDRAKSSASKIIF

SEQ ID NO: 450726 - protein, 13 aa, Homo sapiens
  CDR3 for beta chain variable domain of TCR clone 225363 (TRBV13, TRBJ2-1)
CASILGGRGEQFF

SEQ ID NO: 450727 - protein, 14 aa, Homo sapiens
  CDR3 for alpha chain variable domain of TCR clone 225364 (TRAV12-1, TRAJ12)
CVVTRMDSSYKLIF

SEQ ID NO: 450728 - protein, 13 aa, Homo sapiens
  CDR3 for beta chain variable domain of TCR clone 225364 (TRBV20-1, TRBJ1-1)
CSARAGGNTEAFF

SEQ ID NO: 450729 - protein, 13 aa, Homo sapiens
  CDR3 for alpha chain variable domain of TCR clone 225365 (TRAV8-6, TRAJ49)
CAVITNTGNQFYF

SEQ ID NO: 450730 - protein, 14 aa, Homo sapiens
  CDR3 for beta chain variable domain of TCR clone 225365 (TRBV12-4, TRBJ2-3)
CASSLGQGTDTQYF

SEQ ID NO: 450731 - protein, 18 aa, Homo sapiens
  CDR3 for alpha chain variable domain of TCR clone 225366 (TRAV29/DV5, TRAJ52)
CAAGFRGAGGTSYGKLTF

SEQ ID NO: 450732 - protein, 18 aa, Homo sapiens
  CDR3 for beta chain variable domain of TCR clone 225366 (TRBV12-4, TRBJ2-5)
CASSPSGGRDPVLRARHA

SEQ ID NO: 450733 - protein, 14 aa, Homo sapiens
  CDR3 for alpha chain variable domain of TCR clone 225367 (TRAV12-1, TRAJ12)
CVVTRMDSSYKLIF

SEQ ID NO: 450734 - protein, 15 aa, Homo sapiens
  CDR3 for beta chain variable domain of TCR clone 225367 (TRBV3-1, TRBJ2-2)
CASSQDWTRAGELFF

SEQ ID NO: 450735 - protein, 13 aa, Homo sapiens
  CDR3 for alpha chain variable domain of TCR clone 225368 (TRAV12-2, TRAJ52)
CAVSGTSYGKLTF

SEQ ID NO: 450736 - protein, 13 aa, Homo sapiens
  CDR3 for beta chain variable domain of TCR clone 225368 (TRBV3-1, TRBJ2-2)
CASLARGSGELFF

SEQ ID NO: 450737 - protein, 12 aa, Homo sapiens
  CDR3 for alpha chain variable domain of TCR clone 225369 (TRAV20, TRAJ54)
CAVQEGAQKLVF

SEQ ID NO: 450738 - protein, 17 aa, Homo sapiens
  CDR3 for beta chain variable domain of TCR clone 225369 (TRBV13, TRBJ2-3)
CASILSRVAGGRNTQYF

SEQ ID NO: 450739 - protein, 15 aa, Homo sapiens
  CDR3 for alpha chain variable domain of TCR clone 225370 (TRAV27, TRAJ38)
CAARRNASNNRKLSW

SEQ ID NO: 450740 - protein, 13 aa, Homo sapiens
  CDR3 for beta chain variable domain of TCR clone 225370 (TRBV12-5, TRBJ2-3)
CASGDRQTDTQYF

SEQ ID NO: 450741 - protein, 23 aa, Homo sapiens
  CDR3 for alpha chain variable domain of TCR clone 225371 (TRAV8-3, TRAJ4)
STPVLWVRDPTSNDPGGYNKLIF

SEQ ID NO: 450742 - protein, 13 aa, Homo sapiens
  CDR3 for beta chain variable domain of TCR clone 225371 (TRBV20-1, TRBJ1-2)
CSATGIQGSGYTF

SEQ ID NO: 450743 - protein, 15 aa, Homo sapiens
  CDR3 for alpha chain variable domain of TCR clone 225372 (TRAV14/DV4, TRAJ46)
CAMREKKSSGHKLTF

SEQ ID NO: 450744 - protein, 13 aa, Homo sapiens
  CDR3 for beta chain variable domain of TCR clone 225372 (TRBV20-1, TRBJ2-5)
CSAREAFQETQYF

SEQ ID NO: 450745 - protein, 13 aa, Homo sapiens
  CDR3 for alpha chain variable domain of TCR clone 225373 (TRAV21, TRAJ33)
CAVAGDSNYQLIW

SEQ ID NO: 450746 - protein, 16 aa, Homo sapiens
  CDR3 for beta chain variable domain of TCR clone 225373 (TRBV13, TRBJ2-2)
CASSPRTGEHTGELFF

SEQ ID NO: 450747 - protein, 12 aa, Homo sapiens
  CDR3 for alpha chain variable domain of TCR clone 225374 (TRAV12-2, TRAJ4)
GWPEGGYNKLIF

SEQ ID NO: 450748 - protein, 13 aa, Homo sapiens
  CDR3 for beta chain variable domain of TCR clone 225374 (TRBV6-6, TRBJ2-7)
CASSPKHLAEQYF

SEQ ID NO: 450749 - protein, 10 aa, Homo sapiens
  CDR3 for alpha chain variable domain of TCR clone 225375 (TRAV13-2, TRAJ20)
CARRDYKLSF

SEQ ID NO: 450750 - protein, 14 aa, Homo sapiens
  CDR3 for beta chain variable domain of TCR clone 225375 (TRBV7-6, TRBJ2-3)
CASSLGTVTDTQYF

SEQ ID NO: 450751 - protein, 15 aa, Homo sapiens
  CDR3 for alpha chain variable domain of TCR clone 225376 (TRAV12-3, TRAJ6)
CAMSATTGGSYIPTF

SEQ ID NO: 450752 - protein, 15 aa, Homo sapiens
  CDR3 for beta chain variable domain of TCR clone 225376 (TRBV28, TRBJ2-1)
CASSIIAGCRSEQFF

SEQ ID NO: 450753 - protein, 14 aa, Homo sapiens
  CDR3 for alpha chain variable domain of TCR clone 225377 (TRAV16, TRAJ26)
CITVLSAYGKNFVF

SEQ ID NO: 450754 - protein, 14 aa, Homo sapiens
  CDR3 for beta chain variable domain of TCR clone 225377 (TRBV7-2, TRBJ2-7)
CASRSQGAAYEQYF

SEQ ID NO: 450755 - protein, 14 aa, Homo sapiens
  CDR3 for alpha chain variable domain of TCR clone 225378 (TRAV12-2, TRAJ13)
CAVKKTGGYQKVTF

SEQ ID NO: 450756 - protein, 13 aa, Homo sapiens
  CDR3 for beta chain variable domain of TCR clone 225378 (TRBV10-3, TRBJ2-7)
CAYKRAVNYEQYF

SEQ ID NO: 450757 - protein, 14 aa, Homo sapiens
  CDR3 for alpha chain variable domain of TCR clone 225379 (TRAV12-3, TRAJ10)
SHLPLTGGGNKLTF

SEQ ID NO: 450758 - protein, 13 aa, Homo sapiens
  CDR3 for beta chain variable domain of TCR clone 225379 (TRBV3-1, TRBJ2-2)
CASLARGSGELFF

SEQ ID NO: 450759 - protein, 16 aa, Homo sapiens
  CDR3 for alpha chain variable domain of TCR clone 225380 (TRAV26-1, TRAJ53)
CIVRVAMGGSNYKLTF

SEQ ID NO: 450760 - protein, 12 aa, Homo sapiens
  CDR3 for beta chain variable domain of TCR clone 225380 (TRBV7-9, TRBJ1-5)
CASSPQGQPKHF

SEQ ID NO: 450761 - protein, 16 aa, Homo sapiens
  CDR3 for alpha chain variable domain of TCR clone 225381 (TRAV3, TRAJ27)
CAVRDPQGTNAGKSTF

SEQ ID NO: 450762 - protein, 15 aa, Homo sapiens
  CDR3 for beta chain variable domain of TCR clone 225381 (TRBV20-1, TRBJ2-7)
CSARDRVAGMDEQYF

SEQ ID NO: 450763 - protein, 17 aa, Homo sapiens
  CDR3 for alpha chain variable domain of TCR clone 225382 (TRAV3, TRAJ38)
CAVRDCLNAGNNRKLIW

SEQ ID NO: 450764 - protein, 16 aa, Homo sapiens
  CDR3 for beta chain variable domain of TCR clone 225382 (TRBV2, TRBJ1-4)
CASNLLQGATNEKLFF

SEQ ID NO: 450765 - protein, 12 aa, Homo sapiens
  CDR3 for alpha chain variable domain of TCR clone 225383 (TRAV3, TRAJ20)
CAVRDHDYKLSF

SEQ ID NO: 450766 - protein, 13 aa, Homo sapiens
  CDR3 for beta chain variable domain of TCR clone 225383 (TRBV9, TRBJ2-7)
CASSVGQGGEQYV

SEQ ID NO: 450767 - protein, 23 aa, Homo sapiens
  CDR3 for alpha chain variable domain of TCR clone 225384 (TRAV8-6, TRAJ38)
CAVRNAGNNHIQNPDPAVYQLRY

SEQ ID NO: 450768 - protein, 15 aa, Homo sapiens
  CDR3 for beta chain variable domain of TCR clone 225384 (TRBV4-1, TRBJ2-2)
CASSEGQGITGELFF

SEQ ID NO: 450769 - protein, 12 aa, Homo sapiens
  CDR3 for alpha chain variable domain of TCR clone 225385 (TRAV8-3, TRAJ26)
CAGDNYGQNFVF

SEQ ID NO: 450770 - protein, 15 aa, Homo sapiens
  CDR3 for beta chain variable domain of TCR clone 225385 (TRBV5-1, TRBJ2-3)
CASSVTSGSIDTQYF

SEQ ID NO: 450771 - protein, 14 aa, Homo sapiens
  CDR3 for alpha chain variable domain of TCR clone 225386 (TRAV2, TRAJ37)
CAVEDLGNTGQLIF

SEQ ID NO: 450772 - protein, 11 aa, Homo sapiens
  CDR3 for beta chain variable domain of TCR clone 225386 (TRBV25-1, TRBJ2-2)
CASSAQGDEHR

SEQ ID NO: 450773 - protein, 13 aa, Homo sapiens
  CDR3 for alpha chain variable domain of TCR clone 225387 (TRAV17, TRAJ34)
CATDLYNTDKLIF

SEQ ID NO: 450774 - protein, 15 aa, Homo sapiens
  CDR3 for beta chain variable domain of TCR clone 225387 (TRBV20-1, TRBJ2-3)
CSATGTSGFTDTQYF

SEQ ID NO: 450775 - protein, 14 aa, Homo sapiens
  CDR3 for alpha chain variable domain of TCR clone 225388 (TRAV26-1, TRAJ39)
CIVRAYNAGNVLTF

SEQ ID NO: 450776 - protein, 16 aa, Homo sapiens
  CDR3 for beta chain variable domain of TCR clone 225388 (TRBV15, TRBJ2-7)
CATSRDFGAAVYEQYF

SEQ ID NO: 450777 - protein, 16 aa, Homo sapiens
  CDR3 for alpha chain variable domain of TCR clone 225389 (TRAV12-1, TRAJ48)
CVVNMVSNFGNEKLTF

SEQ ID NO: 450778 - protein, 18 aa, Homo sapiens
  CDR3 for beta chain variable domain of TCR clone 225389 (TRBV11-2, TRBJ2-6)
WASSLNPFLGTGANVLLF

SEQ ID NO: 450779 - protein, 14 aa, Homo sapiens
  CDR3 for alpha chain variable domain of TCR clone 225390 (TRAV4, TRAJ16)
CLVGGSSCGQKLLF

SEQ ID NO: 450780 - protein, 13 aa, Homo sapiens
  CDR3 for beta chain variable domain of TCR clone 225390 (TRBV11-2, TRBJ1-2)
CASSHEGFDGYTF

SEQ ID NO: 450781 - protein, 16 aa, Homo sapiens
  CDR3 for alpha chain variable domain of TCR clone 225391 (TRAV30, TRAJ24)
CGTAIVDADSWGKFQF

SEQ ID NO: 450782 - protein, 18 aa, Homo sapiens
  CDR3 for beta chain variable domain of TCR clone 225391 (TRBV20-1, TRBJ2-6)
CSAETTPTHGSGANVLTF

SEQ ID NO: 450783 - protein, 15 aa, Homo sapiens
  CDR3 for alpha chain variable domain of TCR clone 225392 (TRAV2, TRAJ15)
CAVEDREQVGTALIF

SEQ ID NO: 450784 - protein, 12 aa, Homo sapiens
  CDR3 for beta chain variable domain of TCR clone 225392 (TRBV11-2, TRBJ2-2)
CSSSLPTGELFF

SEQ ID NO: 450785 - protein, 18 aa, Homo sapiens
  CDR3 for alpha chain variable domain of TCR clone 225393 (TRAV13-1, TRAJ52)
CAAKNHNAGGTSYGKLTF

SEQ ID NO: 450786 - protein, 18 aa, Homo sapiens
  CDR3 for beta chain variable domain of TCR clone 225393 (TRBV4-1, TRBJ1-4)
CASSPRTGGAWTNEKLFF

SEQ ID NO: 450787 - protein, 14 aa, Homo sapiens
  CDR3 for alpha chain variable domain of TCR clone 225394 (TRAV12-2, TRAJ3)
CAVSLYSSASKIIF

SEQ ID NO: 450788 - protein, 12 aa, Homo sapiens
  CDR3 for beta chain variable domain of TCR clone 225394 (TRBV11-2, TRBJ2-1)
CASSPGNNEQFF

SEQ ID NO: 450789 - protein, 11 aa, Homo sapiens
  CDR3 for alpha chain variable domain of TCR clone 225395 (TRAV21, TRAJ20)
CCRVNAYKLSF

SEQ ID NO: 450790 - protein, 15 aa, Homo sapiens
  CDR3 for beta chain variable domain of TCR clone 225395 (TRBV2, TRBJ2-2)
CASSRQGPNTGELFF

SEQ ID NO: 450791 - protein, 14 aa, Homo sapiens
  CDR3 for alpha chain variable domain of TCR clone 225396 (TRAV12-3, TRAJ10)
SHLPLTGGGNKLTF

SEQ ID NO: 450792 - protein, 15 aa, Homo sapiens
  CDR3 for beta chain variable domain of TCR clone 225396 (TRBV7-9, TRBJ1-4)
CASSRTGGFNEQLFF

SEQ ID NO: 450793 - protein, 13 aa, Homo sapiens
  CDR3 for alpha chain variable domain of TCR clone 225397 (TRAV1-2, TRAJ33)
CAVSEDSNYQLIW

SEQ ID NO: 450794 - protein, 15 aa, Homo sapiens
  CDR3 for beta chain variable domain of TCR clone 225397 (TRBV11-3, TRBJ2-3)
CASLKDGREGDTQYF

SEQ ID NO: 450795 - protein, 13 aa, Homo sapiens
  CDR3 for alpha chain variable domain of TCR clone 225398 (TRAV13-2, TRAJ15)
CAERPKAGTALIV

SEQ ID NO: 450796 - protein, 15 aa, Homo sapiens
  CDR3 for beta chain variable domain of TCR clone 225398 (TRBV11-2, TRBJ2-7)
CASRFPGTGGYEQYF

SEQ ID NO: 450797 - protein, 17 aa, Homo sapiens
  CDR3 for alpha chain variable domain of TCR clone 225399 (TRAV12-1, TRAJ32)
CVVNMQGYGGATNKLIF

SEQ ID NO: 450798 - protein, 16 aa, Homo sapiens
  CDR3 for beta chain variable domain of TCR clone 225399 (TRBV13, TRBJ2-2)
CASSPRTGEHTGELFF

SEQ ID NO: 450799 - protein, 15 aa, Homo sapiens
  CDR3 for alpha chain variable domain of TCR clone 225400 (TRAV26-1, TRAJ44)
CIVRIGTGTASKLTF

SEQ ID NO: 450800 - protein, 15 aa, Homo sapiens
  CDR3 for beta chain variable domain of TCR clone 225400 (TRBV7-6, TRBJ2-1)
GASSSLAGEGNEQFF

SEQ ID NO: 450801 - protein, 12 aa, Homo sapiens
  CDR3 for alpha chain variable domain of TCR clone 225401 (TRAV21, TRAJ34)
CAVRGNTDKLIF

SEQ ID NO: 450802 - protein, 13 aa, Homo sapiens
  CDR3 for beta chain variable domain of TCR clone 225401 (TRBV12-4, TRBJ1-1)
CASSPGTGFEAFF

SEQ ID NO: 450803 - protein, 12 aa, Homo sapiens
  CDR3 for alpha chain variable domain of TCR clone 225402 (TRAV12-2, TRAJ47)
CAVAAYGNNLVF

SEQ ID NO: 450804 - protein, 14 aa, Homo sapiens
  CDR3 for beta chain variable domain of TCR clone 225402 (TRBV20-1, TRBJ1-1)
CSAMGGTANTEAFF

SEQ ID NO: 450805 - protein, 13 aa, Homo sapiens
  CDR3 for alpha chain variable domain of TCR clone 225403 (TRAV27, TRAJ45)
CRSSGGGAAGLTF

SEQ ID NO: 450806 - protein, 13 aa, Homo sapiens
  CDR3 for beta chain variable domain of TCR clone 225403 (TRBV7-7, TRBJ2-5)
CASSRSGQETQYF

SEQ ID NO: 450807 - protein, 11 aa, Homo sapiens
  CDR3 for alpha chain variable domain of TCR clone 225404 (TRAV8-3, TRAJ15)
CAVGPGTALIF

SEQ ID NO: 450808 - protein, 18 aa, Homo sapiens
  CDR3 for beta chain variable domain of TCR clone 225404 (TRBV18, TRBJ2-3)
CASSYTSGAADGTDTQYF

SEQ ID NO: 450809 - protein, 13 aa, Homo sapiens
  CDR3 for alpha chain variable domain of TCR clone 225405 (TRAV9-2, TRAJ53)
CALSGDSNYKLTF

SEQ ID NO: 450810 - protein, 17 aa, Homo sapiens
  CDR3 for beta chain variable domain of TCR clone 225405 (TRBV11-3, TRBJ2-1)
CASSLYPPGVEYNEQFF

SEQ ID NO: 450811 - protein, 12 aa, Homo sapiens
  CDR3 for alpha chain variable domain of TCR clone 225406 (TRAV12-1, TRAJ40)
CVVYSGTYKYIF

SEQ ID NO: 450812 - protein, 12 aa, Homo sapiens
  CDR3 for beta chain variable domain of TCR clone 225406 (TRBV14, TRBJ2-7)
CASSRLKGEQYF

SEQ ID NO: 450813 - protein, 14 aa, Homo sapiens
  CDR3 for alpha chain variable domain of TCR clone 225407 (TRAV1-2, TRAJ8)
CAVREDTGFQKLAF

SEQ ID NO: 450814 - protein, 16 aa, Homo sapiens
  CDR3 for beta chain variable domain of TCR clone 225407 (TRBV4-1, TRBJ2-3)
CASSQSTSGAEDTQYF

SEQ ID NO: 450815 - protein, 14 aa, Homo sapiens
  CDR3 for alpha chain variable domain of TCR clone 225408 (TRAV12-2, TRAJ45)
CALPERGGADGLTF

SEQ ID NO: 450816 - protein, 13 aa, Homo sapiens
  CDR3 for beta chain variable domain of TCR clone 225408 (TRBV4-1, TRBJ1-1)
CASSRKMNTEAFF

SEQ ID NO: 450817 - protein, 15 aa, Homo sapiens
  CDR3 for alpha chain variable domain of TCR clone 225409 (TRAV26-1, TRAJ42)
FIVRVKGGSKGNLIF

SEQ ID NO: 450818 - protein, 14 aa, Homo sapiens
  CDR3 for beta chain variable domain of TCR clone 225409 (TRBV19, TRBJ2-2)
CATTGHATTGELFF

SEQ ID NO: 450819 - protein, 18 aa, Homo sapiens
  CDR3 for alpha chain variable domain of TCR clone 225410 (TRAV13-1, TRAJ52)
CAARRRSAGGTSYGKLTF

SEQ ID NO: 450820 - protein, 13 aa, Homo sapiens
  CDR3 for beta chain variable domain of TCR clone 225410 (TRBV6-3, TRBJ2-3)
CASTLQGIDTQYF

SEQ ID NO: 450821 - protein, 15 aa, Homo sapiens
  CDR3 for alpha chain variable domain of TCR clone 225411 (TRAV8-3, TRAJ45)
CASSYSGGGADGLTF

SEQ ID NO: 450822 - protein, 13 aa, Homo sapiens
  CDR3 for beta chain variable domain of TCR clone 225411 (TRBV7-9, TRBJ2-2)
AASGGANTGELFF

SEQ ID NO: 450823 - protein, 13 aa, Homo sapiens
  CDR3 for alpha chain variable domain of TCR clone 225412 (TRAV27, TRAJ41)
CAGEGNSGYALNF

SEQ ID NO: 450824 - protein, 13 aa, Homo sapiens
  CDR3 for beta chain variable domain of TCR clone 225412 (TRBV12-4, TRBJ1-4)
CASAMGHNEKPFF

SEQ ID NO: 450825 - protein, 15 aa, Homo sapiens
  CDR3 for alpha chain variable domain of TCR clone 225413 (TRAV21, TRAJ53)
CATLNSRGSNYKLTF

SEQ ID NO: 450826 - protein, 16 aa, Homo sapiens
  CDR3 for beta chain variable domain of TCR clone 225413 (TRBV12-4, TRBJ2-3)
CASSLRLAETTDTQYF

SEQ ID NO: 450827 - protein, 13 aa, Homo sapiens
  CDR3 for alpha chain variable domain of TCR clone 225414 (TRAV27, TRAJ45)
CRSSGGGADGLTF

SEQ ID NO: 450828 - protein, 17 aa, Homo sapiens
  CDR3 for beta chain variable domain of TCR clone 225414 (TRBV11-2, TRBJ2-1)
WASSLCPPGVEYNEQFF

SEQ ID NO: 450829 - protein, 14 aa, Homo sapiens
  CDR3 for alpha chain variable domain of TCR clone 225415 (TRAV2, TRAJ37)
CAVDFTSNTGKLIF

SEQ ID NO: 450830 - protein, 16 aa, Homo sapiens
  CDR3 for beta chain variable domain of TCR clone 225415 (TRBV2, TRBJ2-1)
CASSANPRDLQAEQFF

SEQ ID NO: 450831 - protein, 16 aa, Homo sapiens
  CDR3 for alpha chain variable domain of TCR clone 225416 (TRAV30, TRAJ24)
CGTEIVDADSWGKFQF

SEQ ID NO: 450832 - protein, 16 aa, Homo sapiens
  CDR3 for beta chain variable domain of TCR clone 225416 (TRBV10-3, TRBJ2-1)
CAISLTSGNSYNEQFF

SEQ ID NO: 450833 - protein, 15 aa, Homo sapiens
  CDR3 for alpha chain variable domain of TCR clone 225417 (TRAV26-1, TRAJ22)
CIVRVSFLFCKATDL

SEQ ID NO: 450834 - protein, 20 aa, Homo sapiens
  CDR3 for beta chain variable domain of TCR clone 225417 (TRBV7-8, TRBJ2-2)
CASSHLFPGPTIHITGELFF

SEQ ID NO: 450835 - protein, 16 aa, Homo sapiens
  CDR3 for alpha chain variable domain of TCR clone 225418 (TRAV20, TRAJ22)
CAVQGSSSGSARQLTF

SEQ ID NO: 450836 - protein, 13 aa, Homo sapiens
  CDR3 for beta chain variable domain of TCR clone 225418 (TRBV7-2, TRBJ2-5)
CASSQTSVETQYF

SEQ ID NO: 450837 - protein, 16 aa, Homo sapiens
  CDR3 for alpha chain variable domain of TCR clone 225419 (TRAV26-1, TRAJ45)
CIVEKYSGGGADGLTF

SEQ ID NO: 450838 - protein, 17 aa, Homo sapiens
  CDR3 for beta chain variable domain of TCR clone 225419 (TRBV7-3, TRBJ2-3)
CASSLMKRMRGADTQYF

SEQ ID NO: 450839 - protein, 12 aa, Homo sapiens
  CDR3 for alpha chain variable domain of TCR clone 225420 (TRAV17, TRAJ57)
CATDGGSEKLVF

SEQ ID NO: 450840 - protein, 12 aa, Homo sapiens
  CDR3 for beta chain variable domain of TCR clone 225420 (TRBV7-8, TRBJ2-7)
CASSLGDREQYF

SEQ ID NO: 450841 - protein, 13 aa, Homo sapiens
  CDR3 for alpha chain variable domain of TCR clone 225421 (TRAV36/DV7, TRAJ37)
CAAPFRNTGKLIF

SEQ ID NO: 450842 - protein, 14 aa, Homo sapiens
  CDR3 for beta chain variable domain of TCR clone 225421 (TRBV5-6, TRBJ1-3)
CASSLVGRGNTIYF

SEQ ID NO: 450843 - protein, 12 aa, Homo sapiens
  CDR3 for alpha chain variable domain of TCR clone 225422 (TRAV1-2, TRAJ29)
CAVPSGNTPLVF

SEQ ID NO: 450844 - protein, 13 aa, Homo sapiens
  CDR3 for beta chain variable domain of TCR clone 225422 (TRBV5-4, TRBJ1-1)
CASSVDLGTEAYF

SEQ ID NO: 450845 - protein, 12 aa, Homo sapiens
  CDR3 for alpha chain variable domain of TCR clone 225423 (TRAV17, TRAJ9)
CATTGGFNYLWS

SEQ ID NO: 450846 - protein, 14 aa, Homo sapiens
  CDR3 for beta chain variable domain of TCR clone 225423 (TRBV7-9, TRBJ2-2)
CASSGLADTGELFF

SEQ ID NO: 450847 - protein, 13 aa, Homo sapiens
  CDR3 for alpha chain variable domain of TCR clone 225424 (TRAV4, TRAJ42)
CLVGGGSQGNLIF

SEQ ID NO: 450848 - protein, 17 aa, Homo sapiens
  CDR3 for beta chain variable domain of TCR clone 225424 (TRBV5-1, TRBJ2-3)
FAPAACRGRVGADTQYF

SEQ ID NO: 450849 - protein, 16 aa, Homo sapiens
  CDR3 for alpha chain variable domain of TCR clone 225425 (TRAV35, TRAJ42)
GRMERYYGGSQGNLIF

SEQ ID NO: 450850 - protein, 15 aa, Homo sapiens
  CDR3 for beta chain variable domain of TCR clone 225425 (TRBV6-1, TRBJ2-7)
CASSYWDKPNYEQYF

SEQ ID NO: 450851 - protein, 15 aa, Homo sapiens
  CDR3 for alpha chain variable domain of TCR clone 225426 (TRAV12-1, TRAJ9)
CVVSFGDTGGFKTIF

SEQ ID NO: 450852 - protein, 12 aa, Homo sapiens
  CDR3 for beta chain variable domain of TCR clone 225426 (TRBV12-4, TRBJ2-7)
CASSVGGYEQYF

SEQ ID NO: 450853 - protein, 14 aa, Homo sapiens
  CDR3 for alpha chain variable domain of TCR clone 225427 (TRAV4, TRAJ17)
CLVGDMAAGNKLTF

SEQ ID NO: 450854 - protein, 14 aa, Homo sapiens
  CDR3 for beta chain variable domain of TCR clone 225427 (TRBV4-1, TRBJ2-7)
CASSPVAGGYEQYF

SEQ ID NO: 450855 - protein, 18 aa, Homo sapiens
  CDR3 for alpha chain variable domain of TCR clone 225428 (TRAV21, TRAJ52)
CAVRPSPARGTSYGKLTF

SEQ ID NO: 450856 - protein, 12 aa, Homo sapiens
  CDR3 for beta chain variable domain of TCR clone 225428 (TRBV11-2, TRBJ2-2)
CASSLGGGELFF

SEQ ID NO: 450857 - protein, 12 aa, Homo sapiens
  CDR3 for alpha chain variable domain of TCR clone 225429 (TRAV2, TRAJ9)
CAVGAGGFKTIF

SEQ ID NO: 450858 - protein, 14 aa, Homo sapiens
  CDR3 for beta chain variable domain of TCR clone 225429 (TRBV4-1, TRBJ2-7)
CASSQGTTSYEQYF

SEQ ID NO: 450859 - protein, 11 aa, Homo sapiens
  CDR3 for alpha chain variable domain of TCR clone 225430 (TRAV39, TRAJ49)
CVVDISTQFYF

SEQ ID NO: 450860 - protein, 16 aa, Homo sapiens
  CDR3 for beta chain variable domain of TCR clone 225430 (TRBV12-5, TRBJ2-5)
CASGPRTSGNQETQYF

SEQ ID NO: 450861 - protein, 15 aa, Homo sapiens
  CDR3 for alpha chain variable domain of TCR clone 225431 (TRAV3, TRAJ22)
CAVRDRGGSARQLTF

SEQ ID NO: 450862 - protein, 15 aa, Homo sapiens
  CDR3 for beta chain variable domain of TCR clone 225431 (TRBV15, TRBJ2-7)
CATSSGTTTTYEQYF

SEQ ID NO: 450863 - protein, 20 aa, Homo sapiens
  CDR3 for alpha chain variable domain of TCR clone 225432 (TRAV12-1, TRAJ42)
SSVIQPPTSVKGGSQGNLIF

SEQ ID NO: 450864 - protein, 17 aa, Homo sapiens
  CDR3 for beta chain variable domain of TCR clone 225432 (TRBV12-4, TRBJ2-2)
CQQFGSGHPRTDRGAVF

SEQ ID NO: 450865 - protein, 15 aa, Homo sapiens
  CDR3 for alpha chain variable domain of TCR clone 225433 (TRAV16, TRAJ39)
CALCPSNNAGNMLTF

SEQ ID NO: 450866 - protein, 14 aa, Homo sapiens
  CDR3 for beta chain variable domain of TCR clone 225433 (TRBV7-7, TRBJ2-7)
CASSPGGPTYEQYF

SEQ ID NO: 450867 - protein, 13 aa, Homo sapiens
  CDR3 for alpha chain variable domain of TCR clone 225434 (TRAV17, TRAJ6)
CATGFGGSYIPTF

SEQ ID NO: 450868 - protein, 11 aa, Homo sapiens
  CDR3 for beta chain variable domain of TCR clone 225434 (TRBV29-1, TRBJ2-5)
CSEDRTGTQYF

SEQ ID NO: 450869 - protein, 14 aa, Homo sapiens
  CDR3 for alpha chain variable domain of TCR clone 225435 (TRAV20, TRAJ10)
CAVRVAGGGNKLTF

SEQ ID NO: 450870 - protein, 13 aa, Homo sapiens
  CDR3 for beta chain variable domain of TCR clone 225435 (TRBV13, TRBJ2-2)
CASSPGLTGELFF

SEQ ID NO: 450871 - protein, 11 aa, Homo sapiens
  CDR3 for alpha chain variable domain of TCR clone 225436 (TRAV17, TRAJ43)
CATPRSNDIRF

SEQ ID NO: 450872 - protein, 15 aa, Homo sapiens
  CDR3 for beta chain variable domain of TCR clone 225436 (TRBV11-2, TRBJ2-1)
CASSLGTSGLNGQFF

SEQ ID NO: 450873 - protein, 11 aa, Homo sapiens
  CDR3 for alpha chain variable domain of TCR clone 225437 (TRAV17, TRAJ9)
CGFTGGFKTIF

SEQ ID NO: 450874 - protein, 15 aa, Homo sapiens
  CDR3 for beta chain variable domain of TCR clone 225437 (TRBV5-7, TRBJ2-7)
CASSLGPGRGHEQYF

SEQ ID NO: 450875 - protein, 12 aa, Homo sapiens
  CDR3 for alpha chain variable domain of TCR clone 225438 (TRAV13-1, TRAJ42)
VNYGGSQGSLIF

SEQ ID NO: 450876 - protein, 15 aa, Homo sapiens
  CDR3 for beta chain variable domain of TCR clone 225438 (TRBV27, TRBJ1-5)
CASSSSGTGNQPQHF

SEQ ID NO: 450877 - protein, 16 aa, Homo sapiens
  CDR3 for alpha chain variable domain of TCR clone 225439 (TRAV3, TRAJ10)
CAVRDMRAGGGNKLTF

SEQ ID NO: 450878 - protein, 17 aa, Homo sapiens
  CDR3 for beta chain variable domain of TCR clone 225439 (TRBV7-6, TRBJ2-5)
CASSPGLADPWGETQYF

SEQ ID NO: 450879 - protein, 17 aa, Homo sapiens
  CDR3 for alpha chain variable domain of TCR clone 225440 (TRAV8-2, )
CVVNIQNPDPAVYQLRD

SEQ ID NO: 450880 - protein, 13 aa, Homo sapiens
  CDR3 for beta chain variable domain of TCR clone 225440 (TRBV20-1, TRBJ1-1)
CSARGGGNTEAFF

SEQ ID NO: 450881 - protein, 17 aa, Homo sapiens
  CDR3 for alpha chain variable domain of TCR clone 225441 (TRAV3, TRAJ6)
CAVRDGPRAGGSYIPTF

SEQ ID NO: 450882 - protein, 17 aa, Homo sapiens
  CDR3 for beta chain variable domain of TCR clone 225441 (TRBV27, TRBJ2-6)
WASSLTGFASGANVLTF

SEQ ID NO: 450883 - protein, 12 aa, Homo sapiens
  CDR3 for alpha chain variable domain of TCR clone 225442 (TRAV4, TRAJ6)
CLAPGGSYIPTF

SEQ ID NO: 450884 - protein, 15 aa, Homo sapiens
  CDR3 for beta chain variable domain of TCR clone 225442 (TRBV7-2, TRBJ2-6)
CASSLQEAGANVLTF

SEQ ID NO: 450885 - protein, 16 aa, Homo sapiens
  CDR3 for alpha chain variable domain of TCR clone 225443 (TRAV17, TRAJ52)
CSTSNAGGTSYGKLTF

SEQ ID NO: 450886 - protein, 13 aa, Homo sapiens
  CDR3 for beta chain variable domain of TCR clone 225443 (TRBV27, TRBJ1-6)
CASSLVLVSPLQF

SEQ ID NO: 450887 - protein, 17 aa, Homo sapiens
  CDR3 for alpha chain variable domain of TCR clone 225444 (TRAV2, TRAJ10)
CAVEDQRSREEETNPPL

SEQ ID NO: 450888 - protein, 16 aa, Homo sapiens
  CDR3 for beta chain variable domain of TCR clone 225444 (TRBV18, TRBJ1-5)
CASSPSTGNSNQPQHF

SEQ ID NO: 450889 - protein, 12 aa, Homo sapiens
  CDR3 for alpha chain variable domain of TCR clone 225445 (TRAV13-1, TRAJ53)
CAAGGSNYKPTL

SEQ ID NO: 450890 - protein, 11 aa, Homo sapiens
  CDR3 for beta chain variable domain of TCR clone 225445 (TRBV2, TRBJ1-1)
CASREGTEAFF

SEQ ID NO: 450891 - protein, 14 aa, Homo sapiens
  CDR3 for alpha chain variable domain of TCR clone 225446 (TRAV13-1, TRAJ6)
CAASITGGSYIPTF

SEQ ID NO: 450892 - protein, 14 aa, Homo sapiens
  CDR3 for beta chain variable domain of TCR clone 225446 (TRBV6-3, TRBJ2-1)
CASLHSAHYNEQFF

SEQ ID NO: 450893 - protein, 13 aa, Homo sapiens
  CDR3 for alpha chain variable domain of TCR clone 225447 (TRAV12-1, TRAJ16)
CVVNGPDGQKLLF

SEQ ID NO: 450894 - protein, 15 aa, Homo sapiens
  CDR3 for beta chain variable domain of TCR clone 225447 (TRBV9, TRBJ1-6)
CASSVAGTGDSPLHF

SEQ ID NO: 450895 - protein, 13 aa, Homo sapiens
  CDR3 for alpha chain variable domain of TCR clone 225448 (TRAV16, TRAJ37)
CALRGSNTGKLIF

SEQ ID NO: 450896 - protein, 15 aa, Homo sapiens
  CDR3 for beta chain variable domain of TCR clone 225448 (TRBV20-1, TRBJ2-1)
CSARGRGLAYNEQFF

SEQ ID NO: 450897 - protein, 14 aa, Homo sapiens
  CDR3 for alpha chain variable domain of TCR clone 225449 (TRAV8-3, TRAJ21)
CAVVGETTSTNFTF

SEQ ID NO: 450898 - protein, 14 aa, Homo sapiens
  CDR3 for beta chain variable domain of TCR clone 225449 (TRBV4-1, TRBJ2-2)
CASSQAVNTGELFF

SEQ ID NO: 450899 - protein, 18 aa, Homo sapiens
  CDR3 for alpha chain variable domain of TCR clone 225450 (TRAV13-1, TRAJ52)
CAASKRSAGGTSYGKLTF

SEQ ID NO: 450900 - protein, 15 aa, Homo sapiens
  CDR3 for beta chain variable domain of TCR clone 225450 (TRBV19, TRBJ1-2)
CASTPGQVANYGYTF

SEQ ID NO: 450901 - protein, 20 aa, Homo sapiens
  CDR3 for alpha chain variable domain of TCR clone 225451 (TRAV2, TRAJ9)
CAVGPEASQLSLEQEQDYLL

SEQ ID NO: 450902 - protein, 16 aa, Homo sapiens
  CDR3 for beta chain variable domain of TCR clone 225451 (TRBV13, TRBJ2-2)
CASSPRTGEHTGELFF

SEQ ID NO: 450903 - protein, 12 aa, Homo sapiens
  CDR3 for alpha chain variable domain of TCR clone 225452 (TRAV12-3, TRAJ17)
CAMTLTGNKRTW

SEQ ID NO: 450904 - protein, 15 aa, Homo sapiens
  CDR3 for beta chain variable domain of TCR clone 225452 (TRBV20-1, TRBJ2-7)
CSARDRVSGMDEQYF

SEQ ID NO: 450905 - protein, 16 aa, Homo sapiens
  CDR3 for alpha chain variable domain of TCR clone 225453 (TRAV14/DV4, TRAJ54)
CAMREGRIQGAQKLVF

SEQ ID NO: 450906 - protein, 17 aa, Homo sapiens
  CDR3 for beta chain variable domain of TCR clone 225453 (TRBV28, TRBJ2-5)
CASSTPEGDALQETQYF

SEQ ID NO: 450907 - protein, 14 aa, Homo sapiens
  CDR3 for alpha chain variable domain of TCR clone 225454 (TRAV12-3, TRAJ10)
SHLPLAGGGNKLTF

SEQ ID NO: 450908 - protein, 13 aa, Homo sapiens
  CDR3 for beta chain variable domain of TCR clone 225454 (TRBV3-1, TRBJ1-1)
CASSPGVITEAFF

SEQ ID NO: 450909 - protein, 12 aa, Homo sapiens
  CDR3 for alpha chain variable domain of TCR clone 225455 (TRAV16, TRAJ15)
CSNRQAGTALIF

SEQ ID NO: 450910 - protein, 14 aa, Homo sapiens
  CDR3 for beta chain variable domain of TCR clone 225455 (TRBV6-6, TRBJ2-7)
CASSDSGAGYEQYF

SEQ ID NO: 450911 - protein, 12 aa, Homo sapiens
  CDR3 for alpha chain variable domain of TCR clone 225456 (TRAV25, TRAJ30)
CAGKNRDDKIIF

SEQ ID NO: 450912 - protein, 11 aa, Homo sapiens
  CDR3 for beta chain variable domain of TCR clone 225456 (TRBV12-4, TRBJ2-5)
CATPEKGEQYF

SEQ ID NO: 450913 - protein, 14 aa, Homo sapiens
  CDR3 for alpha chain variable domain of TCR clone 225457 (TRAV9-2, TRAJ39)
CALYIYNAGTMLTF

SEQ ID NO: 450914 - protein, 15 aa, Homo sapiens
  CDR3 for beta chain variable domain of TCR clone 225457 (TRBV28, TRBJ1-3)
CASSMGWASGNTIYF

SEQ ID NO: 450915 - protein, 12 aa, Homo sapiens
  CDR3 for alpha chain variable domain of TCR clone 225458 (TRAV13-1, TRAJ48)
CAANFGNEKLTF

SEQ ID NO: 450916 - protein, 18 aa, Homo sapiens
  CDR3 for beta chain variable domain of TCR clone 225458 (TRBV4-1, TRBJ1-4)
CASSPRTGGAWTNEKLFF

SEQ ID NO: 450917 - protein, 12 aa, Homo sapiens
  CDR3 for alpha chain variable domain of TCR clone 225459 (TRAV3, TRAJ47)
CAVRDIGEYETN

SEQ ID NO: 450918 - protein, 14 aa, Homo sapiens
  CDR3 for beta chain variable domain of TCR clone 225459 (TRBV13, TRBJ2-5)
CASSLERVGETQYS

SEQ ID NO: 450919 - protein, 14 aa, Homo sapiens
  CDR3 for alpha chain variable domain of TCR clone 225460 (TRAV12-2, TRAJ40)
GAVKIPSGTYKYIF

SEQ ID NO: 450920 - protein, 12 aa, Homo sapiens
  CDR3 for beta chain variable domain of TCR clone 225460 (TRBV11-2, TRBJ2-2)
CASSLGGGELFF

SEQ ID NO: 450921 - protein, 12 aa, Homo sapiens
  CDR3 for alpha chain variable domain of TCR clone 225461 (TRAV2, TRAJ26)
CAGSPGRLWSEF

SEQ ID NO: 450922 - protein, 16 aa, Homo sapiens
  CDR3 for beta chain variable domain of TCR clone 225461 (TRBV13, TRBJ2-2)
CASSPRTGEHTGELFL

SEQ ID NO: 450923 - protein, 14 aa, Homo sapiens
  CDR3 for alpha chain variable domain of TCR clone 225462 (TRAV13-1, TRAJ44)
CAAKATGPASKLTF

SEQ ID NO: 450924 - protein, 15 aa, Homo sapiens
  CDR3 for beta chain variable domain of TCR clone 225462 (TRBV5-1, TRBJ1-1)
CASSLGEGENTEAFF

SEQ ID NO: 450925 - protein, 22 aa, Homo sapiens
  CDR3 for alpha chain variable domain of TCR clone 225463 (TRAV2, TRAJ10)
ILQVREADAAVYYTGGGNKLTF

SEQ ID NO: 450926 - protein, 15 aa, Homo sapiens
  CDR3 for beta chain variable domain of TCR clone 225463 (TRBV6-1, TRBJ1-5)
CASSVWVAGGQPQHF

SEQ ID NO: 450927 - protein, 15 aa, Homo sapiens
  CDR3 for alpha chain variable domain of TCR clone 225464 (TRAV3, TRAJ22)
CAVRDRGGPARQLTF

SEQ ID NO: 450928 - protein, 13 aa, Homo sapiens
  CDR3 for beta chain variable domain of TCR clone 225464 (TRBV7-3, TRBJ2-1)
CASSPVAYNEQFF

SEQ ID NO: 450929 - protein, 14 aa, Homo sapiens
  CDR3 for alpha chain variable domain of TCR clone 225465 (TRAV29/DV5, TRAJ36)
CAARRKTGAKNLFF

SEQ ID NO: 450930 - protein, 12 aa, Homo sapiens
  CDR3 for beta chain variable domain of TCR clone 225465 (TRBV12-4, TRBJ2-7)
CASSLGGYEQYF

SEQ ID NO: 450931 - protein, 14 aa, Homo sapiens
  CDR3 for alpha chain variable domain of TCR clone 225466 (TRAV14/DV4, TRAJ20)
CAMRESLNDYKLSF

SEQ ID NO: 450932 - protein, 14 aa, Homo sapiens
  CDR3 for beta chain variable domain of TCR clone 225466 (TRBV4-1, TRBJ2-2)
CASSQAVNTGELLF

SEQ ID NO: 450933 - protein, 14 aa, Homo sapiens
  CDR3 for alpha chain variable domain of TCR clone 225467 (TRAV36/DV7, TRAJ40)
CAVETTSGTYKYIF

SEQ ID NO: 450934 - protein, 16 aa, Homo sapiens
  CDR3 for beta chain variable domain of TCR clone 225467 (TRBV12-5, TRBJ2-5)
CASGPRTSGNQETQYF

SEQ ID NO: 450935 - protein, 11 aa, Homo sapiens
  CDR3 for alpha chain variable domain of TCR clone 225468 (TRAV4, TRAJ31)
CLVGDNARLMF

SEQ ID NO: 450936 - protein, 13 aa, Homo sapiens
  CDR3 for beta chain variable domain of TCR clone 225468 (TRBV4-2, TRBJ1-1)
CASSQAGNTEAFF

SEQ ID NO: 450937 - protein, 14 aa, Homo sapiens
  CDR3 for alpha chain variable domain of TCR clone 225469 (TRAV26-1, TRAJ31)
CIALPPNNNAILMF

SEQ ID NO: 450938 - protein, 16 aa, Homo sapiens
  CDR3 for beta chain variable domain of TCR clone 225469 (TRBV10-2, TRBJ2-7)
CASSESPGSSGFEQYF

SEQ ID NO: 450939 - protein, 14 aa, Homo sapiens
  CDR3 for alpha chain variable domain of TCR clone 225470 (TRAV13-2, TRAJ10)
CAETLPGGGNKLTF

SEQ ID NO: 450940 - protein, 15 aa, Homo sapiens
  CDR3 for beta chain variable domain of TCR clone 225470 (TRBV19, TRBJ1-1)
CASTSGQIQNTEAFF

SEQ ID NO: 450941 - protein, 18 aa, Homo sapiens
  CDR3 for alpha chain variable domain of TCR clone 225471 (TRAV9-2, TRAJ52)
CALSRHNAGGTSYGKLTF

SEQ ID NO: 450942 - protein, 15 aa, Homo sapiens
  CDR3 for beta chain variable domain of TCR clone 225471 (TRBV2, TRBJ2-1)
CASSELAGSYNEQFF

SEQ ID NO: 450943 - protein, 13 aa, Homo sapiens
  CDR3 for alpha chain variable domain of TCR clone 225472 (TRAV39, TRAJ48)
CAAVNFGNEKLTF

SEQ ID NO: 450944 - protein, 13 aa, Homo sapiens
  CDR3 for beta chain variable domain of TCR clone 225472 (TRBV19, TRBJ1-5)
CASSIGGNQPQHF

SEQ ID NO: 450945 - protein, 13 aa, Homo sapiens
  CDR3 for alpha chain variable domain of TCR clone 225473 (TRAV17, TRAJ21)
CATDGGNFNKFYF

SEQ ID NO: 450946 - protein, 13 aa, Homo sapiens
  CDR3 for beta chain variable domain of TCR clone 225473 (TRBV11-3, TRBJ1-1)
CASTGSLNTEAVF

SEQ ID NO: 450947 - protein, 14 aa, Homo sapiens
  CDR3 for alpha chain variable domain of TCR clone 225474 (TRAV26-1, TRAJ49)
CIVRPRNTGNPFYF

SEQ ID NO: 450948 - protein, 13 aa, Homo sapiens
  CDR3 for beta chain variable domain of TCR clone 225474 (TRBV12-4, TRBJ2-4)
CASSNLRGNMQYF

SEQ ID NO: 450949 - protein, 12 aa, Homo sapiens
  CDR3 for alpha chain variable domain of TCR clone 225475 (TRAV12-1, TRAJ40)
CVVPSGTYKYIF

SEQ ID NO: 450950 - protein, 15 aa, Homo sapiens
  CDR3 for beta chain variable domain of TCR clone 225475 (TRBV12-4, TRBJ2-1)
CAGSRLSGRNSEQFF

SEQ ID NO: 450951 - protein, 14 aa, Homo sapiens
  CDR3 for alpha chain variable domain of TCR clone 225476 (TRAV9-2, TRAJ39)
CALYIYNAGNMLTF

SEQ ID NO: 450952 - protein, 15 aa, Homo sapiens
  CDR3 for beta chain variable domain of TCR clone 225476 (TRBV9, TRBJ1-6)
YASSVAGTGDSPLHF

SEQ ID NO: 450953 - protein, 14 aa, Homo sapiens
  CDR3 for alpha chain variable domain of TCR clone 225477 (TRAV12-2, TRAJ5)
CAVNRSTGRRALTF

SEQ ID NO: 450954 - protein, 12 aa, Homo sapiens
  CDR3 for beta chain variable domain of TCR clone 225477 (TRBV19, TRBJ1-5)
CPSSIAQQPQHF

SEQ ID NO: 450955 - protein, 17 aa, Homo sapiens
  CDR3 for alpha chain variable domain of TCR clone 225478 (TRAV8-6, TRAJ58)
CAVSSWVGETSGSRLTF

SEQ ID NO: 450956 - protein, 15 aa, Homo sapiens
  CDR3 for beta chain variable domain of TCR clone 225478 (TRBV11-2, TRBJ2-2)
CASSSDRVNAGELFF

SEQ ID NO: 450957 - protein, 11 aa, Homo sapiens
  CDR3 for alpha chain variable domain of TCR clone 225479 (TRAV3, TRAJ13)
CAVTSYQKVTF

SEQ ID NO: 450958 - protein, 17 aa, Homo sapiens
  CDR3 for beta chain variable domain of TCR clone 225479 (TRBV28, TRBJ2-5)
CASSTPEGDALQETQYF

SEQ ID NO: 450959 - protein, 12 aa, Homo sapiens
  CDR3 for alpha chain variable domain of TCR clone 225480 (TRAV8-6, TRAJ8)
CAVTPGFQKLVF

SEQ ID NO: 450960 - protein, 16 aa, Homo sapiens
  CDR3 for beta chain variable domain of TCR clone 225480 (TRBV7-3, TRBJ2-2)
CASSLKRGSLSGELFF

SEQ ID NO: 450961 - protein, 13 aa, Homo sapiens
  CDR3 for alpha chain variable domain of TCR clone 225481 (TRAV21, TRAJ20)
CAVGLRVDYKLSF

SEQ ID NO: 450962 - protein, 14 aa, Homo sapiens
  CDR3 for beta chain variable domain of TCR clone 225481 (TRBV7-3, TRBJ1-1)
CASSLGTGYTEAFF

SEQ ID NO: 450963 - protein, 15 aa, Homo sapiens
  CDR3 for alpha chain variable domain of TCR clone 225482 (TRAV12-2, TRAJ50)
CAVNGLETSYDKVIF

SEQ ID NO: 450964 - protein, 14 aa, Homo sapiens
  CDR3 for beta chain variable domain of TCR clone 225482 (TRBV19, TRBJ2-1)
CASPTFVLSGEQFF

SEQ ID NO: 450965 - protein, 18 aa, Homo sapiens
  CDR3 for alpha chain variable domain of TCR clone 225483 (TRAV17, TRAJ28)
CATDTPRGSGAGSYQLTF

SEQ ID NO: 450966 - protein, 14 aa, Homo sapiens
  CDR3 for beta chain variable domain of TCR clone 225483 (TRBV13, TRBJ2-5)
CASSLDYPQETQYF

SEQ ID NO: 450967 - protein, 14 aa, Homo sapiens
  CDR3 for alpha chain variable domain of TCR clone 225484 (TRAV1-2, TRAJ8)
CAVREDIGFQQLVF

SEQ ID NO: 450968 - protein, 15 aa, Homo sapiens
  CDR3 for beta chain variable domain of TCR clone 225484 (TRBV27, TRBJ2-1)
CASSNGGGSSNEQFF

SEQ ID NO: 450969 - protein, 15 aa, Homo sapiens
  CDR3 for alpha chain variable domain of TCR clone 225485 (TRAV12-1, TRAJ10)
CVVNKLTGGGNKLTF

SEQ ID NO: 450970 - protein, 14 aa, Homo sapiens
  CDR3 for beta chain variable domain of TCR clone 225485 (TRBV15, TRBJ1-3)
CATSRLGGGNTIYF

SEQ ID NO: 450971 - protein, 14 aa, Homo sapiens
  CDR3 for alpha chain variable domain of TCR clone 225486 (TRAV13-1, TRAJ35)
CAASKGGFGNVLHC

SEQ ID NO: 450972 - protein, 15 aa, Homo sapiens
  CDR3 for beta chain variable domain of TCR clone 225486 (TRBV28, TRBJ2-7)
CASSPGGRGFYEQYF

SEQ ID NO: 450973 - protein, 15 aa, Homo sapiens
  CDR3 for alpha chain variable domain of TCR clone 225487 (TRAV17, TRAJ57)
CATCPSQGGSEKLVF

SEQ ID NO: 450974 - protein, 13 aa, Homo sapiens
  CDR3 for beta chain variable domain of TCR clone 225487 (TRBV27, TRBJ1-4)
CASSLMGDEKLFF

SEQ ID NO: 450975 - protein, 11 aa, Homo sapiens
  CDR3 for alpha chain variable domain of TCR clone 225488 (TRAV1-2, TRAJ20)
CAVANDYKLSF

SEQ ID NO: 450976 - protein, 13 aa, Homo sapiens
  CDR3 for beta chain variable domain of TCR clone 225488 (TRBV27, TRBJ1-1)
CASSLSIGAEAFF

SEQ ID NO: 450977 - protein, 14 aa, Homo sapiens
  CDR3 for alpha chain variable domain of TCR clone 225489 (TRAV13-2, TRAJ22)
CADGTVGSARQLTF

SEQ ID NO: 450978 - protein, 16 aa, Homo sapiens
  CDR3 for beta chain variable domain of TCR clone 225489 (TRBV19, TRBJ2-1)
CASSSKGTRSYTEQFF

SEQ ID NO: 450979 - protein, 14 aa, Homo sapiens
  CDR3 for alpha chain variable domain of TCR clone 225490 (TRAV17, TRAJ54)
CATDANQGAQKLVF

SEQ ID NO: 450980 - protein, 15 aa, Homo sapiens
  CDR3 for beta chain variable domain of TCR clone 225490 (TRBV6-5, TRBJ2-4)
CASSLRESPKNIQYF

SEQ ID NO: 450981 - protein, 12 aa, Homo sapiens
  CDR3 for alpha chain variable domain of TCR clone 225491 (TRAV12-1, TRAJ23)
CVVNNQGGKLIF

SEQ ID NO: 450982 - protein, 16 aa, Homo sapiens
  CDR3 for beta chain variable domain of TCR clone 225491 (TRBV11-1, TRBJ2-7)
CASSAQTGTLSYEHYF

SEQ ID NO: 450983 - protein, 13 aa, Homo sapiens
  CDR3 for alpha chain variable domain of TCR clone 225492 (TRAV17, TRAJ11)
CATRSSRYSTLTF

SEQ ID NO: 450984 - protein, 13 aa, Homo sapiens
  CDR3 for beta chain variable domain of TCR clone 225492 (TRBV7-9, TRBJ2-1)
CASSLDVGNEQFF

SEQ ID NO: 450985 - protein, 15 aa, Homo sapiens
  CDR3 for alpha chain variable domain of TCR clone 225493 (TRAV2, TRAJ9)
CAVEDRGTGGFKNIF

SEQ ID NO: 450986 - protein, 14 aa, Homo sapiens
  CDR3 for beta chain variable domain of TCR clone 225493 (TRBV4-1, TRBJ2-2)
CASSQAVNTGELFF

SEQ ID NO: 450987 - protein, 10 aa, Homo sapiens
  CDR3 for alpha chain variable domain of TCR clone 225494 (TRAV35, TRAJ41)
DANSGYALNF

SEQ ID NO: 450988 - protein, 15 aa, Homo sapiens
  CDR3 for beta chain variable domain of TCR clone 225494 (TRBV7-9, TRBJ1-6)
CASSSPGRGNSPLHF

SEQ ID NO: 450989 - protein, 14 aa, Homo sapiens
  CDR3 for alpha chain variable domain of TCR clone 225495 (TRAV23/DV6, TRAJ37)
CAASTSSNTGKLIF

SEQ ID NO: 450990 - protein, 18 aa, Homo sapiens
  CDR3 for beta chain variable domain of TCR clone 225495 (TRBV11-2, TRBJ2-3)
CASSLGGASRGAPNTQYL

SEQ ID NO: 450991 - protein, 13 aa, Homo sapiens
  CDR3 for alpha chain variable domain of TCR clone 225496 (TRAV21, TRAJ47)
CAVSGLYGNKLVF

SEQ ID NO: 450992 - protein, 17 aa, Homo sapiens
  CDR3 for beta chain variable domain of TCR clone 225496 (TRBV15, TRBJ2-3)
CASSGTTSEGGTDTQYF

SEQ ID NO: 450993 - protein, 13 aa, Homo sapiens
  CDR3 for alpha chain variable domain of TCR clone 225497 (TRAV23/DV6, TRAJ10)
ASVLPGGGTKLTF

SEQ ID NO: 450994 - protein, 13 aa, Homo sapiens
  CDR3 for beta chain variable domain of TCR clone 225497 (TRBV11-1, TRBJ1-2)
CASVGSWGYGYTF

SEQ ID NO: 450995 - protein, 13 aa, Homo sapiens
  CDR3 for alpha chain variable domain of TCR clone 225498 (TRAV23/DV6, TRAJ22)
CASRAGSARQLTL

SEQ ID NO: 450996 - protein, 14 aa, Homo sapiens
  CDR3 for beta chain variable domain of TCR clone 225498 (TRBV7-2, TRBJ2-7)
CASSPKTSFYEQYF

SEQ ID NO: 450997 - protein, 16 aa, Homo sapiens
  CDR3 for alpha chain variable domain of TCR clone 225499 (TRAV8-4, TRAJ52)
CSVRKGGGTSYGKLTF

SEQ ID NO: 450998 - protein, 13 aa, Homo sapiens
  CDR3 for beta chain variable domain of TCR clone 225499 (TRBV27, TRBJ1-1)
CASSLSIGAEAFF

SEQ ID NO: 450999 - protein, 15 aa, Homo sapiens
  CDR3 for alpha chain variable domain of TCR clone 225500 (TRAV26-1, TRAJ48)
CIVRVGDFGNEKLTF

SEQ ID NO: 451000 - protein, 15 aa, Homo sapiens
  CDR3 for beta chain variable domain of TCR clone 225500 (TRBV9, TRBJ1-6)
CASSVAGTGDSPLHF

SEQ ID NO: 451001 - protein, 23 aa, Homo sapiens
  CDR3 for alpha chain variable domain of TCR clone 225501 (TRAV26-1, TRAJ38)
CIAANAGNNHIQNPDPAVYPLRD

SEQ ID NO: 451002 - protein, 12 aa, Homo sapiens
  CDR3 for beta chain variable domain of TCR clone 225501 (TRBV11-2, TRBJ2-2)
CASSLGGGELFF

SEQ ID NO: 451003 - protein, 12 aa, Homo sapiens
  CDR3 for alpha chain variable domain of TCR clone 225502 (TRAV4, TRAJ26)
CLVGDYGQNFVF

SEQ ID NO: 451004 - protein, 16 aa, Homo sapiens
  CDR3 for beta chain variable domain of TCR clone 225502 (TRBV28, TRBJ2-1)
CASSLGGSGSYNEQFF

SEQ ID NO: 451005 - protein, 12 aa, Homo sapiens
  CDR3 for alpha chain variable domain of TCR clone 225503 (TRAV17, TRAJ20)
CSTYSNDYKLSF

SEQ ID NO: 451006 - protein, 11 aa, Homo sapiens
  CDR3 for beta chain variable domain of TCR clone 225503 (TRBV4-1, TRBJ2-2)
CASEHTGELFF

SEQ ID NO: 451007 - protein, 13 aa, Homo sapiens
  CDR3 for alpha chain variable domain of TCR clone 225504 (TRAV21, TRAJ20)
CAMGLRVDYKLSF

SEQ ID NO: 451008 - protein, 21 aa, Homo sapiens
  CDR3 for beta chain variable domain of TCR clone 225504 (TRBV15, TRBJ2-1)
AWGTQPCTCVPPAEVDTARFF

SEQ ID NO: 451009 - protein, 15 aa, Homo sapiens
  CDR3 for alpha chain variable domain of TCR clone 225505 (TRAV25, TRAJ41)
CAGPWNSNSGYALNF

SEQ ID NO: 451010 - protein, 13 aa, Homo sapiens
  CDR3 for beta chain variable domain of TCR clone 225505 (TRBV15, TRBJ1-1)
CATSRGIEARAFF

SEQ ID NO: 451011 - protein, 12 aa, Homo sapiens
  CDR3 for alpha chain variable domain of TCR clone 225506 (TRAV22, TRAJ22)
CAPGGSARQLTF

SEQ ID NO: 451012 - protein, 12 aa, Homo sapiens
  CDR3 for beta chain variable domain of TCR clone 225506 (TRBV24-1, TRBJ2-7)
CATGTGTYEQYF

SEQ ID NO: 451013 - protein, 15 aa, Homo sapiens
  CDR3 for alpha chain variable domain of TCR clone 225507 (TRAV21, TRAJ40)
CAVRPQTSGTYKYIF

SEQ ID NO: 451014 - protein, 15 aa, Homo sapiens
  CDR3 for beta chain variable domain of TCR clone 225507 (TRBV5-1, TRBJ2-3)
CASSFTSGSTDTQYF

SEQ ID NO: 451015 - protein, 16 aa, Homo sapiens
  CDR3 for alpha chain variable domain of TCR clone 225508 (TRAV4, TRAJ42)
CLVGDHYGGSQGNLIF

SEQ ID NO: 451016 - protein, 13 aa, Homo sapiens
  CDR3 for beta chain variable domain of TCR clone 225508 (TRBV7-9, TRBJ1-2)
CVSSLKQNYGYIF

SEQ ID NO: 451017 - protein, 14 aa, Homo sapiens
  CDR3 for alpha chain variable domain of TCR clone 225509 (TRAV1-2, TRAJ8)
CAVREDTGFQKLVF

SEQ ID NO: 451018 - protein, 15 aa, Homo sapiens
  CDR3 for beta chain variable domain of TCR clone 225509 (TRBV4-1, TRBJ2-7)
SASSQNTGRLYEQYF

SEQ ID NO: 451019 - protein, 15 aa, Homo sapiens
  CDR3 for alpha chain variable domain of TCR clone 225510 (TRAV14/DV4, TRAJ26)
CAMREGQNYDHNFVF

SEQ ID NO: 451020 - protein, 13 aa, Homo sapiens
  CDR3 for beta chain variable domain of TCR clone 225510 (TRBV24-1, TRBJ2-2)
CATSDWSTGELFF

SEQ ID NO: 451021 - protein, 15 aa, Homo sapiens
  CDR3 for alpha chain variable domain of TCR clone 225511 (TRAV19, TRAJ23)
CALSEVGNQGGKLIF

SEQ ID NO: 451022 - protein, 14 aa, Homo sapiens
  CDR3 for beta chain variable domain of TCR clone 225511 (TRBV4-1, TRBJ2-2)
CASSQAVNTGELFF

SEQ ID NO: 451023 - protein, 12 aa, Homo sapiens
  CDR3 for alpha chain variable domain of TCR clone 225512 (TRAV35, TRAJ31)
CAAASNNARLMF

SEQ ID NO: 451024 - protein, 15 aa, Homo sapiens
  CDR3 for beta chain variable domain of TCR clone 225512 (TRBV12-4, TRBJ2-5)
CASSPPTGLQETQYF

SEQ ID NO: 451025 - protein, 14 aa, Homo sapiens
  CDR3 for alpha chain variable domain of TCR clone 225513 (TRAV1-2, TRAJ16)
CAVNRFSDGQKLLF

SEQ ID NO: 451026 - protein, 14 aa, Homo sapiens
  CDR3 for beta chain variable domain of TCR clone 225513 (TRBV2, TRBJ1-5)
CASSENRDDQPQHF

SEQ ID NO: 451027 - protein, 11 aa, Homo sapiens
  CDR3 for alpha chain variable domain of TCR clone 225514 (TRAV20, TRAJ23)
CACNKGGKLIF

SEQ ID NO: 451028 - protein, 16 aa, Homo sapiens
  CDR3 for beta chain variable domain of TCR clone 225514 (TRBV7-8, TRBJ2-5)
CASSFGGQPAHETQYF

SEQ ID NO: 451029 - protein, 14 aa, Homo sapiens
  CDR3 for alpha chain variable domain of TCR clone 225515 (TRAV12-1, TRAJ12)
CVVTRMDSSYKLIF

SEQ ID NO: 451030 - protein, 13 aa, Homo sapiens
  CDR3 for beta chain variable domain of TCR clone 225515 (TRBV20-1, TRBJ1-1)
CSARGGGNTEPFF

SEQ ID NO: 451031 - protein, 19 aa, Homo sapiens
  CDR3 for alpha chain variable domain of TCR clone 225516 (TRAV26-1, TRAJ28)
CIVRVAHAYSGAGSYQLTF

SEQ ID NO: 451032 - protein, 15 aa, Homo sapiens
  CDR3 for beta chain variable domain of TCR clone 225516 (TRBV7-2, TRBJ2-7)
CASSLGGAKSGEQYF

SEQ ID NO: 451033 - protein, 10 aa, Homo sapiens
  CDR3 for alpha chain variable domain of TCR clone 225517 (TRAV36/DV7, TRAJ48)
CAVGNEELTF

SEQ ID NO: 451034 - protein, 13 aa, Homo sapiens
  CDR3 for beta chain variable domain of TCR clone 225517 (TRBV5-4, TRBJ1-1)
CASSVDLGTEAFF

SEQ ID NO: 451035 - protein, 12 aa, Homo sapiens
  CDR3 for alpha chain variable domain of TCR clone 225518 (TRAV35, TRAJ49)
CAGWNTGNQFCF

SEQ ID NO: 451036 - protein, 16 aa, Homo sapiens
  CDR3 for beta chain variable domain of TCR clone 225518 (TRBV5-1, TRBJ2-2)
CASSLWDTTNTGELFF

SEQ ID NO: 451037 - protein, 17 aa, Homo sapiens
  CDR3 for alpha chain variable domain of TCR clone 225519 (TRAV27, TRAJ52)
CAGAGWAGGTSYGKLTV

SEQ ID NO: 451038 - protein, 16 aa, Homo sapiens
  CDR3 for beta chain variable domain of TCR clone 225519 (TRBV19, TRBJ2-1)
CASSKAGPSSYNEQFF

SEQ ID NO: 451039 - protein, 11 aa, Homo sapiens
  CDR3 for alpha chain variable domain of TCR clone 225520 (TRAV3, TRAJ21)
CAVGNFNKFYF

SEQ ID NO: 451040 - protein, 13 aa, Homo sapiens
  CDR3 for beta chain variable domain of TCR clone 225520 (TRBV7-7, TRBJ2-3)
CASSLSRADTQYF

SEQ ID NO: 451041 - protein, 13 aa, Homo sapiens
  CDR3 for alpha chain variable domain of TCR clone 225521 (TRAV13-2, TRAJ11)
YAENYSRYSTLTF

SEQ ID NO: 451042 - protein, 13 aa, Homo sapiens
  CDR3 for beta chain variable domain of TCR clone 225521 (TRBV12-4, TRBJ1-4)
CASAMGHNEKLFF

SEQ ID NO: 451043 - protein, 13 aa, Homo sapiens
  CDR3 for alpha chain variable domain of TCR clone 225522 (TRAV12-3, TRAJ33)
CAMSVNSNYQLFW

SEQ ID NO: 451044 - protein, 16 aa, Homo sapiens
  CDR3 for beta chain variable domain of TCR clone 225522 (TRBV13, TRBJ2-5)
CASSLRTGGSWETQYF

SEQ ID NO: 451045 - protein, 13 aa, Homo sapiens
  CDR3 for alpha chain variable domain of TCR clone 225523 (TRAV17, TRAJ34)
CATDLYNTDKLIF

SEQ ID NO: 451046 - protein, 13 aa, Homo sapiens
  CDR3 for beta chain variable domain of TCR clone 225523 (TRBV5-5, TRBJ1-2)
CASSFWRGEDYTF

SEQ ID NO: 451047 - protein, 14 aa, Homo sapiens
  CDR3 for alpha chain variable domain of TCR clone 225524 (TRAV8-3, TRAJ13)
CAVGGTFGSQKVTF

SEQ ID NO: 451048 - protein, 17 aa, Homo sapiens
  CDR3 for beta chain variable domain of TCR clone 225524 (TRBV7-9, TRBJ2-1)
CASSAGTLGRSYNEQFF

SEQ ID NO: 451049 - protein, 14 aa, Homo sapiens
  CDR3 for alpha chain variable domain of TCR clone 225525 (TRAV12-2, TRAJ40)
CAVKIPSGTYKSIF

SEQ ID NO: 451050 - protein, 14 aa, Homo sapiens
  CDR3 for beta chain variable domain of TCR clone 225525 (TRBV11-2, TRBJ1-5)
CASSLDRGRQPQHF

SEQ ID NO: 451051 - protein, 12 aa, Homo sapiens
  CDR3 for alpha chain variable domain of TCR clone 225526 (TRAV12-3, TRAJ17)
CAMTLTGNKLTF

SEQ ID NO: 451052 - protein, 15 aa, Homo sapiens
  CDR3 for beta chain variable domain of TCR clone 225526 (TRBV7-2, TRBJ2-2)
CASSPTGANTGELFF

SEQ ID NO: 451053 - protein, 14 aa, Homo sapiens
  CDR3 for alpha chain variable domain of TCR clone 225527 (TRAV12-2, TRAJ45)
CAVYSGGGADGLTF

SEQ ID NO: 451054 - protein, 13 aa, Homo sapiens
  CDR3 for beta chain variable domain of TCR clone 225527 (TRBV19, TRBJ2-2)
CASQEGIHGELFF

SEQ ID NO: 451055 - protein, 11 aa, Homo sapiens
  CDR3 for alpha chain variable domain of TCR clone 225528 (TRAV13-1, TRAJ34)
CAAENTDKLIF

SEQ ID NO: 451056 - protein, 14 aa, Homo sapiens
  CDR3 for beta chain variable domain of TCR clone 225528 (TRBV19, TRBJ2-5)
CASSMTGQQETQYF

SEQ ID NO: 451057 - protein, 14 aa, Homo sapiens
  CDR3 for alpha chain variable domain of TCR clone 225529 (TRAV1-2, TRAJ16)
CAVNRVSDGQKLLF

SEQ ID NO: 451058 - protein, 13 aa, Homo sapiens
  CDR3 for beta chain variable domain of TCR clone 225529 (TRBV10-3, TRBJ2-7)
CASKLAVNYEQYF

SEQ ID NO: 451059 - protein, 15 aa, Homo sapiens
  CDR3 for alpha chain variable domain of TCR clone 225530 (TRAV3, TRAJ3)
CAVRDRDSSASKIIF

SEQ ID NO: 451060 - protein, 13 aa, Homo sapiens
  CDR3 for beta chain variable domain of TCR clone 225530 (TRBV10-3, TRBJ2-7)
CASKLAVNYEQYF

SEQ ID NO: 451061 - protein, 15 aa, Homo sapiens
  CDR3 for alpha chain variable domain of TCR clone 225531 (TRAV13-1, TRAJ8)
CAASIPNTGFQKLVF

SEQ ID NO: 451062 - protein, 13 aa, Homo sapiens
  CDR3 for beta chain variable domain of TCR clone 225531 (TRBV10-3, TRBJ1-2)
CAISERDSYGYAF

SEQ ID NO: 451063 - protein, 16 aa, Homo sapiens
  CDR3 for alpha chain variable domain of TCR clone 225532 (TRAV12-2, TRAJ40)
CAVIIGGTSGTYKYIF

SEQ ID NO: 451064 - protein, 13 aa, Homo sapiens
  CDR3 for beta chain variable domain of TCR clone 225532 (TRBV7-9, TRBJ1-2)
CASSLKQNYGYTF

SEQ ID NO: 451065 - protein, 10 aa, Homo sapiens
  CDR3 for alpha chain variable domain of TCR clone 225533 (TRAV23/DV6, TRAJ57)
CAASSTLSQG

SEQ ID NO: 451066 - protein, 13 aa, Homo sapiens
  CDR3 for beta chain variable domain of TCR clone 225533 (TRBV11-2, TRBJ2-5)
CASSFSSQETQYF

SEQ ID NO: 451067 - protein, 18 aa, Homo sapiens
  CDR3 for alpha chain variable domain of TCR clone 225534 (TRAV21, TRAJ52)
CAVRPSPAGGTSYGKLTF

SEQ ID NO: 451068 - protein, 16 aa, Homo sapiens
  CDR3 for beta chain variable domain of TCR clone 225534 (TRBV7-9, TRBJ2-3)
CASSPWREVGTDTQYF

SEQ ID NO: 451069 - protein, 15 aa, Homo sapiens
  CDR3 for alpha chain variable domain of TCR clone 225535 (TRAV1-2, TRAJ28)
CAVRNSGAGSYQLTF

SEQ ID NO: 451070 - protein, 13 aa, Homo sapiens
  CDR3 for beta chain variable domain of TCR clone 225535 (TRBV7-9, TRBJ1-2)
CASSLKQNYGYTF

SEQ ID NO: 451071 - protein, 16 aa, Homo sapiens
  CDR3 for alpha chain variable domain of TCR clone 225536 (TRAV12-3, TRAJ45)
CAMGWGSGGGADGLTF

SEQ ID NO: 451072 - protein, 16 aa, Homo sapiens
  CDR3 for beta chain variable domain of TCR clone 225536 (TRBV7-2, TRBJ2-7)
CASSLEAGGPWYEQYF

SEQ ID NO: 451073 - protein, 13 aa, Homo sapiens
  CDR3 for alpha chain variable domain of TCR clone 225537 (TRAV2, TRAJ29)
CAAGNSGNTPLFF

SEQ ID NO: 451074 - protein, 16 aa, Homo sapiens
  CDR3 for beta chain variable domain of TCR clone 225537 (TRBV7-9, TRBJ1-2)
CASSPGGGAINYGYTF

SEQ ID NO: 451075 - protein, 15 aa, Homo sapiens
  CDR3 for alpha chain variable domain of TCR clone 225538 (TRAV2, TRAJ9)
CAVAALNTGGFKTIF

SEQ ID NO: 451076 - protein, 14 aa, Homo sapiens
  CDR3 for beta chain variable domain of TCR clone 225538 (TRBV7-8, TRBJ2-5)
CASCATGGQETQYF

SEQ ID NO: 451077 - protein, 12 aa, Homo sapiens
  CDR3 for alpha chain variable domain of TCR clone 225539 (TRAV12-2, TRAJ9)
CAVNTGGFKTIF

SEQ ID NO: 451078 - protein, 15 aa, Homo sapiens
  CDR3 for beta chain variable domain of TCR clone 225539 (TRBV7-9, TRBJ1-2)
CASSLDREPNYGYTF

SEQ ID NO: 451079 - protein, 15 aa, Homo sapiens
  CDR3 for alpha chain variable domain of TCR clone 225540 (TRAV23/DV6, TRAJ38)
CAARSNAGNNRKLIW

SEQ ID NO: 451080 - protein, 16 aa, Homo sapiens
  CDR3 for beta chain variable domain of TCR clone 225540 (TRBV10-2, TRBJ1-5)
CASSRDRDYSNQPQHC

SEQ ID NO: 451081 - protein, 11 aa, Homo sapiens
  CDR3 for alpha chain variable domain of TCR clone 225541 (TRAV12-2, TRAJ29)
CAVTLRSPLVF

SEQ ID NO: 451082 - protein, 16 aa, Homo sapiens
  CDR3 for beta chain variable domain of TCR clone 225541 (TRBV19, TRBJ1-5)
CGSSIDRGGPRQPQHF

SEQ ID NO: 451083 - protein, 15 aa, Homo sapiens
  CDR3 for alpha chain variable domain of TCR clone 225542 (TRAV3, TRAJ22)
CAVRDRGGSARPLTS

SEQ ID NO: 451084 - protein, 16 aa, Homo sapiens
  CDR3 for beta chain variable domain of TCR clone 225542 (TRBV5-4, TRBJ2-3)
CASQQPGAGGADTQYF

SEQ ID NO: 451085 - protein, 14 aa, Homo sapiens
  CDR3 for alpha chain variable domain of TCR clone 225543 (TRAV20, TRAJ29)
CAVQAWVGNTPLVF

SEQ ID NO: 451086 - protein, 15 aa, Homo sapiens
  CDR3 for beta chain variable domain of TCR clone 225543 (TRBV29-1, TRBJ2-1)
CSVEFFDRGSYEQYF

SEQ ID NO: 451087 - protein, 15 aa, Homo sapiens
  CDR3 for alpha chain variable domain of TCR clone 225544 (TRAV8-3, TRAJ40)
CAVGPYTSGTYKYIF

SEQ ID NO: 451088 - protein, 18 aa, Homo sapiens
  CDR3 for beta chain variable domain of TCR clone 225544 (TRBV7-2, TRBJ2-7)
CASSLYPGVDRASSTSGR

SEQ ID NO: 451089 - protein, 11 aa, Homo sapiens
  CDR3 for alpha chain variable domain of TCR clone 225545 (TRAV23/DV6, TRAJ58)
CAARLLRGETS

SEQ ID NO: 451090 - protein, 15 aa, Homo sapiens
  CDR3 for beta chain variable domain of TCR clone 225545 (TRBV9, TRBJ1-6)
CASSVAGKGDSPLHF

SEQ ID NO: 451091 - protein, 13 aa, Homo sapiens
  CDR3 for alpha chain variable domain of TCR clone 225546 (TRAV8-2, TRAJ36)
CVVSENWGKQPLL

SEQ ID NO: 451092 - protein, 15 aa, Homo sapiens
  CDR3 for beta chain variable domain of TCR clone 225546 (TRBV20-1, TRBJ2-5)
CSAEGTGGLQETQYF

SEQ ID NO: 451093 - protein, 13 aa, Homo sapiens
  CDR3 for alpha chain variable domain of TCR clone 225547 (TRAV12-2, TRAJ50)
CAVIVTSYDKVIF

SEQ ID NO: 451094 - protein, 14 aa, Homo sapiens
  CDR3 for beta chain variable domain of TCR clone 225547 (TRBV4-1, TRBJ2-2)
CASSQAVNTGELFF

SEQ ID NO: 451095 - protein, 12 aa, Homo sapiens
  CDR3 for alpha chain variable domain of TCR clone 225548 (TRAV8-3, TRAJ4)
PAFSGGYNKLIF

SEQ ID NO: 451096 - protein, 19 aa, Homo sapiens
  CDR3 for beta chain variable domain of TCR clone 225548 (TRBV28, TRBJ2-1)
CASSFSIRGSGRTRYEQFF

SEQ ID NO: 451097 - protein, 10 aa, Homo sapiens
  CDR3 for alpha chain variable domain of TCR clone 225549 (TRAV12-3, TRAJ18)
CAMSAEAQPW

SEQ ID NO: 451098 - protein, 13 aa, Homo sapiens
  CDR3 for beta chain variable domain of TCR clone 225549 (TRBV15, TRBJ1-6)
CATSGGVNSPLHF

SEQ ID NO: 451099 - protein, 12 aa, Homo sapiens
  CDR3 for alpha chain variable domain of TCR clone 225550 (TRAV12-3, TRAJ17)
CAMTLTGNKLTF

SEQ ID NO: 451100 - protein, 13 aa, Homo sapiens
  CDR3 for beta chain variable domain of TCR clone 225550 (TRBV7-9, TRBJ1-5)
CASSLRNDQPQHF

SEQ ID NO: 451101 - protein, 12 aa, Homo sapiens
  CDR3 for alpha chain variable domain of TCR clone 225551 (TRAV3, TRAJ6)
CAVRDSRRKLHN

SEQ ID NO: 451102 - protein, 15 aa, Homo sapiens
  CDR3 for beta chain variable domain of TCR clone 225551 (TRBV18, TRBJ2-7)
CASSPLQGRTYEQYF

SEQ ID NO: 451103 - protein, 13 aa, Homo sapiens
  CDR3 for alpha chain variable domain of TCR clone 225552 (TRAV36/DV7, TRAJ37)
CAVFSSNTGKLIF

SEQ ID NO: 451104 - protein, 15 aa, Homo sapiens
  CDR3 for beta chain variable domain of TCR clone 225552 (TRBV12-4, TRBJ2-5)
CQQFFVRGRQETQYL

SEQ ID NO: 451105 - protein, 16 aa, Homo sapiens
  CDR3 for alpha chain variable domain of TCR clone 225553 (TRAV13-1, TRAJ48)
CSKYRESNFGNEKLTF

SEQ ID NO: 451106 - protein, 17 aa, Homo sapiens
  CDR3 for beta chain variable domain of TCR clone 225553 (TRBV28, TRBJ2-1)
WASSSARQALTYNEQFF

SEQ ID NO: 451107 - protein, 14 aa, Homo sapiens
  CDR3 for alpha chain variable domain of TCR clone 225554 (TRAV16, TRAJ39)
CALSKNNAGNMLNF

SEQ ID NO: 451108 - protein, 16 aa, Homo sapiens
  CDR3 for beta chain variable domain of TCR clone 225554 (TRBV6-6, TRBJ2-1)
CASSYSFSGSYNEQFF

SEQ ID NO: 451109 - protein, 12 aa, Homo sapiens
  CDR3 for alpha chain variable domain of TCR clone 225555 (TRAV12-3, TRAJ17)
CATTLTGNKLTF

SEQ ID NO: 451110 - protein, 16 aa, Homo sapiens
  CDR3 for beta chain variable domain of TCR clone 225555 (TRBV19, TRBJ2-1)
CASSKAGPSSYNEQFF

SEQ ID NO: 451111 - protein, 13 aa, Homo sapiens
  CDR3 for alpha chain variable domain of TCR clone 225556 (TRAV20, TRAJ34)
CAVSCYNTDKLIF

SEQ ID NO: 451112 - protein, 13 aa, Homo sapiens
  CDR3 for beta chain variable domain of TCR clone 225556 (TRBV7-9, TRBJ1-2)
CASSLKQNYGYTF

SEQ ID NO: 451113 - protein, 16 aa, Homo sapiens
  CDR3 for alpha chain variable domain of TCR clone 225557 (TRAV3, TRAJ10)
CAVRDMRAGGGNKLTF

SEQ ID NO: 451114 - protein, 16 aa, Homo sapiens
  CDR3 for beta chain variable domain of TCR clone 225557 (TRBV5-7, TRBJ1-5)
CASSLEQDREYQPQHF

SEQ ID NO: 451115 - protein, 13 aa, Homo sapiens
  CDR3 for alpha chain variable domain of TCR clone 225558 (TRAV9-2, TRAJ53)
CALRGGSNYKLKF

SEQ ID NO: 451116 - protein, 17 aa, Homo sapiens
  CDR3 for beta chain variable domain of TCR clone 225558 (TRBV11-2, TRBJ2-1)
CASSLYPPGVEYNEQFF

SEQ ID NO: 451117 - protein, 14 aa, Homo sapiens
  CDR3 for alpha chain variable domain of TCR clone 225559 (TRAV35, TRAJ40)
CAGSTTSGTYQYIF

SEQ ID NO: 451118 - protein, 13 aa, Homo sapiens
  CDR3 for beta chain variable domain of TCR clone 225559 (TRBV20-1, TRBJ1-6)
CSAPLGVGSPLHF

SEQ ID NO: 451119 - protein, 13 aa, Homo sapiens
  CDR3 for alpha chain variable domain of TCR clone 225560 (TRAV2, TRAJ15)
CAVASQAGTALIF

SEQ ID NO: 451120 - protein, 17 aa, Homo sapiens
  CDR3 for beta chain variable domain of TCR clone 225560 (TRBV20-1, TRBJ2-2)
CTAGGSGQGGLTGELFF

SEQ ID NO: 451121 - protein, 18 aa, Homo sapiens
  CDR3 for alpha chain variable domain of TCR clone 225561 (TRAV12-2, TRAJ52)
CAMSVGGAGGTSYGKLTL

SEQ ID NO: 451122 - protein, 17 aa, Homo sapiens
  CDR3 for beta chain variable domain of TCR clone 225561 (TRBV13, TRBJ2-3)
CASSLSRVAGGRNTQYF

SEQ ID NO: 451123 - protein, 12 aa, Homo sapiens
  CDR3 for alpha chain variable domain of TCR clone 225562 (TRAV20, TRAJ37)
CALPSNTGKLIF

SEQ ID NO: 451124 - protein, 12 aa, Homo sapiens
  CDR3 for beta chain variable domain of TCR clone 225562 (TRBV7-9, TRBJ2-7)
CASSIKREEQYF

SEQ ID NO: 451125 - protein, 14 aa, Homo sapiens
  CDR3 for alpha chain variable domain of TCR clone 225563 (TRAV1-2, TRAJ16)
CAVNRFSDGQKLLF

SEQ ID NO: 451126 - protein, 14 aa, Homo sapiens
  CDR3 for beta chain variable domain of TCR clone 225563 (TRBV7-2, TRBJ2-1)
CASSRGGTYNEQFF

SEQ ID NO: 451127 - protein, 20 aa, Homo sapiens
  CDR3 for alpha chain variable domain of TCR clone 225564 (TRAV1-2, TRAJ8)
CAVREDTGFETCIWNWHPTS

SEQ ID NO: 451128 - protein, 14 aa, Homo sapiens
  CDR3 for beta chain variable domain of TCR clone 225564 (TRBV5-4, TRBJ1-1)
CASSLDSRRDEAFF

SEQ ID NO: 451129 - protein, 14 aa, Homo sapiens
  CDR3 for alpha chain variable domain of TCR clone 225565 (TRAV8-3, TRAJ4)
CAVGAAGGYNKLIF

SEQ ID NO: 451130 - protein, 18 aa, Homo sapiens
  CDR3 for beta chain variable domain of TCR clone 225565 (TRBV12-4, TRBJ2-2)
CASRPFGAGALNTGELFF

SEQ ID NO: 451131 - protein, 19 aa, Homo sapiens
  CDR3 for alpha chain variable domain of TCR clone 225566 (TRAV27, TRAJ49)
TAAQPGDTGLNPTSNQFYF

SEQ ID NO: 451132 - protein, 14 aa, Homo sapiens
  CDR3 for beta chain variable domain of TCR clone 225566 (TRBV9, TRBJ2-3)
CASSNDWGRDTQYF

SEQ ID NO: 451133 - protein, 16 aa, Homo sapiens
  CDR3 for alpha chain variable domain of TCR clone 225567 (TRAV13-1, TRAJ48)
CSKYRESNFGNEKLTF

SEQ ID NO: 451134 - protein, 15 aa, Homo sapiens
  CDR3 for beta chain variable domain of TCR clone 225567 (TRBV20-1, TRBJ2-7)
CSARDRVSGMDEQYF

SEQ ID NO: 451135 - protein, 14 aa, Homo sapiens
  CDR3 for alpha chain variable domain of TCR clone 225568 (TRAV8-1, TRAJ5)
CAVRTDTGRRALTF

SEQ ID NO: 451136 - protein, 14 aa, Homo sapiens
  CDR3 for beta chain variable domain of TCR clone 225568 (TRBV7-8, TRBJ2-3)
CASSLEAGTDTQYF

SEQ ID NO: 451137 - protein, 13 aa, Homo sapiens
  CDR3 for alpha chain variable domain of TCR clone 225569 (TRAV2, TRAJ40)
CAVVTSGTYKYIF

SEQ ID NO: 451138 - protein, 15 aa, Homo sapiens
  CDR3 for beta chain variable domain of TCR clone 225569 (TRBV7-2, TRBJ1-3)
CASSPGGADGNTIYF

SEQ ID NO: 451139 - protein, 15 aa, Homo sapiens
  CDR3 for alpha chain variable domain of TCR clone 225570 (TRAV1-2, TRAJ18)
CAWEGRGSTLGRLYF

SEQ ID NO: 451140 - protein, 14 aa, Homo sapiens
  CDR3 for beta chain variable domain of TCR clone 225570 (TRBV7-2, TRBJ2-7)
CASSLDPGPYEQYF

SEQ ID NO: 451141 - protein, 14 aa, Homo sapiens
  CDR3 for alpha chain variable domain of TCR clone 225571 (TRAV12-3, TRAJ10)
SHLPLPGGGNKLTF

SEQ ID NO: 451142 - protein, 15 aa, Homo sapiens
  CDR3 for beta chain variable domain of TCR clone 225571 (TRBV12-4, TRBJ1-1)
CASSLGGLSDTEAFF

SEQ ID NO: 451143 - protein, 14 aa, Homo sapiens
  CDR3 for alpha chain variable domain of TCR clone 225572 (TRAV3, TRAJ17)
CAVRDAAAGNKLTF

SEQ ID NO: 451144 - protein, 15 aa, Homo sapiens
  CDR3 for beta chain variable domain of TCR clone 225572 (TRBV2, TRBJ2-1)
CASSELAGSYNEQFF

SEQ ID NO: 451145 - protein, 15 aa, Homo sapiens
  CDR3 for alpha chain variable domain of TCR clone 225573 (TRAV13-1, TRAJ10)
CAPRELTGGGNKLTF

SEQ ID NO: 451146 - protein, 14 aa, Homo sapiens
  CDR3 for beta chain variable domain of TCR clone 225573 (TRBV11-2, TRBJ2-3)
CASSRLARTDTQYF

SEQ ID NO: 451147 - protein, 11 aa, Homo sapiens
  CDR3 for alpha chain variable domain of TCR clone 225574 (TRAV1-2, TRAJ11)
CAVRGYSTLTF

SEQ ID NO: 451148 - protein, 14 aa, Homo sapiens
  CDR3 for beta chain variable domain of TCR clone 225574 (TRBV11-2, TRBJ2-5)
CASSRTGGIETQYF

SEQ ID NO: 451149 - protein, 13 aa, Homo sapiens
  CDR3 for alpha chain variable domain of TCR clone 225575 (TRAV3, TRAJ30)
CAVRDRGDDKIIF

SEQ ID NO: 451150 - protein, 16 aa, Homo sapiens
  CDR3 for beta chain variable domain of TCR clone 225575 (TRBV7-3, TRBJ2-2)
CASSLKRGTLSGVLFF

SEQ ID NO: 451151 - protein, 14 aa, Homo sapiens
  CDR3 for alpha chain variable domain of TCR clone 225576 (TRAV12-3, TRAJ58)
CAMSTETSGSRLTF

SEQ ID NO: 451152 - protein, 16 aa, Homo sapiens
  CDR3 for beta chain variable domain of TCR clone 225576 (TRBV28, TRBJ2-1)
CASSSPGLAKGDEQFF

SEQ ID NO: 451153 - protein, 12 aa, Homo sapiens
  CDR3 for alpha chain variable domain of TCR clone 225577 (TRAV8-4, TRAJ31)
CAVSDSNARLMF

SEQ ID NO: 451154 - protein, 14 aa, Homo sapiens
  CDR3 for beta chain variable domain of TCR clone 225577 (TRBV19, TRBJ2-1)
CASPTFVLSGEQFF

SEQ ID NO: 451155 - protein, 15 aa, Homo sapiens
  CDR3 for alpha chain variable domain of TCR clone 225578 (TRAV1-2, TRAJ18)
CAWEGRGSTLGRLYF

SEQ ID NO: 451156 - protein, 14 aa, Homo sapiens
  CDR3 for beta chain variable domain of TCR clone 225578 (TRBV19, TRBJ2-7)
CASSIFAGTYEQYF

SEQ ID NO: 451157 - protein, 17 aa, Homo sapiens
  CDR3 for alpha chain variable domain of TCR clone 225579 (TRAV3, TRAJ6)
CAVRDGPSAGGSYIPTF

SEQ ID NO: 451158 - protein, 14 aa, Homo sapiens
  CDR3 for beta chain variable domain of TCR clone 225579 (TRBV7-2, TRBJ2-7)
CTSSPKTSFYEQYF

SEQ ID NO: 451159 - protein, 14 aa, Homo sapiens
  CDR3 for alpha chain variable domain of TCR clone 225580 (TRAV35, TRAJ13)
CAGRSPGGYQKVTF

SEQ ID NO: 451160 - protein, 14 aa, Homo sapiens
  CDR3 for beta chain variable domain of TCR clone 225580 (TRBV7-9, TRBJ2-5)
CASSLVGGEETQYF

SEQ ID NO: 451161 - protein, 11 aa, Homo sapiens
  CDR3 for alpha chain variable domain of TCR clone 225581 (TRAV3, TRAJ21)
CAVGNFNKFYF

SEQ ID NO: 451162 - protein, 16 aa, Homo sapiens
  CDR3 for beta chain variable domain of TCR clone 225581 (TRBV19, TRBJ2-1)
CASSRAGPSSYNVQFF

SEQ ID NO: 451163 - protein, 12 aa, Homo sapiens
  CDR3 for alpha chain variable domain of TCR clone 225582 (TRAV12-3, TRAJ17)
CAITLTGNKLTF

SEQ ID NO: 451164 - protein, 15 aa, Homo sapiens
  CDR3 for beta chain variable domain of TCR clone 225582 (TRBV20-1, TRBJ2-7)
CSARARVSGMDEQYF

SEQ ID NO: 451165 - protein, 16 aa, Homo sapiens
  CDR3 for alpha chain variable domain of TCR clone 225583 (TRAV8-3, TRAJ38)
CAVGSVYAGNNRKLIW

SEQ ID NO: 451166 - protein, 14 aa, Homo sapiens
  CDR3 for beta chain variable domain of TCR clone 225583 (TRBV29-1, TRBJ2-7)
CSVEVDRTGVEQYF

SEQ ID NO: 451167 - protein, 13 aa, Homo sapiens
  CDR3 for alpha chain variable domain of TCR clone 225584 (TRAV30, TRAJ39)
CGTEKNAGNMLTF

SEQ ID NO: 451168 - protein, 13 aa, Homo sapiens
  CDR3 for beta chain variable domain of TCR clone 225584 (TRBV19, TRBJ2-5)
CASSETAPETQYF

SEQ ID NO: 451169 - protein, 11 aa, Homo sapiens
  CDR3 for alpha chain variable domain of TCR clone 225585 (TRAV12-3, TRAJ26)
CAMSHGQNFVF

SEQ ID NO: 451170 - protein, 15 aa, Homo sapiens
  CDR3 for beta chain variable domain of TCR clone 225585 (TRBV10-2, TRBJ2-6)
CASSVQGTGANVLTF

SEQ ID NO: 451171 - protein, 12 aa, Homo sapiens
  CDR3 for alpha chain variable domain of TCR clone 225586 (TRAV2, TRAJ31)
CAVEEGNARLMC

SEQ ID NO: 451172 - protein, 18 aa, Homo sapiens
  CDR3 for beta chain variable domain of TCR clone 225586 (TRBV7-9, TRBJ2-3)
CASSLDLAGLATPDTQYF

SEQ ID NO: 451173 - protein, 11 aa, Homo sapiens
  CDR3 for alpha chain variable domain of TCR clone 225587 (TRAV21, TRAJ11)
CAVNGYSTLTL

SEQ ID NO: 451174 - protein, 20 aa, Homo sapiens
  CDR3 for beta chain variable domain of TCR clone 225587 (TRBV28, TRBJ2-1)
CASTPIGRSPGLAGGNEQFF

SEQ ID NO: 451175 - protein, 14 aa, Homo sapiens
  CDR3 for alpha chain variable domain of TCR clone 225588 (TRAV16, TRAJ48)
CALTPGFGNEKLTF

SEQ ID NO: 451176 - protein, 16 aa, Homo sapiens
  CDR3 for beta chain variable domain of TCR clone 225588 (TRBV7-2, TRBJ2-1)
CASSLVAGAGYNEQFF

SEQ ID NO: 451177 - protein, 13 aa, Homo sapiens
  CDR3 for alpha chain variable domain of TCR clone 225589 (TRAV26-2, TRAJ43)
CILRAVNNSDMRF

SEQ ID NO: 451178 - protein, 15 aa, Homo sapiens
  CDR3 for beta chain variable domain of TCR clone 225589 (TRBV7-2, TRBJ2-1)
CASTHGTGIYNEQFF

SEQ ID NO: 451179 - protein, 12 aa, Homo sapiens
  CDR3 for alpha chain variable domain of TCR clone 225590 (TRAV3, TRAJ26)
CAVRDYGQHFVF

SEQ ID NO: 451180 - protein, 16 aa, Homo sapiens
  CDR3 for beta chain variable domain of TCR clone 225590 (TRBV11-2, TRBJ1-2)
SASSPSGREANYGYTF

SEQ ID NO: 451181 - protein, 14 aa, Homo sapiens
  CDR3 for alpha chain variable domain of TCR clone 225591 (TRAV12-3, TRAJ12)
CAMIEVDSSYKLIF

SEQ ID NO: 451182 - protein, 12 aa, Homo sapiens
  CDR3 for beta chain variable domain of TCR clone 225591 (TRBV18, TRBJ1-4)
CASSPSREKLFF

SEQ ID NO: 451183 - protein, 17 aa, Homo sapiens
  CDR3 for alpha chain variable domain of TCR clone 225592 (TRAV3, TRAJ6)
CAVRDGPRAGGSYIPTF

SEQ ID NO: 451184 - protein, 15 aa, Homo sapiens
  CDR3 for beta chain variable domain of TCR clone 225592 (TRBV5-1, TRBJ1-2)
CASSLGSVTNYGYTF

SEQ ID NO: 451185 - protein, 12 aa, Homo sapiens
  CDR3 for alpha chain variable domain of TCR clone 225593 (TRAV21, TRAJ11)
CAATSGYSTLTF

SEQ ID NO: 451186 - protein, 15 aa, Homo sapiens
  CDR3 for beta chain variable domain of TCR clone 225593 (TRBV11-3, TRBJ2-7)
CASSPGPASSYEQYF

SEQ ID NO: 451187 - protein, 15 aa, Homo sapiens
  CDR3 for alpha chain variable domain of TCR clone 225594 (TRAV35, TRAJ40)
FAGQLGTSGIYKYIF

SEQ ID NO: 451188 - protein, 14 aa, Homo sapiens
  CDR3 for beta chain variable domain of TCR clone 225594 (TRBV7-3, TRBJ2-1)
CASSLAGGTNEQFF

SEQ ID NO: 451189 - protein, 18 aa, Homo sapiens
  CDR3 for alpha chain variable domain of TCR clone 225595 (TRAV26-1, TRAJ30)
CCVLLHRQSTNRDNKIIF

SEQ ID NO: 451190 - protein, 18 aa, Homo sapiens
  CDR3 for beta chain variable domain of TCR clone 225595 (TRBV4-1, TRBJ1-5)
CASSQDPRGQGLNQPQHF

SEQ ID NO: 451191 - protein, 16 aa, Homo sapiens
  CDR3 for alpha chain variable domain of TCR clone 225596 (TRAV13-1, TRAJ48)
CAASIFGNFGNEKLTF

SEQ ID NO: 451192 - protein, 19 aa, Homo sapiens
  CDR3 for beta chain variable domain of TCR clone 225596 (TRBV25-1, TRBJ2-2)
CAILVYRVDRGRKTGELFF

SEQ ID NO: 451193 - protein, 17 aa, Homo sapiens
  CDR3 for alpha chain variable domain of TCR clone 225597 (TRAV26-1, TRAJ58)
RIVRVGAEETSGSRLTF

SEQ ID NO: 451194 - protein, 18 aa, Homo sapiens
  CDR3 for beta chain variable domain of TCR clone 225597 (TRBV7-9, TRBJ2-7)
CASSLTTSGSRTWYEQYF

SEQ ID NO: 451195 - protein, 15 aa, Homo sapiens
  CDR3 for alpha chain variable domain of TCR clone 225598 (TRAV34, TRAJ38)
CGADFTPGNNRRLIW

SEQ ID NO: 451196 - protein, 14 aa, Homo sapiens
  CDR3 for beta chain variable domain of TCR clone 225598 (TRBV6-6, TRBJ2-7)
CASSDSGAGYEQYF

SEQ ID NO: 451197 - protein, 16 aa, Homo sapiens
  CDR3 for alpha chain variable domain of TCR clone 225599 (TRAV3, TRAJ10)
CAVRDRLTGGGNKLTF

SEQ ID NO: 451198 - protein, 14 aa, Homo sapiens
  CDR3 for beta chain variable domain of TCR clone 225599 (TRBV11-2, TRBJ1-2)
CASSLGTANYGYTF

SEQ ID NO: 451199 - protein, 14 aa, Homo sapiens
  CDR3 for alpha chain variable domain of TCR clone 225600 (TRAV8-4, TRAJ16)
CAVSPVGRWPEAAL

SEQ ID NO: 451200 - protein, 13 aa, Homo sapiens
  CDR3 for beta chain variable domain of TCR clone 225600 (TRBV10-3, TRBJ1-2)
CAISERDSYGYTF

SEQ ID NO: 451201 - protein, 16 aa, Homo sapiens
  CDR3 for alpha chain variable domain of TCR clone 225601 (TRAV14/DV4, TRAJ37)
CAMREYGSGNTGKLIF

SEQ ID NO: 451202 - protein, 13 aa, Homo sapiens
  CDR3 for beta chain variable domain of TCR clone 225601 (TRBV20-1, TRBJ2-1)
CSAQDGGPNEQFF

SEQ ID NO: 451203 - protein, 14 aa, Homo sapiens
  CDR3 for alpha chain variable domain of TCR clone 225602 (TRAV16, TRAJ15)
CALSFNQAGTALIF

SEQ ID NO: 451204 - protein, 12 aa, Homo sapiens
  CDR3 for beta chain variable domain of TCR clone 225602 (TRBV7-9, TRBJ2-7)
CASSLEGYEQYF

SEQ ID NO: 451205 - protein, 17 aa, Homo sapiens
  CDR3 for alpha chain variable domain of TCR clone 225603 (TRAV12-2, TRAJ53)
CAPLTDSQEGSNYKLIF

SEQ ID NO: 451206 - protein, 12 aa, Homo sapiens
  CDR3 for beta chain variable domain of TCR clone 225603 (TRBV11-2, TRBJ2-2)
CASSLGGGELFF

SEQ ID NO: 451207 - protein, 16 aa, Homo sapiens
  CDR3 for alpha chain variable domain of TCR clone 225604 (TRAV26-1, TRAJ52)
CIVSNAGGTSYGQLTF

SEQ ID NO: 451208 - protein, 15 aa, Homo sapiens
  CDR3 for beta chain variable domain of TCR clone 225604 (TRBV7-3, TRBJ2-1)
CASSPTGGGEVEQFF

SEQ ID NO: 451209 - protein, 14 aa, Homo sapiens
  CDR3 for alpha chain variable domain of TCR clone 225605 (TRAV16, TRAJ33)
CALSAMDSNYQLIW

SEQ ID NO: 451210 - protein, 13 aa, Homo sapiens
  CDR3 for beta chain variable domain of TCR clone 225605 (TRBV15, TRBJ1-6)
CATSGGLKSPLHF

SEQ ID NO: 451211 - protein, 14 aa, Homo sapiens
  CDR3 for alpha chain variable domain of TCR clone 225606 (TRAV20, TRAJ56)
CAVQFGGANSKLTF

SEQ ID NO: 451212 - protein, 14 aa, Homo sapiens
  CDR3 for beta chain variable domain of TCR clone 225606 (TRBV20-1, TRBJ2-7)
CSAKRGRSCYEQYF

SEQ ID NO: 451213 - protein, 18 aa, Homo sapiens
  CDR3 for alpha chain variable domain of TCR clone 225607 (TRAV8-3, TRAJ8)
CAVPETRTQAFRNLYLEL

SEQ ID NO: 451214 - protein, 15 aa, Homo sapiens
  CDR3 for beta chain variable domain of TCR clone 225607 (TRBV19, TRBJ1-5)
CASSIVWADNQPQHF

SEQ ID NO: 451215 - protein, 17 aa, Homo sapiens
  CDR3 for alpha chain variable domain of TCR clone 225608 (TRAV4, TRAJ18)
CLVGERSVGSTLGRLYL

SEQ ID NO: 451216 - protein, 18 aa, Homo sapiens
  CDR3 for beta chain variable domain of TCR clone 225608 (TRBV11-2, TRBJ2-3)
CASSLGGASRGAPNTQYF

SEQ ID NO: 451217 - protein, 13 aa, Homo sapiens
  CDR3 for alpha chain variable domain of TCR clone 225609 (TRAV17, TRAJ5)
CALRRTGRRALTF

SEQ ID NO: 451218 - protein, 12 aa, Homo sapiens
  CDR3 for beta chain variable domain of TCR clone 225609 (TRBV7-8, TRBJ2-7)
CASSLGDREQYF

SEQ ID NO: 451219 - protein, 13 aa, Homo sapiens
  CDR3 for alpha chain variable domain of TCR clone 225610 (TRAV2, TRAJ15)
CAVAAQAGTALIF

SEQ ID NO: 451220 - protein, 15 aa, Homo sapiens
  CDR3 for beta chain variable domain of TCR clone 225610 (TRBV7-3, TRBJ2-2)
CASSETGQGTGELFF

SEQ ID NO: 451221 - protein, 11 aa, Homo sapiens
  CDR3 for alpha chain variable domain of TCR clone 225611 (TRAV2, TRAJ13)
CASGGYQKVTF

SEQ ID NO: 451222 - protein, 15 aa, Homo sapiens
  CDR3 for beta chain variable domain of TCR clone 225611 (TRBV28, TRBJ1-3)
CASSMGWASGSTIYF

SEQ ID NO: 451223 - protein, 13 aa, Homo sapiens
  CDR3 for alpha chain variable domain of TCR clone 225612 (TRAV36/DV7, TRAJ7)
CAGTRYGNNRLAF

SEQ ID NO: 451224 - protein, 14 aa, Homo sapiens
  CDR3 for beta chain variable domain of TCR clone 225612 (TRBV19, TRBJ2-1)
CASPTFVLSGEKFF

SEQ ID NO: 451225 - protein, 13 aa, Homo sapiens
  CDR3 for alpha chain variable domain of TCR clone 225613 (TRAV27, TRAJ40)
CAGPPSGTYKYIF

SEQ ID NO: 451226 - protein, 15 aa, Homo sapiens
  CDR3 for beta chain variable domain of TCR clone 225613 (TRBV2, TRBJ2-1)
CASSEEREGDNEQFF

SEQ ID NO: 451227 - protein, 14 aa, Homo sapiens
  CDR3 for alpha chain variable domain of TCR clone 225614 (TRAV1-2, TRAJ16)
CAVNRFSDGQKLLF

SEQ ID NO: 451228 - protein, 17 aa, Homo sapiens
  CDR3 for beta chain variable domain of TCR clone 225614 (TRBV7-3, TRBJ2-3)
CARSLMKRMRGADTQYF

SEQ ID NO: 451229 - protein, 12 aa, Homo sapiens
  CDR3 for alpha chain variable domain of TCR clone 225615 (TRAV26-1, TRAJ35)
CIGLSFGNVLHC

SEQ ID NO: 451230 - protein, 20 aa, Homo sapiens
  CDR3 for beta chain variable domain of TCR clone 225615 (TRBV11-2, TRBJ2-7)
CASSPVGRERAGGPSYEQYF

SEQ ID NO: 451231 - protein, 14 aa, Homo sapiens
  CDR3 for alpha chain variable domain of TCR clone 225616 (TRAV1-2, TRAJ8)
CAVREDTGFQKLAF

SEQ ID NO: 451232 - protein, 13 aa, Homo sapiens
  CDR3 for beta chain variable domain of TCR clone 225616 (TRBV10-3, TRBJ2-7)
CASKLAVNYEQYF

SEQ ID NO: 451233 - protein, 10 aa, Homo sapiens
  CDR3 for alpha chain variable domain of TCR clone 225617 (TRAV12-3, TRAJ4)
CAMTGAGTRL

SEQ ID NO: 451234 - protein, 14 aa, Homo sapiens
  CDR3 for beta chain variable domain of TCR clone 225617 (TRBV10-3, TRBJ1-1)
CAISDADRGVEAFF

SEQ ID NO: 451235 - protein, 11 aa, Homo sapiens
  CDR3 for alpha chain variable domain of TCR clone 225618 (TRAV21, TRAJ11)
CAVNGYSTLTF

SEQ ID NO: 451236 - protein, 14 aa, Homo sapiens
  CDR3 for beta chain variable domain of TCR clone 225618 (TRBV12-4, TRBJ1-2)
CASSPPGPGGGYTF

SEQ ID NO: 451237 - protein, 13 aa, Homo sapiens
  CDR3 for alpha chain variable domain of TCR clone 225619 (TRAV13-1, TRAJ6)
CARGSGGSYIPTF

SEQ ID NO: 451238 - protein, 12 aa, Homo sapiens
  CDR3 for beta chain variable domain of TCR clone 225619 (TRBV19, TRBJ1-5)
CASSIAQQPQHF

SEQ ID NO: 451239 - protein, 13 aa, Homo sapiens
  CDR3 for alpha chain variable domain of TCR clone 225620 (TRAV12-3, TRAJ9)
CAMSADGGFKTIF

SEQ ID NO: 451240 - protein, 15 aa, Homo sapiens
  CDR3 for beta chain variable domain of TCR clone 225620 (TRBV19, TRBJ1-6)
CASSTQGAVGSPLHS

SEQ ID NO: 451241 - protein, 14 aa, Homo sapiens
  CDR3 for alpha chain variable domain of TCR clone 225621 (TRAV12-2, TRAJ17)
CAVLFKAAGNKLTF

SEQ ID NO: 451242 - protein, 17 aa, Homo sapiens
  CDR3 for beta chain variable domain of TCR clone 225621 (TRBV20-1, TRBJ2-2)
CSASGSGQGGLTGELCL

SEQ ID NO: 451243 - protein, 13 aa, Homo sapiens
  CDR3 for alpha chain variable domain of TCR clone 225622 (TRAV13-1, TRAJ39)
CAASIWAGDMLTF

SEQ ID NO: 451244 - protein, 15 aa, Homo sapiens
  CDR3 for beta chain variable domain of TCR clone 225622 (TRBV7-9, TRBJ1-1)
CASSLLEQGGTEAVF

SEQ ID NO: 451245 - protein, 14 aa, Homo sapiens
  CDR3 for alpha chain variable domain of TCR clone 225623 (TRAV1-2, TRAJ16)
CAVNRFSVGQKLLF

SEQ ID NO: 451246 - protein, 15 aa, Homo sapiens
  CDR3 for beta chain variable domain of TCR clone 225623 (TRBV3-1, TRBJ2-5)
CASSANLGGPETQYF

SEQ ID NO: 451247 - protein, 14 aa, Homo sapiens
  CDR3 for alpha chain variable domain of TCR clone 225624 (TRAV1-2, TRAJ16)
CAVNRFSDGQKLPF

SEQ ID NO: 451248 - protein, 13 aa, Homo sapiens
  CDR3 for beta chain variable domain of TCR clone 225624 (TRBV20-1, TRBJ1-1)
CSARLGQGTEAFF

SEQ ID NO: 451249 - protein, 12 aa, Homo sapiens
  CDR3 for alpha chain variable domain of TCR clone 225625 (TRAV12-3, TRAJ20)
CAMVRGDYKLSS

SEQ ID NO: 451250 - protein, 13 aa, Homo sapiens
  CDR3 for beta chain variable domain of TCR clone 225625 (TRBV23-1, TRBJ1-4)
CASRGKFNEKLFF

SEQ ID NO: 451251 - protein, 14 aa, Homo sapiens
  CDR3 for alpha chain variable domain of TCR clone 225626 (TRAV12-3, TRAJ29)
CAMVLLSGNTPLVF

SEQ ID NO: 451252 - protein, 16 aa, Homo sapiens
  CDR3 for beta chain variable domain of TCR clone 225626 (TRBV28, TRBJ2-7)
CASSSGTSGRGYEQYF

SEQ ID NO: 451253 - protein, 13 aa, Homo sapiens
  CDR3 for alpha chain variable domain of TCR clone 225627 (TRAV35, TRAJ43)
CAGYSYNNNDMRF

SEQ ID NO: 451254 - protein, 15 aa, Homo sapiens
  CDR3 for beta chain variable domain of TCR clone 225627 (TRBV25-1, TRBJ1-4)
CASSKRIATNEKLFF

SEQ ID NO: 451255 - protein, 13 aa, Homo sapiens
  CDR3 for alpha chain variable domain of TCR clone 225628 (TRAV8-3, TRAJ37)
CAVPSSNTGKLIF

SEQ ID NO: 451256 - protein, 12 aa, Homo sapiens
  CDR3 for beta chain variable domain of TCR clone 225628 (TRBV11-2, TRBJ2-1)
CASSPGNNKQFF

SEQ ID NO: 451257 - protein, 12 aa, Homo sapiens
  CDR3 for alpha chain variable domain of TCR clone 225629 (TRAV1-1, TRAJ15)
CAVGQAGTALIF

SEQ ID NO: 451258 - protein, 16 aa, Homo sapiens
  CDR3 for beta chain variable domain of TCR clone 225629 (TRBV12-4, TRBJ2-7)
CASSPEGQGGSYEQYF

SEQ ID NO: 451259 - protein, 13 aa, Homo sapiens
  CDR3 for alpha chain variable domain of TCR clone 225630 (TRAV12-1, TRAJ11)
CVVNRAGYSTLTF

SEQ ID NO: 451260 - protein, 15 aa, Homo sapiens
  CDR3 for beta chain variable domain of TCR clone 225630 (TRBV7-3, TRBJ2-2)
CASSETGQGTGELFL

SEQ ID NO: 451261 - protein, 16 aa, Homo sapiens
  CDR3 for alpha chain variable domain of TCR clone 225631 (TRAV30, TRAJ24)
CGTEIVVADSWGKFQF

SEQ ID NO: 451262 - protein, 13 aa, Homo sapiens
  CDR3 for beta chain variable domain of TCR clone 225631 (TRBV7-3, TRBJ1-1)
CASSQDWGAEAFF

SEQ ID NO: 451263 - protein, 15 aa, Homo sapiens
  CDR3 for alpha chain variable domain of TCR clone 225632 (TRAV26-1, TRAJ44)
CIARVPFGTASKLTF

SEQ ID NO: 451264 - protein, 17 aa, Homo sapiens
  CDR3 for beta chain variable domain of TCR clone 225632 (TRBV24-1, TRBJ2-4)
CATSDAEARGIRNIQYF

SEQ ID NO: 451265 - protein, 15 aa, Homo sapiens
  CDR3 for alpha chain variable domain of TCR clone 225633 (TRAV4, TRAJ10)
CPVGDGSGGGNKLTF

SEQ ID NO: 451266 - protein, 11 aa, Homo sapiens
  CDR3 for beta chain variable domain of TCR clone 225633 (TRBV5-1, TRBJ2-2)
CASSPSRCEHR

SEQ ID NO: 451267 - protein, 10 aa, Homo sapiens
  CDR3 for alpha chain variable domain of TCR clone 225634 (TRAV8-4, TRAJ43)
CAVSADDMRF

SEQ ID NO: 451268 - protein, 15 aa, Homo sapiens
  CDR3 for beta chain variable domain of TCR clone 225634 (TRBV5-1, TRBJ2-3)
CASSVTTGSTDTQYF

SEQ ID NO: 451269 - protein, 11 aa, Homo sapiens
  CDR3 for alpha chain variable domain of TCR clone 225635 (TRAV3, TRAJ21)
CAVGNLNKFYF

SEQ ID NO: 451270 - protein, 13 aa, Homo sapiens
  CDR3 for beta chain variable domain of TCR clone 225635 (TRBV4-1, TRBJ2-2)
CASSQENTGELFF

SEQ ID NO: 451271 - protein, 13 aa, Homo sapiens
  CDR3 for alpha chain variable domain of TCR clone 225636 (TRAV12-2, TRAJ37)
CAGGAGNTGKLIF

SEQ ID NO: 451272 - protein, 14 aa, Homo sapiens
  CDR3 for beta chain variable domain of TCR clone 225636 (TRBV6-1, TRBJ2-6)
CASQQGAGANVLTF

SEQ ID NO: 451273 - protein, 10 aa, Homo sapiens
  CDR3 for alpha chain variable domain of TCR clone 225637 (TRAV2, TRAJ40)
CAVVTWNLQI

SEQ ID NO: 451274 - protein, 14 aa, Homo sapiens
  CDR3 for beta chain variable domain of TCR clone 225637 (TRBV19, TRBJ2-1)
SASPTFVLSGEQFF

SEQ ID NO: 451275 - protein, 16 aa, Homo sapiens
  CDR3 for alpha chain variable domain of TCR clone 225638 (TRAV1-2, TRAJ35)
CAVRGLTIVFGNVLHC

SEQ ID NO: 451276 - protein, 13 aa, Homo sapiens
  CDR3 for beta chain variable domain of TCR clone 225638 (TRBV6-6, TRBJ2-1)
CASSLHQGDEQFF

SEQ ID NO: 451277 - protein, 14 aa, Homo sapiens
  CDR3 for alpha chain variable domain of TCR clone 225639 (TRAV16, TRAJ33)
CALSAMDSNYQLIW

SEQ ID NO: 451278 - protein, 15 aa, Homo sapiens
  CDR3 for beta chain variable domain of TCR clone 225639 (TRBV5-1, TRBJ2-3)
CASSVTAGSTDTQYF

SEQ ID NO: 451279 - protein, 17 aa, Homo sapiens
  CDR3 for alpha chain variable domain of TCR clone 225640 (TRAV26-1, TRAJ10)
CIVSFRGLTGGGNKLTF

SEQ ID NO: 451280 - protein, 13 aa, Homo sapiens
  CDR3 for beta chain variable domain of TCR clone 225640 (TRBV20-1, TRBJ2-3)
CSASRQAADTQHF

SEQ ID NO: 451281 - protein, 14 aa, Homo sapiens
  CDR3 for alpha chain variable domain of TCR clone 225641 (TRAV13-1, TRAJ44)
CAAKATGTASKLTF

SEQ ID NO: 451282 - protein, 14 aa, Homo sapiens
  CDR3 for beta chain variable domain of TCR clone 225641 (TRBV6-5, TRBJ1-2)
CASSYDGTGGGYTF

SEQ ID NO: 451283 - protein, 14 aa, Homo sapiens
  CDR3 for alpha chain variable domain of TCR clone 225642 (TRAV16, TRAJ33)
CALSAMDSNYQLIW

SEQ ID NO: 451284 - protein, 16 aa, Homo sapiens
  CDR3 for beta chain variable domain of TCR clone 225642 (TRBV12-4, TRBJ2-3)
CASSFPSHTNTDTQCF

SEQ ID NO: 451285 - protein, 16 aa, Homo sapiens
  CDR3 for alpha chain variable domain of TCR clone 225643 (TRAV27, TRAJ52)
CAGAGAGGTIYGKLTF

SEQ ID NO: 451286 - protein, 17 aa, Homo sapiens
  CDR3 for beta chain variable domain of TCR clone 225643 (TRBV24-1, TRBJ2-3)
CATSDLPSGEDTDTQYF

SEQ ID NO: 451287 - protein, 13 aa, Homo sapiens
  CDR3 for alpha chain variable domain of TCR clone 225644 (TRAV12-3, TRAJ33)
CAMSVNSNYQLIW

SEQ ID NO: 451288 - protein, 14 aa, Homo sapiens
  CDR3 for beta chain variable domain of TCR clone 225644 (TRBV5-1, TRBJ2-3)
CASSRGQGGGTQYF

SEQ ID NO: 451289 - protein, 12 aa, Homo sapiens
  CDR3 for alpha chain variable domain of TCR clone 225645 (TRAV21, TRAJ23)
CAVPNQGGKLIF

SEQ ID NO: 451290 - protein, 15 aa, Homo sapiens
  CDR3 for beta chain variable domain of TCR clone 225645 (TRBV27, TRBJ2-1)
CASSCGAGTGPEQFF

SEQ ID NO: 451291 - protein, 14 aa, Homo sapiens
  CDR3 for alpha chain variable domain of TCR clone 225646 (TRAV1-2, TRAJ8)
CAVREDTGFQKIVS

SEQ ID NO: 451292 - protein, 16 aa, Homo sapiens
  CDR3 for beta chain variable domain of TCR clone 225646 (TRBV29-1, TRBJ2-6)
CSVEDITYSGANVLTF

SEQ ID NO: 451293 - protein, 14 aa, Homo sapiens
  CDR3 for alpha chain variable domain of TCR clone 225647 (TRAV1-2, TRAJ8)
CAVREDTGFQKLVF

SEQ ID NO: 451294 - protein, 15 aa, Homo sapiens
  CDR3 for beta chain variable domain of TCR clone 225647 (TRBV3-1, TRBJ2-1)
CASSTGDTNYNEQFF

SEQ ID NO: 451295 - protein, 13 aa, Homo sapiens
  CDR3 for alpha chain variable domain of TCR clone 225648 (TRAV27, TRAJ45)
CRSSGGGADGLTF

SEQ ID NO: 451296 - protein, 17 aa, Homo sapiens
  CDR3 for beta chain variable domain of TCR clone 225648 (TRBV20-1, TRBJ2-3)
CSARDGWNAKERDTQYF

SEQ ID NO: 451297 - protein, 15 aa, Homo sapiens
  CDR3 for alpha chain variable domain of TCR clone 225649 (TRAV12-3, TRAJ54)
CAMNPPFQGAQKLGF

SEQ ID NO: 451298 - protein, 15 aa, Homo sapiens
  CDR3 for beta chain variable domain of TCR clone 225649 (TRBV20-1, TRBJ2-7)
CSARDRVSGMDEQYF

SEQ ID NO: 451299 - protein, 15 aa, Homo sapiens
  CDR3 for alpha chain variable domain of TCR clone 225650 (TRAV20, TRAJ43)
CAVQAGKSSNNDMRV

SEQ ID NO: 451300 - protein, 13 aa, Homo sapiens
  CDR3 for beta chain variable domain of TCR clone 225650 (TRBV27, TRBJ1-1)
CASSLSIGAEAFF

SEQ ID NO: 451301 - protein, 15 aa, Homo sapiens
  CDR3 for alpha chain variable domain of TCR clone 225651 (TRAV12-1, TRAJ44)
CVVGEYTGTASKLTF

SEQ ID NO: 451302 - protein, 14 aa, Homo sapiens
  CDR3 for beta chain variable domain of TCR clone 225651 (TRBV5-1, TRBJ1-2)
CASSLEPVNYGYTF

SEQ ID NO: 451303 - protein, 14 aa, Homo sapiens
  CDR3 for alpha chain variable domain of TCR clone 225652 (TRAV26-1, TRAJ52)
CIVRVGTSYGKMTF

SEQ ID NO: 451304 - protein, 13 aa, Homo sapiens
  CDR3 for beta chain variable domain of TCR clone 225652 (TRBV7-2, TRBJ1-1)
CASSLKASTEAFF

SEQ ID NO: 451305 - protein, 14 aa, Homo sapiens
  CDR3 for alpha chain variable domain of TCR clone 225653 (TRAV12-2, TRAJ13)
CAVKKTGGYQKVTF

SEQ ID NO: 451306 - protein, 14 aa, Homo sapiens
  CDR3 for beta chain variable domain of TCR clone 225653 (TRBV7-2, TRBJ2-7)
CASSPKTGFYEQYF

SEQ ID NO: 451307 - protein, 13 aa, Homo sapiens
  CDR3 for alpha chain variable domain of TCR clone 225654 (TRAV13-1, TRAJ40)
CAASKGGTYKYIF

SEQ ID NO: 451308 - protein, 13 aa, Homo sapiens
  CDR3 for beta chain variable domain of TCR clone 225654 (TRBV7-6, TRBJ1-2)
CASSLVADYGYTL

SEQ ID NO: 451309 - protein, 14 aa, Homo sapiens
  CDR3 for alpha chain variable domain of TCR clone 225655 (TRAV12-3, TRAJ10)
SHLPMTGGGNKLTF

SEQ ID NO: 451310 - protein, 14 aa, Homo sapiens
  CDR3 for beta chain variable domain of TCR clone 225655 (TRBV4-1, TRBJ2-2)
CASSLTENTGELFF

SEQ ID NO: 451311 - protein, 15 aa, Homo sapiens
  CDR3 for alpha chain variable domain of TCR clone 225656 (TRAV26-1, TRAJ29)
CIVRVEGSVNTPLVF

SEQ ID NO: 451312 - protein, 15 aa, Homo sapiens
  CDR3 for beta chain variable domain of TCR clone 225656 (TRBV7-9, TRBJ1-5)
CASSQGHQPSQPQHF

SEQ ID NO: 451313 - protein, 13 aa, Homo sapiens
  CDR3 for alpha chain variable domain of TCR clone 225657 (TRAV3, TRAJ42)
CADVGGSQGNLIF

SEQ ID NO: 451314 - protein, 16 aa, Homo sapiens
  CDR3 for beta chain variable domain of TCR clone 225657 (TRBV28, TRBJ2-1)
CASSPLAINNGDEQFF

SEQ ID NO: 451315 - protein, 14 aa, Homo sapiens
  CDR3 for alpha chain variable domain of TCR clone 225658 (TRAV8-6, TRAJ37)
CAVRLSGNTGKLIF

SEQ ID NO: 451316 - protein, 13 aa, Homo sapiens
  CDR3 for beta chain variable domain of TCR clone 225658 (TRBV10-3, TRBJ2-7)
CASKLAVNYEQYF

SEQ ID NO: 451317 - protein, 13 aa, Homo sapiens
  CDR3 for alpha chain variable domain of TCR clone 225659 (TRAV12-2, TRAJ9)
CAVKWAGGFKTIF

SEQ ID NO: 451318 - protein, 15 aa, Homo sapiens
  CDR3 for beta chain variable domain of TCR clone 225659 (TRBV5-1, TRBJ1-4)
CASSLTADSGEKLFF

SEQ ID NO: 451319 - protein, 13 aa, Homo sapiens
  CDR3 for alpha chain variable domain of TCR clone 225660 (TRAV36/DV7, TRAJ53)
CALCGGSNYKLTF

SEQ ID NO: 451320 - protein, 13 aa, Homo sapiens
  CDR3 for beta chain variable domain of TCR clone 225660 (TRBV28, TRBJ2-4)
CASSQSSKNIQYF

SEQ ID NO: 451321 - protein, 22 aa, Homo sapiens
  CDR3 for alpha chain variable domain of TCR clone 225661 (TRAV21, )
CAVRQDAGNNHIQNPDPAVYQL

SEQ ID NO: 451322 - protein, 16 aa, Homo sapiens
  CDR3 for beta chain variable domain of TCR clone 225661 (TRBV19, TRBJ1-5)
CASRPGTGGRNQPQHF

SEQ ID NO: 451323 - protein, 16 aa, Homo sapiens
  CDR3 for alpha chain variable domain of TCR clone 225662 (TRAV3, TRAJ13)
CAVRDENSGGYQKVTF

SEQ ID NO: 451324 - protein, 15 aa, Homo sapiens
  CDR3 for beta chain variable domain of TCR clone 225662 (TRBV5-1, TRBJ2-1)
CASSPPRAPYNEQFF

SEQ ID NO: 451325 - protein, 15 aa, Homo sapiens
  CDR3 for alpha chain variable domain of TCR clone 225663 (TRAV3, TRAJ5)
CAVRDLDTGWRALTF

SEQ ID NO: 451326 - protein, 14 aa, Homo sapiens
  CDR3 for beta chain variable domain of TCR clone 225663 (TRBV25-1, TRBJ1-4)
CASSGGGQPEKLFF

SEQ ID NO: 451327 - protein, 12 aa, Homo sapiens
  CDR3 for alpha chain variable domain of TCR clone 225664 (TRAV2, TRAJ9)
CAVGAGGFKTIF

SEQ ID NO: 451328 - protein, 14 aa, Homo sapiens
  CDR3 for beta chain variable domain of TCR clone 225664 (TRBV19, TRBJ2-5)
CASSSSGIQETQYF

SEQ ID NO: 451329 - protein, 14 aa, Homo sapiens
  CDR3 for alpha chain variable domain of TCR clone 225665 (TRAV1-1, TRAJ27)
CAVIYNTNAGKSTF

SEQ ID NO: 451330 - protein, 15 aa, Homo sapiens
  CDR3 for beta chain variable domain of TCR clone 225665 (TRBV5-1, TRBJ2-2)
CASSSQGGNTGELFF

SEQ ID NO: 451331 - protein, 14 aa, Homo sapiens
  CDR3 for alpha chain variable domain of TCR clone 225666 (TRAV13-1, TRAJ35)
CAASKGGFGNVLHC

SEQ ID NO: 451332 - protein, 12 aa, Homo sapiens
  CDR3 for beta chain variable domain of TCR clone 225666 (TRBV28, TRBJ2-1)
CASSVQINEQFF

SEQ ID NO: 451333 - protein, 13 aa, Homo sapiens
  CDR3 for alpha chain variable domain of TCR clone 225667 (TRAV16, TRAJ27)
CALRRTNAGKSTF

SEQ ID NO: 451334 - protein, 15 aa, Homo sapiens
  CDR3 for beta chain variable domain of TCR clone 225667 (TRBV18, TRBJ2-1)
CASSPPIASYNEQFF

SEQ ID NO: 451335 - protein, 12 aa, Homo sapiens
  CDR3 for alpha chain variable domain of TCR clone 225668 (TRAV36/DV7, TRAJ40)
CAVAGGNYKYIF

SEQ ID NO: 451336 - protein, 18 aa, Homo sapiens
  CDR3 for beta chain variable domain of TCR clone 225668 (TRBV27, TRBJ2-3)
CASSKGTSGRTSTDTQYF

SEQ ID NO: 451337 - protein, 16 aa, Homo sapiens
  CDR3 for alpha chain variable domain of TCR clone 225669 (TRAV16, TRAJ4)
CALSRMFSGGYNKLIF

SEQ ID NO: 451338 - protein, 16 aa, Homo sapiens
  CDR3 for beta chain variable domain of TCR clone 225669 (TRBV24-1, TRBJ2-3)
CATSHPGTGATDTQYF

SEQ ID NO: 451339 - protein, 14 aa, Homo sapiens
  CDR3 for alpha chain variable domain of TCR clone 225670 (TRAV12-3, TRAJ10)
SHLPLTGGGNKLTF

SEQ ID NO: 451340 - protein, 15 aa, Homo sapiens
  CDR3 for beta chain variable domain of TCR clone 225670 (TRBV7-3, TRBJ2-2)
CDSSETGQGTGELFF

SEQ ID NO: 451341 - protein, 14 aa, Homo sapiens
  CDR3 for alpha chain variable domain of TCR clone 225671 (TRAV1-1, TRAJ30)
CAVRSLNRDDKIIF

SEQ ID NO: 451342 - protein, 16 aa, Homo sapiens
  CDR3 for beta chain variable domain of TCR clone 225671 (TRBV11-2, TRBJ2-7)
CASSPTTGGVSYEQYF

SEQ ID NO: 451343 - protein, 15 aa, Homo sapiens
  CDR3 for alpha chain variable domain of TCR clone 225672 (TRAV17, TRAJ57)
CATGPSQGGSEKRVV

SEQ ID NO: 451344 - protein, 16 aa, Homo sapiens
  CDR3 for beta chain variable domain of TCR clone 225672 (TRBV12-4, TRBJ1-5)
CASSRPVGGSNQPQHF

SEQ ID NO: 451345 - protein, 13 aa, Homo sapiens
  CDR3 for alpha chain variable domain of TCR clone 225673 (TRAV12-3, TRAJ53)
CAMRGGSNYKLTF

SEQ ID NO: 451346 - protein, 14 aa, Homo sapiens
  CDR3 for beta chain variable domain of TCR clone 225673 (TRBV7-3, TRBJ2-1)
CASSLAGGTNEQFF

SEQ ID NO: 451347 - protein, 12 aa, Homo sapiens
  CDR3 for alpha chain variable domain of TCR clone 225674 (TRAV21, TRAJ37)
CAVRGNTGKLIF

SEQ ID NO: 451348 - protein, 15 aa, Homo sapiens
  CDR3 for beta chain variable domain of TCR clone 225674 (TRBV7-2, TRBJ2-1)
CASSSGLAGGNEQFF

SEQ ID NO: 451349 - protein, 13 aa, Homo sapiens
  CDR3 for alpha chain variable domain of TCR clone 225675 (TRAV3, TRAJ20)
CCEAFCNDYKLSF

SEQ ID NO: 451350 - protein, 13 aa, Homo sapiens
  CDR3 for beta chain variable domain of TCR clone 225675 (TRBV10-3, TRBJ2-7)
CASKLAVNYEQYF

SEQ ID NO: 451351 - protein, 14 aa, Homo sapiens
  CDR3 for alpha chain variable domain of TCR clone 225676 (TRAV13-1, TRAJ35)
CAASKGGFGNVLHC

SEQ ID NO: 451352 - protein, 13 aa, Homo sapiens
  CDR3 for beta chain variable domain of TCR clone 225676 (TRBV10-2, TRBJ2-7)
CASGASGGYEQYF

SEQ ID NO: 451353 - protein, 15 aa, Homo sapiens
  CDR3 for alpha chain variable domain of TCR clone 225677 (TRAV1-2, TRAJ15)
CAVDVMGSAGTALTF

SEQ ID NO: 451354 - protein, 13 aa, Homo sapiens
  CDR3 for beta chain variable domain of TCR clone 225677 (TRBV20-1, TRBJ1-1)
CSAFDRENTEAFF

SEQ ID NO: 451355 - protein, 13 aa, Homo sapiens
  CDR3 for alpha chain variable domain of TCR clone 225678 (TRAV36/DV7, TRAJ7)
CAVERYGNNRLAF

SEQ ID NO: 451356 - protein, 13 aa, Homo sapiens
  CDR3 for beta chain variable domain of TCR clone 225678 (TRBV6-4, TRBJ1-5)
CASSADLNQPQHF

SEQ ID NO: 451357 - protein, 21 aa, Homo sapiens
  CDR3 for alpha chain variable domain of TCR clone 225679 (TRAV36/DV7, TRAJ39)
TATQTGDSAIYLPNAGNMLTF

SEQ ID NO: 451358 - protein, 13 aa, Homo sapiens
  CDR3 for beta chain variable domain of TCR clone 225679 (TRBV7-2, TRBJ2-5)
CASSYWTGETQYF

SEQ ID NO: 451359 - protein, 15 aa, Homo sapiens
  CDR3 for alpha chain variable domain of TCR clone 225680 (TRAV12-3, TRAJ6)
CAMSATSGGSYIPTF

SEQ ID NO: 451360 - protein, 14 aa, Homo sapiens
  CDR3 for beta chain variable domain of TCR clone 225680 (TRBV4-1, TRBJ2-2)
CASSQAVNTGELFF

SEQ ID NO: 451361 - protein, 13 aa, Homo sapiens
  CDR3 for alpha chain variable domain of TCR clone 225681 (TRAV8-3, TRAJ36)
CAVGATPANNLFF

SEQ ID NO: 451362 - protein, 13 aa, Homo sapiens
  CDR3 for beta chain variable domain of TCR clone 225681 (TRBV29-1, TRBJ1-1)
CSVGDSRNTEAFF

SEQ ID NO: 451363 - protein, 17 aa, Homo sapiens
  CDR3 for alpha chain variable domain of TCR clone 225682 (TRAV19, TRAJ32)
CALSERPYGGATNKLIF

SEQ ID NO: 451364 - protein, 15 aa, Homo sapiens
  CDR3 for beta chain variable domain of TCR clone 225682 (TRBV28, TRBJ1-3)
CASSMGWASGNTMYF

SEQ ID NO: 451365 - protein, 15 aa, Homo sapiens
  CDR3 for alpha chain variable domain of TCR clone 225683 (TRAV12-3, TRAJ6)
CAMSATTGGSYIPTF

SEQ ID NO: 451366 - protein, 16 aa, Homo sapiens
  CDR3 for beta chain variable domain of TCR clone 225683 (TRBV20-1, TRBJ1-2)
GSASMGQGVANYDYTF

SEQ ID NO: 451367 - protein, 14 aa, Homo sapiens
  CDR3 for alpha chain variable domain of TCR clone 225684 (TRAV8-2, TRAJ4)
CVVSPSGGYNKLIF

SEQ ID NO: 451368 - protein, 14 aa, Homo sapiens
  CDR3 for beta chain variable domain of TCR clone 225684 (TRBV18, TRBJ2-5)
CASSPGVSQETQYF

SEQ ID NO: 451369 - protein, 18 aa, Homo sapiens
  CDR3 for alpha chain variable domain of TCR clone 225685 (TRAV21, TRAJ52)
CAVRPSPAGGTSYGKLSF

SEQ ID NO: 451370 - protein, 15 aa, Homo sapiens
  CDR3 for beta chain variable domain of TCR clone 225685 (TRBV27, TRBJ2-1)
CASSNGGGSSNEQFF

SEQ ID NO: 451371 - protein, 14 aa, Homo sapiens
  CDR3 for alpha chain variable domain of TCR clone 225686 (TRAV20, TRAJ9)
CAVQANTGGFKTIF

SEQ ID NO: 451372 - protein, 15 aa, Homo sapiens
  CDR3 for beta chain variable domain of TCR clone 225686 (TRBV19, TRBJ1-2)
CASSVGQVLNYGYTF

SEQ ID NO: 451373 - protein, 14 aa, Homo sapiens
  CDR3 for alpha chain variable domain of TCR clone 225687 (TRAV12-3, TRAJ12)
CAMSEVDSSYKLIF

SEQ ID NO: 451374 - protein, 15 aa, Homo sapiens
  CDR3 for beta chain variable domain of TCR clone 225687 (TRBV7-9, TRBJ1-5)
CASSQGHQPNQPQHF

SEQ ID NO: 451375 - protein, 13 aa, Homo sapiens
  CDR3 for alpha chain variable domain of TCR clone 225688 (TRAV8-3, TRAJ44)
CAVVPGTASKLTF

SEQ ID NO: 451376 - protein, 14 aa, Homo sapiens
  CDR3 for beta chain variable domain of TCR clone 225688 (TRBV11-2, TRBJ2-3)
CASSRLARTDTQHF

SEQ ID NO: 451377 - protein, 13 aa, Homo sapiens
  CDR3 for alpha chain variable domain of TCR clone 225689 (TRAV12-3, TRAJ7)
CAMTPYGNNRLAF

SEQ ID NO: 451378 - protein, 18 aa, Homo sapiens
  CDR3 for beta chain variable domain of TCR clone 225689 (TRBV7-9, TRBJ2-7)
CASSLTTSGSRTWYEQYF

SEQ ID NO: 451379 - protein, 14 aa, Homo sapiens
  CDR3 for alpha chain variable domain of TCR clone 225690 (TRAV1-2, TRAJ8)
CAVREDTGFQNLVF

SEQ ID NO: 451380 - protein, 12 aa, Homo sapiens
  CDR3 for beta chain variable domain of TCR clone 225690 (TRBV2, TRBJ2-1)
CAYGPPGNEQFF

SEQ ID NO: 451381 - protein, 15 aa, Homo sapiens
  CDR3 for alpha chain variable domain of TCR clone 225691 (TRAV20, TRAJ4)
CAVQVFSGGYNKLIF

SEQ ID NO: 451382 - protein, 14 aa, Homo sapiens
  CDR3 for beta chain variable domain of TCR clone 225691 (TRBV7-7, TRBJ2-3)
CASNSGGDANTQYF

SEQ ID NO: 451383 - protein, 20 aa, Homo sapiens
  CDR3 for alpha chain variable domain of TCR clone 225692 (TRAV26-1, TRAJ42)
CCVLLHRQTYYGGSQGNLIF

SEQ ID NO: 451384 - protein, 18 aa, Homo sapiens
  CDR3 for beta chain variable domain of TCR clone 225692 (TRBV10-3, TRBJ2-3)
CAISESKVGPMRGDTQYF

SEQ ID NO: 451385 - protein, 13 aa, Homo sapiens
  CDR3 for alpha chain variable domain of TCR clone 225693 (TRAV27, TRAJ6)
CSGGTRGSYIPTF

SEQ ID NO: 451386 - protein, 14 aa, Homo sapiens
  CDR3 for beta chain variable domain of TCR clone 225693 (TRBV6-1, TRBJ1-3)
CASVQGGGGNTIYF

SEQ ID NO: 451387 - protein, 15 aa, Homo sapiens
  CDR3 for alpha chain variable domain of TCR clone 225694 (TRAV3, TRAJ22)
CAVRDRGGSARQLTF

SEQ ID NO: 451388 - protein, 13 aa, Homo sapiens
  CDR3 for beta chain variable domain of TCR clone 225694 (TRBV25-1, TRBJ1-6)
CASHPRGDSPLHF

SEQ ID NO: 451389 - protein, 12 aa, Homo sapiens
  CDR3 for alpha chain variable domain of TCR clone 225695 (TRAV12-3, TRAJ17)
CAMTLTGNKLTF

SEQ ID NO: 451390 - protein, 13 aa, Homo sapiens
  CDR3 for beta chain variable domain of TCR clone 225695 (TRBV11-2, TRBJ1-1)
CASSLGRNTEAFF

SEQ ID NO: 451391 - protein, 14 aa, Homo sapiens
  CDR3 for alpha chain variable domain of TCR clone 225696 (TRAV29/DV5, TRAJ36)
CAARRKTGANNLFF

SEQ ID NO: 451392 - protein, 14 aa, Homo sapiens
  CDR3 for beta chain variable domain of TCR clone 225696 (TRBV12-5, TRBJ2-5)
CASSSRTHQETQYF

SEQ ID NO: 451393 - protein, 15 aa, Homo sapiens
  CDR3 for alpha chain variable domain of TCR clone 225697 (TRAV12-2, TRAJ57)
CAVSRGQGGSEKLVV

SEQ ID NO: 451394 - protein, 14 aa, Homo sapiens
  CDR3 for beta chain variable domain of TCR clone 225697 (TRBV20-1, TRBJ2-1)
CSAHPGLPYNEQFF

SEQ ID NO: 451395 - protein, 14 aa, Homo sapiens
  CDR3 for alpha chain variable domain of TCR clone 225698 (TRAV13-2, TRAJ17)
CAENSKAAGNKLTF

SEQ ID NO: 451396 - protein, 14 aa, Homo sapiens
  CDR3 for beta chain variable domain of TCR clone 225698 (TRBV19, TRBJ2-7)
CASSMGQGAIEQYF

SEQ ID NO: 451397 - protein, 12 aa, Homo sapiens
  CDR3 for alpha chain variable domain of TCR clone 225699 (TRAV21, TRAJ11)
CAATSGYSTLTF

SEQ ID NO: 451398 - protein, 17 aa, Homo sapiens
  CDR3 for beta chain variable domain of TCR clone 225699 (TRBV20-1, TRBJ2-1)
CSAPPRLAGTRYNEQFF

SEQ ID NO: 451399 - protein, 12 aa, Homo sapiens
  CDR3 for alpha chain variable domain of TCR clone 225700 (TRAV13-2, TRAJ23)
CAERHRGGKLIF

SEQ ID NO: 451400 - protein, 12 aa, Homo sapiens
  CDR3 for beta chain variable domain of TCR clone 225700 (TRBV11-2, TRBJ2-2)
CASSLEGGELFF

SEQ ID NO: 451401 - protein, 13 aa, Homo sapiens
  CDR3 for alpha chain variable domain of TCR clone 225701 (TRAV12-1, TRAJ40)
CVVLTSGTYKYIF

SEQ ID NO: 451402 - protein, 18 aa, Homo sapiens
  CDR3 for beta chain variable domain of TCR clone 225701 (TRBV7-6, TRBJ2-1)
CASSPRTSGMSSYNEQSF

SEQ ID NO: 451403 - protein, 14 aa, Homo sapiens
  CDR3 for alpha chain variable domain of TCR clone 225702 (TRAV2, TRAJ9)
CAVEDRSGGFKTIL

SEQ ID NO: 451404 - protein, 16 aa, Homo sapiens
  CDR3 for beta chain variable domain of TCR clone 225702 (TRBV7-2, TRBJ2-3)
CASSLVALYSTDTQYF

SEQ ID NO: 451405 - protein, 14 aa, Homo sapiens
  CDR3 for alpha chain variable domain of TCR clone 225703 (TRAV16, TRAJ33)
CALSAMDSNYQLIW

SEQ ID NO: 451406 - protein, 12 aa, Homo sapiens
  CDR3 for beta chain variable domain of TCR clone 225703 (TRBV5-1, TRBJ1-2)
CASSQDTYGYTG

SEQ ID NO: 451407 - protein, 13 aa, Homo sapiens
  CDR3 for alpha chain variable domain of TCR clone 225704 (TRAV38-2/DV8, TRAJ34)
CAYRTWNTDKLIF

SEQ ID NO: 451408 - protein, 12 aa, Homo sapiens
  CDR3 for beta chain variable domain of TCR clone 225704 (TRBV11-2, TRBJ2-2)
CASSLGGGELFF

SEQ ID NO: 451409 - protein, 14 aa, Homo sapiens
  CDR3 for alpha chain variable domain of TCR clone 225705 (TRAV6, TRAJ37)
CALGSQGNTGKLIF

SEQ ID NO: 451410 - protein, 15 aa, Homo sapiens
  CDR3 for beta chain variable domain of TCR clone 225705 (TRBV2, TRBJ2-1)
CASSEGREGDNEQFF

SEQ ID NO: 451411 - protein, 18 aa, Homo sapiens
  CDR3 for alpha chain variable domain of TCR clone 225706 (TRAV29/DV5, TRAJ52)
CAAGFRGAGGPSYGKLPF

SEQ ID NO: 451412 - protein, 16 aa, Homo sapiens
  CDR3 for beta chain variable domain of TCR clone 225706 (TRBV7-3, TRBJ2-2)
CASSLKRGTLSGELFF

SEQ ID NO: 451413 - protein, 14 aa, Homo sapiens
  CDR3 for alpha chain variable domain of TCR clone 225707 (TRAV38-1, TRAJ45)
CASHSGGGADGLTY

SEQ ID NO: 451414 - protein, 17 aa, Homo sapiens
  CDR3 for beta chain variable domain of TCR clone 225707 (TRBV20-1, TRBJ2-3)
CSARSAGLAGVTDTQYF

SEQ ID NO: 451415 - protein, 14 aa, Homo sapiens
  CDR3 for alpha chain variable domain of TCR clone 225708 (TRAV23/DV6, TRAJ23)
CAAGPYNQGGKLIF

SEQ ID NO: 451416 - protein, 16 aa, Homo sapiens
  CDR3 for beta chain variable domain of TCR clone 225708 (TRBV4-1, TRBJ2-5)
CASSSGLAGVLGTQYF

SEQ ID NO: 451417 - protein, 15 aa, Homo sapiens
  CDR3 for alpha chain variable domain of TCR clone 225709 (TRAV8-3, TRAJ23)
CAVGDRYNQGGKFIF

SEQ ID NO: 451418 - protein, 17 aa, Homo sapiens
  CDR3 for beta chain variable domain of TCR clone 225709 (TRBV4-1, TRBJ1-4)
CASSQEGPRGVEEKLFF

SEQ ID NO: 451419 - protein, 15 aa, Homo sapiens
  CDR3 for alpha chain variable domain of TCR clone 225710 (TRAV17, TRAJ16)
CATALRFSDGQKLLF

SEQ ID NO: 451420 - protein, 14 aa, Homo sapiens
  CDR3 for beta chain variable domain of TCR clone 225710 (TRBV12-4, TRBJ1-6)
CASNLQGKGSPLHF

SEQ ID NO: 451421 - protein, 15 aa, Homo sapiens
  CDR3 for alpha chain variable domain of TCR clone 225711 (TRAV8-1, TRAJ6)
CAVNTPPGGSYILTF

SEQ ID NO: 451422 - protein, 15 aa, Homo sapiens
  CDR3 for beta chain variable domain of TCR clone 225711 (TRBV11-3, TRBJ2-2)
CASSSDRVNAGELFF

SEQ ID NO: 451423 - protein, 14 aa, Homo sapiens
  CDR3 for alpha chain variable domain of TCR clone 225712 (TRAV1-2, TRAJ16)
CAVNRLSDGQKLLF

SEQ ID NO: 451424 - protein, 19 aa, Homo sapiens
  CDR3 for beta chain variable domain of TCR clone 225712 (TRBV18, TRBJ2-7)
CASSPRGGGLRAVLRAGHQ

SEQ ID NO: 451425 - protein, 15 aa, Homo sapiens
  CDR3 for alpha chain variable domain of TCR clone 225713 (TRAV27, TRAJ39)
ASTSVQENAGNMLTF

SEQ ID NO: 451426 - protein, 15 aa, Homo sapiens
  CDR3 for beta chain variable domain of TCR clone 225713 (TRBV19, TRBJ1-2)
CASSVGQVLNYGYTF

SEQ ID NO: 451427 - protein, 12 aa, Homo sapiens
  CDR3 for alpha chain variable domain of TCR clone 225714 (TRAV12-1, TRAJ23)
CVVNIPGGKLIF

SEQ ID NO: 451428 - protein, 15 aa, Homo sapiens
  CDR3 for beta chain variable domain of TCR clone 225714 (TRBV7-2, TRBJ2-7)
CASSSVSSGSYEQYF

SEQ ID NO: 451429 - protein, 15 aa, Homo sapiens
  CDR3 for alpha chain variable domain of TCR clone 225715 (TRAV26-1, TRAJ21)
CIVRVPNYNFNKFYF

SEQ ID NO: 451430 - protein, 16 aa, Homo sapiens
  CDR3 for beta chain variable domain of TCR clone 225715 (TRBV7-9, TRBJ2-3)
CASSLQGNPGTDTKYF

SEQ ID NO: 451431 - protein, 19 aa, Homo sapiens
  CDR3 for alpha chain variable domain of TCR clone 225716 (TRAV1-2, TRAJ26)
CLLPLCCERPDNYGQNFVF

SEQ ID NO: 451432 - protein, 13 aa, Homo sapiens
  CDR3 for beta chain variable domain of TCR clone 225716 (TRBV5-5, TRBJ1-2)
CASSFWRSEDYTF

SEQ ID NO: 451433 - protein, 11 aa, Homo sapiens
  CDR3 for alpha chain variable domain of TCR clone 225717 (TRAV2, TRAJ13)
CASGGYQKVTF

SEQ ID NO: 451434 - protein, 15 aa, Homo sapiens
  CDR3 for beta chain variable domain of TCR clone 225717 (TRBV18, TRBJ2-1)
CASLPDRGRDNEQFF

SEQ ID NO: 451435 - protein, 14 aa, Homo sapiens
  CDR3 for alpha chain variable domain of TCR clone 225718 (TRAV17, TRAJ22)
CARVLSGSARQLPF

SEQ ID NO: 451436 - protein, 14 aa, Homo sapiens
  CDR3 for beta chain variable domain of TCR clone 225718 (TRBV12-4, TRBJ2-5)
CASSLGDRGETQYF

SEQ ID NO: 451437 - protein, 14 aa, Homo sapiens
  CDR3 for alpha chain variable domain of TCR clone 225719 (TRAV1-1, TRAJ15)
CAVRTQPGRNCSDL

SEQ ID NO: 451438 - protein, 14 aa, Homo sapiens
  CDR3 for beta chain variable domain of TCR clone 225719 (TRBV11-2, TRBJ2-1)
CASSLSGPYNEQFF

SEQ ID NO: 451439 - protein, 15 aa, Homo sapiens
  CDR3 for alpha chain variable domain of TCR clone 225720 (TRAV3, TRAJ5)
CAVRDLDTGRRALTF

SEQ ID NO: 451440 - protein, 22 aa, Homo sapiens
  CDR3 for beta chain variable domain of TCR clone 225720 (TRBV19, TRBJ2-1)
CASSVRDRVTGTSGRIYNEQFF

SEQ ID NO: 451441 - protein, 12 aa, Homo sapiens
  CDR3 for alpha chain variable domain of TCR clone 225721 (TRAV2, TRAJ9)
CAVGAGGFKTIF

SEQ ID NO: 451442 - protein, 17 aa, Homo sapiens
  CDR3 for beta chain variable domain of TCR clone 225721 (TRBV28, TRBJ2-5)
CASSTPEGDALQETQYF

SEQ ID NO: 451443 - protein, 14 aa, Homo sapiens
  CDR3 for alpha chain variable domain of TCR clone 225722 (TRAV8-4, TRAJ40)
CAVIPTSGTYKYIF

SEQ ID NO: 451444 - protein, 16 aa, Homo sapiens
  CDR3 for beta chain variable domain of TCR clone 225722 (TRBV7-9, TRBJ1-2)
CASSLGFSSGEDGYTF

SEQ ID NO: 451445 - protein, 13 aa, Homo sapiens
  CDR3 for alpha chain variable domain of TCR clone 225723 (TRAV12-2, TRAJ52)
CAVSGTSYGKLKF

SEQ ID NO: 451446 - protein, 17 aa, Homo sapiens
  CDR3 for beta chain variable domain of TCR clone 225723 (TRBV11-2, TRBJ2-1)
CASSLYPPGVEYNEQFF

SEQ ID NO: 451447 - protein, 14 aa, Homo sapiens
  CDR3 for alpha chain variable domain of TCR clone 225724 (TRAV21, TRAJ35)
CAVMPIGFGTVLHF

SEQ ID NO: 451448 - protein, 12 aa, Homo sapiens
  CDR3 for beta chain variable domain of TCR clone 225724 (TRBV7-9, TRBJ2-7)
CASSIKREEQYF

SEQ ID NO: 451449 - protein, 15 aa, Homo sapiens
  CDR3 for alpha chain variable domain of TCR clone 225725 (TRAV13-1, TRAJ10)
CAAGVVTGGGNKLTF

SEQ ID NO: 451450 - protein, 13 aa, Homo sapiens
  CDR3 for beta chain variable domain of TCR clone 225725 (TRBV28, TRBJ2-5)
CAGVSRGEETQYF

SEQ ID NO: 451451 - protein, 15 aa, Homo sapiens
  CDR3 for alpha chain variable domain of TCR clone 225726 (TRAV17, TRAJ48)
CATDETNFGNEKLTF

SEQ ID NO: 451452 - protein, 13 aa, Homo sapiens
  CDR3 for beta chain variable domain of TCR clone 225726 (TRBV12-4, TRBJ1-5)
CASSPDRAQTQHL

SEQ ID NO: 451453 - protein, 14 aa, Homo sapiens
  CDR3 for alpha chain variable domain of TCR clone 225727 (TRAV16, TRAJ33)
CALSAMVSNFQLIW

SEQ ID NO: 451454 - protein, 12 aa, Homo sapiens
  CDR3 for beta chain variable domain of TCR clone 225727 (TRBV5-1, TRBJ1-2)
CASSQDTYGYTF

SEQ ID NO: 451455 - protein, 10 aa, Homo sapiens
  CDR3 for alpha chain variable domain of TCR clone 225728 (TRAV16, TRAJ31)
SLFNNARLMF

SEQ ID NO: 451456 - protein, 15 aa, Homo sapiens
  CDR3 for beta chain variable domain of TCR clone 225728 (TRBV18, TRBJ1-1)
CASSPRQGENTEAFF

SEQ ID NO: 451457 - protein, 14 aa, Homo sapiens
  CDR3 for alpha chain variable domain of TCR clone 225729 (TRAV12-2, TRAJ17)
CAVLFKAAGNKLTF

SEQ ID NO: 451458 - protein, 15 aa, Homo sapiens
  CDR3 for beta chain variable domain of TCR clone 225729 (TRBV20-1, TRBJ2-4)
CSVTTGLLAKNIQYF

SEQ ID NO: 451459 - protein, 15 aa, Homo sapiens
  CDR3 for alpha chain variable domain of TCR clone 225730 (TRAV3, TRAJ11)
CAVRDRGSGYSTLPF

SEQ ID NO: 451460 - protein, 13 aa, Homo sapiens
  CDR3 for beta chain variable domain of TCR clone 225730 (TRBV27, TRBJ1-4)
CASSLMGDEKLFF

SEQ ID NO: 451461 - protein, 14 aa, Homo sapiens
  CDR3 for alpha chain variable domain of TCR clone 225731 (TRAV13-2, TRAJ17)
CAENSKAAGNKLTF

SEQ ID NO: 451462 - protein, 11 aa, Homo sapiens
  CDR3 for beta chain variable domain of TCR clone 225731 (TRBV6-3, TRBJ2-3)
CATGQAYTQYF

SEQ ID NO: 451463 - protein, 12 aa, Homo sapiens
  CDR3 for alpha chain variable domain of TCR clone 225732 (TRAV21, TRAJ37)
CAVRGNTGKLIF

SEQ ID NO: 451464 - protein, 15 aa, Homo sapiens
  CDR3 for beta chain variable domain of TCR clone 225732 (TRBV19, TRBJ2-1)
CASSSPGVPLDEQFF

SEQ ID NO: 451465 - protein, 15 aa, Homo sapiens
  CDR3 for alpha chain variable domain of TCR clone 225733 (TRAV12-1, TRAJ44)
CVVDTPQGTASKLTF

SEQ ID NO: 451466 - protein, 14 aa, Homo sapiens
  CDR3 for beta chain variable domain of TCR clone 225733 (TRBV7-9, TRBJ2-1)
CGSSPRDSLYEQFF

SEQ ID NO: 451467 - protein, 14 aa, Homo sapiens
  CDR3 for alpha chain variable domain of TCR clone 225734 (TRAV26-1, TRAJ48)
CIVRAGFGNGKLTF

SEQ ID NO: 451468 - protein, 13 aa, Homo sapiens
  CDR3 for beta chain variable domain of TCR clone 225734 (TRBV11-3, TRBJ2-3)
CASSHDTKDTQYF

SEQ ID NO: 451469 - protein, 15 aa, Homo sapiens
  CDR3 for alpha chain variable domain of TCR clone 225735 (TRAV8-3, TRAJ27)
CAVGPSKTNSGKSTF

SEQ ID NO: 451470 - protein, 13 aa, Homo sapiens
  CDR3 for beta chain variable domain of TCR clone 225735 (TRBV12-5, TRBJ1-2)
CASGVRTGNGYAF

SEQ ID NO: 451471 - protein, 15 aa, Homo sapiens
  CDR3 for alpha chain variable domain of TCR clone 225736 (TRAV3, TRAJ22)
CAVRDRGGSASQLTF

SEQ ID NO: 451472 - protein, 12 aa, Homo sapiens
  CDR3 for beta chain variable domain of TCR clone 225736 (TRBV12-4, TRBJ1-2)
CASSFIWLHLRF

SEQ ID NO: 451473 - protein, 12 aa, Homo sapiens
  CDR3 for alpha chain variable domain of TCR clone 225737 (TRAV12-3, TRAJ17)
CAMTLTGNKLTF

SEQ ID NO: 451474 - protein, 13 aa, Homo sapiens
  CDR3 for beta chain variable domain of TCR clone 225737 (TRBV4-2, TRBJ2-1)
CASSPGTYSEQFF

SEQ ID NO: 451475 - protein, 11 aa, Homo sapiens
  CDR3 for alpha chain variable domain of TCR clone 225738 (TRAV12-3, TRAJ27)
CAMANAGKSTF

SEQ ID NO: 451476 - protein, 12 aa, Homo sapiens
  CDR3 for beta chain variable domain of TCR clone 225738 (TRBV2, TRBJ2-1)
CAYGPPGNEQFF

SEQ ID NO: 451477 - protein, 12 aa, Homo sapiens
  CDR3 for alpha chain variable domain of TCR clone 225739 (TRAV8-3, TRAJ15)
CAVGAPLSALIF

SEQ ID NO: 451478 - protein, 17 aa, Homo sapiens
  CDR3 for beta chain variable domain of TCR clone 225739 (TRBV5-5, TRBJ1-1)
CASSLRFRGLMNTEAFL

SEQ ID NO: 451479 - protein, 14 aa, Homo sapiens
  CDR3 for alpha chain variable domain of TCR clone 225740 (TRAV26-1, TRAJ38)
CIADNAGNNRKLIW

SEQ ID NO: 451480 - protein, 15 aa, Homo sapiens
  CDR3 for beta chain variable domain of TCR clone 225740 (TRBV5-1, TRBJ2-3)
CASSVTSGSTDTQYF

SEQ ID NO: 451481 - protein, 17 aa, Homo sapiens
  CDR3 for alpha chain variable domain of TCR clone 225741 (TRAV3, TRAJ6)
CAVRDGPRAGGSYTLTF

SEQ ID NO: 451482 - protein, 20 aa, Homo sapiens
  CDR3 for beta chain variable domain of TCR clone 225741 (TRBV28, TRBJ2-1)
CASTPIGRSPGLAGGNEQFF

SEQ ID NO: 451483 - protein, 13 aa, Homo sapiens
  CDR3 for alpha chain variable domain of TCR clone 225742 (TRAV2, TRAJ47)
CAVDREYGNKLVF

SEQ ID NO: 451484 - protein, 17 aa, Homo sapiens
  CDR3 for beta chain variable domain of TCR clone 225742 (TRBV15, TRBJ1-5)
CATSRVEGIYSNQPQHF

SEQ ID NO: 451485 - protein, 15 aa, Homo sapiens
  CDR3 for alpha chain variable domain of TCR clone 225743 (TRAV29/DV5, TRAJ24)
CATSGATDSWGKFQF

SEQ ID NO: 451486 - protein, 13 aa, Homo sapiens
  CDR3 for beta chain variable domain of TCR clone 225743 (TRBV19, TRBJ1-2)
CASSVPGQDGYTF

SEQ ID NO: 451487 - protein, 13 aa, Homo sapiens
  CDR3 for alpha chain variable domain of TCR clone 225744 (TRAV12-2, TRAJ12)
CAVNWDSSYKLIF

SEQ ID NO: 451488 - protein, 12 aa, Homo sapiens
  CDR3 for beta chain variable domain of TCR clone 225744 (TRBV11-2, TRBJ2-2)
CASSLGGGELFF

SEQ ID NO: 451489 - protein, 13 aa, Homo sapiens
  CDR3 for alpha chain variable domain of TCR clone 225745 (TRAV23/DV6, TRAJ22)
CAPYSGSARQLTF

SEQ ID NO: 451490 - protein, 12 aa, Homo sapiens
  CDR3 for beta chain variable domain of TCR clone 225745 (TRBV20-1, TRBJ1-5)
CSALHSNQPQHF

SEQ ID NO: 451491 - protein, 15 aa, Homo sapiens
  CDR3 for alpha chain variable domain of TCR clone 225746 (TRAV3, TRAJ3)
CAVRDRDSSASKIIF

SEQ ID NO: 451492 - protein, 13 aa, Homo sapiens
  CDR3 for beta chain variable domain of TCR clone 225746 (TRBV19, TRBJ2-7)
CASSPRQSYEQYF

SEQ ID NO: 451493 - protein, 15 aa, Homo sapiens
  CDR3 for alpha chain variable domain of TCR clone 225747 (TRAV13-1, TRAJ32)
CAASIYGGATNKLIF

SEQ ID NO: 451494 - protein, 17 aa, Homo sapiens
  CDR3 for beta chain variable domain of TCR clone 225747 (TRBV7-3, TRBJ2-5)
CSSSLGSGRSGSETQYF

SEQ ID NO: 451495 - protein, 14 aa, Homo sapiens
  CDR3 for alpha chain variable domain of TCR clone 225748 (TRAV1-2, TRAJ8)
CAVRADTGFQKLVF

SEQ ID NO: 451496 - protein, 16 aa, Homo sapiens
  CDR3 for beta chain variable domain of TCR clone 225748 (TRBV27, TRBJ2-2)
CASSFRGLVRTGELFF

SEQ ID NO: 451497 - protein, 16 aa, Homo sapiens
  CDR3 for alpha chain variable domain of TCR clone 225749 (TRAV16, TRAJ4)
CALSRMFSGGYNKLIF

SEQ ID NO: 451498 - protein, 15 aa, Homo sapiens
  CDR3 for beta chain variable domain of TCR clone 225749 (TRBV28, TRBJ1-1)
CASSLGRGFRTGAFF

SEQ ID NO: 451499 - protein, 15 aa, Homo sapiens
  CDR3 for alpha chain variable domain of TCR clone 225750 (TRAV8-2, TRAJ16)
CVVSDGFSDGQKLPF

SEQ ID NO: 451500 - protein, 13 aa, Homo sapiens
  CDR3 for beta chain variable domain of TCR clone 225750 (TRBV20-1, TRBJ1-1)
CSAPPGGHTEAFF

SEQ ID NO: 451501 - protein, 12 aa, Homo sapiens
  CDR3 for alpha chain variable domain of TCR clone 225751 (TRAV12-3, TRAJ17)
CAMTLTGTKLTF

SEQ ID NO: 451502 - protein, 15 aa, Homo sapiens
  CDR3 for beta chain variable domain of TCR clone 225751 (TRBV20-1, TRBJ2-7)
CSARDRVSRMDEQYF

SEQ ID NO: 451503 - protein, 14 aa, Homo sapiens
  CDR3 for alpha chain variable domain of TCR clone 225752 (TRAV12-3, TRAJ10)
SHLPLPGGGNKLTF

SEQ ID NO: 451504 - protein, 16 aa, Homo sapiens
  CDR3 for beta chain variable domain of TCR clone 225752 (TRBV4-1, TRBJ1-4)
CASSQDLRRGGEKLFF

SEQ ID NO: 451505 - protein, 14 aa, Homo sapiens
  CDR3 for alpha chain variable domain of TCR clone 225753 (TRAV8-4, TRAJ9)
CAVRINTGGFKTIF

SEQ ID NO: 451506 - protein, 17 aa, Homo sapiens
  CDR3 for beta chain variable domain of TCR clone 225753 (TRBV20-1, TRBJ2-1)
CSASSSGLAGSYNEQFF

SEQ ID NO: 451507 - protein, 13 aa, Homo sapiens
  CDR3 for alpha chain variable domain of TCR clone 225754 (TRAV38-2/DV8, TRAJ34)
CAYRNYNTDKLVF

SEQ ID NO: 451508 - protein, 16 aa, Homo sapiens
  CDR3 for beta chain variable domain of TCR clone 225754 (TRBV9, TRBJ2-2)
CASSAMGKGNTGELFF

SEQ ID NO: 451509 - protein, 13 aa, Homo sapiens
  CDR3 for alpha chain variable domain of TCR clone 225755 (TRAV13-1, TRAJ10)
CAAAEGGGKKLTF

SEQ ID NO: 451510 - protein, 15 aa, Homo sapiens
  CDR3 for beta chain variable domain of TCR clone 225755 (TRBV7-8, TRBJ2-2)
CASSLDQGWAGELFF

SEQ ID NO: 451511 - protein, 12 aa, Homo sapiens
  CDR3 for alpha chain variable domain of TCR clone 225756 (TRAV27, TRAJ41)
CAGRNSGYALNF

SEQ ID NO: 451512 - protein, 12 aa, Homo sapiens
  CDR3 for beta chain variable domain of TCR clone 225756 (TRBV28, TRBJ2-3)
CASSLYRDTQYF

SEQ ID NO: 451513 - protein, 12 aa, Homo sapiens
  CDR3 for alpha chain variable domain of TCR clone 225757 (TRAV3, TRAJ20)
CAVRDPDYKLSF

SEQ ID NO: 451514 - protein, 13 aa, Homo sapiens
  CDR3 for beta chain variable domain of TCR clone 225757 (TRBV12-5, TRBJ2-3)
CASGDRQSDTQYF

SEQ ID NO: 451515 - protein, 14 aa, Homo sapiens
  CDR3 for alpha chain variable domain of TCR clone 225758 (TRAV36/DV7, TRAJ57)
CCLSSQGGSEKLVF

SEQ ID NO: 451516 - protein, 14 aa, Homo sapiens
  CDR3 for beta chain variable domain of TCR clone 225758 (TRBV2, TRBJ2-5)
CASSEVLAQETQYS

SEQ ID NO: 451517 - protein, 16 aa, Homo sapiens
  CDR3 for alpha chain variable domain of TCR clone 225759 (TRAV8-4, TRAJ5)
CAVSPLTDTGRRALTF

SEQ ID NO: 451518 - protein, 14 aa, Homo sapiens
  CDR3 for beta chain variable domain of TCR clone 225759 (TRBV19, TRBJ1-6)
CASSTDGWNSPLRF

SEQ ID NO: 451519 - protein, 11 aa, Homo sapiens
  CDR3 for alpha chain variable domain of TCR clone 225760 (TRAV2, TRAJ21)
CAVFNFNKFYF

SEQ ID NO: 451520 - protein, 14 aa, Homo sapiens
  CDR3 for beta chain variable domain of TCR clone 225760 (TRBV15, TRBJ2-3)
CATRGGTSTDKQYF

SEQ ID NO: 451521 - protein, 17 aa, Homo sapiens
  CDR3 for alpha chain variable domain of TCR clone 225761 (TRAV38-2/DV8, TRAJ56)
CAYRSEVGTGANSKLTF

SEQ ID NO: 451522 - protein, 14 aa, Homo sapiens
  CDR3 for beta chain variable domain of TCR clone 225761 (TRBV11-1, TRBJ1-1)
CASSLENPNTEAFF

SEQ ID NO: 451523 - protein, 16 aa, Homo sapiens
  CDR3 for alpha chain variable domain of TCR clone 225762 (TRAV23/DV6, TRAJ9)
CAASIGGNTGGFKTIF

SEQ ID NO: 451524 - protein, 11 aa, Homo sapiens
  CDR3 for beta chain variable domain of TCR clone 225762 (TRBV12-4, TRBJ2-2)
CASSSAGELFF

SEQ ID NO: 451525 - protein, 13 aa, Homo sapiens
  CDR3 for alpha chain variable domain of TCR clone 225763 (TRAV3, TRAJ21)
CAVSEPDFNKFYF

SEQ ID NO: 451526 - protein, 13 aa, Homo sapiens
  CDR3 for beta chain variable domain of TCR clone 225763 (TRBV9, TRBJ2-1)
CASSPSGGDEQFF

SEQ ID NO: 451527 - protein, 19 aa, Homo sapiens
  CDR3 for alpha chain variable domain of TCR clone 225764 (TRAV26-1, TRAJ52)
CIVRAHRNAGGTSYEKLTF

SEQ ID NO: 451528 - protein, 15 aa, Homo sapiens
  CDR3 for beta chain variable domain of TCR clone 225764 (TRBV29-1, TRBJ2-1)
CSGRDRKSSYNEQFF

SEQ ID NO: 451529 - protein, 15 aa, Homo sapiens
  CDR3 for alpha chain variable domain of TCR clone 225765 (TRAV12-2, TRAJ43)
CAFDMRFGAGTRLTV

SEQ ID NO: 451530 - protein, 18 aa, Homo sapiens
  CDR3 for beta chain variable domain of TCR clone 225765 (TRBV20-1, TRBJ2-3)
CSASGLAGGAGTTDTQYF

SEQ ID NO: 451531 - protein, 13 aa, Homo sapiens
  CDR3 for alpha chain variable domain of TCR clone 225766 (TRAV36/DV7, TRAJ7)
CAVERYGNNRLAF

SEQ ID NO: 451532 - protein, 13 aa, Homo sapiens
  CDR3 for beta chain variable domain of TCR clone 225766 (TRBV19, TRBJ1-2)
CASSVPGQDGYTF

SEQ ID NO: 451533 - protein, 12 aa, Homo sapiens
  CDR3 for alpha chain variable domain of TCR clone 225767 (TRAV12-3, TRAJ33)
CAFMDSNYQLTW

SEQ ID NO: 451534 - protein, 17 aa, Homo sapiens
  CDR3 for beta chain variable domain of TCR clone 225767 (TRBV13, TRBJ2-3)
CASSLSRVAGGRNTQYF

SEQ ID NO: 451535 - protein, 13 aa, Homo sapiens
  CDR3 for alpha chain variable domain of TCR clone 225768 (TRAV21, TRAJ45)
CAVMGGGADGLTF

SEQ ID NO: 451536 - protein, 12 aa, Homo sapiens
  CDR3 for beta chain variable domain of TCR clone 225768 (TRBV19, TRBJ2-1)
CASSQISNEQFF

SEQ ID NO: 451537 - protein, 14 aa, Homo sapiens
  CDR3 for alpha chain variable domain of TCR clone 225769 (TRAV12-3, TRAJ35)
CAMSLIGFGNVLHC

SEQ ID NO: 451538 - protein, 14 aa, Homo sapiens
  CDR3 for beta chain variable domain of TCR clone 225769 (TRBV25-1, TRBJ1-1)
CASTHLGGNTEDFF

SEQ ID NO: 451539 - protein, 13 aa, Homo sapiens
  CDR3 for alpha chain variable domain of TCR clone 225770 (TRAV2, TRAJ40)
CAVVTSGTYQYIF

SEQ ID NO: 451540 - protein, 15 aa, Homo sapiens
  CDR3 for beta chain variable domain of TCR clone 225770 (TRBV7-9, TRBJ1-5)
CASSQGHQPNQPQHF

SEQ ID NO: 451541 - protein, 13 aa, Homo sapiens
  CDR3 for alpha chain variable domain of TCR clone 225771 (TRAV8-3, TRAJ21)
CDVGLDNFNKFYF

SEQ ID NO: 451542 - protein, 13 aa, Homo sapiens
  CDR3 for beta chain variable domain of TCR clone 225771 (TRBV11-2, TRBJ2-5)
CASGHGAKETQYF

SEQ ID NO: 451543 - protein, 15 aa, Homo sapiens
  CDR3 for alpha chain variable domain of TCR clone 225772 (TRAV2, TRAJ40)
CAVVTSGTYKYILEQ

SEQ ID NO: 451544 - protein, 15 aa, Homo sapiens
  CDR3 for beta chain variable domain of TCR clone 225772 (TRBV27, TRBJ2-1)
CASSNGGGSSNEQFF

SEQ ID NO: 451545 - protein, 12 aa, Homo sapiens
  CDR3 for alpha chain variable domain of TCR clone 225773 (TRAV3, TRAJ43)
CAVRDPNNDIRF

SEQ ID NO: 451546 - protein, 15 aa, Homo sapiens
  CDR3 for beta chain variable domain of TCR clone 225773 (TRBV11-1, TRBJ1-5)
CASSLGTGFDQPQHF

SEQ ID NO: 451547 - protein, 14 aa, Homo sapiens
  CDR3 for alpha chain variable domain of TCR clone 225774 (TRAV2, TRAJ37)
CAVDFTSNTGKLIF

SEQ ID NO: 451548 - protein, 14 aa, Homo sapiens
  CDR3 for beta chain variable domain of TCR clone 225774 (TRBV19, TRBJ2-1)
CASSMGSGATEQFF

SEQ ID NO: 451549 - protein, 17 aa, Homo sapiens
  CDR3 for alpha chain variable domain of TCR clone 225775 (TRAV3, TRAJ38)
CAVRDCLNAGNNRKLIW

SEQ ID NO: 451550 - protein, 14 aa, Homo sapiens
  CDR3 for beta chain variable domain of TCR clone 225775 (TRBV5-5, TRBJ1-5)
CASSGQGVDEPQHF

SEQ ID NO: 451551 - protein, 14 aa, Homo sapiens
  CDR3 for alpha chain variable domain of TCR clone 225776 (TRAV17, TRAJ16)
CATADFSDGQKLLF

SEQ ID NO: 451552 - protein, 13 aa, Homo sapiens
  CDR3 for beta chain variable domain of TCR clone 225776 (TRBV12-5, TRBJ2-3)
CASGDRQSDTQYL

SEQ ID NO: 451553 - protein, 14 aa, Homo sapiens
  CDR3 for alpha chain variable domain of TCR clone 225777 (TRAV25, TRAJ39)
CGRSNNNAGNMLTF

SEQ ID NO: 451554 - protein, 15 aa, Homo sapiens
  CDR3 for beta chain variable domain of TCR clone 225777 (TRBV15, TRBJ1-5)
CATSSGPVSNQPQHF

SEQ ID NO: 451555 - protein, 10 aa, Homo sapiens
  CDR3 for alpha chain variable domain of TCR clone 225778 (TRAV27, TRAJ49)
CAGPVTSSIL

SEQ ID NO: 451556 - protein, 17 aa, Homo sapiens
  CDR3 for beta chain variable domain of TCR clone 225778 (TRBV6-5, TRBJ2-1)
CASRKSPRTGGHNEQFF

SEQ ID NO: 451557 - protein, 13 aa, Homo sapiens
  CDR3 for alpha chain variable domain of TCR clone 225779 (TRAV13-1, TRAJ53)
QAASGGSNYKLTF

SEQ ID NO: 451558 - protein, 15 aa, Homo sapiens
  CDR3 for beta chain variable domain of TCR clone 225779 (TRBV5-1, TRBJ2-1)
CASNPPRAPYNEQFF

SEQ ID NO: 451559 - protein, 14 aa, Homo sapiens
  CDR3 for alpha chain variable domain of TCR clone 225780 (TRAV3, TRAJ36)
CAVRDGTGANNLFF

SEQ ID NO: 451560 - protein, 16 aa, Homo sapiens
  CDR3 for beta chain variable domain of TCR clone 225780 (TRBV20-1, TRBJ2-6)
CSTREGPGVGANVLTF

SEQ ID NO: 451561 - protein, 16 aa, Homo sapiens
  CDR3 for alpha chain variable domain of TCR clone 225781 (TRAV3, TRAJ37)
CAVRGKGSGNTGKLIF

SEQ ID NO: 451562 - protein, 14 aa, Homo sapiens
  CDR3 for beta chain variable domain of TCR clone 225781 (TRBV7-2, TRBJ2-7)
RASSPKTSFYEQYF

SEQ ID NO: 451563 - protein, 14 aa, Homo sapiens
  CDR3 for alpha chain variable domain of TCR clone 225782 (TRAV4, TRAJ43)
CLVGPMYNNNDMRF

SEQ ID NO: 451564 - protein, 21 aa, Homo sapiens
  CDR3 for beta chain variable domain of TCR clone 225782 (TRBV11-1, TRBJ2-1)
CASSPRERLRPEGPSYNEQFF

SEQ ID NO: 451565 - protein, 14 aa, Homo sapiens
  CDR3 for alpha chain variable domain of TCR clone 225783 (TRAV8-6, TRAJ34)
CAVSDQGNTDKLIF

SEQ ID NO: 451566 - protein, 12 aa, Homo sapiens
  CDR3 for beta chain variable domain of TCR clone 225783 (TRBV29-1, TRBJ2-3)
CSVTGGADTQYF

SEQ ID NO: 451567 - protein, 12 aa, Homo sapiens
  CDR3 for alpha chain variable domain of TCR clone 225784 (TRAV3, TRAJ20)
CAVRDPDYKLSF

SEQ ID NO: 451568 - protein, 15 aa, Homo sapiens
  CDR3 for beta chain variable domain of TCR clone 225784 (TRBV5-4, TRBJ2-6)
CASSLLLSGANVLTF

SEQ ID NO: 451569 - protein, 14 aa, Homo sapiens
  CDR3 for alpha chain variable domain of TCR clone 225785 (TRAV3, TRAJ40)
FAVRDRRGTYKYIF

SEQ ID NO: 451570 - protein, 14 aa, Homo sapiens
  CDR3 for beta chain variable domain of TCR clone 225785 (TRBV6-1, TRBJ1-3)
CASVQGGGGNTIYF

SEQ ID NO: 451571 - protein, 14 aa, Homo sapiens
  CDR3 for alpha chain variable domain of TCR clone 225786 (TRAV12-2, TRAJ17)
CAVLFKAAGNKLTF

SEQ ID NO: 451572 - protein, 16 aa, Homo sapiens
  CDR3 for beta chain variable domain of TCR clone 225786 (TRBV3-1, TRBJ2-5)
CASSPGQFNGFGTQYF

SEQ ID NO: 451573 - protein, 14 aa, Homo sapiens
  CDR3 for alpha chain variable domain of TCR clone 225787 (TRAV2, TRAJ23)
CAGIIYNQGGKLIF

SEQ ID NO: 451574 - protein, 13 aa, Homo sapiens
  CDR3 for beta chain variable domain of TCR clone 225787 (TRBV20-1, TRBJ2-3)
CSATSGGAGTQYF

SEQ ID NO: 451575 - protein, 16 aa, Homo sapiens
  CDR3 for alpha chain variable domain of TCR clone 225788 (TRAV12-3, TRAJ53)
CAMSPGSGGSYYKLTF

SEQ ID NO: 451576 - protein, 16 aa, Homo sapiens
  CDR3 for beta chain variable domain of TCR clone 225788 (TRBV4-2, TRBJ1-1)
CASRPLDGGGDTEAFF

SEQ ID NO: 451577 - protein, 14 aa, Homo sapiens
  CDR3 for alpha chain variable domain of TCR clone 225789 (TRAV1-2, TRAJ16)
CAVNRFSDGQKLLF

SEQ ID NO: 451578 - protein, 18 aa, Homo sapiens
  CDR3 for beta chain variable domain of TCR clone 225789 (TRBV20-1, TRBJ2-6)
CSADTTPTHGSGANVLSF

SEQ ID NO: 451579 - protein, 16 aa, Homo sapiens
  CDR3 for alpha chain variable domain of TCR clone 225790 (TRAV30, TRAJ24)
CGTEIVGADSWGRFQF

SEQ ID NO: 451580 - protein, 15 aa, Homo sapiens
  CDR3 for beta chain variable domain of TCR clone 225790 (TRBV7-9, TRBJ1-4)
CASSARTGGNEKLFF

SEQ ID NO: 451581 - protein, 19 aa, Homo sapiens
  CDR3 for alpha chain variable domain of TCR clone 225791 (TRAV38-1, TRAJ53)
CAFMKHGLERGGSNYKLTF

SEQ ID NO: 451582 - protein, 13 aa, Homo sapiens
  CDR3 for beta chain variable domain of TCR clone 225791 (TRBV19, TRBJ2-7)
CASSPRQSYEQYL

SEQ ID NO: 451583 - protein, 16 aa, Homo sapiens
  CDR3 for alpha chain variable domain of TCR clone 225792 (TRAV13-2, TRAJ53)
CAENANSGGRKYKLTF

SEQ ID NO: 451584 - protein, 19 aa, Homo sapiens
  CDR3 for beta chain variable domain of TCR clone 225792 (TRBV28, TRBJ2-7)
CASSYSGTSRLGWVYEQYF

SEQ ID NO: 451585 - protein, 14 aa, Homo sapiens
  CDR3 for alpha chain variable domain of TCR clone 225793 (TRAV4, TRAJ17)
CLVGDMAAGNKLTF

SEQ ID NO: 451586 - protein, 15 aa, Homo sapiens
  CDR3 for beta chain variable domain of TCR clone 225793 (TRBV5-5, TRBJ1-5)
CASSSTPGSSQPQHF

SEQ ID NO: 451587 - protein, 14 aa, Homo sapiens
  CDR3 for alpha chain variable domain of TCR clone 225794 (TRAV9-2, TRAJ39)
CALYIYNAGTMLTF

SEQ ID NO: 451588 - protein, 16 aa, Homo sapiens
  CDR3 for beta chain variable domain of TCR clone 225794 (TRBV24-1, TRBJ2-3)
CATSDRRQDLTDTQYF

SEQ ID NO: 451589 - protein, 11 aa, Homo sapiens
  CDR3 for alpha chain variable domain of TCR clone 225795 (TRAV1-2, TRAJ40)
CAVPGTYKYIF

SEQ ID NO: 451590 - protein, 14 aa, Homo sapiens
  CDR3 for beta chain variable domain of TCR clone 225795 (TRBV7-3, TRBJ2-1)
CASSLAGGTNEQFF

SEQ ID NO: 451591 - protein, 13 aa, Homo sapiens
  CDR3 for alpha chain variable domain of TCR clone 225796 (TRAV8-6, TRAJ21)
CAVCPSSLNKFYF

SEQ ID NO: 451592 - protein, 14 aa, Homo sapiens
  CDR3 for beta chain variable domain of TCR clone 225796 (TRBV7-9, TRBJ2-5)
CASSLDTAQETQYF

SEQ ID NO: 451593 - protein, 11 aa, Homo sapiens
  CDR3 for alpha chain variable domain of TCR clone 225797 (TRAV2, TRAJ33)
CSVDSNYQLIW

SEQ ID NO: 451594 - protein, 14 aa, Homo sapiens
  CDR3 for beta chain variable domain of TCR clone 225797 (TRBV7-2, TRBJ2-7)
CASSPKTSFYEQYF

SEQ ID NO: 451595 - protein, 13 aa, Homo sapiens
  CDR3 for alpha chain variable domain of TCR clone 225798 (TRAV2, TRAJ12)
CAVGADSSYKLIF

SEQ ID NO: 451596 - protein, 13 aa, Homo sapiens
  CDR3 for beta chain variable domain of TCR clone 225798 (TRBV20-1, TRBJ2-1)
CSARSSPRDDQFF

SEQ ID NO: 451597 - protein, 14 aa, Homo sapiens
  CDR3 for alpha chain variable domain of TCR clone 225799 (TRAV12-2, TRAJ13)
CAVKKTGGYQKVTF

SEQ ID NO: 451598 - protein, 15 aa, Homo sapiens
  CDR3 for beta chain variable domain of TCR clone 225799 (TRBV7-9, TRBJ1-4)
CASSATGGNNEKLFF

SEQ ID NO: 451599 - protein, 14 aa, Homo sapiens
  CDR3 for alpha chain variable domain of TCR clone 225800 (TRAV8-3, TRAJ4)
CAVGASGGYNKLIF

SEQ ID NO: 451600 - protein, 15 aa, Homo sapiens
  CDR3 for beta chain variable domain of TCR clone 225800 (TRBV28, TRBJ1-3)
CASSMGWASGNTIYF

SEQ ID NO: 451601 - protein, 16 aa, Homo sapiens
  CDR3 for alpha chain variable domain of TCR clone 225801 (TRAV38-1, TRAJ37)
CAFTGDGSSNTGKLIS

SEQ ID NO: 451602 - protein, 13 aa, Homo sapiens
  CDR3 for beta chain variable domain of TCR clone 225801 (TRBV12-4, TRBJ2-5)
CASSLFRRETQYF

SEQ ID NO: 451603 - protein, 18 aa, Homo sapiens
  CDR3 for alpha chain variable domain of TCR clone 225802 (TRAV13-1, TRAJ52)
CAAKNPNAGGTSYGKLTF

SEQ ID NO: 451604 - protein, 16 aa, Homo sapiens
  CDR3 for beta chain variable domain of TCR clone 225802 (TRBV7-2, TRBJ2-7)
CASRSQGRRTSSTSGR

SEQ ID NO: 451605 - protein, 13 aa, Homo sapiens
  CDR3 for alpha chain variable domain of TCR clone 225803 (TRAV8-4, TRAJ49)
CAVSDPGGNQFYF

SEQ ID NO: 451606 - protein, 16 aa, Homo sapiens
  CDR3 for beta chain variable domain of TCR clone 225803 (TRBV5-1, TRBJ1-1)
CASSSGGNSLNTEAFF

SEQ ID NO: 451607 - protein, 16 aa, Homo sapiens
  CDR3 for alpha chain variable domain of TCR clone 225804 (TRAV23/DV6, TRAJ9)
CAASIGGNTGGFKTIF

SEQ ID NO: 451608 - protein, 12 aa, Homo sapiens
  CDR3 for beta chain variable domain of TCR clone 225804 (TRBV2, TRBJ2-1)
CAYGPPGNEQFF

SEQ ID NO: 451609 - protein, 13 aa, Homo sapiens
  CDR3 for alpha chain variable domain of TCR clone 225805 (TRAV36/DV7, TRAJ37)
CAVFSSNTGKLIF

SEQ ID NO: 451610 - protein, 13 aa, Homo sapiens
  CDR3 for beta chain variable domain of TCR clone 225805 (TRBV10-3, TRBJ2-5)
CAISESGRGAQYF

SEQ ID NO: 451611 - protein, 13 aa, Homo sapiens
  CDR3 for alpha chain variable domain of TCR clone 225806 (TRAV21, TRAJ57)
CAVTQGGSEKLVF

SEQ ID NO: 451612 - protein, 15 aa, Homo sapiens
  CDR3 for beta chain variable domain of TCR clone 225806 (TRBV27, TRBJ1-4)
CASSPRHATNEKLFF

SEQ ID NO: 451613 - protein, 10 aa, Homo sapiens
  CDR3 for alpha chain variable domain of TCR clone 225807 (TRAV12-3, TRAJ50)
CAMSAMGNLL

SEQ ID NO: 451614 - protein, 13 aa, Homo sapiens
  CDR3 for beta chain variable domain of TCR clone 225807 (TRBV7-3, TRBJ1-1)
CASSQDWGAEAFF

SEQ ID NO: 451615 - protein, 11 aa, Homo sapiens
  CDR3 for alpha chain variable domain of TCR clone 225808 (TRAV2, TRAJ33)
CAVDSNYQLIW

SEQ ID NO: 451616 - protein, 12 aa, Homo sapiens
  CDR3 for beta chain variable domain of TCR clone 225808 (TRBV7-6, TRBJ2-7)
CASSSADSEQYF

SEQ ID NO: 451617 - protein, 16 aa, Homo sapiens
  CDR3 for alpha chain variable domain of TCR clone 225809 (TRAV30, TRAJ24)
CGTEIVDADSWGKFQF

SEQ ID NO: 451618 - protein, 14 aa, Homo sapiens
  CDR3 for beta chain variable domain of TCR clone 225809 (TRBV19, TRBJ2-7)
CASSETGATYEQYF

SEQ ID NO: 451619 - protein, 17 aa, Homo sapiens
  CDR3 for alpha chain variable domain of TCR clone 225810 (TRAV3, TRAJ6)
CAVRDGPRAGGTYIPTF

SEQ ID NO: 451620 - protein, 13 aa, Homo sapiens
  CDR3 for beta chain variable domain of TCR clone 225810 (TRBV27, TRBJ2-1)
CASRTLGVGEQFF

SEQ ID NO: 451621 - protein, 16 aa, Homo sapiens
  CDR3 for alpha chain variable domain of TCR clone 225811 (TRAV30, TRAJ24)
CGIEIVDADSWGKFQF

SEQ ID NO: 451622 - protein, 16 aa, Homo sapiens
  CDR3 for beta chain variable domain of TCR clone 225811 (TRBV7-3, TRBJ2-3)
ELSLMKRMRGADTQYF

SEQ ID NO: 451623 - protein, 13 aa, Homo sapiens
  CDR3 for alpha chain variable domain of TCR clone 225812 (TRAV26-1, TRAJ48)
CIVRVVGDEKLTL

SEQ ID NO: 451624 - protein, 17 aa, Homo sapiens
  CDR3 for beta chain variable domain of TCR clone 225812 (TRBV7-3, TRBJ2-2)
CASSLSGTSGGTGELFF

SEQ ID NO: 451625 - protein, 16 aa, Homo sapiens
  CDR3 for alpha chain variable domain of TCR clone 225813 (TRAV38-2/DV8, TRAJ57)
CAYRSAGQGGSEKRVF

SEQ ID NO: 451626 - protein, 15 aa, Homo sapiens
  CDR3 for beta chain variable domain of TCR clone 225813 (TRBV7-2, TRBJ2-7)
CASSSGLAGRREQYF

SEQ ID NO: 451627 - protein, 17 aa, Homo sapiens
  CDR3 for alpha chain variable domain of TCR clone 225814 (TRAV3, TRAJ6)
CAVRDGPSAGGSYIPTF

SEQ ID NO: 451628 - protein, 13 aa, Homo sapiens
  CDR3 for beta chain variable domain of TCR clone 225814 (TRBV27, TRBJ2-1)
CASRTLGVGEQFF

SEQ ID NO: 451629 - protein, 12 aa, Homo sapiens
  CDR3 for alpha chain variable domain of TCR clone 225815 (TRAV12-3, TRAJ42)
CAPGGTQGNLIF

SEQ ID NO: 451630 - protein, 13 aa, Homo sapiens
  CDR3 for beta chain variable domain of TCR clone 225815 (TRBV5-7, TRBJ2-6)
CASTSSGANVLTF

SEQ ID NO: 451631 - protein, 15 aa, Homo sapiens
  CDR3 for alpha chain variable domain of TCR clone 225816 (TRAV16, TRAJ4)
CALEDPSGVYNKLIF

SEQ ID NO: 451632 - protein, 13 aa, Homo sapiens
  CDR3 for beta chain variable domain of TCR clone 225816 (TRBV7-3, TRBJ2-7)
CASSQAGGYEQYF

SEQ ID NO: 451633 - protein, 11 aa, Homo sapiens
  CDR3 for alpha chain variable domain of TCR clone 225817 (TRAV13-1, TRAJ39)
CASHAGNMLTF

SEQ ID NO: 451634 - protein, 15 aa, Homo sapiens
  CDR3 for beta chain variable domain of TCR clone 225817 (TRBV6-3, TRBJ2-7)
CASSAPGTVFYEQYF

SEQ ID NO: 451635 - protein, 20 aa, Homo sapiens
  CDR3 for alpha chain variable domain of TCR clone 225818 (TRAV1-2, TRAJ34)
LLKELQMKDSASPNTDKLIF

SEQ ID NO: 451636 - protein, 14 aa, Homo sapiens
  CDR3 for beta chain variable domain of TCR clone 225818 (TRBV18, TRBJ2-7)
CASSPRGGAYEQYF

SEQ ID NO: 451637 - protein, 13 aa, Homo sapiens
  CDR3 for alpha chain variable domain of TCR clone 225819 (TRAV27, TRAJ57)
CRSAQGGSEKLVF

SEQ ID NO: 451638 - protein, 15 aa, Homo sapiens
  CDR3 for beta chain variable domain of TCR clone 225819 (TRBV12-4, TRBJ2-5)
CASSPPTGLQETQYF

SEQ ID NO: 451639 - protein, 12 aa, Homo sapiens
  CDR3 for alpha chain variable domain of TCR clone 225820 (TRAV13-1, TRAJ53)
AASGGSNYKLTF

SEQ ID NO: 451640 - protein, 12 aa, Homo sapiens
  CDR3 for beta chain variable domain of TCR clone 225820 (TRBV5-1, TRBJ2-1)
QPAEGPLNEQFF

SEQ ID NO: 451641 - protein, 13 aa, Homo sapiens
  CDR3 for alpha chain variable domain of TCR clone 225821 (TRAV40, TRAJ41)
CLLGAQSGYALNF

SEQ ID NO: 451642 - protein, 14 aa, Homo sapiens
  CDR3 for beta chain variable domain of TCR clone 225821 (TRBV11-2, TRBJ2-7)
CASSSTGEGYEQYF

SEQ ID NO: 451643 - protein, 12 aa, Homo sapiens
  CDR3 for alpha chain variable domain of TCR clone 225822 (TRAV21, TRAJ33)
CAKMDSNYQLIW

SEQ ID NO: 451644 - protein, 17 aa, Homo sapiens
  CDR3 for beta chain variable domain of TCR clone 225822 (TRBV28, TRBJ2-1)
CASSFPLTSGKANEQFF

SEQ ID NO: 451645 - protein, 16 aa, Homo sapiens
  CDR3 for alpha chain variable domain of TCR clone 225823 (TRAV3, TRAJ37)
CAVRVRGSGNTGKLIF

SEQ ID NO: 451646 - protein, 13 aa, Homo sapiens
  CDR3 for beta chain variable domain of TCR clone 225823 (TRBV14, TRBJ2-1)
CASSLDRRNEQFF

SEQ ID NO: 451647 - protein, 18 aa, Homo sapiens
  CDR3 for alpha chain variable domain of TCR clone 225824 (TRAV12-3, TRAJ52)
CAMSVGGAGGTSYGKLTF

SEQ ID NO: 451648 - protein, 13 aa, Homo sapiens
  CDR3 for beta chain variable domain of TCR clone 225824 (TRBV19, TRBJ1-2)
CASSQGQVYGYTF

SEQ ID NO: 451649 - protein, 16 aa, Homo sapiens
  CDR3 for alpha chain variable domain of TCR clone 225825 (TRAV35, TRAJ20)
CWADPSSGFNEYKLSF

SEQ ID NO: 451650 - protein, 16 aa, Homo sapiens
  CDR3 for beta chain variable domain of TCR clone 225825 (TRBV4-3, TRBJ1-6)
CASSAQPGGEGSPLHF

SEQ ID NO: 451651 - protein, 14 aa, Homo sapiens
  CDR3 for alpha chain variable domain of TCR clone 225826 (TRAV13-1, TRAJ40)
CAASMTSGTYKYIF

SEQ ID NO: 451652 - protein, 15 aa, Homo sapiens
  CDR3 for beta chain variable domain of TCR clone 225826 (TRBV5-7, TRBJ1-5)
CASSYGKLWDQPQHF

SEQ ID NO: 451653 - protein, 13 aa, Homo sapiens
  CDR3 for alpha chain variable domain of TCR clone 225827 (TRAV35, TRAJ42)
CAGFPGSQGYLIF

SEQ ID NO: 451654 - protein, 16 aa, Homo sapiens
  CDR3 for beta chain variable domain of TCR clone 225827 (TRBV19, TRBJ2-2)
CASSFPGQGLAGELFF

SEQ ID NO: 451655 - protein, 13 aa, Homo sapiens
  CDR3 for alpha chain variable domain of TCR clone 225828 (TRAV12-3, TRAJ50)
CARGGTSYDKVIF

SEQ ID NO: 451656 - protein, 18 aa, Homo sapiens
  CDR3 for beta chain variable domain of TCR clone 225828 (TRBV20-1, TRBJ2-3)
CSASGLAGGPGTTDTQYF

SEQ ID NO: 451657 - protein, 15 aa, Homo sapiens
  CDR3 for alpha chain variable domain of TCR clone 225829 (TRAV17, TRAJ57)
CATGPSQGGSEKLVF

SEQ ID NO: 451658 - protein, 15 aa, Homo sapiens
  CDR3 for beta chain variable domain of TCR clone 225829 (TRBV6-3, TRBJ2-7)
CASSSPGTVFYEQYL

SEQ ID NO: 451659 - protein, 14 aa, Homo sapiens
  CDR3 for alpha chain variable domain of TCR clone 225830 (TRAV29/DV5, TRAJ36)
CAARRKTGANNIFF

SEQ ID NO: 451660 - protein, 12 aa, Homo sapiens
  CDR3 for beta chain variable domain of TCR clone 225830 (TRBV28, TRBJ2-7)
CASTGNHYEQYF

SEQ ID NO: 451661 - protein, 14 aa, Homo sapiens
  CDR3 for alpha chain variable domain of TCR clone 225831 (TRAV1-2, TRAJ8)
CAVREDTGFQKLVF

SEQ ID NO: 451662 - protein, 16 aa, Homo sapiens
  CDR3 for beta chain variable domain of TCR clone 225831 (TRBV7-2, TRBJ1-3)
CASSRLEASSGNTIYF

SEQ ID NO: 451663 - protein, 14 aa, Homo sapiens
  CDR3 for alpha chain variable domain of TCR clone 225832 (TRAV13-1, TRAJ35)
IAASKGGFGNVLHC

SEQ ID NO: 451664 - protein, 13 aa, Homo sapiens
  CDR3 for beta chain variable domain of TCR clone 225832 (TRBV7-3, TRBJ1-1)
CASSQDWGAEAFF

SEQ ID NO: 451665 - protein, 14 aa, Homo sapiens
  CDR3 for alpha chain variable domain of TCR clone 225833 (TRAV12-2, TRAJ13)
CAVKKTGGYQKVTF

SEQ ID NO: 451666 - protein, 13 aa, Homo sapiens
  CDR3 for beta chain variable domain of TCR clone 225833 (TRBV14, TRBJ1-2)
CASSEDRRYGDTF

SEQ ID NO: 451667 - protein, 14 aa, Homo sapiens
  CDR3 for alpha chain variable domain of TCR clone 225834 (TRAV8-4, TRAJ45)
CASGGGGGADGTTF

SEQ ID NO: 451668 - protein, 20 aa, Homo sapiens
  CDR3 for beta chain variable domain of TCR clone 225834 (TRBV4-3, TRBJ2-3)
CASSPRVEMRASGRPDTQYF

SEQ ID NO: 451669 - protein, 13 aa, Homo sapiens
  CDR3 for alpha chain variable domain of TCR clone 225835 (TRAV21, TRAJ20)
CAVGLRVDYKLSF

SEQ ID NO: 451670 - protein, 18 aa, Homo sapiens
  CDR3 for beta chain variable domain of TCR clone 225835 (TRBV7-6, TRBJ2-1)
CASSPRTSGMSSYNEHFF

SEQ ID NO: 451671 - protein, 13 aa, Homo sapiens
  CDR3 for alpha chain variable domain of TCR clone 225836 (TRAV25, TRAJ30)
CAGRVDRDDKIIF

SEQ ID NO: 451672 - protein, 14 aa, Homo sapiens
  CDR3 for beta chain variable domain of TCR clone 225836 (TRBV2, TRBJ2-3)
CASSEGQNTDTQYF

SEQ ID NO: 451673 - protein, 15 aa, Homo sapiens
  CDR3 for alpha chain variable domain of TCR clone 225837 (TRAV2, TRAJ9)
CAVAALNTGGFKPIF

SEQ ID NO: 451674 - protein, 16 aa, Homo sapiens
  CDR3 for beta chain variable domain of TCR clone 225837 (TRBV6-5, TRBJ2-1)
CASSETLAGHYNEQFF

SEQ ID NO: 451675 - protein, 11 aa, Homo sapiens
  CDR3 for alpha chain variable domain of TCR clone 225838 (TRAV12-3, TRAJ49)
CAMSSGNQFNF

SEQ ID NO: 451676 - protein, 17 aa, Homo sapiens
  CDR3 for beta chain variable domain of TCR clone 225838 (TRBV5-7, TRBJ2-7)
CASSLWRVLAGSYEQYL

SEQ ID NO: 451677 - protein, 14 aa, Homo sapiens
  CDR3 for alpha chain variable domain of TCR clone 225839 (TRAV17, TRAJ54)
CATDAKQGAQKLVF

SEQ ID NO: 451678 - protein, 12 aa, Homo sapiens
  CDR3 for beta chain variable domain of TCR clone 225839 (TRBV7-9, TRBJ2-7)
CASSIKREEQYF

SEQ ID NO: 451679 - protein, 15 aa, Homo sapiens
  CDR3 for alpha chain variable domain of TCR clone 225840 (TRAV34, TRAJ38)
CGADFTPGNNRKLIW

SEQ ID NO: 451680 - protein, 17 aa, Homo sapiens
  CDR3 for beta chain variable domain of TCR clone 225840 (TRBV5-5, TRBJ1-1)
CASSLRFRGLMNTEAFF

SEQ ID NO: 451681 - protein, 13 aa, Homo sapiens
  CDR3 for alpha chain variable domain of TCR clone 225841 (TRAV4, TRAJ22)
CLGGSGSARQLTF

SEQ ID NO: 451682 - protein, 15 aa, Homo sapiens
  CDR3 for beta chain variable domain of TCR clone 225841 (TRBV7-9, TRBJ1-6)
CASSSPGRGKSPLHF

SEQ ID NO: 451683 - protein, 23 aa, Homo sapiens
  CDR3 for alpha chain variable domain of TCR clone 225842 (TRAV26-1, TRAJ38)
CIADNAGNNHIQNPDPAVYQLRD

SEQ ID NO: 451684 - protein, 13 aa, Homo sapiens
  CDR3 for beta chain variable domain of TCR clone 225842 (TRBV12-5, TRBJ2-3)
CASGDRQSDTQYF

SEQ ID NO: 451685 - protein, 14 aa, Homo sapiens
  CDR3 for alpha chain variable domain of TCR clone 225843 (TRAV12-2, TRAJ44)
CAVNPAGTASKLTF

SEQ ID NO: 451686 - protein, 22 aa, Homo sapiens
  CDR3 for beta chain variable domain of TCR clone 225843 (TRBV2, TRBJ2-6)
CASSEVGGAGQRPDFRGRQQAD

SEQ ID NO: 451687 - protein, 14 aa, Homo sapiens
  CDR3 for alpha chain variable domain of TCR clone 225844 (TRAV12-1, TRAJ9)
CVVNKGTGGFKTIF

SEQ ID NO: 451688 - protein, 16 aa, Homo sapiens
  CDR3 for beta chain variable domain of TCR clone 225844 (TRBV4-3, TRBJ2-2)
CASSQDRGSDAGELFF

SEQ ID NO: 451689 - protein, 12 aa, Homo sapiens
  CDR3 for alpha chain variable domain of TCR clone 225845 (TRAV2, TRAJ26)
CAGSPGRLWSEF

SEQ ID NO: 451690 - protein, 16 aa, Homo sapiens
  CDR3 for beta chain variable domain of TCR clone 225845 (TRBV13, TRBJ2-2)
CASSSRTGEHTGELFF

SEQ ID NO: 451691 - protein, 14 aa, Homo sapiens
  CDR3 for alpha chain variable domain of TCR clone 225846 (TRAV26-1, TRAJ34)
YIVRESYNTDKLIF

SEQ ID NO: 451692 - protein, 16 aa, Homo sapiens
  CDR3 for beta chain variable domain of TCR clone 225846 (TRBV10-3, TRBJ2-1)
CAISGVGDGGGGEQFF

SEQ ID NO: 451693 - protein, 14 aa, Homo sapiens
  CDR3 for alpha chain variable domain of TCR clone 225847 (TRAV8-3, TRAJ4)
CAVGGSGGYNKLIF

SEQ ID NO: 451694 - protein, 14 aa, Homo sapiens
  CDR3 for beta chain variable domain of TCR clone 225847 (TRBV11-2, TRBJ2-5)
CASSRTGGIETQYF

SEQ ID NO: 451695 - protein, 13 aa, Homo sapiens
  CDR3 for alpha chain variable domain of TCR clone 225848 (TRAV29/DV5, TRAJ21)
CAASVYNFNKFYF

SEQ ID NO: 451696 - protein, 12 aa, Homo sapiens
  CDR3 for beta chain variable domain of TCR clone 225848 (TRBV2, TRBJ2-1)
GRGLPSYNEQFF

SEQ ID NO: 451697 - protein, 14 aa, Homo sapiens
  CDR3 for alpha chain variable domain of TCR clone 225849 (TRAV26-1, TRAJ38)
CIADNAGNNRKLIW

SEQ ID NO: 451698 - protein, 12 aa, Homo sapiens
  CDR3 for beta chain variable domain of TCR clone 225849 (TRBV7-3, TRBJ2-1)
CASSFINNEQFF

SEQ ID NO: 451699 - protein, 17 aa, Homo sapiens
  CDR3 for alpha chain variable domain of TCR clone 225850 (TRAV3, TRAJ6)
FAVRDGPRAGGSYIPTF

SEQ ID NO: 451700 - protein, 15 aa, Homo sapiens
  CDR3 for beta chain variable domain of TCR clone 225850 (TRBV29-1, TRBJ2-1)
CSGRDRKSSYNEQFF

SEQ ID NO: 451701 - protein, 12 aa, Homo sapiens
  CDR3 for alpha chain variable domain of TCR clone 225851 (TRAV17, TRAJ12)
CATLRSSSKLIL

SEQ ID NO: 451702 - protein, 14 aa, Homo sapiens
  CDR3 for beta chain variable domain of TCR clone 225851 (TRBV19, TRBJ2-1)
CARGARSFQWEQFF

SEQ ID NO: 451703 - protein, 16 aa, Homo sapiens
  CDR3 for alpha chain variable domain of TCR clone 225852 (TRAV2, TRAJ26)
TTVLGPPGDYGQHVVF

SEQ ID NO: 451704 - protein, 17 aa, Homo sapiens
  CDR3 for beta chain variable domain of TCR clone 225852 (TRBV11-2, TRBJ2-1)
CASSLYPPGVEYNEQFF

SEQ ID NO: 451705 - protein, 15 aa, Homo sapiens
  CDR3 for alpha chain variable domain of TCR clone 225853 (TRAV4, TRAJ39)
CLVGPNNNAGNMLTF

SEQ ID NO: 451706 - protein, 15 aa, Homo sapiens
  CDR3 for beta chain variable domain of TCR clone 225853 (TRBV11-2, TRBJ2-2)
CASRRPGQNTGELFF

SEQ ID NO: 451707 - protein, 11 aa, Homo sapiens
  CDR3 for alpha chain variable domain of TCR clone 225854 (TRAV17, TRAJ36)
CAPTGANNLFF

SEQ ID NO: 451708 - protein, 14 aa, Homo sapiens
  CDR3 for beta chain variable domain of TCR clone 225854 (TRBV12-5, TRBJ2-5)
CASGSRTHQETQYF

SEQ ID NO: 451709 - protein, 11 aa, Homo sapiens
  CDR3 for alpha chain variable domain of TCR clone 225855 (TRAV17, TRAJ31)
CATSNNARLMF

SEQ ID NO: 451710 - protein, 16 aa, Homo sapiens
  CDR3 for beta chain variable domain of TCR clone 225855 (TRBV7-8, TRBJ2-4)
CASSAERTLAKNRQYF

SEQ ID NO: 451711 - protein, 14 aa, Homo sapiens
  CDR3 for alpha chain variable domain of TCR clone 225856 (TRAV23/DV6, TRAJ49)
CAASTPNTGNQFYF

SEQ ID NO: 451712 - protein, 14 aa, Homo sapiens
  CDR3 for beta chain variable domain of TCR clone 225856 (TRBV18, TRBJ2-3)
CTSSETSASDTQYF

SEQ ID NO: 451713 - protein, 11 aa, Homo sapiens
  CDR3 for alpha chain variable domain of TCR clone 225857 (TRAV2, TRAJ13)
CASGGYQKVTF

SEQ ID NO: 451714 - protein, 15 aa, Homo sapiens
  CDR3 for beta chain variable domain of TCR clone 225857 (TRBV3-1, TRBJ2-2)
SASSQDWTRAGELFF

SEQ ID NO: 451715 - protein, 12 aa, Homo sapiens
  CDR3 for alpha chain variable domain of TCR clone 225858 (TRAV8-3, TRAJ26)
CAGDNYGQNFVF

SEQ ID NO: 451716 - protein, 13 aa, Homo sapiens
  CDR3 for beta chain variable domain of TCR clone 225858 (TRBV2, TRBJ2-1)
CASISGGNNEQFF

SEQ ID NO: 451717 - protein, 14 aa, Homo sapiens
  CDR3 for alpha chain variable domain of TCR clone 225859 (TRAV1-2, TRAJ16)
CAVNRFSDGQKLLF

SEQ ID NO: 451718 - protein, 15 aa, Homo sapiens
  CDR3 for beta chain variable domain of TCR clone 225859 (TRBV9, TRBJ1-6)
CAIIVAGTGDSPLHF

SEQ ID NO: 451719 - protein, 11 aa, Homo sapiens
  CDR3 for alpha chain variable domain of TCR clone 225860 (TRAV2, TRAJ13)
CASGGYQKVTF

SEQ ID NO: 451720 - protein, 14 aa, Homo sapiens
  CDR3 for beta chain variable domain of TCR clone 225860 (TRBV7-3, TRBJ2-1)
CASSFAGGTNEQFF

SEQ ID NO: 451721 - protein, 16 aa, Homo sapiens
  CDR3 for alpha chain variable domain of TCR clone 225861 (TRAV12-1, TRAJ12)
CVVNTLLMDSSYRLIF

SEQ ID NO: 451722 - protein, 13 aa, Homo sapiens
  CDR3 for beta chain variable domain of TCR clone 225861 (TRBV11-2, TRBJ2-1)
CASSSEAYNEQFF

SEQ ID NO: 451723 - protein, 14 aa, Homo sapiens
  CDR3 for alpha chain variable domain of TCR clone 225862 (TRAV12-2, TRAJ13)
CAVKKTGGYQKVTF

SEQ ID NO: 451724 - protein, 15 aa, Homo sapiens
  CDR3 for beta chain variable domain of TCR clone 225862 (TRBV20-1, TRBJ2-7)
CSARGRVSGMDEQYL

SEQ ID NO: 451725 - protein, 15 aa, Homo sapiens
  CDR3 for alpha chain variable domain of TCR clone 225863 (TRAV26-1, TRAJ29)
CIVRVEGSGNTPLVF

SEQ ID NO: 451726 - protein, 18 aa, Homo sapiens
  CDR3 for beta chain variable domain of TCR clone 225863 (TRBV12-4, TRBJ1-1)
CTSVQQQDRVVANTEAFF

SEQ ID NO: 451727 - protein, 11 aa, Homo sapiens
  CDR3 for alpha chain variable domain of TCR clone 225864 (TRAV12-1, TRAJ30)
CVVNGQDKIIF

SEQ ID NO: 451728 - protein, 12 aa, Homo sapiens
  CDR3 for beta chain variable domain of TCR clone 225864 (TRBV6-5, TRBJ2-2)
CASKLFTGELFF

SEQ ID NO: 451729 - protein, 12 aa, Homo sapiens
  CDR3 for alpha chain variable domain of TCR clone 225865 (TRAV13-1, TRAJ9)
CASHTGGFKTIF

SEQ ID NO: 451730 - protein, 13 aa, Homo sapiens
  CDR3 for beta chain variable domain of TCR clone 225865 (TRBV12-5, TRBJ2-3)
CASQNRGTDTQYF

SEQ ID NO: 451731 - protein, 12 aa, Homo sapiens
  CDR3 for alpha chain variable domain of TCR clone 225866 (TRAV6, TRAJ41)
CSSPLGRYALNF

SEQ ID NO: 451732 - protein, 13 aa, Homo sapiens
  CDR3 for beta chain variable domain of TCR clone 225866 (TRBV15, TRBJ1-6)
CATSGGLNSTLHF

SEQ ID NO: 451733 - protein, 15 aa, Homo sapiens
  CDR3 for alpha chain variable domain of TCR clone 225867 (TRAV17, TRAJ57)
CATGPSQGGSEKLVF

SEQ ID NO: 451734 - protein, 11 aa, Homo sapiens
  CDR3 for beta chain variable domain of TCR clone 225867 (TRBV29-1, TRBJ2-5)
CGEDRTGTQYF

SEQ ID NO: 451735 - protein, 15 aa, Homo sapiens
  CDR3 for alpha chain variable domain of TCR clone 225868 (TRAV35, TRAJ40)
CAGQLGTSGTFTYIF

SEQ ID NO: 451736 - protein, 14 aa, Homo sapiens
  CDR3 for beta chain variable domain of TCR clone 225868 (TRBV7-3, TRBJ2-1)
CASSLAGGTNEQCF

SEQ ID NO: 451737 - protein, 18 aa, Homo sapiens
  CDR3 for alpha chain variable domain of TCR clone 225869 (TRAV21, TRAJ52)
CAVRPSPAGGTSYGKLTF

SEQ ID NO: 451738 - protein, 17 aa, Homo sapiens
  CDR3 for beta chain variable domain of TCR clone 225869 (TRBV15, TRBJ1-2)
CATSGREIDVVNYGYTF

SEQ ID NO: 451739 - protein, 16 aa, Homo sapiens
  CDR3 for alpha chain variable domain of TCR clone 225870 (TRAV2, TRAJ13)
CAARILGVTRKLPLEL

SEQ ID NO: 451740 - protein, 14 aa, Homo sapiens
  CDR3 for beta chain variable domain of TCR clone 225870 (TRBV19, TRBJ2-1)
CAREVTGARNEQFF

SEQ ID NO: 451741 - protein, 12 aa, Homo sapiens
  CDR3 for alpha chain variable domain of TCR clone 225871 (TRAV16, TRAJ10)
CSRTGGGNKLTF

SEQ ID NO: 451742 - protein, 14 aa, Homo sapiens
  CDR3 for beta chain variable domain of TCR clone 225871 (TRBV20-1, TRBJ2-7)
CSAPELAGVGEQYF

SEQ ID NO: 451743 - protein, 13 aa, Homo sapiens
  CDR3 for alpha chain variable domain of TCR clone 225872 (TRAV2, TRAJ24)
CAVPTDSWGKLQF

SEQ ID NO: 451744 - protein, 14 aa, Homo sapiens
  CDR3 for beta chain variable domain of TCR clone 225872 (TRBV7-8, TRBJ2-3)
CASSFKSSTDTQYF

SEQ ID NO: 451745 - protein, 12 aa, Homo sapiens
  CDR3 for alpha chain variable domain of TCR clone 225873 (TRAV12-3, TRAJ17)
CAMTLTGNKLTF

SEQ ID NO: 451746 - protein, 14 aa, Homo sapiens
  CDR3 for beta chain variable domain of TCR clone 225873 (TRBV2, TRBJ2-1)
CASSEARQGVSEFF

SEQ ID NO: 451747 - protein, 12 aa, Homo sapiens
  CDR3 for alpha chain variable domain of TCR clone 225874 (TRAV17, TRAJ39)
CATDAAGNMLTF

SEQ ID NO: 451748 - protein, 14 aa, Homo sapiens
  CDR3 for beta chain variable domain of TCR clone 225874 (TRBV7-9, TRBJ1-2)
CASSRQGANYGYTF

SEQ ID NO: 451749 - protein, 14 aa, Homo sapiens
  CDR3 for alpha chain variable domain of TCR clone 225875 (TRAV8-6, TRAJ5)
CAVSVDTGRRALTF

SEQ ID NO: 451750 - protein, 11 aa, Homo sapiens
  CDR3 for beta chain variable domain of TCR clone 225875 (TRBV7-3, TRBJ2-5)
CASSLSGTQYF

SEQ ID NO: 451751 - protein, 15 aa, Homo sapiens
  CDR3 for alpha chain variable domain of TCR clone 225876 (TRAV8-3, TRAJ11)
CAVGLLNSGYSTLTL

SEQ ID NO: 451752 - protein, 16 aa, Homo sapiens
  CDR3 for beta chain variable domain of TCR clone 225876 (TRBV7-9, TRBJ1-2)
CASSLGFSSGEDGYAF

SEQ ID NO: 451753 - protein, 12 aa, Homo sapiens
  CDR3 for alpha chain variable domain of TCR clone 225877 (TRAV26-1, TRAJ47)
CIVPPPNIWKQT

SEQ ID NO: 451754 - protein, 15 aa, Homo sapiens
  CDR3 for beta chain variable domain of TCR clone 225877 (TRBV11-2, TRBJ2-1)
CASSSPSTRYNEQFF

SEQ ID NO: 451755 - protein, 13 aa, Homo sapiens
  CDR3 for alpha chain variable domain of TCR clone 225878 (TRAV30, TRAJ24)
CGTVSDSWGKLQF

SEQ ID NO: 451756 - protein, 15 aa, Homo sapiens
  CDR3 for beta chain variable domain of TCR clone 225878 (TRBV25-1, TRBJ1-4)
CASSPGDSTNEKLFF

SEQ ID NO: 451757 - protein, 16 aa, Homo sapiens
  CDR3 for alpha chain variable domain of TCR clone 225879 (TRAV23/DV6, TRAJ12)
CAAIDLGAMDSSYKLI

SEQ ID NO: 451758 - protein, 16 aa, Homo sapiens
  CDR3 for beta chain variable domain of TCR clone 225879 (TRBV7-3, TRBJ2-2)
CASSLKRGTLSGELFF

SEQ ID NO: 451759 - protein, 11 aa, Homo sapiens
  CDR3 for alpha chain variable domain of TCR clone 225880 (TRAV12-3, TRAJ27)
CAMANAGKSTF

SEQ ID NO: 451760 - protein, 14 aa, Homo sapiens
  CDR3 for beta chain variable domain of TCR clone 225880 (TRBV4-1, TRBJ2-2)
CASIPAVNTGELFF

SEQ ID NO: 451761 - protein, 13 aa, Homo sapiens
  CDR3 for alpha chain variable domain of TCR clone 225881 (TRAV8-3, TRAJ42)
CARYGGSQGNLIF

SEQ ID NO: 451762 - protein, 14 aa, Homo sapiens
  CDR3 for beta chain variable domain of TCR clone 225881 (TRBV20-1, TRBJ2-1)
CSALDRGTYNEQFL

SEQ ID NO: 451763 - protein, 16 aa, Homo sapiens
  CDR3 for alpha chain variable domain of TCR clone 225882 (TRAV1-1, TRAJ29)
CAVRSTRNSGNTPLVF

SEQ ID NO: 451764 - protein, 15 aa, Homo sapiens
  CDR3 for beta chain variable domain of TCR clone 225882 (TRBV5-1, TRBJ2-7)
CASSLDLTSSYEQYF

SEQ ID NO: 451765 - protein, 15 aa, Homo sapiens
  CDR3 for alpha chain variable domain of TCR clone 225883 (TRAV26-1, TRAJ22)
CIVRVSFWFCNATAL

SEQ ID NO: 451766 - protein, 14 aa, Homo sapiens
  CDR3 for beta chain variable domain of TCR clone 225883 (TRBV2, TRBJ1-5)
CASSENRGGQPQHF

SEQ ID NO: 451767 - protein, 16 aa, Homo sapiens
  CDR3 for alpha chain variable domain of TCR clone 225884 (TRAV27, TRAJ52)
CAGAGAGGTSSGKLTF

SEQ ID NO: 451768 - protein, 17 aa, Homo sapiens
  CDR3 for beta chain variable domain of TCR clone 225884 (TRBV24-1, TRBJ2-3)
CATSDLPSGEDTDTQYF

SEQ ID NO: 451769 - protein, 16 aa, Homo sapiens
  CDR3 for alpha chain variable domain of TCR clone 225885 (TRAV30, TRAJ24)
CGTEIVDADSWGKFQF

SEQ ID NO: 451770 - protein, 20 aa, Homo sapiens
  CDR3 for beta chain variable domain of TCR clone 225885 (TRBV12-5, TRBJ2-5)
CASGPRTSGNQETSTSGQAR

SEQ ID NO: 451771 - protein, 12 aa, Homo sapiens
  CDR3 for alpha chain variable domain of TCR clone 225886 (TRAV9-2, TRAJ26)
CALRGYGQNSVF

SEQ ID NO: 451772 - protein, 12 aa, Homo sapiens
  CDR3 for beta chain variable domain of TCR clone 225886 (TRBV29-1, TRBJ2-3)
CSVTGGADTQYF

SEQ ID NO: 451773 - protein, 12 aa, Homo sapiens
  CDR3 for alpha chain variable domain of TCR clone 225887 (TRAV21, TRAJ8)
CAVNTGFQKLVL

SEQ ID NO: 451774 - protein, 13 aa, Homo sapiens
  CDR3 for beta chain variable domain of TCR clone 225887 (TRBV6-3, TRBJ2-1)
CASSYDNYNEQFF

SEQ ID NO: 451775 - protein, 17 aa, Homo sapiens
  CDR3 for alpha chain variable domain of TCR clone 225888 (TRAV4, TRAJ18)
CLVGARSVGSTLGRLYF

SEQ ID NO: 451776 - protein, 16 aa, Homo sapiens
  CDR3 for beta chain variable domain of TCR clone 225888 (TRBV19, TRBJ2-1)
CASSKAGPSSYNEQFF

SEQ ID NO: 451777 - protein, 12 aa, Homo sapiens
  CDR3 for alpha chain variable domain of TCR clone 225889 (TRAV12-1, TRAJ34)
CVVAGATDKLIF

SEQ ID NO: 451778 - protein, 13 aa, Homo sapiens
  CDR3 for beta chain variable domain of TCR clone 225889 (TRBV20-1, TRBJ2-7)
CSARWGYNYEQYF

SEQ ID NO: 451779 - protein, 15 aa, Homo sapiens
  CDR3 for alpha chain variable domain of TCR clone 225890 (TRAV25, TRAJ23)
CALAPNYNQGGKLLF

SEQ ID NO: 451780 - protein, 13 aa, Homo sapiens
  CDR3 for beta chain variable domain of TCR clone 225890 (TRBV11-3, TRBJ1-1)
CASSWDGNTEAFF

SEQ ID NO: 451781 - protein, 16 aa, Homo sapiens
  CDR3 for alpha chain variable domain of TCR clone 225891 (TRAV9-2, TRAJ10)
CALSEGGTGGGNKLTF

SEQ ID NO: 451782 - protein, 12 aa, Homo sapiens
  CDR3 for beta chain variable domain of TCR clone 225891 (TRBV12-4, TRBJ1-3)
CASSFSGNTIYF

SEQ ID NO: 451783 - protein, 13 aa, Homo sapiens
  CDR3 for alpha chain variable domain of TCR clone 225892 (TRAV3, TRAJ21)
CAVREPDFNKVYF

SEQ ID NO: 451784 - protein, 14 aa, Homo sapiens
  CDR3 for beta chain variable domain of TCR clone 225892 (TRBV20-1, TRBJ2-3)
CSARGGTSTDTQYF

SEQ ID NO: 451785 - protein, 14 aa, Homo sapiens
  CDR3 for alpha chain variable domain of TCR clone 225893 (TRAV8-4, TRAJ9)
CAVRINTGGFKTIF

SEQ ID NO: 451786 - protein, 16 aa, Homo sapiens
  CDR3 for beta chain variable domain of TCR clone 225893 (TRBV7-2, TRBJ2-5)
CASSPFPTGGEETQYF

SEQ ID NO: 451787 - protein, 16 aa, Homo sapiens
  CDR3 for alpha chain variable domain of TCR clone 225894 (TRAV3, TRAJ37)
FAVRGKGSGNTGKLIF

SEQ ID NO: 451788 - protein, 21 aa, Homo sapiens
  CDR3 for beta chain variable domain of TCR clone 225894 (TRBV15, TRBJ2-1)
AWGTQPCTCVPPAEVDTARFF

SEQ ID NO: 451789 - protein, 14 aa, Homo sapiens
  CDR3 for alpha chain variable domain of TCR clone 225895 (TRAV12-2, TRAJ13)
CAVKKTGGYQKVTF

SEQ ID NO: 451790 - protein, 16 aa, Homo sapiens
  CDR3 for beta chain variable domain of TCR clone 225895 (TRBV12-4, TRBJ1-5)
CASSSGTRGSNQPQHF

SEQ ID NO: 451791 - protein, 11 aa, Homo sapiens
  CDR3 for alpha chain variable domain of TCR clone 225896 (TRAV12-2, TRAJ39)
CAVNNMLTFGG

SEQ ID NO: 451792 - protein, 18 aa, Homo sapiens
  CDR3 for beta chain variable domain of TCR clone 225896 (TRBV7-3, TRBJ2-1)
CASSLTLASGRAIVSSSS

SEQ ID NO: 451793 - protein, 14 aa, Homo sapiens
  CDR3 for alpha chain variable domain of TCR clone 225897 (TRAV1-2, TRAJ8)
CAVREDTGFQKLVF

SEQ ID NO: 451794 - protein, 15 aa, Homo sapiens
  CDR3 for beta chain variable domain of TCR clone 225897 (TRBV28, TRBJ2-1)
CVSSIIAGGRSEQFF

SEQ ID NO: 451795 - protein, 12 aa, Homo sapiens
  CDR3 for alpha chain variable domain of TCR clone 225898 (TRAV23/DV6, TRAJ30)
CAASKGDDNIIF

SEQ ID NO: 451796 - protein, 12 aa, Homo sapiens
  CDR3 for beta chain variable domain of TCR clone 225898 (TRBV7-9, TRBJ1-4)
CASSTDREKLFF

SEQ ID NO: 451797 - protein, 12 aa, Homo sapiens
  CDR3 for alpha chain variable domain of TCR clone 225899 (TRAV2, TRAJ26)
CAVGEYGQNFVF

SEQ ID NO: 451798 - protein, 13 aa, Homo sapiens
  CDR3 for beta chain variable domain of TCR clone 225899 (TRBV10-3, TRBJ2-7)
CASKLAVKYEQYF

SEQ ID NO: 451799 - protein, 14 aa, Homo sapiens
  CDR3 for alpha chain variable domain of TCR clone 225900 (TRAV12-2, TRAJ44)
CAVNPAGTASKLTF

SEQ ID NO: 451800 - protein, 15 aa, Homo sapiens
  CDR3 for beta chain variable domain of TCR clone 225900 (TRBV7-3, TRBJ2-2)
CASSETGQGTGELFF

SEQ ID NO: 451801 - protein, 15 aa, Homo sapiens
  CDR3 for alpha chain variable domain of TCR clone 225901 (TRAV9-2, TRAJ56)
CALSDVDGANSKLNF

SEQ ID NO: 451802 - protein, 15 aa, Homo sapiens
  CDR3 for beta chain variable domain of TCR clone 225901 (TRBV7-2, TRBJ2-1)
CASSSGLAGGNEQFF

SEQ ID NO: 451803 - protein, 13 aa, Homo sapiens
  CDR3 for alpha chain variable domain of TCR clone 225902 (TRAV21, TRAJ27)
CAARPGNAGKSTF

SEQ ID NO: 451804 - protein, 12 aa, Homo sapiens
  CDR3 for beta chain variable domain of TCR clone 225902 (TRBV7-9, TRBJ1-6)
CASSASESPLHF

SEQ ID NO: 451805 - protein, 16 aa, Homo sapiens
  CDR3 for alpha chain variable domain of TCR clone 225903 (TRAV20, TRAJ10)
CAVLRGLSGGGNKLTF

SEQ ID NO: 451806 - protein, 14 aa, Homo sapiens
  CDR3 for beta chain variable domain of TCR clone 225903 (TRBV19, TRBJ1-5)
CASRAPDSFLSQHF

SEQ ID NO: 451807 - protein, 12 aa, Homo sapiens
  CDR3 for alpha chain variable domain of TCR clone 225904 (TRAV9-2, TRAJ36)
CALKKGANNLFF

SEQ ID NO: 451808 - protein, 14 aa, Homo sapiens
  CDR3 for beta chain variable domain of TCR clone 225904 (TRBV19, TRBJ2-7)
CASSMGQGAIEQYF

SEQ ID NO: 451809 - protein, 12 aa, Homo sapiens
  CDR3 for alpha chain variable domain of TCR clone 225905 (TRAV29/DV5, TRAJ49)
CAATDTGNQFYF

SEQ ID NO: 451810 - protein, 14 aa, Homo sapiens
  CDR3 for beta chain variable domain of TCR clone 225905 (TRBV11-3, TRBJ2-1)
CASSATTSGSIQFF

SEQ ID NO: 451811 - protein, 13 aa, Homo sapiens
  CDR3 for alpha chain variable domain of TCR clone 225906 (TRAV2, TRAJ40)
CAVVTAGTYKYIF

SEQ ID NO: 451812 - protein, 15 aa, Homo sapiens
  CDR3 for beta chain variable domain of TCR clone 225906 (TRBV11-3, TRBJ2-3)
CASLKDGREGDTHYF

SEQ ID NO: 451813 - protein, 11 aa, Homo sapiens
  CDR3 for alpha chain variable domain of TCR clone 225907 (TRAV17, TRAJ9)
CATTGGFKTIF

SEQ ID NO: 451814 - protein, 14 aa, Homo sapiens
  CDR3 for beta chain variable domain of TCR clone 225907 (TRBV5-5, TRBJ2-7)
CASSLGQGTYEQYF

SEQ ID NO: 451815 - protein, 12 aa, Homo sapiens
  CDR3 for alpha chain variable domain of TCR clone 225908 (TRAV12-2, TRAJ10)
WGVTGGGNKLTF

SEQ ID NO: 451816 - protein, 16 aa, Homo sapiens
  CDR3 for beta chain variable domain of TCR clone 225908 (TRBV24-1, TRBJ2-3)
CATSDRRRDLKDTQYF

SEQ ID NO: 451817 - protein, 15 aa, Homo sapiens
  CDR3 for alpha chain variable domain of TCR clone 225909 (TRAV8-3, TRAJ40)
CAVGPYTSGTYKYIF

SEQ ID NO: 451818 - protein, 16 aa, Homo sapiens
  CDR3 for beta chain variable domain of TCR clone 225909 (TRBV7-2, TRBJ2-7)
CASSLDPGGGSGEQYS

SEQ ID NO: 451819 - protein, 15 aa, Homo sapiens
  CDR3 for alpha chain variable domain of TCR clone 225910 (TRAV8-1, TRAJ6)
CAVNANPGGSYIPTF

SEQ ID NO: 451820 - protein, 15 aa, Homo sapiens
  CDR3 for beta chain variable domain of TCR clone 225910 (TRBV5-1, TRBJ2-1)
CVSSPPRAPYNEQFF

SEQ ID NO: 451821 - protein, 14 aa, Homo sapiens
  CDR3 for alpha chain variable domain of TCR clone 225911 (TRAV38-1, TRAJ45)
CASHSVGGADGLTL

SEQ ID NO: 451822 - protein, 13 aa, Homo sapiens
  CDR3 for beta chain variable domain of TCR clone 225911 (TRBV10-3, TRBJ1-2)
CAISERDSYGYTF

SEQ ID NO: 451823 - protein, 12 aa, Homo sapiens
  CDR3 for alpha chain variable domain of TCR clone 225912 (TRAV8-3, TRAJ26)
CAGDNYGQNFFF

SEQ ID NO: 451824 - protein, 14 aa, Homo sapiens
  CDR3 for beta chain variable domain of TCR clone 225912 (TRBV6-3, TRBJ2-5)
CASSYSLREKTQYF

SEQ ID NO: 451825 - protein, 16 aa, Homo sapiens
  CDR3 for alpha chain variable domain of TCR clone 225913 (TRAV30, TRAJ24)
CGTEIVDADSCGKFQF

SEQ ID NO: 451826 - protein, 16 aa, Homo sapiens
  CDR3 for beta chain variable domain of TCR clone 225913 (TRBV6-1, TRBJ2-1)
CASILRQGSSYNEQFF

SEQ ID NO: 451827 - protein, 12 aa, Homo sapiens
  CDR3 for alpha chain variable domain of TCR clone 225914 (TRAV17, TRAJ39)
CATGAAGNMLTF

SEQ ID NO: 451828 - protein, 14 aa, Homo sapiens
  CDR3 for beta chain variable domain of TCR clone 225914 (TRBV7-9, TRBJ1-2)
CAGSGQGANYGYTF

SEQ ID NO: 451829 - protein, 17 aa, Homo sapiens
  CDR3 for alpha chain variable domain of TCR clone 225915 (TRAV3, TRAJ6)
CAVRDGPRAGGSYIPTF

SEQ ID NO: 451830 - protein, 16 aa, Homo sapiens
  CDR3 for beta chain variable domain of TCR clone 225915 (TRBV7-9, TRBJ1-3)
CASSQTSGLRMGTIYF

SEQ ID NO: 451831 - protein, 13 aa, Homo sapiens
  CDR3 for alpha chain variable domain of TCR clone 225916 (TRAV17, TRAJ54)
CAMSWGGAQKLVF

SEQ ID NO: 451832 - protein, 15 aa, Homo sapiens
  CDR3 for beta chain variable domain of TCR clone 225916 (TRBV4-3, TRBJ2-3)
CASSPSLLSTDTQYF

SEQ ID NO: 451833 - protein, 14 aa, Homo sapiens
  CDR3 for alpha chain variable domain of TCR clone 225917 (TRAV8-3, TRAJ17)
CAVGAQTAGNKLTF

SEQ ID NO: 451834 - protein, 11 aa, Homo sapiens
  CDR3 for beta chain variable domain of TCR clone 225917 (TRBV29-1, TRBJ1-4)
CSVSSGERLFF

SEQ ID NO: 451835 - protein, 12 aa, Homo sapiens
  CDR3 for alpha chain variable domain of TCR clone 225918 (TRAV21, TRAJ31)
CAGCGNNARLMF

SEQ ID NO: 451836 - protein, 16 aa, Homo sapiens
  CDR3 for beta chain variable domain of TCR clone 225918 (TRBV27, TRBJ2-5)
CASSYGPGGQKETQYF

SEQ ID NO: 451837 - protein, 17 aa, Homo sapiens
  CDR3 for alpha chain variable domain of TCR clone 225919 (TRAV12-1, TRAJ4)
CVVNPFSGGYNSWFLEQ

SEQ ID NO: 451838 - protein, 13 aa, Homo sapiens
  CDR3 for beta chain variable domain of TCR clone 225919 (TRBV20-1, TRBJ1-2)
CSARGTADYGYTF

SEQ ID NO: 451839 - protein, 14 aa, Homo sapiens
  CDR3 for alpha chain variable domain of TCR clone 225920 (TRAV12-2, TRAJ44)
CAVNPAGTASNLTF

SEQ ID NO: 451840 - protein, 16 aa, Homo sapiens
  CDR3 for beta chain variable domain of TCR clone 225920 (TRBV15, TRBJ1-2)
CATSRGPRTGGGGYTF

SEQ ID NO: 451841 - protein, 16 aa, Homo sapiens
  CDR3 for alpha chain variable domain of TCR clone 225921 (TRAV4, TRAJ18)
CCVLLIGCSTLGRLYF

SEQ ID NO: 451842 - protein, 13 aa, Homo sapiens
  CDR3 for beta chain variable domain of TCR clone 225921 (TRBV7-9, TRBJ1-2)
CASSLKQNYGYTF

SEQ ID NO: 451843 - protein, 14 aa, Homo sapiens
  CDR3 for alpha chain variable domain of TCR clone 225922 (TRAV1-2, TRAJ16)
CAVNRFSDGQKLLF

SEQ ID NO: 451844 - protein, 15 aa, Homo sapiens
  CDR3 for beta chain variable domain of TCR clone 225922 (TRBV7-3, TRBJ2-5)
CASSLIAGGQETQYF

SEQ ID NO: 451845 - protein, 18 aa, Homo sapiens
  CDR3 for alpha chain variable domain of TCR clone 225923 (TRAV21, TRAJ52)
CAVRPSPAGGTSYGKLTF

SEQ ID NO: 451846 - protein, 17 aa, Homo sapiens
  CDR3 for beta chain variable domain of TCR clone 225923 (TRBV4-1, TRBJ2-1)
CASSQGRGGGLYNEQFF

SEQ ID NO: 451847 - protein, 12 aa, Homo sapiens
  CDR3 for alpha chain variable domain of TCR clone 225924 (TRAV20, TRAJ20)
CAVRFNDYKLSF

SEQ ID NO: 451848 - protein, 17 aa, Homo sapiens
  CDR3 for beta chain variable domain of TCR clone 225924 (TRBV11-2, TRBJ2-1)
CASSLYPPGVEYNEQFF

SEQ ID NO: 451849 - protein, 13 aa, Homo sapiens
  CDR3 for alpha chain variable domain of TCR clone 225925 (TRAV3, TRAJ15)
CAVRDEAGTALIF

SEQ ID NO: 451850 - protein, 15 aa, Homo sapiens
  CDR3 for beta chain variable domain of TCR clone 225925 (TRBV11-1, TRBJ2-7)
CASSLNYGASYEQYF

SEQ ID NO: 451851 - protein, 10 aa, Homo sapiens
  CDR3 for alpha chain variable domain of TCR clone 225926 (TRAV27, TRAJ43)
CAGANNDMRF

SEQ ID NO: 451852 - protein, 16 aa, Homo sapiens
  CDR3 for beta chain variable domain of TCR clone 225926 (TRBV5-4, TRBJ2-3)
CASQQPGAGGADTQYF

SEQ ID NO: 451853 - protein, 17 aa, Homo sapiens
  CDR3 for alpha chain variable domain of TCR clone 225927 (TRAV26-1, TRAJ28)
CIVRVPDSGAGSYQLTV

SEQ ID NO: 451854 - protein, 17 aa, Homo sapiens
  CDR3 for beta chain variable domain of TCR clone 225927 (TRBV28, TRBJ2-7)
CASSPLPAGGKSYEQYF

SEQ ID NO: 451855 - protein, 12 aa, Homo sapiens
  CDR3 for alpha chain variable domain of TCR clone 225928 (TRAV1-1, TRAJ8)
CAGGTGFQKLVF

SEQ ID NO: 451856 - protein, 15 aa, Homo sapiens
  CDR3 for beta chain variable domain of TCR clone 225928 (TRBV7-2, TRBJ1-2)
CASSITWTGNYGYTF

SEQ ID NO: 451857 - protein, 13 aa, Homo sapiens
  CDR3 for alpha chain variable domain of TCR clone 225929 (TRAV8-3, TRAJ44)
CAVVPGTASKLSF

SEQ ID NO: 451858 - protein, 14 aa, Homo sapiens
  CDR3 for beta chain variable domain of TCR clone 225929 (TRBV11-2, TRBJ2-3)
CASRRLARTDTQYF

SEQ ID NO: 451859 - protein, 12 aa, Homo sapiens
  CDR3 for alpha chain variable domain of TCR clone 225930 (TRAV21, TRAJ33)
CAKMDSNYQVIW

SEQ ID NO: 451860 - protein, 17 aa, Homo sapiens
  CDR3 for beta chain variable domain of TCR clone 225930 (TRBV20-1, TRBJ2-2)
CSASGSGQGGLTGELFF

SEQ ID NO: 451861 - protein, 13 aa, Homo sapiens
  CDR3 for alpha chain variable domain of TCR clone 225931 (TRAV8-3, TRAJ36)
CAVGATGANNLFF

SEQ ID NO: 451862 - protein, 12 aa, Homo sapiens
  CDR3 for beta chain variable domain of TCR clone 225931 (TRBV12-4, TRBJ2-1)
CASSLVRVEQFF

SEQ ID NO: 451863 - protein, 11 aa, Homo sapiens
  CDR3 for alpha chain variable domain of TCR clone 225932 (TRAV3, TRAJ21)
CAVGNFNKFYF

SEQ ID NO: 451864 - protein, 14 aa, Homo sapiens
  CDR3 for beta chain variable domain of TCR clone 225932 (TRBV29-1, TRBJ2-2)
CSGRGSGNTGELVF

SEQ ID NO: 451865 - protein, 14 aa, Homo sapiens
  CDR3 for alpha chain variable domain of TCR clone 225933 (TRAV3, TRAJ8)
CAVSLNTGFQKLVF

SEQ ID NO: 451866 - protein, 19 aa, Homo sapiens
  CDR3 for beta chain variable domain of TCR clone 225933 (TRBV7-9, TRBJ2-1)
CASSHNRGALLRSYNEQFF

SEQ ID NO: 451867 - protein, 13 aa, Homo sapiens
  CDR3 for alpha chain variable domain of TCR clone 225934 (TRAV23/DV6, TRAJ5)
CAARAAGRRALAF

SEQ ID NO: 451868 - protein, 12 aa, Homo sapiens
  CDR3 for beta chain variable domain of TCR clone 225934 (TRBV7-9, TRBJ2-7)
CASSIKREEQYF

SEQ ID NO: 451869 - protein, 14 aa, Homo sapiens
  CDR3 for alpha chain variable domain of TCR clone 225935 (TRAV12-3, TRAJ9)
CAMSPNTGGFKTIF

SEQ ID NO: 451870 - protein, 14 aa, Homo sapiens
  CDR3 for beta chain variable domain of TCR clone 225935 (TRBV19, TRBJ2-1)
CASSRLASINEQFF

SEQ ID NO: 451871 - protein, 15 aa, Homo sapiens
  CDR3 for alpha chain variable domain of TCR clone 225936 (TRAV17, TRAJ54)
CATEKLGQGGQKLVF

SEQ ID NO: 451872 - protein, 16 aa, Homo sapiens
  CDR3 for beta chain variable domain of TCR clone 225936 (TRBV9, TRBJ1-2)
CASSVEEKVSPYGYTF

SEQ ID NO: 451873 - protein, 16 aa, Homo sapiens
  CDR3 for alpha chain variable domain of TCR clone 225937 (TRAV13-1, TRAJ48)
CAASIFGNFGNEKLTF

SEQ ID NO: 451874 - protein, 12 aa, Homo sapiens
  CDR3 for beta chain variable domain of TCR clone 225937 (TRBV14, TRBJ2-4)
CASSNLKSIQCF

SEQ ID NO: 451875 - protein, 13 aa, Homo sapiens
  CDR3 for alpha chain variable domain of TCR clone 225938 (TRAV12-1, TRAJ34)
CVVTGYNTDKLSL

SEQ ID NO: 451876 - protein, 13 aa, Homo sapiens
  CDR3 for beta chain variable domain of TCR clone 225938 (TRBV28, TRBJ2-7)
CASKAGGVYEQYF

SEQ ID NO: 451877 - protein, 15 aa, Homo sapiens
  CDR3 for alpha chain variable domain of TCR clone 225939 (TRAV1-1, TRAJ5)
CAVRHMDTGRRARTF

SEQ ID NO: 451878 - protein, 17 aa, Homo sapiens
  CDR3 for beta chain variable domain of TCR clone 225939 (TRBV28, TRBJ2-7)
CASSPGLAGGDSSEQYF

SEQ ID NO: 451879 - protein, 13 aa, Homo sapiens
  CDR3 for alpha chain variable domain of TCR clone 225940 (TRAV25, TRAJ26)
CAGMDNYGQNFVL

SEQ ID NO: 451880 - protein, 15 aa, Homo sapiens
  CDR3 for beta chain variable domain of TCR clone 225940 (TRBV10-3, TRBJ2-1)
CAIRNGTSGHNEQFF

SEQ ID NO: 451881 - protein, 14 aa, Homo sapiens
  CDR3 for alpha chain variable domain of TCR clone 225941 (TRAV13-2, TRAJ32)
CAENYGVATNKLIF

SEQ ID NO: 451882 - protein, 17 aa, Homo sapiens
  CDR3 for beta chain variable domain of TCR clone 225941 (TRBV7-8, TRBJ2-6)
CASSAGTGGAGANVLTF

SEQ ID NO: 451883 - protein, 11 aa, Homo sapiens
  CDR3 for alpha chain variable domain of TCR clone 225942 (TRAV21, TRAJ48)
CAVDGNEKLTF

SEQ ID NO: 451884 - protein, 18 aa, Homo sapiens
  CDR3 for beta chain variable domain of TCR clone 225942 (TRBV12-4, TRBJ1-5)
CTSVPAVPVPGVAISQHF

SEQ ID NO: 451885 - protein, 12 aa, Homo sapiens
  CDR3 for alpha chain variable domain of TCR clone 225943 (TRAV17, TRAJ4)
CATDGGYNKLIF

SEQ ID NO: 451886 - protein, 11 aa, Homo sapiens
  CDR3 for beta chain variable domain of TCR clone 225943 (TRBV29-1, TRBJ2-5)
CSEDRTGTQYF

SEQ ID NO: 451887 - protein, 16 aa, Homo sapiens
  CDR3 for alpha chain variable domain of TCR clone 225944 (TRAV14/DV4, TRAJ53)
CAMREGGGGSNYKLTF

SEQ ID NO: 451888 - protein, 12 aa, Homo sapiens
  CDR3 for beta chain variable domain of TCR clone 225944 (TRBV19, TRBJ2-1)
CASSMQDTEQFF

SEQ ID NO: 451889 - protein, 15 aa, Homo sapiens
  CDR3 for alpha chain variable domain of TCR clone 225945 (TRAV26-1, TRAJ29)
CIVRVEGSGNTPLVF

SEQ ID NO: 451890 - protein, 15 aa, Homo sapiens
  CDR3 for beta chain variable domain of TCR clone 225945 (TRBV4-1, TRBJ2-1)
CASSQVLAGGDEQFF

SEQ ID NO: 451891 - protein, 12 aa, Homo sapiens
  CDR3 for alpha chain variable domain of TCR clone 225946 (TRAV12-3, TRAJ17)
CAMTLTGNKLTF

SEQ ID NO: 451892 - protein, 14 aa, Homo sapiens
  CDR3 for beta chain variable domain of TCR clone 225946 (TRBV7-6, TRBJ2-3)
CASSLETVTDTQYF

SEQ ID NO: 451893 - protein, 15 aa, Homo sapiens
  CDR3 for alpha chain variable domain of TCR clone 225947 (TRAV34, TRAJ38)
CGADFTPCNNRKLIW

SEQ ID NO: 451894 - protein, 16 aa, Homo sapiens
  CDR3 for beta chain variable domain of TCR clone 225947 (TRBV4-1, TRBJ2-1)
CASSQQGAWESNEQFF

SEQ ID NO: 451895 - protein, 14 aa, Homo sapiens
  CDR3 for alpha chain variable domain of TCR clone 225948 (TRAV1-2, TRAJ16)
CAVNRFSDGQKLLF

SEQ ID NO: 451896 - protein, 14 aa, Homo sapiens
  CDR3 for beta chain variable domain of TCR clone 225948 (TRBV6-1, TRBJ1-6)
CASSGTAYNSPLHV

SEQ ID NO: 451897 - protein, 13 aa, Homo sapiens
  CDR3 for alpha chain variable domain of TCR clone 225949 (TRAV13-2, TRAJ48)
CAEMDFGNEKLTF

SEQ ID NO: 451898 - protein, 14 aa, Homo sapiens
  CDR3 for beta chain variable domain of TCR clone 225949 (TRBV7-8, TRBJ1-2)
CASSPDSLSYGYTF

SEQ ID NO: 451899 - protein, 15 aa, Homo sapiens
  CDR3 for alpha chain variable domain of TCR clone 225950 (TRAV4, TRAJ39)
CLVGPNNNAGNMLTF

SEQ ID NO: 451900 - protein, 16 aa, Homo sapiens
  CDR3 for beta chain variable domain of TCR clone 225950 (TRBV7-7, TRBJ2-1)
CASSLASGTSYNEQFF

SEQ ID NO: 451901 - protein, 10 aa, Homo sapiens
  CDR3 for alpha chain variable domain of TCR clone 225951 (TRAV13-1, TRAJ43)
CAASKNDMRF

SEQ ID NO: 451902 - protein, 13 aa, Homo sapiens
  CDR3 for beta chain variable domain of TCR clone 225951 (TRBV20-1, TRBJ1-5)
CSARTGVNQPQHV

SEQ ID NO: 451903 - protein, 13 aa, Homo sapiens
  CDR3 for alpha chain variable domain of TCR clone 225952 (TRAV2, TRAJ40)
CAVVTSGTYKYIF

SEQ ID NO: 451904 - protein, 16 aa, Homo sapiens
  CDR3 for beta chain variable domain of TCR clone 225952 (TRBV19, TRBJ2-1)
CASIKAGPSSYNEQFF

SEQ ID NO: 451905 - protein, 12 aa, Homo sapiens
  CDR3 for alpha chain variable domain of TCR clone 225953 (TRAV29/DV5, TRAJ49)
CAATDTGNQFYF

SEQ ID NO: 451906 - protein, 19 aa, Homo sapiens
  CDR3 for beta chain variable domain of TCR clone 225953 (TRBV25-1, TRBJ2-2)
CAILVYRVDRGRKTGGLFF

SEQ ID NO: 451907 - protein, 15 aa, Homo sapiens
  CDR3 for alpha chain variable domain of TCR clone 225954 (TRAV8-3, TRAJ45)
CASSYSGGGGDGLTF

SEQ ID NO: 451908 - protein, 13 aa, Homo sapiens
  CDR3 for beta chain variable domain of TCR clone 225954 (TRBV10-3, TRBJ2-7)
CASKLAVNYEQYL

SEQ ID NO: 451909 - protein, 11 aa, Homo sapiens
  CDR3 for alpha chain variable domain of TCR clone 225955 (TRAV21, TRAJ11)
CAVNGYSTLTF

SEQ ID NO: 451910 - protein, 16 aa, Homo sapiens
  CDR3 for beta chain variable domain of TCR clone 225955 (TRBV4-3, TRBJ2-2)
CASSPLQGSGTGELFF

SEQ ID NO: 451911 - protein, 15 aa, Homo sapiens
  CDR3 for alpha chain variable domain of TCR clone 225956 (TRAV12-2, TRAJ53)
CAVNGGGGSNYKLTF

SEQ ID NO: 451912 - protein, 15 aa, Homo sapiens
  CDR3 for beta chain variable domain of TCR clone 225956 (TRBV5-1, TRBJ2-3)
CASSVTSGSTDTQYF

SEQ ID NO: 451913 - protein, 13 aa, Homo sapiens
  CDR3 for alpha chain variable domain of TCR clone 225957 (TRAV12-2, TRAJ11)
CAVPNSGYSTLTF

SEQ ID NO: 451914 - protein, 12 aa, Homo sapiens
  CDR3 for beta chain variable domain of TCR clone 225957 (TRBV19, TRBJ2-3)
CASSPASDTQYF

SEQ ID NO: 451915 - protein, 14 aa, Homo sapiens
  CDR3 for alpha chain variable domain of TCR clone 225958 (TRAV12-3, TRAJ4)
CAMSATGGYNKLIF

SEQ ID NO: 451916 - protein, 15 aa, Homo sapiens
  CDR3 for beta chain variable domain of TCR clone 225958 (TRBV11-2, TRBJ2-1)
CASSSPSTRYNEQFF

SEQ ID NO: 451917 - protein, 13 aa, Homo sapiens
  CDR3 for alpha chain variable domain of TCR clone 225959 (TRAV8-4, TRAJ48)
CAVSLFGNEKLTF

SEQ ID NO: 451918 - protein, 15 aa, Homo sapiens
  CDR3 for beta chain variable domain of TCR clone 225959 (TRBV20-1, TRBJ2-7)
CRARKGLAESYEQYF

SEQ ID NO: 451919 - protein, 15 aa, Homo sapiens
  CDR3 for alpha chain variable domain of TCR clone 225960 (TRAV8-3, TRAJ32)
CAVGPYCGATNKLIF

SEQ ID NO: 451920 - protein, 14 aa, Homo sapiens
  CDR3 for beta chain variable domain of TCR clone 225960 (TRBV29-1, TRBJ2-2)
CSVLAETNTGELFF

SEQ ID NO: 451921 - protein, 11 aa, Homo sapiens
  CDR3 for alpha chain variable domain of TCR clone 225961 (TRAV12-2, TRAJ33)
CAVGSNYQLIW

SEQ ID NO: 451922 - protein, 13 aa, Homo sapiens
  CDR3 for beta chain variable domain of TCR clone 225961 (TRBV20-1, TRBJ1-1)
CSAPLGGGTEAFF

SEQ ID NO: 451923 - protein, 11 aa, Homo sapiens
  CDR3 for alpha chain variable domain of TCR clone 225962 (TRAV8-3, TRAJ49)
CAVGGGNQFSF

SEQ ID NO: 451924 - protein, 15 aa, Homo sapiens
  CDR3 for beta chain variable domain of TCR clone 225962 (TRBV7-9, TRBJ1-5)
CASIQGHQPNQPQHF

SEQ ID NO: 451925 - protein, 12 aa, Homo sapiens
  CDR3 for alpha chain variable domain of TCR clone 225963 (TRAV25, TRAJ5)
CAGGGGQESTYF

SEQ ID NO: 451926 - protein, 15 aa, Homo sapiens
  CDR3 for beta chain variable domain of TCR clone 225963 (TRBV9, TRBJ1-2)
CASSVVGQANYGYTF

SEQ ID NO: 451927 - protein, 16 aa, Homo sapiens
  CDR3 for alpha chain variable domain of TCR clone 225964 (TRAV12-3, TRAJ53)
CAMSPGSGGSNYKPTF

SEQ ID NO: 451928 - protein, 13 aa, Homo sapiens
  CDR3 for beta chain variable domain of TCR clone 225964 (TRBV7-2, TRBJ2-5)
CASSQTSVETQYF

SEQ ID NO: 451929 - protein, 14 aa, Homo sapiens
  CDR3 for alpha chain variable domain of TCR clone 225965 (TRAV1-2, TRAJ8)
CAVREDTGFQNLVF

SEQ ID NO: 451930 - protein, 14 aa, Homo sapiens
  CDR3 for beta chain variable domain of TCR clone 225965 (TRBV7-8, TRBJ2-5)
CASSATGGQETQYF

SEQ ID NO: 451931 - protein, 13 aa, Homo sapiens
  CDR3 for alpha chain variable domain of TCR clone 225966 (TRAV35, TRAJ20)
CAGPLSNDYKLSF

SEQ ID NO: 451932 - protein, 13 aa, Homo sapiens
  CDR3 for beta chain variable domain of TCR clone 225966 (TRBV7-9, TRBJ1-2)
CASSLKQNYGYTF

SEQ ID NO: 451933 - protein, 12 aa, Homo sapiens
  CDR3 for alpha chain variable domain of TCR clone 225967 (TRAV13-1, TRAJ48)
CAANFGNEKLTF

SEQ ID NO: 451934 - protein, 14 aa, Homo sapiens
  CDR3 for beta chain variable domain of TCR clone 225967 (TRBV5-1, TRBJ1-1)
CASSLTRRSTEAFF

SEQ ID NO: 451935 - protein, 15 aa, Homo sapiens
  CDR3 for alpha chain variable domain of TCR clone 225968 (TRAV13-1, TRAJ17)
CAARIERAAGNKLTF

SEQ ID NO: 451936 - protein, 13 aa, Homo sapiens
  CDR3 for beta chain variable domain of TCR clone 225968 (TRBV10-3, TRBJ2-7)
CASKLAVNYEQYF

SEQ ID NO: 451937 - protein, 12 aa, Homo sapiens
  CDR3 for alpha chain variable domain of TCR clone 225969 (TRAV30, TRAJ20)
CGTESNDYKLGF

SEQ ID NO: 451938 - protein, 15 aa, Homo sapiens
  CDR3 for beta chain variable domain of TCR clone 225969 (TRBV20-1, TRBJ2-7)
CSARDRVSGMDEHYF

SEQ ID NO: 451939 - protein, 16 aa, Homo sapiens
  CDR3 for alpha chain variable domain of TCR clone 225970 (TRAV21, TRAJ58)
CAVRGDRENSGSRLTL

SEQ ID NO: 451940 - protein, 12 aa, Homo sapiens
  CDR3 for beta chain variable domain of TCR clone 225970 (TRBV19, TRBJ2-3)
CASAGGADTQYF

SEQ ID NO: 451941 - protein, 16 aa, Homo sapiens
  CDR3 for alpha chain variable domain of TCR clone 225971 (TRAV16, TRAJ57)
CTPYLITQGGSEKLVF

SEQ ID NO: 451942 - protein, 17 aa, Homo sapiens
  CDR3 for beta chain variable domain of TCR clone 225971 (TRBV24-1, TRBJ2-4)
CATSDAEARGVRNIQYF

SEQ ID NO: 451943 - protein, 18 aa, Homo sapiens
  CDR3 for alpha chain variable domain of TCR clone 225972 (TRAV26-2, TRAJ45)
CILRVDKYSGGGADGLTY

SEQ ID NO: 451944 - protein, 16 aa, Homo sapiens
  CDR3 for beta chain variable domain of TCR clone 225972 (TRBV2, TRBJ1-4)
CASNLLQGATNEKLFF

SEQ ID NO: 451945 - protein, 16 aa, Homo sapiens
  CDR3 for alpha chain variable domain of TCR clone 225973 (TRAV12-1, TRAJ8)
CVVNGRGNTGFQKLVF

SEQ ID NO: 451946 - protein, 15 aa, Homo sapiens
  CDR3 for beta chain variable domain of TCR clone 225973 (TRBV6-1, TRBJ1-2)
CASSPGRGGPYGYTF

SEQ ID NO: 451947 - protein, 11 aa, Homo sapiens
  CDR3 for alpha chain variable domain of TCR clone 225974 (TRAV12-1, TRAJ33)
CVVNSNYQLIW

SEQ ID NO: 451948 - protein, 19 aa, Homo sapiens
  CDR3 for beta chain variable domain of TCR clone 225974 (TRBV7-6, TRBJ2-5)
CASSFVGPGTSGEQETQYF

SEQ ID NO: 451949 - protein, 14 aa, Homo sapiens
  CDR3 for alpha chain variable domain of TCR clone 225975 (TRAV17, TRAJ15)
CATDVWQAGTALIF

SEQ ID NO: 451950 - protein, 17 aa, Homo sapiens
  CDR3 for beta chain variable domain of TCR clone 225975 (TRBV6-6, TRBJ2-6)
CASSYSMEGAGANVLTF

SEQ ID NO: 451951 - protein, 15 aa, Homo sapiens
  CDR3 for alpha chain variable domain of TCR clone 225976 (TRAV8-1, TRAJ42)
CAVRSYGGSQGNLIF

SEQ ID NO: 451952 - protein, 14 aa, Homo sapiens
  CDR3 for beta chain variable domain of TCR clone 225976 (TRBV19, TRBJ2-1)
CASPTFVLSGEQFF

SEQ ID NO: 451953 - protein, 15 aa, Homo sapiens
  CDR3 for alpha chain variable domain of TCR clone 225977 (TRAV26-2, TRAJ28)
CILVESGAGSYQLTF

SEQ ID NO: 451954 - protein, 12 aa, Homo sapiens
  CDR3 for beta chain variable domain of TCR clone 225977 (TRBV29-1, TRBJ2-3)
CSVTGGADTQYF

SEQ ID NO: 451955 - protein, 21 aa, Homo sapiens
  CDR3 for alpha chain variable domain of TCR clone 225978 (TRAV3, TRAJ43)
HLKKPSALVSDSALYFGGMRF

SEQ ID NO: 451956 - protein, 13 aa, Homo sapiens
  CDR3 for beta chain variable domain of TCR clone 225978 (TRBV12-4, TRBJ2-7)
CASSPTETYEQYF

SEQ ID NO: 451957 - protein, 12 aa, Homo sapiens
  CDR3 for alpha chain variable domain of TCR clone 225979 (TRAV2, TRAJ34)
CALERNTDKLIF

SEQ ID NO: 451958 - protein, 14 aa, Homo sapiens
  CDR3 for beta chain variable domain of TCR clone 225979 (TRBV7-9, TRBJ2-1)
CASSDNSGYNEQFF

SEQ ID NO: 451959 - protein, 15 aa, Homo sapiens
  CDR3 for alpha chain variable domain of TCR clone 225980 (TRAV34, TRAJ44)
TSVEQTTGTASKLTF

SEQ ID NO: 451960 - protein, 15 aa, Homo sapiens
  CDR3 for beta chain variable domain of TCR clone 225980 (TRBV5-7, TRBJ2-7)
CASSLGPGRGHEQYF

SEQ ID NO: 451961 - protein, 13 aa, Homo sapiens
  CDR3 for alpha chain variable domain of TCR clone 225981 (TRAV2, TRAJ40)
CAVVTSGTYKYIF

SEQ ID NO: 451962 - protein, 15 aa, Homo sapiens
  CDR3 for beta chain variable domain of TCR clone 225981 (TRBV7-6, TRBJ2-1)
CASSPGQGPYNEQFF

SEQ ID NO: 451963 - protein, 12 aa, Homo sapiens
  CDR3 for alpha chain variable domain of TCR clone 225982 (TRAV12-1, TRAJ30)
CVVNPRDDKIIF

SEQ ID NO: 451964 - protein, 14 aa, Homo sapiens
  CDR3 for beta chain variable domain of TCR clone 225982 (TRBV19, TRBJ2-1)
CASPTFVLSGEQFF

SEQ ID NO: 451965 - protein, 13 aa, Homo sapiens
  CDR3 for alpha chain variable domain of TCR clone 225983 (TRAV8-6, TRAJ49)
CAVITNTGNQFYF

SEQ ID NO: 451966 - protein, 11 aa, Homo sapiens
  CDR3 for beta chain variable domain of TCR clone 225983 (TRBV20-1, TRBJ2-1)
CSVPHPDEQFF

SEQ ID NO: 451967 - protein, 15 aa, Homo sapiens
  CDR3 for alpha chain variable domain of TCR clone 225984 (TRAV26-1, TRAJ39)
CIVRRYNNAGNMLIF

SEQ ID NO: 451968 - protein, 13 aa, Homo sapiens
  CDR3 for beta chain variable domain of TCR clone 225984 (TRBV12-5, TRBJ2-3)
CASGDRQSDTQYF

SEQ ID NO: 451969 - protein, 16 aa, Homo sapiens
  CDR3 for alpha chain variable domain of TCR clone 225985 (TRAV3, TRAJ10)
CAVRDMRAGGGSKLTF

SEQ ID NO: 451970 - protein, 13 aa, Homo sapiens
  CDR3 for beta chain variable domain of TCR clone 225985 (TRBV10-2, TRBJ2-1)
CASGASGDAKQFF

SEQ ID NO: 451971 - protein, 13 aa, Homo sapiens
  CDR3 for alpha chain variable domain of TCR clone 225986 (TRAV13-1, TRAJ6)
CSRGSGGSYIPTF

SEQ ID NO: 451972 - protein, 15 aa, Homo sapiens
  CDR3 for beta chain variable domain of TCR clone 225986 (TRBV20-1, TRBJ2-1)
CSARGIGGTYNEQFF

SEQ ID NO: 451973 - protein, 14 aa, Homo sapiens
  CDR3 for alpha chain variable domain of TCR clone 225987 (TRAV12-2, TRAJ53)
CAVKGGGSNYKLTL

SEQ ID NO: 451974 - protein, 13 aa, Homo sapiens
  CDR3 for beta chain variable domain of TCR clone 225987 (TRBV20-1, TRBJ1-1)
CSARGGGNTEAFF

SEQ ID NO: 451975 - protein, 16 aa, Homo sapiens
  CDR3 for alpha chain variable domain of TCR clone 225988 (TRAV13-2, TRAJ22)
CAENRGSSGSARPLTF

SEQ ID NO: 451976 - protein, 17 aa, Homo sapiens
  CDR3 for beta chain variable domain of TCR clone 225988 (TRBV14, TRBJ2-1)
CASSQDRRVSSYNEQFF

SEQ ID NO: 451977 - protein, 15 aa, Homo sapiens
  CDR3 for alpha chain variable domain of TCR clone 225989 (TRAV3, TRAJ40)
CAVRDVTSGTYKYIF

SEQ ID NO: 451978 - protein, 13 aa, Homo sapiens
  CDR3 for beta chain variable domain of TCR clone 225989 (TRBV7-9, TRBJ1-2)
CASSLKQNCGYTF

SEQ ID NO: 451979 - protein, 14 aa, Homo sapiens
  CDR3 for alpha chain variable domain of TCR clone 225990 (TRAV35, TRAJ50)
CAGHRETSYDKVIF

SEQ ID NO: 451980 - protein, 13 aa, Homo sapiens
  CDR3 for beta chain variable domain of TCR clone 225990 (TRBV7-7, TRBJ2-3)
CASSLSRADTQDF

SEQ ID NO: 451981 - protein, 14 aa, Homo sapiens
  CDR3 for alpha chain variable domain of TCR clone 225991 (TRAV12-2, TRAJ13)
CAVKKTGGYQKVTF

SEQ ID NO: 451982 - protein, 15 aa, Homo sapiens
  CDR3 for beta chain variable domain of TCR clone 225991 (TRBV11-2, TRBJ2-2)
CATSSDRVNAGELFF

SEQ ID NO: 451983 - protein, 15 aa, Homo sapiens
  CDR3 for alpha chain variable domain of TCR clone 225992 (TRAV21, TRAJ53)
CATLNSRGSNYKLTF

SEQ ID NO: 451984 - protein, 16 aa, Homo sapiens
  CDR3 for beta chain variable domain of TCR clone 225992 (TRBV29-1, TRBJ1-2)
CSVEANRDIANYGYTF

SEQ ID NO: 451985 - protein, 16 aa, Homo sapiens
  CDR3 for alpha chain variable domain of TCR clone 225993 (TRAV12-2, TRAJ45)
CAVIFLSGGGADGLTF

SEQ ID NO: 451986 - protein, 19 aa, Homo sapiens
  CDR3 for beta chain variable domain of TCR clone 225993 (TRBV28, TRBJ2-4)
CASSFRPGGPAHSKNSQYF

SEQ ID NO: 451987 - protein, 12 aa, Homo sapiens
  CDR3 for alpha chain variable domain of TCR clone 225994 (TRAV16, TRAJ26)
CALRSYGQNFVF

SEQ ID NO: 451988 - protein, 16 aa, Homo sapiens
  CDR3 for beta chain variable domain of TCR clone 225994 (TRBV5-1, TRBJ2-2)
CASSLWDTTNTGELFF

SEQ ID NO: 451989 - protein, 17 aa, Homo sapiens
  CDR3 for alpha chain variable domain of TCR clone 225995 (TRAV23/DV6, TRAJ57)
CAASSTLSQGGSEKLVF

SEQ ID NO: 451990 - protein, 13 aa, Homo sapiens
  CDR3 for beta chain variable domain of TCR clone 225995 (TRBV12-4, TRBJ2-7)
CASSPTETYEQYF

SEQ ID NO: 451991 - protein, 13 aa, Homo sapiens
  CDR3 for alpha chain variable domain of TCR clone 225996 (TRAV23/DV6, TRAJ47)
CAASIRNGIWKQT

SEQ ID NO: 451992 - protein, 13 aa, Homo sapiens
  CDR3 for beta chain variable domain of TCR clone 225996 (TRBV19, TRBJ1-2)
CASGQGQVYGYTF

SEQ ID NO: 451993 - protein, 18 aa, Homo sapiens
  CDR3 for alpha chain variable domain of TCR clone 225997 (TRAV26-1, TRAJ52)
CIVRVEGAGVTSYGKLTF

SEQ ID NO: 451994 - protein, 13 aa, Homo sapiens
  CDR3 for beta chain variable domain of TCR clone 225997 (TRBV7-3, TRBJ1-2)
CASSLKRGYGYTV

SEQ ID NO: 451995 - protein, 13 aa, Homo sapiens
  CDR3 for alpha chain variable domain of TCR clone 225998 (TRAV8-4, TRAJ49)
CAVRTLTGNQFYF

SEQ ID NO: 451996 - protein, 14 aa, Homo sapiens
  CDR3 for beta chain variable domain of TCR clone 225998 (TRBV6-5, TRBJ1-2)
CASSYDGTGGGYTF

SEQ ID NO: 451997 - protein, 18 aa, Homo sapiens
  CDR3 for alpha chain variable domain of TCR clone 225999 (TRAV21, TRAJ52)
CAVRPFPAGGTSYGKLTF

SEQ ID NO: 451998 - protein, 13 aa, Homo sapiens
  CDR3 for beta chain variable domain of TCR clone 225999 (TRBV2, TRBJ2-7)
CASSVGGSGEQYF

SEQ ID NO: 451999 - protein, 12 aa, Homo sapiens
  CDR3 for alpha chain variable domain of TCR clone 226000 (TRAV12-3, TRAJ17)
CAMTLTGNKLTF

SEQ ID NO: 452000 - protein, 12 aa, Homo sapiens
  CDR3 for beta chain variable domain of TCR clone 226000 (TRBV11-2, TRBJ2-2)
CTSSLPTGELFF

SEQ ID NO: 452001 - protein, 13 aa, Homo sapiens
  CDR3 for alpha chain variable domain of TCR clone 226001 (TRAV1-2, TRAJ9)
CAALNTGGFKTMF

SEQ ID NO: 452002 - protein, 13 aa, Homo sapiens
  CDR3 for beta chain variable domain of TCR clone 226001 (TRBV19, TRBJ1-2)
CASSVPGQDGYTF

SEQ ID NO: 452003 - protein, 19 aa, Homo sapiens
  CDR3 for alpha chain variable domain of TCR clone 226002 (TRAV2, TRAJ20)
ILQVREADAAVYRDCKLSF

SEQ ID NO: 452004 - protein, 16 aa, Homo sapiens
  CDR3 for beta chain variable domain of TCR clone 226002 (TRBV5-1, TRBJ2-5)
CASSLTLLRAGETQYF

SEQ ID NO: 452005 - protein, 13 aa, Homo sapiens
  CDR3 for alpha chain variable domain of TCR clone 226003 (TRAV12-2, TRAJ45)
CAVNRGGADGLTF

SEQ ID NO: 452006 - protein, 13 aa, Homo sapiens
  CDR3 for beta chain variable domain of TCR clone 226003 (TRBV7-9, TRBJ2-5)
CASLPSGRETQYF

SEQ ID NO: 452007 - protein, 15 aa, Homo sapiens
  CDR3 for alpha chain variable domain of TCR clone 226004 (TRAV20, TRAJ58)
CAVQDLETSGSRLTF

SEQ ID NO: 452008 - protein, 13 aa, Homo sapiens
  CDR3 for beta chain variable domain of TCR clone 226004 (TRBV7-7, TRBJ2-2)
CASSLTSAGELFF

SEQ ID NO: 452009 - protein, 20 aa, Homo sapiens
  CDR3 for alpha chain variable domain of TCR clone 226005 (TRAV26-1, TRAJ42)
CCVLLHRQIYYGGSQGNLIF

SEQ ID NO: 452010 - protein, 16 aa, Homo sapiens
  CDR3 for beta chain variable domain of TCR clone 226005 (TRBV7-3, TRBJ2-2)
CGSSLKRGTLSGELFF

SEQ ID NO: 452011 - protein, 15 aa, Homo sapiens
  CDR3 for alpha chain variable domain of TCR clone 226006 (TRAV25, TRAJ53)
CAATGGGGSNYKLTL

SEQ ID NO: 452012 - protein, 14 aa, Homo sapiens
  CDR3 for beta chain variable domain of TCR clone 226006 (TRBV5-1, TRBJ2-3)
CASSLFGPTDTQYF

SEQ ID NO: 452013 - protein, 14 aa, Homo sapiens
  CDR3 for alpha chain variable domain of TCR clone 226007 (TRAV21, TRAJ37)
CAVKGSSNTGKLIF

SEQ ID NO: 452014 - protein, 16 aa, Homo sapiens
  CDR3 for beta chain variable domain of TCR clone 226007 (TRBV6-1, TRBJ2-5)
CASSETLDRGAETQYF

SEQ ID NO: 452015 - protein, 13 aa, Homo sapiens
  CDR3 for alpha chain variable domain of TCR clone 226008 (TRAV2, TRAJ40)
CAVVTSGTYKYIF

SEQ ID NO: 452016 - protein, 15 aa, Homo sapiens
  CDR3 for beta chain variable domain of TCR clone 226008 (TRBV4-1, TRBJ2-1)
CASSQAQREIYEQFF

SEQ ID NO: 452017 - protein, 19 aa, Homo sapiens
  CDR3 for alpha chain variable domain of TCR clone 226009 (TRAV26-1, TRAJ52)
RIVRAHRNAGGTSYGKLTF

SEQ ID NO: 452018 - protein, 15 aa, Homo sapiens
  CDR3 for beta chain variable domain of TCR clone 226009 (TRBV12-4, TRBJ2-5)
CASSPPTGLQETQYF

SEQ ID NO: 452019 - protein, 14 aa, Homo sapiens
  CDR3 for alpha chain variable domain of TCR clone 226010 (TRAV13-1, TRAJ9)
CAASALTGGFNTIF

SEQ ID NO: 452020 - protein, 13 aa, Homo sapiens
  CDR3 for beta chain variable domain of TCR clone 226010 (TRBV20-1, TRBJ1-1)
CSDGTVGNTEAFF

SEQ ID NO: 452021 - protein, 15 aa, Homo sapiens
  CDR3 for alpha chain variable domain of TCR clone 226011 (TRAV3, TRAJ28)
CCPPRSGAGSYQLTF

SEQ ID NO: 452022 - protein, 13 aa, Homo sapiens
  CDR3 for beta chain variable domain of TCR clone 226011 (TRBV12-4, TRBJ2-5)
CASRLAVQETQYF

SEQ ID NO: 452023 - protein, 16 aa, Homo sapiens
  CDR3 for alpha chain variable domain of TCR clone 226012 (TRAV8-3, TRAJ13)
CAGGAYPYVGYQKVTF

SEQ ID NO: 452024 - protein, 15 aa, Homo sapiens
  CDR3 for beta chain variable domain of TCR clone 226012 (TRBV19, TRBJ1-5)
CASSIVWADNQPQHF

SEQ ID NO: 452025 - protein, 15 aa, Homo sapiens
  CDR3 for alpha chain variable domain of TCR clone 226013 (TRAV14/DV4, TRAJ15)
CAMREGWQAGTAIIF

SEQ ID NO: 452026 - protein, 14 aa, Homo sapiens
  CDR3 for beta chain variable domain of TCR clone 226013 (TRBV19, TRBJ2-5)
CASSMTGQQETQYF

SEQ ID NO: 452027 - protein, 14 aa, Homo sapiens
  CDR3 for alpha chain variable domain of TCR clone 226014 (TRAV8-6, TRAJ12)
CAVKAADSSYILIF

SEQ ID NO: 452028 - protein, 15 aa, Homo sapiens
  CDR3 for beta chain variable domain of TCR clone 226014 (TRBV5-1, TRBJ2-5)
CASSLGLAEQETQYF

SEQ ID NO: 452029 - protein, 11 aa, Homo sapiens
  CDR3 for alpha chain variable domain of TCR clone 226015 (TRAV21, TRAJ34)
CAVTNTDKLIF

SEQ ID NO: 452030 - protein, 14 aa, Homo sapiens
  CDR3 for beta chain variable domain of TCR clone 226015 (TRBV9, TRBJ2-4)
CASSPSGTSGFQYF

SEQ ID NO: 452031 - protein, 14 aa, Homo sapiens
  CDR3 for alpha chain variable domain of TCR clone 226016 (TRAV17, TRAJ12)
CAILLMDSSYKLIF

SEQ ID NO: 452032 - protein, 11 aa, Homo sapiens
  CDR3 for beta chain variable domain of TCR clone 226016 (TRBV19, TRBJ1-1)
CASSIGSEAFF

SEQ ID NO: 452033 - protein, 14 aa, Homo sapiens
  CDR3 for alpha chain variable domain of TCR clone 226017 (TRAV12-2, TRAJ44)
CAVNPAGTASKPTF

SEQ ID NO: 452034 - protein, 16 aa, Homo sapiens
  CDR3 for beta chain variable domain of TCR clone 226017 (TRBV2, TRBJ2-1)
CASSVGGSLSYNEQFF

SEQ ID NO: 452035 - protein, 14 aa, Homo sapiens
  CDR3 for alpha chain variable domain of TCR clone 226018 (TRAV26-1, TRAJ39)
CIVRGSRAGNMLTF

SEQ ID NO: 452036 - protein, 12 aa, Homo sapiens
  CDR3 for beta chain variable domain of TCR clone 226018 (TRBV2, TRBJ2-1)
CAYGPPGNEQFF

SEQ ID NO: 452037 - protein, 12 aa, Homo sapiens
  CDR3 for alpha chain variable domain of TCR clone 226019 (TRAV30, TRAJ43)
CGTEERGNDMRF

SEQ ID NO: 452038 - protein, 13 aa, Homo sapiens
  CDR3 for beta chain variable domain of TCR clone 226019 (TRBV19, TRBJ1-3)
CASRLSLGNTIYF

SEQ ID NO: 452039 - protein, 15 aa, Homo sapiens
  CDR3 for alpha chain variable domain of TCR clone 226020 (TRAV30, TRAJ57)
CGTAIPQGGSEKLVF

SEQ ID NO: 452040 - protein, 13 aa, Homo sapiens
  CDR3 for beta chain variable domain of TCR clone 226020 (TRBV20-1, TRBJ1-1)
CSARGGGNTEAFF

SEQ ID NO: 452041 - protein, 12 aa, Homo sapiens
  CDR3 for alpha chain variable domain of TCR clone 226021 (TRAV3, TRAJ26)
CAVRDYGQNFVF

SEQ ID NO: 452042 - protein, 15 aa, Homo sapiens
  CDR3 for beta chain variable domain of TCR clone 226021 (TRBV11-2, TRBJ1-2)
CRQPSGREANYGYTF

SEQ ID NO: 452043 - protein, 15 aa, Homo sapiens
  CDR3 for alpha chain variable domain of TCR clone 226022 (TRAV1-2, TRAJ30)
CAVRPHGNRDDKIIF

SEQ ID NO: 452044 - protein, 13 aa, Homo sapiens
  CDR3 for beta chain variable domain of TCR clone 226022 (TRBV4-1, TRBJ2-2)
CASSQENTGELFF

SEQ ID NO: 452045 - protein, 15 aa, Homo sapiens
  CDR3 for alpha chain variable domain of TCR clone 226023 (TRAV26-1, TRAJ56)
CIVRVDNGANSKLTF

SEQ ID NO: 452046 - protein, 15 aa, Homo sapiens
  CDR3 for beta chain variable domain of TCR clone 226023 (TRBV20-1, TRBJ2-7)
SSARDPTEVGHEQYF

SEQ ID NO: 452047 - protein, 15 aa, Homo sapiens
  CDR3 for alpha chain variable domain of TCR clone 226024 (TRAV4, TRAJ10)
CLVGDEEGGGNKLTF

SEQ ID NO: 452048 - protein, 15 aa, Homo sapiens
  CDR3 for beta chain variable domain of TCR clone 226024 (TRBV7-2, TRBJ2-7)
CASSLSGQGTYEQYF

SEQ ID NO: 452049 - protein, 13 aa, Homo sapiens
  CDR3 for alpha chain variable domain of TCR clone 226025 (TRAV35, TRAJ42)
CAGFPGSQGNLIF

SEQ ID NO: 452050 - protein, 13 aa, Homo sapiens
  CDR3 for beta chain variable domain of TCR clone 226025 (TRBV29-1, TRBJ2-1)
CSVGGGRGNEQFF

SEQ ID NO: 452051 - protein, 13 aa, Homo sapiens
  CDR3 for alpha chain variable domain of TCR clone 226026 (TRAV2, TRAJ15)
CAVASQAGTALLF

SEQ ID NO: 452052 - protein, 14 aa, Homo sapiens
  CDR3 for beta chain variable domain of TCR clone 226026 (TRBV5-1, TRBJ2-7)
CASSRGESLYEQYF

SEQ ID NO: 452053 - protein, 13 aa, Homo sapiens
  CDR3 for alpha chain variable domain of TCR clone 226027 (TRAV27, TRAJ45)
CRSSGGGADGLTF

SEQ ID NO: 452054 - protein, 15 aa, Homo sapiens
  CDR3 for beta chain variable domain of TCR clone 226027 (TRBV3-1, TRBJ1-2)
CASSPTRLPEGGYTF

SEQ ID NO: 452055 - protein, 13 aa, Homo sapiens
  CDR3 for alpha chain variable domain of TCR clone 226028 (TRAV21, TRAJ20)
CDVGLRVDYKLSF

SEQ ID NO: 452056 - protein, 13 aa, Homo sapiens
  CDR3 for beta chain variable domain of TCR clone 226028 (TRBV6-1, TRBJ1-1)
CASSRQGNTGAFF

SEQ ID NO: 452057 - protein, 11 aa, Homo sapiens
  CDR3 for alpha chain variable domain of TCR clone 226029 (TRAV1-2, TRAJ20)
CAVSNDYKLSF

SEQ ID NO: 452058 - protein, 16 aa, Homo sapiens
  CDR3 for beta chain variable domain of TCR clone 226029 (TRBV6-1, TRBJ2-5)
CASSEALDRGAETQYF

SEQ ID NO: 452059 - protein, 14 aa, Homo sapiens
  CDR3 for alpha chain variable domain of TCR clone 226030 (TRAV8-3, TRAJ9)
CAVVDNNGGFKTIF

SEQ ID NO: 452060 - protein, 14 aa, Homo sapiens
  CDR3 for beta chain variable domain of TCR clone 226030 (TRBV7-3, TRBJ2-2)
CASSSGGYTGELFF

SEQ ID NO: 452061 - protein, 11 aa, Homo sapiens
  CDR3 for alpha chain variable domain of TCR clone 226031 (TRAV1-1, TRAJ23)
CAVRQGGTLIF

SEQ ID NO: 452062 - protein, 20 aa, Homo sapiens
  CDR3 for beta chain variable domain of TCR clone 226031 (TRBV7-8, TRBJ2-2)
CASSHFFPGPTIHITGELFF

SEQ ID NO: 452063 - protein, 18 aa, Homo sapiens
  CDR3 for alpha chain variable domain of TCR clone 226032 (TRAV1-2, TRAJ18)
CAARDMGDRGSTLGRLYF

SEQ ID NO: 452064 - protein, 16 aa, Homo sapiens
  CDR3 for beta chain variable domain of TCR clone 226032 (TRBV29-1, TRBJ1-2)
FSVEANRDIANYGYTF

SEQ ID NO: 452065 - protein, 14 aa, Homo sapiens
  CDR3 for alpha chain variable domain of TCR clone 226033 (TRAV12-2, TRAJ40)
CAVKIPSGTYKYIF

SEQ ID NO: 452066 - protein, 18 aa, Homo sapiens
  CDR3 for beta chain variable domain of TCR clone 226033 (TRBV20-1, TRBJ2-6)
CSAETTPTHGSGANTLTF

SEQ ID NO: 452067 - protein, 15 aa, Homo sapiens
  CDR3 for alpha chain variable domain of TCR clone 226034 (TRAV21, TRAJ52)
CAVRGGGTSYGKVTF

SEQ ID NO: 452068 - protein, 15 aa, Homo sapiens
  CDR3 for beta chain variable domain of TCR clone 226034 (TRBV18, TRBJ1-5)
CASSPSDRSNQPQHF

SEQ ID NO: 452069 - protein, 15 aa, Homo sapiens
  CDR3 for alpha chain variable domain of TCR clone 226035 (TRAV3, TRAJ22)
CAVRDRGGSARQLTF

SEQ ID NO: 452070 - protein, 15 aa, Homo sapiens
  CDR3 for beta chain variable domain of TCR clone 226035 (TRBV11-3, TRBJ2-3)
CASPKDGREGDTQYF

SEQ ID NO: 452071 - protein, 11 aa, Homo sapiens
  CDR3 for alpha chain variable domain of TCR clone 226036 (TRAV35, TRAJ30)
CAGLRDDKIIF

SEQ ID NO: 452072 - protein, 13 aa, Homo sapiens
  CDR3 for beta chain variable domain of TCR clone 226036 (TRBV28, TRBJ1-5)
CASRMTGDQPQHF

SEQ ID NO: 452073 - protein, 11 aa, Homo sapiens
  CDR3 for alpha chain variable domain of TCR clone 226037 (TRAV12-1, TRAJ43)
RVEYDNNDMRF

SEQ ID NO: 452074 - protein, 17 aa, Homo sapiens
  CDR3 for beta chain variable domain of TCR clone 226037 (TRBV20-1, TRBJ2-1)
CSARDPLAGVWDNEQFF

SEQ ID NO: 452075 - protein, 14 aa, Homo sapiens
  CDR3 for alpha chain variable domain of TCR clone 226038 (TRAV12-2, TRAJ13)
CAVKKTAGYQKVTF

SEQ ID NO: 452076 - protein, 13 aa, Homo sapiens
  CDR3 for beta chain variable domain of TCR clone 226038 (TRBV10-3, TRBJ2-7)
CASKLAVNYEQYF

SEQ ID NO: 452077 - protein, 13 aa, Homo sapiens
  CDR3 for alpha chain variable domain of TCR clone 226039 (TRAV13-1, TRAJ39)
CAASIWAGNMLTF

SEQ ID NO: 452078 - protein, 13 aa, Homo sapiens
  CDR3 for beta chain variable domain of TCR clone 226039 (TRBV10-3, TRBJ1-2)
CAISERDSYGYTF

SEQ ID NO: 452079 - protein, 16 aa, Homo sapiens
  CDR3 for alpha chain variable domain of TCR clone 226040 (TRAV13-1, TRAJ48)
CAASIFGNFGNEKLTF

SEQ ID NO: 452080 - protein, 12 aa, Homo sapiens
  CDR3 for beta chain variable domain of TCR clone 226040 (TRBV14, TRBJ2-4)
CASSNLKSILYF

SEQ ID NO: 452081 - protein, 12 aa, Homo sapiens
  CDR3 for alpha chain variable domain of TCR clone 226041 (TRAV23/DV6, TRAJ31)
CAARRTGARPMF

SEQ ID NO: 452082 - protein, 13 aa, Homo sapiens
  CDR3 for beta chain variable domain of TCR clone 226041 (TRBV28, TRBJ2-7)
CASKAGGVYEQYF

SEQ ID NO: 452083 - protein, 15 aa, Homo sapiens
  CDR3 for alpha chain variable domain of TCR clone 226042 (TRAV21, TRAJ53)
CATLNSGGSNYKLTF

SEQ ID NO: 452084 - protein, 15 aa, Homo sapiens
  CDR3 for beta chain variable domain of TCR clone 226042 (TRBV28, TRBJ1-5)
CASSRTGGYVQPQHF

SEQ ID NO: 452085 - protein, 17 aa, Homo sapiens
  CDR3 for alpha chain variable domain of TCR clone 226043 (TRAV13-1, TRAJ28)
CAASPPYSGAGSYQLTF

SEQ ID NO: 452086 - protein, 13 aa, Homo sapiens
  CDR3 for beta chain variable domain of TCR clone 226043 (TRBV19, TRBJ2-7)
CASRKAGGSEQYF

SEQ ID NO: 452087 - protein, 14 aa, Homo sapiens
  CDR3 for alpha chain variable domain of TCR clone 226044 (TRAV12-3, TRAJ56)
CAMSVTVANSKLTF

SEQ ID NO: 452088 - protein, 17 aa, Homo sapiens
  CDR3 for beta chain variable domain of TCR clone 226044 (TRBV20-1, TRBJ2-3)
CSASLLGRGGSADTQYF

SEQ ID NO: 452089 - protein, 15 aa, Homo sapiens
  CDR3 for alpha chain variable domain of TCR clone 226045 (TRAV12-3, TRAJ6)
CAMSATTGGSHIPTF

SEQ ID NO: 452090 - protein, 19 aa, Homo sapiens
  CDR3 for beta chain variable domain of TCR clone 226045 (TRBV5-5, TRBJ2-7)
CASSSSGSETGEGSSTSGR

SEQ ID NO: 452091 - protein, 16 aa, Homo sapiens
  CDR3 for alpha chain variable domain of TCR clone 226046 (TRAV12-1, TRAJ42)
CVVTPYYGGSQGNLIL

SEQ ID NO: 452092 - protein, 15 aa, Homo sapiens
  CDR3 for beta chain variable domain of TCR clone 226046 (TRBV4-3, TRBJ2-7)
CASSQGGRGIYEQYF

SEQ ID NO: 452093 - protein, 16 aa, Homo sapiens
  CDR3 for alpha chain variable domain of TCR clone 226047 (TRAV3, TRAJ37)
CAVRVRGSGNTGKLIF

SEQ ID NO: 452094 - protein, 15 aa, Homo sapiens
  CDR3 for beta chain variable domain of TCR clone 226047 (TRBV7-9, TRBJ1-4)
CASSATGGNNEKLFF

SEQ ID NO: 452095 - protein, 16 aa, Homo sapiens
  CDR3 for alpha chain variable domain of TCR clone 226048 (TRAV3, TRAJ10)
CAVRDMRAGGGNKLTF

SEQ ID NO: 452096 - protein, 15 aa, Homo sapiens
  CDR3 for beta chain variable domain of TCR clone 226048 (TRBV19, TRBJ2-7)
CASRPTPGLSIEQYF

SEQ ID NO: 452097 - protein, 16 aa, Homo sapiens
  CDR3 for alpha chain variable domain of TCR clone 226049 (TRAV30, TRAJ44)
CGTEAKRTGTASKLTF

SEQ ID NO: 452098 - protein, 16 aa, Homo sapiens
  CDR3 for beta chain variable domain of TCR clone 226049 (TRBV10-2, TRBJ2-7)
CASSESPGSSGFEQYF

SEQ ID NO: 452099 - protein, 12 aa, Homo sapiens
  CDR3 for alpha chain variable domain of TCR clone 226050 (TRAV10, TRAJ43)
CGVVRVGNDMHF

SEQ ID NO: 452100 - protein, 15 aa, Homo sapiens
  CDR3 for beta chain variable domain of TCR clone 226050 (TRBV2, TRBJ2-7)
CASSEGLARSYEQYF

SEQ ID NO: 452101 - protein, 13 aa, Homo sapiens
  CDR3 for alpha chain variable domain of TCR clone 226051 (TRAV2, TRAJ40)
CAVVTSGTYKYIF

SEQ ID NO: 452102 - protein, 14 aa, Homo sapiens
  CDR3 for beta chain variable domain of TCR clone 226051 (TRBV2, TRBJ2-5)
CASSEGSYQETQYF

SEQ ID NO: 452103 - protein, 11 aa, Homo sapiens
  CDR3 for alpha chain variable domain of TCR clone 226052 (TRAV39, TRAJ49)
CAVDISTQFYF

SEQ ID NO: 452104 - protein, 13 aa, Homo sapiens
  CDR3 for beta chain variable domain of TCR clone 226052 (TRBV7-7, TRBJ2-3)
CASSLSRADTQYF

SEQ ID NO: 452105 - protein, 13 aa, Homo sapiens
  CDR3 for alpha chain variable domain of TCR clone 226053 (TRAV17, TRAJ13)
CATDSGGYQKVTF

SEQ ID NO: 452106 - protein, 13 aa, Homo sapiens
  CDR3 for beta chain variable domain of TCR clone 226053 (TRBV6-3, TRBJ2-5)
CASSWAGEETQYF

SEQ ID NO: 452107 - protein, 14 aa, Homo sapiens
  CDR3 for alpha chain variable domain of TCR clone 226054 (TRAV13-2, TRAJ9)
CAENLETGGFKTIF

SEQ ID NO: 452108 - protein, 16 aa, Homo sapiens
  CDR3 for beta chain variable domain of TCR clone 226054 (TRBV28, TRBJ2-5)
CASSFSPAGGWETQYF

SEQ ID NO: 452109 - protein, 13 aa, Homo sapiens
  CDR3 for alpha chain variable domain of TCR clone 226055 (TRAV21, TRAJ27)
CAARPGNAGKSTF

SEQ ID NO: 452110 - protein, 21 aa, Homo sapiens
  CDR3 for beta chain variable domain of TCR clone 226055 (TRBV7-6, TRBJ2-1)
SGTRPCIDVPAAWGGADEQFF

SEQ ID NO: 452111 - protein, 15 aa, Homo sapiens
  CDR3 for alpha chain variable domain of TCR clone 226056 (TRAV41, TRAJ45)
CAASYSGGGAGGLTF

SEQ ID NO: 452112 - protein, 14 aa, Homo sapiens
  CDR3 for beta chain variable domain of TCR clone 226056 (TRBV12-5, TRBJ2-5)
CASGSRTHQETQYF

SEQ ID NO: 452113 - protein, 17 aa, Homo sapiens
  CDR3 for alpha chain variable domain of TCR clone 226057 (TRAV38-2/DV8, TRAJ57)
RAYRSVLTQGGSEKLVF

SEQ ID NO: 452114 - protein, 16 aa, Homo sapiens
  CDR3 for beta chain variable domain of TCR clone 226057 (TRBV7-3, TRBJ2-2)
CASSLKRGTLSGELFF

SEQ ID NO: 452115 - protein, 16 aa, Homo sapiens
  CDR3 for alpha chain variable domain of TCR clone 226058 (TRAV30, TRAJ24)
CGTEIVDADSWGKFQF

SEQ ID NO: 452116 - protein, 12 aa, Homo sapiens
  CDR3 for beta chain variable domain of TCR clone 226058 (TRBV28, TRBJ1-6)
CASSLLRGGIAF

SEQ ID NO: 452117 - protein, 13 aa, Homo sapiens
  CDR3 for alpha chain variable domain of TCR clone 226059 (TRAV16, TRAJ26)
CITVLCLGQNFVF

SEQ ID NO: 452118 - protein, 15 aa, Homo sapiens
  CDR3 for beta chain variable domain of TCR clone 226059 (TRBV20-1, TRBJ2-5)
CSAEGTGGLQETQYF

SEQ ID NO: 452119 - protein, 12 aa, Homo sapiens
  CDR3 for alpha chain variable domain of TCR clone 226060 (TRAV27, TRAJ9)
CAGESGGFKTIF

SEQ ID NO: 452120 - protein, 13 aa, Homo sapiens
  CDR3 for beta chain variable domain of TCR clone 226060 (TRBV12-4, TRBJ2-7)
CASTSGARGEQYF

SEQ ID NO: 452121 - protein, 13 aa, Homo sapiens
  CDR3 for alpha chain variable domain of TCR clone 226061 (TRAV17, TRAJ9)
CATDYTGGCKTIF

SEQ ID NO: 452122 - protein, 16 aa, Homo sapiens
  CDR3 for beta chain variable domain of TCR clone 226061 (TRBV7-7, TRBJ2-1)
CARSLASGTSYNEQFF

SEQ ID NO: 452123 - protein, 16 aa, Homo sapiens
  CDR3 for alpha chain variable domain of TCR clone 226062 (TRAV30, TRAJ24)
CGTEIGDADSWGKFQF

SEQ ID NO: 452124 - protein, 16 aa, Homo sapiens
  CDR3 for beta chain variable domain of TCR clone 226062 (TRBV12-4, TRBJ2-5)
CASSFFVRGRQETQYF

SEQ ID NO: 452125 - protein, 21 aa, Homo sapiens
  CDR3 for alpha chain variable domain of TCR clone 226063 (TRAV26-1, )
CIADNAANNHIQNPDPAVYQL

SEQ ID NO: 452126 - protein, 13 aa, Homo sapiens
  CDR3 for beta chain variable domain of TCR clone 226063 (TRBV20-1, TRBJ1-1)
CSARGGGNTEAFF

SEQ ID NO: 452127 - protein, 15 aa, Homo sapiens
  CDR3 for alpha chain variable domain of TCR clone 226064 (TRAV3, TRAJ5)
CAVRDLDTARRALTF

SEQ ID NO: 452128 - protein, 13 aa, Homo sapiens
  CDR3 for beta chain variable domain of TCR clone 226064 (TRBV12-4, TRBJ2-7)
CASSPTEPYEQYF

SEQ ID NO: 452129 - protein, 18 aa, Homo sapiens
  CDR3 for alpha chain variable domain of TCR clone 226065 (TRAV1-2, TRAJ18)
CAVRDMGDRGSTLGRLYF

SEQ ID NO: 452130 - protein, 15 aa, Homo sapiens
  CDR3 for beta chain variable domain of TCR clone 226065 (TRBV19, TRBJ1-2)
CASSVGQVLNYGYTF

SEQ ID NO: 452131 - protein, 14 aa, Homo sapiens
  CDR3 for alpha chain variable domain of TCR clone 226066 (TRAV17, TRAJ53)
CATDAGGSNYKLTF

SEQ ID NO: 452132 - protein, 14 aa, Homo sapiens
  CDR3 for beta chain variable domain of TCR clone 226066 (TRBV7-8, TRBJ2-3)
CASSFKSSTDTQYF

SEQ ID NO: 452133 - protein, 16 aa, Homo sapiens
  CDR3 for alpha chain variable domain of TCR clone 226067 (TRAV3, TRAJ37)
CAVRGKGSGNTGKLIF

SEQ ID NO: 452134 - protein, 15 aa, Homo sapiens
  CDR3 for beta chain variable domain of TCR clone 226067 (TRBV7-9, TRBJ1-6)
CASSSSGRGNSPLHF

SEQ ID NO: 452135 - protein, 12 aa, Homo sapiens
  CDR3 for alpha chain variable domain of TCR clone 226068 (TRAV2, TRAJ9)
CAVGAGGFKTIF

SEQ ID NO: 452136 - protein, 18 aa, Homo sapiens
  CDR3 for beta chain variable domain of TCR clone 226068 (TRBV6-6, TRBJ1-3)
CASSYSKWDSISGNTIYF

SEQ ID NO: 452137 - protein, 14 aa, Homo sapiens
  CDR3 for alpha chain variable domain of TCR clone 226069 (TRAV1-2, TRAJ8)
CAVREDTGLQKLVF

SEQ ID NO: 452138 - protein, 16 aa, Homo sapiens
  CDR3 for beta chain variable domain of TCR clone 226069 (TRBV20-1, TRBJ2-4)
CSARAILAGQGDIQYF

SEQ ID NO: 452139 - protein, 14 aa, Homo sapiens
  CDR3 for alpha chain variable domain of TCR clone 226070 (TRAV2, TRAJ37)
CAVDFTSNTGKLIF

SEQ ID NO: 452140 - protein, 15 aa, Homo sapiens
  CDR3 for beta chain variable domain of TCR clone 226070 (TRBV2, TRBJ2-1)
CATSELAGSYNEQFF

SEQ ID NO: 452141 - protein, 12 aa, Homo sapiens
  CDR3 for alpha chain variable domain of TCR clone 226071 (TRAV12-3, TRAJ42)
CVSGGSQGNLIF

SEQ ID NO: 452142 - protein, 13 aa, Homo sapiens
  CDR3 for beta chain variable domain of TCR clone 226071 (TRBV5-7, TRBJ2-6)
CASTSSGANVLTF

SEQ ID NO: 452143 - protein, 16 aa, Homo sapiens
  CDR3 for alpha chain variable domain of TCR clone 226072 (TRAV30, TRAJ24)
CGTEIVDADSWGKFQF

SEQ ID NO: 452144 - protein, 14 aa, Homo sapiens
  CDR3 for beta chain variable domain of TCR clone 226072 (TRBV7-6, TRBJ2-3)
CASSSGTVTDTQYF

SEQ ID NO: 452145 - protein, 14 aa, Homo sapiens
  CDR3 for alpha chain variable domain of TCR clone 226073 (TRAV1-1, TRAJ23)
CAVSIYNQGGKLIF

SEQ ID NO: 452146 - protein, 15 aa, Homo sapiens
  CDR3 for beta chain variable domain of TCR clone 226073 (TRBV27, TRBJ1-6)
CASSFDRGLGSPLHF

SEQ ID NO: 452147 - protein, 16 aa, Homo sapiens
  CDR3 for alpha chain variable domain of TCR clone 226074 (TRAV16, TRAJ52)
CALSAAGGSSYGKLTF

SEQ ID NO: 452148 - protein, 12 aa, Homo sapiens
  CDR3 for beta chain variable domain of TCR clone 226074 (TRBV12-4, TRBJ1-3)
CASSFSGNTIYF

SEQ ID NO: 452149 - protein, 12 aa, Homo sapiens
  CDR3 for alpha chain variable domain of TCR clone 226075 (TRAV17, TRAJ39)
CATGAAGNMLTF

SEQ ID NO: 452150 - protein, 14 aa, Homo sapiens
  CDR3 for beta chain variable domain of TCR clone 226075 (TRBV7-9, TRBJ1-2)
CASSRQGANYGNTF

SEQ ID NO: 452151 - protein, 15 aa, Homo sapiens
  CDR3 for alpha chain variable domain of TCR clone 226076 (TRAV13-1, TRAJ39)
CAASPLNNAGNMLTF

SEQ ID NO: 452152 - protein, 13 aa, Homo sapiens
  CDR3 for beta chain variable domain of TCR clone 226076 (TRBV19, TRBJ2-7)
CASSPRQSYEQYF

SEQ ID NO: 452153 - protein, 12 aa, Homo sapiens
  CDR3 for alpha chain variable domain of TCR clone 226077 (TRAV13-2, TRAJ16)
CAASPDGQKLLF

SEQ ID NO: 452154 - protein, 13 aa, Homo sapiens
  CDR3 for beta chain variable domain of TCR clone 226077 (TRBV7-3, TRBJ2-1)
CASSLDSYNEQFF

SEQ ID NO: 452155 - protein, 18 aa, Homo sapiens
  CDR3 for alpha chain variable domain of TCR clone 226078 (TRAV26-2, TRAJ45)
CILRVDKYSGGGADGLAF

SEQ ID NO: 452156 - protein, 17 aa, Homo sapiens
  CDR3 for beta chain variable domain of TCR clone 226078 (TRBV25-1, TRBJ2-1)
CASSAYGQGRGVYEQFF

SEQ ID NO: 452157 - protein, 12 aa, Homo sapiens
  CDR3 for alpha chain variable domain of TCR clone 226079 (TRAV29/DV5, TRAJ15)
CASNQAGTALNF

SEQ ID NO: 452158 - protein, 15 aa, Homo sapiens
  CDR3 for beta chain variable domain of TCR clone 226079 (TRBV11-2, TRBJ2-2)
CASSSDRVNAGELFS

SEQ ID NO: 452159 - protein, 14 aa, Homo sapiens
  CDR3 for alpha chain variable domain of TCR clone 226080 (TRAV8-1, TRAJ5)
CAVRTDTGRRALTF

SEQ ID NO: 452160 - protein, 15 aa, Homo sapiens
  CDR3 for beta chain variable domain of TCR clone 226080 (TRBV7-3, TRBJ2-1)
YASSPTGGGEVEQFF

SEQ ID NO: 452161 - protein, 17 aa, Homo sapiens
  CDR3 for alpha chain variable domain of TCR clone 226081 (TRAV3, TRAJ6)
CAVRDGPRAGGSYIPTF

SEQ ID NO: 452162 - protein, 14 aa, Homo sapiens
  CDR3 for beta chain variable domain of TCR clone 226081 (TRBV7-2, TRBJ2-7)
CASSLDPGPYEQYF

SEQ ID NO: 452163 - protein, 14 aa, Homo sapiens
  CDR3 for alpha chain variable domain of TCR clone 226082 (TRAV3, TRAJ36)
CAVRDGTGANNLFF

SEQ ID NO: 452164 - protein, 16 aa, Homo sapiens
  CDR3 for beta chain variable domain of TCR clone 226082 (TRBV7-3, TRBJ2-5)
CASIQPGGSVQETHYF

SEQ ID NO: 452165 - protein, 15 aa, Homo sapiens
  CDR3 for alpha chain variable domain of TCR clone 226083 (TRAV12-2, TRAJ53)
CAVHGGGGRNYKLTF

SEQ ID NO: 452166 - protein, 13 aa, Homo sapiens
  CDR3 for beta chain variable domain of TCR clone 226083 (TRBV3-1, TRBJ1-1)
CASSPGVITEAFF

SEQ ID NO: 452167 - protein, 15 aa, Homo sapiens
  CDR3 for alpha chain variable domain of TCR clone 226084 (TRAV12-2, TRAJ43)
CAFDMRFGAGTRLTV

SEQ ID NO: 452168 - protein, 13 aa, Homo sapiens
  CDR3 for beta chain variable domain of TCR clone 226084 (TRBV6-1, TRBJ1-6)
CASSSSWDSTLHF

SEQ ID NO: 452169 - protein, 13 aa, Homo sapiens
  CDR3 for alpha chain variable domain of TCR clone 226085 (TRAV13-2, TRAJ48)
CAEMDFGNEKLTF

SEQ ID NO: 452170 - protein, 15 aa, Homo sapiens
  CDR3 for beta chain variable domain of TCR clone 226085 (TRBV7-9, TRBJ1-6)
CASSSPGRANSPLHF

SEQ ID NO: 452171 - protein, 13 aa, Homo sapiens
  CDR3 for alpha chain variable domain of TCR clone 226086 (TRAV13-1, TRAJ21)
CAASVYNFSKFYF

SEQ ID NO: 452172 - protein, 13 aa, Homo sapiens
  CDR3 for beta chain variable domain of TCR clone 226086 (TRBV27, TRBJ1-4)
CASSLMGDEKLFF

SEQ ID NO: 452173 - protein, 13 aa, Homo sapiens
  CDR3 for alpha chain variable domain of TCR clone 226087 (TRAV2, TRAJ40)
CAVVTSGTYKYIF

SEQ ID NO: 452174 - protein, 18 aa, Homo sapiens
  CDR3 for beta chain variable domain of TCR clone 226087 (TRBV11-2, TRBJ2-3)
CASSLGGASRGAPNTKYF

SEQ ID NO: 452175 - protein, 13 aa, Homo sapiens
  CDR3 for alpha chain variable domain of TCR clone 226088 (TRAV35, TRAJ58)
CAGLGTSGSRLTF

SEQ ID NO: 452176 - protein, 15 aa, Homo sapiens
  CDR3 for beta chain variable domain of TCR clone 226088 (TRBV20-1, TRBJ2-1)
CSARFSAGGLNEQFF

SEQ ID NO: 452177 - protein, 13 aa, Homo sapiens
  CDR3 for alpha chain variable domain of TCR clone 226089 (TRAV1-1, TRAJ13)
CAVNSGGYQKVTF

SEQ ID NO: 452178 - protein, 12 aa, Homo sapiens
  CDR3 for beta chain variable domain of TCR clone 226089 (TRBV28, TRBJ2-1)
CASSVQINEQYF

SEQ ID NO: 452179 - protein, 14 aa, Homo sapiens
  CDR3 for alpha chain variable domain of TCR clone 226090 (TRAV12-2, TRAJ13)
CAVKKTGGYQKVTF

SEQ ID NO: 452180 - protein, 12 aa, Homo sapiens
  CDR3 for beta chain variable domain of TCR clone 226090 (TRBV12-4, TRBJ1-2)
CASSFIRLHLRF

SEQ ID NO: 452181 - protein, 15 aa, Homo sapiens
  CDR3 for alpha chain variable domain of TCR clone 226091 (TRAV8-3, TRAJ45)
CASSYSGGGADGLTF

SEQ ID NO: 452182 - protein, 14 aa, Homo sapiens
  CDR3 for beta chain variable domain of TCR clone 226091 (TRBV11-2, TRBJ2-3)
CASSRRARTDTQYF

SEQ ID NO: 452183 - protein, 13 aa, Homo sapiens
  CDR3 for alpha chain variable domain of TCR clone 226092 (TRAV17, TRAJ6)
CATGFGGSYIPTF

SEQ ID NO: 452184 - protein, 14 aa, Homo sapiens
  CDR3 for beta chain variable domain of TCR clone 226092 (TRBV5-1, TRBJ2-5)
CASSCGGSHETQYF

SEQ ID NO: 452185 - protein, 12 aa, Homo sapiens
  CDR3 for alpha chain variable domain of TCR clone 226093 (TRAV12-3, TRAJ17)
CAMTLTDNKLTF

SEQ ID NO: 452186 - protein, 13 aa, Homo sapiens
  CDR3 for beta chain variable domain of TCR clone 226093 (TRBV6-1, TRBJ1-1)
CASSRQGNTEALF

SEQ ID NO: 452187 - protein, 11 aa, Homo sapiens
  CDR3 for alpha chain variable domain of TCR clone 226094 (TRAV1-2, TRAJ31)
CAANNNARLMF

SEQ ID NO: 452188 - protein, 13 aa, Homo sapiens
  CDR3 for beta chain variable domain of TCR clone 226094 (TRBV12-4, TRBJ2-3)
CASSSPLGGTQYF

SEQ ID NO: 452189 - protein, 12 aa, Homo sapiens
  CDR3 for alpha chain variable domain of TCR clone 226095 (TRAV12-3, TRAJ17)
CSMTLTGNKLTF

SEQ ID NO: 452190 - protein, 15 aa, Homo sapiens
  CDR3 for beta chain variable domain of TCR clone 226095 (TRBV10-2, TRBJ2-6)
CASSEQGTGANVLTF

SEQ ID NO: 452191 - protein, 14 aa, Homo sapiens
  CDR3 for alpha chain variable domain of TCR clone 226096 (TRAV12-3, TRAJ22)
CAMSLFGSARQLTF

SEQ ID NO: 452192 - protein, 13 aa, Homo sapiens
  CDR3 for beta chain variable domain of TCR clone 226096 (TRBV7-2, TRBJ2-4)
CASSREHANIQYF

SEQ ID NO: 452193 - protein, 14 aa, Homo sapiens
  CDR3 for alpha chain variable domain of TCR clone 226097 (TRAV26-1, TRAJ22)
CIVRVYGSARQLTF

SEQ ID NO: 452194 - protein, 15 aa, Homo sapiens
  CDR3 for beta chain variable domain of TCR clone 226097 (TRBV6-6, TRBJ2-7)
CASSYSYGGSYEQYF

SEQ ID NO: 452195 - protein, 13 aa, Homo sapiens
  CDR3 for alpha chain variable domain of TCR clone 226098 (TRAV27, TRAJ45)
CRSSGGGADGLTF

SEQ ID NO: 452196 - protein, 15 aa, Homo sapiens
  CDR3 for beta chain variable domain of TCR clone 226098 (TRBV4-1, TRBJ2-7)
CASSQQGQGFDEQYF

SEQ ID NO: 452197 - protein, 12 aa, Homo sapiens
  CDR3 for alpha chain variable domain of TCR clone 226099 (TRAV12-3, TRAJ17)
CAMMLTGNKLTF

SEQ ID NO: 452198 - protein, 11 aa, Homo sapiens
  CDR3 for beta chain variable domain of TCR clone 226099 (TRBV11-2, TRBJ1-1)
CASSINTEAFF

SEQ ID NO: 452199 - protein, 14 aa, Homo sapiens
  CDR3 for alpha chain variable domain of TCR clone 226100 (TRAV12-3, TRAJ47)
CAMSVREYRNKLVF

SEQ ID NO: 452200 - protein, 15 aa, Homo sapiens
  CDR3 for beta chain variable domain of TCR clone 226100 (TRBV20-1, TRBJ2-2)
CSARDTRLNTGELFF

SEQ ID NO: 452201 - protein, 13 aa, Homo sapiens
  CDR3 for alpha chain variable domain of TCR clone 226101 (TRAV6, TRAJ22)
CAPFSGSARQLTF

SEQ ID NO: 452202 - protein, 13 aa, Homo sapiens
  CDR3 for beta chain variable domain of TCR clone 226101 (TRBV19, TRBJ2-7)
CASRKVGGSEQYF

SEQ ID NO: 452203 - protein, 14 aa, Homo sapiens
  CDR3 for alpha chain variable domain of TCR clone 226102 (TRAV13-1, TRAJ44)
CAASSGGTASKLTF

SEQ ID NO: 452204 - protein, 13 aa, Homo sapiens
  CDR3 for beta chain variable domain of TCR clone 226102 (TRBV7-3, TRBJ1-1)
CASSQDWGAEAFF

SEQ ID NO: 452205 - protein, 16 aa, Homo sapiens
  CDR3 for alpha chain variable domain of TCR clone 226103 (TRAV16, TRAJ24)
CDLSGGSTDSWGKLQF

SEQ ID NO: 452206 - protein, 15 aa, Homo sapiens
  CDR3 for beta chain variable domain of TCR clone 226103 (TRBV27, TRBJ2-1)
CASSNGGGSSNEQFF

SEQ ID NO: 452207 - protein, 14 aa, Homo sapiens
  CDR3 for alpha chain variable domain of TCR clone 226104 (TRAV1-2, TRAJ8)
CAVREDTGFQKLVF

SEQ ID NO: 452208 - protein, 16 aa, Homo sapiens
  CDR3 for beta chain variable domain of TCR clone 226104 (TRBV4-1, TRBJ2-7)
CASSLTAGQATYEQYF

SEQ ID NO: 452209 - protein, 13 aa, Homo sapiens
  CDR3 for alpha chain variable domain of TCR clone 226105 (TRAV20, TRAJ37)
CAGCPSNTGKLIF

SEQ ID NO: 452210 - protein, 11 aa, Homo sapiens
  CDR3 for beta chain variable domain of TCR clone 226105 (TRBV12-3, TRBJ2-3)
CASTATDTQYF

SEQ ID NO: 452211 - protein, 14 aa, Homo sapiens
  CDR3 for alpha chain variable domain of TCR clone 226106 (TRAV12-2, TRAJ40)
CAVKIPSGTYKYIF

SEQ ID NO: 452212 - protein, 13 aa, Homo sapiens
  CDR3 for beta chain variable domain of TCR clone 226106 (TRBV12-4, TRBJ1-2)
CASSLDSNYGYTF

SEQ ID NO: 452213 - protein, 15 aa, Homo sapiens
  CDR3 for alpha chain variable domain of TCR clone 226107 (TRAV34, TRAJ38)
CGADFTPGNNRKLIW

SEQ ID NO: 452214 - protein, 16 aa, Homo sapiens
  CDR3 for beta chain variable domain of TCR clone 226107 (TRBV12-5, TRBJ2-5)
CASGPRTIGNQETQYF

SEQ ID NO: 452215 - protein, 13 aa, Homo sapiens
  CDR3 for alpha chain variable domain of TCR clone 226108 (TRAV3, TRAJ3)
CAVKALGASKIIF

SEQ ID NO: 452216 - protein, 18 aa, Homo sapiens
  CDR3 for beta chain variable domain of TCR clone 226108 (TRBV12-4, TRBJ2-5)
CASSPSGGRDPVLRARHA

SEQ ID NO: 452217 - protein, 13 aa, Homo sapiens
  CDR3 for alpha chain variable domain of TCR clone 226109 (TRAV17, TRAJ5)
CAPMDTGRRALTF

SEQ ID NO: 452218 - protein, 13 aa, Homo sapiens
  CDR3 for beta chain variable domain of TCR clone 226109 (TRBV7-2, TRBJ2-2)
CASSLAVTGELFF

SEQ ID NO: 452219 - protein, 14 aa, Homo sapiens
  CDR3 for alpha chain variable domain of TCR clone 226110 (TRAV12-3, TRAJ41)
CAMSAGNSGNALNF

SEQ ID NO: 452220 - protein, 11 aa, Homo sapiens
  CDR3 for beta chain variable domain of TCR clone 226110 (TRBV7-2, TRBJ2-3)
CASSSSDTQYF

SEQ ID NO: 452221 - protein, 17 aa, Homo sapiens
  CDR3 for alpha chain variable domain of TCR clone 226111 (TRAV13-2, TRAJ28)
CAEEPAGSGAGSYQLTL

SEQ ID NO: 452222 - protein, 15 aa, Homo sapiens
  CDR3 for beta chain variable domain of TCR clone 226111 (TRBV2, TRBJ2-7)
EDSAMYFCASSEQYF

SEQ ID NO: 452223 - protein, 12 aa, Homo sapiens
  CDR3 for alpha chain variable domain of TCR clone 226112 (TRAV8-3, TRAJ20)
CAVGANDYKLRF

SEQ ID NO: 452224 - protein, 19 aa, Homo sapiens
  CDR3 for beta chain variable domain of TCR clone 226112 (TRBV7-9, TRBJ2-6)
CASSLESATVLPGANVLTF

SEQ ID NO: 452225 - protein, 13 aa, Homo sapiens
  CDR3 for alpha chain variable domain of TCR clone 226113 (TRAV3, TRAJ41)
CALSSNSGYALNF

SEQ ID NO: 452226 - protein, 13 aa, Homo sapiens
  CDR3 for beta chain variable domain of TCR clone 226113 (TRBV20-1, TRBJ2-2)
CSALSGGAGELFF

SEQ ID NO: 452227 - protein, 11 aa, Homo sapiens
  CDR3 for alpha chain variable domain of TCR clone 226114 (TRAV21, TRAJ31)
CAVRNNPRLMF

SEQ ID NO: 452228 - protein, 14 aa, Homo sapiens
  CDR3 for beta chain variable domain of TCR clone 226114 (TRBV7-8, TRBJ2-3)
CASSLEAGTDTQYF

SEQ ID NO: 452229 - protein, 14 aa, Homo sapiens
  CDR3 for alpha chain variable domain of TCR clone 226115 (TRAV12-2, TRAJ17)
CAVLFKAADNKLTF

SEQ ID NO: 452230 - protein, 15 aa, Homo sapiens
  CDR3 for beta chain variable domain of TCR clone 226115 (TRBV20-1, TRBJ2-7)
CSARDRVSGMDEQYF

SEQ ID NO: 452231 - protein, 15 aa, Homo sapiens
  CDR3 for alpha chain variable domain of TCR clone 226116 (TRAV8-3, TRAJ6)
CAVGEDRGGSYIPTF

SEQ ID NO: 452232 - protein, 14 aa, Homo sapiens
  CDR3 for beta chain variable domain of TCR clone 226116 (TRBV27, TRBJ2-2)
CASLRSPPGGELFL

SEQ ID NO: 452233 - protein, 13 aa, Homo sapiens
  CDR3 for alpha chain variable domain of TCR clone 226117 (TRAV12-1, TRAJ13)
CVVALLGYLKVTF

SEQ ID NO: 452234 - protein, 13 aa, Homo sapiens
  CDR3 for beta chain variable domain of TCR clone 226117 (TRBV20-1, TRBJ2-5)
CSAILTGQETQYF

SEQ ID NO: 452235 - protein, 12 aa, Homo sapiens
  CDR3 for alpha chain variable domain of TCR clone 226118 (TRAV1-1, TRAJ30)
CAVRGRDDKIIF

SEQ ID NO: 452236 - protein, 14 aa, Homo sapiens
  CDR3 for beta chain variable domain of TCR clone 226118 (TRBV7-3, TRBJ2-2)
CASSSGEYTGELFF

SEQ ID NO: 452237 - protein, 13 aa, Homo sapiens
  CDR3 for alpha chain variable domain of TCR clone 226119 (TRAV20, TRAJ48)
RAVHLFGNEKLTF

SEQ ID NO: 452238 - protein, 15 aa, Homo sapiens
  CDR3 for beta chain variable domain of TCR clone 226119 (TRBV6-5, TRBJ2-6)
CASSQWEAGANVLTF

SEQ ID NO: 452239 - protein, 11 aa, Homo sapiens
  CDR3 for alpha chain variable domain of TCR clone 226120 (TRAV2, TRAJ33)
CAVDSNYQLIW

SEQ ID NO: 452240 - protein, 12 aa, Homo sapiens
  CDR3 for beta chain variable domain of TCR clone 226120 (TRBV7-9, TRBJ1-6)
CASSASESPLHF

SEQ ID NO: 452241 - protein, 16 aa, Homo sapiens
  CDR3 for alpha chain variable domain of TCR clone 226121 (TRAV12-2, TRAJ32)
CAVNMNYGGATNTLIF

SEQ ID NO: 452242 - protein, 16 aa, Homo sapiens
  CDR3 for beta chain variable domain of TCR clone 226121 (TRBV7-8, TRBJ2-3)
CASSTEGQRETDTQYF

SEQ ID NO: 452243 - protein, 13 aa, Homo sapiens
  CDR3 for alpha chain variable domain of TCR clone 226122 (TRAV2, TRAJ15)
CAVASQAGTALIF

SEQ ID NO: 452244 - protein, 14 aa, Homo sapiens
  CDR3 for beta chain variable domain of TCR clone 226122 (TRBV20-1, TRBJ1-1)
RSAQTRIGGTEAFF

SEQ ID NO: 452245 - protein, 14 aa, Homo sapiens
  CDR3 for alpha chain variable domain of TCR clone 226123 (TRAV3, TRAJ21)
CAVASQANFNNFYF

SEQ ID NO: 452246 - protein, 18 aa, Homo sapiens
  CDR3 for beta chain variable domain of TCR clone 226123 (TRBV7-9, TRBJ2-1)
CASSLAVSGTSGRNEQFF

SEQ ID NO: 452247 - protein, 13 aa, Homo sapiens
  CDR3 for alpha chain variable domain of TCR clone 226124 (TRAV13-1, TRAJ43)
CAASKNNNNDMRF

SEQ ID NO: 452248 - protein, 14 aa, Homo sapiens
  CDR3 for beta chain variable domain of TCR clone 226124 (TRBV7-2, TRBJ2-7)
CASSPKTSFYEQYL

SEQ ID NO: 452249 - protein, 13 aa, Homo sapiens
  CDR3 for alpha chain variable domain of TCR clone 226125 (TRAV9-2, TRAJ53)
CALSGGSNYKLTF

SEQ ID NO: 452250 - protein, 16 aa, Homo sapiens
  CDR3 for beta chain variable domain of TCR clone 226125 (TRBV7-3, TRBJ2-1)
YASSLEGYRSYNEQFF

SEQ ID NO: 452251 - protein, 14 aa, Homo sapiens
  CDR3 for alpha chain variable domain of TCR clone 226126 (TRAV1-1, TRAJ27)
CAVIDNTNAVKSTF

SEQ ID NO: 452252 - protein, 15 aa, Homo sapiens
  CDR3 for beta chain variable domain of TCR clone 226126 (TRBV7-2, TRBJ2-1)
CASSSGLAGGNEQFF

SEQ ID NO: 452253 - protein, 16 aa, Homo sapiens
  CDR3 for alpha chain variable domain of TCR clone 226127 (TRAV3, TRAJ21)
CAVRDRSASTNFTLDL

SEQ ID NO: 452254 - protein, 16 aa, Homo sapiens
  CDR3 for beta chain variable domain of TCR clone 226127 (TRBV7-2, TRBJ2-5)
CASSVESAGGRETQYF

SEQ ID NO: 452255 - protein, 17 aa, Homo sapiens
  CDR3 for alpha chain variable domain of TCR clone 226128 (TRAV3, TRAJ6)
CAVRDGPRAGGSYIPTF

SEQ ID NO: 452256 - protein, 16 aa, Homo sapiens
  CDR3 for beta chain variable domain of TCR clone 226128 (TRBV7-2, TRBJ2-7)
CASSPKTVSTSSTSGR

SEQ ID NO: 452257 - protein, 14 aa, Homo sapiens
  CDR3 for alpha chain variable domain of TCR clone 226129 (TRAV8-1, TRAJ39)
CAVNDNNAGNMLTF

SEQ ID NO: 452258 - protein, 14 aa, Homo sapiens
  CDR3 for beta chain variable domain of TCR clone 226129 (TRBV28, TRBJ2-1)
CASSPSTCYNEQFF

SEQ ID NO: 452259 - protein, 14 aa, Homo sapiens
  CDR3 for alpha chain variable domain of TCR clone 226130 (TRAV29/DV5, TRAJ45)
CAASFRGGADGLTF

SEQ ID NO: 452260 - protein, 15 aa, Homo sapiens
  CDR3 for beta chain variable domain of TCR clone 226130 (TRBV20-1, TRBJ2-7)
CSARDRVSGMDEQYF

SEQ ID NO: 452261 - protein, 14 aa, Homo sapiens
  CDR3 for alpha chain variable domain of TCR clone 226131 (TRAV26-1, TRAJ38)
CIANSAGNNRKLIW

SEQ ID NO: 452262 - protein, 13 aa, Homo sapiens
  CDR3 for beta chain variable domain of TCR clone 226131 (TRBV20-1, TRBJ1-1)
CSARGGGNTEAFF

SEQ ID NO: 452263 - protein, 18 aa, Homo sapiens
  CDR3 for alpha chain variable domain of TCR clone 226132 (TRAV26-1, TRAJ52)
CIVRVAGAGGTSNGKLTF

SEQ ID NO: 452264 - protein, 13 aa, Homo sapiens
  CDR3 for beta chain variable domain of TCR clone 226132 (TRBV7-8, TRBJ1-2)
CASSAQSYYGYTF

SEQ ID NO: 452265 - protein, 14 aa, Homo sapiens
  CDR3 for alpha chain variable domain of TCR clone 226133 (TRAV1-2, TRAJ8)
CAVREDTGFQVLVF

SEQ ID NO: 452266 - protein, 15 aa, Homo sapiens
  CDR3 for beta chain variable domain of TCR clone 226133 (TRBV7-9, TRBJ1-1)
CASSHRGTVNTEAFF

SEQ ID NO: 452267 - protein, 14 aa, Homo sapiens
  CDR3 for alpha chain variable domain of TCR clone 226134 (TRAV1-1, TRAJ27)
CAVIYNTNAGKSTF

SEQ ID NO: 452268 - protein, 12 aa, Homo sapiens
  CDR3 for beta chain variable domain of TCR clone 226134 (TRBV5-1, TRBJ2-7)
CASSLDSYEQYF

SEQ ID NO: 452269 - protein, 11 aa, Homo sapiens
  CDR3 for alpha chain variable domain of TCR clone 226135 (TRAV26-1, TRAJ37)
CIVRVGRELIF

SEQ ID NO: 452270 - protein, 17 aa, Homo sapiens
  CDR3 for beta chain variable domain of TCR clone 226135 (TRBV11-2, TRBJ2-1)
CASSLYPPGVEYNEQFF

SEQ ID NO: 452271 - protein, 11 aa, Homo sapiens
  CDR3 for alpha chain variable domain of TCR clone 226136 (TRAV21, TRAJ20)
CAVRDDYKLSF

SEQ ID NO: 452272 - protein, 14 aa, Homo sapiens
  CDR3 for beta chain variable domain of TCR clone 226136 (TRBV12-5, TRBJ2-5)
CASGSRTHQETQYF

SEQ ID NO: 452273 - protein, 18 aa, Homo sapiens
  CDR3 for alpha chain variable domain of TCR clone 226137 (TRAV8-3, TRAJ4)
WVREPTSNDPGGYNKLIF

SEQ ID NO: 452274 - protein, 13 aa, Homo sapiens
  CDR3 for beta chain variable domain of TCR clone 226137 (TRBV20-1, TRBJ1-2)
CSATVIQGSGYTF

SEQ ID NO: 452275 - protein, 11 aa, Homo sapiens
  CDR3 for alpha chain variable domain of TCR clone 226138 (TRAV13-2, TRAJ54)
RAVQGAQKLVF

SEQ ID NO: 452276 - protein, 16 aa, Homo sapiens
  CDR3 for beta chain variable domain of TCR clone 226138 (TRBV7-2, TRBJ2-3)
CASSLVALYSTDTQYF

SEQ ID NO: 452277 - protein, 17 aa, Homo sapiens
  CDR3 for alpha chain variable domain of TCR clone 226139 (TRAV3, TRAJ42)
CAVRDRDYGGSQGNLTF

SEQ ID NO: 452278 - protein, 16 aa, Homo sapiens
  CDR3 for beta chain variable domain of TCR clone 226139 (TRBV7-3, TRBJ2-2)
CASSLKRGTLSGELFF

SEQ ID NO: 452279 - protein, 13 aa, Homo sapiens
  CDR3 for alpha chain variable domain of TCR clone 226140 (TRAV1-1, TRAJ9)
CAAKNTGGFKTIF

SEQ ID NO: 452280 - protein, 16 aa, Homo sapiens
  CDR3 for beta chain variable domain of TCR clone 226140 (TRBV12-5, TRBJ2-5)
CASGPRTSGDQETQYF

SEQ ID NO: 452281 - protein, 15 aa, Homo sapiens
  CDR3 for alpha chain variable domain of TCR clone 226141 (TRAV26-1, TRAJ44)
CIVRIGTGTASKLTF

SEQ ID NO: 452282 - protein, 15 aa, Homo sapiens
  CDR3 for beta chain variable domain of TCR clone 226141 (TRBV9, TRBJ2-1)
CASSLAGSSYNEQFF

SEQ ID NO: 452283 - protein, 15 aa, Homo sapiens
  CDR3 for alpha chain variable domain of TCR clone 226142 (TRAV26-1, TRAJ29)
RIVRVEGSGNTPLVF

SEQ ID NO: 452284 - protein, 13 aa, Homo sapiens
  CDR3 for beta chain variable domain of TCR clone 226142 (TRBV7-9, TRBJ1-2)
CASSLKQNYGYTF

SEQ ID NO: 452285 - protein, 10 aa, Homo sapiens
  CDR3 for alpha chain variable domain of TCR clone 226143 (TRAV23/DV6, TRAJ57)
CAASSTLSQG

SEQ ID NO: 452286 - protein, 15 aa, Homo sapiens
  CDR3 for beta chain variable domain of TCR clone 226143 (TRBV28, TRBJ1-5)
CASSRTGGYVQPQHF

SEQ ID NO: 452287 - protein, 12 aa, Homo sapiens
  CDR3 for alpha chain variable domain of TCR clone 226144 (TRAV8-3, TRAJ20)
CAVGANDCKLSF

SEQ ID NO: 452288 - protein, 15 aa, Homo sapiens
  CDR3 for beta chain variable domain of TCR clone 226144 (TRBV10-2, TRBJ2-6)
CASSEQGTGANVLTF

SEQ ID NO: 452289 - protein, 12 aa, Homo sapiens
  CDR3 for alpha chain variable domain of TCR clone 226145 (TRAV21, TRAJ31)
CAVWGNNARLML

SEQ ID NO: 452290 - protein, 14 aa, Homo sapiens
  CDR3 for beta chain variable domain of TCR clone 226145 (TRBV7-2, TRBJ2-7)
CASRSQGAAYEQYF

SEQ ID NO: 452291 - protein, 14 aa, Homo sapiens
  CDR3 for alpha chain variable domain of TCR clone 226146 (TRAV35, TRAJ13)
CAGFPSGGYQKVTF

SEQ ID NO: 452292 - protein, 17 aa, Homo sapiens
  CDR3 for beta chain variable domain of TCR clone 226146 (TRBV18, TRBJ1-5)
CQLTTCRVRQNNQPQHF

SEQ ID NO: 452293 - protein, 13 aa, Homo sapiens
  CDR3 for alpha chain variable domain of TCR clone 226147 (TRAV16, TRAJ34)
CALIPYNTDKLIF

SEQ ID NO: 452294 - protein, 17 aa, Homo sapiens
  CDR3 for beta chain variable domain of TCR clone 226147 (TRBV5-1, TRBJ2-1)
CASSTGTSGYSYNEQFF

SEQ ID NO: 452295 - protein, 15 aa, Homo sapiens
  CDR3 for alpha chain variable domain of TCR clone 226148 (TRAV4, TRAJ39)
CLVGPNNNAGNMLTF

SEQ ID NO: 452296 - protein, 15 aa, Homo sapiens
  CDR3 for beta chain variable domain of TCR clone 226148 (TRBV9, TRBJ2-1)
CASSLAGSSYNEQFF

SEQ ID NO: 452297 - protein, 17 aa, Homo sapiens
  CDR3 for alpha chain variable domain of TCR clone 226149 (TRAV3, TRAJ6)
CAVRDGPRAGGSYIPTF

SEQ ID NO: 452298 - protein, 18 aa, Homo sapiens
  CDR3 for beta chain variable domain of TCR clone 226149 (TRBV7-9, TRBJ2-7)
CASSLTTGGSRTWYEQYF

SEQ ID NO: 452299 - protein, 14 aa, Homo sapiens
  CDR3 for alpha chain variable domain of TCR clone 226150 (TRAV29/DV5, TRAJ32)
CAAAYGGATNKLIF

SEQ ID NO: 452300 - protein, 13 aa, Homo sapiens
  CDR3 for beta chain variable domain of TCR clone 226150 (TRBV10-3, TRBJ2-7)
CASKLAVNHEQYF

SEQ ID NO: 452301 - protein, 10 aa, Homo sapiens
  CDR3 for alpha chain variable domain of TCR clone 226151 (TRAV21, TRAJ49)
CAVTVNQFYF

SEQ ID NO: 452302 - protein, 15 aa, Homo sapiens
  CDR3 for beta chain variable domain of TCR clone 226151 (TRBV6-1, TRBJ2-3)
CASTTLAGHTDTQYF

SEQ ID NO: 452303 - protein, 15 aa, Homo sapiens
  CDR3 for alpha chain variable domain of TCR clone 226152 (TRAV38-2/DV8, TRAJ48)
CAYRSPESGNEKLNF

SEQ ID NO: 452304 - protein, 13 aa, Homo sapiens
  CDR3 for beta chain variable domain of TCR clone 226152 (TRBV4-2, TRBJ1-2)
CASSLSASGGYTF

SEQ ID NO: 452305 - protein, 18 aa, Homo sapiens
  CDR3 for alpha chain variable domain of TCR clone 226153 (TRAV21, TRAJ52)
CAVRPSPASGTSYGKLTF

SEQ ID NO: 452306 - protein, 16 aa, Homo sapiens
  CDR3 for beta chain variable domain of TCR clone 226153 (TRBV19, TRBJ2-1)
CASSKAGPSSYNEQFF

SEQ ID NO: 452307 - protein, 17 aa, Homo sapiens
  CDR3 for alpha chain variable domain of TCR clone 226154 (TRAV13-2, TRAJ5)
CAESVVIVGHGQESTYF

SEQ ID NO: 452308 - protein, 18 aa, Homo sapiens
  CDR3 for beta chain variable domain of TCR clone 226154 (TRBV4-1, TRBJ2-3)
CASSHQLAGGRGTDTQYF

SEQ ID NO: 452309 - protein, 16 aa, Homo sapiens
  CDR3 for alpha chain variable domain of TCR clone 226155 (TRAV26-1, TRAJ48)
CIVREPPNFGNEKLTF

SEQ ID NO: 452310 - protein, 14 aa, Homo sapiens
  CDR3 for beta chain variable domain of TCR clone 226155 (TRBV7-2, TRBJ2-7)
CASSPKTSYYEQYF

SEQ ID NO: 452311 - protein, 15 aa, Homo sapiens
  CDR3 for alpha chain variable domain of TCR clone 226156 (TRAV17, TRAJ6)
CATDLPSGGSYIPTF

SEQ ID NO: 452312 - protein, 14 aa, Homo sapiens
  CDR3 for beta chain variable domain of TCR clone 226156 (TRBV20-1, TRBJ2-2)
CSAPDTANTGELFF

SEQ ID NO: 452313 - protein, 12 aa, Homo sapiens
  CDR3 for alpha chain variable domain of TCR clone 226157 (TRAV8-3, TRAJ26)
CAGDNYCQNFVF

SEQ ID NO: 452314 - protein, 15 aa, Homo sapiens
  CDR3 for beta chain variable domain of TCR clone 226157 (TRBV9, TRBJ2-1)
CASSLAGSSYNEQLF

SEQ ID NO: 452315 - protein, 16 aa, Homo sapiens
  CDR3 for alpha chain variable domain of TCR clone 226158 (TRAV3, TRAJ21)
CAVRDMERGNFNKFYF

SEQ ID NO: 452316 - protein, 16 aa, Homo sapiens
  CDR3 for beta chain variable domain of TCR clone 226158 (TRBV12-4, TRBJ1-5)
CASSRPVGGSNQPQHF

SEQ ID NO: 452317 - protein, 15 aa, Homo sapiens
  CDR3 for alpha chain variable domain of TCR clone 226159 (TRAV13-1, TRAJ22)
CAASLLSGSARQLTF

SEQ ID NO: 452318 - protein, 14 aa, Homo sapiens
  CDR3 for beta chain variable domain of TCR clone 226159 (TRBV20-1, TRBJ2-7)
CSARDGGLTYEQYF

SEQ ID NO: 452319 - protein, 14 aa, Homo sapiens
  CDR3 for alpha chain variable domain of TCR clone 226160 (TRAV3, TRAJ9)
CAVRLNTGGFKTIF

SEQ ID NO: 452320 - protein, 12 aa, Homo sapiens
  CDR3 for beta chain variable domain of TCR clone 226160 (TRBV14, TRBJ2-5)
CASSQLKETQYF

SEQ ID NO: 452321 - protein, 15 aa, Homo sapiens
  CDR3 for alpha chain variable domain of TCR clone 226161 (TRAV13-2, TRAJ45)
CAESDSGGGADGLTF

SEQ ID NO: 452322 - protein, 17 aa, Homo sapiens
  CDR3 for beta chain variable domain of TCR clone 226161 (TRBV27, TRBJ1-6)
CASSLDQLSSYNSPLYF

SEQ ID NO: 452323 - protein, 17 aa, Homo sapiens
  CDR3 for alpha chain variable domain of TCR clone 226162 (TRAV26-2, TRAJ32)
ERCCCGGYGGATNKLIF

SEQ ID NO: 452324 - protein, 14 aa, Homo sapiens
  CDR3 for beta chain variable domain of TCR clone 226162 (TRBV7-6, TRBJ2-3)
CASSLGTVTDTQYF

SEQ ID NO: 452325 - protein, 15 aa, Homo sapiens
  CDR3 for alpha chain variable domain of TCR clone 226163 (TRAV26-1, TRAJ22)
CIVRVSSWFRKATDL

SEQ ID NO: 452326 - protein, 13 aa, Homo sapiens
  CDR3 for beta chain variable domain of TCR clone 226163 (TRBV7-9, TRBJ1-2)
CASSLKQNYGYTF

SEQ ID NO: 452327 - protein, 14 aa, Homo sapiens
  CDR3 for alpha chain variable domain of TCR clone 226164 (TRAV1-2, TRAJ16)
CAVNRFSDGQKLLF

SEQ ID NO: 452328 - protein, 13 aa, Homo sapiens
  CDR3 for beta chain variable domain of TCR clone 226164 (TRBV10-3, TRBJ2-7)
CASKLAVNYEQDF

SEQ ID NO: 452329 - protein, 12 aa, Homo sapiens
  CDR3 for alpha chain variable domain of TCR clone 226165 (TRAV27, TRAJ13)
CAGVRGYHKVTF

SEQ ID NO: 452330 - protein, 16 aa, Homo sapiens
  CDR3 for beta chain variable domain of TCR clone 226165 (TRBV28, TRBJ2-1)
CASSSSYSGSLNEQFF

SEQ ID NO: 452331 - protein, 17 aa, Homo sapiens
  CDR3 for alpha chain variable domain of TCR clone 226166 (TRAV8-6, TRAJ58)
CAVSSWVGETSGSRFTF

SEQ ID NO: 452332 - protein, 16 aa, Homo sapiens
  CDR3 for beta chain variable domain of TCR clone 226166 (TRBV18, TRBJ2-7)
CASSPRSRGISYEQYF

SEQ ID NO: 452333 - protein, 14 aa, Homo sapiens
  CDR3 for alpha chain variable domain of TCR clone 226167 (TRAV1-1, TRAJ35)
CAVRSIGFGYVLHC

SEQ ID NO: 452334 - protein, 14 aa, Homo sapiens
  CDR3 for beta chain variable domain of TCR clone 226167 (TRBV5-7, TRBJ2-7)
CASSGGLSSYEQYF

SEQ ID NO: 452335 - protein, 15 aa, Homo sapiens
  CDR3 for alpha chain variable domain of TCR clone 226168 (TRAV8-1, TRAJ37)
CAVKKGSGNTGTLIF

SEQ ID NO: 452336 - protein, 17 aa, Homo sapiens
  CDR3 for beta chain variable domain of TCR clone 226168 (TRBV12-4, TRBJ1-1)
CASSLSGFRTMNTEAFF

SEQ ID NO: 452337 - protein, 15 aa, Homo sapiens
  CDR3 for alpha chain variable domain of TCR clone 226169 (TRAV12-1, TRAJ42)
CVVTRDGGSQGNLIF

SEQ ID NO: 452338 - protein, 13 aa, Homo sapiens
  CDR3 for beta chain variable domain of TCR clone 226169 (TRBV27, TRBJ2-7)
CASSLTTGYEKYS

SEQ ID NO: 452339 - protein, 14 aa, Homo sapiens
  CDR3 for alpha chain variable domain of TCR clone 226170 (TRAV12-2, TRAJ17)
CAVLFKAAGNKLTF

SEQ ID NO: 452340 - protein, 14 aa, Homo sapiens
  CDR3 for beta chain variable domain of TCR clone 226170 (TRBV19, TRBJ2-1)
CAGPTVVLSGEQFF

SEQ ID NO: 452341 - protein, 14 aa, Homo sapiens
  CDR3 for alpha chain variable domain of TCR clone 226171 (TRAV12-2, TRAJ13)
CAVKKTGGYQKVTF

SEQ ID NO: 452342 - protein, 19 aa, Homo sapiens
  CDR3 for beta chain variable domain of TCR clone 226171 (TRBV25-1, TRBJ2-2)
CAILVYRVDRGCKTGELFF

SEQ ID NO: 452343 - protein, 15 aa, Homo sapiens
  CDR3 for alpha chain variable domain of TCR clone 226172 (TRAV12-3, TRAJ6)
CAMSATTGGSYIPTF

SEQ ID NO: 452344 - protein, 18 aa, Homo sapiens
  CDR3 for beta chain variable domain of TCR clone 226172 (TRBV11-2, TRBJ2-3)
CASRLGGASRGAPNTQYF

SEQ ID NO: 452345 - protein, 14 aa, Homo sapiens
  CDR3 for alpha chain variable domain of TCR clone 226173 (TRAV12-3, TRAJ12)
CAMSRMDSSYKLIF

SEQ ID NO: 452346 - protein, 15 aa, Homo sapiens
  CDR3 for beta chain variable domain of TCR clone 226173 (TRBV20-1, TRBJ1-4)
SAVLDQGRVMKNCFF

SEQ ID NO: 452347 - protein, 16 aa, Homo sapiens
  CDR3 for alpha chain variable domain of TCR clone 226174 (TRAV12-3, TRAJ53)
CAMSPGSGGSNYKLTF

SEQ ID NO: 452348 - protein, 13 aa, Homo sapiens
  CDR3 for beta chain variable domain of TCR clone 226174 (TRBV7-2, TRBJ2-5)
CDSSQTSVETQYF

SEQ ID NO: 452349 - protein, 15 aa, Homo sapiens
  CDR3 for alpha chain variable domain of TCR clone 226175 (TRAV9-2, TRAJ56)
CALSDVDGANSKLTF

SEQ ID NO: 452350 - protein, 14 aa, Homo sapiens
  CDR3 for beta chain variable domain of TCR clone 226175 (TRBV5-1, TRBJ2-7)
CASGRGESLYEQYF

SEQ ID NO: 452351 - protein, 13 aa, Homo sapiens
  CDR3 for alpha chain variable domain of TCR clone 226176 (TRAV1-2, TRAJ12)
CAVSMDSSYKLIF

SEQ ID NO: 452352 - protein, 17 aa, Homo sapiens
  CDR3 for beta chain variable domain of TCR clone 226176 (TRBV11-2, TRBJ2-1)
CASSLCPPGVEYNEQFF

SEQ ID NO: 452353 - protein, 13 aa, Homo sapiens
  CDR3 for alpha chain variable domain of TCR clone 226177 (TRAV3, TRAJ5)
FAVRDTGRRALTF

SEQ ID NO: 452354 - protein, 17 aa, Homo sapiens
  CDR3 for beta chain variable domain of TCR clone 226177 (TRBV11-2, TRBJ2-1)
CASSLYPPGVEYNEQFF

SEQ ID NO: 452355 - protein, 11 aa, Homo sapiens
  CDR3 for alpha chain variable domain of TCR clone 226178 (TRAV1-2, TRAJ34)
CAGYNTDKLIF

SEQ ID NO: 452356 - protein, 16 aa, Homo sapiens
  CDR3 for beta chain variable domain of TCR clone 226178 (TRBV10-3, TRBJ2-1)
CAISGVGDGGGGGQFF

SEQ ID NO: 452357 - protein, 12 aa, Homo sapiens
  CDR3 for alpha chain variable domain of TCR clone 226179 (TRAV38-2/DV8, TRAJ48)
CALLSGNEKLTF

SEQ ID NO: 452358 - protein, 20 aa, Homo sapiens
  CDR3 for beta chain variable domain of TCR clone 226179 (TRBV7-8, TRBJ2-2)
CASSHLFPGPTIHITGELFF

SEQ ID NO: 452359 - protein, 13 aa, Homo sapiens
  CDR3 for alpha chain variable domain of TCR clone 226180 (TRAV21, TRAJ27)
CAARPGNAGKSTF

SEQ ID NO: 452360 - protein, 20 aa, Homo sapiens
  CDR3 for beta chain variable domain of TCR clone 226180 (TRBV7-8, TRBJ2-2)
CASSHLFPGPTIHITWELFF

SEQ ID NO: 452361 - protein, 12 aa, Homo sapiens
  CDR3 for alpha chain variable domain of TCR clone 226181 (TRAV17, TRAJ49)
CATVTTGNQFYF

SEQ ID NO: 452362 - protein, 18 aa, Homo sapiens
  CDR3 for beta chain variable domain of TCR clone 226181 (TRBV11-2, TRBJ2-6)
CASSLNPFLGTGANILTF

SEQ ID NO: 452363 - protein, 14 aa, Homo sapiens
  CDR3 for alpha chain variable domain of TCR clone 226182 (TRAV13-1, TRAJ3)
CAAEGYSSASKIIF

SEQ ID NO: 452364 - protein, 13 aa, Homo sapiens
  CDR3 for beta chain variable domain of TCR clone 226182 (TRBV6-1, TRBJ1-1)
CASSRQGNTEAFF

SEQ ID NO: 452365 - protein, 14 aa, Homo sapiens
  CDR3 for alpha chain variable domain of TCR clone 226183 (TRAV10, TRAJ6)
CAVSFSGGSYIPTF

SEQ ID NO: 452366 - protein, 12 aa, Homo sapiens
  CDR3 for beta chain variable domain of TCR clone 226183 (TRBV4-2, TRBJ2-5)
CASGGAQETQYF

SEQ ID NO: 452367 - protein, 12 aa, Homo sapiens
  CDR3 for alpha chain variable domain of TCR clone 226184 (TRAV17, TRAJ20)
CATQANDYKLSF

SEQ ID NO: 452368 - protein, 12 aa, Homo sapiens
  CDR3 for beta chain variable domain of TCR clone 226184 (TRBV6-1, TRBJ1-1)
CASNSPKAEAFF

SEQ ID NO: 452369 - protein, 12 aa, Homo sapiens
  CDR3 for alpha chain variable domain of TCR clone 226185 (TRAV17, TRAJ53)
CAGGGSNYKLTF

SEQ ID NO: 452370 - protein, 16 aa, Homo sapiens
  CDR3 for beta chain variable domain of TCR clone 226185 (TRBV11-2, TRBJ2-3)
CASSFQGRGALDTQYI

SEQ ID NO: 452371 - protein, 12 aa, Homo sapiens
  CDR3 for alpha chain variable domain of TCR clone 226186 (TRAV13-1, TRAJ36)
WRGGAGAKNLFF

SEQ ID NO: 452372 - protein, 16 aa, Homo sapiens
  CDR3 for beta chain variable domain of TCR clone 226186 (TRBV7-9, TRBJ2-5)
CASRLEIGTRKETQYF

SEQ ID NO: 452373 - protein, 12 aa, Homo sapiens
  CDR3 for alpha chain variable domain of TCR clone 226187 (TRAV3, TRAJ26)
CAVRDYGQNFVF

SEQ ID NO: 452374 - protein, 16 aa, Homo sapiens
  CDR3 for beta chain variable domain of TCR clone 226187 (TRBV19, TRBJ2-1)
CASSKAGPSSYNEQFF

SEQ ID NO: 452375 - protein, 11 aa, Homo sapiens
  CDR3 for alpha chain variable domain of TCR clone 226188 (TRAV1-2, TRAJ20)
CAVSNYYKLSF

SEQ ID NO: 452376 - protein, 16 aa, Homo sapiens
  CDR3 for beta chain variable domain of TCR clone 226188 (TRBV29-1, TRBJ2-6)
CSVEDITYSGANDLTF

SEQ ID NO: 452377 - protein, 10 aa, Homo sapiens
  CDR3 for alpha chain variable domain of TCR clone 226189 (TRAV1-2, TRAJ31)
CAFFDARLMF

SEQ ID NO: 452378 - protein, 13 aa, Homo sapiens
  CDR3 for beta chain variable domain of TCR clone 226189 (TRBV20-1, TRBJ1-2)
CSATGIQGSGYTF

SEQ ID NO: 452379 - protein, 11 aa, Homo sapiens
  CDR3 for alpha chain variable domain of TCR clone 226190 (TRAV12-1, TRAJ21)
CVVYNFNKFYF

SEQ ID NO: 452380 - protein, 14 aa, Homo sapiens
  CDR3 for beta chain variable domain of TCR clone 226190 (TRBV19, TRBJ2-7)
CASSMGQGAIQQYF

SEQ ID NO: 452381 - protein, 14 aa, Homo sapiens
  CDR3 for alpha chain variable domain of TCR clone 226191 (TRAV12-2, TRAJ24)
CAVTPADRRGKLQF

SEQ ID NO: 452382 - protein, 12 aa, Homo sapiens
  CDR3 for beta chain variable domain of TCR clone 226191 (TRBV3-1, TRBJ2-1)
CASSQGSSGQFF

SEQ ID NO: 452383 - protein, 12 aa, Homo sapiens
  CDR3 for alpha chain variable domain of TCR clone 226192 (TRAV12-1, TRAJ40)
CVVYSGTYKYIF

SEQ ID NO: 452384 - protein, 14 aa, Homo sapiens
  CDR3 for beta chain variable domain of TCR clone 226192 (TRBV7-9, TRBJ2-5)
CASSLDTAQEAQYF

SEQ ID NO: 452385 - protein, 13 aa, Homo sapiens
  CDR3 for alpha chain variable domain of TCR clone 226193 (TRAV8-3, TRAJ44)
CAVVPGTASKLTF

SEQ ID NO: 452386 - protein, 13 aa, Homo sapiens
  CDR3 for beta chain variable domain of TCR clone 226193 (TRBV7-9, TRBJ2-2)
CASSLDPTGELFF

SEQ ID NO: 452387 - protein, 10 aa, Homo sapiens
  CDR3 for alpha chain variable domain of TCR clone 226194 (TRAV17, TRAJ52)
SATSYGKLTF

SEQ ID NO: 452388 - protein, 13 aa, Homo sapiens
  CDR3 for beta chain variable domain of TCR clone 226194 (TRBV29-1, TRBJ2-5)
CSVGGTRAETQYF

SEQ ID NO: 452389 - protein, 16 aa, Homo sapiens
  CDR3 for alpha chain variable domain of TCR clone 226195 (TRAV30, TRAJ24)
CGTEIVDADSWGKFQV

SEQ ID NO: 452390 - protein, 15 aa, Homo sapiens
  CDR3 for beta chain variable domain of TCR clone 226195 (TRBV4-3, TRBJ1-5)
CASSQEAVGGQPQHF

SEQ ID NO: 452391 - protein, 14 aa, Homo sapiens
  CDR3 for alpha chain variable domain of TCR clone 226196 (TRAV2, TRAJ22)
CAVGRGGSARQLTF

SEQ ID NO: 452392 - protein, 14 aa, Homo sapiens
  CDR3 for beta chain variable domain of TCR clone 226196 (TRBV7-3, TRBJ2-7)
CASTILSRGDEQYF

SEQ ID NO: 452393 - protein, 13 aa, Homo sapiens
  CDR3 for alpha chain variable domain of TCR clone 226197 (TRAV36/DV7, TRAJ33)
CAVDMDSNYQLIW

SEQ ID NO: 452394 - protein, 16 aa, Homo sapiens
  CDR3 for beta chain variable domain of TCR clone 226197 (TRBV15, TRBJ2-3)
CATRLPGWRAPDTQYF

SEQ ID NO: 452395 - protein, 14 aa, Homo sapiens
  CDR3 for alpha chain variable domain of TCR clone 226198 (TRAV35, TRAJ33)
CAGSFKDSNYQLIW

SEQ ID NO: 452396 - protein, 15 aa, Homo sapiens
  CDR3 for beta chain variable domain of TCR clone 226198 (TRBV20-1, TRBJ2-7)
CSAESGTSGAYEQYF

SEQ ID NO: 452397 - protein, 15 aa, Homo sapiens
  CDR3 for alpha chain variable domain of TCR clone 226199 (TRAV13-1, TRAJ5)
CAASPMGHGQESTYF

SEQ ID NO: 452398 - protein, 17 aa, Homo sapiens
  CDR3 for beta chain variable domain of TCR clone 226199 (TRBV3-1, TRBJ2-2)
CASSQFRDKVDTGELFF

SEQ ID NO: 452399 - protein, 13 aa, Homo sapiens
  CDR3 for alpha chain variable domain of TCR clone 226200 (TRAV12-2, TRAJ9)
CAGGNTGGFKTSF

SEQ ID NO: 452400 - protein, 17 aa, Homo sapiens
  CDR3 for beta chain variable domain of TCR clone 226200 (TRBV4-1, TRBJ2-1)
CASSQGRGGGLYNEQFF

SEQ ID NO: 452401 - protein, 16 aa, Homo sapiens
  CDR3 for alpha chain variable domain of TCR clone 226201 (TRAV13-1, TRAJ22)
CAAKGGRSGSARQLTV

SEQ ID NO: 452402 - protein, 15 aa, Homo sapiens
  CDR3 for beta chain variable domain of TCR clone 226201 (TRBV9, TRBJ1-6)
CASSVAGTGDSPLHF

SEQ ID NO: 452403 - protein, 12 aa, Homo sapiens
  CDR3 for alpha chain variable domain of TCR clone 226202 (TRAV17, TRAJ39)
CAAGAAGNMLTL

SEQ ID NO: 452404 - protein, 14 aa, Homo sapiens
  CDR3 for beta chain variable domain of TCR clone 226202 (TRBV7-9, TRBJ1-2)
CASSRQGANYGYTF

SEQ ID NO: 452405 - protein, 13 aa, Homo sapiens
  CDR3 for alpha chain variable domain of TCR clone 226203 (TRAV12-2, TRAJ20)
CAVYPSNDYKLSF

SEQ ID NO: 452406 - protein, 13 aa, Homo sapiens
  CDR3 for beta chain variable domain of TCR clone 226203 (TRBV24-1, TRBJ2-2)
CATSDWSTGELFF

SEQ ID NO: 452407 - protein, 14 aa, Homo sapiens
  CDR3 for alpha chain variable domain of TCR clone 226204 (TRAV8-4, TRAJ13)
CAVTLSGGYQKVTF

SEQ ID NO: 452408 - protein, 17 aa, Homo sapiens
  CDR3 for beta chain variable domain of TCR clone 226204 (TRBV7-3, TRBJ2-3)
CASSPRGQGYGTDTQYF

SEQ ID NO: 452409 - protein, 10 aa, Homo sapiens
  CDR3 for alpha chain variable domain of TCR clone 226205 (TRAV1-2, TRAJ20)
CALNDYKLSF

SEQ ID NO: 452410 - protein, 16 aa, Homo sapiens
  CDR3 for beta chain variable domain of TCR clone 226205 (TRBV20-1, TRBJ1-1)
CSARARTQGMNTEAFF

SEQ ID NO: 452411 - protein, 16 aa, Homo sapiens
  CDR3 for alpha chain variable domain of TCR clone 226206 (TRAV8-3, TRAJ13)
CAVGAYPSGGYQKGTF

SEQ ID NO: 452412 - protein, 13 aa, Homo sapiens
  CDR3 for beta chain variable domain of TCR clone 226206 (TRBV7-9, TRBJ1-2)
CASSLKQNYGYTF

SEQ ID NO: 452413 - protein, 11 aa, Homo sapiens
  CDR3 for alpha chain variable domain of TCR clone 226207 (TRAV1-2, TRAJ20)
CAVANDYKLSF

SEQ ID NO: 452414 - protein, 15 aa, Homo sapiens
  CDR3 for beta chain variable domain of TCR clone 226207 (TRBV6-1, TRBJ2-2)
CASSRLQGDTGELFF

SEQ ID NO: 452415 - protein, 16 aa, Homo sapiens
  CDR3 for alpha chain variable domain of TCR clone 226208 (TRAV13-1, TRAJ13)
CTAFFLGITRKLPLEL

SEQ ID NO: 452416 - protein, 15 aa, Homo sapiens
  CDR3 for beta chain variable domain of TCR clone 226208 (TRBV7-8, TRBJ2-1)
CASSLADSLYNEQFF

SEQ ID NO: 452417 - protein, 13 aa, Homo sapiens
  CDR3 for alpha chain variable domain of TCR clone 226209 (TRAV8-3, TRAJ43)
CAVGPDNNNDMRF

SEQ ID NO: 452418 - protein, 20 aa, Homo sapiens
  CDR3 for beta chain variable domain of TCR clone 226209 (TRBV28, TRBJ2-1)
CASTPIGRSPGLAGGNEQFF

SEQ ID NO: 452419 - protein, 12 aa, Homo sapiens
  CDR3 for alpha chain variable domain of TCR clone 226210 (TRAV12-1, TRAJ31)
CVSWNNNARLMF

SEQ ID NO: 452420 - protein, 15 aa, Homo sapiens
  CDR3 for beta chain variable domain of TCR clone 226210 (TRBV28, TRBJ2-1)
CASSIIAGGRSEQFF

SEQ ID NO: 452421 - protein, 14 aa, Homo sapiens
  CDR3 for alpha chain variable domain of TCR clone 226211 (TRAV12-2, TRAJ17)
WAGLFKAAGNKLTF

SEQ ID NO: 452422 - protein, 17 aa, Homo sapiens
  CDR3 for beta chain variable domain of TCR clone 226211 (TRBV20-1, TRBJ2-2)
CSASGSGQGGLTGELFF

SEQ ID NO: 452423 - protein, 13 aa, Homo sapiens
  CDR3 for alpha chain variable domain of TCR clone 226212 (TRAV3, TRAJ27)
CAVRPLVAGKSTF

SEQ ID NO: 452424 - protein, 13 aa, Homo sapiens
  CDR3 for beta chain variable domain of TCR clone 226212 (TRBV7-9, TRBJ2-3)
CASSPGATDTQYF

SEQ ID NO: 452425 - protein, 16 aa, Homo sapiens
  CDR3 for alpha chain variable domain of TCR clone 226213 (TRAV3, TRAJ37)
CAVRVRGSGNTGKLIY

SEQ ID NO: 452426 - protein, 13 aa, Homo sapiens
  CDR3 for beta chain variable domain of TCR clone 226213 (TRBV14, TRBJ2-1)
CASSQDRRNEQFF

SEQ ID NO: 452427 - protein, 14 aa, Homo sapiens
  CDR3 for alpha chain variable domain of TCR clone 226214 (TRAV1-2, TRAJ15)
CAVRDRQTGTALIF

SEQ ID NO: 452428 - protein, 13 aa, Homo sapiens
  CDR3 for beta chain variable domain of TCR clone 226214 (TRBV4-1, TRBJ2-2)
CASSQENTGELFF

SEQ ID NO: 452429 - protein, 13 aa, Homo sapiens
  CDR3 for alpha chain variable domain of TCR clone 226215 (TRAV8-6, TRAJ21)
CAVSPSSLHKFYF

SEQ ID NO: 452430 - protein, 14 aa, Homo sapiens
  CDR3 for beta chain variable domain of TCR clone 226215 (TRBV7-9, TRBJ2-5)
CASSLDTAQETQYF

SEQ ID NO: 452431 - protein, 12 aa, Homo sapiens
  CDR3 for alpha chain variable domain of TCR clone 226216 (TRAV36/DV7, TRAJ26)
CAADNYGQNFVF

SEQ ID NO: 452432 - protein, 14 aa, Homo sapiens
  CDR3 for beta chain variable domain of TCR clone 226216 (TRBV7-8, TRBJ1-2)
CASSPDSLSYGYTF

SEQ ID NO: 452433 - protein, 16 aa, Homo sapiens
  CDR3 for alpha chain variable domain of TCR clone 226217 (TRAV12-2, TRAJ40)
CAVIRGGTSGTYKYIF

SEQ ID NO: 452434 - protein, 13 aa, Homo sapiens
  CDR3 for beta chain variable domain of TCR clone 226217 (TRBV20-1, TRBJ2-5)
QSRDGRAGETQYF

SEQ ID NO: 452435 - protein, 14 aa, Homo sapiens
  CDR3 for alpha chain variable domain of TCR clone 226218 (TRAV8-3, TRAJ15)
CAVGRHQAGTALIF

SEQ ID NO: 452436 - protein, 15 aa, Homo sapiens
  CDR3 for beta chain variable domain of TCR clone 226218 (TRBV11-3, TRBJ2-3)
CASLKDGREGDTQYF

SEQ ID NO: 452437 - protein, 16 aa, Homo sapiens
  CDR3 for alpha chain variable domain of TCR clone 226219 (TRAV30, TRAJ24)
CGTEIVDADSWGKFQF

SEQ ID NO: 452438 - protein, 13 aa, Homo sapiens
  CDR3 for beta chain variable domain of TCR clone 226219 (TRBV10-3, TRBJ1-2)
CAISERDSYGYAF

SEQ ID NO: 452439 - protein, 14 aa, Homo sapiens
  CDR3 for alpha chain variable domain of TCR clone 226220 (TRAV12-2, TRAJ13)
CAVKKTGGYQKVTF

SEQ ID NO: 452440 - protein, 15 aa, Homo sapiens
  CDR3 for beta chain variable domain of TCR clone 226220 (TRBV27, TRBJ2-1)
CASSNGGWSSNEQYF

SEQ ID NO: 452441 - protein, 12 aa, Homo sapiens
  CDR3 for alpha chain variable domain of TCR clone 226221 (TRAV38-2/DV8, TRAJ48)
CALLSGNEKVTF

SEQ ID NO: 452442 - protein, 14 aa, Homo sapiens
  CDR3 for beta chain variable domain of TCR clone 226221 (TRBV7-2, TRBJ2-7)
CASSPKTSFYEQYF

SEQ ID NO: 452443 - protein, 16 aa, Homo sapiens
  CDR3 for alpha chain variable domain of TCR clone 226222 (TRAV26-1, TRAJ23)
CIVIVERYNQGGKLIF

SEQ ID NO: 452444 - protein, 15 aa, Homo sapiens
  CDR3 for beta chain variable domain of TCR clone 226222 (TRBV18, TRBJ2-7)
CASSPRGGKGYEQYF

SEQ ID NO: 452445 - protein, 11 aa, Homo sapiens
  CDR3 for alpha chain variable domain of TCR clone 226223 (TRAV16, TRAJ31)
CALFNNARPMF

SEQ ID NO: 452446 - protein, 16 aa, Homo sapiens
  CDR3 for beta chain variable domain of TCR clone 226223 (TRBV5-1, TRBJ2-2)
CASSSRTGGRTGELFF

SEQ ID NO: 452447 - protein, 20 aa, Homo sapiens
  CDR3 for alpha chain variable domain of TCR clone 226224 (TRAV8-3, TRAJ44)
LSTSVLWVRLYTGTASKLTF

SEQ ID NO: 452448 - protein, 15 aa, Homo sapiens
  CDR3 for beta chain variable domain of TCR clone 226224 (TRBV6-5, TRBJ1-2)
CAISYSQAFNYGYTF

SEQ ID NO: 452449 - protein, 14 aa, Homo sapiens
  CDR3 for alpha chain variable domain of TCR clone 226225 (TRAV8-4, TRAJ9)
CAVRINTGGFKTIF

SEQ ID NO: 452450 - protein, 16 aa, Homo sapiens
  CDR3 for beta chain variable domain of TCR clone 226225 (TRBV7-9, TRBJ2-3)
CASSPWREVGTDTQYF

SEQ ID NO: 452451 - protein, 13 aa, Homo sapiens
  CDR3 for alpha chain variable domain of TCR clone 226226 (TRAV27, TRAJ40)
CAGVLASTYKYIF

SEQ ID NO: 452452 - protein, 14 aa, Homo sapiens
  CDR3 for beta chain variable domain of TCR clone 226226 (TRBV7-2, TRBJ2-7)
CASSPKTSFYEQYF

SEQ ID NO: 452453 - protein, 14 aa, Homo sapiens
  CDR3 for alpha chain variable domain of TCR clone 226227 (TRAV1-2, TRAJ16)
CAVNRFSDGQRLLF

SEQ ID NO: 452454 - protein, 15 aa, Homo sapiens
  CDR3 for beta chain variable domain of TCR clone 226227 (TRBV7-9, TRBJ1-6)
CASSSPGRRNSPLHF

SEQ ID NO: 452455 - protein, 16 aa, Homo sapiens
  CDR3 for alpha chain variable domain of TCR clone 226228 (TRAV12-2, TRAJ18)
CAATTDRGSTLGRLYF

SEQ ID NO: 452456 - protein, 15 aa, Homo sapiens
  CDR3 for beta chain variable domain of TCR clone 226228 (TRBV9, TRBJ1-6)
CASSVAGTGDSPLHF

SEQ ID NO: 452457 - protein, 15 aa, Homo sapiens
  CDR3 for alpha chain variable domain of TCR clone 226229 (TRAV12-1, TRAJ42)
CVGTRDGGSQGNPIF

SEQ ID NO: 452458 - protein, 14 aa, Homo sapiens
  CDR3 for beta chain variable domain of TCR clone 226229 (TRBV11-2, TRBJ2-3)
CASSLGGGANTQYF

SEQ ID NO: 452459 - protein, 13 aa, Homo sapiens
  CDR3 for alpha chain variable domain of TCR clone 226230 (TRAV12-3, TRAJ31)
CAMSANNNAGLMF

SEQ ID NO: 452460 - protein, 16 aa, Homo sapiens
  CDR3 for beta chain variable domain of TCR clone 226230 (TRBV7-9, TRBJ1-2)
CASSLGFSSGEDGYAF

SEQ ID NO: 452461 - protein, 14 aa, Homo sapiens
  CDR3 for alpha chain variable domain of TCR clone 226231 (TRAV8-6, TRAJ13)
CAVSDREGYQKVTF

SEQ ID NO: 452462 - protein, 17 aa, Homo sapiens
  CDR3 for beta chain variable domain of TCR clone 226231 (TRBV5-1, TRBJ2-2)
CASSEKPNFANTGGLFF

SEQ ID NO: 452463 - protein, 14 aa, Homo sapiens
  CDR3 for alpha chain variable domain of TCR clone 226232 (TRAV35, TRAJ33)
CAGSSQDSNYQLIW

SEQ ID NO: 452464 - protein, 12 aa, Homo sapiens
  CDR3 for beta chain variable domain of TCR clone 226232 (TRBV12-5, TRBJ2-5)
CASGQGVETQYF

SEQ ID NO: 452465 - protein, 12 aa, Homo sapiens
  CDR3 for alpha chain variable domain of TCR clone 226233 (TRAV12-1, TRAJ40)
CVVYSGTYKYIF

SEQ ID NO: 452466 - protein, 13 aa, Homo sapiens
  CDR3 for beta chain variable domain of TCR clone 226233 (TRBV24-1, TRBJ2-2)
CATSDWSTGELFF

SEQ ID NO: 452467 - protein, 12 aa, Homo sapiens
  CDR3 for alpha chain variable domain of TCR clone 226234 (TRAV12-3, TRAJ17)
CAMTLTGNKLTF

SEQ ID NO: 452468 - protein, 15 aa, Homo sapiens
  CDR3 for beta chain variable domain of TCR clone 226234 (TRBV7-9, TRBJ2-2)
CASRRTGGRTGELFF

SEQ ID NO: 452469 - protein, 12 aa, Homo sapiens
  CDR3 for alpha chain variable domain of TCR clone 226235 (TRAV25, TRAJ35)
CAGIGFGNVLHC

SEQ ID NO: 452470 - protein, 14 aa, Homo sapiens
  CDR3 for beta chain variable domain of TCR clone 226235 (TRBV12-4, TRBJ1-1)
CASSLGTGGTEAFF

SEQ ID NO: 452471 - protein, 11 aa, Homo sapiens
  CDR3 for alpha chain variable domain of TCR clone 226236 (TRAV12-3, TRAJ27)
CAMANAGKSTF

SEQ ID NO: 452472 - protein, 13 aa, Homo sapiens
  CDR3 for beta chain variable domain of TCR clone 226236 (TRBV20-1, TRBJ1-1)
CNARVGGNIEAFF

SEQ ID NO: 452473 - protein, 17 aa, Homo sapiens
  CDR3 for alpha chain variable domain of TCR clone 226237 (TRAV13-1, TRAJ52)
CGASSGAGGTSYGKLTF

SEQ ID NO: 452474 - protein, 12 aa, Homo sapiens
  CDR3 for beta chain variable domain of TCR clone 226237 (TRBV11-2, TRBJ2-2)
CASSLGGGELFI

SEQ ID NO: 452475 - protein, 13 aa, Homo sapiens
  CDR3 for alpha chain variable domain of TCR clone 226238 (TRAV17, TRAJ5)
CALRGTCRRALTF

SEQ ID NO: 452476 - protein, 13 aa, Homo sapiens
  CDR3 for beta chain variable domain of TCR clone 226238 (TRBV4-2, TRBJ1-1)
CASSQAGNTEAFF

SEQ ID NO: 452477 - protein, 17 aa, Homo sapiens
  CDR3 for alpha chain variable domain of TCR clone 226239 (TRAV16, TRAJ42)
CALSPKLYGGCQGNLIF

SEQ ID NO: 452478 - protein, 13 aa, Homo sapiens
  CDR3 for beta chain variable domain of TCR clone 226239 (TRBV19, TRBJ1-5)
CASSTRRDQPQHF

SEQ ID NO: 452479 - protein, 10 aa, Homo sapiens
  CDR3 for alpha chain variable domain of TCR clone 226240 (TRAV16, TRAJ22)
SAMYLRQLTF

SEQ ID NO: 452480 - protein, 15 aa, Homo sapiens
  CDR3 for beta chain variable domain of TCR clone 226240 (TRBV7-9, TRBJ1-6)
CASSCPGRGNSPLHF

SEQ ID NO: 452481 - protein, 11 aa, Homo sapiens
  CDR3 for alpha chain variable domain of TCR clone 226241 (TRAV21, TRAJ34)
CAVTNTDKRIF

SEQ ID NO: 452482 - protein, 16 aa, Homo sapiens
  CDR3 for beta chain variable domain of TCR clone 226241 (TRBV20-1, TRBJ1-4)
CSAPGQGLLTNEKLFF

SEQ ID NO: 452483 - protein, 13 aa, Homo sapiens
  CDR3 for alpha chain variable domain of TCR clone 226242 (TRAV35, TRAJ36)
CAGPRIGANNLFF

SEQ ID NO: 452484 - protein, 17 aa, Homo sapiens
  CDR3 for beta chain variable domain of TCR clone 226242 (TRBV7-3, TRBJ2-5)
CASSLGSGRSGSETQYF

SEQ ID NO: 452485 - protein, 13 aa, Homo sapiens
  CDR3 for alpha chain variable domain of TCR clone 226243 (TRAV12-1, TRAJ37)
CVVNAGNTGKLIF

SEQ ID NO: 452486 - protein, 14 aa, Homo sapiens
  CDR3 for beta chain variable domain of TCR clone 226243 (TRBV2, TRBJ2-1)
CASSEALDGNEQFF

SEQ ID NO: 452487 - protein, 13 aa, Homo sapiens
  CDR3 for alpha chain variable domain of TCR clone 226244 (TRAV21, TRAJ27)
CAARPGNAGKSTF

SEQ ID NO: 452488 - protein, 14 aa, Homo sapiens
  CDR3 for beta chain variable domain of TCR clone 226244 (TRBV4-1, TRBJ2-3)
CASSQDWSTDTQYF

SEQ ID NO: 452489 - protein, 12 aa, Homo sapiens
  CDR3 for alpha chain variable domain of TCR clone 226245 (TRAV12-3, TRAJ17)
CAMTLTGNKLTF

SEQ ID NO: 452490 - protein, 12 aa, Homo sapiens
  CDR3 for beta chain variable domain of TCR clone 226245 (TRBV2, TRBJ2-1)
CAYGPPGSEQFF

SEQ ID NO: 452491 - protein, 13 aa, Homo sapiens
  CDR3 for alpha chain variable domain of TCR clone 226246 (TRAV2, TRAJ21)
CAVEDLNFNKFYF

SEQ ID NO: 452492 - protein, 13 aa, Homo sapiens
  CDR3 for beta chain variable domain of TCR clone 226246 (TRBV20-1, TRBJ1-1)
CSARGGGNTEAFF

SEQ ID NO: 452493 - protein, 16 aa, Homo sapiens
  CDR3 for alpha chain variable domain of TCR clone 226247 (TRAV30, TRAJ24)
CGTEIVDADSWGKFQL

SEQ ID NO: 452494 - protein, 17 aa, Homo sapiens
  CDR3 for beta chain variable domain of TCR clone 226247 (TRBV13, TRBJ2-3)
CASSRSRVAGGRNTQYF

SEQ ID NO: 452495 - protein, 14 aa, Homo sapiens
  CDR3 for alpha chain variable domain of TCR clone 226248 (TRAV9-2, TRAJ39)
CALYIYNAGNMLTF

SEQ ID NO: 452496 - protein, 14 aa, Homo sapiens
  CDR3 for beta chain variable domain of TCR clone 226248 (TRBV29-1, TRBJ2-1)
CGTSGAYSYNEQFF

SEQ ID NO: 452497 - protein, 14 aa, Homo sapiens
  CDR3 for alpha chain variable domain of TCR clone 226249 (TRAV13-2, TRAJ17)
CAENSKAAGNKLTF

SEQ ID NO: 452498 - protein, 15 aa, Homo sapiens
  CDR3 for beta chain variable domain of TCR clone 226249 (TRBV4-3, TRBJ1-1)
CASSQELGRGTEAFF

SEQ ID NO: 452499 - protein, 10 aa, Homo sapiens
  CDR3 for alpha chain variable domain of TCR clone 226250 (TRAV36/DV7, TRAJ56)
CAGPAVELTF

SEQ ID NO: 452500 - protein, 12 aa, Homo sapiens
  CDR3 for beta chain variable domain of TCR clone 226250 (TRBV11-2, TRBJ2-2)
CASSLGGGELFF

SEQ ID NO: 452501 - protein, 18 aa, Homo sapiens
  CDR3 for alpha chain variable domain of TCR clone 226251 (TRAV26-2, TRAJ54)
CILRDVEVGIQGAQKLVF

SEQ ID NO: 452502 - protein, 15 aa, Homo sapiens
  CDR3 for beta chain variable domain of TCR clone 226251 (TRBV13, TRBJ2-5)
CASSLAGYREETQYF

SEQ ID NO: 452503 - protein, 15 aa, Homo sapiens
  CDR3 for alpha chain variable domain of TCR clone 226252 (TRAV8-3, TRAJ27)
CAVGPPKTNAGKSTF

SEQ ID NO: 452504 - protein, 15 aa, Homo sapiens
  CDR3 for beta chain variable domain of TCR clone 226252 (TRBV27, TRBJ2-1)
CASSNGGGSSNEQFF

SEQ ID NO: 452505 - protein, 14 aa, Homo sapiens
  CDR3 for alpha chain variable domain of TCR clone 226253 (TRAV26-1, TRAJ38)
CIADNAGNNRKLIW

SEQ ID NO: 452506 - protein, 12 aa, Homo sapiens
  CDR3 for beta chain variable domain of TCR clone 226253 (TRBV7-8, TRBJ2-7)
CASSLGDREQYC

SEQ ID NO: 452507 - protein, 14 aa, Homo sapiens
  CDR3 for alpha chain variable domain of TCR clone 226254 (TRAV26-1, TRAJ38)
CIADNAGKNSKLIW

SEQ ID NO: 452508 - protein, 13 aa, Homo sapiens
  CDR3 for beta chain variable domain of TCR clone 226254 (TRBV20-1, TRBJ1-1)
CSARGGGNTEAFF

SEQ ID NO: 452509 - protein, 11 aa, Homo sapiens
  CDR3 for alpha chain variable domain of TCR clone 226255 (TRAV2, TRAJ13)
CASGGYQKVTF

SEQ ID NO: 452510 - protein, 14 aa, Homo sapiens
  CDR3 for beta chain variable domain of TCR clone 226255 (TRBV2, TRBJ2-1)
CASRTGSSYNEQFF

SEQ ID NO: 452511 - protein, 11 aa, Homo sapiens
  CDR3 for alpha chain variable domain of TCR clone 226256 (TRAV12-2, )
CAVASLATTIS

SEQ ID NO: 452512 - protein, 14 aa, Homo sapiens
  CDR3 for beta chain variable domain of TCR clone 226256 (TRBV4-2, TRBJ2-1)
CASGLDRAYNEQFF

SEQ ID NO: 452513 - protein, 16 aa, Homo sapiens
  CDR3 for alpha chain variable domain of TCR clone 226257 (TRAV23/DV6, TRAJ45)
CAARARTGGGADGLTF

SEQ ID NO: 452514 - protein, 15 aa, Homo sapiens
  CDR3 for beta chain variable domain of TCR clone 226257 (TRBV19, TRBJ1-2)
CASSVGQVLNYGYTF

SEQ ID NO: 452515 - protein, 16 aa, Homo sapiens
  CDR3 for alpha chain variable domain of TCR clone 226258 (TRAV35, TRAJ37)
CWSFLRGSSNTGKLIF

SEQ ID NO: 452516 - protein, 13 aa, Homo sapiens
  CDR3 for beta chain variable domain of TCR clone 226258 (TRBV2, TRBJ1-2)
CASSVRGNYGYTF

SEQ ID NO: 452517 - protein, 14 aa, Homo sapiens
  CDR3 for alpha chain variable domain of TCR clone 226259 (TRAV12-2, TRAJ17)
CAVLFKAAGNQLTF

SEQ ID NO: 452518 - protein, 13 aa, Homo sapiens
  CDR3 for beta chain variable domain of TCR clone 226259 (TRBV4-2, TRBJ1-1)
CASSQAGNTEAVF

SEQ ID NO: 452519 - protein, 15 aa, Homo sapiens
  CDR3 for alpha chain variable domain of TCR clone 226260 (TRAV3, TRAJ5)
CAVRDRNTGRRALTF

SEQ ID NO: 452520 - protein, 15 aa, Homo sapiens
  CDR3 for beta chain variable domain of TCR clone 226260 (TRBV7-9, TRBJ2-2)
CASGPLDTFPGELFF

SEQ ID NO: 452521 - protein, 16 aa, Homo sapiens
  CDR3 for alpha chain variable domain of TCR clone 226261 (TRAV30, TRAJ24)
CGTEIVDADSWGKFQF

SEQ ID NO: 452522 - protein, 14 aa, Homo sapiens
  CDR3 for beta chain variable domain of TCR clone 226261 (TRBV18, TRBJ1-5)
CASSPGNSNQPQHF

SEQ ID NO: 452523 - protein, 12 aa, Homo sapiens
  CDR3 for alpha chain variable domain of TCR clone 226262 (TRAV12-1, TRAJ40)
CVFYSGTYTYIF

SEQ ID NO: 452524 - protein, 18 aa, Homo sapiens
  CDR3 for beta chain variable domain of TCR clone 226262 (TRBV12-4, TRBJ2-2)
CASSLVAGTRGRTGELFF

SEQ ID NO: 452525 - protein, 15 aa, Homo sapiens
  CDR3 for alpha chain variable domain of TCR clone 226263 (TRAV8-3, TRAJ11)
CAVGLLNSGYSTLTF

SEQ ID NO: 452526 - protein, 14 aa, Homo sapiens
  CDR3 for beta chain variable domain of TCR clone 226263 (TRBV7-3, TRBJ2-7)
CASSYDQHYYEQYF

SEQ ID NO: 452527 - protein, 13 aa, Homo sapiens
  CDR3 for alpha chain variable domain of TCR clone 226264 (TRAV12-3, TRAJ33)
FAMSVNSNYQLIW

SEQ ID NO: 452528 - protein, 12 aa, Homo sapiens
  CDR3 for beta chain variable domain of TCR clone 226264 (TRBV11-2, TRBJ2-2)
CASSLGGGELFF

SEQ ID NO: 452529 - protein, 11 aa, Homo sapiens
  CDR3 for alpha chain variable domain of TCR clone 226265 (TRAV12-1, TRAJ34)
CVVNKGRELIF

SEQ ID NO: 452530 - protein, 13 aa, Homo sapiens
  CDR3 for beta chain variable domain of TCR clone 226265 (TRBV12-4, TRBJ2-5)
CASRLAVQETQYF

SEQ ID NO: 452531 - protein, 10 aa, Homo sapiens
  CDR3 for alpha chain variable domain of TCR clone 226266 (TRAV12-1, TRAJ23)
CVVSGGKLIF

SEQ ID NO: 452532 - protein, 15 aa, Homo sapiens
  CDR3 for beta chain variable domain of TCR clone 226266 (TRBV6-5, TRBJ2-1)
CASSSTSSFYNEKFF

SEQ ID NO: 452533 - protein, 14 aa, Homo sapiens
  CDR3 for alpha chain variable domain of TCR clone 226267 (TRAV1-2, TRAJ16)
CAVNRFSDGQKLLF

SEQ ID NO: 452534 - protein, 15 aa, Homo sapiens
  CDR3 for beta chain variable domain of TCR clone 226267 (TRBV6-3, TRBJ2-7)
CTSSSPGTVFYEQYF

SEQ ID NO: 452535 - protein, 13 aa, Homo sapiens
  CDR3 for alpha chain variable domain of TCR clone 226268 (TRAV13-1, TRAJ37)
CAAVSGNTGKLTF

SEQ ID NO: 452536 - protein, 13 aa, Homo sapiens
  CDR3 for beta chain variable domain of TCR clone 226268 (TRBV7-9, TRBJ1-2)
CASSLKQNYGYTF

SEQ ID NO: 452537 - protein, 12 aa, Homo sapiens
  CDR3 for alpha chain variable domain of TCR clone 226269 (TRAV12-2, TRAJ20)
CAVRPSDYKLSF

SEQ ID NO: 452538 - protein, 12 aa, Homo sapiens
  CDR3 for beta chain variable domain of TCR clone 226269 (TRBV11-2, TRBJ2-2)
CASGLGGGELFF

SEQ ID NO: 452539 - protein, 16 aa, Homo sapiens
  CDR3 for alpha chain variable domain of TCR clone 226270 (TRAV1-2, TRAJ10)
CAVRGVLTGGGNKLNF

SEQ ID NO: 452540 - protein, 13 aa, Homo sapiens
  CDR3 for beta chain variable domain of TCR clone 226270 (TRBV12-4, TRBJ1-1)
CASSPGTGFEAFF

SEQ ID NO: 452541 - protein, 15 aa, Homo sapiens
  CDR3 for alpha chain variable domain of TCR clone 226271 (TRAV8-6, TRAJ38)
CAVSSNAGNNRKLIW

SEQ ID NO: 452542 - protein, 14 aa, Homo sapiens
  CDR3 for beta chain variable domain of TCR clone 226271 (TRBV25-1, TRBJ1-1)
CASTHLGGNTEAFF

SEQ ID NO: 452543 - protein, 12 aa, Homo sapiens
  CDR3 for alpha chain variable domain of TCR clone 226272 (TRAV27, TRAJ41)
CAGRNSGYALNF

SEQ ID NO: 452544 - protein, 13 aa, Homo sapiens
  CDR3 for beta chain variable domain of TCR clone 226272 (TRBV12-4, TRBJ1-1)
CASSPGTGLEAFF

SEQ ID NO: 452545 - protein, 13 aa, Homo sapiens
  CDR3 for alpha chain variable domain of TCR clone 226273 (TRAV30, TRAJ24)
CGTVTYSWGKLQF

SEQ ID NO: 452546 - protein, 15 aa, Homo sapiens
  CDR3 for beta chain variable domain of TCR clone 226273 (TRBV19, TRBJ1-1)
YASTSGQIQNTEAFF

SEQ ID NO: 452547 - protein, 13 aa, Homo sapiens
  CDR3 for alpha chain variable domain of TCR clone 226274 (TRAV8-6, TRAJ13)
CAVRDGGYRKVTF

SEQ ID NO: 452548 - protein, 15 aa, Homo sapiens
  CDR3 for beta chain variable domain of TCR clone 226274 (TRBV7-9, TRBJ2-2)
CASRPEGTSTGELFF

SEQ ID NO: 452549 - protein, 18 aa, Homo sapiens
  CDR3 for alpha chain variable domain of TCR clone 226275 (TRAV21, TRAJ52)
CAVRPSPAGGTSYVNLTF

SEQ ID NO: 452550 - protein, 17 aa, Homo sapiens
  CDR3 for beta chain variable domain of TCR clone 226275 (TRBV13, TRBJ2-3)
CASSLSRVAGGRNTQYF

SEQ ID NO: 452551 - protein, 14 aa, Homo sapiens
  CDR3 for alpha chain variable domain of TCR clone 226276 (TRAV3, TRAJ6)
CAVRDPCGSYIPTF

SEQ ID NO: 452552 - protein, 16 aa, Homo sapiens
  CDR3 for beta chain variable domain of TCR clone 226276 (TRBV27, TRBJ2-5)
CASSLSRTAGGETQYF

SEQ ID NO: 452553 - protein, 15 aa, Homo sapiens
  CDR3 for alpha chain variable domain of TCR clone 226277 (TRAV20, TRAJ6)
CSVRLQSGGSYIPTF

SEQ ID NO: 452554 - protein, 14 aa, Homo sapiens
  CDR3 for beta chain variable domain of TCR clone 226277 (TRBV12-4, TRBJ2-7)
CASSASGGWYEQYF

SEQ ID NO: 452555 - protein, 11 aa, Homo sapiens
  CDR3 for alpha chain variable domain of TCR clone 226278 (TRAV3, TRAJ21)
CAVGNYNKFYF

SEQ ID NO: 452556 - protein, 16 aa, Homo sapiens
  CDR3 for beta chain variable domain of TCR clone 226278 (TRBV19, TRBJ2-1)
CASSKVGPSSYNEQFF

SEQ ID NO: 452557 - protein, 14 aa, Homo sapiens
  CDR3 for alpha chain variable domain of TCR clone 226279 (TRAV17, TRAJ6)
CATDASGGSYIPTF

SEQ ID NO: 452558 - protein, 15 aa, Homo sapiens
  CDR3 for beta chain variable domain of TCR clone 226279 (TRBV9, TRBJ2-1)
RASSLAGSSYNEQFF

SEQ ID NO: 452559 - protein, 12 aa, Homo sapiens
  CDR3 for alpha chain variable domain of TCR clone 226280 (TRAV12-3, TRAJ40)
CAMSSGTYKYIF

SEQ ID NO: 452560 - protein, 15 aa, Homo sapiens
  CDR3 for beta chain variable domain of TCR clone 226280 (TRBV7-3, TRBJ2-2)
CASSEAGPGTGELFF

SEQ ID NO: 452561 - protein, 16 aa, Homo sapiens
  CDR3 for alpha chain variable domain of TCR clone 226281 (TRAV30, TRAJ24)
CGTEMVDADSWGKFQC

SEQ ID NO: 452562 - protein, 14 aa, Homo sapiens
  CDR3 for beta chain variable domain of TCR clone 226281 (TRBV12-5, TRBJ2-5)
CASGSRTHQETQYF

SEQ ID NO: 452563 - protein, 14 aa, Homo sapiens
  CDR3 for alpha chain variable domain of TCR clone 226282 (TRAV9-2, TRAJ39)
CALYIYNAGNMLTF

SEQ ID NO: 452564 - protein, 13 aa, Homo sapiens
  CDR3 for beta chain variable domain of TCR clone 226282 (TRBV28, TRBJ2-7)
CASKAGGVYEQYF

SEQ ID NO: 452565 - protein, 12 aa, Homo sapiens
  CDR3 for alpha chain variable domain of TCR clone 226283 (TRAV27, TRAJ36)
CAGMTGANNLFF

SEQ ID NO: 452566 - protein, 14 aa, Homo sapiens
  CDR3 for beta chain variable domain of TCR clone 226283 (TRBV12-4, TRBJ2-3)
CASGLVPSTDTQYF

SEQ ID NO: 452567 - protein, 16 aa, Homo sapiens
  CDR3 for alpha chain variable domain of TCR clone 226284 (TRAV30, TRAJ24)
CGTEIVDADSWGKCRF

SEQ ID NO: 452568 - protein, 14 aa, Homo sapiens
  CDR3 for beta chain variable domain of TCR clone 226284 (TRBV12-5, TRBJ2-5)
CASGSRTHQETQYF

SEQ ID NO: 452569 - protein, 14 aa, Homo sapiens
  CDR3 for alpha chain variable domain of TCR clone 226285 (TRAV1-2, TRAJ16)
CAVNRFSNGQKLLF

SEQ ID NO: 452570 - protein, 14 aa, Homo sapiens
  CDR3 for beta chain variable domain of TCR clone 226285 (TRBV4-1, TRBJ2-2)
CASSQAVNTGELFF

SEQ ID NO: 452571 - protein, 14 aa, Homo sapiens
  CDR3 for alpha chain variable domain of TCR clone 226286 (TRAV12-2, TRAJ13)
CAVKKTGGYQKVTF

SEQ ID NO: 452572 - protein, 14 aa, Homo sapiens
  CDR3 for beta chain variable domain of TCR clone 226286 (TRBV15, TRBJ2-5)
CATSIGGLGETQYF

SEQ ID NO: 452573 - protein, 14 aa, Homo sapiens
  CDR3 for alpha chain variable domain of TCR clone 226287 (TRAV12-3, TRAJ10)
SHLPLTGGGNKLTF

SEQ ID NO: 452574 - protein, 17 aa, Homo sapiens
  CDR3 for beta chain variable domain of TCR clone 226287 (TRBV12-4, TRBJ2-1)
CASSPGLAGGRINEQFF

SEQ ID NO: 452575 - protein, 14 aa, Homo sapiens
  CDR3 for alpha chain variable domain of TCR clone 226288 (TRAV16, TRAJ32)
CALKSGGATNKRIF

SEQ ID NO: 452576 - protein, 13 aa, Homo sapiens
  CDR3 for beta chain variable domain of TCR clone 226288 (TRBV15, TRBJ1-6)
CATSGGLNSPLHF

SEQ ID NO: 452577 - protein, 13 aa, Homo sapiens
  CDR3 for alpha chain variable domain of TCR clone 226289 (TRAV13-2, TRAJ13)
CAERPGGYQNVTF

SEQ ID NO: 452578 - protein, 15 aa, Homo sapiens
  CDR3 for beta chain variable domain of TCR clone 226289 (TRBV11-3, TRBJ2-7)
CASSPGPASSYEQYF

SEQ ID NO: 452579 - protein, 14 aa, Homo sapiens
  CDR3 for alpha chain variable domain of TCR clone 226290 (TRAV1-2, TRAJ8)
CAVREDTGFQKLVF

SEQ ID NO: 452580 - protein, 12 aa, Homo sapiens
  CDR3 for beta chain variable domain of TCR clone 226290 (TRBV12-4, TRBJ2-3)
CASSLGQDTQYF

SEQ ID NO: 452581 - protein, 14 aa, Homo sapiens
  CDR3 for alpha chain variable domain of TCR clone 226291 (TRAV26-1, TRAJ34)
CIVRVAYNTDELIF

SEQ ID NO: 452582 - protein, 16 aa, Homo sapiens
  CDR3 for beta chain variable domain of TCR clone 226291 (TRBV7-3, TRBJ2-2)
CASSLKRGTLSGELFF

SEQ ID NO: 452583 - protein, 12 aa, Homo sapiens
  CDR3 for alpha chain variable domain of TCR clone 226292 (TRAV35, TRAJ39)
LAPNNAGNMLTF

SEQ ID NO: 452584 - protein, 16 aa, Homo sapiens
  CDR3 for beta chain variable domain of TCR clone 226292 (TRBV2, TRBJ2-3)
CASSTSVEGVTDTQYF

SEQ ID NO: 452585 - protein, 14 aa, Homo sapiens
  CDR3 for alpha chain variable domain of TCR clone 226293 (TRAV35, TRAJ33)
CAGSSQDSNYQFIW

SEQ ID NO: 452586 - protein, 15 aa, Homo sapiens
  CDR3 for beta chain variable domain of TCR clone 226293 (TRBV5-1, TRBJ1-4)
FAPAAWKDGNEKLFF

SEQ ID NO: 452587 - protein, 13 aa, Homo sapiens
  CDR3 for alpha chain variable domain of TCR clone 226294 (TRAV2, TRAJ40)
CAVVTSGTCKYIF

SEQ ID NO: 452588 - protein, 14 aa, Homo sapiens
  CDR3 for beta chain variable domain of TCR clone 226294 (TRBV7-6, TRBJ2-1)
CASSLGGGADEQFF

SEQ ID NO: 452589 - protein, 13 aa, Homo sapiens
  CDR3 for alpha chain variable domain of TCR clone 226295 (TRAV8-6, TRAJ49)
CAVITNTGNQSYF

SEQ ID NO: 452590 - protein, 13 aa, Homo sapiens
  CDR3 for beta chain variable domain of TCR clone 226295 (TRBV7-9, TRBJ1-2)
CASSLKQNYGYTF

SEQ ID NO: 452591 - protein, 15 aa, Homo sapiens
  CDR3 for alpha chain variable domain of TCR clone 226296 (TRAV13-2, TRAJ53)
CAETVSGGSNYKLTF

SEQ ID NO: 452592 - protein, 12 aa, Homo sapiens
  CDR3 for beta chain variable domain of TCR clone 226296 (TRBV7-8, TRBJ2-1)
CASSLGHNEQFF

SEQ ID NO: 452593 - protein, 13 aa, Homo sapiens
  CDR3 for alpha chain variable domain of TCR clone 226297 (TRAV1-1, TRAJ13)
CAVNSGGYQKVTL

SEQ ID NO: 452594 - protein, 12 aa, Homo sapiens
  CDR3 for beta chain variable domain of TCR clone 226297 (TRBV28, TRBJ2-1)
CASSVQINEQFF

SEQ ID NO: 452595 - protein, 23 aa, Homo sapiens
  CDR3 for alpha chain variable domain of TCR clone 226298 (TRAV20, TRAJ32)
CAVDGMVVLQTSSSLELALCLLS

SEQ ID NO: 452596 - protein, 13 aa, Homo sapiens
  CDR3 for beta chain variable domain of TCR clone 226298 (TRBV7-9, TRBJ2-3)
CASSPGSTDTQYF

SEQ ID NO: 452597 - protein, 15 aa, Homo sapiens
  CDR3 for alpha chain variable domain of TCR clone 226299 (TRAV26-1, TRAJ38)
CIASSNAGNNRKLIW

SEQ ID NO: 452598 - protein, 12 aa, Homo sapiens
  CDR3 for beta chain variable domain of TCR clone 226299 (TRBV5-8, TRBJ1-2)
CASSFGVYGYTC

SEQ ID NO: 452599 - protein, 16 aa, Homo sapiens
  CDR3 for alpha chain variable domain of TCR clone 226300 (TRAV3, TRAJ5)
CAVRNLMDSGRRALTF

SEQ ID NO: 452600 - protein, 16 aa, Homo sapiens
  CDR3 for beta chain variable domain of TCR clone 226300 (TRBV4-2, TRBJ2-7)
CASSQEGLANSYEQYF

SEQ ID NO: 452601 - protein, 12 aa, Homo sapiens
  CDR3 for alpha chain variable domain of TCR clone 226301 (TRAV1-2, TRAJ29)
CAAPSGNTPLVF

SEQ ID NO: 452602 - protein, 12 aa, Homo sapiens
  CDR3 for beta chain variable domain of TCR clone 226301 (TRBV7-9, TRBJ2-7)
CASSFGSYEQYF

SEQ ID NO: 452603 - protein, 12 aa, Homo sapiens
  CDR3 for alpha chain variable domain of TCR clone 226302 (TRAV12-2, TRAJ33)
CAKMDSNYQLIW

SEQ ID NO: 452604 - protein, 13 aa, Homo sapiens
  CDR3 for beta chain variable domain of TCR clone 226302 (TRBV2, TRBJ2-7)
CASSVGGSGEQYF

SEQ ID NO: 452605 - protein, 13 aa, Homo sapiens
  CDR3 for alpha chain variable domain of TCR clone 226303 (TRAV13-1, TRAJ39)
CSKYSNAGNMLTF

SEQ ID NO: 452606 - protein, 19 aa, Homo sapiens
  CDR3 for beta chain variable domain of TCR clone 226303 (TRBV7-2, TRBJ2-3)
CASIFLSRNWGGGTDTQYF

SEQ ID NO: 452607 - protein, 14 aa, Homo sapiens
  CDR3 for alpha chain variable domain of TCR clone 226304 (TRAV8-3, TRAJ10)
CAVGNAGGGNKLTF

SEQ ID NO: 452608 - protein, 15 aa, Homo sapiens
  CDR3 for beta chain variable domain of TCR clone 226304 (TRBV7-9, TRBJ1-5)
CASSQGHQPNQPQHF

SEQ ID NO: 452609 - protein, 14 aa, Homo sapiens
  CDR3 for alpha chain variable domain of TCR clone 226305 (TRAV34, TRAJ44)
CGADGTGTASKLTP

SEQ ID NO: 452610 - protein, 15 aa, Homo sapiens
  CDR3 for beta chain variable domain of TCR clone 226305 (TRBV5-1, TRBJ2-1)
CASSPPRAPYNEQFF

SEQ ID NO: 452611 - protein, 11 aa, Homo sapiens
  CDR3 for alpha chain variable domain of TCR clone 226306 (TRAV17, TRAJ31)
CTTSNNARLMF

SEQ ID NO: 452612 - protein, 16 aa, Homo sapiens
  CDR3 for beta chain variable domain of TCR clone 226306 (TRBV7-8, TRBJ2-4)
CASSAQRTLAKNIQYF

SEQ ID NO: 452613 - protein, 14 aa, Homo sapiens
  CDR3 for alpha chain variable domain of TCR clone 226307 (TRAV4, TRAJ26)
CLVGPHNYGKNFVF

SEQ ID NO: 452614 - protein, 17 aa, Homo sapiens
  CDR3 for beta chain variable domain of TCR clone 226307 (TRBV24-1, TRBJ2-1)
CATSDVSTSGAYNEQFF

SEQ ID NO: 452615 - protein, 16 aa, Homo sapiens
  CDR3 for alpha chain variable domain of TCR clone 226308 (TRAV12-2, TRAJ32)
CAANLGQGGATNKLIF

SEQ ID NO: 452616 - protein, 12 aa, Homo sapiens
  CDR3 for beta chain variable domain of TCR clone 226308 (TRBV29-1, TRBJ2-3)
CSVTGGADTQYF

SEQ ID NO: 452617 - protein, 12 aa, Homo sapiens
  CDR3 for alpha chain variable domain of TCR clone 226309 (TRAV21, TRAJ3)
CCFYSSASKIIF

SEQ ID NO: 452618 - protein, 16 aa, Homo sapiens
  CDR3 for beta chain variable domain of TCR clone 226309 (TRBV12-5, TRBJ2-5)
CASGPRTSGNQETQYF

SEQ ID NO: 452619 - protein, 16 aa, Homo sapiens
  CDR3 for alpha chain variable domain of TCR clone 226310 (TRAV4, TRAJ5)
CLVMPDHGHGQESTYF

SEQ ID NO: 452620 - protein, 17 aa, Homo sapiens
  CDR3 for beta chain variable domain of TCR clone 226310 (TRBV11-2, TRBJ2-1)
CASSLYPPGVEYNEQFF

SEQ ID NO: 452621 - protein, 14 aa, Homo sapiens
  CDR3 for alpha chain variable domain of TCR clone 226311 (TRAV23/DV6, TRAJ57)
CAASNQGGSEKLAF

SEQ ID NO: 452622 - protein, 13 aa, Homo sapiens
  CDR3 for beta chain variable domain of TCR clone 226311 (TRBV11-2, TRBJ2-7)
CASSSYPSYEQYF

SEQ ID NO: 452623 - protein, 18 aa, Homo sapiens
  CDR3 for alpha chain variable domain of TCR clone 226312 (TRAV26-2, TRAJ45)
CILRLWGYSGGGADGLTF

SEQ ID NO: 452624 - protein, 15 aa, Homo sapiens
  CDR3 for beta chain variable domain of TCR clone 226312 (TRBV19, TRBJ1-5)
CASSINSNLHQPQHF

SEQ ID NO: 452625 - protein, 14 aa, Homo sapiens
  CDR3 for alpha chain variable domain of TCR clone 226313 (TRAV17, TRAJ54)
CATDANQGAQKLVF

SEQ ID NO: 452626 - protein, 17 aa, Homo sapiens
  CDR3 for beta chain variable domain of TCR clone 226313 (TRBV7-9, TRBJ2-3)
CASSLEEAGAYPDTQYF

SEQ ID NO: 452627 - protein, 11 aa, Homo sapiens
  CDR3 for alpha chain variable domain of TCR clone 226314 (TRAV2, TRAJ13)
CASGGYEKVTF

SEQ ID NO: 452628 - protein, 16 aa, Homo sapiens
  CDR3 for beta chain variable domain of TCR clone 226314 (TRBV6-1, TRBJ2-5)
CASSATLDRGAETQYF

SEQ ID NO: 452629 - protein, 13 aa, Homo sapiens
  CDR3 for alpha chain variable domain of TCR clone 226315 (TRAV8-3, TRAJ28)
CAVGAVGSYQLTF

SEQ ID NO: 452630 - protein, 13 aa, Homo sapiens
  CDR3 for beta chain variable domain of TCR clone 226315 (TRBV12-4, TRBJ1-1)
CASSPGTGFEAFF

SEQ ID NO: 452631 - protein, 11 aa, Homo sapiens
  CDR3 for alpha chain variable domain of TCR clone 226316 (TRAV2, TRAJ31)
CAAGPPARLMF

SEQ ID NO: 452632 - protein, 12 aa, Homo sapiens
  CDR3 for beta chain variable domain of TCR clone 226316 (TRBV7-8, TRBJ2-7)
CASSLGDREQYF

SEQ ID NO: 452633 - protein, 16 aa, Homo sapiens
  CDR3 for alpha chain variable domain of TCR clone 226317 (TRAV26-1, TRAJ37)
CIVRGDGSGNTGKLIF

SEQ ID NO: 452634 - protein, 16 aa, Homo sapiens
  CDR3 for beta chain variable domain of TCR clone 226317 (TRBV4-1, TRBJ2-7)
RQQPRPAGGPWGEQYF

SEQ ID NO: 452635 - protein, 16 aa, Homo sapiens
  CDR3 for alpha chain variable domain of TCR clone 226318 (TRAV1-2, TRAJ10)
CAVRGVRTGGGNKLTF

SEQ ID NO: 452636 - protein, 14 aa, Homo sapiens
  CDR3 for beta chain variable domain of TCR clone 226318 (TRBV20-1, TRBJ1-1)
CSAQTRIGGTEAFF

SEQ ID NO: 452637 - protein, 15 aa, Homo sapiens
  CDR3 for alpha chain variable domain of TCR clone 226319 (TRAV4, TRAJ26)
CLGGDMNNYGQNFFF

SEQ ID NO: 452638 - protein, 16 aa, Homo sapiens
  CDR3 for beta chain variable domain of TCR clone 226319 (TRBV28, TRBJ1-4)
CASSSRTGAANEKLFF

SEQ ID NO: 452639 - protein, 15 aa, Homo sapiens
  CDR3 for alpha chain variable domain of TCR clone 226320 (TRAV26-1, TRAJ22)
CIVRVSFWCCKATDL

SEQ ID NO: 452640 - protein, 13 aa, Homo sapiens
  CDR3 for beta chain variable domain of TCR clone 226320 (TRBV7-9, TRBJ1-2)
CASSLKQNYGYTF

SEQ ID NO: 452641 - protein, 14 aa, Homo sapiens
  CDR3 for alpha chain variable domain of TCR clone 226321 (TRAV12-3, TRAJ10)
SHLPLTGGGNKLTF

SEQ ID NO: 452642 - protein, 15 aa, Homo sapiens
  CDR3 for beta chain variable domain of TCR clone 226321 (TRBV19, TRBJ2-3)
CASTPWGGSTDTQYF

SEQ ID NO: 452643 - protein, 15 aa, Homo sapiens
  CDR3 for alpha chain variable domain of TCR clone 226322 (TRAV3, TRAJ5)
CAVRALDTGRGALTF

SEQ ID NO: 452644 - protein, 13 aa, Homo sapiens
  CDR3 for beta chain variable domain of TCR clone 226322 (TRBV12-4, TRBJ2-7)
CARSPTETYEQYF

SEQ ID NO: 452645 - protein, 18 aa, Homo sapiens
  CDR3 for alpha chain variable domain of TCR clone 226323 (TRAV12-3, TRAJ52)
CAMSVGGAGGTSYGKLTL

SEQ ID NO: 452646 - protein, 13 aa, Homo sapiens
  CDR3 for beta chain variable domain of TCR clone 226323 (TRBV28, TRBJ2-7)
CASKAGGVYEQYF

SEQ ID NO: 452647 - protein, 14 aa, Homo sapiens
  CDR3 for alpha chain variable domain of TCR clone 226324 (TRAV12-2, TRAJ12)
CAVINRDSSYKLIF

SEQ ID NO: 452648 - protein, 15 aa, Homo sapiens
  CDR3 for beta chain variable domain of TCR clone 226324 (TRBV28, TRBJ2-1)
CARSLDTSSYNEQFF

SEQ ID NO: 452649 - protein, 17 aa, Homo sapiens
  CDR3 for alpha chain variable domain of TCR clone 226325 (TRAV13-1, TRAJ52)
CAAARNAGGTSYGKLTF

SEQ ID NO: 452650 - protein, 13 aa, Homo sapiens
  CDR3 for beta chain variable domain of TCR clone 226325 (TRBV7-2, TRBJ1-1)
CASNLKGAKVAFF

SEQ ID NO: 452651 - protein, 15 aa, Homo sapiens
  CDR3 for alpha chain variable domain of TCR clone 226326 (TRAV3, TRAJ22)
CAVRDRGGSARQLTF

SEQ ID NO: 452652 - protein, 16 aa, Homo sapiens
  CDR3 for beta chain variable domain of TCR clone 226326 (TRBV5-8, TRBJ2-2)
CASSLINPGGAGELFF

SEQ ID NO: 452653 - protein, 16 aa, Homo sapiens
  CDR3 for alpha chain variable domain of TCR clone 226327 (TRAV12-1, TRAJ12)
CVVNTVLMDSSYKLIF

SEQ ID NO: 452654 - protein, 13 aa, Homo sapiens
  CDR3 for beta chain variable domain of TCR clone 226327 (TRBV14, TRBJ2-7)
CASSQDRRYEQYF

SEQ ID NO: 452655 - protein, 19 aa, Homo sapiens
  CDR3 for alpha chain variable domain of TCR clone 226328 (TRAV3, )
CAISRTLTLPCTSLKPLNP

SEQ ID NO: 452656 - protein, 15 aa, Homo sapiens
  CDR3 for beta chain variable domain of TCR clone 226328 (TRBV19, TRBJ1-5)
CASSDSGPRNQPQHF

SEQ ID NO: 452657 - protein, 14 aa, Homo sapiens
  CDR3 for alpha chain variable domain of TCR clone 226329 (TRAV13-1, TRAJ9)
CAASALTGGFKTIF

SEQ ID NO: 452658 - protein, 15 aa, Homo sapiens
  CDR3 for beta chain variable domain of TCR clone 226329 (TRBV7-9, TRBJ2-1)
CASSLGLAGGTEQFF

SEQ ID NO: 452659 - protein, 17 aa, Homo sapiens
  CDR3 for alpha chain variable domain of TCR clone 226330 (TRAV3, TRAJ6)
CAVRGGPRAGGSYIPTF

SEQ ID NO: 452660 - protein, 14 aa, Homo sapiens
  CDR3 for beta chain variable domain of TCR clone 226330 (TRBV7-2, TRBJ2-7)
CASSPKTSCYEQYF

SEQ ID NO: 452661 - protein, 13 aa, Homo sapiens
  CDR3 for alpha chain variable domain of TCR clone 226331 (TRAV8-3, TRAJ43)
CAVGPDNNNDMRF

SEQ ID NO: 452662 - protein, 14 aa, Homo sapiens
  CDR3 for beta chain variable domain of TCR clone 226331 (TRBV13, TRBJ2-5)
CASYRRLAEETQYF

SEQ ID NO: 452663 - protein, 12 aa, Homo sapiens
  CDR3 for alpha chain variable domain of TCR clone 226332 (TRAV21, TRAJ27)
CAARPQCRQINL

SEQ ID NO: 452664 - protein, 14 aa, Homo sapiens
  CDR3 for beta chain variable domain of TCR clone 226332 (TRBV11-2, TRBJ2-7)
CASSLGAGAYEQYF

SEQ ID NO: 452665 - protein, 11 aa, Homo sapiens
  CDR3 for alpha chain variable domain of TCR clone 226333 (TRAV12-3, TRAJ27)
CAMANTGKSTF

SEQ ID NO: 452666 - protein, 14 aa, Homo sapiens
  CDR3 for beta chain variable domain of TCR clone 226333 (TRBV4-1, TRBJ2-2)
CASSQAVNTGELFF

SEQ ID NO: 452667 - protein, 16 aa, Homo sapiens
  CDR3 for alpha chain variable domain of TCR clone 226334 (TRAV8-4, TRAJ5)
CAVSPLTDTGRRALTF

SEQ ID NO: 452668 - protein, 14 aa, Homo sapiens
  CDR3 for beta chain variable domain of TCR clone 226334 (TRBV19, TRBJ1-6)
CASSTDGWNSHLHF

SEQ ID NO: 452669 - protein, 17 aa, Homo sapiens
  CDR3 for alpha chain variable domain of TCR clone 226335 (TRAV3, TRAJ6)
CAVRDGPRAGGSNIPTF

SEQ ID NO: 452670 - protein, 18 aa, Homo sapiens
  CDR3 for beta chain variable domain of TCR clone 226335 (TRBV7-9, TRBJ2-7)
CASSLTTSGSRTWYEQYF

SEQ ID NO: 452671 - protein, 14 aa, Homo sapiens
  CDR3 for alpha chain variable domain of TCR clone 226336 (TRAV12-1, TRAJ4)
CGEQRSGGYSKLIF

SEQ ID NO: 452672 - protein, 15 aa, Homo sapiens
  CDR3 for beta chain variable domain of TCR clone 226336 (TRBV6-3, TRBJ2-7)
CASSSPGTVFYEQYF

SEQ ID NO: 452673 - protein, 13 aa, Homo sapiens
  CDR3 for alpha chain variable domain of TCR clone 226337 (TRAV17, TRAJ5)
CAPMDTGRRALTF

SEQ ID NO: 452674 - protein, 13 aa, Homo sapiens
  CDR3 for beta chain variable domain of TCR clone 226337 (TRBV9, TRBJ2-1)
CASSPSGGNESSS

SEQ ID NO: 452675 - protein, 13 aa, Homo sapiens
  CDR3 for alpha chain variable domain of TCR clone 226338 (TRAV38-2/DV8, TRAJ57)
CAYTQGGSEKLVF

SEQ ID NO: 452676 - protein, 17 aa, Homo sapiens
  CDR3 for beta chain variable domain of TCR clone 226338 (TRBV13, TRBJ2-3)
CASSLSRVAGGRNTQYF

SEQ ID NO: 452677 - protein, 14 aa, Homo sapiens
  CDR3 for alpha chain variable domain of TCR clone 226339 (TRAV17, TRAJ16)
CATAGFSDGQKLLF

SEQ ID NO: 452678 - protein, 15 aa, Homo sapiens
  CDR3 for beta chain variable domain of TCR clone 226339 (TRBV18, TRBJ2-1)
CASSPPSASYNEQFF

SEQ ID NO: 452679 - protein, 14 aa, Homo sapiens
  CDR3 for alpha chain variable domain of TCR clone 226340 (TRAV12-2, TRAJ40)
CAVKIPSGTYKYIF

SEQ ID NO: 452680 - protein, 16 aa, Homo sapiens
  CDR3 for beta chain variable domain of TCR clone 226340 (TRBV7-9, TRBJ2-5)
CASSFSGTSGRETQYF

SEQ ID NO: 452681 - protein, 13 aa, Homo sapiens
  CDR3 for alpha chain variable domain of TCR clone 226341 (TRAV2, TRAJ20)
CAVEDPSEYELSF

SEQ ID NO: 452682 - protein, 16 aa, Homo sapiens
  CDR3 for beta chain variable domain of TCR clone 226341 (TRBV25-1, TRBJ2-7)
CASSELTGGGIYEQYF

SEQ ID NO: 452683 - protein, 15 aa, Homo sapiens
  CDR3 for alpha chain variable domain of TCR clone 226342 (TRAV2, TRAJ11)
CAVGGRNSGYSTRTF

SEQ ID NO: 452684 - protein, 12 aa, Homo sapiens
  CDR3 for beta chain variable domain of TCR clone 226342 (TRBV5-4, TRBJ2-7)
CASSLEAYEQYF

SEQ ID NO: 452685 - protein, 11 aa, Homo sapiens
  CDR3 for alpha chain variable domain of TCR clone 226343 (TRAV8-3, TRAJ16)
CAVVPCQKLLF

SEQ ID NO: 452686 - protein, 14 aa, Homo sapiens
  CDR3 for beta chain variable domain of TCR clone 226343 (TRBV19, TRBJ2-1)
CASPTFVLSGEQFF

SEQ ID NO: 452687 - protein, 14 aa, Homo sapiens
  CDR3 for alpha chain variable domain of TCR clone 226344 (TRAV8-6, TRAJ9)
CAVSPNTGGFKTIF

SEQ ID NO: 452688 - protein, 15 aa, Homo sapiens
  CDR3 for beta chain variable domain of TCR clone 226344 (TRBV7-3, TRBJ2-7)
CASSPEEGSSYEQYF

SEQ ID NO: 452689 - protein, 14 aa, Homo sapiens
  CDR3 for alpha chain variable domain of TCR clone 226345 (TRAV9-2, TRAJ36)
CALPWRTVANNLFF

SEQ ID NO: 452690 - protein, 14 aa, Homo sapiens
  CDR3 for beta chain variable domain of TCR clone 226345 (TRBV2, TRBJ1-2)
CASSELQVNYGYTF

SEQ ID NO: 452691 - protein, 14 aa, Homo sapiens
  CDR3 for alpha chain variable domain of TCR clone 226346 (TRAV8-3, TRAJ30)
CAGGDMNRDDKIIF

SEQ ID NO: 452692 - protein, 17 aa, Homo sapiens
  CDR3 for beta chain variable domain of TCR clone 226346 (TRBV19, TRBJ2-2)
CASSRNPGGFGTGELLF

SEQ ID NO: 452693 - protein, 15 aa, Homo sapiens
  CDR3 for alpha chain variable domain of TCR clone 226347 (TRAV27, TRAJ38)
CAGRFDAGNNRKLIW

SEQ ID NO: 452694 - protein, 13 aa, Homo sapiens
  CDR3 for beta chain variable domain of TCR clone 226347 (TRBV20-1, TRBJ2-1)
TSGALPPGNEQFF

SEQ ID NO: 452695 - protein, 13 aa, Homo sapiens
  CDR3 for alpha chain variable domain of TCR clone 226348 (TRAV8-1, TRAJ30)
CAVIMNRDDKIIF

SEQ ID NO: 452696 - protein, 14 aa, Homo sapiens
  CDR3 for beta chain variable domain of TCR clone 226348 (TRBV7-2, TRBJ1-6)
RASSLQGANSPLHF

SEQ ID NO: 452697 - protein, 15 aa, Homo sapiens
  CDR3 for alpha chain variable domain of TCR clone 226349 (TRAV12-3, TRAJ6)
CAMSATTGGSYIPTF

SEQ ID NO: 452698 - protein, 14 aa, Homo sapiens
  CDR3 for beta chain variable domain of TCR clone 226349 (TRBV6-5, TRBJ1-1)
CASSFGQGLTEAFF

SEQ ID NO: 452699 - protein, 14 aa, Homo sapiens
  CDR3 for alpha chain variable domain of TCR clone 226350 (TRAV12-3, TRAJ12)
CAMSEVDSIYKLIF

SEQ ID NO: 452700 - protein, 12 aa, Homo sapiens
  CDR3 for beta chain variable domain of TCR clone 226350 (TRBV18, TRBJ1-4)
CASSPSREKLFF

SEQ ID NO: 452701 - protein, 14 aa, Homo sapiens
  CDR3 for alpha chain variable domain of TCR clone 226351 (TRAV23/DV6, TRAJ11)
CAASLESGYSTLTF

SEQ ID NO: 452702 - protein, 13 aa, Homo sapiens
  CDR3 for beta chain variable domain of TCR clone 226351 (TRBV4-1, TRBJ2-5)
CASSLTRVETQYF

SEQ ID NO: 452703 - protein, 11 aa, Homo sapiens
  CDR3 for alpha chain variable domain of TCR clone 226352 (TRAV12-3, TRAJ43)
CAMTVSKDMRF

SEQ ID NO: 452704 - protein, 15 aa, Homo sapiens
  CDR3 for beta chain variable domain of TCR clone 226352 (TRBV5-1, TRBJ2-1)
CASSPPRAPHNEQFF

SEQ ID NO: 452705 - protein, 11 aa, Homo sapiens
  CDR3 for alpha chain variable domain of TCR clone 226353 (TRAV1-2, TRAJ20)
CAVSNDYKLSF

SEQ ID NO: 452706 - protein, 17 aa, Homo sapiens
  CDR3 for beta chain variable domain of TCR clone 226353 (TRBV15, TRBJ1-1)
CATSRVGGADGDTEAFF

SEQ ID NO: 452707 - protein, 15 aa, Homo sapiens
  CDR3 for alpha chain variable domain of TCR clone 226354 (TRAV38-1, TRAJ57)
CAFMDSQGGSEKLVF

SEQ ID NO: 452708 - protein, 16 aa, Homo sapiens
  CDR3 for beta chain variable domain of TCR clone 226354 (TRBV10-3, TRBJ2-1)
CAIRGGGRGDDNEQFF

SEQ ID NO: 452709 - protein, 14 aa, Homo sapiens
  CDR3 for alpha chain variable domain of TCR clone 226355 (TRAV13-1, TRAJ35)
CAASKGGFGNVLHC

SEQ ID NO: 452710 - protein, 15 aa, Homo sapiens
  CDR3 for beta chain variable domain of TCR clone 226355 (TRBV7-6, TRBJ1-5)
CASSQSSGINQPQHF

SEQ ID NO: 452711 - protein, 17 aa, Homo sapiens
  CDR3 for alpha chain variable domain of TCR clone 226356 (TRAV3, TRAJ6)
CAVRDGPRAGGSYIPTL

SEQ ID NO: 452712 - protein, 14 aa, Homo sapiens
  CDR3 for beta chain variable domain of TCR clone 226356 (TRBV7-2, TRBJ2-7)
FASSPKTSFYEQYF

SEQ ID NO: 452713 - protein, 17 aa, Homo sapiens
  CDR3 for alpha chain variable domain of TCR clone 226357 (TRAV8-2, )
CVVNIQNPDPAVYQLRD

SEQ ID NO: 452714 - protein, 14 aa, Homo sapiens
  CDR3 for beta chain variable domain of TCR clone 226357 (TRBV7-9, TRBJ2-5)
CASSLVGGEGTQYF

SEQ ID NO: 452715 - protein, 14 aa, Homo sapiens
  CDR3 for alpha chain variable domain of TCR clone 226358 (TRAV1-2, TRAJ8)
CAVREDTGFQKLVF

SEQ ID NO: 452716 - protein, 15 aa, Homo sapiens
  CDR3 for beta chain variable domain of TCR clone 226358 (TRBV11-3, TRBJ2-7)
CASSPGPASSYEQYL

SEQ ID NO: 452717 - protein, 18 aa, Homo sapiens
  CDR3 for alpha chain variable domain of TCR clone 226359 (TRAV21, TRAJ52)
CAVRPSPAGGTSYGKLTF

SEQ ID NO: 452718 - protein, 13 aa, Homo sapiens
  CDR3 for beta chain variable domain of TCR clone 226359 (TRBV7-3, TRBJ1-1)
YASSQDWGAEAFF

SEQ ID NO: 452719 - protein, 13 aa, Homo sapiens
  CDR3 for alpha chain variable domain of TCR clone 226360 (TRAV8-3, TRAJ48)
CAVVAFGNERLTF

SEQ ID NO: 452720 - protein, 15 aa, Homo sapiens
  CDR3 for beta chain variable domain of TCR clone 226360 (TRBV11-2, TRBJ2-1)
CASSSPSTRYNEQFF

SEQ ID NO: 452721 - protein, 16 aa, Homo sapiens
  CDR3 for alpha chain variable domain of TCR clone 226361 (TRAV17, TRAJ28)
CACGSYSGAGSYQLTF

SEQ ID NO: 452722 - protein, 11 aa, Homo sapiens
  CDR3 for beta chain variable domain of TCR clone 226361 (TRBV6-3, TRBJ2-3)
CATGQADTQYF

SEQ ID NO: 452723 - protein, 17 aa, Homo sapiens
  CDR3 for alpha chain variable domain of TCR clone 226362 (TRAV3, TRAJ12)
CAVRDGGRMDSSYKLTF

SEQ ID NO: 452724 - protein, 16 aa, Homo sapiens
  CDR3 for beta chain variable domain of TCR clone 226362 (TRBV9, TRBJ2-2)
CASSAMGKGNTGELFF

SEQ ID NO: 452725 - protein, 13 aa, Homo sapiens
  CDR3 for alpha chain variable domain of TCR clone 226363 (TRAV8-6, TRAJ9)
CAVWNTGGFKTIF

SEQ ID NO: 452726 - protein, 13 aa, Homo sapiens
  CDR3 for beta chain variable domain of TCR clone 226363 (TRBV27, TRBJ1-1)
CASSLSIGAEAFF

SEQ ID NO: 452727 - protein, 12 aa, Homo sapiens
  CDR3 for alpha chain variable domain of TCR clone 226364 (TRAV4, TRAJ21)
CPVGDNFNKFYF

SEQ ID NO: 452728 - protein, 17 aa, Homo sapiens
  CDR3 for beta chain variable domain of TCR clone 226364 (TRBV3-1, TRBJ2-7)
CASSQDLTGLSSYEQYF

SEQ ID NO: 452729 - protein, 12 aa, Homo sapiens
  CDR3 for alpha chain variable domain of TCR clone 226365 (TRAV1-2, TRAJ33)
CAALDSNYQLIW

SEQ ID NO: 452730 - protein, 13 aa, Homo sapiens
  CDR3 for beta chain variable domain of TCR clone 226365 (TRBV7-9, TRBJ2-5)
CASLPSGRETQYF

SEQ ID NO: 452731 - protein, 10 aa, Homo sapiens
  CDR3 for alpha chain variable domain of TCR clone 226366 (TRAV8-3, TRAJ15)
CAVGPGTADL

SEQ ID NO: 452732 - protein, 18 aa, Homo sapiens
  CDR3 for beta chain variable domain of TCR clone 226366 (TRBV18, TRBJ2-3)
CASSYTSGAAGGTDTQYF

SEQ ID NO: 452733 - protein, 12 aa, Homo sapiens
  CDR3 for alpha chain variable domain of TCR clone 226367 (TRAV12-2, TRAJ4)
GWPEGGYNKLTF

SEQ ID NO: 452734 - protein, 16 aa, Homo sapiens
  CDR3 for beta chain variable domain of TCR clone 226367 (TRBV6-1, TRBJ2-5)
CASSETLDRGAETQYF

SEQ ID NO: 452735 - protein, 12 aa, Homo sapiens
  CDR3 for alpha chain variable domain of TCR clone 226368 (TRAV1-1, TRAJ39)
CAVPVVGNMLTF

SEQ ID NO: 452736 - protein, 14 aa, Homo sapiens
  CDR3 for beta chain variable domain of TCR clone 226368 (TRBV18, TRBJ2-5)
CASSPGVSQETQYF

SEQ ID NO: 452737 - protein, 14 aa, Homo sapiens
  CDR3 for alpha chain variable domain of TCR clone 226369 (TRAV8-3, TRAJ9)
CAVVYNTGGFKTIF

SEQ ID NO: 452738 - protein, 14 aa, Homo sapiens
  CDR3 for beta chain variable domain of TCR clone 226369 (TRBV7-3, TRBJ2-2)
CASSSGGYKGELFF

SEQ ID NO: 452739 - protein, 16 aa, Homo sapiens
  CDR3 for alpha chain variable domain of TCR clone 226370 (TRAV13-1, TRAJ18)
CAASRLRGSTLGRLYF

SEQ ID NO: 452740 - protein, 16 aa, Homo sapiens
  CDR3 for beta chain variable domain of TCR clone 226370 (TRBV27, TRBJ1-1)
CASSSRGRTGYTEAFF

SEQ ID NO: 452741 - protein, 18 aa, Homo sapiens
  CDR3 for alpha chain variable domain of TCR clone 226371 (TRAV21, TRAJ52)
CAVRPSPAGGTSYGKLTF

SEQ ID NO: 452742 - protein, 15 aa, Homo sapiens
  CDR3 for beta chain variable domain of TCR clone 226371 (TRBV7-8, TRBJ2-3)
CASSPRTGSTDTQYF

SEQ ID NO: 452743 - protein, 13 aa, Homo sapiens
  CDR3 for alpha chain variable domain of TCR clone 226372 (TRAV21, TRAJ27)
CAARPGNAGKSTF

SEQ ID NO: 452744 - protein, 15 aa, Homo sapiens
  CDR3 for beta chain variable domain of TCR clone 226372 (TRBV6-1, TRBJ2-5)
CASSAGWGIQETQYF

SEQ ID NO: 452745 - protein, 15 aa, Homo sapiens
  CDR3 for alpha chain variable domain of TCR clone 226373 (TRAV17, TRAJ35)
CATAFVIGFGNVLLC

SEQ ID NO: 452746 - protein, 15 aa, Homo sapiens
  CDR3 for beta chain variable domain of TCR clone 226373 (TRBV7-9, TRBJ2-7)
CASSLALAEAYEQYF

SEQ ID NO: 452747 - protein, 13 aa, Homo sapiens
  CDR3 for alpha chain variable domain of TCR clone 226374 (TRAV12-1, TRAJ29)
CVVNGPGNTPLVF

SEQ ID NO: 452748 - protein, 14 aa, Homo sapiens
  CDR3 for beta chain variable domain of TCR clone 226374 (TRBV7-7, TRBJ2-2)
CATRQDSDTGELFF

SEQ ID NO: 452749 - protein, 11 aa, Homo sapiens
  CDR3 for alpha chain variable domain of TCR clone 226375 (TRAV1-1, TRAJ23)
CAVRQGGKLIF

SEQ ID NO: 452750 - protein, 16 aa, Homo sapiens
  CDR3 for beta chain variable domain of TCR clone 226375 (TRBV15, TRBJ2-6)
CATSVNGGFLANVLTF

SEQ ID NO: 452751 - protein, 15 aa, Homo sapiens
  CDR3 for alpha chain variable domain of TCR clone 226376 (TRAV13-1, TRAJ57)
CAASNTQGGSVKLVF

SEQ ID NO: 452752 - protein, 16 aa, Homo sapiens
  CDR3 for beta chain variable domain of TCR clone 226376 (TRBV19, TRBJ2-1)
CASSKAGPSSYNEQFF

SEQ ID NO: 452753 - protein, 15 aa, Homo sapiens
  CDR3 for alpha chain variable domain of TCR clone 226377 (TRAV38-2/DV8, TRAJ47)
CAYRSAKGHGNKLVV

SEQ ID NO: 452754 - protein, 15 aa, Homo sapiens
  CDR3 for beta chain variable domain of TCR clone 226377 (TRBV6-6, TRBJ2-7)
CASSYSYGGSYEQYF

SEQ ID NO: 452755 - protein, 12 aa, Homo sapiens
  CDR3 for alpha chain variable domain of TCR clone 226378 (TRAV26-1, TRAJ17)
CISQSYRQQANF

SEQ ID NO: 452756 - protein, 16 aa, Homo sapiens
  CDR3 for beta chain variable domain of TCR clone 226378 (TRBV28, TRBJ1-4)
CASSSRTGAANEKLFF

SEQ ID NO: 452757 - protein, 11 aa, Homo sapiens
  CDR3 for alpha chain variable domain of TCR clone 226379 (TRAV1-1, TRAJ37)
CAVSPQGKLIF

SEQ ID NO: 452758 - protein, 14 aa, Homo sapiens
  CDR3 for beta chain variable domain of TCR clone 226379 (TRBV19, TRBJ2-1)
CASPTFVLSGEQFF

SEQ ID NO: 452759 - protein, 10 aa, Homo sapiens
  CDR3 for alpha chain variable domain of TCR clone 226380 (TRAV30, TRAJ48)
CGIGNEKLTF

SEQ ID NO: 452760 - protein, 13 aa, Homo sapiens
  CDR3 for beta chain variable domain of TCR clone 226380 (TRBV29-1, TRBJ2-7)
CSVGPSGGYEQYF

SEQ ID NO: 452761 - protein, 12 aa, Homo sapiens
  CDR3 for alpha chain variable domain of TCR clone 226381 (TRAV13-1, TRAJ53)
AASGGSNYKRTF

SEQ ID NO: 452762 - protein, 15 aa, Homo sapiens
  CDR3 for beta chain variable domain of TCR clone 226381 (TRBV5-1, TRBJ2-1)
CASSPPRAPYNEQFF

SEQ ID NO: 452763 - protein, 14 aa, Homo sapiens
  CDR3 for alpha chain variable domain of TCR clone 226382 (TRAV8-4, TRAJ38)
CARLNAGNNRKLIW

SEQ ID NO: 452764 - protein, 14 aa, Homo sapiens
  CDR3 for beta chain variable domain of TCR clone 226382 (TRBV6-1, TRBJ2-7)
CTSVPSEPLYEQYF

SEQ ID NO: 452765 - protein, 10 aa, Homo sapiens
  CDR3 for alpha chain variable domain of TCR clone 226383 (TRAV23/DV6, TRAJ57)
CAASPTLSQG

SEQ ID NO: 452766 - protein, 15 aa, Homo sapiens
  CDR3 for beta chain variable domain of TCR clone 226383 (TRBV20-1, TRBJ2-7)
CSARDRVSGMDEQYF

SEQ ID NO: 452767 - protein, 14 aa, Homo sapiens
  CDR3 for alpha chain variable domain of TCR clone 226384 (TRAV26-1, TRAJ49)
CIVRPANTGNQVYC

SEQ ID NO: 452768 - protein, 15 aa, Homo sapiens
  CDR3 for beta chain variable domain of TCR clone 226384 (TRBV19, TRBJ1-1)
CASMGFRDVNTEAFF

SEQ ID NO: 452769 - protein, 14 aa, Homo sapiens
  CDR3 for alpha chain variable domain of TCR clone 226385 (TRAV1-2, TRAJ16)
CAVNRFPDGQKLLF

SEQ ID NO: 452770 - protein, 13 aa, Homo sapiens
  CDR3 for beta chain variable domain of TCR clone 226385 (TRBV9, TRBJ2-7)
CASSASDSYEQYF

SEQ ID NO: 452771 - protein, 16 aa, Homo sapiens
  CDR3 for alpha chain variable domain of TCR clone 226386 (TRAV21, TRAJ37)
CAVRTAGTSNTGKLIF

SEQ ID NO: 452772 - protein, 13 aa, Homo sapiens
  CDR3 for beta chain variable domain of TCR clone 226386 (TRBV7-9, TRBJ2-5)
CASLPLGRETQYF

SEQ ID NO: 452773 - protein, 15 aa, Homo sapiens
  CDR3 for alpha chain variable domain of TCR clone 226387 (TRAV29/DV5, TRAJ42)
CAAKTDGGSQGNLIF

SEQ ID NO: 452774 - protein, 12 aa, Homo sapiens
  CDR3 for beta chain variable domain of TCR clone 226387 (TRBV5-4, TRBJ2-5)
CASSSTRETQYF

SEQ ID NO: 452775 - protein, 18 aa, Homo sapiens
  CDR3 for alpha chain variable domain of TCR clone 226388 (TRAV12-3, TRAJ52)
CAMSRTNAGGTSYGKLTF

SEQ ID NO: 452776 - protein, 16 aa, Homo sapiens
  CDR3 for beta chain variable domain of TCR clone 226388 (TRBV20-1, TRBJ2-1)
CSARDSLGAVYNEQFF

SEQ ID NO: 452777 - protein, 13 aa, Homo sapiens
  CDR3 for alpha chain variable domain of TCR clone 226389 (TRAV21, TRAJ57)
CAVTQGGSEKLVF

SEQ ID NO: 452778 - protein, 15 aa, Homo sapiens
  CDR3 for beta chain variable domain of TCR clone 226389 (TRBV19, TRBJ2-1)
CASNAQGLAGREQFF

SEQ ID NO: 452779 - protein, 14 aa, Homo sapiens
  CDR3 for alpha chain variable domain of TCR clone 226390 (TRAV1-2, TRAJ8)
CAVREDTGFQKLVF

SEQ ID NO: 452780 - protein, 16 aa, Homo sapiens
  CDR3 for beta chain variable domain of TCR clone 226390 (TRBV7-2, TRBJ2-1)
CASSLGRTSGDNEQFF

SEQ ID NO: 452781 - protein, 14 aa, Homo sapiens
  CDR3 for alpha chain variable domain of TCR clone 226391 (TRAV12-2, TRAJ24)
CAVTPADSWGKLQF

SEQ ID NO: 452782 - protein, 16 aa, Homo sapiens
  CDR3 for beta chain variable domain of TCR clone 226391 (TRBV27, TRBJ2-2)
CASSFRGLVRTGELFF

SEQ ID NO: 452783 - protein, 14 aa, Homo sapiens
  CDR3 for alpha chain variable domain of TCR clone 226392 (TRAV29/DV5, TRAJ44)
CAAFLVGTARKLTF

SEQ ID NO: 452784 - protein, 15 aa, Homo sapiens
  CDR3 for beta chain variable domain of TCR clone 226392 (TRBV7-3, TRBJ2-2)
CASSETVQGTGELFF

SEQ ID NO: 452785 - protein, 14 aa, Homo sapiens
  CDR3 for alpha chain variable domain of TCR clone 226393 (TRAV12-1, TRAJ12)
CVVTRMDSSYKLIF

SEQ ID NO: 452786 - protein, 13 aa, Homo sapiens
  CDR3 for beta chain variable domain of TCR clone 226393 (TRBV20-1, TRBJ1-1)
GSARGGGNTEAFF

SEQ ID NO: 452787 - protein, 13 aa, Homo sapiens
  CDR3 for alpha chain variable domain of TCR clone 226394 (TRAV19, TRAJ26)
CALTFDYGQNFVF

SEQ ID NO: 452788 - protein, 16 aa, Homo sapiens
  CDR3 for beta chain variable domain of TCR clone 226394 (TRBV11-2, TRBJ2-3)
CASSSRTSGGAGTQYF

SEQ ID NO: 452789 - protein, 19 aa, Homo sapiens
  CDR3 for alpha chain variable domain of TCR clone 226395 (TRAV2, TRAJ20)
ILQVREADAAVYRDCKLSF

SEQ ID NO: 452790 - protein, 12 aa, Homo sapiens
  CDR3 for beta chain variable domain of TCR clone 226395 (TRBV7-9, TRBJ2-7)
CASSLEGYEQYF

SEQ ID NO: 452791 - protein, 14 aa, Homo sapiens
  CDR3 for alpha chain variable domain of TCR clone 226396 (TRAV1-2, TRAJ8)
CAVREDTGFQKLVF

SEQ ID NO: 452792 - protein, 16 aa, Homo sapiens
  CDR3 for beta chain variable domain of TCR clone 226396 (TRBV11-2, TRBJ2-1)
CASSLERDGVDNEQFF

SEQ ID NO: 452793 - protein, 17 aa, Homo sapiens
  CDR3 for alpha chain variable domain of TCR clone 226397 (TRAV3, TRAJ6)
CAVRDGPRAGGSYIPTF

SEQ ID NO: 452794 - protein, 15 aa, Homo sapiens
  CDR3 for beta chain variable domain of TCR clone 226397 (TRBV27, TRBJ2-1)
CASSNGGGSSDEQFF

SEQ ID NO: 452795 - protein, 12 aa, Homo sapiens
  CDR3 for alpha chain variable domain of TCR clone 226398 (TRAV29/DV5, TRAJ15)
CASNQAGTALIF

SEQ ID NO: 452796 - protein, 15 aa, Homo sapiens
  CDR3 for beta chain variable domain of TCR clone 226398 (TRBV4-1, TRBJ1-4)
CASSDTGGTNEKLFF

SEQ ID NO: 452797 - protein, 13 aa, Homo sapiens
  CDR3 for alpha chain variable domain of TCR clone 226399 (TRAV1-2, TRAJ9)
CAALNAGGFKTIF

SEQ ID NO: 452798 - protein, 12 aa, Homo sapiens
  CDR3 for beta chain variable domain of TCR clone 226399 (TRBV11-3, TRBJ1-1)
CASSQRQGEAFF

SEQ ID NO: 452799 - protein, 14 aa, Homo sapiens
  CDR3 for alpha chain variable domain of TCR clone 226400 (TRAV1-2, TRAJ16)
CAVNRFSGGQKLLF

SEQ ID NO: 452800 - protein, 15 aa, Homo sapiens
  CDR3 for beta chain variable domain of TCR clone 226400 (TRBV7-9, TRBJ1-6)
CASSSPGRGNSTLHF

SEQ ID NO: 452801 - protein, 13 aa, Homo sapiens
  CDR3 for alpha chain variable domain of TCR clone 226401 (TRAV1-1, TRAJ9)
CAAKNTGGFKTIF

SEQ ID NO: 452802 - protein, 14 aa, Homo sapiens
  CDR3 for beta chain variable domain of TCR clone 226401 (TRBV12-5, TRBJ2-5)
CASGARTHQETQYF

SEQ ID NO: 452803 - protein, 14 aa, Homo sapiens
  CDR3 for alpha chain variable domain of TCR clone 226402 (TRAV8-3, TRAJ6)
CAVGGRGGSYIPTF

SEQ ID NO: 452804 - protein, 15 aa, Homo sapiens
  CDR3 for beta chain variable domain of TCR clone 226402 (TRBV28, TRBJ2-1)
CASSIIAGGRSEQFL

SEQ ID NO: 452805 - protein, 18 aa, Homo sapiens
  CDR3 for alpha chain variable domain of TCR clone 226403 (TRAV21, TRAJ52)
CAVRPSPAGGTSYGKPTF

SEQ ID NO: 452806 - protein, 13 aa, Homo sapiens
  CDR3 for beta chain variable domain of TCR clone 226403 (TRBV7-3, TRBJ1-1)
CASGQDWGAEAFF

SEQ ID NO: 452807 - protein, 12 aa, Homo sapiens
  CDR3 for alpha chain variable domain of TCR clone 226404 (TRAV1-2, TRAJ29)
CAVRNLNTPLVF

SEQ ID NO: 452808 - protein, 14 aa, Homo sapiens
  CDR3 for beta chain variable domain of TCR clone 226404 (TRBV12-5, TRBJ2-5)
CASGSRTHQETQYF

SEQ ID NO: 452809 - protein, 18 aa, Homo sapiens
  CDR3 for alpha chain variable domain of TCR clone 226405 (TRAV9-2, TRAJ44)
CAPVPKFINTGTASKLTF

SEQ ID NO: 452810 - protein, 14 aa, Homo sapiens
  CDR3 for beta chain variable domain of TCR clone 226405 (TRBV12-4, TRBJ1-1)
CASSLGTGGTEAFF

SEQ ID NO: 452811 - protein, 16 aa, Homo sapiens
  CDR3 for alpha chain variable domain of TCR clone 226406 (TRAV16, TRAJ57)
CAPYLITQGGSEKLVF

SEQ ID NO: 452812 - protein, 15 aa, Homo sapiens
  CDR3 for beta chain variable domain of TCR clone 226406 (TRBV29-1, TRBJ2-7)
CSVEFFDRGSYEQYF

SEQ ID NO: 452813 - protein, 11 aa, Homo sapiens
  CDR3 for alpha chain variable domain of TCR clone 226407 (TRAV35, TRAJ34)
CWARNTDKLIF

SEQ ID NO: 452814 - protein, 16 aa, Homo sapiens
  CDR3 for beta chain variable domain of TCR clone 226407 (TRBV20-1, TRBJ2-1)
CSAATQGPVSYNEQFF

SEQ ID NO: 452815 - protein, 15 aa, Homo sapiens
  CDR3 for alpha chain variable domain of TCR clone 226408 (TRAV14/DV4, TRAJ39)
CAMRAVNNAGNMLTF

SEQ ID NO: 452816 - protein, 14 aa, Homo sapiens
  CDR3 for beta chain variable domain of TCR clone 226408 (TRBV7-2, TRBJ2-7)
CASSPKTSFYEQYF

SEQ ID NO: 452817 - protein, 14 aa, Homo sapiens
  CDR3 for alpha chain variable domain of TCR clone 226409 (TRAV1-2, TRAJ16)
CAVNRISDGQTLLF

SEQ ID NO: 452818 - protein, 17 aa, Homo sapiens
  CDR3 for beta chain variable domain of TCR clone 226409 (TRBV7-9, TRBJ2-1)
CASSLVASYPSYNEQFF

SEQ ID NO: 452819 - protein, 13 aa, Homo sapiens
  CDR3 for alpha chain variable domain of TCR clone 226410 (TRAV16, TRAJ10)
CALLTGGGNKLTF

SEQ ID NO: 452820 - protein, 12 aa, Homo sapiens
  CDR3 for beta chain variable domain of TCR clone 226410 (TRBV28, TRBJ2-7)
CASTGNHSEQYF

SEQ ID NO: 452821 - protein, 13 aa, Homo sapiens
  CDR3 for alpha chain variable domain of TCR clone 226411 (TRAV21, TRAJ27)
CASRPGNAGKSTF

SEQ ID NO: 452822 - protein, 13 aa, Homo sapiens
  CDR3 for beta chain variable domain of TCR clone 226411 (TRBV18, TRBJ2-7)
CASQSGGGYEQYF

SEQ ID NO: 452823 - protein, 15 aa, Homo sapiens
  CDR3 for alpha chain variable domain of TCR clone 226412 (TRAV4, TRAJ36)
CLVGDRQTGANHLFF

SEQ ID NO: 452824 - protein, 15 aa, Homo sapiens
  CDR3 for beta chain variable domain of TCR clone 226412 (TRBV7-6, TRBJ2-1)
CASSSLAGEGNEQFF

SEQ ID NO: 452825 - protein, 23 aa, Homo sapiens
  CDR3 for alpha chain variable domain of TCR clone 226413 (TRAV26-1, TRAJ38)
CIADNAGNNHIQHPDPAVYQLRD

SEQ ID NO: 452826 - protein, 13 aa, Homo sapiens
  CDR3 for beta chain variable domain of TCR clone 226413 (TRBV20-1, TRBJ1-1)
CRARGGGNTEAFF

SEQ ID NO: 452827 - protein, 11 aa, Homo sapiens
  CDR3 for alpha chain variable domain of TCR clone 226414 (TRAV21, TRAJ34)
CAPLDTDKLIF

SEQ ID NO: 452828 - protein, 16 aa, Homo sapiens
  CDR3 for beta chain variable domain of TCR clone 226414 (TRBV5-1, TRBJ2-3)
CASSLAGDRGTDTQYL

SEQ ID NO: 452829 - protein, 13 aa, Homo sapiens
  CDR3 for alpha chain variable domain of TCR clone 226415 (TRAV3, TRAJ21)
CAVREPDFNKFYF

SEQ ID NO: 452830 - protein, 17 aa, Homo sapiens
  CDR3 for beta chain variable domain of TCR clone 226415 (TRBV11-2, TRBJ2-3)
CQQLRGASRGAPSTQYF

SEQ ID NO: 452831 - protein, 14 aa, Homo sapiens
  CDR3 for alpha chain variable domain of TCR clone 226416 (TRAV8-1, TRAJ24)
CAVNAADSWGKLQV

SEQ ID NO: 452832 - protein, 15 aa, Homo sapiens
  CDR3 for beta chain variable domain of TCR clone 226416 (TRBV20-1, TRBJ2-7)
CSARVPAAYFYEQYF

SEQ ID NO: 452833 - protein, 12 aa, Homo sapiens
  CDR3 for alpha chain variable domain of TCR clone 226417 (TRAV29/DV5, TRAJ49)
CAAMDTGNQFYF

SEQ ID NO: 452834 - protein, 15 aa, Homo sapiens
  CDR3 for beta chain variable domain of TCR clone 226417 (TRBV20-1, TRBJ1-5)
CSAREGGYSNQPQHF

SEQ ID NO: 452835 - protein, 15 aa, Homo sapiens
  CDR3 for alpha chain variable domain of TCR clone 226418 (TRAV8-3, TRAJ45)
CASSYSGGGADGLTF

SEQ ID NO: 452836 - protein, 13 aa, Homo sapiens
  CDR3 for beta chain variable domain of TCR clone 226418 (TRBV7-2, TRBJ2-2)
CASSLAVTGELFF

SEQ ID NO: 452837 - protein, 14 aa, Homo sapiens
  CDR3 for alpha chain variable domain of TCR clone 226419 (TRAV12-3, TRAJ58)
CAMSTETSGARLTF

SEQ ID NO: 452838 - protein, 12 aa, Homo sapiens
  CDR3 for beta chain variable domain of TCR clone 226419 (TRBV7-8, TRBJ2-7)
CASSLGDREQYF

SEQ ID NO: 452839 - protein, 14 aa, Homo sapiens
  CDR3 for alpha chain variable domain of TCR clone 226420 (TRAV26-1, TRAJ38)
CIADNAGNNRQLIW

SEQ ID NO: 452840 - protein, 13 aa, Homo sapiens
  CDR3 for beta chain variable domain of TCR clone 226420 (TRBV19, TRBJ1-2)
CASSVPGQDGYTF

SEQ ID NO: 452841 - protein, 16 aa, Homo sapiens
  CDR3 for alpha chain variable domain of TCR clone 226421 (TRAV14/DV4, TRAJ21)
CTMREGPENNFNKFYF

SEQ ID NO: 452842 - protein, 12 aa, Homo sapiens
  CDR3 for beta chain variable domain of TCR clone 226421 (TRBV29-1, TRBJ2-2)
CSADKYTGELFF

SEQ ID NO: 452843 - protein, 13 aa, Homo sapiens
  CDR3 for alpha chain variable domain of TCR clone 226422 (TRAV21, TRAJ37)
CAVSSGNTGKLIF

SEQ ID NO: 452844 - protein, 15 aa, Homo sapiens
  CDR3 for beta chain variable domain of TCR clone 226422 (TRBV19, TRBJ2-4)
CGSRGPRRGENIQYF

SEQ ID NO: 452845 - protein, 13 aa, Homo sapiens
  CDR3 for alpha chain variable domain of TCR clone 226423 (TRAV2, TRAJ40)
CAVVTSGTYKYIF

SEQ ID NO: 452846 - protein, 16 aa, Homo sapiens
  CDR3 for beta chain variable domain of TCR clone 226423 (TRBV2, TRBJ2-1)
CASSVGGSQSYNEQFF

SEQ ID NO: 452847 - protein, 15 aa, Homo sapiens
  CDR3 for alpha chain variable domain of TCR clone 226424 (TRAV16, TRAJ4)
CALEDPSGGYNKLIF

SEQ ID NO: 452848 - protein, 13 aa, Homo sapiens
  CDR3 for beta chain variable domain of TCR clone 226424 (TRBV7-3, TRBJ2-7)
CASSQARGYEQYF

SEQ ID NO: 452849 - protein, 14 aa, Homo sapiens
  CDR3 for alpha chain variable domain of TCR clone 226425 (TRAV12-1, TRAJ15)
CLPPANQPGTALIF

SEQ ID NO: 452850 - protein, 13 aa, Homo sapiens
  CDR3 for beta chain variable domain of TCR clone 226425 (TRBV7-2, TRBJ2-4)
CASSRQHANRHYF

SEQ ID NO: 452851 - protein, 13 aa, Homo sapiens
  CDR3 for alpha chain variable domain of TCR clone 226426 (TRAV8-6, TRAJ49)
CAVITNTGNQFYF

SEQ ID NO: 452852 - protein, 14 aa, Homo sapiens
  CDR3 for beta chain variable domain of TCR clone 226426 (TRBV18, TRBJ2-1)
CSSPPSASYNEQFF

SEQ ID NO: 452853 - protein, 18 aa, Homo sapiens
  CDR3 for alpha chain variable domain of TCR clone 226427 (TRAV26-1, TRAJ52)
CIVRVEGAGGTSYGKLTF

SEQ ID NO: 452854 - protein, 13 aa, Homo sapiens
  CDR3 for beta chain variable domain of TCR clone 226427 (TRBV7-3, TRBJ1-2)
CASSLKRCYGYTF

SEQ ID NO: 452855 - protein, 15 aa, Homo sapiens
  CDR3 for alpha chain variable domain of TCR clone 226428 (TRAV29/DV5, TRAJ53)
CAALNSGGSNYKLTF

SEQ ID NO: 452856 - protein, 12 aa, Homo sapiens
  CDR3 for beta chain variable domain of TCR clone 226428 (TRBV11-2, TRBJ2-1)
CASSPGNNEQFF

SEQ ID NO: 452857 - protein, 11 aa, Homo sapiens
  CDR3 for alpha chain variable domain of TCR clone 226429 (TRAV21, TRAJ39)
LLVNAGNMLTF

SEQ ID NO: 452858 - protein, 12 aa, Homo sapiens
  CDR3 for beta chain variable domain of TCR clone 226429 (TRBV3-1, TRBJ2-1)
CASSQGSSGQFC

SEQ ID NO: 452859 - protein, 14 aa, Homo sapiens
  CDR3 for alpha chain variable domain of TCR clone 226430 (TRAV3, TRAJ36)
CAVRDGTGANNLFF

SEQ ID NO: 452860 - protein, 16 aa, Homo sapiens
  CDR3 for beta chain variable domain of TCR clone 226430 (TRBV20-1, TRBJ2-6)
CSAREGPGVEANVLTF

SEQ ID NO: 452861 - protein, 21 aa, Homo sapiens
  CDR3 for alpha chain variable domain of TCR clone 226431 (TRAV26-1, TRAJ38)
CIADNAGNNHIQNPDPAVYQL

SEQ ID NO: 452862 - protein, 17 aa, Homo sapiens
  CDR3 for beta chain variable domain of TCR clone 226431 (TRBV29-1, TRBJ2-1)
CSVVGLAGAYSYNEQFF

SEQ ID NO: 452863 - protein, 14 aa, Homo sapiens
  CDR3 for alpha chain variable domain of TCR clone 226432 (TRAV12-2, TRAJ44)
CAVNPAGTACKLTF

SEQ ID NO: 452864 - protein, 13 aa, Homo sapiens
  CDR3 for beta chain variable domain of TCR clone 226432 (TRBV20-1, TRBJ1-6)
CSAPLGVGSPLHF

SEQ ID NO: 452865 - protein, 15 aa, Homo sapiens
  CDR3 for alpha chain variable domain of TCR clone 226433 (TRAV17, TRAJ35)
CATAFVIGFGNVLHC

SEQ ID NO: 452866 - protein, 14 aa, Homo sapiens
  CDR3 for beta chain variable domain of TCR clone 226433 (TRBV12-5, TRBJ2-5)
CASGSRTQQETQSF

SEQ ID NO: 452867 - protein, 15 aa, Homo sapiens
  CDR3 for alpha chain variable domain of TCR clone 226434 (TRAV17, TRAJ57)
CATGPSQGGSEKLVF

SEQ ID NO: 452868 - protein, 15 aa, Homo sapiens
  CDR3 for beta chain variable domain of TCR clone 226434 (TRBV7-9, TRBJ2-1)
CASSFVGAGKNEQFF

SEQ ID NO: 452869 - protein, 12 aa, Homo sapiens
  CDR3 for alpha chain variable domain of TCR clone 226435 (TRAV12-1, TRAJ40)
CVVYSGTYKYIF

SEQ ID NO: 452870 - protein, 16 aa, Homo sapiens
  CDR3 for beta chain variable domain of TCR clone 226435 (TRBV7-9, TRBJ2-7)
CASSSPSANTVNEQYF

SEQ ID NO: 452871 - protein, 13 aa, Homo sapiens
  CDR3 for alpha chain variable domain of TCR clone 226436 (TRAV8-6, TRAJ49)
CAVITNTGNTFSF

SEQ ID NO: 452872 - protein, 14 aa, Homo sapiens
  CDR3 for beta chain variable domain of TCR clone 226436 (TRBV5-1, TRBJ2-7)
CASSRGESLYEQYF

SEQ ID NO: 452873 - protein, 12 aa, Homo sapiens
  CDR3 for alpha chain variable domain of TCR clone 226437 (TRAV12-1, TRAJ40)
CVAYSGTYKYIF

SEQ ID NO: 452874 - protein, 18 aa, Homo sapiens
  CDR3 for beta chain variable domain of TCR clone 226437 (TRBV11-2, TRBJ2-3)
CASSLGGASRGATNTQYF

SEQ ID NO: 452875 - protein, 13 aa, Homo sapiens
  CDR3 for alpha chain variable domain of TCR clone 226438 (TRAV8-3, TRAJ21)
CDVGAYNFNKFYF

SEQ ID NO: 452876 - protein, 16 aa, Homo sapiens
  CDR3 for beta chain variable domain of TCR clone 226438 (TRBV19, TRBJ2-1)
CASSMGGGSSYNEQFF

SEQ ID NO: 452877 - protein, 13 aa, Homo sapiens
  CDR3 for alpha chain variable domain of TCR clone 226439 (TRAV20, TRAJ37)
CAGCSSSTGKLIF

SEQ ID NO: 452878 - protein, 11 aa, Homo sapiens
  CDR3 for beta chain variable domain of TCR clone 226439 (TRBV12-4, TRBJ2-3)
WASTATDTQYF

SEQ ID NO: 452879 - protein, 13 aa, Homo sapiens
  CDR3 for alpha chain variable domain of TCR clone 226440 (TRAV21, TRAJ20)
CAVGLRVDYKLSF

SEQ ID NO: 452880 - protein, 11 aa, Homo sapiens
  CDR3 for beta chain variable domain of TCR clone 226440 (TRBV25-1, TRBJ2-1)
CATTGISEQFF

SEQ ID NO: 452881 - protein, 13 aa, Homo sapiens
  CDR3 for alpha chain variable domain of TCR clone 226441 (TRAV2, TRAJ36)
CAVDHTGANKLFF

SEQ ID NO: 452882 - protein, 12 aa, Homo sapiens
  CDR3 for beta chain variable domain of TCR clone 226441 (TRBV19, TRBJ1-1)
CASMNRYTEAFF

SEQ ID NO: 452883 - protein, 14 aa, Homo sapiens
  CDR3 for alpha chain variable domain of TCR clone 226442 (TRAV9-2, TRAJ39)
CALYTYNAGNMLTF

SEQ ID NO: 452884 - protein, 16 aa, Homo sapiens
  CDR3 for beta chain variable domain of TCR clone 226442 (TRBV7-3, TRBJ2-1)
CASSKPLAGGYNEQFF

SEQ ID NO: 452885 - protein, 15 aa, Homo sapiens
  CDR3 for alpha chain variable domain of TCR clone 226443 (TRAV8-2, TRAJ40)
CVVLGTTSGTYKYIF

SEQ ID NO: 452886 - protein, 15 aa, Homo sapiens
  CDR3 for beta chain variable domain of TCR clone 226443 (TRBV7-3, TRBJ2-1)
CQQLRGYRSYNEQFF

SEQ ID NO: 452887 - protein, 16 aa, Homo sapiens
  CDR3 for alpha chain variable domain of TCR clone 226444 (TRAV12-2, TRAJ43)
CAGDDMRFGAGTRLTV

SEQ ID NO: 452888 - protein, 11 aa, Homo sapiens
  CDR3 for beta chain variable domain of TCR clone 226444 (TRBV19, TRBJ1-1)
CASSIGSEAFF

SEQ ID NO: 452889 - protein, 13 aa, Homo sapiens
  CDR3 for alpha chain variable domain of TCR clone 226445 (TRAV27, TRAJ45)
CRSSGGGADGLTF

SEQ ID NO: 452890 - protein, 16 aa, Homo sapiens
  CDR3 for beta chain variable domain of TCR clone 226445 (TRBV2, TRBJ2-1)
CASSVGGSLSYNEQFF

SEQ ID NO: 452891 - protein, 14 aa, Homo sapiens
  CDR3 for alpha chain variable domain of TCR clone 226446 (TRAV8-2, TRAJ11)
CVVSEKSGYSTLTF

SEQ ID NO: 452892 - protein, 15 aa, Homo sapiens
  CDR3 for beta chain variable domain of TCR clone 226446 (TRBV7-9, TRBJ1-5)
CASSQGHQPNQPQHF

SEQ ID NO: 452893 - protein, 15 aa, Homo sapiens
  CDR3 for alpha chain variable domain of TCR clone 226447 (TRAV20, TRAJ50)
CAVRQMKTSYDKVIF

SEQ ID NO: 452894 - protein, 17 aa, Homo sapiens
  CDR3 for beta chain variable domain of TCR clone 226447 (TRBV28, TRBJ2-7)
CASSPLHRASGVYEQYI

SEQ ID NO: 452895 - protein, 14 aa, Homo sapiens
  CDR3 for alpha chain variable domain of TCR clone 226448 (TRAV8-6, TRAJ5)
CAVSVDTSRRALTF

SEQ ID NO: 452896 - protein, 11 aa, Homo sapiens
  CDR3 for beta chain variable domain of TCR clone 226448 (TRBV7-3, TRBJ2-5)
CASSLSETQYF

SEQ ID NO: 452897 - protein, 14 aa, Homo sapiens
  CDR3 for alpha chain variable domain of TCR clone 226449 (TRAV30, TRAJ26)
CGTEIVSYGQNIVF

SEQ ID NO: 452898 - protein, 13 aa, Homo sapiens
  CDR3 for beta chain variable domain of TCR clone 226449 (TRBV7-3, TRBJ1-1)
CASSQDWGAEAFF

SEQ ID NO: 452899 - protein, 12 aa, Homo sapiens
  CDR3 for alpha chain variable domain of TCR clone 226450 (TRAV17, TRAJ20)
CATYSNDYKLSF

SEQ ID NO: 452900 - protein, 16 aa, Homo sapiens
  CDR3 for beta chain variable domain of TCR clone 226450 (TRBV5-1, TRBJ2-3)
CASSWGLAVYTDTQYF

SEQ ID NO: 452901 - protein, 13 aa, Homo sapiens
  CDR3 for alpha chain variable domain of TCR clone 226451 (TRAV27, TRAJ8)
CAGGPTGFQKLVF

SEQ ID NO: 452902 - protein, 14 aa, Homo sapiens
  CDR3 for beta chain variable domain of TCR clone 226451 (TRBV11-2, TRBJ1-2)
CASSLGTANYGYTF

SEQ ID NO: 452903 - protein, 16 aa, Homo sapiens
  CDR3 for alpha chain variable domain of TCR clone 226452 (TRAV21, TRAJ45)
CAVSWGSVGGADGLTF

SEQ ID NO: 452904 - protein, 14 aa, Homo sapiens
  CDR3 for beta chain variable domain of TCR clone 226452 (TRBV4-2, TRBJ1-2)
CASSPGGSNYGYTF

SEQ ID NO: 452905 - protein, 12 aa, Homo sapiens
  CDR3 for alpha chain variable domain of TCR clone 226453 (TRAV13-1, TRAJ15)
CAASQAGTALIF

SEQ ID NO: 452906 - protein, 18 aa, Homo sapiens
  CDR3 for beta chain variable domain of TCR clone 226453 (TRBV7-9, TRBJ2-3)
CASSLPINGQISTDTQDF

SEQ ID NO: 452907 - protein, 15 aa, Homo sapiens
  CDR3 for alpha chain variable domain of TCR clone 226454 (TRAV3, TRAJ9)
CAVRARYTGGFKTIF

SEQ ID NO: 452908 - protein, 12 aa, Homo sapiens
  CDR3 for beta chain variable domain of TCR clone 226454 (TRBV11-2, TRBJ2-7)
CASSLPTYEQYF

SEQ ID NO: 452909 - protein, 15 aa, Homo sapiens
  CDR3 for alpha chain variable domain of TCR clone 226455 (TRAV20, TRAJ4)
CAVQVFSGGYNKLIF

SEQ ID NO: 452910 - protein, 14 aa, Homo sapiens
  CDR3 for beta chain variable domain of TCR clone 226455 (TRBV7-6, TRBJ2-3)
CASNSGGDANTQFF

SEQ ID NO: 452911 - protein, 13 aa, Homo sapiens
  CDR3 for alpha chain variable domain of TCR clone 226456 (TRAV27, TRAJ53)
CAGQGGSNYKLPF

SEQ ID NO: 452912 - protein, 13 aa, Homo sapiens
  CDR3 for beta chain variable domain of TCR clone 226456 (TRBV29-1, TRBJ1-1)
CSVESGFGTEAFF

SEQ ID NO: 452913 - protein, 14 aa, Homo sapiens
  CDR3 for alpha chain variable domain of TCR clone 226457 (TRAV8-1, TRAJ34)
CAVNPSYNTDKLIF

SEQ ID NO: 452914 - protein, 16 aa, Homo sapiens
  CDR3 for beta chain variable domain of TCR clone 226457 (TRBV7-2, TRBJ2-6)
GASSLAGRSGANVLTF

SEQ ID NO: 452915 - protein, 18 aa, Homo sapiens
  CDR3 for alpha chain variable domain of TCR clone 226458 (TRAV21, TRAJ52)
CAVRPSPAGGTSYGKLTF

SEQ ID NO: 452916 - protein, 13 aa, Homo sapiens
  CDR3 for beta chain variable domain of TCR clone 226458 (TRBV4-3, TRBJ1-1)
CASSQVEGSMAFF

SEQ ID NO: 452917 - protein, 14 aa, Homo sapiens
  CDR3 for alpha chain variable domain of TCR clone 226459 (TRAV23/DV6, TRAJ11)
CAASLESGYSTLTF

SEQ ID NO: 452918 - protein, 13 aa, Homo sapiens
  CDR3 for beta chain variable domain of TCR clone 226459 (TRBV4-1, TRBJ2-5)
CASSLTRGETQYL

SEQ ID NO: 452919 - protein, 13 aa, Homo sapiens
  CDR3 for alpha chain variable domain of TCR clone 226460 (TRAV38-1, TRAJ42)
CARWGGSQGNLIF

SEQ ID NO: 452920 - protein, 17 aa, Homo sapiens
  CDR3 for beta chain variable domain of TCR clone 226460 (TRBV20-1, TRBJ1-5)
CSASLSPGQGGNQPQHF

SEQ ID NO: 452921 - protein, 13 aa, Homo sapiens
  CDR3 for alpha chain variable domain of TCR clone 226461 (TRAV36/DV7, TRAJ33)
CSVDMDINYQLIW

SEQ ID NO: 452922 - protein, 16 aa, Homo sapiens
  CDR3 for beta chain variable domain of TCR clone 226461 (TRBV15, TRBJ2-3)
CATRLSGGRAPDTQYF

SEQ ID NO: 452923 - protein, 14 aa, Homo sapiens
  CDR3 for alpha chain variable domain of TCR clone 226462 (TRAV13-1, TRAJ44)
CAAKATGTASKLTF

SEQ ID NO: 452924 - protein, 15 aa, Homo sapiens
  CDR3 for beta chain variable domain of TCR clone 226462 (TRBV5-1, TRBJ2-7)
CASSLMTSGSNEQYF

SEQ ID NO: 452925 - protein, 12 aa, Homo sapiens
  CDR3 for alpha chain variable domain of TCR clone 226463 (TRAV12-3, TRAJ17)
CAMTLTGNKLTF

SEQ ID NO: 452926 - protein, 13 aa, Homo sapiens
  CDR3 for beta chain variable domain of TCR clone 226463 (TRBV5-4, TRBJ1-2)
CASSFRNNYGYTF

SEQ ID NO: 452927 - protein, 11 aa, Homo sapiens
  CDR3 for alpha chain variable domain of TCR clone 226464 (TRAV17, TRAJ43)
CATPRSNDMRF

SEQ ID NO: 452928 - protein, 14 aa, Homo sapiens
  CDR3 for beta chain variable domain of TCR clone 226464 (TRBV27, TRBJ2-2)
CASSLGAATGELFF

SEQ ID NO: 452929 - protein, 14 aa, Homo sapiens
  CDR3 for alpha chain variable domain of TCR clone 226465 (TRAV21, TRAJ4)
CAAPGVGGYNKLIF

SEQ ID NO: 452930 - protein, 14 aa, Homo sapiens
  CDR3 for beta chain variable domain of TCR clone 226465 (TRBV7-2, TRBJ1-2)
CASSQTGSTYGYTF

SEQ ID NO: 452931 - protein, 16 aa, Homo sapiens
  CDR3 for alpha chain variable domain of TCR clone 226466 (TRAV26-1, TRAJ48)
CIVRETPNFGNEKLTF

SEQ ID NO: 452932 - protein, 12 aa, Homo sapiens
  CDR3 for beta chain variable domain of TCR clone 226466 (TRBV19, TRBJ2-1)
CASSRQGAEQFF

SEQ ID NO: 452933 - protein, 12 aa, Homo sapiens
  CDR3 for alpha chain variable domain of TCR clone 226467 (TRAV12-3, TRAJ17)
CAMTLTGNKLTF

SEQ ID NO: 452934 - protein, 14 aa, Homo sapiens
  CDR3 for beta chain variable domain of TCR clone 226467 (TRBV4-1, TRBJ2-7)
CASSQDREHVEQFF

SEQ ID NO: 452935 - protein, 16 aa, Homo sapiens
  CDR3 for alpha chain variable domain of TCR clone 226468 (TRAV3, TRAJ10)
CAVRDLRAGGGNKLTF

SEQ ID NO: 452936 - protein, 15 aa, Homo sapiens
  CDR3 for beta chain variable domain of TCR clone 226468 (TRBV5-1, TRBJ2-1)
CASSPPRAPYNEQFF

SEQ ID NO: 452937 - protein, 16 aa, Homo sapiens
  CDR3 for alpha chain variable domain of TCR clone 226469 (TRAV4, TRAJ18)
CCVPLIGGSTLGKLYF

SEQ ID NO: 452938 - protein, 14 aa, Homo sapiens
  CDR3 for beta chain variable domain of TCR clone 226469 (TRBV7-3, TRBJ2-1)
CASSLAGGTNEQFF

SEQ ID NO: 452939 - protein, 20 aa, Homo sapiens
  CDR3 for alpha chain variable domain of TCR clone 226470 (TRAV12-3, TRAJ41)
SLFIRDSQPSDSATPEALNF

SEQ ID NO: 452940 - protein, 15 aa, Homo sapiens
  CDR3 for beta chain variable domain of TCR clone 226470 (TRBV5-1, TRBJ2-7)
CASSLYLTSSYEQYF

SEQ ID NO: 452941 - protein, 12 aa, Homo sapiens
  CDR3 for alpha chain variable domain of TCR clone 226471 (TRAV26-1, TRAJ35)
CIGLSFGNVLHF

SEQ ID NO: 452942 - protein, 17 aa, Homo sapiens
  CDR3 for beta chain variable domain of TCR clone 226471 (TRBV11-3, TRBJ1-5)
CASSPLTGLRGNQPQHF

SEQ ID NO: 452943 - protein, 18 aa, Homo sapiens
  CDR3 for alpha chain variable domain of TCR clone 226472 (TRAV13-1, TRAJ52)
CAAKNPNAGGTSYGKLTF

SEQ ID NO: 452944 - protein, 13 aa, Homo sapiens
  CDR3 for beta chain variable domain of TCR clone 226472 (TRBV7-9, TRBJ2-7)
CASSAGLQYEQYF

SEQ ID NO: 452945 - protein, 14 aa, Homo sapiens
  CDR3 for alpha chain variable domain of TCR clone 226473 (TRAV1-2, TRAJ16)
CAVYRFSDGQKLLF

SEQ ID NO: 452946 - protein, 16 aa, Homo sapiens
  CDR3 for beta chain variable domain of TCR clone 226473 (TRBV7-3, TRBJ2-2)
CASSLKRGTLSGELFF

SEQ ID NO: 452947 - protein, 12 aa, Homo sapiens
  CDR3 for alpha chain variable domain of TCR clone 226474 (TRAV38-1, TRAJ20)
CAFIWNDYKHSF

SEQ ID NO: 452948 - protein, 14 aa, Homo sapiens
  CDR3 for beta chain variable domain of TCR clone 226474 (TRBV27, TRBJ1-1)
CASSPQGKRAEAFF

SEQ ID NO: 452949 - protein, 14 aa, Homo sapiens
  CDR3 for alpha chain variable domain of TCR clone 226475 (TRAV13-2, TRAJ43)
CAEIPTYNNNDIRF

SEQ ID NO: 452950 - protein, 15 aa, Homo sapiens
  CDR3 for beta chain variable domain of TCR clone 226475 (TRBV7-9, TRBJ2-2)
CASGPLDTLPGELFF

SEQ ID NO: 452951 - protein, 13 aa, Homo sapiens
  CDR3 for alpha chain variable domain of TCR clone 226476 (TRAV13-1, TRAJ5)
CAASDTGRRALSF

SEQ ID NO: 452952 - protein, 12 aa, Homo sapiens
  CDR3 for beta chain variable domain of TCR clone 226476 (TRBV28, TRBJ2-3)
CASSLYRDTQYF

SEQ ID NO: 452953 - protein, 16 aa, Homo sapiens
  CDR3 for alpha chain variable domain of TCR clone 226477 (TRAV20, TRAJ22)
CAEQASSSGSARQLTF

SEQ ID NO: 452954 - protein, 13 aa, Homo sapiens
  CDR3 for beta chain variable domain of TCR clone 226477 (TRBV7-2, TRBJ2-5)
CASSQTSVETQYF

SEQ ID NO: 452955 - protein, 16 aa, Homo sapiens
  CDR3 for alpha chain variable domain of TCR clone 226478 (TRAV16, TRAJ52)
CALSAAGGTSYGKLTL

SEQ ID NO: 452956 - protein, 16 aa, Homo sapiens
  CDR3 for beta chain variable domain of TCR clone 226478 (TRBV12-4, TRBJ1-5)
CASSRPVGGSNQPQHF

SEQ ID NO: 452957 - protein, 12 aa, Homo sapiens
  CDR3 for alpha chain variable domain of TCR clone 226479 (TRAV16, TRAJ56)
CAPTGANSKLTF

SEQ ID NO: 452958 - protein, 17 aa, Homo sapiens
  CDR3 for beta chain variable domain of TCR clone 226479 (TRBV27, TRBJ2-6)
CASSLTGFASGANFLTF

SEQ ID NO: 452959 - protein, 17 aa, Homo sapiens
  CDR3 for alpha chain variable domain of TCR clone 226480 (TRAV12-2, TRAJ52)
CAANPYAVGTSYGKLTF

SEQ ID NO: 452960 - protein, 16 aa, Homo sapiens
  CDR3 for beta chain variable domain of TCR clone 226480 (TRBV5-5, TRBJ2-2)
CASSGRREGATGELFF

SEQ ID NO: 452961 - protein, 12 aa, Homo sapiens
  CDR3 for alpha chain variable domain of TCR clone 226481 (TRAV22, TRAJ48)
CAVRFGNEKLTF

SEQ ID NO: 452962 - protein, 14 aa, Homo sapiens
  CDR3 for beta chain variable domain of TCR clone 226481 (TRBV7-2, TRBJ2-7)
CASSPKTSFYEQYF

SEQ ID NO: 452963 - protein, 14 aa, Homo sapiens
  CDR3 for alpha chain variable domain of TCR clone 226482 (TRAV1-2, TRAJ8)
CSVREDTGFQKLVF

SEQ ID NO: 452964 - protein, 15 aa, Homo sapiens
  CDR3 for beta chain variable domain of TCR clone 226482 (TRBV7-9, TRBJ1-6)
CASSSPGRGNSPPHF

SEQ ID NO: 452965 - protein, 11 aa, Homo sapiens
  CDR3 for alpha chain variable domain of TCR clone 226483 (TRAV26-1, TRAJ27)
CIDPNAGKSTF

SEQ ID NO: 452966 - protein, 18 aa, Homo sapiens
  CDR3 for beta chain variable domain of TCR clone 226483 (TRBV7-9, TRBJ2-6)
CASSFPGAGISGPNVLTF

SEQ ID NO: 452967 - protein, 13 aa, Homo sapiens
  CDR3 for alpha chain variable domain of TCR clone 226484 (TRAV16, TRAJ34)
CALTGYITDKLIF

SEQ ID NO: 452968 - protein, 13 aa, Homo sapiens
  CDR3 for beta chain variable domain of TCR clone 226484 (TRBV6-1, TRBJ2-1)
CASREDGGHEQFF

SEQ ID NO: 452969 - protein, 12 aa, Homo sapiens
  CDR3 for alpha chain variable domain of TCR clone 226485 (TRAV1-2, TRAJ20)
CAVRERDYKLSF

SEQ ID NO: 452970 - protein, 12 aa, Homo sapiens
  CDR3 for beta chain variable domain of TCR clone 226485 (TRBV19, TRBJ1-5)
CASRASNQPQHF

SEQ ID NO: 452971 - protein, 14 aa, Homo sapiens
  CDR3 for alpha chain variable domain of TCR clone 226486 (TRAV3, TRAJ17)
CAVRDAAAGNKLTF

SEQ ID NO: 452972 - protein, 15 aa, Homo sapiens
  CDR3 for beta chain variable domain of TCR clone 226486 (TRBV3-1, TRBJ2-7)
CASSQVRQRAYEQYF

SEQ ID NO: 452973 - protein, 10 aa, Homo sapiens
  CDR3 for alpha chain variable domain of TCR clone 226487 (TRAV13-1, TRAJ8)
CAAPLQKLVF

SEQ ID NO: 452974 - protein, 20 aa, Homo sapiens
  CDR3 for beta chain variable domain of TCR clone 226487 (TRBV3-1, TRBJ2-6)
CASSPRPGLEGGAGANVLTF

SEQ ID NO: 452975 - protein, 14 aa, Homo sapiens
  CDR3 for alpha chain variable domain of TCR clone 226488 (TRAV9-2, TRAJ39)
CALYIYNAGNMLTF

SEQ ID NO: 452976 - protein, 16 aa, Homo sapiens
  CDR3 for beta chain variable domain of TCR clone 226488 (TRBV12-5, TRBJ2-5)
CASGPRTSGNQETEYF

SEQ ID NO: 452977 - protein, 12 aa, Homo sapiens
  CDR3 for alpha chain variable domain of TCR clone 226489 (TRAV27, TRAJ35)
CAGADFGNVLHC

SEQ ID NO: 452978 - protein, 16 aa, Homo sapiens
  CDR3 for beta chain variable domain of TCR clone 226489 (TRBV6-1, TRBJ2-7)
CASILRQGSSYNEQFF

SEQ ID NO: 452979 - protein, 16 aa, Homo sapiens
  CDR3 for alpha chain variable domain of TCR clone 226490 (TRAV8-3, TRAJ28)
CAVPPQRGAGSYQLTF

SEQ ID NO: 452980 - protein, 15 aa, Homo sapiens
  CDR3 for beta chain variable domain of TCR clone 226490 (TRBV11-2, TRBJ1-1)
CASSSRSSLLLSLDK

SEQ ID NO: 452981 - protein, 17 aa, Homo sapiens
  CDR3 for alpha chain variable domain of TCR clone 226491 (TRAV3, TRAJ6)
CAVRDGPRAGGSYIPTF

SEQ ID NO: 452982 - protein, 19 aa, Homo sapiens
  CDR3 for beta chain variable domain of TCR clone 226491 (TRBV25-1, TRBJ2-2)
CAILVYRVDRVRKTGELFF

SEQ ID NO: 452983 - protein, 17 aa, Homo sapiens
  CDR3 for alpha chain variable domain of TCR clone 226492 (TRAV3, TRAJ6)
CAVRDVPRAGGSYIRTF

SEQ ID NO: 452984 - protein, 14 aa, Homo sapiens
  CDR3 for beta chain variable domain of TCR clone 226492 (TRBV7-2, TRBJ2-7)
CASSPKTSFYEQYF

SEQ ID NO: 452985 - protein, 12 aa, Homo sapiens
  CDR3 for alpha chain variable domain of TCR clone 226493 (TRAV12-1, TRAJ34)
CVVAGATDKLIF

SEQ ID NO: 452986 - protein, 14 aa, Homo sapiens
  CDR3 for beta chain variable domain of TCR clone 226493 (TRBV3-1, TRBJ2-7)
CASSPSSGTYEQYF

SEQ ID NO: 452987 - protein, 10 aa, Homo sapiens
  CDR3 for alpha chain variable domain of TCR clone 226494 (TRAV1-2, TRAJ23)
CAGQGGKLIF

SEQ ID NO: 452988 - protein, 16 aa, Homo sapiens
  CDR3 for beta chain variable domain of TCR clone 226494 (TRBV11-2, TRBJ1-1)
CASSLRQGGEHSKAFV

SEQ ID NO: 452989 - protein, 16 aa, Homo sapiens
  CDR3 for alpha chain variable domain of TCR clone 226495 (TRAV3, TRAJ37)
CAVRGKGSGNTGKLIF

SEQ ID NO: 452990 - protein, 15 aa, Homo sapiens
  CDR3 for beta chain variable domain of TCR clone 226495 (TRBV5-1, TRBJ2-7)
CASSLSGGPAREQYF

SEQ ID NO: 452991 - protein, 12 aa, Homo sapiens
  CDR3 for alpha chain variable domain of TCR clone 226496 (TRAV3, TRAJ15)
CAVRDQATALIF

SEQ ID NO: 452992 - protein, 15 aa, Homo sapiens
  CDR3 for beta chain variable domain of TCR clone 226496 (TRBV11-1, TRBJ2-7)
CASSLNYGASYEQYF

SEQ ID NO: 452993 - protein, 15 aa, Homo sapiens
  CDR3 for alpha chain variable domain of TCR clone 226497 (TRAV21, TRAJ24)
CAARSSTYNWGQLQF

SEQ ID NO: 452994 - protein, 13 aa, Homo sapiens
  CDR3 for beta chain variable domain of TCR clone 226497 (TRBV11-2, TRBJ2-5)
CASSSTGEETQYF

SEQ ID NO: 452995 - protein, 14 aa, Homo sapiens
  CDR3 for alpha chain variable domain of TCR clone 226498 (TRAV12-2, TRAJ11)
CAVNRESGYSTLTF

SEQ ID NO: 452996 - protein, 15 aa, Homo sapiens
  CDR3 for beta chain variable domain of TCR clone 226498 (TRBV5-1, TRBJ2-5)
CASSSGRAMVETQYF

SEQ ID NO: 452997 - protein, 11 aa, Homo sapiens
  CDR3 for alpha chain variable domain of TCR clone 226499 (TRAV13-1, TRAJ30)
CAASRDDKIIF

SEQ ID NO: 452998 - protein, 15 aa, Homo sapiens
  CDR3 for beta chain variable domain of TCR clone 226499 (TRBV18, TRBJ1-1)
CASSPSSWVNTEALF

SEQ ID NO: 452999 - protein, 16 aa, Homo sapiens
  CDR3 for alpha chain variable domain of TCR clone 226500 (TRAV12-2, TRAJ10)
CAVNRALTGGGNKLTF

SEQ ID NO: 453000 - protein, 16 aa, Homo sapiens
  CDR3 for beta chain variable domain of TCR clone 226500 (TRBV12-5, TRBJ2-5)
CASGPRTSGNQETQYF

SEQ ID NO: 453001 - protein, 11 aa, Homo sapiens
  CDR3 for alpha chain variable domain of TCR clone 226501 (TRAV3, TRAJ13)
CAVTSYQKVTF

SEQ ID NO: 453002 - protein, 14 aa, Homo sapiens
  CDR3 for beta chain variable domain of TCR clone 226501 (TRBV7-9, TRBJ1-2)
CASSFPLREYGYTF

SEQ ID NO: 453003 - protein, 12 aa, Homo sapiens
  CDR3 for alpha chain variable domain of TCR clone 226502 (TRAV1-2, TRAJ24)
CAVGGSWGKFQF

SEQ ID NO: 453004 - protein, 15 aa, Homo sapiens
  CDR3 for beta chain variable domain of TCR clone 226502 (TRBV6-1, TRBJ2-7)
CASSEGVRNPYEQYF

SEQ ID NO: 453005 - protein, 14 aa, Homo sapiens
  CDR3 for alpha chain variable domain of TCR clone 226503 (TRAV12-3, TRAJ10)
SHLPLTGGGNKLSF

SEQ ID NO: 453006 - protein, 16 aa, Homo sapiens
  CDR3 for beta chain variable domain of TCR clone 226503 (TRBV5-1, TRBJ2-1)
CASSPWTSGEYNEQFF

SEQ ID NO: 453007 - protein, 14 aa, Homo sapiens
  CDR3 for alpha chain variable domain of TCR clone 226504 (TRAV13-1, TRAJ28)
CAASPGAGSYQLTF

SEQ ID NO: 453008 - protein, 11 aa, Homo sapiens
  CDR3 for beta chain variable domain of TCR clone 226504 (TRBV29-1, TRBJ2-5)
CSVASGETQYF

SEQ ID NO: 453009 - protein, 14 aa, Homo sapiens
  CDR3 for alpha chain variable domain of TCR clone 226505 (TRAV12-3, TRAJ10)
SHLPLTGGGNKLTF

SEQ ID NO: 453010 - protein, 15 aa, Homo sapiens
  CDR3 for beta chain variable domain of TCR clone 226505 (TRBV28, TRBJ2-1)
CASSGLAEVDNERFF

SEQ ID NO: 453011 - protein, 15 aa, Homo sapiens
  CDR3 for alpha chain variable domain of TCR clone 226506 (TRAV3, TRAJ5)
CAVRDRKTGRRALTF

SEQ ID NO: 453012 - protein, 15 aa, Homo sapiens
  CDR3 for beta chain variable domain of TCR clone 226506 (TRBV7-8, TRBJ2-1)
CASSLADSLYNAQFF

SEQ ID NO: 453013 - protein, 13 aa, Homo sapiens
  CDR3 for alpha chain variable domain of TCR clone 226507 (TRAV20, TRAJ54)
CAVQAGGAQKLVF

SEQ ID NO: 453014 - protein, 15 aa, Homo sapiens
  CDR3 for beta chain variable domain of TCR clone 226507 (TRBV4-1, TRBJ2-7)
CASSQQGQGFDEQYF

SEQ ID NO: 453015 - protein, 14 aa, Homo sapiens
  CDR3 for alpha chain variable domain of TCR clone 226508 (TRAV1-2, TRAJ8)
CAVREATGFHKLVF

SEQ ID NO: 453016 - protein, 13 aa, Homo sapiens
  CDR3 for beta chain variable domain of TCR clone 226508 (TRBV14, TRBJ1-2)
CASSEDRRYGYTF

SEQ ID NO: 453017 - protein, 12 aa, Homo sapiens
  CDR3 for alpha chain variable domain of TCR clone 226509 (TRAV12-3, TRAJ43)
RAISSNNNDMRF

SEQ ID NO: 453018 - protein, 15 aa, Homo sapiens
  CDR3 for beta chain variable domain of TCR clone 226509 (TRBV27, TRBJ1-4)
CASSPRHATNEKLFF

SEQ ID NO: 453019 - protein, 15 aa, Homo sapiens
  CDR3 for alpha chain variable domain of TCR clone 226510 (TRAV13-1, TRAJ8)
CAASIPNTGFQNLVF

SEQ ID NO: 453020 - protein, 13 aa, Homo sapiens
  CDR3 for beta chain variable domain of TCR clone 226510 (TRBV5-4, TRBJ1-1)
CASSFQVNTGAFF

SEQ ID NO: 453021 - protein, 16 aa, Homo sapiens
  CDR3 for alpha chain variable domain of TCR clone 226511 (TRAV1-2, TRAJ10)
GAVRGVLTGGGNKLTF

SEQ ID NO: 453022 - protein, 12 aa, Homo sapiens
  CDR3 for beta chain variable domain of TCR clone 226511 (TRBV7-8, TRBJ2-7)
CASSLGDREQYF

SEQ ID NO: 453023 - protein, 13 aa, Homo sapiens
  CDR3 for alpha chain variable domain of TCR clone 226512 (TRAV36/DV7, TRAJ54)
CAVLIQGVQKLVF

SEQ ID NO: 453024 - protein, 13 aa, Homo sapiens
  CDR3 for beta chain variable domain of TCR clone 226512 (TRBV29-1, TRBJ2-4)
CSVGEGTKNIQYF

SEQ ID NO: 453025 - protein, 11 aa, Homo sapiens
  CDR3 for alpha chain variable domain of TCR clone 226513 (TRAV2, TRAJ13)
CASGGYQKVAF

SEQ ID NO: 453026 - protein, 16 aa, Homo sapiens
  CDR3 for beta chain variable domain of TCR clone 226513 (TRBV12-5, TRBJ2-5)
CASGPRTSGNQETQYF

SEQ ID NO: 453027 - protein, 13 aa, Homo sapiens
  CDR3 for alpha chain variable domain of TCR clone 226514 (TRAV27, TRAJ56)
CAGKPGANSKLTF

SEQ ID NO: 453028 - protein, 18 aa, Homo sapiens
  CDR3 for beta chain variable domain of TCR clone 226514 (TRBV20-1, TRBJ2-6)
CSAETTPTHGSGANVLTF

SEQ ID NO: 453029 - protein, 14 aa, Homo sapiens
  CDR3 for alpha chain variable domain of TCR clone 226515 (TRAV38-1, TRAJ40)
CALRPTSVTYKYIF

SEQ ID NO: 453030 - protein, 14 aa, Homo sapiens
  CDR3 for beta chain variable domain of TCR clone 226515 (TRBV5-4, TRBJ1-1)
CASSLDSRRDEAFF

SEQ ID NO: 453031 - protein, 15 aa, Homo sapiens
  CDR3 for alpha chain variable domain of TCR clone 226516 (TRAV8-6, TRAJ10)
CAVSSKGGGGNTLTF

SEQ ID NO: 453032 - protein, 15 aa, Homo sapiens
  CDR3 for beta chain variable domain of TCR clone 226516 (TRBV28, TRBJ1-2)
CASSTHSIANYGYTF

SEQ ID NO: 453033 - protein, 11 aa, Homo sapiens
  CDR3 for alpha chain variable domain of TCR clone 226517 (TRAV35, TRAJ49)
CAGLFGNQFYF

SEQ ID NO: 453034 - protein, 11 aa, Homo sapiens
  CDR3 for beta chain variable domain of TCR clone 226517 (TRBV7-2, TRBJ2-3)
CASSASDTQYF

SEQ ID NO: 453035 - protein, 14 aa, Homo sapiens
  CDR3 for alpha chain variable domain of TCR clone 226518 (TRAV26-1, TRAJ38)
CIADNAGHNRKLIW

SEQ ID NO: 453036 - protein, 15 aa, Homo sapiens
  CDR3 for beta chain variable domain of TCR clone 226518 (TRBV9, TRBJ1-6)
CASSVAGTGDSPLHF

SEQ ID NO: 453037 - protein, 15 aa, Homo sapiens
  CDR3 for alpha chain variable domain of TCR clone 226519 (TRAV12-2, TRAJ53)
RAVNGGGGSNYKLTF

SEQ ID NO: 453038 - protein, 17 aa, Homo sapiens
  CDR3 for beta chain variable domain of TCR clone 226519 (TRBV7-3, TRBJ2-3)
CASSLMKRMRGADTQYF

SEQ ID NO: 453039 - protein, 14 aa, Homo sapiens
  CDR3 for alpha chain variable domain of TCR clone 226520 (TRAV1-2, TRAJ29)
CAVRELTSATPLVF

SEQ ID NO: 453040 - protein, 14 aa, Homo sapiens
  CDR3 for beta chain variable domain of TCR clone 226520 (TRBV5-1, TRBJ1-5)
CASSLGSGSRPQHF

SEQ ID NO: 453041 - protein, 13 aa, Homo sapiens
  CDR3 for alpha chain variable domain of TCR clone 226521 (TRAV26-1, TRAJ31)
CIVRVDGNARLMF

SEQ ID NO: 453042 - protein, 14 aa, Homo sapiens
  CDR3 for beta chain variable domain of TCR clone 226521 (TRBV11-2, TRBJ2-3)
CASSRLARTDTQYF

SEQ ID NO: 453043 - protein, 16 aa, Homo sapiens
  CDR3 for alpha chain variable domain of TCR clone 226522 (TRAV1-1, TRAJ29)
CSVRSTRNSGNTPLVF

SEQ ID NO: 453044 - protein, 16 aa, Homo sapiens
  CDR3 for beta chain variable domain of TCR clone 226522 (TRBV27, TRBJ1-1)
CASSSRGRTGYTEAFF

SEQ ID NO: 453045 - protein, 15 aa, Homo sapiens
  CDR3 for alpha chain variable domain of TCR clone 226523 (TRAV27, TRAJ38)
CAARRNAGDNRKLIW

SEQ ID NO: 453046 - protein, 11 aa, Homo sapiens
  CDR3 for beta chain variable domain of TCR clone 226523 (TRBV12-4, TRBJ2-2)
CASSSAGELFF

SEQ ID NO: 453047 - protein, 15 aa, Homo sapiens
  CDR3 for alpha chain variable domain of TCR clone 226524 (TRAV21, TRAJ53)
CATLNSAGSNYKLTF

SEQ ID NO: 453048 - protein, 16 aa, Homo sapiens
  CDR3 for beta chain variable domain of TCR clone 226524 (TRBV9, TRBJ2-1)
CASSVGGGGNYNEQFF

SEQ ID NO: 453049 - protein, 12 aa, Homo sapiens
  CDR3 for alpha chain variable domain of TCR clone 226525 (TRAV17, TRAJ57)
CATDGGSEKLVF

SEQ ID NO: 453050 - protein, 17 aa, Homo sapiens
  CDR3 for beta chain variable domain of TCR clone 226525 (TRBV13, TRBJ2-3)
CASSLSRVAGGRNTQYF

SEQ ID NO: 453051 - protein, 20 aa, Homo sapiens
  CDR3 for alpha chain variable domain of TCR clone 226526 (TRAV13-1, TRAJ17)
CAASIHGGCRQQANFWRRNQ

SEQ ID NO: 453052 - protein, 14 aa, Homo sapiens
  CDR3 for beta chain variable domain of TCR clone 226526 (TRBV20-1, TRBJ2-4)
CSARDRGQGGIQYF

SEQ ID NO: 453053 - protein, 13 aa, Homo sapiens
  CDR3 for alpha chain variable domain of TCR clone 226527 (TRAV1-1, TRAJ31)
CASYLNNNARLLF

SEQ ID NO: 453054 - protein, 14 aa, Homo sapiens
  CDR3 for beta chain variable domain of TCR clone 226527 (TRBV4-1, TRBJ2-5)
CASNRSGGGETQYF

SEQ ID NO: 453055 - protein, 12 aa, Homo sapiens
  CDR3 for alpha chain variable domain of TCR clone 226528 (TRAV12-3, TRAJ17)
CAMTLTGNKLTF

SEQ ID NO: 453056 - protein, 15 aa, Homo sapiens
  CDR3 for beta chain variable domain of TCR clone 226528 (TRBV15, TRBJ2-7)
CATSSGTTTTYEQYF

SEQ ID NO: 453057 - protein, 14 aa, Homo sapiens
  CDR3 for alpha chain variable domain of TCR clone 226529 (TRAV3, TRAJ6)
CAVRDPWGSYIPTF

SEQ ID NO: 453058 - protein, 14 aa, Homo sapiens
  CDR3 for beta chain variable domain of TCR clone 226529 (TRBV18, TRBJ2-5)
CASSPGVSQETQYF

SEQ ID NO: 453059 - protein, 14 aa, Homo sapiens
  CDR3 for alpha chain variable domain of TCR clone 226530 (TRAV12-3, TRAJ10)
SHLPLTGGGNKLTF

SEQ ID NO: 453060 - protein, 16 aa, Homo sapiens
  CDR3 for beta chain variable domain of TCR clone 226530 (TRBV11-2, TRBJ2-3)
CASSPRGGGAGDTQYF

SEQ ID NO: 453061 - protein, 13 aa, Homo sapiens
  CDR3 for alpha chain variable domain of TCR clone 226531 (TRAV8-6, TRAJ21)
CAVSPSSLNKFYF

SEQ ID NO: 453062 - protein, 21 aa, Homo sapiens
  CDR3 for beta chain variable domain of TCR clone 226531 (TRBV6-4, TRBJ2-1)
CASRRLKAGASHPGSYNEQFF

SEQ ID NO: 453063 - protein, 13 aa, Homo sapiens
  CDR3 for alpha chain variable domain of TCR clone 226532 (TRAV13-1, TRAJ9)
FAARGTGGFKTIF

SEQ ID NO: 453064 - protein, 12 aa, Homo sapiens
  CDR3 for beta chain variable domain of TCR clone 226532 (TRBV2, TRBJ2-1)
CAYGPPGNEQFF

SEQ ID NO: 453065 - protein, 15 aa, Homo sapiens
  CDR3 for alpha chain variable domain of TCR clone 226533 (TRAV12-3, TRAJ47)
CAMSALVEYGNKLVF

SEQ ID NO: 453066 - protein, 13 aa, Homo sapiens
  CDR3 for beta chain variable domain of TCR clone 226533 (TRBV11-3, TRBJ2-7)
CASSLDKLYEQYF

SEQ ID NO: 453067 - protein, 14 aa, Homo sapiens
  CDR3 for alpha chain variable domain of TCR clone 226534 (TRAV1-2, TRAJ16)
CAVNRFSDVQKLLF

SEQ ID NO: 453068 - protein, 16 aa, Homo sapiens
  CDR3 for beta chain variable domain of TCR clone 226534 (TRBV14, TRBJ2-2)
CASSRSLGDDTGELFF

SEQ ID NO: 453069 - protein, 11 aa, Homo sapiens
  CDR3 for alpha chain variable domain of TCR clone 226535 (TRAV1-2, TRAJ20)
CAVTNDYKLSF

SEQ ID NO: 453070 - protein, 18 aa, Homo sapiens
  CDR3 for beta chain variable domain of TCR clone 226535 (TRBV20-1, TRBJ2-6)
CSAETTPTHGSGANVLTF

SEQ ID NO: 453071 - protein, 13 aa, Homo sapiens
  CDR3 for alpha chain variable domain of TCR clone 226536 (TRAV12-2, TRAJ15)
CAVFNQAGTALIS

SEQ ID NO: 453072 - protein, 15 aa, Homo sapiens
  CDR3 for beta chain variable domain of TCR clone 226536 (TRBV7-8, TRBJ1-5)
CASSRGGGADQPQHF

SEQ ID NO: 453073 - protein, 11 aa, Homo sapiens
  CDR3 for alpha chain variable domain of TCR clone 226537 (TRAV21, TRAJ11)
CAGNGYSTLTF

SEQ ID NO: 453074 - protein, 11 aa, Homo sapiens
  CDR3 for beta chain variable domain of TCR clone 226537 (TRBV19, TRBJ1-1)
CASSIGSEAFF

SEQ ID NO: 453075 - protein, 14 aa, Homo sapiens
  CDR3 for alpha chain variable domain of TCR clone 226538 (TRAV1-2, TRAJ8)
RAVREDTGFQKLVF

SEQ ID NO: 453076 - protein, 12 aa, Homo sapiens
  CDR3 for beta chain variable domain of TCR clone 226538 (TRBV2, TRBJ2-1)
CAYGPPGNEQFF

SEQ ID NO: 453077 - protein, 14 aa, Homo sapiens
  CDR3 for alpha chain variable domain of TCR clone 226539 (TRAV12-2, TRAJ9)
CAVNMEGGSFKTIF

SEQ ID NO: 453078 - protein, 14 aa, Homo sapiens
  CDR3 for beta chain variable domain of TCR clone 226539 (TRBV2, TRBJ2-5)
CASSEVLAQETQYF

SEQ ID NO: 453079 - protein, 12 aa, Homo sapiens
  CDR3 for alpha chain variable domain of TCR clone 226540 (TRAV12-2, TRAJ20)
CAVRPSDYKLSF

SEQ ID NO: 453080 - protein, 13 aa, Homo sapiens
  CDR3 for beta chain variable domain of TCR clone 226540 (TRBV20-1, TRBJ1-1)
CSARGGGNTEAFF

SEQ ID NO: 453081 - protein, 15 aa, Homo sapiens
  CDR3 for alpha chain variable domain of TCR clone 226541 (TRAV3, TRAJ22)
CAVRDRGGSARQLTL

SEQ ID NO: 453082 - protein, 13 aa, Homo sapiens
  CDR3 for beta chain variable domain of TCR clone 226541 (TRBV20-1, TRBJ1-1)
CSARVGGNTEAFF

SEQ ID NO: 453083 - protein, 10 aa, Homo sapiens
  CDR3 for alpha chain variable domain of TCR clone 226542 (TRAV36/DV7, TRAJ56)
CAGPAVEMTF

SEQ ID NO: 453084 - protein, 13 aa, Homo sapiens
  CDR3 for beta chain variable domain of TCR clone 226542 (TRBV7-9, TRBJ2-7)
CASSFWSSYEQYF

SEQ ID NO: 453085 - protein, 14 aa, Homo sapiens
  CDR3 for alpha chain variable domain of TCR clone 226543 (TRAV23/DV6, TRAJ6)
CAAIPSGGSYIPTF

SEQ ID NO: 453086 - protein, 17 aa, Homo sapiens
  CDR3 for beta chain variable domain of TCR clone 226543 (TRBV7-2, TRBJ2-3)
CASSVGGRAAWRDTQYC

SEQ ID NO: 453087 - protein, 13 aa, Homo sapiens
  CDR3 for alpha chain variable domain of TCR clone 226544 (TRAV8-6, TRAJ9)
CAVSHTGGFKTIF

SEQ ID NO: 453088 - protein, 13 aa, Homo sapiens
  CDR3 for beta chain variable domain of TCR clone 226544 (TRBV7-2, TRBJ2-2)
CASSLAVTGELFF

SEQ ID NO: 453089 - protein, 15 aa, Homo sapiens
  CDR3 for alpha chain variable domain of TCR clone 226545 (TRAV8-3, TRAJ45)
CASSYSGGGADGHTF

SEQ ID NO: 453090 - protein, 11 aa, Homo sapiens
  CDR3 for beta chain variable domain of TCR clone 226545 (TRBV12-4, TRBJ2-3)
CASTATDTQYF

SEQ ID NO: 453091 - protein, 17 aa, Homo sapiens
  CDR3 for alpha chain variable domain of TCR clone 226546 (TRAV1-1, TRAJ11)
CAGYSTLTFGKGTMLLV

SEQ ID NO: 453092 - protein, 15 aa, Homo sapiens
  CDR3 for beta chain variable domain of TCR clone 226546 (TRBV5-1, TRBJ2-1)
CASSPPRAPYNEQFF

SEQ ID NO: 453093 - protein, 16 aa, Homo sapiens
  CDR3 for alpha chain variable domain of TCR clone 226547 (TRAV3, TRAJ37)
CAVRGKGSGHTGKIIF

SEQ ID NO: 453094 - protein, 13 aa, Homo sapiens
  CDR3 for beta chain variable domain of TCR clone 226547 (TRBV19, TRBJ1-2)
CASSVPGQDGYTF

SEQ ID NO: 453095 - protein, 16 aa, Homo sapiens
  CDR3 for alpha chain variable domain of TCR clone 226548 (TRAV30, TRAJ24)
CGTEIVDAHSWGKFQF

SEQ ID NO: 453096 - protein, 14 aa, Homo sapiens
  CDR3 for beta chain variable domain of TCR clone 226548 (TRBV11-2, TRBJ2-7)
CASSLGAGAYEQYF

SEQ ID NO: 453097 - protein, 17 aa, Homo sapiens
  CDR3 for alpha chain variable domain of TCR clone 226549 (TRAV23/DV6, TRAJ58)
CAARLLRGETSGSRLTF

SEQ ID NO: 453098 - protein, 14 aa, Homo sapiens
  CDR3 for beta chain variable domain of TCR clone 226549 (TRBV7-2, TRBJ1-1)
CASSFLTGTTEAFF

SEQ ID NO: 453099 - protein, 14 aa, Homo sapiens
  CDR3 for alpha chain variable domain of TCR clone 226550 (TRAV16, TRAJ29)
CALTRNSGNTPLVF

SEQ ID NO: 453100 - protein, 14 aa, Homo sapiens
  CDR3 for beta chain variable domain of TCR clone 226550 (TRBV7-6, TRBJ2-3)
CASGLGTVTDTQYF

SEQ ID NO: 453101 - protein, 12 aa, Homo sapiens
  CDR3 for alpha chain variable domain of TCR clone 226551 (TRAV12-1, TRAJ6)
CLVSERSYIPTF

SEQ ID NO: 453102 - protein, 21 aa, Homo sapiens
  CDR3 for beta chain variable domain of TCR clone 226551 (TRBV7-3, TRBJ2-1)
GGTQPCISVPAAYGLAGAQFF

SEQ ID NO: 453103 - protein, 13 aa, Homo sapiens
  CDR3 for alpha chain variable domain of TCR clone 226552 (TRAV29/DV5, TRAJ31)
CAASRNNNASLMF

SEQ ID NO: 453104 - protein, 12 aa, Homo sapiens
  CDR3 for beta chain variable domain of TCR clone 226552 (TRBV14, TRBJ2-7)
CPSSLYKDEQYF

SEQ ID NO: 453105 - protein, 13 aa, Homo sapiens
  CDR3 for alpha chain variable domain of TCR clone 226553 (TRAV8-3, TRAJ21)
CAVGAYNFNNFYF

SEQ ID NO: 453106 - protein, 16 aa, Homo sapiens
  CDR3 for beta chain variable domain of TCR clone 226553 (TRBV19, TRBJ2-1)
WASSMGGGSSYNEQFF

SEQ ID NO: 453107 - protein, 18 aa, Homo sapiens
  CDR3 for alpha chain variable domain of TCR clone 226554 (TRAV21, TRAJ52)
CAVRPSPAGGTSSGKLTF

SEQ ID NO: 453108 - protein, 13 aa, Homo sapiens
  CDR3 for beta chain variable domain of TCR clone 226554 (TRBV19, TRBJ1-2)
CASSVPGQDGYTF

SEQ ID NO: 453109 - protein, 14 aa, Homo sapiens
  CDR3 for alpha chain variable domain of TCR clone 226555 (TRAV12-3, TRAJ10)
SHLPLTGGGNKLIF

SEQ ID NO: 453110 - protein, 12 aa, Homo sapiens
  CDR3 for beta chain variable domain of TCR clone 226555 (TRBV7-2, TRBJ1-6)
CASSLSSSPLHF

SEQ ID NO: 453111 - protein, 18 aa, Homo sapiens
  CDR3 for alpha chain variable domain of TCR clone 226556 (TRAV29/DV5, TRAJ52)
CAAGFRGAGGTSYGKLTF

SEQ ID NO: 453112 - protein, 16 aa, Homo sapiens
  CDR3 for beta chain variable domain of TCR clone 226556 (TRBV11-2, TRBJ2-3)
CASSSRTSGGAGTQYF

SEQ ID NO: 453113 - protein, 16 aa, Homo sapiens
  CDR3 for alpha chain variable domain of TCR clone 226557 (TRAV8-2, TRAJ7)
CVVSEGPYYGNNRLAF

SEQ ID NO: 453114 - protein, 13 aa, Homo sapiens
  CDR3 for beta chain variable domain of TCR clone 226557 (TRBV19, TRBJ2-3)
CATWDKITDTQYF

SEQ ID NO: 453115 - protein, 14 aa, Homo sapiens
  CDR3 for alpha chain variable domain of TCR clone 226558 (TRAV12-3, TRAJ29)
CAMILLSGNTLLVF

SEQ ID NO: 453116 - protein, 16 aa, Homo sapiens
  CDR3 for beta chain variable domain of TCR clone 226558 (TRBV28, TRBJ2-7)
CASSSGTSGRGYEQYF

SEQ ID NO: 453117 - protein, 16 aa, Homo sapiens
  CDR3 for alpha chain variable domain of TCR clone 226559 (TRAV38-1, TRAJ45)
CAFRKGSGGGADGLTF

SEQ ID NO: 453118 - protein, 15 aa, Homo sapiens
  CDR3 for beta chain variable domain of TCR clone 226559 (TRBV20-1, TRBJ2-7)
CSAREGRDSLYEQYF

SEQ ID NO: 453119 - protein, 14 aa, Homo sapiens
  CDR3 for alpha chain variable domain of TCR clone 226560 (TRAV12-2, TRAJ13)
CAVTKTGGYHKVTF

SEQ ID NO: 453120 - protein, 15 aa, Homo sapiens
  CDR3 for beta chain variable domain of TCR clone 226560 (TRBV27, TRBJ2-1)
CASSNGGGSSNEQFF

SEQ ID NO: 453121 - protein, 13 aa, Homo sapiens
  CDR3 for alpha chain variable domain of TCR clone 226561 (TRAV13-1, TRAJ15)
CAAINQAGTALIF

SEQ ID NO: 453122 - protein, 16 aa, Homo sapiens
  CDR3 for beta chain variable domain of TCR clone 226561 (TRBV7-9, TRBJ2-3)
CASSPWREVGTDTQYF

SEQ ID NO: 453123 - protein, 15 aa, Homo sapiens
  CDR3 for alpha chain variable domain of TCR clone 226562 (TRAV13-1, TRAJ50)
CAAKGSETSYDKVIF

SEQ ID NO: 453124 - protein, 18 aa, Homo sapiens
  CDR3 for beta chain variable domain of TCR clone 226562 (TRBV10-3, TRBJ2-1)
CTSAPSVSLRGGVDEQFF

SEQ ID NO: 453125 - protein, 12 aa, Homo sapiens
  CDR3 for alpha chain variable domain of TCR clone 226563 (TRAV13-2, TRAJ23)
CAERHRGGKLIF

SEQ ID NO: 453126 - protein, 13 aa, Homo sapiens
  CDR3 for beta chain variable domain of TCR clone 226563 (TRBV20-1, TRBJ2-2)
CSALSGGARELFF

SEQ ID NO: 453127 - protein, 16 aa, Homo sapiens
  CDR3 for alpha chain variable domain of TCR clone 226564 (TRAV8-3, TRAJ8)
CAVPRDGNTGFQKLVF

SEQ ID NO: 453128 - protein, 14 aa, Homo sapiens
  CDR3 for beta chain variable domain of TCR clone 226564 (TRBV7-3, TRBJ2-1)
CASSLAGGTNEQFF

SEQ ID NO: 453129 - protein, 15 aa, Homo sapiens
  CDR3 for alpha chain variable domain of TCR clone 226565 (TRAV25, TRAJ52)
CAGRPGGTSYGKLTF

SEQ ID NO: 453130 - protein, 13 aa, Homo sapiens
  CDR3 for beta chain variable domain of TCR clone 226565 (TRBV7-3, TRBJ2-1)
CASSLDSYNEQFF

SEQ ID NO: 453131 - protein, 17 aa, Homo sapiens
  CDR3 for alpha chain variable domain of TCR clone 226566 (TRAV23/DV6, TRAJ57)
CAASSTLSQGGSEKPVF

SEQ ID NO: 453132 - protein, 14 aa, Homo sapiens
  CDR3 for beta chain variable domain of TCR clone 226566 (TRBV6-1, TRBJ1-3)
CASVQGGGGNTIYF

SEQ ID NO: 453133 - protein, 14 aa, Homo sapiens
  CDR3 for alpha chain variable domain of TCR clone 226567 (TRAV8-3, TRAJ35)
CAVVPQGFGNVLHC

SEQ ID NO: 453134 - protein, 16 aa, Homo sapiens
  CDR3 for beta chain variable domain of TCR clone 226567 (TRBV20-1, TRBJ1-2)
CSASMGQGVANYGYTF

SEQ ID NO: 453135 - protein, 15 aa, Homo sapiens
  CDR3 for alpha chain variable domain of TCR clone 226568 (TRAV2, TRAJ9)
CAVEDRGTGGFKTIF

SEQ ID NO: 453136 - protein, 17 aa, Homo sapiens
  CDR3 for beta chain variable domain of TCR clone 226568 (TRBV13, TRBJ2-3)
CASILSRVAGGRNTQYF

SEQ ID NO: 453137 - protein, 12 aa, Homo sapiens
  CDR3 for alpha chain variable domain of TCR clone 226569 (TRAV13-1, TRAJ23)
CAASKKGGKLIF

SEQ ID NO: 453138 - protein, 13 aa, Homo sapiens
  CDR3 for beta chain variable domain of TCR clone 226569 (TRBV19, TRBJ1-2)
CASSVPGQDGYTF

SEQ ID NO: 453139 - protein, 12 aa, Homo sapiens
  CDR3 for alpha chain variable domain of TCR clone 226570 (TRAV9-2, TRAJ36)
CALKKGASNLFF

SEQ ID NO: 453140 - protein, 14 aa, Homo sapiens
  CDR3 for beta chain variable domain of TCR clone 226570 (TRBV25-1, TRBJ1-1)
CASTHLGGNTEAFF

SEQ ID NO: 453141 - protein, 14 aa, Homo sapiens
  CDR3 for alpha chain variable domain of TCR clone 226571 (TRAV9-2, TRAJ39)
CALYIYNAGNMLTL

SEQ ID NO: 453142 - protein, 12 aa, Homo sapiens
  CDR3 for beta chain variable domain of TCR clone 226571 (TRBV7-2, TRBJ2-5)
CASSQYQETQYF

SEQ ID NO: 453143 - protein, 16 aa, Homo sapiens
  CDR3 for alpha chain variable domain of TCR clone 226572 (TRAV30, TRAJ24)
CGTEIVDADSWGKFLF

SEQ ID NO: 453144 - protein, 14 aa, Homo sapiens
  CDR3 for beta chain variable domain of TCR clone 226572 (TRBV13, TRBJ2-1)
CASSPRPRYNEQFF

SEQ ID NO: 453145 - protein, 13 aa, Homo sapiens
  CDR3 for alpha chain variable domain of TCR clone 226573 (TRAV27, TRAJ8)
CAGGPTGFQKLVF

SEQ ID NO: 453146 - protein, 15 aa, Homo sapiens
  CDR3 for beta chain variable domain of TCR clone 226573 (TRBV15, TRBJ2-7)
CATSSRQESSYEQYV

SEQ ID NO: 453147 - protein, 12 aa, Homo sapiens
  CDR3 for alpha chain variable domain of TCR clone 226574 (TRAV13-1, TRAJ21)
CAAKEGVNKFYF

SEQ ID NO: 453148 - protein, 17 aa, Homo sapiens
  CDR3 for beta chain variable domain of TCR clone 226574 (TRBV20-1, TRBJ2-1)
CSASSSGLAGSYNEQFF

SEQ ID NO: 453149 - protein, 14 aa, Homo sapiens
  CDR3 for alpha chain variable domain of TCR clone 226575 (TRAV12-2, TRAJ13)
CAVKKTGGYQKVTF

SEQ ID NO: 453150 - protein, 16 aa, Homo sapiens
  CDR3 for beta chain variable domain of TCR clone 226575 (TRBV27, TRBJ2-1)
CASSSSYSGSLNEQFF

SEQ ID NO: 453151 - protein, 13 aa, Homo sapiens
  CDR3 for alpha chain variable domain of TCR clone 226576 (TRAV13-1, TRAJ5)
CAASDTGRRALTF

SEQ ID NO: 453152 - protein, 19 aa, Homo sapiens
  CDR3 for beta chain variable domain of TCR clone 226576 (TRBV25-1, TRBJ2-2)
CAILVYRVDRGRKTGELFF

SEQ ID NO: 453153 - protein, 11 aa, Homo sapiens
  CDR3 for alpha chain variable domain of TCR clone 226577 (TRAV12-1, TRAJ41)
CVALSGYSLNF

SEQ ID NO: 453154 - protein, 13 aa, Homo sapiens
  CDR3 for beta chain variable domain of TCR clone 226577 (TRBV6-5, TRBJ2-7)
CASSWQGASEQYF

SEQ ID NO: 453155 - protein, 14 aa, Homo sapiens
  CDR3 for alpha chain variable domain of TCR clone 226578 (TRAV35, TRAJ46)
CAGPQKSSGDKLTF

SEQ ID NO: 453156 - protein, 13 aa, Homo sapiens
  CDR3 for beta chain variable domain of TCR clone 226578 (TRBV7-9, TRBJ1-2)
CASSLKQNYGYTF

SEQ ID NO: 453157 - protein, 13 aa, Homo sapiens
  CDR3 for alpha chain variable domain of TCR clone 226579 (TRAV21, TRAJ27)
CAALNTNAGKSTF

SEQ ID NO: 453158 - protein, 15 aa, Homo sapiens
  CDR3 for beta chain variable domain of TCR clone 226579 (TRBV12-4, TRBJ2-5)
CASSPPTGLQETQYF

SEQ ID NO: 453159 - protein, 17 aa, Homo sapiens
  CDR3 for alpha chain variable domain of TCR clone 226580 (TRAV26-1, TRAJ11)
CIVRVGQSNSGYSTLTF

SEQ ID NO: 453160 - protein, 15 aa, Homo sapiens
  CDR3 for beta chain variable domain of TCR clone 226580 (TRBV27, TRBJ2-5)
CDSSLIPSGGETQYF

SEQ ID NO: 453161 - protein, 16 aa, Homo sapiens
  CDR3 for alpha chain variable domain of TCR clone 226581 (TRAV4, TRAJ22)
CLVGDLYSGSARQLTF

SEQ ID NO: 453162 - protein, 16 aa, Homo sapiens
  CDR3 for beta chain variable domain of TCR clone 226581 (TRBV7-9, TRBJ2-1)
CASSDVAGASYNEQFF

SEQ ID NO: 453163 - protein, 15 aa, Homo sapiens
  CDR3 for alpha chain variable domain of TCR clone 226582 (TRAV14/DV4, TRAJ26)
CAMREGQNYGKNFVF

SEQ ID NO: 453164 - protein, 13 aa, Homo sapiens
  CDR3 for beta chain variable domain of TCR clone 226582 (TRBV24-1, TRBJ2-2)
CATSDWSTGELSF

SEQ ID NO: 453165 - protein, 13 aa, Homo sapiens
  CDR3 for alpha chain variable domain of TCR clone 226583 (TRAV8-1, TRAJ13)
CAVSKGGYQQVTF

SEQ ID NO: 453166 - protein, 18 aa, Homo sapiens
  CDR3 for beta chain variable domain of TCR clone 226583 (TRBV11-2, TRBJ2-7)
CASSWRTVQTGQSYEQYF

SEQ ID NO: 453167 - protein, 14 aa, Homo sapiens
  CDR3 for alpha chain variable domain of TCR clone 226584 (TRAV26-1, TRAJ44)
CIARTTGTASKLTF

SEQ ID NO: 453168 - protein, 13 aa, Homo sapiens
  CDR3 for beta chain variable domain of TCR clone 226584 (TRBV4-1, TRBJ2-2)
CASSQENTGELFF

SEQ ID NO: 453169 - protein, 13 aa, Homo sapiens
  CDR3 for alpha chain variable domain of TCR clone 226585 (TRAV8-6, TRAJ20)
CAVSYSNDYKLSF

SEQ ID NO: 453170 - protein, 15 aa, Homo sapiens
  CDR3 for beta chain variable domain of TCR clone 226585 (TRBV2, TRBJ2-5)
CASTRDGGPKETQYF

SEQ ID NO: 453171 - protein, 13 aa, Homo sapiens
  CDR3 for alpha chain variable domain of TCR clone 226586 (TRAV21, TRAJ53)
CAVLRGSNYKLTF

SEQ ID NO: 453172 - protein, 13 aa, Homo sapiens
  CDR3 for beta chain variable domain of TCR clone 226586 (TRBV7-9, TRBJ2-2)
CASSLDPTGELFF

SEQ ID NO: 453173 - protein, 17 aa, Homo sapiens
  CDR3 for alpha chain variable domain of TCR clone 226587 (TRAV3, TRAJ6)
CAVRDGPRAGGSYIPKF

SEQ ID NO: 453174 - protein, 14 aa, Homo sapiens
  CDR3 for beta chain variable domain of TCR clone 226587 (TRBV27, TRBJ2-2)
CASRPGVNTGELFF

SEQ ID NO: 453175 - protein, 14 aa, Homo sapiens
  CDR3 for alpha chain variable domain of TCR clone 226588 (TRAV12-2, TRAJ45)
CAVNIGGGSDGLTF

SEQ ID NO: 453176 - protein, 17 aa, Homo sapiens
  CDR3 for beta chain variable domain of TCR clone 226588 (TRBV7-8, TRBJ2-6)
CASSAGTGGAGANVLTF

SEQ ID NO: 453177 - protein, 14 aa, Homo sapiens
  CDR3 for alpha chain variable domain of TCR clone 226589 (TRAV17, TRAJ22)
CATSPSGSARHLTF

SEQ ID NO: 453178 - protein, 15 aa, Homo sapiens
  CDR3 for beta chain variable domain of TCR clone 226589 (TRBV4-1, TRBJ2-5)
CASSQWDLYKETQYF

SEQ ID NO: 453179 - protein, 14 aa, Homo sapiens
  CDR3 for alpha chain variable domain of TCR clone 226590 (TRAV8-3, TRAJ40)
CAVGVISGTYKYIF

SEQ ID NO: 453180 - protein, 15 aa, Homo sapiens
  CDR3 for beta chain variable domain of TCR clone 226590 (TRBV10-1, TRBJ2-1)
CASSEWRGTYNEQFF

SEQ ID NO: 453181 - protein, 18 aa, Homo sapiens
  CDR3 for alpha chain variable domain of TCR clone 226591 (TRAV3, TRAJ12)
CAVRDEMVRWIAAINCSS

SEQ ID NO: 453182 - protein, 15 aa, Homo sapiens
  CDR3 for beta chain variable domain of TCR clone 226591 (TRBV5-5, TRBJ1-5)
RASSLKGGGEQPQHF

SEQ ID NO: 453183 - protein, 11 aa, Homo sapiens
  CDR3 for alpha chain variable domain of TCR clone 226592 (TRAV1-2, TRAJ20)
CAVANDYKLSF

SEQ ID NO: 453184 - protein, 13 aa, Homo sapiens
  CDR3 for beta chain variable domain of TCR clone 226592 (TRBV7-2, TRBJ1-1)
CASSRNTNTEAFF

SEQ ID NO: 453185 - protein, 11 aa, Homo sapiens
  CDR3 for alpha chain variable domain of TCR clone 226593 (TRAV2, TRAJ13)
CASGGYQKVTF

SEQ ID NO: 453186 - protein, 16 aa, Homo sapiens
  CDR3 for beta chain variable domain of TCR clone 226593 (TRBV5-7, TRBJ2-7)
CASSPTSGRELDEQYF

SEQ ID NO: 453187 - protein, 11 aa, Homo sapiens
  CDR3 for alpha chain variable domain of TCR clone 226594 (TRAV3, TRAJ21)
CVVGNFNKFYF

SEQ ID NO: 453188 - protein, 14 aa, Homo sapiens
  CDR3 for beta chain variable domain of TCR clone 226594 (TRBV29-1, TRBJ2-2)
CSGRGSGNTGELFF

SEQ ID NO: 453189 - protein, 12 aa, Homo sapiens
  CDR3 for alpha chain variable domain of TCR clone 226595 (TRAV35, TRAJ30)
CAGLNREDKIIF

SEQ ID NO: 453190 - protein, 15 aa, Homo sapiens
  CDR3 for beta chain variable domain of TCR clone 226595 (TRBV9, TRBJ1-6)
CASSVAGTGDSPLHF

SEQ ID NO: 453191 - protein, 16 aa, Homo sapiens
  CDR3 for alpha chain variable domain of TCR clone 226596 (TRAV12-3, TRAJ53)
CAMSPGGGGSNHKLTF

SEQ ID NO: 453192 - protein, 11 aa, Homo sapiens
  CDR3 for beta chain variable domain of TCR clone 226596 (TRBV29-1, TRBJ2-5)
CSEDRTGTQYF

SEQ ID NO: 453193 - protein, 12 aa, Homo sapiens
  CDR3 for alpha chain variable domain of TCR clone 226597 (TRAV12-2, TRAJ52)
IGGGTSYGKLTF

SEQ ID NO: 453194 - protein, 15 aa, Homo sapiens
  CDR3 for beta chain variable domain of TCR clone 226597 (TRBV24-1, TRBJ2-1)
CATRASGGQYNEQFF

SEQ ID NO: 453195 - protein, 15 aa, Homo sapiens
  CDR3 for alpha chain variable domain of TCR clone 226598 (TRAV1-2, TRAJ18)
CDWEGRGSTLGRLYF

SEQ ID NO: 453196 - protein, 14 aa, Homo sapiens
  CDR3 for beta chain variable domain of TCR clone 226598 (TRBV4-3, TRBJ2-7)
CASSQDVAGEEQYF

SEQ ID NO: 453197 - protein, 12 aa, Homo sapiens
  CDR3 for alpha chain variable domain of TCR clone 226599 (TRAV12-1, TRAJ9)
CRERTGGFKTIF

SEQ ID NO: 453198 - protein, 14 aa, Homo sapiens
  CDR3 for beta chain variable domain of TCR clone 226599 (TRBV12-5, TRBJ2-5)
CASGSRTHQETQYF

SEQ ID NO: 453199 - protein, 13 aa, Homo sapiens
  CDR3 for alpha chain variable domain of TCR clone 226600 (TRAV8-4, TRAJ9)
CAVSETGGFKTIF

SEQ ID NO: 453200 - protein, 14 aa, Homo sapiens
  CDR3 for beta chain variable domain of TCR clone 226600 (TRBV18, TRBJ2-3)
CASSGLADTDTQYS

SEQ ID NO: 453201 - protein, 13 aa, Homo sapiens
  CDR3 for alpha chain variable domain of TCR clone 226601 (TRAV29/DV5, TRAJ49)
CAASTNTSNQFYF

SEQ ID NO: 453202 - protein, 13 aa, Homo sapiens
  CDR3 for beta chain variable domain of TCR clone 226601 (TRBV7-2, TRBJ1-4)
CASSLAGLEKLFF

SEQ ID NO: 453203 - protein, 16 aa, Homo sapiens
  CDR3 for alpha chain variable domain of TCR clone 226602 (TRAV30, TRAJ24)
CGTEIVDADSWGKFQF

SEQ ID NO: 453204 - protein, 15 aa, Homo sapiens
  CDR3 for beta chain variable domain of TCR clone 226602 (TRBV2, TRBJ1-3)
CASSISPRSGNTIYF

SEQ ID NO: 453205 - protein, 13 aa, Homo sapiens
  CDR3 for alpha chain variable domain of TCR clone 226603 (TRAV12-1, TRAJ39)
CVVPQRAGNVLTF

SEQ ID NO: 453206 - protein, 17 aa, Homo sapiens
  CDR3 for beta chain variable domain of TCR clone 226603 (TRBV4-1, TRBJ2-5)
CASSQDLTGGPIETQYF

SEQ ID NO: 453207 - protein, 16 aa, Homo sapiens
  CDR3 for alpha chain variable domain of TCR clone 226604 (TRAV17, TRAJ53)
CATDALSGGSNYKLTF

SEQ ID NO: 453208 - protein, 12 aa, Homo sapiens
  CDR3 for beta chain variable domain of TCR clone 226604 (TRBV5-1, TRBJ2-7)
CASSFRGYEQCF

SEQ ID NO: 453209 - protein, 14 aa, Homo sapiens
  CDR3 for alpha chain variable domain of TCR clone 226605 (TRAV9-2, TRAJ39)
CALYIYNAGNMLTF

SEQ ID NO: 453210 - protein, 13 aa, Homo sapiens
  CDR3 for beta chain variable domain of TCR clone 226605 (TRBV6-1, TRBJ1-3)
SSVQEGGGNTIYF

SEQ ID NO: 453211 - protein, 14 aa, Homo sapiens
  CDR3 for alpha chain variable domain of TCR clone 226606 (TRAV12-3, TRAJ10)
SHLPLTGGGNRLTF

SEQ ID NO: 453212 - protein, 15 aa, Homo sapiens
  CDR3 for beta chain variable domain of TCR clone 226606 (TRBV7-3, TRBJ2-2)
CASSETGQGTGELFF

SEQ ID NO: 453213 - protein, 14 aa, Homo sapiens
  CDR3 for alpha chain variable domain of TCR clone 226607 (TRAV8-3, TRAJ22)
CAVVVSGSARQMTF

SEQ ID NO: 453214 - protein, 13 aa, Homo sapiens
  CDR3 for beta chain variable domain of TCR clone 226607 (TRBV4-2, TRBJ2-5)
CASSQGGWQTQYF

SEQ ID NO: 453215 - protein, 12 aa, Homo sapiens
  CDR3 for alpha chain variable domain of TCR clone 226608 (TRAV26-1, TRAJ26)
CIVFIYGQNFVF

SEQ ID NO: 453216 - protein, 14 aa, Homo sapiens
  CDR3 for beta chain variable domain of TCR clone 226608 (TRBV7-9, TRBJ2-5)
CASSLDTAQETQYF

SEQ ID NO: 453217 - protein, 12 aa, Homo sapiens
  CDR3 for alpha chain variable domain of TCR clone 226609 (TRAV1-1, TRAJ20)
CAVREDDYKLSF

SEQ ID NO: 453218 - protein, 18 aa, Homo sapiens
  CDR3 for beta chain variable domain of TCR clone 226609 (TRBV20-1, TRBJ2-3)
SSASGLAGGPGTTDTQYF

SEQ ID NO: 453219 - protein, 13 aa, Homo sapiens
  CDR3 for alpha chain variable domain of TCR clone 226610 (TRAV17, TRAJ9)
CATDYTVGFKTIF

SEQ ID NO: 453220 - protein, 14 aa, Homo sapiens
  CDR3 for beta chain variable domain of TCR clone 226610 (TRBV19, TRBJ2-5)
CASSMTVQQETQYF

SEQ ID NO: 453221 - protein, 16 aa, Homo sapiens
  CDR3 for alpha chain variable domain of TCR clone 226611 (TRAV12-3, TRAJ53)
CAMSVGSGGSNYKLTF

SEQ ID NO: 453222 - protein, 15 aa, Homo sapiens
  CDR3 for beta chain variable domain of TCR clone 226611 (TRBV7-9, TRBJ1-5)
CASSLAGLGHQPQHF

SEQ ID NO: 453223 - protein, 16 aa, Homo sapiens
  CDR3 for alpha chain variable domain of TCR clone 226612 (TRAV3, TRAJ28)
CAVLPRSGAGSYQLTF

SEQ ID NO: 453224 - protein, 13 aa, Homo sapiens
  CDR3 for beta chain variable domain of TCR clone 226612 (TRBV12-4, TRBJ2-5)
CSSRLAVQETQYF

SEQ ID NO: 453225 - protein, 10 aa, Homo sapiens
  CDR3 for alpha chain variable domain of TCR clone 226613 (TRAV2, TRAJ34)
CAVVNDKLIF

SEQ ID NO: 453226 - protein, 15 aa, Homo sapiens
  CDR3 for beta chain variable domain of TCR clone 226613 (TRBV7-2, TRBJ2-3)
CASSLAGAFIDTQYF

SEQ ID NO: 453227 - protein, 18 aa, Homo sapiens
  CDR3 for alpha chain variable domain of TCR clone 226614 (TRAV21, TRAJ52)
CAVRPSPAGGTSYGKLTF

SEQ ID NO: 453228 - protein, 17 aa, Homo sapiens
  CDR3 for beta chain variable domain of TCR clone 226614 (TRBV4-2, TRBJ1-1)
CASSQVATGGMNTEAFF

SEQ ID NO: 453229 - protein, 15 aa, Homo sapiens
  CDR3 for alpha chain variable domain of TCR clone 226615 (TRAV12-2, TRAJ52)
CNGGAVGTSYGKLTF

SEQ ID NO: 453230 - protein, 13 aa, Homo sapiens
  CDR3 for beta chain variable domain of TCR clone 226615 (TRBV20-1, TRBJ2-5)
CSARGDYQETQYF

SEQ ID NO: 453231 - protein, 12 aa, Homo sapiens
  CDR3 for alpha chain variable domain of TCR clone 226616 (TRAV8-3, TRAJ34)
WASGYNTDKLIF

SEQ ID NO: 453232 - protein, 13 aa, Homo sapiens
  CDR3 for beta chain variable domain of TCR clone 226616 (TRBV6-4, TRBJ2-3)
CASSVSWADKQYF

SEQ ID NO: 453233 - protein, 13 aa, Homo sapiens
  CDR3 for alpha chain variable domain of TCR clone 226617 (TRAV12-3, TRAJ7)
CAMTPYGNNRLAF

SEQ ID NO: 453234 - protein, 13 aa, Homo sapiens
  CDR3 for beta chain variable domain of TCR clone 226617 (TRBV3-1, TRBJ1-1)
CASSPGVITEAFF

SEQ ID NO: 453235 - protein, 14 aa, Homo sapiens
  CDR3 for alpha chain variable domain of TCR clone 226618 (TRAV12-3, TRAJ22)
CAMSLFGSAGQLTF

SEQ ID NO: 453236 - protein, 11 aa, Homo sapiens
  CDR3 for beta chain variable domain of TCR clone 226618 (TRBV12-4, TRBJ2-2)
CASSSAGELFF

SEQ ID NO: 453237 - protein, 12 aa, Homo sapiens
  CDR3 for alpha chain variable domain of TCR clone 226619 (TRAV8-3, TRAJ26)
CAGVNYGQNFVF

SEQ ID NO: 453238 - protein, 11 aa, Homo sapiens
  CDR3 for beta chain variable domain of TCR clone 226619 (TRBV29-1, TRBJ2-5)
CSEDRTGTQYF

SEQ ID NO: 453239 - protein, 11 aa, Homo sapiens
  CDR3 for alpha chain variable domain of TCR clone 226620 (TRAV23/DV6, TRAJ43)
CAASSGNDMRF

SEQ ID NO: 453240 - protein, 14 aa, Homo sapiens
  CDR3 for beta chain variable domain of TCR clone 226620 (TRBV4-1, TRBJ1-2)
CASSRDPLPYGYTF

SEQ ID NO: 453241 - protein, 13 aa, Homo sapiens
  CDR3 for alpha chain variable domain of TCR clone 226621 (TRAV2, TRAJ15)
CAVASQAGTALIF

SEQ ID NO: 453242 - protein, 14 aa, Homo sapiens
  CDR3 for beta chain variable domain of TCR clone 226621 (TRBV5-1, TRBJ2-7)
CASSRGESLYEQYI

SEQ ID NO: 453243 - protein, 14 aa, Homo sapiens
  CDR3 for alpha chain variable domain of TCR clone 226622 (TRAV16, TRAJ44)
CSKRRTGTASKLTF

SEQ ID NO: 453244 - protein, 15 aa, Homo sapiens
  CDR3 for beta chain variable domain of TCR clone 226622 (TRBV7-2, TRBJ1-2)
CASSLVSGGDYGYTF

SEQ ID NO: 453245 - protein, 15 aa, Homo sapiens
  CDR3 for alpha chain variable domain of TCR clone 226623 (TRAV3, TRAJ4)
CAVRDGTGGYNKLIF

SEQ ID NO: 453246 - protein, 14 aa, Homo sapiens
  CDR3 for beta chain variable domain of TCR clone 226623 (TRBV7-6, TRBJ2-3)
CASSLGTVTDTQYF

SEQ ID NO: 453247 - protein, 13 aa, Homo sapiens
  CDR3 for alpha chain variable domain of TCR clone 226624 (TRAV13-1, TRAJ39)
CAASIWAGNMLTF

SEQ ID NO: 453248 - protein, 14 aa, Homo sapiens
  CDR3 for beta chain variable domain of TCR clone 226624 (TRBV7-2, TRBJ1-1)
CASSFLTGTTEAFF

SEQ ID NO: 453249 - protein, 12 aa, Homo sapiens
  CDR3 for alpha chain variable domain of TCR clone 226625 (TRAV12-3, TRAJ17)
CAMTLTGNKLTF

SEQ ID NO: 453250 - protein, 17 aa, Homo sapiens
  CDR3 for beta chain variable domain of TCR clone 226625 (TRBV18, TRBJ1-5)
CASSPTMGQGTNQPQHF

SEQ ID NO: 453251 - protein, 14 aa, Homo sapiens
  CDR3 for alpha chain variable domain of TCR clone 226626 (TRAV20, TRAJ54)
CAVQAGRGAQKLVF

SEQ ID NO: 453252 - protein, 17 aa, Homo sapiens
  CDR3 for beta chain variable domain of TCR clone 226626 (TRBV25-1, TRBJ2-7)
CASSDARVVFSSYEQYF

SEQ ID NO: 453253 - protein, 17 aa, Homo sapiens
  CDR3 for alpha chain variable domain of TCR clone 226627 (TRAV3, TRAJ12)
CAVRDGGRMDSSYKLIF

SEQ ID NO: 453254 - protein, 16 aa, Homo sapiens
  CDR3 for beta chain variable domain of TCR clone 226627 (TRBV7-7, TRBJ2-1)
CASSLASGTSYNEQFF

SEQ ID NO: 453255 - protein, 19 aa, Homo sapiens
  CDR3 for alpha chain variable domain of TCR clone 226628 (TRAV2, TRAJ20)
ILQVREADAAVYRDCKLSF

SEQ ID NO: 453256 - protein, 14 aa, Homo sapiens
  CDR3 for beta chain variable domain of TCR clone 226628 (TRBV18, TRBJ2-5)
CASSPLRVQETQYF

SEQ ID NO: 453257 - protein, 14 aa, Homo sapiens
  CDR3 for alpha chain variable domain of TCR clone 226629 (TRAV1-2, TRAJ8)
CAVREDTGFQKLVF

SEQ ID NO: 453258 - protein, 19 aa, Homo sapiens
  CDR3 for beta chain variable domain of TCR clone 226629 (TRBV25-1, TRBJ2-2)
CAILVYRVDRGRKTGELLF

SEQ ID NO: 453259 - protein, 17 aa, Homo sapiens
  CDR3 for alpha chain variable domain of TCR clone 226630 (TRAV3, TRAJ6)
CAVRDGPRSGGSYIPTF

SEQ ID NO: 453260 - protein, 13 aa, Homo sapiens
  CDR3 for beta chain variable domain of TCR clone 226630 (TRBV27, TRBJ2-1)
CASRTLGVGEQFF

SEQ ID NO: 453261 - protein, 15 aa, Homo sapiens
  CDR3 for alpha chain variable domain of TCR clone 226631 (TRAV23/DV6, TRAJ33)
CAASNSGGGNSQLIL

SEQ ID NO: 453262 - protein, 14 aa, Homo sapiens
  CDR3 for beta chain variable domain of TCR clone 226631 (TRBV7-2, TRBJ2-7)
CASSLYPGRYEQYF

SEQ ID NO: 453263 - protein, 14 aa, Homo sapiens
  CDR3 for alpha chain variable domain of TCR clone 226632 (TRAV12-3, TRAJ10)
SHLPLTGGGHKLTF

SEQ ID NO: 453264 - protein, 12 aa, Homo sapiens
  CDR3 for beta chain variable domain of TCR clone 226632 (TRBV7-8, TRBJ2-7)
CASSLGDREQYF

SEQ ID NO: 453265 - protein, 15 aa, Homo sapiens
  CDR3 for alpha chain variable domain of TCR clone 226633 (TRAV8-4, TRAJ13)
CAVSDRGGGYQKVTF

SEQ ID NO: 453266 - protein, 15 aa, Homo sapiens
  CDR3 for beta chain variable domain of TCR clone 226633 (TRBV27, TRBJ2-1)
CASSNGGGSSNEQFF

SEQ ID NO: 453267 - protein, 12 aa, Homo sapiens
  CDR3 for alpha chain variable domain of TCR clone 226634 (TRAV3, TRAJ4)
CAVSGGYNKLIF

SEQ ID NO: 453268 - protein, 17 aa, Homo sapiens
  CDR3 for beta chain variable domain of TCR clone 226634 (TRBV6-5, TRBJ2-6)
CASSSATSGPGANDLTF

SEQ ID NO: 453269 - protein, 14 aa, Homo sapiens
  CDR3 for alpha chain variable domain of TCR clone 226635 (TRAV1-2, TRAJ16)
CAVNRFSDGQKLLF

SEQ ID NO: 453270 - protein, 16 aa, Homo sapiens
  CDR3 for beta chain variable domain of TCR clone 226635 (TRBV13, TRBJ2-2)
WASSPRTGGHTGELFF

SEQ ID NO: 453271 - protein, 13 aa, Homo sapiens
  CDR3 for alpha chain variable domain of TCR clone 226636 (TRAV3, TRAJ33)
CAVRDRSNYQLIW

SEQ ID NO: 453272 - protein, 12 aa, Homo sapiens
  CDR3 for beta chain variable domain of TCR clone 226636 (TRBV18, TRBJ1-1)
CASSPGGTEAFF

SEQ ID NO: 453273 - protein, 14 aa, Homo sapiens
  CDR3 for alpha chain variable domain of TCR clone 226637 (TRAV17, TRAJ18)
CAFDRGSTLGRLYF

SEQ ID NO: 453274 - protein, 14 aa, Homo sapiens
  CDR3 for beta chain variable domain of TCR clone 226637 (TRBV4-1, TRBJ2-2)
CASSQAVNTGELFF

SEQ ID NO: 453275 - protein, 12 aa, Homo sapiens
  CDR3 for alpha chain variable domain of TCR clone 226638 (TRAV12-1, TRAJ40)
CVVYSGNYKYIF

SEQ ID NO: 453276 - protein, 14 aa, Homo sapiens
  CDR3 for beta chain variable domain of TCR clone 226638 (TRBV19, TRBJ2-1)
CASPTFVLSGEQFF

SEQ ID NO: 453277 - protein, 12 aa, Homo sapiens
  CDR3 for alpha chain variable domain of TCR clone 226639 (TRAV1-1, TRAJ20)
CAVREDDYKLSF

SEQ ID NO: 453278 - protein, 12 aa, Homo sapiens
  CDR3 for beta chain variable domain of TCR clone 226639 (TRBV11-2, TRBJ2-2)
CASSLGGGELFF

SEQ ID NO: 453279 - protein, 14 aa, Homo sapiens
  CDR3 for alpha chain variable domain of TCR clone 226640 (TRAV12-2, TRAJ40)
CAVKIPSGTYKYIF

SEQ ID NO: 453280 - protein, 13 aa, Homo sapiens
  CDR3 for beta chain variable domain of TCR clone 226640 (TRBV20-1, TRBJ1-1)
QCTNTDWVTEAFF

SEQ ID NO: 453281 - protein, 14 aa, Homo sapiens
  CDR3 for alpha chain variable domain of TCR clone 226641 (TRAV26-2, TRAJ11)
CIPRLNSGYSTLTF

SEQ ID NO: 453282 - protein, 13 aa, Homo sapiens
  CDR3 for beta chain variable domain of TCR clone 226641 (TRBV19, TRBJ1-2)
CASSVPGQDGYTF

SEQ ID NO: 453283 - protein, 16 aa, Homo sapiens
  CDR3 for alpha chain variable domain of TCR clone 226642 (TRAV3, TRAJ10)
CAVRDLRAGGGNKLTF

SEQ ID NO: 453284 - protein, 15 aa, Homo sapiens
  CDR3 for beta chain variable domain of TCR clone 226642 (TRBV11-2, TRBJ1-6)
CACTGFGTAVSPLHF

SEQ ID NO: 453285 - protein, 10 aa, Homo sapiens
  CDR3 for alpha chain variable domain of TCR clone 226643 (TRAV23/DV6, TRAJ57)
CAASPTLSQG

SEQ ID NO: 453286 - protein, 17 aa, Homo sapiens
  CDR3 for beta chain variable domain of TCR clone 226643 (TRBV10-3, TRBJ2-6)
CAISESTAPSGADVLTF

SEQ ID NO: 453287 - protein, 15 aa, Homo sapiens
  CDR3 for alpha chain variable domain of TCR clone 226644 (TRAV3, TRAJ22)
CAVRDRGGSAMQLTF

SEQ ID NO: 453288 - protein, 17 aa, Homo sapiens
  CDR3 for beta chain variable domain of TCR clone 226644 (TRBV28, TRBJ2-5)
CASSTPEGDALQETQYF

SEQ ID NO: 453289 - protein, 14 aa, Homo sapiens
  CDR3 for alpha chain variable domain of TCR clone 226645 (TRAV1-2, TRAJ8)
CAVREDTGFQKLVF

SEQ ID NO: 453290 - protein, 17 aa, Homo sapiens
  CDR3 for beta chain variable domain of TCR clone 226645 (TRBV7-8, TRBJ2-6)
CASSAVTGGAGANVLTF

SEQ ID NO: 453291 - protein, 15 aa, Homo sapiens
  CDR3 for alpha chain variable domain of TCR clone 226646 (TRAV36/DV7, TRAJ53)
CAVEGSGGSNYKLTF

SEQ ID NO: 453292 - protein, 16 aa, Homo sapiens
  CDR3 for beta chain variable domain of TCR clone 226646 (TRBV27, TRBJ2-2)
CAGSLSGVWVTGELFF

SEQ ID NO: 453293 - protein, 14 aa, Homo sapiens
  CDR3 for alpha chain variable domain of TCR clone 226647 (TRAV35, TRAJ22)
CAGLRPGSARQLTF

SEQ ID NO: 453294 - protein, 16 aa, Homo sapiens
  CDR3 for beta chain variable domain of TCR clone 226647 (TRBV28, TRBJ2-7)
CASSSGTSGRGYEQYF

SEQ ID NO: 453295 - protein, 17 aa, Homo sapiens
  CDR3 for alpha chain variable domain of TCR clone 226648 (TRAV8-3, TRAJ53)
CAVGRLNSGGSNYKLTF

SEQ ID NO: 453296 - protein, 16 aa, Homo sapiens
  CDR3 for beta chain variable domain of TCR clone 226648 (TRBV12-4, TRBJ2-3)
CASSFPSNTNTDTQYF

SEQ ID NO: 453297 - protein, 14 aa, Homo sapiens
  CDR3 for alpha chain variable domain of TCR clone 226649 (TRAV1-1, TRAJ27)
CAVIYNTNAGKTTF

SEQ ID NO: 453298 - protein, 15 aa, Homo sapiens
  CDR3 for beta chain variable domain of TCR clone 226649 (TRBV6-3, TRBJ2-7)
CASSSPGTVFYEQYF

SEQ ID NO: 453299 - protein, 17 aa, Homo sapiens
  CDR3 for alpha chain variable domain of TCR clone 226650 (TRAV3, TRAJ6)
CAVSDGPRAGGSYIPTF

SEQ ID NO: 453300 - protein, 13 aa, Homo sapiens
  CDR3 for beta chain variable domain of TCR clone 226650 (TRBV25-1, TRBJ2-5)
CASSESVRETQYF

SEQ ID NO: 453301 - protein, 13 aa, Homo sapiens
  CDR3 for alpha chain variable domain of TCR clone 226651 (TRAV35, TRAJ42)
CAGFPGSQGNLIF

SEQ ID NO: 453302 - protein, 13 aa, Homo sapiens
  CDR3 for beta chain variable domain of TCR clone 226651 (TRBV10-3, TRBJ2-7)
CASKLAVNYEHYF

SEQ ID NO: 453303 - protein, 15 aa, Homo sapiens
  CDR3 for alpha chain variable domain of TCR clone 226652 (TRAV3, TRAJ4)
CAQIMFSGGYNKLIF

SEQ ID NO: 453304 - protein, 16 aa, Homo sapiens
  CDR3 for beta chain variable domain of TCR clone 226652 (TRBV3-1, TRBJ1-6)
CASSQEFQGSYSPLHF

SEQ ID NO: 453305 - protein, 16 aa, Homo sapiens
  CDR3 for alpha chain variable domain of TCR clone 226653 (TRAV16, TRAJ42)
CARKMNYGGSQGNLIF

SEQ ID NO: 453306 - protein, 13 aa, Homo sapiens
  CDR3 for beta chain variable domain of TCR clone 226653 (TRBV20-1, TRBJ2-7)
CGASPPSSYEQYF

SEQ ID NO: 453307 - protein, 14 aa, Homo sapiens
  CDR3 for alpha chain variable domain of TCR clone 226654 (TRAV20, TRAJ20)
CAVRRGNNDYKLSF

SEQ ID NO: 453308 - protein, 13 aa, Homo sapiens
  CDR3 for beta chain variable domain of TCR clone 226654 (TRBV19, TRBJ2-5)
CASSETAPETQYF

SEQ ID NO: 453309 - protein, 14 aa, Homo sapiens
  CDR3 for alpha chain variable domain of TCR clone 226655 (TRAV1-2, TRAJ16)
CAVNRFSDGQKLLF

SEQ ID NO: 453310 - protein, 14 aa, Homo sapiens
  CDR3 for beta chain variable domain of TCR clone 226655 (TRBV7-2, TRBJ2-7)
CASSLYPGRYGQYF

SEQ ID NO: 453311 - protein, 15 aa, Homo sapiens
  CDR3 for alpha chain variable domain of TCR clone 226656 (TRAV21, TRAJ45)
CAVSYSGGGADVLTF

SEQ ID NO: 453312 - protein, 13 aa, Homo sapiens
  CDR3 for beta chain variable domain of TCR clone 226656 (TRBV20-1, TRBJ2-5)
CSAPTELQETQYF

SEQ ID NO: 453313 - protein, 15 aa, Homo sapiens
  CDR3 for alpha chain variable domain of TCR clone 226657 (TRAV13-1, TRAJ28)
CAANQPAAGSYQLTF

SEQ ID NO: 453314 - protein, 12 aa, Homo sapiens
  CDR3 for beta chain variable domain of TCR clone 226657 (TRBV27, TRBJ2-1)
CASRGFYNEQFF

SEQ ID NO: 453315 - protein, 16 aa, Homo sapiens
  CDR3 for alpha chain variable domain of TCR clone 226658 (TRAV30, TRAJ24)
CGTEIVDADSWGKFQF

SEQ ID NO: 453316 - protein, 14 aa, Homo sapiens
  CDR3 for beta chain variable domain of TCR clone 226658 (TRBV12-5, TRBJ2-5)
CASCSRTHQENQYF

SEQ ID NO: 453317 - protein, 14 aa, Homo sapiens
  CDR3 for alpha chain variable domain of TCR clone 226659 (TRAV29/DV5, TRAJ32)
CAAAYGGATNKLLF

SEQ ID NO: 453318 - protein, 11 aa, Homo sapiens
  CDR3 for beta chain variable domain of TCR clone 226659 (TRBV11-2, TRBJ2-2)
CASSLPGELFF

SEQ ID NO: 453319 - protein, 12 aa, Homo sapiens
  CDR3 for alpha chain variable domain of TCR clone 226660 (TRAV2, TRAJ37)
CAVTMSTGKLIF

SEQ ID NO: 453320 - protein, 17 aa, Homo sapiens
  CDR3 for beta chain variable domain of TCR clone 226660 (TRBV13, TRBJ2-3)
CASSLSRVAGGRNTQYF

SEQ ID NO: 453321 - protein, 17 aa, Homo sapiens
  CDR3 for alpha chain variable domain of TCR clone 226661 (TRAV23/DV6, TRAJ28)
CAALLAYSGAGSYQLNF

SEQ ID NO: 453322 - protein, 13 aa, Homo sapiens
  CDR3 for beta chain variable domain of TCR clone 226661 (TRBV4-2, TRBJ2-3)
CASSQGNTDTQYF

SEQ ID NO: 453323 - protein, 13 aa, Homo sapiens
  CDR3 for alpha chain variable domain of TCR clone 226662 (TRAV8-3, TRAJ43)
CAVGPDNNNEMRF

SEQ ID NO: 453324 - protein, 14 aa, Homo sapiens
  CDR3 for beta chain variable domain of TCR clone 226662 (TRBV19, TRBJ2-1)
CASPTFVLSGEQFF

SEQ ID NO: 453325 - protein, 13 aa, Homo sapiens
  CDR3 for alpha chain variable domain of TCR clone 226663 (TRAV1-1, TRAJ9)
CAAKNTGGFKTIL

SEQ ID NO: 453326 - protein, 13 aa, Homo sapiens
  CDR3 for beta chain variable domain of TCR clone 226663 (TRBV7-9, TRBJ1-2)
CASSLKQNYGYTF

SEQ ID NO: 453327 - protein, 15 aa, Homo sapiens
  CDR3 for alpha chain variable domain of TCR clone 226664 (TRAV23/DV6, TRAJ18)
CAARNRGSTLGRPYF

SEQ ID NO: 453328 - protein, 13 aa, Homo sapiens
  CDR3 for beta chain variable domain of TCR clone 226664 (TRBV7-2, TRBJ2-7)
CASSSPSGSEQYF

SEQ ID NO: 453329 - protein, 14 aa, Homo sapiens
  CDR3 for alpha chain variable domain of TCR clone 226665 (TRAV30, TRAJ44)
CGTESAGTASKLTF

SEQ ID NO: 453330 - protein, 16 aa, Homo sapiens
  CDR3 for beta chain variable domain of TCR clone 226665 (TRBV11-2, TRBJ2-1)
CASSFGGSFVYNEQFF

SEQ ID NO: 453331 - protein, 11 aa, Homo sapiens
  CDR3 for alpha chain variable domain of TCR clone 226666 (TRAV36/DV7, TRAJ45)
SGGGGADGLTF

SEQ ID NO: 453332 - protein, 15 aa, Homo sapiens
  CDR3 for beta chain variable domain of TCR clone 226666 (TRBV2, TRBJ2-2)
CASSRETVGTGELFF

SEQ ID NO: 453333 - protein, 13 aa, Homo sapiens
  CDR3 for alpha chain variable domain of TCR clone 226667 (TRAV38-1, TRAJ42)
CARWGGSQGNLIF

SEQ ID NO: 453334 - protein, 15 aa, Homo sapiens
  CDR3 for beta chain variable domain of TCR clone 226667 (TRBV12-4, TRBJ2-3)
CASSLGLASTDTQYF

SEQ ID NO: 453335 - protein, 14 aa, Homo sapiens
  CDR3 for alpha chain variable domain of TCR clone 226668 (TRAV13-1, TRAJ40)
CAGSMTSGTYKYIF

SEQ ID NO: 453336 - protein, 15 aa, Homo sapiens
  CDR3 for beta chain variable domain of TCR clone 226668 (TRBV7-3, TRBJ2-1)
CASSPTGGGEVEQFF

SEQ ID NO: 453337 - protein, 14 aa, Homo sapiens
  CDR3 for alpha chain variable domain of TCR clone 226669 (TRAV1-1, TRAJ27)
CAVIITTMQANQPL

SEQ ID NO: 453338 - protein, 13 aa, Homo sapiens
  CDR3 for beta chain variable domain of TCR clone 226669 (TRBV7-9, TRBJ1-2)
CASSLKQNYGYTF

SEQ ID NO: 453339 - protein, 17 aa, Homo sapiens
  CDR3 for alpha chain variable domain of TCR clone 226670 (TRAV3, TRAJ42)
CAVRDRDYGGSQGNLIF

SEQ ID NO: 453340 - protein, 16 aa, Homo sapiens
  CDR3 for beta chain variable domain of TCR clone 226670 (TRBV6-3, TRBJ2-2)
CASRTLAGGSTGELFF

SEQ ID NO: 453341 - protein, 12 aa, Homo sapiens
  CDR3 for alpha chain variable domain of TCR clone 226671 (TRAV12-2, TRAJ7)
CAVMRGNNRLAF

SEQ ID NO: 453342 - protein, 17 aa, Homo sapiens
  CDR3 for beta chain variable domain of TCR clone 226671 (TRBV7-9, TRBJ2-3)
CASGPTVAGDLTDTQYF

SEQ ID NO: 453343 - protein, 15 aa, Homo sapiens
  CDR3 for alpha chain variable domain of TCR clone 226672 (TRAV12-1, TRAJ44)
CVVFVNTGTASKLTF

SEQ ID NO: 453344 - protein, 14 aa, Homo sapiens
  CDR3 for beta chain variable domain of TCR clone 226672 (TRBV27, TRBJ2-5)
CANSSLKGWETQYF

SEQ ID NO: 453345 - protein, 15 aa, Homo sapiens
  CDR3 for alpha chain variable domain of TCR clone 226673 (TRAV3, TRAJ45)
CAVRTPWGGADGRPF

SEQ ID NO: 453346 - protein, 16 aa, Homo sapiens
  CDR3 for beta chain variable domain of TCR clone 226673 (TRBV6-1, TRBJ2-2)
CASSFGQGANTGELFF

SEQ ID NO: 453347 - protein, 15 aa, Homo sapiens
  CDR3 for alpha chain variable domain of TCR clone 226674 (TRAV12-1, TRAJ5)
CVVNMLETGRKALTF

SEQ ID NO: 453348 - protein, 13 aa, Homo sapiens
  CDR3 for beta chain variable domain of TCR clone 226674 (TRBV14, TRBJ1-5)
CASSQDRRGPQHF

SEQ ID NO: 453349 - protein, 15 aa, Homo sapiens
  CDR3 for alpha chain variable domain of TCR clone 226675 (TRAV2, TRAJ9)
CAVEDRGTGGFKTSF

SEQ ID NO: 453350 - protein, 14 aa, Homo sapiens
  CDR3 for beta chain variable domain of TCR clone 226675 (TRBV4-1, TRBJ2-2)
CASSQAVNTGELFF

SEQ ID NO: 453351 - protein, 14 aa, Homo sapiens
  CDR3 for alpha chain variable domain of TCR clone 226676 (TRAV1-2, TRAJ16)
CAVRGFSDGQKLLF

SEQ ID NO: 453352 - protein, 13 aa, Homo sapiens
  CDR3 for beta chain variable domain of TCR clone 226676 (TRBV11-2, TRBJ1-1)
CASSLGNGAEAFF

SEQ ID NO: 453353 - protein, 13 aa, Homo sapiens
  CDR3 for alpha chain variable domain of TCR clone 226677 (TRAV21, TRAJ27)
CAARPGNAGKSTF

SEQ ID NO: 453354 - protein, 18 aa, Homo sapiens
  CDR3 for beta chain variable domain of TCR clone 226677 (TRBV4-2, TRBJ2-6)
CASSQLQGVLTGANVLTF

SEQ ID NO: 453355 - protein, 15 aa, Homo sapiens
  CDR3 for alpha chain variable domain of TCR clone 226678 (TRAV2, TRAJ9)
CAVAALNTGGFKTIF

SEQ ID NO: 453356 - protein, 15 aa, Homo sapiens
  CDR3 for beta chain variable domain of TCR clone 226678 (TRBV7-9, TRBJ1-1)
CASSLLEQGGTEAFF

SEQ ID NO: 453357 - protein, 13 aa, Homo sapiens
  CDR3 for alpha chain variable domain of TCR clone 226679 (TRAV27, TRAJ29)
CAGAHSGNTPLVF

SEQ ID NO: 453358 - protein, 14 aa, Homo sapiens
  CDR3 for beta chain variable domain of TCR clone 226679 (TRBV19, TRBJ2-1)
CASPAFVLSGEQFF

SEQ ID NO: 453359 - protein, 10 aa, Homo sapiens
  CDR3 for alpha chain variable domain of TCR clone 226680 (TRAV23/DV6, TRAJ37)
ALSNTGKLIF

SEQ ID NO: 453360 - protein, 13 aa, Homo sapiens
  CDR3 for beta chain variable domain of TCR clone 226680 (TRBV7-7, TRBJ1-1)
CASSLGANTEAFF

SEQ ID NO: 453361 - protein, 11 aa, Homo sapiens
  CDR3 for alpha chain variable domain of TCR clone 226681 (TRAV3, TRAJ21)
CAVGNFNKFYF

SEQ ID NO: 453362 - protein, 15 aa, Homo sapiens
  CDR3 for beta chain variable domain of TCR clone 226681 (TRBV29-1, TRBJ2-1)
CSAEGGPASYNEQIF

SEQ ID NO: 453363 - protein, 16 aa, Homo sapiens
  CDR3 for alpha chain variable domain of TCR clone 226682 (TRAV14/DV4, TRAJ28)
CNERDKFWGWELLTNF

SEQ ID NO: 453364 - protein, 13 aa, Homo sapiens
  CDR3 for beta chain variable domain of TCR clone 226682 (TRBV28, TRBJ2-5)
CASSFAGGETQYF

SEQ ID NO: 453365 - protein, 14 aa, Homo sapiens
  CDR3 for alpha chain variable domain of TCR clone 226683 (TRAV13-1, TRAJ35)
CAASKGGFGNVLHG

SEQ ID NO: 453366 - protein, 15 aa, Homo sapiens
  CDR3 for beta chain variable domain of TCR clone 226683 (TRBV7-9, TRBJ1-6)
CASSSPGRGNSPLHF

SEQ ID NO: 453367 - protein, 14 aa, Homo sapiens
  CDR3 for alpha chain variable domain of TCR clone 226684 (TRAV12-2, TRAJ40)
CAVKIPSGTYKYIF

SEQ ID NO: 453368 - protein, 15 aa, Homo sapiens
  CDR3 for beta chain variable domain of TCR clone 226684 (TRBV12-4, TRBJ1-1)
CASSLAVSRGAEAFF

SEQ ID NO: 453369 - protein, 13 aa, Homo sapiens
  CDR3 for alpha chain variable domain of TCR clone 226685 (TRAV29/DV5, TRAJ29)
CAASAAGNTPLVF

SEQ ID NO: 453370 - protein, 14 aa, Homo sapiens
  CDR3 for beta chain variable domain of TCR clone 226685 (TRBV19, TRBJ2-3)
CASSAPSGTDTQYF

SEQ ID NO: 453371 - protein, 13 aa, Homo sapiens
  CDR3 for alpha chain variable domain of TCR clone 226686 (TRAV30, TRAJ39)
CGTENNAGNMLTF

SEQ ID NO: 453372 - protein, 14 aa, Homo sapiens
  CDR3 for beta chain variable domain of TCR clone 226686 (TRBV20-1, TRBJ2-7)
CSAKRGRSSYEQYF

SEQ ID NO: 453373 - protein, 13 aa, Homo sapiens
  CDR3 for alpha chain variable domain of TCR clone 226687 (TRAV21, TRAJ57)
CAVTQGGSEKLVF

SEQ ID NO: 453374 - protein, 11 aa, Homo sapiens
  CDR3 for beta chain variable domain of TCR clone 226687 (TRBV11-2, TRBJ2-2)
FASSLPGELFF

SEQ ID NO: 453375 - protein, 13 aa, Homo sapiens
  CDR3 for alpha chain variable domain of TCR clone 226688 (TRAV36/DV7, TRAJ37)
CAVFSSNTGKLIF

SEQ ID NO: 453376 - protein, 16 aa, Homo sapiens
  CDR3 for beta chain variable domain of TCR clone 226688 (TRBV3-1, TRBJ2-5)
CASSPGQFNGFGTQFF

SEQ ID NO: 453377 - protein, 15 aa, Homo sapiens
  CDR3 for alpha chain variable domain of TCR clone 226689 (TRAV8-3, TRAJ7)
CAVGSISYGNNRLAF

SEQ ID NO: 453378 - protein, 15 aa, Homo sapiens
  CDR3 for beta chain variable domain of TCR clone 226689 (TRBV4-2, TRBJ1-1)
CASSPEDLPRTEAFF

SEQ ID NO: 453379 - protein, 15 aa, Homo sapiens
  CDR3 for alpha chain variable domain of TCR clone 226690 (TRAV10, TRAJ6)
CVVRPRTGGSYIPTF

SEQ ID NO: 453380 - protein, 14 aa, Homo sapiens
  CDR3 for beta chain variable domain of TCR clone 226690 (TRBV20-1, TRBJ2-4)
CSASGGVGENIQYF

SEQ ID NO: 453381 - protein, 14 aa, Homo sapiens
  CDR3 for alpha chain variable domain of TCR clone 226691 (TRAV13-1, TRAJ39)
CAASKNNAGNMLTF

SEQ ID NO: 453382 - protein, 12 aa, Homo sapiens
  CDR3 for beta chain variable domain of TCR clone 226691 (TRBV5-1, TRBJ2-3)
CASSLAEGTQYF

SEQ ID NO: 453383 - protein, 13 aa, Homo sapiens
  CDR3 for alpha chain variable domain of TCR clone 226692 (TRAV20, TRAJ48)
CAVQGVGNEKLTF

SEQ ID NO: 453384 - protein, 18 aa, Homo sapiens
  CDR3 for beta chain variable domain of TCR clone 226692 (TRBV2, TRBJ2-2)
CQQSTGTSGGGDTGELFF

SEQ ID NO: 453385 - protein, 22 aa, Homo sapiens
  CDR3 for alpha chain variable domain of TCR clone 226693 (TRAV1-1, TRAJ30)
CAVRDQTEMTRSSLEKGHDFIF

SEQ ID NO: 453386 - protein, 17 aa, Homo sapiens
  CDR3 for beta chain variable domain of TCR clone 226693 (TRBV7-8, TRBJ2-6)
CASSAGTGGAGANVLTF

SEQ ID NO: 453387 - protein, 12 aa, Homo sapiens
  CDR3 for alpha chain variable domain of TCR clone 226694 (TRAV1-2, TRAJ33)
CAALDSNYQLIW

SEQ ID NO: 453388 - protein, 16 aa, Homo sapiens
  CDR3 for beta chain variable domain of TCR clone 226694 (TRBV6-4, TRBJ1-2)
CASSEAVGDPNYGNTF

SEQ ID NO: 453389 - protein, 14 aa, Homo sapiens
  CDR3 for alpha chain variable domain of TCR clone 226695 (TRAV17, TRAJ22)
GATSPSGSARQLTF

SEQ ID NO: 453390 - protein, 13 aa, Homo sapiens
  CDR3 for beta chain variable domain of TCR clone 226695 (TRBV12-4, TRBJ1-2)
CASSLRQGKGYTF

SEQ ID NO: 453391 - protein, 16 aa, Homo sapiens
  CDR3 for alpha chain variable domain of TCR clone 226696 (TRAV3, TRAJ10)
CAVRDMRAGGGTKLTF

SEQ ID NO: 453392 - protein, 15 aa, Homo sapiens
  CDR3 for beta chain variable domain of TCR clone 226696 (TRBV11-2, TRBJ1-6)
CASTGFGTAVSALHF

SEQ ID NO: 453393 - protein, 12 aa, Homo sapiens
  CDR3 for alpha chain variable domain of TCR clone 226697 (TRAV12-2, TRAJ31)
CAVNTPDARLMF

SEQ ID NO: 453394 - protein, 17 aa, Homo sapiens
  CDR3 for beta chain variable domain of TCR clone 226697 (TRBV20-1, TRBJ2-7)
CSAESGLAGHTSSTSGR

SEQ ID NO: 453395 - protein, 14 aa, Homo sapiens
  CDR3 for alpha chain variable domain of TCR clone 226698 (TRAV12-3, TRAJ35)
CAMSLIGFGNVLHC

SEQ ID NO: 453396 - protein, 12 aa, Homo sapiens
  CDR3 for beta chain variable domain of TCR clone 226698 (TRBV12-4, TRBJ1-1)
SASSLAGLEAFF

SEQ ID NO: 453397 - protein, 19 aa, Homo sapiens
  CDR3 for alpha chain variable domain of TCR clone 226699 (TRAV8-3, TRAJ8)
LSTSVLWDPMNTGFQKLVF

SEQ ID NO: 453398 - protein, 13 aa, Homo sapiens
  CDR3 for beta chain variable domain of TCR clone 226699 (TRBV10-2, TRBJ2-3)
CASSESGDNTQYF

SEQ ID NO: 453399 - protein, 12 aa, Homo sapiens
  CDR3 for alpha chain variable domain of TCR clone 226700 (TRAV12-3, TRAJ17)
CAMTLTGNKLTF

SEQ ID NO: 453400 - protein, 13 aa, Homo sapiens
  CDR3 for beta chain variable domain of TCR clone 226700 (TRBV24-1, TRBJ1-2)
CATSGTALDGYTF

SEQ ID NO: 453401 - protein, 17 aa, Homo sapiens
  CDR3 for alpha chain variable domain of TCR clone 226701 (TRAV3, TRAJ6)
CAVRDGPRAGGSNIPTF

SEQ ID NO: 453402 - protein, 18 aa, Homo sapiens
  CDR3 for beta chain variable domain of TCR clone 226701 (TRBV7-9, TRBJ2-7)
CASSLTTSGSGTWYEQYF

SEQ ID NO: 453403 - protein, 13 aa, Homo sapiens
  CDR3 for alpha chain variable domain of TCR clone 226702 (TRAV12-2, TRAJ47)
CAVFMEYGNKLVF

SEQ ID NO: 453404 - protein, 14 aa, Homo sapiens
  CDR3 for beta chain variable domain of TCR clone 226702 (TRBV4-1, TRBJ1-5)
CASSQGPTNQHQHF

SEQ ID NO: 453405 - protein, 15 aa, Homo sapiens
  CDR3 for alpha chain variable domain of TCR clone 226703 (TRAV13-1, TRAJ16)
CAARYQMARSCFLQG

SEQ ID NO: 453406 - protein, 13 aa, Homo sapiens
  CDR3 for beta chain variable domain of TCR clone 226703 (TRBV4-1, TRBJ2-1)
CASSQAGGDEQFF

SEQ ID NO: 453407 - protein, 13 aa, Homo sapiens
  CDR3 for alpha chain variable domain of TCR clone 226704 (TRAV20, TRAJ21)
CAVEGYNFNKFYF

SEQ ID NO: 453408 - protein, 14 aa, Homo sapiens
  CDR3 for beta chain variable domain of TCR clone 226704 (TRBV4-3, TRBJ1-6)
CASSPGTDNSPLHF

SEQ ID NO: 453409 - protein, 15 aa, Homo sapiens
  CDR3 for alpha chain variable domain of TCR clone 226705 (TRAV14/DV4, TRAJ33)
CAMREGRDSTYQLIW

SEQ ID NO: 453410 - protein, 16 aa, Homo sapiens
  CDR3 for beta chain variable domain of TCR clone 226705 (TRBV12-5, TRBJ2-5)
CASGPRTSGNQETQYF

SEQ ID NO: 453411 - protein, 12 aa, Homo sapiens
  CDR3 for alpha chain variable domain of TCR clone 226706 (TRAV21, TRAJ11)
CAATSGYSTLTF

SEQ ID NO: 453412 - protein, 15 aa, Homo sapiens
  CDR3 for beta chain variable domain of TCR clone 226706 (TRBV4-1, TRBJ2-5)
CASSQSRGDQETQYF

SEQ ID NO: 453413 - protein, 17 aa, Homo sapiens
  CDR3 for alpha chain variable domain of TCR clone 226707 (TRAV3, TRAJ12)
CAVRDGGRMDSSYKLIF

SEQ ID NO: 453414 - protein, 13 aa, Homo sapiens
  CDR3 for beta chain variable domain of TCR clone 226707 (TRBV15, TRBJ1-6)
CATSGGLKSPLHF

SEQ ID NO: 453415 - protein, 14 aa, Homo sapiens
  CDR3 for alpha chain variable domain of TCR clone 226708 (TRAV8-6, TRAJ52)
CAVIGGTSYGKLTF

SEQ ID NO: 453416 - protein, 17 aa, Homo sapiens
  CDR3 for beta chain variable domain of TCR clone 226708 (TRBV28, TRBJ2-5)
CASSTPEGDALQETQYF

SEQ ID NO: 453417 - protein, 11 aa, Homo sapiens
  CDR3 for alpha chain variable domain of TCR clone 226709 (TRAV21, TRAJ34)
CAVTNTDKLIF

SEQ ID NO: 453418 - protein, 13 aa, Homo sapiens
  CDR3 for beta chain variable domain of TCR clone 226709 (TRBV7-9, TRBJ1-2)
CASSLKQNYGYTS

SEQ ID NO: 453419 - protein, 14 aa, Homo sapiens
  CDR3 for alpha chain variable domain of TCR clone 226710 (TRAV1-2, TRAJ8)
CAVREDTGFQKLVF

SEQ ID NO: 453420 - protein, 12 aa, Homo sapiens
  CDR3 for beta chain variable domain of TCR clone 226710 (TRBV12-5, TRBJ2-1)
CASGSFYNEQFF

SEQ ID NO: 453421 - protein, 12 aa, Homo sapiens
  CDR3 for alpha chain variable domain of TCR clone 226711 (TRAV13-1, TRAJ20)
CAASMGDYKLSF

SEQ ID NO: 453422 - protein, 14 aa, Homo sapiens
  CDR3 for beta chain variable domain of TCR clone 226711 (TRBV20-1, TRBJ2-5)
CSASDSASGETQYF

SEQ ID NO: 453423 - protein, 12 aa, Homo sapiens
  CDR3 for alpha chain variable domain of TCR clone 226712 (TRAV13-2, TRAJ23)
CAERHRGGKLIF

SEQ ID NO: 453424 - protein, 13 aa, Homo sapiens
  CDR3 for beta chain variable domain of TCR clone 226712 (TRBV19, TRBJ2-7)
CASSIDRTYEQYF

SEQ ID NO: 453425 - protein, 12 aa, Homo sapiens
  CDR3 for alpha chain variable domain of TCR clone 226713 (TRAV17, TRAJ45)
CAAGGGADGLTF

SEQ ID NO: 453426 - protein, 14 aa, Homo sapiens
  CDR3 for beta chain variable domain of TCR clone 226713 (TRBV20-1, TRBJ1-1)
CSAQTRIGGTEAVF

SEQ ID NO: 453427 - protein, 15 aa, Homo sapiens
  CDR3 for alpha chain variable domain of TCR clone 226714 (TRAV30, TRAJ13)
CGTQGVTGGYQKVTF

SEQ ID NO: 453428 - protein, 12 aa, Homo sapiens
  CDR3 for beta chain variable domain of TCR clone 226714 (TRBV19, TRBJ2-1)
CASSMQDTEQFF

SEQ ID NO: 453429 - protein, 13 aa, Homo sapiens
  CDR3 for alpha chain variable domain of TCR clone 226715 (TRAV8-3, TRAJ43)
LSTSVLALADMRF

SEQ ID NO: 453430 - protein, 14 aa, Homo sapiens
  CDR3 for beta chain variable domain of TCR clone 226715 (TRBV4-2, TRBJ2-1)
CASGLDRAYNEQFF

SEQ ID NO: 453431 - protein, 14 aa, Homo sapiens
  CDR3 for alpha chain variable domain of TCR clone 226716 (TRAV23/DV6, TRAJ37)
CAASTSSNTGKLIF

SEQ ID NO: 453432 - protein, 17 aa, Homo sapiens
  CDR3 for beta chain variable domain of TCR clone 226716 (TRBV5-1, TRBJ2-2)
CASSLAGLSGGTGELFF

SEQ ID NO: 453433 - protein, 18 aa, Homo sapiens
  CDR3 for alpha chain variable domain of TCR clone 226717 (TRAV12-3, TRAJ52)
CARSRTNAGGTSYGKLTF

SEQ ID NO: 453434 - protein, 17 aa, Homo sapiens
  CDR3 for beta chain variable domain of TCR clone 226717 (TRBV7-3, TRBJ2-3)
CASSLMKWMRGADTQYF

SEQ ID NO: 453435 - protein, 15 aa, Homo sapiens
  CDR3 for alpha chain variable domain of TCR clone 226718 (TRAV23/DV6, TRAJ37)
CAAGEGSSNTGQLIL

SEQ ID NO: 453436 - protein, 17 aa, Homo sapiens
  CDR3 for beta chain variable domain of TCR clone 226718 (TRBV20-1, TRBJ2-7)
CSATRAGGVAGVEEQYF

SEQ ID NO: 453437 - protein, 15 aa, Homo sapiens
  CDR3 for alpha chain variable domain of TCR clone 226719 (TRAV26-1, TRAJ23)
CIVRVVGYQGGQLIF

SEQ ID NO: 453438 - protein, 18 aa, Homo sapiens
  CDR3 for beta chain variable domain of TCR clone 226719 (TRBV28, TRBJ2-1)
CASSSTSGRANSYNEQFF

SEQ ID NO: 453439 - protein, 17 aa, Homo sapiens
  CDR3 for alpha chain variable domain of TCR clone 226720 (TRAV3, TRAJ42)
CAVRDRDYGGSQGNLIF

SEQ ID NO: 453440 - protein, 18 aa, Homo sapiens
  CDR3 for beta chain variable domain of TCR clone 226720 (TRBV3-1, TRBJ2-5)
CASSQAGTSGGGRETQYF

SEQ ID NO: 453441 - protein, 11 aa, Homo sapiens
  CDR3 for alpha chain variable domain of TCR clone 226721 (TRAV21, TRAJ34)
CAVTNTDKLIF

SEQ ID NO: 453442 - protein, 14 aa, Homo sapiens
  CDR3 for beta chain variable domain of TCR clone 226721 (TRBV7-2, TRBJ1-3)
CASSRGGTGNTIYF

SEQ ID NO: 453443 - protein, 15 aa, Homo sapiens
  CDR3 for alpha chain variable domain of TCR clone 226722 (TRAV27, TRAJ38)
CAARRNAGNNRKLIW

SEQ ID NO: 453444 - protein, 14 aa, Homo sapiens
  CDR3 for beta chain variable domain of TCR clone 226722 (TRBV11-2, TRBJ1-2)
CASSLGTANYGYTF

SEQ ID NO: 453445 - protein, 12 aa, Homo sapiens
  CDR3 for alpha chain variable domain of TCR clone 226723 (TRAV8-4, TRAJ33)
CAVSEGNYQLIR

SEQ ID NO: 453446 - protein, 14 aa, Homo sapiens
  CDR3 for beta chain variable domain of TCR clone 226723 (TRBV19, TRBJ2-1)
CASPTFVLSGEQFF

SEQ ID NO: 453447 - protein, 15 aa, Homo sapiens
  CDR3 for alpha chain variable domain of TCR clone 226724 (TRAV26-1, TRAJ40)
CIVRAVPSGTYKYIF

SEQ ID NO: 453448 - protein, 17 aa, Homo sapiens
  CDR3 for beta chain variable domain of TCR clone 226724 (TRBV20-1, TRBJ2-2)
CSASGSGQGGLTGELFF

SEQ ID NO: 453449 - protein, 15 aa, Homo sapiens
  CDR3 for alpha chain variable domain of TCR clone 226725 (TRAV2, TRAJ44)
CAVEAYTGTASKLTF

SEQ ID NO: 453450 - protein, 14 aa, Homo sapiens
  CDR3 for beta chain variable domain of TCR clone 226725 (TRBV11-2, TRBJ2-1)
CTSSPGSRDNEQFF

SEQ ID NO: 453451 - protein, 13 aa, Homo sapiens
  CDR3 for alpha chain variable domain of TCR clone 226726 (TRAV12-3, TRAJ7)
CAMTPYGNNRLAF

SEQ ID NO: 453452 - protein, 13 aa, Homo sapiens
  CDR3 for beta chain variable domain of TCR clone 226726 (TRBV12-4, TRBJ1-2)
CASSLRQGKGYTF

SEQ ID NO: 453453 - protein, 16 aa, Homo sapiens
  CDR3 for alpha chain variable domain of TCR clone 226727 (TRAV4, TRAJ5)
CLVGPDHGHGQESTYF

SEQ ID NO: 453454 - protein, 16 aa, Homo sapiens
  CDR3 for beta chain variable domain of TCR clone 226727 (TRBV7-3, TRBJ2-1)
CASSLEGYRSYNEQFF

SEQ ID NO: 453455 - protein, 16 aa, Homo sapiens
  CDR3 for alpha chain variable domain of TCR clone 226728 (TRAV3, TRAJ10)
WAVRDMRAGGGNKLTF

SEQ ID NO: 453456 - protein, 15 aa, Homo sapiens
  CDR3 for beta chain variable domain of TCR clone 226728 (TRBV11-2, TRBJ1-6)
CASTGFGTAVSPLHF

SEQ ID NO: 453457 - protein, 13 aa, Homo sapiens
  CDR3 for alpha chain variable domain of TCR clone 226729 (TRAV12-1, TRAJ40)
CVVPTSGTYKYIF

SEQ ID NO: 453458 - protein, 13 aa, Homo sapiens
  CDR3 for beta chain variable domain of TCR clone 226729 (TRBV20-1, TRBJ1-1)
CSAGTVGNTEAFF

SEQ ID NO: 453459 - protein, 14 aa, Homo sapiens
  CDR3 for alpha chain variable domain of TCR clone 226730 (TRAV1-2, TRAJ8)
CAVREDTGFQKLVF

SEQ ID NO: 453460 - protein, 13 aa, Homo sapiens
  CDR3 for beta chain variable domain of TCR clone 226730 (TRBV20-1, TRBJ2-5)
CSARGDYQETQYF

SEQ ID NO: 453461 - protein, 16 aa, Homo sapiens
  CDR3 for alpha chain variable domain of TCR clone 226731 (TRAV26-1, TRAJ37)
CIVRGDGSGNTGKLIF

SEQ ID NO: 453462 - protein, 17 aa, Homo sapiens
  CDR3 for beta chain variable domain of TCR clone 226731 (TRBV4-1, TRBJ2-7)
SASSRDPLGVRGGEQYF

SEQ ID NO: 453463 - protein, 12 aa, Homo sapiens
  CDR3 for alpha chain variable domain of TCR clone 226732 (TRAV16, TRAJ10)
CSRTGGGNKLTF

SEQ ID NO: 453464 - protein, 13 aa, Homo sapiens
  CDR3 for beta chain variable domain of TCR clone 226732 (TRBV7-7, TRBJ1-1)
CASSLGANTEAFC

SEQ ID NO: 453465 - protein, 13 aa, Homo sapiens
  CDR3 for alpha chain variable domain of TCR clone 226733 (TRAV21, TRAJ20)
CAVCLRVDYKLSF

SEQ ID NO: 453466 - protein, 11 aa, Homo sapiens
  CDR3 for beta chain variable domain of TCR clone 226733 (TRBV11-2, TRBJ2-2)
CASSLPGELFF

SEQ ID NO: 453467 - protein, 18 aa, Homo sapiens
  CDR3 for alpha chain variable domain of TCR clone 226734 (TRAV29/DV5, TRAJ53)
CSVLLCSKRGGSNYKLTF

SEQ ID NO: 453468 - protein, 17 aa, Homo sapiens
  CDR3 for beta chain variable domain of TCR clone 226734 (TRBV7-8, TRBJ2-6)
RASSAGTGGAGANVLTF

SEQ ID NO: 453469 - protein, 23 aa, Homo sapiens
  CDR3 for alpha chain variable domain of TCR clone 226735 (TRAV26-1, )
CIADSAGNNHIQNPYPAVYQLRD

SEQ ID NO: 453470 - protein, 13 aa, Homo sapiens
  CDR3 for beta chain variable domain of TCR clone 226735 (TRBV20-1, TRBJ2-1)
CSARSSPRDEQFF

SEQ ID NO: 453471 - protein, 18 aa, Homo sapiens
  CDR3 for alpha chain variable domain of TCR clone 226736 (TRAV21, TRAJ52)
CAVRPSPAGGASYGKLTF

SEQ ID NO: 453472 - protein, 17 aa, Homo sapiens
  CDR3 for beta chain variable domain of TCR clone 226736 (TRBV13, TRBJ2-3)
CASSLSKVAGGRNTQYF

SEQ ID NO: 453473 - protein, 16 aa, Homo sapiens
  CDR3 for alpha chain variable domain of TCR clone 226737 (TRAV17, TRAJ9)
CATGEWGGTGGFTTIF

SEQ ID NO: 453474 - protein, 15 aa, Homo sapiens
  CDR3 for beta chain variable domain of TCR clone 226737 (TRBV20-1, TRBJ1-2)
CSARDSRGRNYGYTF

SEQ ID NO: 453475 - protein, 14 aa, Homo sapiens
  CDR3 for alpha chain variable domain of TCR clone 226738 (TRAV1-1, TRAJ27)
CAVIYNTNAGKSTF

SEQ ID NO: 453476 - protein, 15 aa, Homo sapiens
  CDR3 for beta chain variable domain of TCR clone 226738 (TRBV7-2, TRBJ2-1)
CASSYGLAGGNEQFF

SEQ ID NO: 453477 - protein, 16 aa, Homo sapiens
  CDR3 for alpha chain variable domain of TCR clone 226739 (TRAV30, TRAJ24)
CGTEIVDADSRGKFPF

SEQ ID NO: 453478 - protein, 14 aa, Homo sapiens
  CDR3 for beta chain variable domain of TCR clone 226739 (TRBV12-5, TRBJ2-5)
CASGSRTHQETQYF

SEQ ID NO: 453479 - protein, 14 aa, Homo sapiens
  CDR3 for alpha chain variable domain of TCR clone 226740 (TRAV12-2, TRAJ53)
CAVKGGGSNYKLTF

SEQ ID NO: 453480 - protein, 21 aa, Homo sapiens
  CDR3 for beta chain variable domain of TCR clone 226740 (TRBV28, TRBJ2-5)
CASSFLGQGLKRDPVLRARHA

SEQ ID NO: 453481 - protein, 16 aa, Homo sapiens
  CDR3 for alpha chain variable domain of TCR clone 226741 (TRAV21, TRAJ17)
CAVRPGEEAAGNKLTF

SEQ ID NO: 453482 - protein, 18 aa, Homo sapiens
  CDR3 for beta chain variable domain of TCR clone 226741 (TRBV12-4, TRBJ2-2)
CASSRSGGAIPNTGELFF

SEQ ID NO: 453483 - protein, 18 aa, Homo sapiens
  CDR3 for alpha chain variable domain of TCR clone 226742 (TRAV13-1, TRAJ52)
CAASTRSAVGTSYGKLTF

SEQ ID NO: 453484 - protein, 14 aa, Homo sapiens
  CDR3 for beta chain variable domain of TCR clone 226742 (TRBV7-2, TRBJ2-5)
CASSTGGELKTQYF

SEQ ID NO: 453485 - protein, 13 aa, Homo sapiens
  CDR3 for alpha chain variable domain of TCR clone 226743 (TRAV17, TRAJ21)
CATDGGNFNKFYF

SEQ ID NO: 453486 - protein, 13 aa, Homo sapiens
  CDR3 for beta chain variable domain of TCR clone 226743 (TRBV11-2, TRBJ2-5)
CASSSTGEETQYF

SEQ ID NO: 453487 - protein, 16 aa, Homo sapiens
  CDR3 for alpha chain variable domain of TCR clone 226744 (TRAV16, TRAJ21)
CACGLATTSTNFTLDL

SEQ ID NO: 453488 - protein, 15 aa, Homo sapiens
  CDR3 for beta chain variable domain of TCR clone 226744 (TRBV19, TRBJ2-1)
CASSIQATSYNEQFF

SEQ ID NO: 453489 - protein, 12 aa, Homo sapiens
  CDR3 for alpha chain variable domain of TCR clone 226745 (TRAV17, TRAJ6)
CATGGGSYIPTF

SEQ ID NO: 453490 - protein, 13 aa, Homo sapiens
  CDR3 for beta chain variable domain of TCR clone 226745 (TRBV7-9, TRBJ1-2)
CASSLKQNYGYTF

SEQ ID NO: 453491 - protein, 10 aa, Homo sapiens
  CDR3 for alpha chain variable domain of TCR clone 226746 (TRAV35, TRAJ30)
CAGIDDKIIF

SEQ ID NO: 453492 - protein, 14 aa, Homo sapiens
  CDR3 for beta chain variable domain of TCR clone 226746 (TRBV19, TRBJ2-1)
CASPTFVLSGEQFF

SEQ ID NO: 453493 - protein, 21 aa, Homo sapiens
  CDR3 for alpha chain variable domain of TCR clone 226747 (TRAV12-1, TRAJ32)
SSVIQPPTSMNYGGATNKLIF

SEQ ID NO: 453494 - protein, 15 aa, Homo sapiens
  CDR3 for beta chain variable domain of TCR clone 226747 (TRBV7-9, TRBJ2-2)
FAIVPLDTFPGQLFS

SEQ ID NO: 453495 - protein, 12 aa, Homo sapiens
  CDR3 for alpha chain variable domain of TCR clone 226748 (TRAV2, TRAJ9)
CAVGAGGFKTIF

SEQ ID NO: 453496 - protein, 15 aa, Homo sapiens
  CDR3 for beta chain variable domain of TCR clone 226748 (TRBV28, TRBJ2-7)
CASSPGGRGFYEQYF

SEQ ID NO: 453497 - protein, 14 aa, Homo sapiens
  CDR3 for alpha chain variable domain of TCR clone 226749 (TRAV8-3, TRAJ9)
CAVVLLAGGFKTIF

SEQ ID NO: 453498 - protein, 12 aa, Homo sapiens
  CDR3 for beta chain variable domain of TCR clone 226749 (TRBV11-2, TRBJ2-2)
CASSLGGGELFF

SEQ ID NO: 453499 - protein, 13 aa, Homo sapiens
  CDR3 for alpha chain variable domain of TCR clone 226750 (TRAV38-2/DV8, TRAJ34)
CAYRNYNTDKLIF

SEQ ID NO: 453500 - protein, 14 aa, Homo sapiens
  CDR3 for beta chain variable domain of TCR clone 226750 (TRBV20-1, TRBJ2-5)
QCRGDRGLQETQYF

SEQ ID NO: 453501 - protein, 13 aa, Homo sapiens
  CDR3 for alpha chain variable domain of TCR clone 226751 (TRAV3, TRAJ27)
CAVRPLGAGKSTF

SEQ ID NO: 453502 - protein, 12 aa, Homo sapiens
  CDR3 for beta chain variable domain of TCR clone 226751 (TRBV7-9, TRBJ1-5)
CASSPQGQPQHF

SEQ ID NO: 453503 - protein, 13 aa, Homo sapiens
  CDR3 for alpha chain variable domain of TCR clone 226752 (TRAV1-1, TRAJ29)
CAVRDRGNTPLVF

SEQ ID NO: 453504 - protein, 15 aa, Homo sapiens
  CDR3 for beta chain variable domain of TCR clone 226752 (TRBV12-4, TRBJ1-3)
CASTPGRRSGNTIYF

SEQ ID NO: 453505 - protein, 14 aa, Homo sapiens
  CDR3 for alpha chain variable domain of TCR clone 226753 (TRAV12-2, TRAJ17)
CAVLFKAAGNKLTF

SEQ ID NO: 453506 - protein, 14 aa, Homo sapiens
  CDR3 for beta chain variable domain of TCR clone 226753 (TRBV20-1, TRBJ2-1)
CSAQIGGSANEQFF

SEQ ID NO: 453507 - protein, 19 aa, Homo sapiens
  CDR3 for alpha chain variable domain of TCR clone 226754 (TRAV25, TRAJ20)
TATQTTDVGILPHDYKLSF

SEQ ID NO: 453508 - protein, 15 aa, Homo sapiens
  CDR3 for beta chain variable domain of TCR clone 226754 (TRBV20-1, TRBJ2-1)
CSARGIGGTYNEQFF

SEQ ID NO: 453509 - protein, 11 aa, Homo sapiens
  CDR3 for alpha chain variable domain of TCR clone 226755 (TRAV1-1, TRAJ23)
CAVRQGGKLIF

SEQ ID NO: 453510 - protein, 14 aa, Homo sapiens
  CDR3 for beta chain variable domain of TCR clone 226755 (TRBV4-1, TRBJ2-2)
CASSLTENTGELFF

SEQ ID NO: 453511 - protein, 11 aa, Homo sapiens
  CDR3 for alpha chain variable domain of TCR clone 226756 (TRAV2, TRAJ33)
CAVESTYQLIW

SEQ ID NO: 453512 - protein, 12 aa, Homo sapiens
  CDR3 for beta chain variable domain of TCR clone 226756 (TRBV11-2, TRBJ2-2)
CASSLGGGELFF

SEQ ID NO: 453513 - protein, 12 aa, Homo sapiens
  CDR3 for alpha chain variable domain of TCR clone 226757 (TRAV29/DV5, TRAJ15)
CASNQAGTALIC

SEQ ID NO: 453514 - protein, 15 aa, Homo sapiens
  CDR3 for beta chain variable domain of TCR clone 226757 (TRBV11-2, TRBJ2-2)
CASSSDRVNAGELFF

SEQ ID NO: 453515 - protein, 11 aa, Homo sapiens
  CDR3 for alpha chain variable domain of TCR clone 226758 (TRAV2, TRAJ13)
CASGGYQKVTF

SEQ ID NO: 453516 - protein, 13 aa, Homo sapiens
  CDR3 for beta chain variable domain of TCR clone 226758 (TRBV19, TRBJ2-5)
CASSMGGAGTQYF

SEQ ID NO: 453517 - protein, 14 aa, Homo sapiens
  CDR3 for alpha chain variable domain of TCR clone 226759 (TRAV12-2, TRAJ53)
LAVKGGGSNYKLTF

SEQ ID NO: 453518 - protein, 15 aa, Homo sapiens
  CDR3 for beta chain variable domain of TCR clone 226759 (TRBV11-2, TRBJ2-2)
CASSSDRVNAGELFF

SEQ ID NO: 453519 - protein, 11 aa, Homo sapiens
  CDR3 for alpha chain variable domain of TCR clone 226760 (TRAV2, TRAJ13)
CASGGYQKVTF

SEQ ID NO: 453520 - protein, 15 aa, Homo sapiens
  CDR3 for beta chain variable domain of TCR clone 226760 (TRBV7-2, TRBJ2-1)
CASTHGTGIYNEQVF

SEQ ID NO: 453521 - protein, 13 aa, Homo sapiens
  CDR3 for alpha chain variable domain of TCR clone 226761 (TRAV3, TRAJ36)
CAVRDTGANNLFF

SEQ ID NO: 453522 - protein, 15 aa, Homo sapiens
  CDR3 for beta chain variable domain of TCR clone 226761 (TRBV12-4, TRBJ1-5)
CQQPTGRGSNQPQHF

SEQ ID NO: 453523 - protein, 13 aa, Homo sapiens
  CDR3 for alpha chain variable domain of TCR clone 226762 (TRAV35, TRAJ33)
CAGRRDSNYQLIW

SEQ ID NO: 453524 - protein, 19 aa, Homo sapiens
  CDR3 for beta chain variable domain of TCR clone 226762 (TRBV6-3, TRBJ2-1)
CASSYSWTSGRATYNEQFF

SEQ ID NO: 453525 - protein, 14 aa, Homo sapiens
  CDR3 for alpha chain variable domain of TCR clone 226763 (TRAV9-2, TRAJ39)
CALYIYNAGNMITF

SEQ ID NO: 453526 - protein, 14 aa, Homo sapiens
  CDR3 for beta chain variable domain of TCR clone 226763 (TRBV6-1, TRBJ1-3)
CASVQGGGGNTIYF

SEQ ID NO: 453527 - protein, 18 aa, Homo sapiens
  CDR3 for alpha chain variable domain of TCR clone 226764 (TRAV21, TRAJ52)
CAVRPSPAGGSSYGKLTF

SEQ ID NO: 453528 - protein, 13 aa, Homo sapiens
  CDR3 for beta chain variable domain of TCR clone 226764 (TRBV20-1, TRBJ1-1)
CSARVGGNTEAFF

SEQ ID NO: 453529 - protein, 13 aa, Homo sapiens
  CDR3 for alpha chain variable domain of TCR clone 226765 (TRAV1-1, TRAJ9)
CAAKNTGGFKTIF

SEQ ID NO: 453530 - protein, 15 aa, Homo sapiens
  CDR3 for beta chain variable domain of TCR clone 226765 (TRBV27, TRBJ2-1)
CASSLARGAYNEQFF

SEQ ID NO: 453531 - protein, 15 aa, Homo sapiens
  CDR3 for alpha chain variable domain of TCR clone 226766 (TRAV8-3, TRAJ45)
CASSYSGGGADGLTF

SEQ ID NO: 453532 - protein, 16 aa, Homo sapiens
  CDR3 for beta chain variable domain of TCR clone 226766 (TRBV28, TRBJ1-5)
CASSLTGQGWNQPQHF

SEQ ID NO: 453533 - protein, 19 aa, Homo sapiens
  CDR3 for alpha chain variable domain of TCR clone 226767 (TRAV26-1, TRAJ52)
CIVRAHRNAGGTSYGKLTF

SEQ ID NO: 453534 - protein, 18 aa, Homo sapiens
  CDR3 for beta chain variable domain of TCR clone 226767 (TRBV11-2, TRBJ2-3)
CASSLGGASRGAPNTQYF

SEQ ID NO: 453535 - protein, 16 aa, Homo sapiens
  CDR3 for alpha chain variable domain of TCR clone 226768 (TRAV3, TRAJ10)
CAVRDMRAGGRNKLTF

SEQ ID NO: 453536 - protein, 19 aa, Homo sapiens
  CDR3 for beta chain variable domain of TCR clone 226768 (TRBV6-3, TRBJ1-2)
CASSYSKGRTGPPNYGYTF

SEQ ID NO: 453537 - protein, 16 aa, Homo sapiens
  CDR3 for alpha chain variable domain of TCR clone 226769 (TRAV20, TRAJ22)
CAVQASSSGSERQLTF

SEQ ID NO: 453538 - protein, 16 aa, Homo sapiens
  CDR3 for beta chain variable domain of TCR clone 226769 (TRBV20-1, TRBJ1-5)
CSASRGTGYSNQPQHF

SEQ ID NO: 453539 - protein, 12 aa, Homo sapiens
  CDR3 for alpha chain variable domain of TCR clone 226770 (TRAV12-3, TRAJ17)
CAMTLTGNKLTF

SEQ ID NO: 453540 - protein, 16 aa, Homo sapiens
  CDR3 for beta chain variable domain of TCR clone 226770 (TRBV6-1, TRBJ1-3)
CASVQGGGGTTIYLER

SEQ ID NO: 453541 - protein, 13 aa, Homo sapiens
  CDR3 for alpha chain variable domain of TCR clone 226771 (TRAV12-2, TRAJ20)
CALYPSNDYKLSF

SEQ ID NO: 453542 - protein, 15 aa, Homo sapiens
  CDR3 for beta chain variable domain of TCR clone 226771 (TRBV18, TRBJ1-2)
CASSPGNGLGYGYTF

SEQ ID NO: 453543 - protein, 21 aa, Homo sapiens
  CDR3 for alpha chain variable domain of TCR clone 226772 (TRAV8-4, TRAJ47)
HLTKPSAHMSDAAERGNKLVF

SEQ ID NO: 453544 - protein, 14 aa, Homo sapiens
  CDR3 for beta chain variable domain of TCR clone 226772 (TRBV7-9, TRBJ2-1)
CASSPWDSLYEQFF

SEQ ID NO: 453545 - protein, 13 aa, Homo sapiens
  CDR3 for alpha chain variable domain of TCR clone 226773 (TRAV3, TRAJ21)
CAVREPDFNKFYF

SEQ ID NO: 453546 - protein, 14 aa, Homo sapiens
  CDR3 for beta chain variable domain of TCR clone 226773 (TRBV4-2, TRBJ2-3)
CASRETRAPGMQYF

SEQ ID NO: 453547 - protein, 16 aa, Homo sapiens
  CDR3 for alpha chain variable domain of TCR clone 226774 (TRAV30, TRAJ24)
CGTEIVDADSWGKFQL

SEQ ID NO: 453548 - protein, 14 aa, Homo sapiens
  CDR3 for beta chain variable domain of TCR clone 226774 (TRBV6-1, TRBJ1-3)
CASVQGGGGNTIYF

SEQ ID NO: 453549 - protein, 13 aa, Homo sapiens
  CDR3 for alpha chain variable domain of TCR clone 226775 (TRAV12-3, TRAJ33)
CAMSVNSHYQLIW

SEQ ID NO: 453550 - protein, 15 aa, Homo sapiens
  CDR3 for beta chain variable domain of TCR clone 226775 (TRBV20-1, TRBJ2-7)
CSARDRVSGMDEQYF

SEQ ID NO: 453551 - protein, 18 aa, Homo sapiens
  CDR3 for alpha chain variable domain of TCR clone 226776 (TRAV13-1, TRAJ52)
CAASKRSAGGTSYGKLTF

SEQ ID NO: 453552 - protein, 12 aa, Homo sapiens
  CDR3 for beta chain variable domain of TCR clone 226776 (TRBV28, TRBJ2-1)
CASSVQINEQFF

SEQ ID NO: 453553 - protein, 13 aa, Homo sapiens
  CDR3 for alpha chain variable domain of TCR clone 226777 (TRAV12-1, TRAJ16)
CVVNGPDGQKLLF

SEQ ID NO: 453554 - protein, 13 aa, Homo sapiens
  CDR3 for beta chain variable domain of TCR clone 226777 (TRBV2, TRBJ1-1)
CAMNPTGGFHAFF

SEQ ID NO: 453555 - protein, 10 aa, Homo sapiens
  CDR3 for alpha chain variable domain of TCR clone 226778 (TRAV5, TRAJ34)
CAEDTDKLIF

SEQ ID NO: 453556 - protein, 14 aa, Homo sapiens
  CDR3 for beta chain variable domain of TCR clone 226778 (TRBV7-9, TRBJ2-1)
CASSSMVGFGEQFF

SEQ ID NO: 453557 - protein, 14 aa, Homo sapiens
  CDR3 for alpha chain variable domain of TCR clone 226779 (TRAV1-2, TRAJ16)
CAVNRFSDGQKLLF

SEQ ID NO: 453558 - protein, 14 aa, Homo sapiens
  CDR3 for beta chain variable domain of TCR clone 226779 (TRBV7-3, TRBJ2-1)
CQQPDGGGEVEQFF

SEQ ID NO: 453559 - protein, 15 aa, Homo sapiens
  CDR3 for alpha chain variable domain of TCR clone 226780 (TRAV36/DV7, TRAJ44)
CAVCRNTGTASKLTF

SEQ ID NO: 453560 - protein, 13 aa, Homo sapiens
  CDR3 for beta chain variable domain of TCR clone 226780 (TRBV18, TRBJ2-3)
CASPTGRTDTQYF

SEQ ID NO: 453561 - protein, 13 aa, Homo sapiens
  CDR3 for alpha chain variable domain of TCR clone 226781 (TRAV27, TRAJ56)
CAGKPGANSKLTF

SEQ ID NO: 453562 - protein, 18 aa, Homo sapiens
  CDR3 for beta chain variable domain of TCR clone 226781 (TRBV7-3, TRBJ2-1)
CASSLTLASGRAMVSSSS

SEQ ID NO: 453563 - protein, 13 aa, Homo sapiens
  CDR3 for alpha chain variable domain of TCR clone 226782 (TRAV13-1, TRAJ6)
CAASKGGSYIPTF

SEQ ID NO: 453564 - protein, 14 aa, Homo sapiens
  CDR3 for beta chain variable domain of TCR clone 226782 (TRBV7-2, TRBJ2-1)
FASSLGVGYNEQFF

SEQ ID NO: 453565 - protein, 18 aa, Homo sapiens
  CDR3 for alpha chain variable domain of TCR clone 226783 (TRAV16, TRAJ26)
CALRLWSEFCLRSRNQIV

SEQ ID NO: 453566 - protein, 14 aa, Homo sapiens
  CDR3 for beta chain variable domain of TCR clone 226783 (TRBV7-2, TRBJ2-7)
CASRSQGAAYEQYF

SEQ ID NO: 453567 - protein, 13 aa, Homo sapiens
  CDR3 for alpha chain variable domain of TCR clone 226784 (TRAV1-2, TRAJ9)
CAVLNTGGFKTIF

SEQ ID NO: 453568 - protein, 14 aa, Homo sapiens
  CDR3 for beta chain variable domain of TCR clone 226784 (TRBV20-1, TRBJ2-3)
CIARGGTSTDTQYF

SEQ ID NO: 453569 - protein, 11 aa, Homo sapiens
  CDR3 for alpha chain variable domain of TCR clone 226785 (TRAV12-2, TRAJ39)
CAVNNMLTFGG

SEQ ID NO: 453570 - protein, 15 aa, Homo sapiens
  CDR3 for beta chain variable domain of TCR clone 226785 (TRBV7-2, TRBJ2-1)
CASTHGTGIYNEQFF

SEQ ID NO: 453571 - protein, 13 aa, Homo sapiens
  CDR3 for alpha chain variable domain of TCR clone 226786 (TRAV8-3, TRAJ28)
CAVGAVGSYQLTF

SEQ ID NO: 453572 - protein, 11 aa, Homo sapiens
  CDR3 for beta chain variable domain of TCR clone 226786 (TRBV7-9, TRBJ2-5)
CASSLSATQYF

SEQ ID NO: 453573 - protein, 14 aa, Homo sapiens
  CDR3 for alpha chain variable domain of TCR clone 226787 (TRAV1-2, TRAJ8)
CAVREDTCFQKLVF

SEQ ID NO: 453574 - protein, 15 aa, Homo sapiens
  CDR3 for beta chain variable domain of TCR clone 226787 (TRBV27, TRBJ2-1)
CASSNGGGSSNEQFF

SEQ ID NO: 453575 - protein, 15 aa, Homo sapiens
  CDR3 for alpha chain variable domain of TCR clone 226788 (TRAV27, TRAJ38)
YATRRNAGNNRKLIW

SEQ ID NO: 453576 - protein, 13 aa, Homo sapiens
  CDR3 for beta chain variable domain of TCR clone 226788 (TRBV12-5, TRBJ2-3)
CASGDRQSDTQYF

SEQ ID NO: 453577 - protein, 14 aa, Homo sapiens
  CDR3 for alpha chain variable domain of TCR clone 226789 (TRAV13-1, TRAJ35)
CAASKGGFGHVLHC

SEQ ID NO: 453578 - protein, 16 aa, Homo sapiens
  CDR3 for beta chain variable domain of TCR clone 226789 (TRBV12-5, TRBJ2-5)
CASGPRTSGNQETQYF

SEQ ID NO: 453579 - protein, 16 aa, Homo sapiens
  CDR3 for alpha chain variable domain of TCR clone 226790 (TRAV12-3, TRAJ53)
CAMSPGIGGSNYKLTF

SEQ ID NO: 453580 - protein, 14 aa, Homo sapiens
  CDR3 for beta chain variable domain of TCR clone 226790 (TRBV2, TRBJ2-7)
CASSLTSGGYEQYF

SEQ ID NO: 453581 - protein, 12 aa, Homo sapiens
  CDR3 for alpha chain variable domain of TCR clone 226791 (TRAV3, TRAJ43)
CAVRDPNNDMRF

SEQ ID NO: 453582 - protein, 15 aa, Homo sapiens
  CDR3 for beta chain variable domain of TCR clone 226791 (TRBV7-9, TRBJ1-5)
CASSQGHQPNQHQHF

SEQ ID NO: 453583 - protein, 14 aa, Homo sapiens
  CDR3 for alpha chain variable domain of TCR clone 226792 (TRAV29/DV5, TRAJ36)
CAARRKTGANNLFF

SEQ ID NO: 453584 - protein, 12 aa, Homo sapiens
  CDR3 for beta chain variable domain of TCR clone 226792 (TRBV14, TRBJ2-5)
CANSQLKETQYF

SEQ ID NO: 453585 - protein, 14 aa, Homo sapiens
  CDR3 for alpha chain variable domain of TCR clone 226793 (TRAV12-1, TRAJ12)
CVMTRMDSSYKLIF

SEQ ID NO: 453586 - protein, 13 aa, Homo sapiens
  CDR3 for beta chain variable domain of TCR clone 226793 (TRBV20-1, TRBJ1-1)
CSARGGGNTEAFF

SEQ ID NO: 453587 - protein, 14 aa, Homo sapiens
  CDR3 for alpha chain variable domain of TCR clone 226794 (TRAV12-2, TRAJ15)
CAPHTGQAGTALLF

SEQ ID NO: 453588 - protein, 17 aa, Homo sapiens
  CDR3 for beta chain variable domain of TCR clone 226794 (TRBV5-5, TRBJ1-2)
CASSLGSFDGQSEGYTF

SEQ ID NO: 453589 - protein, 10 aa, Homo sapiens
  CDR3 for alpha chain variable domain of TCR clone 226795 (TRAV12-2, TRAJ10)
CAAWTGVETH

SEQ ID NO: 453590 - protein, 14 aa, Homo sapiens
  CDR3 for beta chain variable domain of TCR clone 226795 (TRBV7-2, TRBJ2-7)
CASSPKTSFYEQYF

SEQ ID NO: 453591 - protein, 16 aa, Homo sapiens
  CDR3 for alpha chain variable domain of TCR clone 226796 (TRAV12-3, TRAJ53)
CAMSPGSGGSNYKLTF

SEQ ID NO: 453592 - protein, 11 aa, Homo sapiens
  CDR3 for beta chain variable domain of TCR clone 226796 (TRBV10-2, TRBJ2-2)
CASSASTSRCR

SEQ ID NO: 453593 - protein, 12 aa, Homo sapiens
  CDR3 for alpha chain variable domain of TCR clone 226797 (TRAV17, TRAJ30)
CVPDRRDDKIIF

SEQ ID NO: 453594 - protein, 14 aa, Homo sapiens
  CDR3 for beta chain variable domain of TCR clone 226797 (TRBV7-7, TRBJ2-2)
CASSRDRSTGELFF

SEQ ID NO: 453595 - protein, 21 aa, Homo sapiens
  CDR3 for alpha chain variable domain of TCR clone 226798 (TRAV27, TRAJ36)
SLRPSLAIQASTPAGANNLFF

SEQ ID NO: 453596 - protein, 13 aa, Homo sapiens
  CDR3 for beta chain variable domain of TCR clone 226798 (TRBV7-9, TRBJ2-3)
CASSPGSTDTQYF

SEQ ID NO: 453597 - protein, 11 aa, Homo sapiens
  CDR3 for alpha chain variable domain of TCR clone 226799 (TRAV12-1, TRAJ47)
CVVNDGNKLVF

SEQ ID NO: 453598 - protein, 15 aa, Homo sapiens
  CDR3 for beta chain variable domain of TCR clone 226799 (TRBV19, TRBJ2-7)
CASSPAGSGEALRYF

SEQ ID NO: 453599 - protein, 14 aa, Homo sapiens
  CDR3 for alpha chain variable domain of TCR clone 226800 (TRAV35, TRAJ22)
CSGLRPCSARQLTF

SEQ ID NO: 453600 - protein, 15 aa, Homo sapiens
  CDR3 for beta chain variable domain of TCR clone 226800 (TRBV12-4, TRBJ2-5)
CASSPPTGLQETQYF

SEQ ID NO: 453601 - protein, 13 aa, Homo sapiens
  CDR3 for alpha chain variable domain of TCR clone 226801 (TRAV26-1, TRAJ30)
CIVNKNRDDNIIF

SEQ ID NO: 453602 - protein, 16 aa, Homo sapiens
  CDR3 for beta chain variable domain of TCR clone 226801 (TRBV16, TRBJ2-7)
CASSRPAGGSSYEQYF

SEQ ID NO: 453603 - protein, 17 aa, Homo sapiens
  CDR3 for alpha chain variable domain of TCR clone 226802 (TRAV23/DV6, TRAJ57)
CAANSTLYQGVSEKLVF

SEQ ID NO: 453604 - protein, 14 aa, Homo sapiens
  CDR3 for beta chain variable domain of TCR clone 226802 (TRBV25-1, TRBJ1-1)
CASTHLGGNTEAFF

SEQ ID NO: 453605 - protein, 12 aa, Homo sapiens
  CDR3 for alpha chain variable domain of TCR clone 226803 (TRAV12-2, TRAJ30)
CAVRNRNDKIIF

SEQ ID NO: 453606 - protein, 15 aa, Homo sapiens
  CDR3 for beta chain variable domain of TCR clone 226803 (TRBV6-3, TRBJ1-5)
CASRVDRWSNQPQHF

SEQ ID NO: 453607 - protein, 13 aa, Homo sapiens
  CDR3 for alpha chain variable domain of TCR clone 226804 (TRAV26-1, TRAJ36)
CIVVRTGANNLFF

SEQ ID NO: 453608 - protein, 16 aa, Homo sapiens
  CDR3 for beta chain variable domain of TCR clone 226804 (TRBV10-3, TRBJ2-1)
CAISGVGDGGGGEQFF

SEQ ID NO: 453609 - protein, 16 aa, Homo sapiens
  CDR3 for alpha chain variable domain of TCR clone 226805 (TRAV21, TRAJ37)
CAVRTAGSSNTGKLIF

SEQ ID NO: 453610 - protein, 16 aa, Homo sapiens
  CDR3 for beta chain variable domain of TCR clone 226805 (TRBV7-9, TRBJ1-2)
CASSLGFSSGEDGYTF

SEQ ID NO: 453611 - protein, 16 aa, Homo sapiens
  CDR3 for alpha chain variable domain of TCR clone 226806 (TRAV1-2, TRAJ10)
CAVRGVLTGGGNKLTF

SEQ ID NO: 453612 - protein, 14 aa, Homo sapiens
  CDR3 for beta chain variable domain of TCR clone 226806 (TRBV4-2, TRBJ2-1)
CASGLDRAYNEQFF

SEQ ID NO: 453613 - protein, 16 aa, Homo sapiens
  CDR3 for alpha chain variable domain of TCR clone 226807 (TRAV3, TRAJ37)
CAVRGKGSGNTGKLIF

SEQ ID NO: 453614 - protein, 14 aa, Homo sapiens
  CDR3 for beta chain variable domain of TCR clone 226807 (TRBV28, TRBJ2-7)
CASTTDRDGFVQYF

SEQ ID NO: 453615 - protein, 15 aa, Homo sapiens
  CDR3 for alpha chain variable domain of TCR clone 226808 (TRAV3, TRAJ30)
CAVRDEYGRDDKIIF

SEQ ID NO: 453616 - protein, 16 aa, Homo sapiens
  CDR3 for beta chain variable domain of TCR clone 226808 (TRBV5-1, TRBJ2-5)
CARSLANHRGRETQYF

SEQ ID NO: 453617 - protein, 13 aa, Homo sapiens
  CDR3 for alpha chain variable domain of TCR clone 226809 (TRAV20, TRAJ37)
CAGCSSNTGKLIF

SEQ ID NO: 453618 - protein, 13 aa, Homo sapiens
  CDR3 for beta chain variable domain of TCR clone 226809 (TRBV10-2, TRBJ2-3)
CASSESGDHTQYF

SEQ ID NO: 453619 - protein, 16 aa, Homo sapiens
  CDR3 for alpha chain variable domain of TCR clone 226810 (TRAV21, TRAJ45)
CAVSWGSGGGADGLTF

SEQ ID NO: 453620 - protein, 14 aa, Homo sapiens
  CDR3 for beta chain variable domain of TCR clone 226810 (TRBV2, TRBJ2-1)
CASRTGSSYNEQFF

SEQ ID NO: 453621 - protein, 14 aa, Homo sapiens
  CDR3 for alpha chain variable domain of TCR clone 226811 (TRAV12-1, TRAJ30)
CVPTGTNRDDKIIF

SEQ ID NO: 453622 - protein, 16 aa, Homo sapiens
  CDR3 for beta chain variable domain of TCR clone 226811 (TRBV10-3, TRBJ2-1)
CAISGVGDGGGGEQFF

SEQ ID NO: 453623 - protein, 16 aa, Homo sapiens
  CDR3 for alpha chain variable domain of TCR clone 226812 (TRAV26-1, TRAJ36)
CIVIAIGRSGANNLFF

SEQ ID NO: 453624 - protein, 14 aa, Homo sapiens
  CDR3 for beta chain variable domain of TCR clone 226812 (TRBV25-1, TRBJ2-1)
CASSKTGGYNEQFF

SEQ ID NO: 453625 - protein, 16 aa, Homo sapiens
  CDR3 for alpha chain variable domain of TCR clone 226813 (TRAV35, TRAJ28)
CAVQRYSWAGSYQLTF

SEQ ID NO: 453626 - protein, 14 aa, Homo sapiens
  CDR3 for beta chain variable domain of TCR clone 226813 (TRBV18, TRBJ2-7)
CASSPRGGAYEQYF

SEQ ID NO: 453627 - protein, 11 aa, Homo sapiens
  CDR3 for alpha chain variable domain of TCR clone 226814 (TRAV13-2, TRAJ39)
CAENAGNILTF

SEQ ID NO: 453628 - protein, 14 aa, Homo sapiens
  CDR3 for beta chain variable domain of TCR clone 226814 (TRBV19, TRBJ1-5)
CASRAPDSFLSQHF

SEQ ID NO: 453629 - protein, 14 aa, Homo sapiens
  CDR3 for alpha chain variable domain of TCR clone 226815 (TRAV16, TRAJ48)
CALTPGFGNEKLTF

SEQ ID NO: 453630 - protein, 14 aa, Homo sapiens
  CDR3 for beta chain variable domain of TCR clone 226815 (TRBV7-2, TRBJ2-7)
CASSAISGFSEQYF

SEQ ID NO: 453631 - protein, 14 aa, Homo sapiens
  CDR3 for alpha chain variable domain of TCR clone 226816 (TRAV12-2, TRAJ18)
CAGKRGSTLGRLYF

SEQ ID NO: 453632 - protein, 16 aa, Homo sapiens
  CDR3 for beta chain variable domain of TCR clone 226816 (TRBV27, TRBJ2-3)
CASSFRGQLLRDTQHF

SEQ ID NO: 453633 - protein, 13 aa, Homo sapiens
  CDR3 for alpha chain variable domain of TCR clone 226817 (TRAV12-1, TRAJ34)
CVVTGYNTDKLIF

SEQ ID NO: 453634 - protein, 14 aa, Homo sapiens
  CDR3 for beta chain variable domain of TCR clone 226817 (TRBV25-1, TRBJ1-1)
CASTHLGGNTEAFF

SEQ ID NO: 453635 - protein, 13 aa, Homo sapiens
  CDR3 for alpha chain variable domain of TCR clone 226818 (TRAV1-2, TRAJ35)
CAASRGFGNVLHC

SEQ ID NO: 453636 - protein, 14 aa, Homo sapiens
  CDR3 for beta chain variable domain of TCR clone 226818 (TRBV7-9, TRBJ2-2)
CASSLGHRTGELFF

SEQ ID NO: 453637 - protein, 17 aa, Homo sapiens
  CDR3 for alpha chain variable domain of TCR clone 226819 (TRAV3, TRAJ5)
CAVRDLDTGRRALTLVV

SEQ ID NO: 453638 - protein, 13 aa, Homo sapiens
  CDR3 for beta chain variable domain of TCR clone 226819 (TRBV12-4, TRBJ2-7)
CASSPTETYEQYF

SEQ ID NO: 453639 - protein, 15 aa, Homo sapiens
  CDR3 for alpha chain variable domain of TCR clone 226820 (TRAV3, TRAJ20)
CAVRGIKLSDYKLSF

SEQ ID NO: 453640 - protein, 12 aa, Homo sapiens
  CDR3 for beta chain variable domain of TCR clone 226820 (TRBV6-5, TRBJ2-7)
CASSDRQNEQYF

SEQ ID NO: 453641 - protein, 15 aa, Homo sapiens
  CDR3 for alpha chain variable domain of TCR clone 226821 (TRAV29/DV5, TRAJ44)
CAASAGTGTASKLTF

SEQ ID NO: 453642 - protein, 12 aa, Homo sapiens
  CDR3 for beta chain variable domain of TCR clone 226821 (TRBV11-2, TRBJ2-2)
CASSRGGGELFF

SEQ ID NO: 453643 - protein, 14 aa, Homo sapiens
  CDR3 for alpha chain variable domain of TCR clone 226822 (TRAV4, TRAJ30)
CLVGDMNRDDKIIF

SEQ ID NO: 453644 - protein, 15 aa, Homo sapiens
  CDR3 for beta chain variable domain of TCR clone 226822 (TRBV7-2, TRBJ2-7)
CASSLSSGRTFEQYF

SEQ ID NO: 453645 - protein, 15 aa, Homo sapiens
  CDR3 for alpha chain variable domain of TCR clone 226823 (TRAV38-1, TRAJ37)
CAFIHGSGNTGKLIF

SEQ ID NO: 453646 - protein, 14 aa, Homo sapiens
  CDR3 for beta chain variable domain of TCR clone 226823 (TRBV5-8, TRBJ1-6)
CASSPRTENSPLHF

SEQ ID NO: 453647 - protein, 18 aa, Homo sapiens
  CDR3 for alpha chain variable domain of TCR clone 226824 (TRAV21, TRAJ52)
CAVRPSPAGGTSYGKLTF

SEQ ID NO: 453648 - protein, 12 aa, Homo sapiens
  CDR3 for beta chain variable domain of TCR clone 226824 (TRBV5-7, TRBJ1-2)
CASSLVQNGYTF

SEQ ID NO: 453649 - protein, 16 aa, Homo sapiens
  CDR3 for alpha chain variable domain of TCR clone 226825 (TRAV12-2, TRAJ28)
CAVITDPGAGSYQLTF

SEQ ID NO: 453650 - protein, 14 aa, Homo sapiens
  CDR3 for beta chain variable domain of TCR clone 226825 (TRBV25-1, TRBJ1-1)
CASTHLGGNTEAFF

SEQ ID NO: 453651 - protein, 12 aa, Homo sapiens
  CDR3 for alpha chain variable domain of TCR clone 226826 (TRAV1-2, TRAJ26)
CGVRYYGQNFVF

SEQ ID NO: 453652 - protein, 15 aa, Homo sapiens
  CDR3 for beta chain variable domain of TCR clone 226826 (TRBV28, TRBJ2-1)
CASSIIAGGRSEQFF

SEQ ID NO: 453653 - protein, 12 aa, Homo sapiens
  CDR3 for alpha chain variable domain of TCR clone 226827 (TRAV3, TRAJ43)
CAVRDPNNDMRF

SEQ ID NO: 453654 - protein, 15 aa, Homo sapiens
  CDR3 for beta chain variable domain of TCR clone 226827 (TRBV6-3, TRBJ2-7)
CASSSPGTVFYEQYF

SEQ ID NO: 453655 - protein, 13 aa, Homo sapiens
  CDR3 for alpha chain variable domain of TCR clone 226828 (TRAV14/DV4, TRAJ23)
CAMREVKGGKLIF

SEQ ID NO: 453656 - protein, 17 aa, Homo sapiens
  CDR3 for beta chain variable domain of TCR clone 226828 (TRBV27, TRBJ2-6)
CASSLTGFASGANVLTF

SEQ ID NO: 453657 - protein, 21 aa, Homo sapiens
  CDR3 for alpha chain variable domain of TCR clone 226829 (TRAV3, TRAJ17)
CPCERLRFVPPRGAAGNKLTF

SEQ ID NO: 453658 - protein, 16 aa, Homo sapiens
  CDR3 for beta chain variable domain of TCR clone 226829 (TRBV19, TRBJ2-1)
CASSKAGPSSYNEQFF

SEQ ID NO: 453659 - protein, 10 aa, Homo sapiens
  CDR3 for alpha chain variable domain of TCR clone 226830 (TRAV26-2, TRAJ49)
CILLGNQFYF

SEQ ID NO: 453660 - protein, 15 aa, Homo sapiens
  CDR3 for beta chain variable domain of TCR clone 226830 (TRBV20-1, TRBJ2-7)
CSADPGPPTSSTSGR

SEQ ID NO: 453661 - protein, 15 aa, Homo sapiens
  CDR3 for alpha chain variable domain of TCR clone 226831 (TRAV4, TRAJ32)
CLVGGDGGATNKLIF

SEQ ID NO: 453662 - protein, 14 aa, Homo sapiens
  CDR3 for beta chain variable domain of TCR clone 226831 (TRBV6-1, TRBJ1-3)
CASVQGGGGNTIYF

SEQ ID NO: 453663 - protein, 12 aa, Homo sapiens
  CDR3 for alpha chain variable domain of TCR clone 226832 (TRAV41, TRAJ58)
CAVKTSGSRLTF

SEQ ID NO: 453664 - protein, 17 aa, Homo sapiens
  CDR3 for beta chain variable domain of TCR clone 226832 (TRBV20-1, TRBJ2-2)
CSASGSGQGGLTGELFF

SEQ ID NO: 453665 - protein, 14 aa, Homo sapiens
  CDR3 for alpha chain variable domain of TCR clone 226833 (TRAV23/DV6, TRAJ8)
CAASKNIGFQKLVF

SEQ ID NO: 453666 - protein, 16 aa, Homo sapiens
  CDR3 for beta chain variable domain of TCR clone 226833 (TRBV4-1, TRBJ2-6)
CASSQVGDPGANVLTF

SEQ ID NO: 453667 - protein, 16 aa, Homo sapiens
  CDR3 for alpha chain variable domain of TCR clone 226834 (TRAV30, TRAJ24)
CGTEIVDADSWGKFQF

SEQ ID NO: 453668 - protein, 20 aa, Homo sapiens
  CDR3 for beta chain variable domain of TCR clone 226834 (TRBV7-8, TRBJ2-2)
CASGHLFPGPTIHITGELFF

SEQ ID NO: 453669 - protein, 14 aa, Homo sapiens
  CDR3 for alpha chain variable domain of TCR clone 226835 (TRAV12-1, TRAJ17)
CVVNYKAAGNKLTF

SEQ ID NO: 453670 - protein, 14 aa, Homo sapiens
  CDR3 for beta chain variable domain of TCR clone 226835 (TRBV11-2, TRBJ1-5)
CASSLDRGGQPQHF

SEQ ID NO: 453671 - protein, 13 aa, Homo sapiens
  CDR3 for alpha chain variable domain of TCR clone 226836 (TRAV26-2, TRAJ45)
CILRRGGADGLTF

SEQ ID NO: 453672 - protein, 17 aa, Homo sapiens
  CDR3 for beta chain variable domain of TCR clone 226836 (TRBV20-1, TRBJ2-2)
CSASGSGQGGLTGELFF

SEQ ID NO: 453673 - protein, 17 aa, Homo sapiens
  CDR3 for alpha chain variable domain of TCR clone 226837 (TRAV13-1, TRAJ52)
CAASSGAGGTSYGKLTF

SEQ ID NO: 453674 - protein, 14 aa, Homo sapiens
  CDR3 for beta chain variable domain of TCR clone 226837 (TRBV2, TRBJ1-1)
CASSEQWGDTEAFF

SEQ ID NO: 453675 - protein, 16 aa, Homo sapiens
  CDR3 for alpha chain variable domain of TCR clone 226838 (TRAV12-2, TRAJ28)
CAVITDSGAVRYQLTF

SEQ ID NO: 453676 - protein, 14 aa, Homo sapiens
  CDR3 for beta chain variable domain of TCR clone 226838 (TRBV25-1, TRBJ1-1)
CASTHLGGNTEAFF

SEQ ID NO: 453677 - protein, 12 aa, Homo sapiens
  CDR3 for alpha chain variable domain of TCR clone 226839 (TRAV2, TRAJ9)
CAVGAGGLKTIF

SEQ ID NO: 453678 - protein, 14 aa, Homo sapiens
  CDR3 for beta chain variable domain of TCR clone 226839 (TRBV6-1, TRBJ1-3)
CASVQGGGGNTIYF

SEQ ID NO: 453679 - protein, 14 aa, Homo sapiens
  CDR3 for alpha chain variable domain of TCR clone 226840 (TRAV12-3, TRAJ10)
SHLPLTGGGNKLTF

SEQ ID NO: 453680 - protein, 15 aa, Homo sapiens
  CDR3 for beta chain variable domain of TCR clone 226840 (TRBV4-1, TRBJ1-4)
FASSDTGGTNEKLFF

SEQ ID NO: 453681 - protein, 14 aa, Homo sapiens
  CDR3 for alpha chain variable domain of TCR clone 226841 (TRAV8-2, TRAJ4)
CGVSPPGGYNKLIF

SEQ ID NO: 453682 - protein, 15 aa, Homo sapiens
  CDR3 for beta chain variable domain of TCR clone 226841 (TRBV4-1, TRBJ1-4)
CASSDTGGTNEKLFF

SEQ ID NO: 453683 - protein, 14 aa, Homo sapiens
  CDR3 for alpha chain variable domain of TCR clone 226842 (TRAV17, TRAJ32)
CATDPGGATNKLIF

SEQ ID NO: 453684 - protein, 16 aa, Homo sapiens
  CDR3 for beta chain variable domain of TCR clone 226842 (TRBV29-1, TRBJ2-7)
CSVEDAEDGTAYEQYF

SEQ ID NO: 453685 - protein, 16 aa, Homo sapiens
  CDR3 for alpha chain variable domain of TCR clone 226843 (TRAV23/DV6, TRAJ9)
CAASIGGNTGGFKPIF

SEQ ID NO: 453686 - protein, 13 aa, Homo sapiens
  CDR3 for beta chain variable domain of TCR clone 226843 (TRBV7-9, TRBJ1-2)
CASSLKQNYGYSF

SEQ ID NO: 453687 - protein, 13 aa, Homo sapiens
  CDR3 for alpha chain variable domain of TCR clone 226844 (TRAV2, TRAJ36)
CAVDQTGANNLCF

SEQ ID NO: 453688 - protein, 12 aa, Homo sapiens
  CDR3 for beta chain variable domain of TCR clone 226844 (TRBV19, TRBJ1-1)
CASMNRYTEAFF

SEQ ID NO: 453689 - protein, 13 aa, Homo sapiens
  CDR3 for alpha chain variable domain of TCR clone 226845 (TRAV1-2, TRAJ11)
CAVRREGYSTLTF

SEQ ID NO: 453690 - protein, 18 aa, Homo sapiens
  CDR3 for beta chain variable domain of TCR clone 226845 (TRBV7-9, TRBJ2-7)
CASSLTTSGSRTWYEQYF

SEQ ID NO: 453691 - protein, 14 aa, Homo sapiens
  CDR3 for alpha chain variable domain of TCR clone 226846 (TRAV12-3, TRAJ10)
SHQPLTGGGNKLTF

SEQ ID NO: 453692 - protein, 15 aa, Homo sapiens
  CDR3 for beta chain variable domain of TCR clone 226846 (TRBV6-3, TRBJ2-7)
CASSSPGTVFYEQYF

SEQ ID NO: 453693 - protein, 16 aa, Homo sapiens
  CDR3 for alpha chain variable domain of TCR clone 226847 (TRAV12-3, TRAJ47)
CAYRSAIMEYGNKLVF

SEQ ID NO: 453694 - protein, 14 aa, Homo sapiens
  CDR3 for beta chain variable domain of TCR clone 226847 (TRBV19, TRBJ2-7)
CASSIFAGTYEQYF

SEQ ID NO: 453695 - protein, 13 aa, Homo sapiens
  CDR3 for alpha chain variable domain of TCR clone 226848 (TRAV8-3, TRAJ28)
CAVGAVGSYQLTF

SEQ ID NO: 453696 - protein, 15 aa, Homo sapiens
  CDR3 for beta chain variable domain of TCR clone 226848 (TRBV10-2, TRBJ2-6)
CASSTQSPGANVLTF

SEQ ID NO: 453697 - protein, 15 aa, Homo sapiens
  CDR3 for alpha chain variable domain of TCR clone 226849 (TRAV22, TRAJ45)
CAAKYSGGGADGLTF

SEQ ID NO: 453698 - protein, 18 aa, Homo sapiens
  CDR3 for beta chain variable domain of TCR clone 226849 (TRBV4-1, TRBJ1-5)
CASSQDPRGQGLNQPQHF

SEQ ID NO: 453699 - protein, 14 aa, Homo sapiens
  CDR3 for alpha chain variable domain of TCR clone 226850 (TRAV2, TRAJ9)
CAVEDRSGGFKTIF

SEQ ID NO: 453700 - protein, 16 aa, Homo sapiens
  CDR3 for beta chain variable domain of TCR clone 226850 (TRBV11-2, TRBJ2-7)
CASSPTTGGVSYEQYF

SEQ ID NO: 453701 - protein, 14 aa, Homo sapiens
  CDR3 for alpha chain variable domain of TCR clone 226851 (TRAV35, TRAJ40)
CAGSTTSGTYKYIL

SEQ ID NO: 453702 - protein, 13 aa, Homo sapiens
  CDR3 for beta chain variable domain of TCR clone 226851 (TRBV20-1, TRBJ1-6)
CSAPLGVGSPLHF

SEQ ID NO: 453703 - protein, 14 aa, Homo sapiens
  CDR3 for alpha chain variable domain of TCR clone 226852 (TRAV16, TRAJ33)
CDLSAMDSNYQLIW

SEQ ID NO: 453704 - protein, 16 aa, Homo sapiens
  CDR3 for beta chain variable domain of TCR clone 226852 (TRBV12-4, TRBJ2-3)
CASSFPSNTNTDTQYF

SEQ ID NO: 453705 - protein, 15 aa, Homo sapiens
  CDR3 for alpha chain variable domain of TCR clone 226853 (TRAV29/DV5, TRAJ47)
CAARPTMEYENKLVF

SEQ ID NO: 453706 - protein, 13 aa, Homo sapiens
  CDR3 for beta chain variable domain of TCR clone 226853 (TRBV20-1, TRBJ1-1)
CSARAGGNTEAFF

SEQ ID NO: 453707 - protein, 16 aa, Homo sapiens
  CDR3 for alpha chain variable domain of TCR clone 226854 (TRAV14/DV4, TRAJ54)
CAMREGRIKGAQKLVF

SEQ ID NO: 453708 - protein, 18 aa, Homo sapiens
  CDR3 for beta chain variable domain of TCR clone 226854 (TRBV18, TRBJ1-3)
CASSPRGGAGPSGNTIYF

SEQ ID NO: 453709 - protein, 18 aa, Homo sapiens
  CDR3 for alpha chain variable domain of TCR clone 226855 (TRAV29/DV5, TRAJ52)
CAAGFRGAGGTSYGKLTF

SEQ ID NO: 453710 - protein, 15 aa, Homo sapiens
  CDR3 for beta chain variable domain of TCR clone 226855 (TRBV9, TRBJ2-3)
CASSTGGGEGDTQYF

SEQ ID NO: 453711 - protein, 14 aa, Homo sapiens
  CDR3 for alpha chain variable domain of TCR clone 226856 (TRAV1-2, TRAJ16)
CAVNRFSDGQKLLV

SEQ ID NO: 453712 - protein, 13 aa, Homo sapiens
  CDR3 for beta chain variable domain of TCR clone 226856 (TRBV10-3, TRBJ2-7)
CASKLAVNYEQYF

SEQ ID NO: 453713 - protein, 10 aa, Homo sapiens
  CDR3 for alpha chain variable domain of TCR clone 226857 (TRAV1-2, TRAJ31)
CVSEGARLMF

SEQ ID NO: 453714 - protein, 15 aa, Homo sapiens
  CDR3 for beta chain variable domain of TCR clone 226857 (TRBV11-3, TRBJ2-3)
CASLKDGREGDTQYF

SEQ ID NO: 453715 - protein, 13 aa, Homo sapiens
  CDR3 for alpha chain variable domain of TCR clone 226858 (TRAV29/DV5, TRAJ47)
CAASAEYGNKLVF

SEQ ID NO: 453716 - protein, 15 aa, Homo sapiens
  CDR3 for beta chain variable domain of TCR clone 226858 (TRBV5-1, TRBJ2-7)
CASSLMSSGSNEQYF

SEQ ID NO: 453717 - protein, 14 aa, Homo sapiens
  CDR3 for alpha chain variable domain of TCR clone 226859 (TRAV21, TRAJ35)
CAVMPIGFGNVLHC

SEQ ID NO: 453718 - protein, 13 aa, Homo sapiens
  CDR3 for beta chain variable domain of TCR clone 226859 (TRBV23-1, TRBJ1-4)
CASRGKFNDKLFF

SEQ ID NO: 453719 - protein, 16 aa, Homo sapiens
  CDR3 for alpha chain variable domain of TCR clone 226860 (TRAV17, TRAJ22)
CATDAISSGSARQLTF

SEQ ID NO: 453720 - protein, 15 aa, Homo sapiens
  CDR3 for beta chain variable domain of TCR clone 226860 (TRBV5-1, TRBJ2-1)
CASSPPRSPYNEQFF

SEQ ID NO: 453721 - protein, 13 aa, Homo sapiens
  CDR3 for alpha chain variable domain of TCR clone 226861 (TRAV1-2, TRAJ9)
CAALNTGGFKTIF

SEQ ID NO: 453722 - protein, 14 aa, Homo sapiens
  CDR3 for beta chain variable domain of TCR clone 226861 (TRBV15, TRBJ2-5)
CATSGDRGQETQYF

SEQ ID NO: 453723 - protein, 14 aa, Homo sapiens
  CDR3 for alpha chain variable domain of TCR clone 226862 (TRAV35, TRAJ33)
CAGSSQASNYQLIW

SEQ ID NO: 453724 - protein, 14 aa, Homo sapiens
  CDR3 for beta chain variable domain of TCR clone 226862 (TRBV20-1, TRBJ2-1)
CSAQIGGSANEQFF

SEQ ID NO: 453725 - protein, 16 aa, Homo sapiens
  CDR3 for alpha chain variable domain of TCR clone 226863 (TRAV4, TRAJ22)
CLVGDLYSGSARQLTF

SEQ ID NO: 453726 - protein, 15 aa, Homo sapiens
  CDR3 for beta chain variable domain of TCR clone 226863 (TRBV4-1, TRBJ2-3)
CSSSWVQGIPNTQYF

SEQ ID NO: 453727 - protein, 13 aa, Homo sapiens
  CDR3 for alpha chain variable domain of TCR clone 226864 (TRAV17, TRAJ15)
CATDARAGTALIF

SEQ ID NO: 453728 - protein, 10 aa, Homo sapiens
  CDR3 for beta chain variable domain of TCR clone 226864 (TRBV20-1, TRBJ2-7)
RVSGMDEQYF

SEQ ID NO: 453729 - protein, 11 aa, Homo sapiens
  CDR3 for alpha chain variable domain of TCR clone 226865 (TRAV2, TRAJ33)
CAGDSNYQLIW

SEQ ID NO: 453730 - protein, 14 aa, Homo sapiens
  CDR3 for beta chain variable domain of TCR clone 226865 (TRBV11-2, TRBJ2-3)
CASSRLARTDTQYF

SEQ ID NO: 453731 - protein, 18 aa, Homo sapiens
  CDR3 for alpha chain variable domain of TCR clone 226866 (TRAV21, TRAJ52)
CAVRPSPAGGTSYGKLTF

SEQ ID NO: 453732 - protein, 13 aa, Homo sapiens
  CDR3 for beta chain variable domain of TCR clone 226866 (TRBV13, TRBJ1-2)
CASSLKQNYGYTF

SEQ ID NO: 453733 - protein, 15 aa, Homo sapiens
  CDR3 for alpha chain variable domain of TCR clone 226867 (TRAV12-2, TRAJ53)
CAMNGGGGSNYKLTF

SEQ ID NO: 453734 - protein, 17 aa, Homo sapiens
  CDR3 for beta chain variable domain of TCR clone 226867 (TRBV7-3, TRBJ2-3)
CASSLMKRMRGADTQYF

SEQ ID NO: 453735 - protein, 14 aa, Homo sapiens
  CDR3 for alpha chain variable domain of TCR clone 226868 (TRAV17, TRAJ57)
CATDPQGGSEKLVF

SEQ ID NO: 453736 - protein, 16 aa, Homo sapiens
  CDR3 for beta chain variable domain of TCR clone 226868 (TRBV9, TRBJ2-2)
CASSAMGKGNTGELFF

SEQ ID NO: 453737 - protein, 16 aa, Homo sapiens
  CDR3 for alpha chain variable domain of TCR clone 226869 (TRAV17, TRAJ28)
CATDAYSGAGSYQLTF

SEQ ID NO: 453738 - protein, 13 aa, Homo sapiens
  CDR3 for beta chain variable domain of TCR clone 226869 (TRBV7-9, TRBJ1-2)
CASRTGPNYGYTF

SEQ ID NO: 453739 - protein, 13 aa, Homo sapiens
  CDR3 for alpha chain variable domain of TCR clone 226870 (TRAV21, TRAJ10)
SAVPTGGGNKLTF

SEQ ID NO: 453740 - protein, 22 aa, Homo sapiens
  CDR3 for beta chain variable domain of TCR clone 226870 (TRBV19, TRBJ2-1)
CASSVRDRVTGTSGRIYNEQFF

SEQ ID NO: 453741 - protein, 13 aa, Homo sapiens
  CDR3 for alpha chain variable domain of TCR clone 226871 (TRAV3, TRAJ20)
CCEAFCNDYKLSF

SEQ ID NO: 453742 - protein, 15 aa, Homo sapiens
  CDR3 for beta chain variable domain of TCR clone 226871 (TRBV19, TRBJ2-6)
CASVRRDAGANVLTF

SEQ ID NO: 453743 - protein, 11 aa, Homo sapiens
  CDR3 for alpha chain variable domain of TCR clone 226872 (TRAV2, TRAJ33)
CAVDSNYQLIW

SEQ ID NO: 453744 - protein, 12 aa, Homo sapiens
  CDR3 for beta chain variable domain of TCR clone 226872 (TRBV2, TRBJ2-7)
CASKRGSYEQYF

SEQ ID NO: 453745 - protein, 17 aa, Homo sapiens
  CDR3 for alpha chain variable domain of TCR clone 226873 (TRAV3, TRAJ6)
CAVRDGPRAGGSYIPTF

SEQ ID NO: 453746 - protein, 16 aa, Homo sapiens
  CDR3 for beta chain variable domain of TCR clone 226873 (TRBV11-2, TRBJ2-1)
CASSLLLLSSYNEQFF

SEQ ID NO: 453747 - protein, 14 aa, Homo sapiens
  CDR3 for alpha chain variable domain of TCR clone 226874 (TRAV12-3, TRAJ7)
CAMSEIGGNNRLAF

SEQ ID NO: 453748 - protein, 15 aa, Homo sapiens
  CDR3 for beta chain variable domain of TCR clone 226874 (TRBV20-1, TRBJ2-7)
CSARDRVSGMDEQYF

SEQ ID NO: 453749 - protein, 12 aa, Homo sapiens
  CDR3 for alpha chain variable domain of TCR clone 226875 (TRAV30, TRAJ15)
FGTNQAGTALIF

SEQ ID NO: 453750 - protein, 13 aa, Homo sapiens
  CDR3 for beta chain variable domain of TCR clone 226875 (TRBV7-9, TRBJ1-2)
CASSLKQNYGYTF

SEQ ID NO: 453751 - protein, 13 aa, Homo sapiens
  CDR3 for alpha chain variable domain of TCR clone 226876 (TRAV27, TRAJ6)
CAGGTRGSYIPTF

SEQ ID NO: 453752 - protein, 14 aa, Homo sapiens
  CDR3 for beta chain variable domain of TCR clone 226876 (TRBV19, TRBJ2-7)
CASNFRDTFTGMYF

SEQ ID NO: 453753 - protein, 15 aa, Homo sapiens
  CDR3 for alpha chain variable domain of TCR clone 226877 (TRAV21, TRAJ13)
CAVRPTSGGYQQVTF

SEQ ID NO: 453754 - protein, 18 aa, Homo sapiens
  CDR3 for beta chain variable domain of TCR clone 226877 (TRBV11-3, TRBJ2-1)
CASSSCPGGRDSYNEQFF

SEQ ID NO: 453755 - protein, 17 aa, Homo sapiens
  CDR3 for alpha chain variable domain of TCR clone 226878 (TRAV26-1, TRAJ22)
CIVRVPSHSVSARQLTF

SEQ ID NO: 453756 - protein, 16 aa, Homo sapiens
  CDR3 for beta chain variable domain of TCR clone 226878 (TRBV28, TRBJ2-1)
CASRRSGRVVGNEQFF

SEQ ID NO: 453757 - protein, 13 aa, Homo sapiens
  CDR3 for alpha chain variable domain of TCR clone 226879 (TRAV12-1, TRAJ40)
CVVKEAGTYKYIF

SEQ ID NO: 453758 - protein, 14 aa, Homo sapiens
  CDR3 for beta chain variable domain of TCR clone 226879 (TRBV6-1, TRBJ1-3)
CASVQGGGGNTIYF

SEQ ID NO: 453759 - protein, 16 aa, Homo sapiens
  CDR3 for alpha chain variable domain of TCR clone 226880 (TRAV3, TRAJ37)
CAVRPHGSGNTGNLIF

SEQ ID NO: 453760 - protein, 12 aa, Homo sapiens
  CDR3 for beta chain variable domain of TCR clone 226880 (TRBV29-1, TRBJ2-3)
CSVTGGADTQYF

SEQ ID NO: 453761 - protein, 16 aa, Homo sapiens
  CDR3 for alpha chain variable domain of TCR clone 226881 (TRAV1-2, TRAJ10)
CAVRDQGGGGGNKRTF

SEQ ID NO: 453762 - protein, 13 aa, Homo sapiens
  CDR3 for beta chain variable domain of TCR clone 226881 (TRBV29-1, TRBJ1-1)
CSVGDSRNTEAFF

SEQ ID NO: 453763 - protein, 14 aa, Homo sapiens
  CDR3 for alpha chain variable domain of TCR clone 226882 (TRAV8-6, TRAJ12)
CSVKAADSSYKLIF

SEQ ID NO: 453764 - protein, 12 aa, Homo sapiens
  CDR3 for beta chain variable domain of TCR clone 226882 (TRBV11-2, TRBJ2-1)
CASSPGNNEQFF

SEQ ID NO: 453765 - protein, 12 aa, Homo sapiens
  CDR3 for alpha chain variable domain of TCR clone 226883 (TRAV27, TRAJ35)
CAGADFGNVLHC

SEQ ID NO: 453766 - protein, 13 aa, Homo sapiens
  CDR3 for beta chain variable domain of TCR clone 226883 (TRBV10-2, TRBJ2-7)
CASGASGGYEQYF

SEQ ID NO: 453767 - protein, 16 aa, Homo sapiens
  CDR3 for alpha chain variable domain of TCR clone 226884 (TRAV17, TRAJ53)
CATDALSGGSNYKLTF

SEQ ID NO: 453768 - protein, 11 aa, Homo sapiens
  CDR3 for beta chain variable domain of TCR clone 226884 (TRBV12-4, TRBJ2-3)
CASTATDTQYF

SEQ ID NO: 453769 - protein, 15 aa, Homo sapiens
  CDR3 for alpha chain variable domain of TCR clone 226885 (TRAV2, TRAJ9)
CAVEDRGTGGFKTIF

SEQ ID NO: 453770 - protein, 15 aa, Homo sapiens
  CDR3 for beta chain variable domain of TCR clone 226885 (TRBV16, TRBJ1-5)
CASSQSGTADQPQHF

SEQ ID NO: 453771 - protein, 16 aa, Homo sapiens
  CDR3 for alpha chain variable domain of TCR clone 226886 (TRAV8-3, TRAJ8)
CAVPRDGNKGFQKLVF

SEQ ID NO: 453772 - protein, 14 aa, Homo sapiens
  CDR3 for beta chain variable domain of TCR clone 226886 (TRBV28, TRBJ1-1)
CASSESGRGTESFF

SEQ ID NO: 453773 - protein, 12 aa, Homo sapiens
  CDR3 for alpha chain variable domain of TCR clone 226887 (TRAV8-3, TRAJ20)
CAAGANDYELSF

SEQ ID NO: 453774 - protein, 16 aa, Homo sapiens
  CDR3 for beta chain variable domain of TCR clone 226887 (TRBV19, TRBJ2-2)
CASRSPGTGATGELFF

SEQ ID NO: 453775 - protein, 15 aa, Homo sapiens
  CDR3 for alpha chain variable domain of TCR clone 226888 (TRAV17, TRAJ4)
CAIGTWSGGYNKLIF

SEQ ID NO: 453776 - protein, 15 aa, Homo sapiens
  CDR3 for beta chain variable domain of TCR clone 226888 (TRBV20-1, TRBJ2-7)
CSARDRVSGMDEQYF

SEQ ID NO: 453777 - protein, 14 aa, Homo sapiens
  CDR3 for alpha chain variable domain of TCR clone 226889 (TRAV12-2, TRAJ45)
FAVYSGGGADGLTF

SEQ ID NO: 453778 - protein, 14 aa, Homo sapiens
  CDR3 for beta chain variable domain of TCR clone 226889 (TRBV6-5, TRBJ1-2)
CASTRGGGSDGYTF

SEQ ID NO: 453779 - protein, 19 aa, Homo sapiens
  CDR3 for alpha chain variable domain of TCR clone 226890 (TRAV2, TRAJ20)
ILQVREADAAVYRDCKISF

SEQ ID NO: 453780 - protein, 13 aa, Homo sapiens
  CDR3 for beta chain variable domain of TCR clone 226890 (TRBV15, TRBJ1-6)
CATSGGLNSPLHF

SEQ ID NO: 453781 - protein, 14 aa, Homo sapiens
  CDR3 for alpha chain variable domain of TCR clone 226891 (TRAV16, TRAJ4)
CALHFSGCYNKLIF

SEQ ID NO: 453782 - protein, 15 aa, Homo sapiens
  CDR3 for beta chain variable domain of TCR clone 226891 (TRBV7-2, TRBJ2-7)
CASSTRLAGVDEQYF

SEQ ID NO: 453783 - protein, 12 aa, Homo sapiens
  CDR3 for alpha chain variable domain of TCR clone 226892 (TRAV16, TRAJ10)
RSRTGGGNKLTF

SEQ ID NO: 453784 - protein, 14 aa, Homo sapiens
  CDR3 for beta chain variable domain of TCR clone 226892 (TRBV19, TRBJ2-1)
CASPTFVLSGEQFF

SEQ ID NO: 453785 - protein, 13 aa, Homo sapiens
  CDR3 for alpha chain variable domain of TCR clone 226893 (TRAV1-2, TRAJ9)
CAVLNTGGFKTIF

SEQ ID NO: 453786 - protein, 15 aa, Homo sapiens
  CDR3 for beta chain variable domain of TCR clone 226893 (TRBV20-1, TRBJ2-3)
CSASPPQVSTDTQYF

SEQ ID NO: 453787 - protein, 15 aa, Homo sapiens
  CDR3 for alpha chain variable domain of TCR clone 226894 (TRAV25, TRAJ53)
CAATGGGGSNYKLTF

SEQ ID NO: 453788 - protein, 12 aa, Homo sapiens
  CDR3 for beta chain variable domain of TCR clone 226894 (TRBV7-9, TRBJ2-7)
CASSLEGYEQYF

SEQ ID NO: 453789 - protein, 20 aa, Homo sapiens
  CDR3 for alpha chain variable domain of TCR clone 226895 (TRAV12-3, TRAJ41)
SLFIRDSQPSDSATPEALNF

SEQ ID NO: 453790 - protein, 13 aa, Homo sapiens
  CDR3 for beta chain variable domain of TCR clone 226895 (TRBV10-3, TRBJ2-7)
CASKLAVNYEQYF

SEQ ID NO: 453791 - protein, 13 aa, Homo sapiens
  CDR3 for alpha chain variable domain of TCR clone 226896 (TRAV3, TRAJ33)
CAVRDRSNYQLIW

SEQ ID NO: 453792 - protein, 15 aa, Homo sapiens
  CDR3 for beta chain variable domain of TCR clone 226896 (TRBV9, TRBJ1-6)
CASSVAGTGDSPLHF

SEQ ID NO: 453793 - protein, 13 aa, Homo sapiens
  CDR3 for alpha chain variable domain of TCR clone 226897 (TRAV21, TRAJ27)
CAARPGMQANQPL

SEQ ID NO: 453794 - protein, 15 aa, Homo sapiens
  CDR3 for beta chain variable domain of TCR clone 226897 (TRBV11-3, TRBJ2-7)
CASSPGPASSYEQYF

SEQ ID NO: 453795 - protein, 16 aa, Homo sapiens
  CDR3 for alpha chain variable domain of TCR clone 226898 (TRAV30, TRAJ28)
CGPPPYSGAGSYQLTF

SEQ ID NO: 453796 - protein, 13 aa, Homo sapiens
  CDR3 for beta chain variable domain of TCR clone 226898 (TRBV5-1, TRBJ1-5)
CASSLAQDQPQHF

SEQ ID NO: 453797 - protein, 13 aa, Homo sapiens
  CDR3 for alpha chain variable domain of TCR clone 226899 (TRAV1-2, TRAJ35)
CAASRGFGNVLHC

SEQ ID NO: 453798 - protein, 15 aa, Homo sapiens
  CDR3 for beta chain variable domain of TCR clone 226899 (TRBV6-1, TRBJ2-3)
CASSERGGITDTQYF

SEQ ID NO: 453799 - protein, 16 aa, Homo sapiens
  CDR3 for alpha chain variable domain of TCR clone 226900 (TRAV4, TRAJ22)
CLVGYLYSGSARRLTF

SEQ ID NO: 453800 - protein, 16 aa, Homo sapiens
  CDR3 for beta chain variable domain of TCR clone 226900 (TRBV6-1, TRBJ2-5)
CASSETLDRGAETQYF

SEQ ID NO: 453801 - protein, 14 aa, Homo sapiens
  CDR3 for alpha chain variable domain of TCR clone 226901 (TRAV21, TRAJ38)
CAVANAGNNRKLIW

SEQ ID NO: 453802 - protein, 18 aa, Homo sapiens
  CDR3 for beta chain variable domain of TCR clone 226901 (TRBV25-1, TRBJ1-2)
CASSGLQNGQGLIFGYTF

SEQ ID NO: 453803 - protein, 13 aa, Homo sapiens
  CDR3 for alpha chain variable domain of TCR clone 226902 (TRAV12-1, TRAJ16)
CVVNGPDGQKLLF

SEQ ID NO: 453804 - protein, 12 aa, Homo sapiens
  CDR3 for beta chain variable domain of TCR clone 226902 (TRBV14, TRBJ2-7)
CASSLYKDEQYF

SEQ ID NO: 453805 - protein, 16 aa, Homo sapiens
  CDR3 for alpha chain variable domain of TCR clone 226903 (TRAV14/DV4, TRAJ21)
CAMREGPENNFNKFYF

SEQ ID NO: 453806 - protein, 12 aa, Homo sapiens
  CDR3 for beta chain variable domain of TCR clone 226903 (TRBV29-1, TRBJ2-2)
CSVDKYTGEQFF

SEQ ID NO: 453807 - protein, 14 aa, Homo sapiens
  CDR3 for alpha chain variable domain of TCR clone 226904 (TRAV1-2, TRAJ16)
CAVNRFSDGQKLLF

SEQ ID NO: 453808 - protein, 14 aa, Homo sapiens
  CDR3 for beta chain variable domain of TCR clone 226904 (TRBV7-2, TRBJ2-7)
CASSPKTSFCEQYF

SEQ ID NO: 453809 - protein, 14 aa, Homo sapiens
  CDR3 for alpha chain variable domain of TCR clone 226905 (TRAV9-2, TRAJ39)
CALYIYNAGNMLIF

SEQ ID NO: 453810 - protein, 14 aa, Homo sapiens
  CDR3 for beta chain variable domain of TCR clone 226905 (TRBV11-2, TRBJ2-1)
CSSSPSTRYNEQFL

SEQ ID NO: 453811 - protein, 12 aa, Homo sapiens
  CDR3 for alpha chain variable domain of TCR clone 226906 (TRAV35, TRAJ28)
GVEGAGSYQLTF

SEQ ID NO: 453812 - protein, 15 aa, Homo sapiens
  CDR3 for beta chain variable domain of TCR clone 226906 (TRBV5-1, TRBJ2-7)
CASSLGDFTTYEQYF

SEQ ID NO: 453813 - protein, 10 aa, Homo sapiens
  CDR3 for alpha chain variable domain of TCR clone 226907 (TRAV12-2, TRAJ52)
RSTSYGKLTF

SEQ ID NO: 453814 - protein, 14 aa, Homo sapiens
  CDR3 for beta chain variable domain of TCR clone 226907 (TRBV2, TRBJ1-2)
CASNPDRDNYGYTF

SEQ ID NO: 453815 - protein, 18 aa, Homo sapiens
  CDR3 for alpha chain variable domain of TCR clone 226908 (TRAV21, TRAJ52)
CAVRPSPAGGTSYGKLTF

SEQ ID NO: 453816 - protein, 13 aa, Homo sapiens
  CDR3 for beta chain variable domain of TCR clone 226908 (TRBV6-5, TRBJ2-5)
CASSPQGGETQYF

SEQ ID NO: 453817 - protein, 12 aa, Homo sapiens
  CDR3 for alpha chain variable domain of TCR clone 226909 (TRAV16, TRAJ49)
CALNEGGNQFYF

SEQ ID NO: 453818 - protein, 14 aa, Homo sapiens
  CDR3 for beta chain variable domain of TCR clone 226909 (TRBV7-9, TRBJ2-1)
CASRLTGLRNEQFF

SEQ ID NO: 453819 - protein, 14 aa, Homo sapiens
  CDR3 for alpha chain variable domain of TCR clone 226910 (TRAV4, TRAJ10)
CLAGDTGGGNKLIF

SEQ ID NO: 453820 - protein, 13 aa, Homo sapiens
  CDR3 for beta chain variable domain of TCR clone 226910 (TRBV10-2, TRBJ2-5)
CASSVGPQETQYF

SEQ ID NO: 453821 - protein, 10 aa, Homo sapiens
  CDR3 for alpha chain variable domain of TCR clone 226911 (TRAV12-2, TRAJ43)
CAGDDMGFGA

SEQ ID NO: 453822 - protein, 16 aa, Homo sapiens
  CDR3 for beta chain variable domain of TCR clone 226911 (TRBV2, TRBJ2-4)
CASSEAPGGEQNIQYF

SEQ ID NO: 453823 - protein, 20 aa, Homo sapiens
  CDR3 for alpha chain variable domain of TCR clone 226912 (TRAV12-1, TRAJ42)
SSVIQPPTSVKGGSQGNHIF

SEQ ID NO: 453824 - protein, 18 aa, Homo sapiens
  CDR3 for beta chain variable domain of TCR clone 226912 (TRBV11-2, TRBJ2-3)
CASSLGGASGGAPNTQYF

SEQ ID NO: 453825 - protein, 14 aa, Homo sapiens
  CDR3 for alpha chain variable domain of TCR clone 226913 (TRAV8-6, TRAJ12)
CAVKAADSSYKLIF

SEQ ID NO: 453826 - protein, 15 aa, Homo sapiens
  CDR3 for beta chain variable domain of TCR clone 226913 (TRBV19, TRBJ1-1)
CASTSGQIQNTEAFF

SEQ ID NO: 453827 - protein, 14 aa, Homo sapiens
  CDR3 for alpha chain variable domain of TCR clone 226914 (TRAV35, TRAJ10)
CAGILTGGGNKLTF

SEQ ID NO: 453828 - protein, 16 aa, Homo sapiens
  CDR3 for beta chain variable domain of TCR clone 226914 (TRBV12-5, TRBJ2-5)
CASGPRTSGNRETQYF

SEQ ID NO: 453829 - protein, 14 aa, Homo sapiens
  CDR3 for alpha chain variable domain of TCR clone 226915 (TRAV26-1, TRAJ40)
CCVLLHSRNYKYIF

SEQ ID NO: 453830 - protein, 15 aa, Homo sapiens
  CDR3 for beta chain variable domain of TCR clone 226915 (TRBV19, TRBJ2-1)
CASSSPGVPLDEQFF

SEQ ID NO: 453831 - protein, 14 aa, Homo sapiens
  CDR3 for alpha chain variable domain of TCR clone 226916 (TRAV16, TRAJ33)
CALSAMDSNYQLIW

SEQ ID NO: 453832 - protein, 17 aa, Homo sapiens
  CDR3 for beta chain variable domain of TCR clone 226916 (TRBV20-1, TRBJ2-1)
CSASSSGLAGSYNEQFF

SEQ ID NO: 453833 - protein, 16 aa, Homo sapiens
  CDR3 for alpha chain variable domain of TCR clone 226917 (TRAV38-1, TRAJ37)
CAFKGDGSSNTGKLIF

SEQ ID NO: 453834 - protein, 13 aa, Homo sapiens
  CDR3 for beta chain variable domain of TCR clone 226917 (TRBV12-4, TRBJ2-5)
CASSVFRRETQHF

SEQ ID NO: 453835 - protein, 12 aa, Homo sapiens
  CDR3 for alpha chain variable domain of TCR clone 226918 (TRAV3, TRAJ31)
CAAQRANARLMF

SEQ ID NO: 453836 - protein, 16 aa, Homo sapiens
  CDR3 for beta chain variable domain of TCR clone 226918 (TRBV4-2, TRBJ1-1)
CASSPSPGRAATEAFF

SEQ ID NO: 453837 - protein, 13 aa, Homo sapiens
  CDR3 for alpha chain variable domain of TCR clone 226919 (TRAV17, TRAJ9)
CATAITGGFKTIF

SEQ ID NO: 453838 - protein, 15 aa, Homo sapiens
  CDR3 for beta chain variable domain of TCR clone 226919 (TRBV4-2, TRBJ1-1)
CASSQQGAGDTEAFF

SEQ ID NO: 453839 - protein, 15 aa, Homo sapiens
  CDR3 for alpha chain variable domain of TCR clone 226920 (TRAV3, TRAJ5)
CAVRDLNTGRRALTF

SEQ ID NO: 453840 - protein, 13 aa, Homo sapiens
  CDR3 for beta chain variable domain of TCR clone 226920 (TRBV6-1, TRBJ1-3)
CASSGERGNTIYF

SEQ ID NO: 453841 - protein, 13 aa, Homo sapiens
  CDR3 for alpha chain variable domain of TCR clone 226921 (TRAV21, TRAJ20)
CAVGLWVDYKLSF

SEQ ID NO: 453842 - protein, 17 aa, Homo sapiens
  CDR3 for beta chain variable domain of TCR clone 226921 (TRBV18, TRBJ2-6)
CASSPDRGVGGANVLTF

SEQ ID NO: 453843 - protein, 13 aa, Homo sapiens
  CDR3 for alpha chain variable domain of TCR clone 226922 (TRAV13-1, TRAJ40)
CAASTSGTYKYIF

SEQ ID NO: 453844 - protein, 15 aa, Homo sapiens
  CDR3 for beta chain variable domain of TCR clone 226922 (TRBV28, TRBJ1-5)
CASSRTGGYVQPQHF

SEQ ID NO: 453845 - protein, 16 aa, Homo sapiens
  CDR3 for alpha chain variable domain of TCR clone 226923 (TRAV27, TRAJ13)
CAGAKSDSGGYQKVTF

SEQ ID NO: 453846 - protein, 15 aa, Homo sapiens
  CDR3 for beta chain variable domain of TCR clone 226923 (TRBV29-1, TRBJ2-1)
CSVGRHALFSNEQFF

SEQ ID NO: 453847 - protein, 21 aa, Homo sapiens
  CDR3 for alpha chain variable domain of TCR clone 226924 (TRAV8-2, TRAJ47)
HLTKPSAHMSDAAEYSRELVF

SEQ ID NO: 453848 - protein, 14 aa, Homo sapiens
  CDR3 for beta chain variable domain of TCR clone 226924 (TRBV5-7, TRBJ1-1)
CASSLAGDWTEAFF

SEQ ID NO: 453849 - protein, 12 aa, Homo sapiens
  CDR3 for alpha chain variable domain of TCR clone 226925 (TRAV13-1, TRAJ27)
CAAHTNAGKSTF

SEQ ID NO: 453850 - protein, 14 aa, Homo sapiens
  CDR3 for beta chain variable domain of TCR clone 226925 (TRBV19, TRBJ2-2)
CARSGQGIAGELFF

SEQ ID NO: 453851 - protein, 11 aa, Homo sapiens
  CDR3 for alpha chain variable domain of TCR clone 226926 (TRAV17, TRAJ9)
CATTGGFNTIF

SEQ ID NO: 453852 - protein, 13 aa, Homo sapiens
  CDR3 for beta chain variable domain of TCR clone 226926 (TRBV6-5, TRBJ1-1)
VTSGTPPVGEAFF

SEQ ID NO: 453853 - protein, 11 aa, Homo sapiens
  CDR3 for alpha chain variable domain of TCR clone 226927 (TRAV17, TRAJ9)
CATTGGFKTIF

SEQ ID NO: 453854 - protein, 14 aa, Homo sapiens
  CDR3 for beta chain variable domain of TCR clone 226927 (TRBV20-1, TRBJ2-4)
CSASGRVGENIQYF

SEQ ID NO: 453855 - protein, 16 aa, Homo sapiens
  CDR3 for alpha chain variable domain of TCR clone 226928 (TRAV3, TRAJ10)
CAVRDMNAGGGNKLTF

SEQ ID NO: 453856 - protein, 13 aa, Homo sapiens
  CDR3 for beta chain variable domain of TCR clone 226928 (TRBV12-4, TRBJ1-5)
CASSPDRAQPQHF

SEQ ID NO: 453857 - protein, 18 aa, Homo sapiens
  CDR3 for alpha chain variable domain of TCR clone 226929 (TRAV21, TRAJ52)
CAVRPSPAGGTSYGKLTF

SEQ ID NO: 453858 - protein, 13 aa, Homo sapiens
  CDR3 for beta chain variable domain of TCR clone 226929 (TRBV15, TRBJ2-5)
CATSQIGEETQYF

SEQ ID NO: 453859 - protein, 13 aa, Homo sapiens
  CDR3 for alpha chain variable domain of TCR clone 226930 (TRAV12-1, TRAJ9)
CVVLNTGGFKTIF

SEQ ID NO: 453860 - protein, 13 aa, Homo sapiens
  CDR3 for beta chain variable domain of TCR clone 226930 (TRBV7-3, TRBJ1-1)
CASSQDWGAEAFF

SEQ ID NO: 453861 - protein, 14 aa, Homo sapiens
  CDR3 for alpha chain variable domain of TCR clone 226931 (TRAV1-2, TRAJ16)
CAVNRFSDGQKLLF

SEQ ID NO: 453862 - protein, 13 aa, Homo sapiens
  CDR3 for beta chain variable domain of TCR clone 226931 (TRBV4-1, TRBJ2-1)
SASSQAGGDEQFF

SEQ ID NO: 453863 - protein, 16 aa, Homo sapiens
  CDR3 for alpha chain variable domain of TCR clone 226932 (TRAV3, TRAJ10)
CAVRDTRAGGGNKLTF

SEQ ID NO: 453864 - protein, 16 aa, Homo sapiens
  CDR3 for beta chain variable domain of TCR clone 226932 (TRBV12-5, TRBJ2-5)
CASGPRTSGNQETQYF

SEQ ID NO: 453865 - protein, 15 aa, Homo sapiens
  CDR3 for alpha chain variable domain of TCR clone 226933 (TRAV26-2, TRAJ13)
CILRDLPGGYQKVTF

SEQ ID NO: 453866 - protein, 11 aa, Homo sapiens
  CDR3 for beta chain variable domain of TCR clone 226933 (TRBV7-9, TRBJ2-3)
CASSYTDTQYF

SEQ ID NO: 453867 - protein, 14 aa, Homo sapiens
  CDR3 for alpha chain variable domain of TCR clone 226934 (TRAV35, TRAJ22)
CAGLRPGSATQLTF

SEQ ID NO: 453868 - protein, 15 aa, Homo sapiens
  CDR3 for beta chain variable domain of TCR clone 226934 (TRBV12-4, TRBJ2-5)
CASSPPTGLQETQYF

SEQ ID NO: 453869 - protein, 11 aa, Homo sapiens
  CDR3 for alpha chain variable domain of TCR clone 226935 (TRAV2, TRAJ33)
CAVESNYQLIW

SEQ ID NO: 453870 - protein, 16 aa, Homo sapiens
  CDR3 for beta chain variable domain of TCR clone 226935 (TRBV2, TRBJ2-5)
CASSARGLGGRETQYF

SEQ ID NO: 453871 - protein, 14 aa, Homo sapiens
  CDR3 for alpha chain variable domain of TCR clone 226936 (TRAV13-1, TRAJ28)
CAASPGAGSYQLTF

SEQ ID NO: 453872 - protein, 17 aa, Homo sapiens
  CDR3 for beta chain variable domain of TCR clone 226936 (TRBV5-1, TRBJ2-5)
CASSPVALGQNQETQYF

SEQ ID NO: 453873 - protein, 10 aa, Homo sapiens
  CDR3 for alpha chain variable domain of TCR clone 226937 (TRAV1-2, TRAJ20)
CACNDYKLSF

SEQ ID NO: 453874 - protein, 16 aa, Homo sapiens
  CDR3 for beta chain variable domain of TCR clone 226937 (TRBV6-6, TRBJ2-1)
CASSYSFSGSYNEQFF

SEQ ID NO: 453875 - protein, 15 aa, Homo sapiens
  CDR3 for alpha chain variable domain of TCR clone 226938 (TRAV17, TRAJ57)
CATGRSQGGSEKLVF

SEQ ID NO: 453876 - protein, 15 aa, Homo sapiens
  CDR3 for beta chain variable domain of TCR clone 226938 (TRBV6-3, TRBJ2-7)
CASSSPGTVFYEQYF

SEQ ID NO: 453877 - protein, 14 aa, Homo sapiens
  CDR3 for alpha chain variable domain of TCR clone 226939 (TRAV1-2, TRAJ16)
CAVNRFSDGQKLPF

SEQ ID NO: 453878 - protein, 17 aa, Homo sapiens
  CDR3 for beta chain variable domain of TCR clone 226939 (TRBV28, TRBJ2-5)
CASSTPEGDALQETQYF

SEQ ID NO: 453879 - protein, 14 aa, Homo sapiens
  CDR3 for alpha chain variable domain of TCR clone 226940 (TRAV8-4, TRAJ15)
CAVTIREAGTALIF

SEQ ID NO: 453880 - protein, 13 aa, Homo sapiens
  CDR3 for beta chain variable domain of TCR clone 226940 (TRBV10-3, TRBJ2-1)
CAISEKGGYEQFF

SEQ ID NO: 453881 - protein, 12 aa, Homo sapiens
  CDR3 for alpha chain variable domain of TCR clone 226941 (TRAV29/DV5, TRAJ49)
CAASAIGNQFYF

SEQ ID NO: 453882 - protein, 17 aa, Homo sapiens
  CDR3 for beta chain variable domain of TCR clone 226941 (TRBV5-1, TRBJ2-2)
CASSRTSGRFSNGELFF

SEQ ID NO: 453883 - protein, 14 aa, Homo sapiens
  CDR3 for alpha chain variable domain of TCR clone 226942 (TRAV1-2, TRAJ6)
CAVRSSGGSYIPTF

SEQ ID NO: 453884 - protein, 15 aa, Homo sapiens
  CDR3 for beta chain variable domain of TCR clone 226942 (TRBV2, TRBJ2-7)
CASSENRQGKGEQYF

SEQ ID NO: 453885 - protein, 12 aa, Homo sapiens
  CDR3 for alpha chain variable domain of TCR clone 226943 (TRAV3, TRAJ27)
CAVRDGAGKSTF

SEQ ID NO: 453886 - protein, 13 aa, Homo sapiens
  CDR3 for beta chain variable domain of TCR clone 226943 (TRBV10-3, TRBJ1-2)
CAINAHLNYGYTF

SEQ ID NO: 453887 - protein, 14 aa, Homo sapiens
  CDR3 for alpha chain variable domain of TCR clone 226944 (TRAV38-1, TRAJ43)
CAFMKQNNNNDMRF

SEQ ID NO: 453888 - protein, 15 aa, Homo sapiens
  CDR3 for beta chain variable domain of TCR clone 226944 (TRBV9, TRBJ1-6)
CASSVAGTGDSPLHF

SEQ ID NO: 453889 - protein, 14 aa, Homo sapiens
  CDR3 for alpha chain variable domain of TCR clone 226945 (TRAV26-1, TRAJ38)
CIADNAGHNRKLIW

SEQ ID NO: 453890 - protein, 15 aa, Homo sapiens
  CDR3 for beta chain variable domain of TCR clone 226945 (TRBV27, TRBJ2-1)
CASSNGGGSSNEQFF

SEQ ID NO: 453891 - protein, 15 aa, Homo sapiens
  CDR3 for alpha chain variable domain of TCR clone 226946 (TRAV3, TRAJ20)
CAVRDIKLSDYKLIF

SEQ ID NO: 453892 - protein, 13 aa, Homo sapiens
  CDR3 for beta chain variable domain of TCR clone 226946 (TRBV20-1, TRBJ1-1)
CSARVGGNTEAFF

SEQ ID NO: 453893 - protein, 17 aa, Homo sapiens
  CDR3 for alpha chain variable domain of TCR clone 226947 (TRAV4, TRAJ13)
CLVGVQGSSGGYQKVTF

SEQ ID NO: 453894 - protein, 13 aa, Homo sapiens
  CDR3 for beta chain variable domain of TCR clone 226947 (TRBV7-2, TRBJ2-7)
CASSSPSGSEQYF

SEQ ID NO: 453895 - protein, 12 aa, Homo sapiens
  CDR3 for alpha chain variable domain of TCR clone 226948 (TRAV13-1, TRAJ21)
CAAKEGFNKFYF

SEQ ID NO: 453896 - protein, 18 aa, Homo sapiens
  CDR3 for beta chain variable domain of TCR clone 226948 (TRBV27, TRBJ2-1)
CASGNRAVGVGSKNEQFF

SEQ ID NO: 453897 - protein, 16 aa, Homo sapiens
  CDR3 for alpha chain variable domain of TCR clone 226949 (TRAV30, TRAJ57)
CGTGWAPQGGSEKLVF

SEQ ID NO: 453898 - protein, 14 aa, Homo sapiens
  CDR3 for beta chain variable domain of TCR clone 226949 (TRBV18, TRBJ1-1)
CASSPGFRGVEAFF

SEQ ID NO: 453899 - protein, 13 aa, Homo sapiens
  CDR3 for alpha chain variable domain of TCR clone 226950 (TRAV3, TRAJ41)
CAVSSNSGYALNF

SEQ ID NO: 453900 - protein, 15 aa, Homo sapiens
  CDR3 for beta chain variable domain of TCR clone 226950 (TRBV28, TRBJ2-5)
CASSPPWSYQETQYF

SEQ ID NO: 453901 - protein, 11 aa, Homo sapiens
  CDR3 for alpha chain variable domain of TCR clone 226951 (TRAV1-1, TRAJ23)
CAVRQGGKLII

SEQ ID NO: 453902 - protein, 20 aa, Homo sapiens
  CDR3 for beta chain variable domain of TCR clone 226951 (TRBV7-8, TRBJ2-2)
CASSHLFPGPTIHITGELFF

SEQ ID NO: 453903 - protein, 11 aa, Homo sapiens
  CDR3 for alpha chain variable domain of TCR clone 226952 (TRAV2, TRAJ13)
CASGGYQKVTF

SEQ ID NO: 453904 - protein, 17 aa, Homo sapiens
  CDR3 for beta chain variable domain of TCR clone 226952 (TRBV5-8, TRBJ2-3)
CASSLLTSGAPTDTQYF

SEQ ID NO: 453905 - protein, 14 aa, Homo sapiens
  CDR3 for alpha chain variable domain of TCR clone 226953 (TRAV26-1, TRAJ38)
CIADNAGNNRKLIW

SEQ ID NO: 453906 - protein, 15 aa, Homo sapiens
  CDR3 for beta chain variable domain of TCR clone 226953 (TRBV7-6, TRBJ1-4)
CASSLGAGAGENLFF

SEQ ID NO: 453907 - protein, 15 aa, Homo sapiens
  CDR3 for alpha chain variable domain of TCR clone 226954 (TRAV35, TRAJ58)
CAGRRQETSVSRLTF

SEQ ID NO: 453908 - protein, 11 aa, Homo sapiens
  CDR3 for beta chain variable domain of TCR clone 226954 (TRBV11-2, TRBJ1-1)
CASSINTEAFF

SEQ ID NO: 453909 - protein, 14 aa, Homo sapiens
  CDR3 for alpha chain variable domain of TCR clone 226955 (TRAV13-2, TRAJ17)
CAENSKAAGNKLTF

SEQ ID NO: 453910 - protein, 14 aa, Homo sapiens
  CDR3 for beta chain variable domain of TCR clone 226955 (TRBV7-2, TRBJ2-7)
CASRSQGAAYEQYF

SEQ ID NO: 453911 - protein, 13 aa, Homo sapiens
  CDR3 for alpha chain variable domain of TCR clone 226956 (TRAV8-3, TRAJ28)
CAVGAVGSYQLTF

SEQ ID NO: 453912 - protein, 13 aa, Homo sapiens
  CDR3 for beta chain variable domain of TCR clone 226956 (TRBV7-6, TRBJ1-2)
CASSLVADYGYTF

SEQ ID NO: 453913 - protein, 15 aa, Homo sapiens
  CDR3 for alpha chain variable domain of TCR clone 226957 (TRAV3, TRAJ32)
CAVSSYGGATNKLIF

SEQ ID NO: 453914 - protein, 13 aa, Homo sapiens
  CDR3 for beta chain variable domain of TCR clone 226957 (TRBV20-1, TRBJ2-7)
CSARRSTNYEQYF

SEQ ID NO: 453915 - protein, 17 aa, Homo sapiens
  CDR3 for alpha chain variable domain of TCR clone 226958 (TRAV20, TRAJ42)
CAVQAWGYGGSQGNLIF

SEQ ID NO: 453916 - protein, 16 aa, Homo sapiens
  CDR3 for beta chain variable domain of TCR clone 226958 (TRBV29-1, TRBJ2-5)
CGVGGLAGDYQETQYF

SEQ ID NO: 453917 - protein, 15 aa, Homo sapiens
  CDR3 for alpha chain variable domain of TCR clone 226959 (TRAV14/DV4, TRAJ33)
CAMREGRDSNYQLIW

SEQ ID NO: 453918 - protein, 14 aa, Homo sapiens
  CDR3 for beta chain variable domain of TCR clone 226959 (TRBV12-5, TRBJ2-5)
CASGSRTHQETQYF

SEQ ID NO: 453919 - protein, 11 aa, Homo sapiens
  CDR3 for alpha chain variable domain of TCR clone 226960 (TRAV12-2, TRAJ31)
CAVTRWARIMF

SEQ ID NO: 453920 - protein, 15 aa, Homo sapiens
  CDR3 for beta chain variable domain of TCR clone 226960 (TRBV9, TRBJ1-6)
CASSVAGTGDSPLHF

SEQ ID NO: 453921 - protein, 13 aa, Homo sapiens
  CDR3 for alpha chain variable domain of TCR clone 226961 (TRAV27, TRAJ49)
CAPRPYTGIQFYF

SEQ ID NO: 453922 - protein, 16 aa, Homo sapiens
  CDR3 for beta chain variable domain of TCR clone 226961 (TRBV4-1, TRBJ1-2)
CASSQDAGQVLYGYTF

SEQ ID NO: 453923 - protein, 12 aa, Homo sapiens
  CDR3 for alpha chain variable domain of TCR clone 226962 (TRAV21, TRAJ41)
CAVREFRICTQL

SEQ ID NO: 453924 - protein, 15 aa, Homo sapiens
  CDR3 for beta chain variable domain of TCR clone 226962 (TRBV18, TRBJ1-5)
CASSPQARSNQPQHF

SEQ ID NO: 453925 - protein, 11 aa, Homo sapiens
  CDR3 for alpha chain variable domain of TCR clone 226963 (TRAV3, TRAJ21)
CAVGNFNKFYF

SEQ ID NO: 453926 - protein, 16 aa, Homo sapiens
  CDR3 for beta chain variable domain of TCR clone 226963 (TRBV19, TRBJ2-1)
CASSKAGPGSYSEQFF

SEQ ID NO: 453927 - protein, 16 aa, Homo sapiens
  CDR3 for alpha chain variable domain of TCR clone 226964 (TRAV1-1, TRAJ22)
CAVNDALSGSARQLTF

SEQ ID NO: 453928 - protein, 14 aa, Homo sapiens
  CDR3 for beta chain variable domain of TCR clone 226964 (TRBV7-2, TRBJ2-7)
CACRSQGAAYEQYF

SEQ ID NO: 453929 - protein, 15 aa, Homo sapiens
  CDR3 for alpha chain variable domain of TCR clone 226965 (TRAV27, TRAJ38)
CAARRSAGNNRKLIW

SEQ ID NO: 453930 - protein, 11 aa, Homo sapiens
  CDR3 for beta chain variable domain of TCR clone 226965 (TRBV12-4, TRBJ2-2)
CASSSAGELFF

SEQ ID NO: 453931 - protein, 15 aa, Homo sapiens
  CDR3 for alpha chain variable domain of TCR clone 226966 (TRAV3, TRAJ22)
CAVRDRGGSARQLTF

SEQ ID NO: 453932 - protein, 13 aa, Homo sapiens
  CDR3 for beta chain variable domain of TCR clone 226966 (TRBV28, TRBJ1-1)
CASSKQGWTEAFF

SEQ ID NO: 453933 - protein, 14 aa, Homo sapiens
  CDR3 for alpha chain variable domain of TCR clone 226967 (TRAV12-2, TRAJ40)
CAVKIPSGTYKYIF

SEQ ID NO: 453934 - protein, 16 aa, Homo sapiens
  CDR3 for beta chain variable domain of TCR clone 226967 (TRBV15, TRBJ2-6)
CATSVNGGFLANVLTF

SEQ ID NO: 453935 - protein, 13 aa, Homo sapiens
  CDR3 for alpha chain variable domain of TCR clone 226968 (TRAV3, TRAJ20)
CAVRSLNDYKLSF

SEQ ID NO: 453936 - protein, 14 aa, Homo sapiens
  CDR3 for beta chain variable domain of TCR clone 226968 (TRBV19, TRBJ2-1)
CASSPGLAPNEQFF

SEQ ID NO: 453937 - protein, 13 aa, Homo sapiens
  CDR3 for alpha chain variable domain of TCR clone 226969 (TRAV26-1, TRAJ22)
CIVKAGSARQLTF

SEQ ID NO: 453938 - protein, 17 aa, Homo sapiens
  CDR3 for beta chain variable domain of TCR clone 226969 (TRBV11-2, TRBJ2-1)
CASSLYPPGVEYNEQFF

SEQ ID NO: 453939 - protein, 17 aa, Homo sapiens
  CDR3 for alpha chain variable domain of TCR clone 226970 (TRAV3, TRAJ12)
CAVRDGGRMDSSYKLIF

SEQ ID NO: 453940 - protein, 15 aa, Homo sapiens
  CDR3 for beta chain variable domain of TCR clone 226970 (TRBV10-2, TRBJ2-7)
CASWNRGQATYEQYF

SEQ ID NO: 453941 - protein, 15 aa, Homo sapiens
  CDR3 for alpha chain variable domain of TCR clone 226971 (TRAV12-1, TRAJ45)
CVVLSGGGGADGLTF

SEQ ID NO: 453942 - protein, 13 aa, Homo sapiens
  CDR3 for beta chain variable domain of TCR clone 226971 (TRBV12-4, TRBJ2-5)
CASSLGGSRTQYF

SEQ ID NO: 453943 - protein, 12 aa, Homo sapiens
  CDR3 for alpha chain variable domain of TCR clone 226972 (TRAV21, TRAJ33)
CAVQDSDYQLIW

SEQ ID NO: 453944 - protein, 14 aa, Homo sapiens
  CDR3 for beta chain variable domain of TCR clone 226972 (TRBV28, TRBJ2-1)
CANSPGEGGNEQFF

SEQ ID NO: 453945 - protein, 16 aa, Homo sapiens
  CDR3 for alpha chain variable domain of TCR clone 226973 (TRAV3, TRAJ37)
CAVRPHGSGNTGKLSF

SEQ ID NO: 453946 - protein, 13 aa, Homo sapiens
  CDR3 for beta chain variable domain of TCR clone 226973 (TRBV2, TRBJ1-5)
CASGTGGYQPQHF

SEQ ID NO: 453947 - protein, 16 aa, Homo sapiens
  CDR3 for alpha chain variable domain of TCR clone 226974 (TRAV3, TRAJ37)
CAVRPHGCGNTGKLIF

SEQ ID NO: 453948 - protein, 16 aa, Homo sapiens
  CDR3 for beta chain variable domain of TCR clone 226974 (TRBV9, TRBJ1-2)
CASSVEEKVSPYGYTF

SEQ ID NO: 453949 - protein, 15 aa, Homo sapiens
  CDR3 for alpha chain variable domain of TCR clone 226975 (TRAV3, TRAJ5)
CAVRDRKTGRRALTF

SEQ ID NO: 453950 - protein, 17 aa, Homo sapiens
  CDR3 for beta chain variable domain of TCR clone 226975 (TRBV7-9, TRBJ2-2)
CASSLGVAGMNTGELFF

SEQ ID NO: 453951 - protein, 11 aa, Homo sapiens
  CDR3 for alpha chain variable domain of TCR clone 226976 (TRAV1-2, TRAJ10)
CFTGGGNKLAF

SEQ ID NO: 453952 - protein, 13 aa, Homo sapiens
  CDR3 for beta chain variable domain of TCR clone 226976 (TRBV5-1, TRBJ1-5)
CASSLGGGQPQHF

SEQ ID NO: 453953 - protein, 14 aa, Homo sapiens
  CDR3 for alpha chain variable domain of TCR clone 226977 (TRAV1-2, TRAJ8)
CAVREDTGFQKLVF

SEQ ID NO: 453954 - protein, 17 aa, Homo sapiens
  CDR3 for beta chain variable domain of TCR clone 226977 (TRBV20-1, TRBJ2-7)
CSARDRVSGMTSSTSGR

SEQ ID NO: 453955 - protein, 16 aa, Homo sapiens
  CDR3 for alpha chain variable domain of TCR clone 226978 (TRAV30, TRAJ24)
CGTEIVGSDSWGKFQF

SEQ ID NO: 453956 - protein, 15 aa, Homo sapiens
  CDR3 for beta chain variable domain of TCR clone 226978 (TRBV7-9, TRBJ1-4)
CASSARTGGNEKLFF

SEQ ID NO: 453957 - protein, 16 aa, Homo sapiens
  CDR3 for alpha chain variable domain of TCR clone 226979 (TRAV21, TRAJ37)
CAVRTAGSSATGKLIF

SEQ ID NO: 453958 - protein, 13 aa, Homo sapiens
  CDR3 for beta chain variable domain of TCR clone 226979 (TRBV7-9, TRBJ2-5)
CASLPSGRETQYF

SEQ ID NO: 453959 - protein, 12 aa, Homo sapiens
  CDR3 for alpha chain variable domain of TCR clone 226980 (TRAV12-1, TRAJ31)
CVVNRANARVMF

SEQ ID NO: 453960 - protein, 15 aa, Homo sapiens
  CDR3 for beta chain variable domain of TCR clone 226980 (TRBV19, TRBJ2-1)
CASNTDGDPNNEQFF

SEQ ID NO: 453961 - protein, 13 aa, Homo sapiens
  CDR3 for alpha chain variable domain of TCR clone 226981 (TRAV2, TRAJ40)
RAVVTSGTYKYIF

SEQ ID NO: 453962 - protein, 14 aa, Homo sapiens
  CDR3 for beta chain variable domain of TCR clone 226981 (TRBV19, TRBJ2-1)
CASPTCVLSGEQFF

SEQ ID NO: 453963 - protein, 15 aa, Homo sapiens
  CDR3 for alpha chain variable domain of TCR clone 226982 (TRAV8-1, TRAJ23)
CAVNSHYNQGGKLIF

SEQ ID NO: 453964 - protein, 15 aa, Homo sapiens
  CDR3 for beta chain variable domain of TCR clone 226982 (TRBV11-2, TRBJ1-6)
CASTLRGTGNSPLHS

SEQ ID NO: 453965 - protein, 13 aa, Homo sapiens
  CDR3 for alpha chain variable domain of TCR clone 226983 (TRAV13-2, TRAJ48)
CAEMDFGNEKLTF

SEQ ID NO: 453966 - protein, 16 aa, Homo sapiens
  CDR3 for beta chain variable domain of TCR clone 226983 (TRBV4-1, TRBJ2-7)
CASSQEWTSGPLEQYF

SEQ ID NO: 453967 - protein, 16 aa, Homo sapiens
  CDR3 for alpha chain variable domain of TCR clone 226984 (TRAV12-3, TRAJ53)
CAMSPGSGGSNYILTF

SEQ ID NO: 453968 - protein, 15 aa, Homo sapiens
  CDR3 for beta chain variable domain of TCR clone 226984 (TRBV7-3, TRBJ2-1)
CASSLDGNSYNEQFF

SEQ ID NO: 453969 - protein, 14 aa, Homo sapiens
  CDR3 for alpha chain variable domain of TCR clone 226985 (TRAV26-1, TRAJ39)
CIVRGSRAGNRPTF

SEQ ID NO: 453970 - protein, 14 aa, Homo sapiens
  CDR3 for beta chain variable domain of TCR clone 226985 (TRBV25-1, TRBJ1-1)
CASTHLGGNTEAFF

SEQ ID NO: 453971 - protein, 14 aa, Homo sapiens
  CDR3 for alpha chain variable domain of TCR clone 226986 (TRAV12-3, TRAJ21)
CAATDLYNFNKFYF

SEQ ID NO: 453972 - protein, 14 aa, Homo sapiens
  CDR3 for beta chain variable domain of TCR clone 226986 (TRBV7-3, TRBJ1-1)
CASSLKGGNTEAFF

SEQ ID NO: 453973 - protein, 13 aa, Homo sapiens
  CDR3 for alpha chain variable domain of TCR clone 226987 (TRAV2, TRAJ24)
CSVTTDSGGKLQF

SEQ ID NO: 453974 - protein, 14 aa, Homo sapiens
  CDR3 for beta chain variable domain of TCR clone 226987 (TRBV13, TRBJ2-5)
CASSLGRGQETQYF

SEQ ID NO: 453975 - protein, 10 aa, Homo sapiens
  CDR3 for alpha chain variable domain of TCR clone 226988 (TRAV12-1, TRAJ23)
CVVSGGKLIF

SEQ ID NO: 453976 - protein, 13 aa, Homo sapiens
  CDR3 for beta chain variable domain of TCR clone 226988 (TRBV7-9, TRBJ1-2)
CASSLKQNYGYTF

SEQ ID NO: 453977 - protein, 13 aa, Homo sapiens
  CDR3 for alpha chain variable domain of TCR clone 226989 (TRAV29/DV5, TRAJ31)
CAASRNNNARLMY

SEQ ID NO: 453978 - protein, 13 aa, Homo sapiens
  CDR3 for beta chain variable domain of TCR clone 226989 (TRBV10-3, TRBJ2-7)
CASKLAVNYEQYF

SEQ ID NO: 453979 - protein, 13 aa, Homo sapiens
  CDR3 for alpha chain variable domain of TCR clone 226990 (TRAV12-1, TRAJ33)
CGDAPDSTYQLIW

SEQ ID NO: 453980 - protein, 15 aa, Homo sapiens
  CDR3 for beta chain variable domain of TCR clone 226990 (TRBV27, TRBJ2-1)
CASSNGGGSSNEQFF

SEQ ID NO: 453981 - protein, 15 aa, Homo sapiens
  CDR3 for alpha chain variable domain of TCR clone 226991 (TRAV3, TRAJ17)
CAVRDTGAAGNKLTF

SEQ ID NO: 453982 - protein, 14 aa, Homo sapiens
  CDR3 for beta chain variable domain of TCR clone 226991 (TRBV6-3, TRBJ1-1)
CASSNLLPGAESFF

SEQ ID NO: 453983 - protein, 15 aa, Homo sapiens
  CDR3 for alpha chain variable domain of TCR clone 226992 (TRAV17, TRAJ16)
CATALRFSDGRKLLF

SEQ ID NO: 453984 - protein, 12 aa, Homo sapiens
  CDR3 for beta chain variable domain of TCR clone 226992 (TRBV5-1, TRBJ1-1)
CASSLTGAEAFF

SEQ ID NO: 453985 - protein, 18 aa, Homo sapiens
  CDR3 for alpha chain variable domain of TCR clone 226993 (TRAV21, TRAJ52)
CAVRPSPAGGTSYGKLTF

SEQ ID NO: 453986 - protein, 15 aa, Homo sapiens
  CDR3 for beta chain variable domain of TCR clone 226993 (TRBV27, TRBJ1-5)
CASSLGKGFDQPQHF

SEQ ID NO: 453987 - protein, 13 aa, Homo sapiens
  CDR3 for alpha chain variable domain of TCR clone 226994 (TRAV20, TRAJ20)
CAVRWVRDYKLSF

SEQ ID NO: 453988 - protein, 12 aa, Homo sapiens
  CDR3 for beta chain variable domain of TCR clone 226994 (TRBV14, TRBJ2-5)
CASSQLKETQYF

SEQ ID NO: 453989 - protein, 13 aa, Homo sapiens
  CDR3 for alpha chain variable domain of TCR clone 226995 (TRAV13-2, TRAJ13)
CAASSGGYQKVTF

SEQ ID NO: 453990 - protein, 15 aa, Homo sapiens
  CDR3 for beta chain variable domain of TCR clone 226995 (TRBV6-5, TRBJ1-1)
CTSTLRLGSGTEAFF

SEQ ID NO: 453991 - protein, 14 aa, Homo sapiens
  CDR3 for alpha chain variable domain of TCR clone 226996 (TRAV20, TRAJ44)
CAVQDTGTASKLTY

SEQ ID NO: 453992 - protein, 13 aa, Homo sapiens
  CDR3 for beta chain variable domain of TCR clone 226996 (TRBV29-1, TRBJ1-3)
CSAGTGRGNTIYF

SEQ ID NO: 453993 - protein, 13 aa, Homo sapiens
  CDR3 for alpha chain variable domain of TCR clone 226997 (TRAV27, TRAJ45)
CRSSGGGADGLTF

SEQ ID NO: 453994 - protein, 17 aa, Homo sapiens
  CDR3 for beta chain variable domain of TCR clone 226997 (TRBV10-3, TRBJ2-4)
CTSVPSVNKGSKNTQYF

SEQ ID NO: 453995 - protein, 14 aa, Homo sapiens
  CDR3 for alpha chain variable domain of TCR clone 226998 (TRAV23/DV6, TRAJ13)
CAASETGVYQKVTF

SEQ ID NO: 453996 - protein, 13 aa, Homo sapiens
  CDR3 for beta chain variable domain of TCR clone 226998 (TRBV29-1, TRBJ2-1)
CSVEGGRVNEQFF

SEQ ID NO: 453997 - protein, 17 aa, Homo sapiens
  CDR3 for alpha chain variable domain of TCR clone 226999 (TRAV36/DV7, TRAJ52)
CAVAQRAGGTSYGKLTF

SEQ ID NO: 453998 - protein, 12 aa, Homo sapiens
  CDR3 for beta chain variable domain of TCR clone 226999 (TRBV2, TRBJ2-1)
CAYGPPGNEQFF

SEQ ID NO: 453999 - protein, 18 aa, Homo sapiens
  CDR3 for alpha chain variable domain of TCR clone 227000 (TRAV3, TRAJ32)
CAVRDIRGYGGPTNKLIF

SEQ ID NO: 454000 - protein, 15 aa, Homo sapiens
  CDR3 for beta chain variable domain of TCR clone 227000 (TRBV12-4, TRBJ2-2)
CASSLGVRHTGELFF

SEQ ID NO: 454001 - protein, 14 aa, Homo sapiens
  CDR3 for alpha chain variable domain of TCR clone 227001 (TRAV1-2, TRAJ16)
CAVNRFSDGQKLLF

SEQ ID NO: 454002 - protein, 15 aa, Homo sapiens
  CDR3 for beta chain variable domain of TCR clone 227001 (TRBV19, TRBJ1-5)
CASSIVWADNQHQHF

SEQ ID NO: 454003 - protein, 15 aa, Homo sapiens
  CDR3 for alpha chain variable domain of TCR clone 227002 (TRAV17, TRAJ35)
CATAFVIGIGNVLHC

SEQ ID NO: 454004 - protein, 14 aa, Homo sapiens
  CDR3 for beta chain variable domain of TCR clone 227002 (TRBV12-5, TRBJ2-5)
CASGSRTHQETQYF

SEQ ID NO: 454005 - protein, 14 aa, Homo sapiens
  CDR3 for alpha chain variable domain of TCR clone 227003 (TRAV8-3, TRAJ44)
CAVGLTGTASKLTF

SEQ ID NO: 454006 - protein, 12 aa, Homo sapiens
  CDR3 for beta chain variable domain of TCR clone 227003 (TRBV7-3, TRBJ2-1)
CASSLDFNEQFF

SEQ ID NO: 454007 - protein, 10 aa, Homo sapiens
  CDR3 for alpha chain variable domain of TCR clone 227004 (TRAV23/DV6, TRAJ57)
CAASSTLSQG

SEQ ID NO: 454008 - protein, 16 aa, Homo sapiens
  CDR3 for beta chain variable domain of TCR clone 227004 (TRBV7-9, TRBJ1-2)
CASSLGFSLGEDGYTF

SEQ ID NO: 454009 - protein, 13 aa, Homo sapiens
  CDR3 for alpha chain variable domain of TCR clone 227005 (TRAV27, TRAJ41)
CAGEGNSGYALNF

SEQ ID NO: 454010 - protein, 15 aa, Homo sapiens
  CDR3 for beta chain variable domain of TCR clone 227005 (TRBV6-6, TRBJ1-5)
CASSSIQGTNQPQHF

SEQ ID NO: 454011 - protein, 11 aa, Homo sapiens
  CDR3 for alpha chain variable domain of TCR clone 227006 (TRAV3, TRAJ21)
CAVGNFNKFYF

SEQ ID NO: 454012 - protein, 13 aa, Homo sapiens
  CDR3 for beta chain variable domain of TCR clone 227006 (TRBV7-9, TRBJ1-2)
CASSLNQNYGYTF

SEQ ID NO: 454013 - protein, 16 aa, Homo sapiens
  CDR3 for alpha chain variable domain of TCR clone 227007 (TRAV12-3, TRAJ52)
CAVSNAGGTSYGKLTF

SEQ ID NO: 454014 - protein, 16 aa, Homo sapiens
  CDR3 for beta chain variable domain of TCR clone 227007 (TRBV6-6, TRBJ2-1)
CASSYSFSGSYNEQFC

SEQ ID NO: 454015 - protein, 12 aa, Homo sapiens
  CDR3 for alpha chain variable domain of TCR clone 227008 (TRAV20, TRAJ39)
CAVGNAGNMLTF

SEQ ID NO: 454016 - protein, 17 aa, Homo sapiens
  CDR3 for beta chain variable domain of TCR clone 227008 (TRBV4-1, TRBJ2-3)
CASSQGYLSGGTDTQYF

SEQ ID NO: 454017 - protein, 19 aa, Homo sapiens
  CDR3 for alpha chain variable domain of TCR clone 227009 (TRAV13-1, TRAJ52)
CAASPYQNAGGTSYGKLTF

SEQ ID NO: 454018 - protein, 17 aa, Homo sapiens
  CDR3 for beta chain variable domain of TCR clone 227009 (TRBV11-2, TRBJ2-1)
CASSLYPPGVEYNEQFF

SEQ ID NO: 454019 - protein, 14 aa, Homo sapiens
  CDR3 for alpha chain variable domain of TCR clone 227010 (TRAV1-2, TRAJ16)
CAVNRFSDGQKLLF

SEQ ID NO: 454020 - protein, 15 aa, Homo sapiens
  CDR3 for beta chain variable domain of TCR clone 227010 (TRBV5-8, TRBJ1-1)
CASSFSGTALKGAFF

SEQ ID NO: 454021 - protein, 13 aa, Homo sapiens
  CDR3 for alpha chain variable domain of TCR clone 227011 (TRAV2, TRAJ15)
CAVASQAGTALIF

SEQ ID NO: 454022 - protein, 12 aa, Homo sapiens
  CDR3 for beta chain variable domain of TCR clone 227011 (TRBV11-2, TRBJ2-2)
CASILPTGELFF

SEQ ID NO: 454023 - protein, 23 aa, Homo sapiens
  CDR3 for alpha chain variable domain of TCR clone 227012 (TRAV26-1, TRAJ38)
CIADNAGNNHIQNPDPAVYHLRD

SEQ ID NO: 454024 - protein, 13 aa, Homo sapiens
  CDR3 for beta chain variable domain of TCR clone 227012 (TRBV20-1, TRBJ1-1)
CSARGGGNTEASF

SEQ ID NO: 454025 - protein, 14 aa, Homo sapiens
  CDR3 for alpha chain variable domain of TCR clone 227013 (TRAV26-1, TRAJ38)
CIADNAGNNRTLLW

SEQ ID NO: 454026 - protein, 13 aa, Homo sapiens
  CDR3 for beta chain variable domain of TCR clone 227013 (TRBV20-1, TRBJ1-1)
CSARGGGNTEAFF

SEQ ID NO: 454027 - protein, 14 aa, Homo sapiens
  CDR3 for alpha chain variable domain of TCR clone 227014 (TRAV13-1, TRAJ40)
CAASMTSGTYKYVF

SEQ ID NO: 454028 - protein, 14 aa, Homo sapiens
  CDR3 for beta chain variable domain of TCR clone 227014 (TRBV7-9, TRBJ2-1)
CASSPRDSLYEQFF

SEQ ID NO: 454029 - protein, 15 aa, Homo sapiens
  CDR3 for alpha chain variable domain of TCR clone 227015 (TRAV13-1, TRAJ42)
CSASIAVGSQGSLIF

SEQ ID NO: 454030 - protein, 15 aa, Homo sapiens
  CDR3 for beta chain variable domain of TCR clone 227015 (TRBV19, TRBJ2-1)
CASSIVRGEGREQFF

SEQ ID NO: 454031 - protein, 15 aa, Homo sapiens
  CDR3 for alpha chain variable domain of TCR clone 227016 (TRAV8-6, TRAJ26)
CAVSDQSPVGQNFVF

SEQ ID NO: 454032 - protein, 13 aa, Homo sapiens
  CDR3 for beta chain variable domain of TCR clone 227016 (TRBV27, TRBJ2-7)
CASSLRHRYEQYF

SEQ ID NO: 454033 - protein, 18 aa, Homo sapiens
  CDR3 for alpha chain variable domain of TCR clone 227017 (TRAV12-3, TRAJ52)
CAMSVGGAGGTSYGKLTF

SEQ ID NO: 454034 - protein, 15 aa, Homo sapiens
  CDR3 for beta chain variable domain of TCR clone 227017 (TRBV15, TRBJ1-5)
CATSRDPVSNQPQHF

SEQ ID NO: 454035 - protein, 11 aa, Homo sapiens
  CDR3 for alpha chain variable domain of TCR clone 227018 (TRAV2, TRAJ13)
CASGGYQKVTF

SEQ ID NO: 454036 - protein, 16 aa, Homo sapiens
  CDR3 for beta chain variable domain of TCR clone 227018 (TRBV7-3, TRBJ2-1)
CASSFTGRRSYNEQFF

SEQ ID NO: 454037 - protein, 12 aa, Homo sapiens
  CDR3 for alpha chain variable domain of TCR clone 227019 (TRAV1-1, TRAJ39)
CAVPVVGSMPTF

SEQ ID NO: 454038 - protein, 13 aa, Homo sapiens
  CDR3 for beta chain variable domain of TCR clone 227019 (TRBV4-1, TRBJ1-1)
CASSRKMNTEAFF

SEQ ID NO: 454039 - protein, 11 aa, Homo sapiens
  CDR3 for alpha chain variable domain of TCR clone 227020 (TRAV21, TRAJ11)
CAVNGYSTLTF

SEQ ID NO: 454040 - protein, 18 aa, Homo sapiens
  CDR3 for beta chain variable domain of TCR clone 227020 (TRBV5-5, TRBJ1-5)
CASSLRQVKGSSNQPQHF

SEQ ID NO: 454041 - protein, 13 aa, Homo sapiens
  CDR3 for alpha chain variable domain of TCR clone 227021 (TRAV12-3, TRAJ31)
CAMSANNNARLMF

SEQ ID NO: 454042 - protein, 16 aa, Homo sapiens
  CDR3 for beta chain variable domain of TCR clone 227021 (TRBV7-9, TRBJ1-2)
CASSLGFSSGEDGYTF

SEQ ID NO: 454043 - protein, 17 aa, Homo sapiens
  CDR3 for alpha chain variable domain of TCR clone 227022 (TRAV12-1, TRAJ32)
CVVNMQGYDGATNKLIF

SEQ ID NO: 454044 - protein, 13 aa, Homo sapiens
  CDR3 for beta chain variable domain of TCR clone 227022 (TRBV6-6, TRBJ2-1)
CASSLHQGDEQFF

SEQ ID NO: 454045 - protein, 10 aa, Homo sapiens
  CDR3 for alpha chain variable domain of TCR clone 227023 (TRAV13-1, TRAJ15)
INQAGTALIF

SEQ ID NO: 454046 - protein, 14 aa, Homo sapiens
  CDR3 for beta chain variable domain of TCR clone 227023 (TRBV7-9, TRBJ2-1)
CASSDNSGYNEHFF

SEQ ID NO: 454047 - protein, 13 aa, Homo sapiens
  CDR3 for alpha chain variable domain of TCR clone 227024 (TRAV38-2/DV8, TRAJ34)
CAYRTWNTDKLIF

SEQ ID NO: 454048 - protein, 13 aa, Homo sapiens
  CDR3 for beta chain variable domain of TCR clone 227024 (TRBV7-3, TRBJ1-1)
CASSQDWGAEAFF

SEQ ID NO: 454049 - protein, 15 aa, Homo sapiens
  CDR3 for alpha chain variable domain of TCR clone 227025 (TRAV38-1, TRAJ57)
CAFTDSQGGSEKLVF

SEQ ID NO: 454050 - protein, 16 aa, Homo sapiens
  CDR3 for beta chain variable domain of TCR clone 227025 (TRBV10-3, TRBJ2-1)
CAIRGGGRGDYNEQFF

SEQ ID NO: 454051 - protein, 13 aa, Homo sapiens
  CDR3 for alpha chain variable domain of TCR clone 227026 (TRAV25, TRAJ26)
CAGMDNYGQNFVF

SEQ ID NO: 454052 - protein, 15 aa, Homo sapiens
  CDR3 for beta chain variable domain of TCR clone 227026 (TRBV18, TRBJ1-2)
CASSPSNTPNYGYTF

SEQ ID NO: 454053 - protein, 15 aa, Homo sapiens
  CDR3 for alpha chain variable domain of TCR clone 227027 (TRAV14/DV4, TRAJ12)
CAMREGRDSSDRLIF

SEQ ID NO: 454054 - protein, 15 aa, Homo sapiens
  CDR3 for beta chain variable domain of TCR clone 227027 (TRBV4-1, TRBJ1-4)
RASSDTGGTNEKLFF

SEQ ID NO: 454055 - protein, 14 aa, Homo sapiens
  CDR3 for alpha chain variable domain of TCR clone 227028 (TRAV4, TRAJ6)
CLVGEAGGSYIHTF

SEQ ID NO: 454056 - protein, 16 aa, Homo sapiens
  CDR3 for beta chain variable domain of TCR clone 227028 (TRBV7-6, TRBJ2-1)
CASSLNEGPSYNEQFF

SEQ ID NO: 454057 - protein, 15 aa, Homo sapiens
  CDR3 for alpha chain variable domain of TCR clone 227029 (TRAV8-3, TRAJ27)
CAVGPSKTNAGNSTF

SEQ ID NO: 454058 - protein, 14 aa, Homo sapiens
  CDR3 for beta chain variable domain of TCR clone 227029 (TRBV11-2, TRBJ2-3)
CASSRLARTDTQYF

SEQ ID NO: 454059 - protein, 17 aa, Homo sapiens
  CDR3 for alpha chain variable domain of TCR clone 227030 (TRAV14/DV4, TRAJ28)
CAMREVSSGAGSYQLTF

SEQ ID NO: 454060 - protein, 15 aa, Homo sapiens
  CDR3 for beta chain variable domain of TCR clone 227030 (TRBV11-2, TRBJ1-6)
CASTLRVTGNSPLHF

SEQ ID NO: 454061 - protein, 17 aa, Homo sapiens
  CDR3 for alpha chain variable domain of TCR clone 227031 (TRAV3, TRAJ6)
CAVRDGPRAEGSYILTF

SEQ ID NO: 454062 - protein, 14 aa, Homo sapiens
  CDR3 for beta chain variable domain of TCR clone 227031 (TRBV7-2, TRBJ2-7)
CASSPKTSFYEQYF

SEQ ID NO: 454063 - protein, 11 aa, Homo sapiens
  CDR3 for alpha chain variable domain of TCR clone 227032 (TRAV2, TRAJ13)
CASGGYQKVTF

SEQ ID NO: 454064 - protein, 15 aa, Homo sapiens
  CDR3 for beta chain variable domain of TCR clone 227032 (TRBV3-1, TRBJ1-2)
CASSHPGTPGYGYTF

SEQ ID NO: 454065 - protein, 15 aa, Homo sapiens
  CDR3 for alpha chain variable domain of TCR clone 227033 (TRAV8-1, TRAJ6)
CAVNTPPGGSYIPPF

SEQ ID NO: 454066 - protein, 15 aa, Homo sapiens
  CDR3 for beta chain variable domain of TCR clone 227033 (TRBV11-2, TRBJ2-2)
CASSSDRVNAGELFF

SEQ ID NO: 454067 - protein, 14 aa, Homo sapiens
  CDR3 for alpha chain variable domain of TCR clone 227034 (TRAV12-2, TRAJ40)
CAVKIPAGTYKYIF

SEQ ID NO: 454068 - protein, 14 aa, Homo sapiens
  CDR3 for beta chain variable domain of TCR clone 227034 (TRBV20-1, TRBJ1-1)
CSAQTRSGGTEDFF

SEQ ID NO: 454069 - protein, 16 aa, Homo sapiens
  CDR3 for alpha chain variable domain of TCR clone 227035 (TRAV12-3, TRAJ53)
CAMSPGSGGSNYKLTF

SEQ ID NO: 454070 - protein, 13 aa, Homo sapiens
  CDR3 for beta chain variable domain of TCR clone 227035 (TRBV10-3, TRBJ2-7)
CASRLAVNYEQYF

SEQ ID NO: 454071 - protein, 11 aa, Homo sapiens
  CDR3 for alpha chain variable domain of TCR clone 227036 (TRAV1-2, TRAJ20)
CAVANDYKLSF

SEQ ID NO: 454072 - protein, 15 aa, Homo sapiens
  CDR3 for beta chain variable domain of TCR clone 227036 (TRBV7-9, TRBJ2-5)
CASSLVWRDRETQYF

SEQ ID NO: 454073 - protein, 17 aa, Homo sapiens
  CDR3 for alpha chain variable domain of TCR clone 227037 (TRAV4, TRAJ18)
CLVGERSVGSTLGRRYL

SEQ ID NO: 454074 - protein, 14 aa, Homo sapiens
  CDR3 for beta chain variable domain of TCR clone 227037 (TRBV6-5, TRBJ1-2)
CASSYDGTGGGYTF

SEQ ID NO: 454075 - protein, 12 aa, Homo sapiens
  CDR3 for alpha chain variable domain of TCR clone 227038 (TRAV12-3, TRAJ40)
CAVSSGTYKYIF

SEQ ID NO: 454076 - protein, 15 aa, Homo sapiens
  CDR3 for beta chain variable domain of TCR clone 227038 (TRBV7-9, TRBJ2-7)
CASSPGGGLTYEQYI

SEQ ID NO: 454077 - protein, 15 aa, Homo sapiens
  CDR3 for alpha chain variable domain of TCR clone 227039 (TRAV12-3, TRAJ49)
CAMAVTPNTGNQFYF

SEQ ID NO: 454078 - protein, 15 aa, Homo sapiens
  CDR3 for beta chain variable domain of TCR clone 227039 (TRBV7-9, TRBJ1-6)
CASSSPGRGNSPLYF

SEQ ID NO: 454079 - protein, 11 aa, Homo sapiens
  CDR3 for alpha chain variable domain of TCR clone 227040 (TRAV36/DV7, TRAJ36)
CAVIARRQTTS

SEQ ID NO: 454080 - protein, 15 aa, Homo sapiens
  CDR3 for beta chain variable domain of TCR clone 227040 (TRBV9, TRBJ1-6)
CASSVAGTGDSPLHF

SEQ ID NO: 454081 - protein, 12 aa, Homo sapiens
  CDR3 for alpha chain variable domain of TCR clone 227041 (TRAV25, TRAJ33)
CEVPDSNYQLIW

SEQ ID NO: 454082 - protein, 20 aa, Homo sapiens
  CDR3 for beta chain variable domain of TCR clone 227041 (TRBV4-1, TRBJ2-2)
CASSQASPPGLASNTGELFF

SEQ ID NO: 454083 - protein, 15 aa, Homo sapiens
  CDR3 for alpha chain variable domain of TCR clone 227042 (TRAV8-6, TRAJ6)
CAVSGESGGSDIPTF

SEQ ID NO: 454084 - protein, 14 aa, Homo sapiens
  CDR3 for beta chain variable domain of TCR clone 227042 (TRBV7-9, TRBJ2-1)
CASSSMVGFGEQFF

SEQ ID NO: 454085 - protein, 15 aa, Homo sapiens
  CDR3 for alpha chain variable domain of TCR clone 227043 (TRAV8-3, TRAJ41)
CAVGSNANSGDALNF

SEQ ID NO: 454086 - protein, 17 aa, Homo sapiens
  CDR3 for beta chain variable domain of TCR clone 227043 (TRBV25-1, TRBJ2-1)
CASSAYGQGRGVYEQFF

SEQ ID NO: 454087 - protein, 17 aa, Homo sapiens
  CDR3 for alpha chain variable domain of TCR clone 227044 (TRAV4, TRAJ20)
CTTASWVKGNNDYKLSF

SEQ ID NO: 454088 - protein, 17 aa, Homo sapiens
  CDR3 for beta chain variable domain of TCR clone 227044 (TRBV11-2, TRBJ2-1)
CASSLYPPGVEYNEEFF

SEQ ID NO: 454089 - protein, 15 aa, Homo sapiens
  CDR3 for alpha chain variable domain of TCR clone 227045 (TRAV17, TRAJ35)
CATAFVIGFGNVLHC

SEQ ID NO: 454090 - protein, 17 aa, Homo sapiens
  CDR3 for beta chain variable domain of TCR clone 227045 (TRBV7-3, TRBJ2-3)
CASSLMKRMRGADTQYF

SEQ ID NO: 454091 - protein, 12 aa, Homo sapiens
  CDR3 for alpha chain variable domain of TCR clone 227046 (TRAV3, TRAJ43)
CAVRDPRNDMRF

SEQ ID NO: 454092 - protein, 11 aa, Homo sapiens
  CDR3 for beta chain variable domain of TCR clone 227046 (TRBV11-2, TRBJ2-2)
CASSLPGELFF

SEQ ID NO: 454093 - protein, 17 aa, Homo sapiens
  CDR3 for alpha chain variable domain of TCR clone 227047 (TRAV12-2, TRAJ42)
CAVNILNYGGSQGNLIF

SEQ ID NO: 454094 - protein, 15 aa, Homo sapiens
  CDR3 for beta chain variable domain of TCR clone 227047 (TRBV9, TRBJ1-6)
CASSVAGTGDSPLHF

SEQ ID NO: 454095 - protein, 14 aa, Homo sapiens
  CDR3 for alpha chain variable domain of TCR clone 227048 (TRAV1-1, TRAJ27)
CAVIYNTNAGKSTF

SEQ ID NO: 454096 - protein, 15 aa, Homo sapiens
  CDR3 for beta chain variable domain of TCR clone 227048 (TRBV12-4, TRBJ2-1)
CASSLGTSAVNEQFF

SEQ ID NO: 454097 - protein, 11 aa, Homo sapiens
  CDR3 for alpha chain variable domain of TCR clone 227049 (TRAV12-3, TRAJ27)
CAMANAGKATF

SEQ ID NO: 454098 - protein, 13 aa, Homo sapiens
  CDR3 for beta chain variable domain of TCR clone 227049 (TRBV20-1, TRBJ1-1)
CSARVGGDTEAFF

SEQ ID NO: 454099 - protein, 14 aa, Homo sapiens
  CDR3 for alpha chain variable domain of TCR clone 227050 (TRAV9-2, TRAJ39)
CALYIYNAGNMLTF

SEQ ID NO: 454100 - protein, 14 aa, Homo sapiens
  CDR3 for beta chain variable domain of TCR clone 227050 (TRBV6-1, TRBJ1-3)
CTSVQGGGGNTIYF

SEQ ID NO: 454101 - protein, 12 aa, Homo sapiens
  CDR3 for alpha chain variable domain of TCR clone 227051 (TRAV13-2, TRAJ23)
CAERHRGGKLIF

SEQ ID NO: 454102 - protein, 15 aa, Homo sapiens
  CDR3 for beta chain variable domain of TCR clone 227051 (TRBV19, TRBJ1-2)
CACSVGQVLNYGYTF

SEQ ID NO: 454103 - protein, 14 aa, Homo sapiens
  CDR3 for alpha chain variable domain of TCR clone 227052 (TRAV12-2, TRAJ40)
CAVKIPSGTYKYIF

SEQ ID NO: 454104 - protein, 15 aa, Homo sapiens
  CDR3 for beta chain variable domain of TCR clone 227052 (TRBV28, TRBJ2-5)
CASSSGRTIQETQYF

SEQ ID NO: 454105 - protein, 12 aa, Homo sapiens
  CDR3 for alpha chain variable domain of TCR clone 227053 (TRAV21, TRAJ11)
CAATSGYSTLTF

SEQ ID NO: 454106 - protein, 14 aa, Homo sapiens
  CDR3 for beta chain variable domain of TCR clone 227053 (TRBV20-1, TRBJ2-7)
CSAPELAGVGEQNF

SEQ ID NO: 454107 - protein, 11 aa, Homo sapiens
  CDR3 for alpha chain variable domain of TCR clone 227054 (TRAV12-2, TRAJ33)
CAVTSNYQLIW

SEQ ID NO: 454108 - protein, 13 aa, Homo sapiens
  CDR3 for beta chain variable domain of TCR clone 227054 (TRBV7-8, TRBJ2-7)
RRVRLTEMGEQYF

SEQ ID NO: 454109 - protein, 17 aa, Homo sapiens
  CDR3 for alpha chain variable domain of TCR clone 227055 (TRAV3, TRAJ42)
FAVRDRDYGGSQGNLIF

SEQ ID NO: 454110 - protein, 12 aa, Homo sapiens
  CDR3 for beta chain variable domain of TCR clone 227055 (TRBV7-9, TRBJ1-5)
CASSPQGQPQHF

SEQ ID NO: 454111 - protein, 12 aa, Homo sapiens
  CDR3 for alpha chain variable domain of TCR clone 227056 (TRAV1-2, TRAJ26)
CAVRYYGQNFVF

SEQ ID NO: 454112 - protein, 12 aa, Homo sapiens
  CDR3 for beta chain variable domain of TCR clone 227056 (TRBV7-8, TRBJ2-7)
CASSLGDREQYF

SEQ ID NO: 454113 - protein, 12 aa, Homo sapiens
  CDR3 for alpha chain variable domain of TCR clone 227057 (TRAV3, TRAJ20)
CAVRDPDYKLSL

SEQ ID NO: 454114 - protein, 15 aa, Homo sapiens
  CDR3 for beta chain variable domain of TCR clone 227057 (TRBV6-3, TRBJ2-7)
CASSSPGTVFYEQYF

SEQ ID NO: 454115 - protein, 17 aa, Homo sapiens
  CDR3 for alpha chain variable domain of TCR clone 227058 (TRAV3, TRAJ6)
CAVRVGPRAGGSYIPTF

SEQ ID NO: 454116 - protein, 13 aa, Homo sapiens
  CDR3 for beta chain variable domain of TCR clone 227058 (TRBV27, TRBJ2-1)
CASRTLGVGEQFF

SEQ ID NO: 454117 - protein, 18 aa, Homo sapiens
  CDR3 for alpha chain variable domain of TCR clone 227059 (TRAV21, TRAJ52)
CVVRPSPAGGTSYGKLTF

SEQ ID NO: 454118 - protein, 16 aa, Homo sapiens
  CDR3 for beta chain variable domain of TCR clone 227059 (TRBV13, TRBJ2-3)
CQQPLQGRGGRNTQYF

SEQ ID NO: 454119 - protein, 13 aa, Homo sapiens
  CDR3 for alpha chain variable domain of TCR clone 227060 (TRAV12-2, TRAJ39)
CAMNNNAGNMLTF

SEQ ID NO: 454120 - protein, 13 aa, Homo sapiens
  CDR3 for beta chain variable domain of TCR clone 227060 (TRBV29-1, TRBJ1-1)
CSVGDSRNTEAFF

SEQ ID NO: 454121 - protein, 14 aa, Homo sapiens
  CDR3 for alpha chain variable domain of TCR clone 227061 (TRAV13-1, TRAJ9)
CAPSALTGGFKTIF

SEQ ID NO: 454122 - protein, 13 aa, Homo sapiens
  CDR3 for beta chain variable domain of TCR clone 227061 (TRBV20-1, TRBJ1-1)
CSAGTVGNTEAFF

SEQ ID NO: 454123 - protein, 14 aa, Homo sapiens
  CDR3 for alpha chain variable domain of TCR clone 227062 (TRAV13-1, TRAJ36)
CAASINTGENNLFF

SEQ ID NO: 454124 - protein, 18 aa, Homo sapiens
  CDR3 for beta chain variable domain of TCR clone 227062 (TRBV20-1, TRBJ2-3)
CSARDPWGQGLSTDTQYF

SEQ ID NO: 454125 - protein, 14 aa, Homo sapiens
  CDR3 for alpha chain variable domain of TCR clone 227063 (TRAV17, TRAJ12)
CAILPMNSSYKLIF

SEQ ID NO: 454126 - protein, 17 aa, Homo sapiens
  CDR3 for beta chain variable domain of TCR clone 227063 (TRBV13, TRBJ2-3)
CASSLSRVAGGRNTQYF

SEQ ID NO: 454127 - protein, 15 aa, Homo sapiens
  CDR3 for alpha chain variable domain of TCR clone 227064 (TRAV8-3, TRAJ6)
CAVGSAGGGSYIPTF

SEQ ID NO: 454128 - protein, 20 aa, Homo sapiens
  CDR3 for beta chain variable domain of TCR clone 227064 (TRBV28, TRBJ2-1)
CASTPVGRSPGLAGGNEQFF

SEQ ID NO: 454129 - protein, 22 aa, Homo sapiens
  CDR3 for alpha chain variable domain of TCR clone 227065 (TRAV16, TRAJ32)
CALKSGGATNKLILELALCLLS

SEQ ID NO: 454130 - protein, 13 aa, Homo sapiens
  CDR3 for beta chain variable domain of TCR clone 227065 (TRBV15, TRBJ1-6)
CATSGGLNSPLHF

SEQ ID NO: 454131 - protein, 14 aa, Homo sapiens
  CDR3 for alpha chain variable domain of TCR clone 227066 (TRAV2, TRAJ37)
CAVDFTSNTGKLIF

SEQ ID NO: 454132 - protein, 16 aa, Homo sapiens
  CDR3 for beta chain variable domain of TCR clone 227066 (TRBV20-1, TRBJ1-1)
SAVLAEGVTAYTEAFF

SEQ ID NO: 454133 - protein, 14 aa, Homo sapiens
  CDR3 for alpha chain variable domain of TCR clone 227067 (TRAV13-1, TRAJ26)
CAASSAHYGQNFVF

SEQ ID NO: 454134 - protein, 17 aa, Homo sapiens
  CDR3 for beta chain variable domain of TCR clone 227067 (TRBV25-1, TRBJ2-5)
CASSRRGSRGGQETQYF

SEQ ID NO: 454135 - protein, 15 aa, Homo sapiens
  CDR3 for alpha chain variable domain of TCR clone 227068 (TRAV3, TRAJ22)
RAVRDRGGSARQLTF

SEQ ID NO: 454136 - protein, 16 aa, Homo sapiens
  CDR3 for beta chain variable domain of TCR clone 227068 (TRBV5-4, TRBJ2-3)
CANQQPGAGGSDTQYF

SEQ ID NO: 454137 - protein, 13 aa, Homo sapiens
  CDR3 for alpha chain variable domain of TCR clone 227069 (TRAV3, TRAJ20)
CAVRPLNDYKLSF

SEQ ID NO: 454138 - protein, 12 aa, Homo sapiens
  CDR3 for beta chain variable domain of TCR clone 227069 (TRBV6-1, TRBJ2-1)
CATYGFNNEQFF

SEQ ID NO: 454139 - protein, 16 aa, Homo sapiens
  CDR3 for alpha chain variable domain of TCR clone 227070 (TRAV1-2, TRAJ10)
CAVRGVLTGGGNKLTF

SEQ ID NO: 454140 - protein, 13 aa, Homo sapiens
  CDR3 for beta chain variable domain of TCR clone 227070 (TRBV20-1, TRBJ1-6)
CSAPLRVGSPLHF

SEQ ID NO: 454141 - protein, 15 aa, Homo sapiens
  CDR3 for alpha chain variable domain of TCR clone 227071 (TRAV17, TRAJ23)
CATDAEDNQGGKLIF

SEQ ID NO: 454142 - protein, 13 aa, Homo sapiens
  CDR3 for beta chain variable domain of TCR clone 227071 (TRBV7-2, TRBJ2-7)
CASSSPSGSEQYF

SEQ ID NO: 454143 - protein, 12 aa, Homo sapiens
  CDR3 for alpha chain variable domain of TCR clone 227072 (TRAV8-4, TRAJ37)
CAVSGNTGKLIF

SEQ ID NO: 454144 - protein, 17 aa, Homo sapiens
  CDR3 for beta chain variable domain of TCR clone 227072 (TRBV7-2, TRBJ2-3)
CASSPQGRARVKDTQYS

SEQ ID NO: 454145 - protein, 11 aa, Homo sapiens
  CDR3 for alpha chain variable domain of TCR clone 227073 (TRAV2, TRAJ13)
CASGGYQKVTF

SEQ ID NO: 454146 - protein, 13 aa, Homo sapiens
  CDR3 for beta chain variable domain of TCR clone 227073 (TRBV27, TRBJ2-7)
CASSLTTGYEQYF

SEQ ID NO: 454147 - protein, 14 aa, Homo sapiens
  CDR3 for alpha chain variable domain of TCR clone 227074 (TRAV12-2, TRAJ40)
CAVKIPSGSYKYIF

SEQ ID NO: 454148 - protein, 14 aa, Homo sapiens
  CDR3 for beta chain variable domain of TCR clone 227074 (TRBV7-9, TRBJ1-2)
CASSRQGANYGYTF

SEQ ID NO: 454149 - protein, 15 aa, Homo sapiens
  CDR3 for alpha chain variable domain of TCR clone 227075 (TRAV17, TRAJ10)
CATDASGGGGNKLTF

SEQ ID NO: 454150 - protein, 14 aa, Homo sapiens
  CDR3 for beta chain variable domain of TCR clone 227075 (TRBV20-1, TRBJ2-5)
CSVPYRGRAGTQYF

SEQ ID NO: 454151 - protein, 12 aa, Homo sapiens
  CDR3 for alpha chain variable domain of TCR clone 227076 (TRAV12-3, TRAJ23)
CAIDAGGGKLIF

SEQ ID NO: 454152 - protein, 14 aa, Homo sapiens
  CDR3 for beta chain variable domain of TCR clone 227076 (TRBV7-3, TRBJ1-6)
CASSRDGYNSPLHF

SEQ ID NO: 454153 - protein, 14 aa, Homo sapiens
  CDR3 for alpha chain variable domain of TCR clone 227077 (TRAV23/DV6, TRAJ10)
CAARLTGGGNKLTF

SEQ ID NO: 454154 - protein, 15 aa, Homo sapiens
  CDR3 for beta chain variable domain of TCR clone 227077 (TRBV5-1, TRBJ2-7)
CASSPQGRPLDGQYF

SEQ ID NO: 454155 - protein, 16 aa, Homo sapiens
  CDR3 for alpha chain variable domain of TCR clone 227078 (TRAV30, TRAJ24)
CGTEIVDAHSWGKFQF

SEQ ID NO: 454156 - protein, 16 aa, Homo sapiens
  CDR3 for beta chain variable domain of TCR clone 227078 (TRBV20-1, TRBJ1-1)
CSARALTQGMNTEAFF

SEQ ID NO: 454157 - protein, 14 aa, Homo sapiens
  CDR3 for alpha chain variable domain of TCR clone 227079 (TRAV13-1, TRAJ40)
CAASITGGSYIPTF

SEQ ID NO: 454158 - protein, 14 aa, Homo sapiens
  CDR3 for beta chain variable domain of TCR clone 227079 (TRBV19, TRBJ2-1)
CASPTFVLSGEQFF

SEQ ID NO: 454159 - protein, 13 aa, Homo sapiens
  CDR3 for alpha chain variable domain of TCR clone 227080 (TRAV20, TRAJ42)
CAVQGGSQGNLIF

SEQ ID NO: 454160 - protein, 15 aa, Homo sapiens
  CDR3 for beta chain variable domain of TCR clone 227080 (TRBV10-1, TRBJ2-1)
CASSEWRGRTMSSSS

SEQ ID NO: 454161 - protein, 13 aa, Homo sapiens
  CDR3 for alpha chain variable domain of TCR clone 227081 (TRAV2, TRAJ29)
CAEQNSGNTPLVF

SEQ ID NO: 454162 - protein, 13 aa, Homo sapiens
  CDR3 for beta chain variable domain of TCR clone 227081 (TRBV28, TRBJ1-2)
CASSPGSRNCYTF

SEQ ID NO: 454163 - protein, 16 aa, Homo sapiens
  CDR3 for alpha chain variable domain of TCR clone 227082 (TRAV12-1, TRAJ22)
CVVNTMSSGSARQLTF

SEQ ID NO: 454164 - protein, 13 aa, Homo sapiens
  CDR3 for beta chain variable domain of TCR clone 227082 (TRBV19, TRBJ2-1)
CASNGGVFSEQFF

SEQ ID NO: 454165 - protein, 13 aa, Homo sapiens
  CDR3 for alpha chain variable domain of TCR clone 227083 (TRAV3, TRAJ21)
CAVREPGFNKFYF

SEQ ID NO: 454166 - protein, 15 aa, Homo sapiens
  CDR3 for beta chain variable domain of TCR clone 227083 (TRBV20-1, TRBJ1-1)
CSASRGVTGNTEAFF

SEQ ID NO: 454167 - protein, 16 aa, Homo sapiens
  CDR3 for alpha chain variable domain of TCR clone 227084 (TRAV1-1, TRAJ28)
CAVRDDSGAGSYQRTF

SEQ ID NO: 454168 - protein, 12 aa, Homo sapiens
  CDR3 for beta chain variable domain of TCR clone 227084 (TRBV11-2, TRBJ2-5)
CASSLDTQTQYF

SEQ ID NO: 454169 - protein, 13 aa, Homo sapiens
  CDR3 for alpha chain variable domain of TCR clone 227085 (TRAV21, TRAJ27)
CAARPGEAGKSTF

SEQ ID NO: 454170 - protein, 14 aa, Homo sapiens
  CDR3 for beta chain variable domain of TCR clone 227085 (TRBV7-6, TRBJ2-3)
CASSLGTVTDTQYF

SEQ ID NO: 454171 - protein, 15 aa, Homo sapiens
  CDR3 for alpha chain variable domain of TCR clone 227086 (TRAV26-1, TRAJ44)
CIARANTGTASKLTF

SEQ ID NO: 454172 - protein, 12 aa, Homo sapiens
  CDR3 for beta chain variable domain of TCR clone 227086 (TRBV2, TRBJ2-1)
GRGLPSYNEQFF

SEQ ID NO: 454173 - protein, 12 aa, Homo sapiens
  CDR3 for alpha chain variable domain of TCR clone 227087 (TRAV12-1, TRAJ40)
CVVYSGTYKYIF

SEQ ID NO: 454174 - protein, 17 aa, Homo sapiens
  CDR3 for beta chain variable domain of TCR clone 227087 (TRBV13, TRBJ2-3)
CASSRSRVAGGRNTQYF

SEQ ID NO: 454175 - protein, 14 aa, Homo sapiens
  CDR3 for alpha chain variable domain of TCR clone 227088 (TRAV12-3, TRAJ9)
CAMSVETGGFKTIF

SEQ ID NO: 454176 - protein, 15 aa, Homo sapiens
  CDR3 for beta chain variable domain of TCR clone 227088 (TRBV7-2, TRBJ1-2)
CASSLVSGGDYGYTF

SEQ ID NO: 454177 - protein, 12 aa, Homo sapiens
  CDR3 for alpha chain variable domain of TCR clone 227089 (TRAV13-2, TRAJ8)
CAPWLGFQKLVF

SEQ ID NO: 454178 - protein, 16 aa, Homo sapiens
  CDR3 for beta chain variable domain of TCR clone 227089 (TRBV25-1, TRBJ1-1)
CASSGDRDRGRIEAFF

SEQ ID NO: 454179 - protein, 14 aa, Homo sapiens
  CDR3 for alpha chain variable domain of TCR clone 227090 (TRAV26-1, TRAJ40)
CIVRLLSGTYKYIF

SEQ ID NO: 454180 - protein, 15 aa, Homo sapiens
  CDR3 for beta chain variable domain of TCR clone 227090 (TRBV20-1, TRBJ2-7)
CSARDRVSGMDEQYF

SEQ ID NO: 454181 - protein, 17 aa, Homo sapiens
  CDR3 for alpha chain variable domain of TCR clone 227091 (TRAV8-3, TRAJ32)
CAVGPLDYGGATNKLIF

SEQ ID NO: 454182 - protein, 15 aa, Homo sapiens
  CDR3 for beta chain variable domain of TCR clone 227091 (TRBV18, TRBJ1-2)
RASSPGNGLGYGYTF

SEQ ID NO: 454183 - protein, 14 aa, Homo sapiens
  CDR3 for alpha chain variable domain of TCR clone 227092 (TRAV35, TRAJ22)
CAGLRPGSARQLTF

SEQ ID NO: 454184 - protein, 21 aa, Homo sapiens
  CDR3 for beta chain variable domain of TCR clone 227092 (TRBV11-3, TRBJ2-3)
LGTRPCISVPAAQARGDTQYF

SEQ ID NO: 454185 - protein, 15 aa, Homo sapiens
  CDR3 for alpha chain variable domain of TCR clone 227093 (TRAV27, TRAJ50)
CAGVGRGTSYDKVIF

SEQ ID NO: 454186 - protein, 14 aa, Homo sapiens
  CDR3 for beta chain variable domain of TCR clone 227093 (TRBV7-2, TRBJ1-1)
CASSFYDLNTEAVF

SEQ ID NO: 454187 - protein, 16 aa, Homo sapiens
  CDR3 for alpha chain variable domain of TCR clone 227094 (TRAV8-3, TRAJ8)
CAVPREGNTGFQKLVF

SEQ ID NO: 454188 - protein, 14 aa, Homo sapiens
  CDR3 for beta chain variable domain of TCR clone 227094 (TRBV4-1, TRBJ2-2)
CASSQAVNTGELFF

SEQ ID NO: 454189 - protein, 15 aa, Homo sapiens
  CDR3 for alpha chain variable domain of TCR clone 227095 (TRAV26-1, TRAJ29)
CIVRVEGSGNKHLVF

SEQ ID NO: 454190 - protein, 15 aa, Homo sapiens
  CDR3 for beta chain variable domain of TCR clone 227095 (TRBV7-9, TRBJ1-5)
CASSQGHQPNQPQHF

SEQ ID NO: 454191 - protein, 14 aa, Homo sapiens
  CDR3 for alpha chain variable domain of TCR clone 227096 (TRAV12-2, TRAJ44)
CAVNPAGTASKLTF

SEQ ID NO: 454192 - protein, 17 aa, Homo sapiens
  CDR3 for beta chain variable domain of TCR clone 227096 (TRBV20-1, TRBJ2-2)
CSASGSGQGGLTGELFF

SEQ ID NO: 454193 - protein, 13 aa, Homo sapiens
  CDR3 for alpha chain variable domain of TCR clone 227097 (TRAV8-3, TRAJ36)
CAVGATGANNLFF

SEQ ID NO: 454194 - protein, 12 aa, Homo sapiens
  CDR3 for beta chain variable domain of TCR clone 227097 (TRBV7-2, TRBJ1-2)
CASSPRAGWTMA

SEQ ID NO: 454195 - protein, 18 aa, Homo sapiens
  CDR3 for alpha chain variable domain of TCR clone 227098 (TRAV21, TRAJ52)
CAVRPSPAGGTSYGKLTF

SEQ ID NO: 454196 - protein, 13 aa, Homo sapiens
  CDR3 for beta chain variable domain of TCR clone 227098 (TRBV12-4, TRBJ2-5)
CASSLFRRETQYF

SEQ ID NO: 454197 - protein, 16 aa, Homo sapiens
  CDR3 for alpha chain variable domain of TCR clone 227099 (TRAV38-1, TRAJ37)
CACKGDGSSNTGKLIF

SEQ ID NO: 454198 - protein, 13 aa, Homo sapiens
  CDR3 for beta chain variable domain of TCR clone 227099 (TRBV12-4, TRBJ2-5)
CASSLFRRETQYF

SEQ ID NO: 454199 - protein, 11 aa, Homo sapiens
  CDR3 for alpha chain variable domain of TCR clone 227100 (TRAV35, TRAJ30)
CAGERDDRIIF

SEQ ID NO: 454200 - protein, 14 aa, Homo sapiens
  CDR3 for beta chain variable domain of TCR clone 227100 (TRBV15, TRBJ2-5)
CATSGDRVQETQYF

SEQ ID NO: 454201 - protein, 14 aa, Homo sapiens
  CDR3 for alpha chain variable domain of TCR clone 227101 (TRAV12-3, TRAJ10)
SHLPLTGGGNKLNF

SEQ ID NO: 454202 - protein, 16 aa, Homo sapiens
  CDR3 for beta chain variable domain of TCR clone 227101 (TRBV19, TRBJ2-1)
CASSKAGPSSYNEQFF

SEQ ID NO: 454203 - protein, 13 aa, Homo sapiens
  CDR3 for alpha chain variable domain of TCR clone 227102 (TRAV13-1, TRAJ40)
CAAISPGTYKYVF

SEQ ID NO: 454204 - protein, 12 aa, Homo sapiens
  CDR3 for beta chain variable domain of TCR clone 227102 (TRBV3-1, TRBJ2-1)
CASGGLGNEQFF

SEQ ID NO: 454205 - protein, 14 aa, Homo sapiens
  CDR3 for alpha chain variable domain of TCR clone 227103 (TRAV22, TRAJ21)
CACRGGYNFNKFYF

SEQ ID NO: 454206 - protein, 16 aa, Homo sapiens
  CDR3 for beta chain variable domain of TCR clone 227103 (TRBV13, TRBJ2-2)
CASSPRTGEHTGELFF

SEQ ID NO: 454207 - protein, 15 aa, Homo sapiens
  CDR3 for alpha chain variable domain of TCR clone 227104 (TRAV12-1, TRAJ45)
CVVLSGGGGADGLTF

SEQ ID NO: 454208 - protein, 12 aa, Homo sapiens
  CDR3 for beta chain variable domain of TCR clone 227104 (TRBV5-1, TRBJ1-2)
CASSQDTYGYTF

SEQ ID NO: 454209 - protein, 11 aa, Homo sapiens
  CDR3 for alpha chain variable domain of TCR clone 227105 (TRAV12-1, TRAJ33)
CVVNTNYQLIL

SEQ ID NO: 454210 - protein, 11 aa, Homo sapiens
  CDR3 for beta chain variable domain of TCR clone 227105 (TRBV10-1, TRBJ2-3)
CASSDSDTQYF

SEQ ID NO: 454211 - protein, 11 aa, Homo sapiens
  CDR3 for alpha chain variable domain of TCR clone 227106 (TRAV1-1, TRAJ23)
CAVRHGGELIF

SEQ ID NO: 454212 - protein, 20 aa, Homo sapiens
  CDR3 for beta chain variable domain of TCR clone 227106 (TRBV7-8, TRBJ2-2)
CASSHLFPGPTIHITGELFF

SEQ ID NO: 454213 - protein, 16 aa, Homo sapiens
  CDR3 for alpha chain variable domain of TCR clone 227107 (TRAV16, TRAJ52)
CALSAAGGTSNGKLTF

SEQ ID NO: 454214 - protein, 16 aa, Homo sapiens
  CDR3 for beta chain variable domain of TCR clone 227107 (TRBV12-4, TRBJ1-5)
CASSRPVGGSNQPQHF

SEQ ID NO: 454215 - protein, 12 aa, Homo sapiens
  CDR3 for alpha chain variable domain of TCR clone 227108 (TRAV13-1, TRAJ9)
CASHTGGFKTIF

SEQ ID NO: 454216 - protein, 13 aa, Homo sapiens
  CDR3 for beta chain variable domain of TCR clone 227108 (TRBV12-4, TRBJ1-2)
CARSSGSKDGYTF

SEQ ID NO: 454217 - protein, 11 aa, Homo sapiens
  CDR3 for alpha chain variable domain of TCR clone 227109 (TRAV21, TRAJ33)
CAVLSNYELIW

SEQ ID NO: 454218 - protein, 15 aa, Homo sapiens
  CDR3 for beta chain variable domain of TCR clone 227109 (TRBV11-2, TRBJ2-7)
CASSLMVGGSYEQYF

SEQ ID NO: 454219 - protein, 14 aa, Homo sapiens
  CDR3 for alpha chain variable domain of TCR clone 227110 (TRAV12-1, TRAJ42)
FVVIYGGSQGNLIF

SEQ ID NO: 454220 - protein, 16 aa, Homo sapiens
  CDR3 for beta chain variable domain of TCR clone 227110 (TRBV7-2, TRBJ2-3)
CASSLVALYSTDTQYF

SEQ ID NO: 454221 - protein, 17 aa, Homo sapiens
  CDR3 for alpha chain variable domain of TCR clone 227111 (TRAV8-1, TRAJ42)
CAVKWGNYGGSQGNLIF

SEQ ID NO: 454222 - protein, 15 aa, Homo sapiens
  CDR3 for beta chain variable domain of TCR clone 227111 (TRBV7-2, TRBJ2-1)
CASSSGLAGGNEQFF

SEQ ID NO: 454223 - protein, 14 aa, Homo sapiens
  CDR3 for alpha chain variable domain of TCR clone 227112 (TRAV12-3, TRAJ29)
CAMSPYSGNTPLVF

SEQ ID NO: 454224 - protein, 16 aa, Homo sapiens
  CDR3 for beta chain variable domain of TCR clone 227112 (TRBV12-4, TRBJ1-5)
GASSRPVGGSNQPQHF

SEQ ID NO: 454225 - protein, 11 aa, Homo sapiens
  CDR3 for alpha chain variable domain of TCR clone 227113 (TRAV17, TRAJ36)
CAPTGANNLFF

SEQ ID NO: 454226 - protein, 13 aa, Homo sapiens
  CDR3 for beta chain variable domain of TCR clone 227113 (TRBV12-4, TRBJ2-7)
CASSPKETYEQYF

SEQ ID NO: 454227 - protein, 12 aa, Homo sapiens
  CDR3 for alpha chain variable domain of TCR clone 227114 (TRAV1-2, TRAJ26)
CAVRYYGQNFVL

SEQ ID NO: 454228 - protein, 15 aa, Homo sapiens
  CDR3 for beta chain variable domain of TCR clone 227114 (TRBV28, TRBJ2-1)
CASSIIAGGRSEQFF

SEQ ID NO: 454229 - protein, 10 aa, Homo sapiens
  CDR3 for alpha chain variable domain of TCR clone 227115 (TRAV1-1, TRAJ5)
CAVIWESTYF

SEQ ID NO: 454230 - protein, 15 aa, Homo sapiens
  CDR3 for beta chain variable domain of TCR clone 227115 (TRBV4-1, TRBJ1-4)
CASSDTGGTNEKLFL

SEQ ID NO: 454231 - protein, 13 aa, Homo sapiens
  CDR3 for alpha chain variable domain of TCR clone 227116 (TRAV12-3, TRAJ53)
CAMRGGSNYKLPF

SEQ ID NO: 454232 - protein, 15 aa, Homo sapiens
  CDR3 for beta chain variable domain of TCR clone 227116 (TRBV2, TRBJ2-1)
CATQARLVMIGEQFV

SEQ ID NO: 454233 - protein, 14 aa, Homo sapiens
  CDR3 for alpha chain variable domain of TCR clone 227117 (TRAV38-1, TRAJ40)
CALCPTSGTFKYIF

SEQ ID NO: 454234 - protein, 14 aa, Homo sapiens
  CDR3 for beta chain variable domain of TCR clone 227117 (TRBV25-1, TRBJ1-1)
CASTHLGGNTEAFF

SEQ ID NO: 454235 - protein, 12 aa, Homo sapiens
  CDR3 for alpha chain variable domain of TCR clone 227118 (TRAV12-3, TRAJ17)
CAMTFTGNKLTF

SEQ ID NO: 454236 - protein, 15 aa, Homo sapiens
  CDR3 for beta chain variable domain of TCR clone 227118 (TRBV20-1, TRBJ2-7)
CGARDRVSGMDEQYF

SEQ ID NO: 454237 - protein, 12 aa, Homo sapiens
  CDR3 for alpha chain variable domain of TCR clone 227119 (TRAV12-3, TRAJ20)
CAMVRGDYKLSF

SEQ ID NO: 454238 - protein, 14 aa, Homo sapiens
  CDR3 for beta chain variable domain of TCR clone 227119 (TRBV5-5, TRBJ1-5)
CASSGQGVDQPPHF

SEQ ID NO: 454239 - protein, 14 aa, Homo sapiens
  CDR3 for alpha chain variable domain of TCR clone 227120 (TRAV17, TRAJ4)
CATGLSGGYNKLIF

SEQ ID NO: 454240 - protein, 15 aa, Homo sapiens
  CDR3 for beta chain variable domain of TCR clone 227120 (TRBV7-9, TRBJ1-4)
CASSARTGGNEKLFF

SEQ ID NO: 454241 - protein, 16 aa, Homo sapiens
  CDR3 for alpha chain variable domain of TCR clone 227121 (TRAV13-1, TRAJ45)
CAASWESGGGADGLPF

SEQ ID NO: 454242 - protein, 14 aa, Homo sapiens
  CDR3 for beta chain variable domain of TCR clone 227121 (TRBV12-4, TRBJ1-3)
CASGQTVSGNTIYF

SEQ ID NO: 454243 - protein, 14 aa, Homo sapiens
  CDR3 for alpha chain variable domain of TCR clone 227122 (TRAV12-3, TRAJ7)
CAMSEIGWNNRLAF

SEQ ID NO: 454244 - protein, 13 aa, Homo sapiens
  CDR3 for beta chain variable domain of TCR clone 227122 (TRBV9, TRBJ1-1)
CASSVARNPEAFF

SEQ ID NO: 454245 - protein, 16 aa, Homo sapiens
  CDR3 for alpha chain variable domain of TCR clone 227123 (TRAV29/DV5, TRAJ30)
QCTSVQQANRDDKIIL

SEQ ID NO: 454246 - protein, 13 aa, Homo sapiens
  CDR3 for beta chain variable domain of TCR clone 227123 (TRBV12-5, TRBJ2-3)
CASQNRGTDTQYF

SEQ ID NO: 454247 - protein, 13 aa, Homo sapiens
  CDR3 for alpha chain variable domain of TCR clone 227124 (TRAV8-3, TRAJ47)
CAVSMEYGNKLVF

SEQ ID NO: 454248 - protein, 16 aa, Homo sapiens
  CDR3 for beta chain variable domain of TCR clone 227124 (TRBV13, TRBJ2-2)
CASSPRTGEHTGELFF

SEQ ID NO: 454249 - protein, 14 aa, Homo sapiens
  CDR3 for alpha chain variable domain of TCR clone 227125 (TRAV8-3, TRAJ39)
CAVVGNNAGNMLTF

SEQ ID NO: 454250 - protein, 15 aa, Homo sapiens
  CDR3 for beta chain variable domain of TCR clone 227125 (TRBV4-3, TRBJ1-1)
CASGQELGRGTEAFF

SEQ ID NO: 454251 - protein, 12 aa, Homo sapiens
  CDR3 for alpha chain variable domain of TCR clone 227126 (TRAV17, TRAJ57)
CATYVGSEKLVF

SEQ ID NO: 454252 - protein, 13 aa, Homo sapiens
  CDR3 for beta chain variable domain of TCR clone 227126 (TRBV7-9, TRBJ2-7)
CASSFAGAYEQYF

SEQ ID NO: 454253 - protein, 11 aa, Homo sapiens
  CDR3 for alpha chain variable domain of TCR clone 227127 (TRAV4, TRAJ31)
CLVGDNARLMF

SEQ ID NO: 454254 - protein, 11 aa, Homo sapiens
  CDR3 for beta chain variable domain of TCR clone 227127 (TRBV7-2, TRBJ2-3)
CASSSSDTQYF

SEQ ID NO: 454255 - protein, 12 aa, Homo sapiens
  CDR3 for alpha chain variable domain of TCR clone 227128 (TRAV21, TRAJ39)
CAADNAGNMLTF

SEQ ID NO: 454256 - protein, 14 aa, Homo sapiens
  CDR3 for beta chain variable domain of TCR clone 227128 (TRBV18, TRBJ2-3)
CASSGLADTDTRYF

SEQ ID NO: 454257 - protein, 12 aa, Homo sapiens
  CDR3 for alpha chain variable domain of TCR clone 227129 (TRAV12-3, TRAJ17)
CAMTLTGNKQTF

SEQ ID NO: 454258 - protein, 15 aa, Homo sapiens
  CDR3 for beta chain variable domain of TCR clone 227129 (TRBV20-1, TRBJ2-7)
CGARDRVSGMDEQYF

SEQ ID NO: 454259 - protein, 13 aa, Homo sapiens
  CDR3 for alpha chain variable domain of TCR clone 227130 (TRAV12-1, TRAJ7)
CVGNMRGHNRLAF

SEQ ID NO: 454260 - protein, 15 aa, Homo sapiens
  CDR3 for beta chain variable domain of TCR clone 227130 (TRBV27, TRBJ2-3)
CASSLGLAATDTQYF

SEQ ID NO: 454261 - protein, 12 aa, Homo sapiens
  CDR3 for alpha chain variable domain of TCR clone 227131 (TRAV21, TRAJ3)
CCFYSSASKIIF

SEQ ID NO: 454262 - protein, 16 aa, Homo sapiens
  CDR3 for beta chain variable domain of TCR clone 227131 (TRBV27, TRBJ2-2)
CASRRLGDQRTVELFF

SEQ ID NO: 454263 - protein, 12 aa, Homo sapiens
  CDR3 for alpha chain variable domain of TCR clone 227132 (TRAV29/DV5, TRAJ49)
CAATDTGNQFSF

SEQ ID NO: 454264 - protein, 15 aa, Homo sapiens
  CDR3 for beta chain variable domain of TCR clone 227132 (TRBV20-1, TRBJ1-5)
CSAREGGYSNQPQHF

SEQ ID NO: 454265 - protein, 15 aa, Homo sapiens
  CDR3 for alpha chain variable domain of TCR clone 227133 (TRAV12-1, TRAJ5)
CVVNMRETGRRALTF

SEQ ID NO: 454266 - protein, 13 aa, Homo sapiens
  CDR3 for beta chain variable domain of TCR clone 227133 (TRBV14, TRBJ1-5)
CASSQDRRGPQHF

SEQ ID NO: 454267 - protein, 17 aa, Homo sapiens
  CDR3 for alpha chain variable domain of TCR clone 227134 (TRAV17, TRAJ7)
CATLGRLAFGKGNQVVV

SEQ ID NO: 454268 - protein, 15 aa, Homo sapiens
  CDR3 for beta chain variable domain of TCR clone 227134 (TRBV3-1, TRBJ2-7)
CASSQVAGAQYEQYF

SEQ ID NO: 454269 - protein, 17 aa, Homo sapiens
  CDR3 for alpha chain variable domain of TCR clone 227135 (TRAV12-1, TRAJ8)
CVVNPKRVNTGFQKLVF

SEQ ID NO: 454270 - protein, 15 aa, Homo sapiens
  CDR3 for beta chain variable domain of TCR clone 227135 (TRBV10-2, TRBJ2-7)
CASWNRGQATYEQYF

SEQ ID NO: 454271 - protein, 11 aa, Homo sapiens
  CDR3 for alpha chain variable domain of TCR clone 227136 (TRAV1-2, TRAJ20)
CAVANDYKLSF

SEQ ID NO: 454272 - protein, 15 aa, Homo sapiens
  CDR3 for beta chain variable domain of TCR clone 227136 (TRBV7-9, TRBJ1-5)
CASSQGHQPNQPQHF

SEQ ID NO: 454273 - protein, 14 aa, Homo sapiens
  CDR3 for alpha chain variable domain of TCR clone 227137 (TRAV17, TRAJ12)
CATDGVDSSYKLIF

SEQ ID NO: 454274 - protein, 13 aa, Homo sapiens
  CDR3 for beta chain variable domain of TCR clone 227137 (TRBV25-1, TRBJ1-2)
CASSEAGASGYTF

SEQ ID NO: 454275 - protein, 10 aa, Homo sapiens
  CDR3 for alpha chain variable domain of TCR clone 227138 (TRAV8-3, TRAJ4)
CAVGPKGLDF

SEQ ID NO: 454276 - protein, 16 aa, Homo sapiens
  CDR3 for beta chain variable domain of TCR clone 227138 (TRBV7-3, TRBJ2-2)
CASSLKRGTLSGELFF

SEQ ID NO: 454277 - protein, 14 aa, Homo sapiens
  CDR3 for alpha chain variable domain of TCR clone 227139 (TRAV26-1, TRAJ38)
CIADNAGNNRKLIW

SEQ ID NO: 454278 - protein, 15 aa, Homo sapiens
  CDR3 for beta chain variable domain of TCR clone 227139 (TRBV27, TRBJ2-1)
CASSNGGGSSNERFF

SEQ ID NO: 454279 - protein, 14 aa, Homo sapiens
  CDR3 for alpha chain variable domain of TCR clone 227140 (TRAV17, TRAJ56)
CATVPAGANSDLTF

SEQ ID NO: 454280 - protein, 13 aa, Homo sapiens
  CDR3 for beta chain variable domain of TCR clone 227140 (TRBV12-4, TRBJ2-2)
CASSITGSGELFF

SEQ ID NO: 454281 - protein, 16 aa, Homo sapiens
  CDR3 for alpha chain variable domain of TCR clone 227141 (TRAV8-3, TRAJ8)
CAVPRDGNTGFQKLVF

SEQ ID NO: 454282 - protein, 14 aa, Homo sapiens
  CDR3 for beta chain variable domain of TCR clone 227141 (TRBV28, TRBJ1-1)
CASSESGRGTEAFC

SEQ ID NO: 454283 - protein, 13 aa, Homo sapiens
  CDR3 for alpha chain variable domain of TCR clone 227142 (TRAV8-4, TRAJ10)
CAAFTGGGNKLTF

SEQ ID NO: 454284 - protein, 18 aa, Homo sapiens
  CDR3 for beta chain variable domain of TCR clone 227142 (TRBV11-2, TRBJ2-3)
CASSLGGASRGAPNTQYF

SEQ ID NO: 454285 - protein, 16 aa, Homo sapiens
  CDR3 for alpha chain variable domain of TCR clone 227143 (TRAV13-1, TRAJ48)
CAASIFGNFGNEKLTF

SEQ ID NO: 454286 - protein, 15 aa, Homo sapiens
  CDR3 for beta chain variable domain of TCR clone 227143 (TRBV2, TRBJ2-1)
CASSEEREGDNEQFF

SEQ ID NO: 454287 - protein, 11 aa, Homo sapiens
  CDR3 for alpha chain variable domain of TCR clone 227144 (TRAV13-2, TRAJ20)
CADSNDYKLSF

SEQ ID NO: 454288 - protein, 16 aa, Homo sapiens
  CDR3 for beta chain variable domain of TCR clone 227144 (TRBV4-1, TRBJ2-3)
CASSQSTSGAEDTQYF

SEQ ID NO: 454289 - protein, 15 aa, Homo sapiens
  CDR3 for alpha chain variable domain of TCR clone 227145 (TRAV17, TRAJ35)
CATAFVIGFGNVLHC

SEQ ID NO: 454290 - protein, 16 aa, Homo sapiens
  CDR3 for beta chain variable domain of TCR clone 227145 (TRBV7-3, TRBJ2-3)
CASSLSGYRPEDTQYF

SEQ ID NO: 454291 - protein, 12 aa, Homo sapiens
  CDR3 for alpha chain variable domain of TCR clone 227146 (TRAV12-3, TRAJ5)
CAMDTGRRALTF

SEQ ID NO: 454292 - protein, 13 aa, Homo sapiens
  CDR3 for beta chain variable domain of TCR clone 227146 (TRBV7-7, TRBJ2-2)
CASTLTSAGELFF

SEQ ID NO: 454293 - protein, 15 aa, Homo sapiens
  CDR3 for alpha chain variable domain of TCR clone 227147 (TRAV3, TRAJ3)
CAVRDGHSSASKRIF

SEQ ID NO: 454294 - protein, 14 aa, Homo sapiens
  CDR3 for beta chain variable domain of TCR clone 227147 (TRBV28, TRBJ1-4)
CASSLGTFDEKLFF

SEQ ID NO: 454295 - protein, 15 aa, Homo sapiens
  CDR3 for alpha chain variable domain of TCR clone 227148 (TRAV13-2, TRAJ45)
CAESDSGGGADGLTF

SEQ ID NO: 454296 - protein, 12 aa, Homo sapiens
  CDR3 for beta chain variable domain of TCR clone 227148 (TRBV7-9, TRBJ1-5)
CASSPQGQPQHF

SEQ ID NO: 454297 - protein, 20 aa, Homo sapiens
  CDR3 for alpha chain variable domain of TCR clone 227149 (TRAV21, TRAJ4)
AASQPGDTATLAGGYNKLIF

SEQ ID NO: 454298 - protein, 19 aa, Homo sapiens
  CDR3 for beta chain variable domain of TCR clone 227149 (TRBV18, TRBJ1-3)
CASSPLSRTGMSSGNTIYF

SEQ ID NO: 454299 - protein, 14 aa, Homo sapiens
  CDR3 for alpha chain variable domain of TCR clone 227150 (TRAV1-2, TRAJ8)
CAVREDTGFQKPGF

SEQ ID NO: 454300 - protein, 16 aa, Homo sapiens
  CDR3 for beta chain variable domain of TCR clone 227150 (TRBV20-1, TRBJ2-1)
CSARDFSGRIGDEQFF

SEQ ID NO: 454301 - protein, 10 aa, Homo sapiens
  CDR3 for alpha chain variable domain of TCR clone 227151 (TRAV23/DV6, TRAJ57)
CAASSTLSQG

SEQ ID NO: 454302 - protein, 14 aa, Homo sapiens
  CDR3 for beta chain variable domain of TCR clone 227151 (TRBV7-3, TRBJ2-2)
CASSSGGYTGELFF

SEQ ID NO: 454303 - protein, 14 aa, Homo sapiens
  CDR3 for alpha chain variable domain of TCR clone 227152 (TRAV26-1, TRAJ49)
CIVRPSNTGNQFYF

SEQ ID NO: 454304 - protein, 15 aa, Homo sapiens
  CDR3 for beta chain variable domain of TCR clone 227152 (TRBV19, TRBJ1-1)
YASMGFRDVNTEAFF

SEQ ID NO: 454305 - protein, 16 aa, Homo sapiens
  CDR3 for alpha chain variable domain of TCR clone 227153 (TRAV3, TRAJ34)
CAVRARGTPTSPSLGL

SEQ ID NO: 454306 - protein, 13 aa, Homo sapiens
  CDR3 for beta chain variable domain of TCR clone 227153 (TRBV2, TRBJ1-1)
CARNPTGGFHAFF

SEQ ID NO: 454307 - protein, 14 aa, Homo sapiens
  CDR3 for alpha chain variable domain of TCR clone 227154 (TRAV12-1, TRAJ17)
CVVSYKAAGNKLTF

SEQ ID NO: 454308 - protein, 17 aa, Homo sapiens
  CDR3 for beta chain variable domain of TCR clone 227154 (TRBV20-1, TRBJ2-1)
CSASSSGLAGAYNEQFF

SEQ ID NO: 454309 - protein, 16 aa, Homo sapiens
  CDR3 for alpha chain variable domain of TCR clone 227155 (TRAV21, TRAJ52)
CAVTNAGGTSYGKLTF

SEQ ID NO: 454310 - protein, 17 aa, Homo sapiens
  CDR3 for beta chain variable domain of TCR clone 227155 (TRBV28, TRBJ2-5)
CDSSRQGGLAGAETQYF

SEQ ID NO: 454311 - protein, 14 aa, Homo sapiens
  CDR3 for alpha chain variable domain of TCR clone 227156 (TRAV9-2, TRAJ39)
CALYIYNAGNMLTF

SEQ ID NO: 454312 - protein, 16 aa, Homo sapiens
  CDR3 for beta chain variable domain of TCR clone 227156 (TRBV19, TRBJ1-6)
CASRLEGNLHNSPLHF

SEQ ID NO: 454313 - protein, 13 aa, Homo sapiens
  CDR3 for alpha chain variable domain of TCR clone 227157 (TRAV12-3, TRAJ40)
CAMSDSGTYKYIF

SEQ ID NO: 454314 - protein, 17 aa, Homo sapiens
  CDR3 for beta chain variable domain of TCR clone 227157 (TRBV20-1, TRBJ2-2)
CSASGSGQGGLTGELFF

SEQ ID NO: 454315 - protein, 15 aa, Homo sapiens
  CDR3 for alpha chain variable domain of TCR clone 227158 (TRAV3, TRAJ36)
CAVRASQTGANNLFF

SEQ ID NO: 454316 - protein, 15 aa, Homo sapiens
  CDR3 for beta chain variable domain of TCR clone 227158 (TRBV3-1, TRBJ2-1)
CASSQDYTPRGEQFF

SEQ ID NO: 454317 - protein, 16 aa, Homo sapiens
  CDR3 for alpha chain variable domain of TCR clone 227159 (TRAV12-1, TRAJ53)
CVVTSVAGGSNYKLTF

SEQ ID NO: 454318 - protein, 13 aa, Homo sapiens
  CDR3 for beta chain variable domain of TCR clone 227159 (TRBV7-2, TRBJ2-1)
CASSRQGYNEQFF

SEQ ID NO: 454319 - protein, 15 aa, Homo sapiens
  CDR3 for alpha chain variable domain of TCR clone 227160 (TRAV34, TRAJ38)
CGADFTPGNNRKRIW

SEQ ID NO: 454320 - protein, 13 aa, Homo sapiens
  CDR3 for beta chain variable domain of TCR clone 227160 (TRBV24-1, TRBJ2-2)
CATSDWSTGELFF

SEQ ID NO: 454321 - protein, 16 aa, Homo sapiens
  CDR3 for alpha chain variable domain of TCR clone 227161 (TRAV13-1, TRAJ48)
CAASIFGNFGNEKLTF

SEQ ID NO: 454322 - protein, 16 aa, Homo sapiens
  CDR3 for beta chain variable domain of TCR clone 227161 (TRBV7-3, TRBJ2-1)
CASSLEGYRSYNEQFF

SEQ ID NO: 454323 - protein, 12 aa, Homo sapiens
  CDR3 for alpha chain variable domain of TCR clone 227162 (TRAV21, TRAJ23)
CAVGPQGGKIIF

SEQ ID NO: 454324 - protein, 13 aa, Homo sapiens
  CDR3 for beta chain variable domain of TCR clone 227162 (TRBV20-1, TRBJ2-7)
CSARTGAGYEQYF

SEQ ID NO: 454325 - protein, 12 aa, Homo sapiens
  CDR3 for alpha chain variable domain of TCR clone 227163 (TRAV35, TRAJ54)
CADLQGAQKLVF

SEQ ID NO: 454326 - protein, 15 aa, Homo sapiens
  CDR3 for beta chain variable domain of TCR clone 227163 (TRBV4-3, TRBJ2-7)
CASSQGDWGDYEQYF

SEQ ID NO: 454327 - protein, 15 aa, Homo sapiens
  CDR3 for alpha chain variable domain of TCR clone 227164 (TRAV3, TRAJ3)
CAVRDMSSSASEIIF

SEQ ID NO: 454328 - protein, 14 aa, Homo sapiens
  CDR3 for beta chain variable domain of TCR clone 227164 (TRBV19, TRBJ2-1)
CASPTFVLSGEQFF

SEQ ID NO: 454329 - protein, 12 aa, Homo sapiens
  CDR3 for alpha chain variable domain of TCR clone 227165 (TRAV3, TRAJ20)
CAVRDPDYTLSF

SEQ ID NO: 454330 - protein, 13 aa, Homo sapiens
  CDR3 for beta chain variable domain of TCR clone 227165 (TRBV9, TRBJ2-1)
CASIVGQGGEQFF

SEQ ID NO: 454331 - protein, 10 aa, Homo sapiens
  CDR3 for alpha chain variable domain of TCR clone 227166 (TRAV12-3, TRAJ49)
CAMNDDQFYF

SEQ ID NO: 454332 - protein, 13 aa, Homo sapiens
  CDR3 for beta chain variable domain of TCR clone 227166 (TRBV12-4, TRBJ1-1)
CASSPGTGFEDFS

SEQ ID NO: 454333 - protein, 11 aa, Homo sapiens
  CDR3 for alpha chain variable domain of TCR clone 227167 (TRAV13-2, TRAJ20)
CADSNDYKLSF

SEQ ID NO: 454334 - protein, 15 aa, Homo sapiens
  CDR3 for beta chain variable domain of TCR clone 227167 (TRBV20-1, TRBJ2-7)
CSARVPAAYFYEQYF

SEQ ID NO: 454335 - protein, 13 aa, Homo sapiens
  CDR3 for alpha chain variable domain of TCR clone 227168 (TRAV8-1, TRAJ9)
CAVNSVGGFKTIF

SEQ ID NO: 454336 - protein, 15 aa, Homo sapiens
  CDR3 for beta chain variable domain of TCR clone 227168 (TRBV11-2, TRBJ2-3)
CASSGRDGLTDTQYS

SEQ ID NO: 454337 - protein, 13 aa, Homo sapiens
  CDR3 for alpha chain variable domain of TCR clone 227169 (TRAV3, TRAJ20)
CAVRDGGDYKLSF

SEQ ID NO: 454338 - protein, 16 aa, Homo sapiens
  CDR3 for beta chain variable domain of TCR clone 227169 (TRBV4-1, TRBJ2-5)
CASRQTSGGPLETQYF

SEQ ID NO: 454339 - protein, 11 aa, Homo sapiens
  CDR3 for alpha chain variable domain of TCR clone 227170 (TRAV1-2, TRAJ11)
CAVRGYSTLTF

SEQ ID NO: 454340 - protein, 16 aa, Homo sapiens
  CDR3 for beta chain variable domain of TCR clone 227170 (TRBV27, TRBJ2-2)
CASSFRGLVRTGELFF

SEQ ID NO: 454341 - protein, 13 aa, Homo sapiens
  CDR3 for alpha chain variable domain of TCR clone 227171 (TRAV1-2, TRAJ20)
CAVRDGNDYKLSF

SEQ ID NO: 454342 - protein, 14 aa, Homo sapiens
  CDR3 for beta chain variable domain of TCR clone 227171 (TRBV7-2, TRBJ2-3)
CQQVRGGGRDTQYF

SEQ ID NO: 454343 - protein, 14 aa, Homo sapiens
  CDR3 for alpha chain variable domain of TCR clone 227172 (TRAV12-1, TRAJ24)
CVVRSTDSWGKFQF

SEQ ID NO: 454344 - protein, 15 aa, Homo sapiens
  CDR3 for beta chain variable domain of TCR clone 227172 (TRBV19, TRBJ1-1)
CASTSGQIQNTEAFF

SEQ ID NO: 454345 - protein, 12 aa, Homo sapiens
  CDR3 for alpha chain variable domain of TCR clone 227173 (TRAV8-4, TRAJ37)
CAKSSNTGKLIF

SEQ ID NO: 454346 - protein, 13 aa, Homo sapiens
  CDR3 for beta chain variable domain of TCR clone 227173 (TRBV7-3, TRBJ1-1)
CASSQDWGAEAFF

SEQ ID NO: 454347 - protein, 17 aa, Homo sapiens
  CDR3 for alpha chain variable domain of TCR clone 227174 (TRAV3, TRAJ6)
CAVRDGRRAGGSYIPTF

SEQ ID NO: 454348 - protein, 16 aa, Homo sapiens
  CDR3 for beta chain variable domain of TCR clone 227174 (TRBV15, TRBJ2-3)
CATSRDLGIVTDTQYF

SEQ ID NO: 454349 - protein, 11 aa, Homo sapiens
  CDR3 for alpha chain variable domain of TCR clone 227175 (TRAV40, TRAJ20)
SSGLNDYKLSF

SEQ ID NO: 454350 - protein, 14 aa, Homo sapiens
  CDR3 for beta chain variable domain of TCR clone 227175 (TRBV19, TRBJ2-1)
CASSSGRDYNEQFF

SEQ ID NO: 454351 - protein, 14 aa, Homo sapiens
  CDR3 for alpha chain variable domain of TCR clone 227176 (TRAV8-4, TRAJ13)
CAWTLSGGYQKVTF

SEQ ID NO: 454352 - protein, 14 aa, Homo sapiens
  CDR3 for beta chain variable domain of TCR clone 227176 (TRBV7-2, TRBJ1-2)
CASSQTGSTYGYTF

SEQ ID NO: 454353 - protein, 13 aa, Homo sapiens
  CDR3 for alpha chain variable domain of TCR clone 227177 (TRAV8-3, TRAJ28)
CAVGAVGSYQLTF

SEQ ID NO: 454354 - protein, 16 aa, Homo sapiens
  CDR3 for beta chain variable domain of TCR clone 227177 (TRBV11-2, TRBJ2-1)
GQQLIPPGVEYNEQFF

SEQ ID NO: 454355 - protein, 13 aa, Homo sapiens
  CDR3 for alpha chain variable domain of TCR clone 227178 (TRAV16, TRAJ47)
CALSDEYGNKLVF

SEQ ID NO: 454356 - protein, 11 aa, Homo sapiens
  CDR3 for beta chain variable domain of TCR clone 227178 (TRBV12-4, TRBJ2-3)
CASTATDTQYF

SEQ ID NO: 454357 - protein, 14 aa, Homo sapiens
  CDR3 for alpha chain variable domain of TCR clone 227179 (TRAV9-2, TRAJ39)
CALYIYNAGNMLTF

SEQ ID NO: 454358 - protein, 13 aa, Homo sapiens
  CDR3 for beta chain variable domain of TCR clone 227179 (TRBV7-3, TRBJ2-1)
CASSPVAYNEQFF

SEQ ID NO: 454359 - protein, 16 aa, Homo sapiens
  CDR3 for alpha chain variable domain of TCR clone 227180 (TRAV2, TRAJ26)
TTVLGPPGDYGKNFVF

SEQ ID NO: 454360 - protein, 13 aa, Homo sapiens
  CDR3 for beta chain variable domain of TCR clone 227180 (TRBV7-9, TRBJ1-2)
CASSLKQNYGYTF

SEQ ID NO: 454361 - protein, 13 aa, Homo sapiens
  CDR3 for alpha chain variable domain of TCR clone 227181 (TRAV4, TRAJ7)
CLVGVYGNNRLAF

SEQ ID NO: 454362 - protein, 15 aa, Homo sapiens
  CDR3 for beta chain variable domain of TCR clone 227181 (TRBV5-1, TRBJ2-1)
CASSLVANSYNEQFF

SEQ ID NO: 454363 - protein, 15 aa, Homo sapiens
  CDR3 for alpha chain variable domain of TCR clone 227182 (TRAV8-4, TRAJ36)
CAVRKSWAGANNLFF

SEQ ID NO: 454364 - protein, 17 aa, Homo sapiens
  CDR3 for beta chain variable domain of TCR clone 227182 (TRBV3-1, TRBJ2-2)
CASSQDSQGPNTGELFF

SEQ ID NO: 454365 - protein, 14 aa, Homo sapiens
  CDR3 for alpha chain variable domain of TCR clone 227183 (TRAV26-1, TRAJ34)
FIVRVAYNTDKLIF

SEQ ID NO: 454366 - protein, 14 aa, Homo sapiens
  CDR3 for beta chain variable domain of TCR clone 227183 (TRBV20-1, TRBJ2-7)
CSAWTALSSYEQYF

SEQ ID NO: 454367 - protein, 14 aa, Homo sapiens
  CDR3 for alpha chain variable domain of TCR clone 227184 (TRAV12-2, TRAJ3)
CAVSLYTSASKLIF

SEQ ID NO: 454368 - protein, 14 aa, Homo sapiens
  CDR3 for beta chain variable domain of TCR clone 227184 (TRBV27, TRBJ2-1)
CAGSIAETYNEQFF

SEQ ID NO: 454369 - protein, 14 aa, Homo sapiens
  CDR3 for alpha chain variable domain of TCR clone 227185 (TRAV1-2, TRAJ8)
CAVREDTGFQQLVF

SEQ ID NO: 454370 - protein, 12 aa, Homo sapiens
  CDR3 for beta chain variable domain of TCR clone 227185 (TRBV14, TRBJ1-1)
CASSQLKGRAFF

SEQ ID NO: 454371 - protein, 17 aa, Homo sapiens
  CDR3 for alpha chain variable domain of TCR clone 227186 (TRAV13-1, TRAJ52)
CAASSGAGGTSYGNLKF

SEQ ID NO: 454372 - protein, 15 aa, Homo sapiens
  CDR3 for beta chain variable domain of TCR clone 227186 (TRBV2, TRBJ2-1)
CASSELAGSYNEQFF

SEQ ID NO: 454373 - protein, 16 aa, Homo sapiens
  CDR3 for alpha chain variable domain of TCR clone 227187 (TRAV16, TRAJ52)
CALSAAGGTSYGQLTF

SEQ ID NO: 454374 - protein, 14 aa, Homo sapiens
  CDR3 for beta chain variable domain of TCR clone 227187 (TRBV7-3, TRBJ2-2)
CASSSGGYTGELFF

SEQ ID NO: 454375 - protein, 16 aa, Homo sapiens
  CDR3 for alpha chain variable domain of TCR clone 227188 (TRAV12-3, TRAJ53)
CAMSPGSGGSNYKLTF

SEQ ID NO: 454376 - protein, 20 aa, Homo sapiens
  CDR3 for beta chain variable domain of TCR clone 227188 (TRBV7-2, TRBJ2-2)
CASSHLFPGPTIHITGELFF

SEQ ID NO: 454377 - protein, 12 aa, Homo sapiens
  CDR3 for alpha chain variable domain of TCR clone 227189 (TRAV16, TRAJ10)
CSRTGGGNKLTF

SEQ ID NO: 454378 - protein, 14 aa, Homo sapiens
  CDR3 for beta chain variable domain of TCR clone 227189 (TRBV7-2, TRBJ2-1)
CASSLGVGYNQQFF

SEQ ID NO: 454379 - protein, 11 aa, Homo sapiens
  CDR3 for alpha chain variable domain of TCR clone 227190 (TRAV13-2, TRAJ23)
CAESPRGKLIF

SEQ ID NO: 454380 - protein, 10 aa, Homo sapiens
  CDR3 for beta chain variable domain of TCR clone 227190 (TRBV2, TRBJ2-5)
CASSAATQYF

SEQ ID NO: 454381 - protein, 14 aa, Homo sapiens
  CDR3 for alpha chain variable domain of TCR clone 227191 (TRAV12-3, TRAJ10)
SHLPLTGGGNKLTF

SEQ ID NO: 454382 - protein, 15 aa, Homo sapiens
  CDR3 for beta chain variable domain of TCR clone 227191 (TRBV27, TRBJ1-5)
CASSLGTGFDQPQHL

SEQ ID NO: 454383 - protein, 17 aa, Homo sapiens
  CDR3 for alpha chain variable domain of TCR clone 227192 (TRAV12-2, TRAJ42)
CAVNILNYGGSQGNLIF

SEQ ID NO: 454384 - protein, 15 aa, Homo sapiens
  CDR3 for beta chain variable domain of TCR clone 227192 (TRBV20-1, TRBJ2-7)
CSAESGTSGAYEQYF

SEQ ID NO: 454385 - protein, 13 aa, Homo sapiens
  CDR3 for alpha chain variable domain of TCR clone 227193 (TRAV35, TRAJ21)
CAGQLSNFNKFYF

SEQ ID NO: 454386 - protein, 11 aa, Homo sapiens
  CDR3 for beta chain variable domain of TCR clone 227193 (TRBV7-6, TRBJ2-5)
CASSSKETQYF

SEQ ID NO: 454387 - protein, 14 aa, Homo sapiens
  CDR3 for alpha chain variable domain of TCR clone 227194 (TRAV3, TRAJ6)
CAVRDGRGRRKLHT

SEQ ID NO: 454388 - protein, 15 aa, Homo sapiens
  CDR3 for beta chain variable domain of TCR clone 227194 (TRBV9, TRBJ2-1)
CASSLAGSSYNEQFF

SEQ ID NO: 454389 - protein, 13 aa, Homo sapiens
  CDR3 for alpha chain variable domain of TCR clone 227195 (TRAV12-1, TRAJ6)
CVVFPGGSYIPTF

SEQ ID NO: 454390 - protein, 16 aa, Homo sapiens
  CDR3 for beta chain variable domain of TCR clone 227195 (TRBV7-3, TRBJ2-2)
CASSLKRGTLSGELFF

SEQ ID NO: 454391 - protein, 12 aa, Homo sapiens
  CDR3 for alpha chain variable domain of TCR clone 227196 (TRAV2, TRAJ31)
CAVEEGNARLMF

SEQ ID NO: 454392 - protein, 18 aa, Homo sapiens
  CDR3 for beta chain variable domain of TCR clone 227196 (TRBV7-9, TRBJ2-3)
CASGLGLAGLATPDTQYF

SEQ ID NO: 454393 - protein, 14 aa, Homo sapiens
  CDR3 for alpha chain variable domain of TCR clone 227197 (TRAV23/DV6, TRAJ28)
CAASSGAGSYQLTF

SEQ ID NO: 454394 - protein, 15 aa, Homo sapiens
  CDR3 for beta chain variable domain of TCR clone 227197 (TRBV12-4, TRBJ1-1)
CQQQDRVVANTEAFF

SEQ ID NO: 454395 - protein, 13 aa, Homo sapiens
  CDR3 for alpha chain variable domain of TCR clone 227198 (TRAV12-3, TRAJ21)
CAPGPLNFNKFYF

SEQ ID NO: 454396 - protein, 15 aa, Homo sapiens
  CDR3 for beta chain variable domain of TCR clone 227198 (TRBV3-1, TRBJ2-7)
CASSQDAGRTYEQYF

SEQ ID NO: 454397 - protein, 15 aa, Homo sapiens
  CDR3 for alpha chain variable domain of TCR clone 227199 (TRAV21, TRAJ24)
CAARSSTDSWGKLQF

SEQ ID NO: 454398 - protein, 13 aa, Homo sapiens
  CDR3 for beta chain variable domain of TCR clone 227199 (TRBV11-2, TRBJ2-5)
YASSSTGEETQFF

SEQ ID NO: 454399 - protein, 14 aa, Homo sapiens
  CDR3 for alpha chain variable domain of TCR clone 227200 (TRAV8-2, TRAJ37)
CVVSISGNTGKLIF

SEQ ID NO: 454400 - protein, 17 aa, Homo sapiens
  CDR3 for beta chain variable domain of TCR clone 227200 (TRBV4-1, TRBJ1-4)
CASSQEGPRGVEEKLFF

SEQ ID NO: 454401 - protein, 13 aa, Homo sapiens
  CDR3 for alpha chain variable domain of TCR clone 227201 (TRAV2, TRAJ5)
CAFPDTGRRALTF

SEQ ID NO: 454402 - protein, 15 aa, Homo sapiens
  CDR3 for beta chain variable domain of TCR clone 227201 (TRBV7-2, TRBJ2-2)
CASSTRTGYTGELFF

SEQ ID NO: 454403 - protein, 14 aa, Homo sapiens
  CDR3 for alpha chain variable domain of TCR clone 227202 (TRAV12-1, TRAJ30)
CVVNIGGRDDKIIF

SEQ ID NO: 454404 - protein, 15 aa, Homo sapiens
  CDR3 for beta chain variable domain of TCR clone 227202 (TRBV7-9, TRBJ1-4)
CASSARTGGNEKLFF

SEQ ID NO: 454405 - protein, 11 aa, Homo sapiens
  CDR3 for alpha chain variable domain of TCR clone 227203 (TRAV2, TRAJ13)
CASGGYRKVTF

SEQ ID NO: 454406 - protein, 13 aa, Homo sapiens
  CDR3 for beta chain variable domain of TCR clone 227203 (TRBV2, TRBJ1-4)
CASSERAGEKLFF

SEQ ID NO: 454407 - protein, 16 aa, Homo sapiens
  CDR3 for alpha chain variable domain of TCR clone 227204 (TRAV26-1, TRAJ37)
CIVRGDGSGNTGKLIF

SEQ ID NO: 454408 - protein, 13 aa, Homo sapiens
  CDR3 for beta chain variable domain of TCR clone 227204 (TRBV4-1, TRBJ2-2)
CASSRENTGELFF

SEQ ID NO: 454409 - protein, 14 aa, Homo sapiens
  CDR3 for alpha chain variable domain of TCR clone 227205 (TRAV26-1, TRAJ38)
CVADNAGNNRKLIW

SEQ ID NO: 454410 - protein, 14 aa, Homo sapiens
  CDR3 for beta chain variable domain of TCR clone 227205 (TRBV19, TRBJ2-1)
CASPTFVLSGEQFF

SEQ ID NO: 454411 - protein, 15 aa, Homo sapiens
  CDR3 for alpha chain variable domain of TCR clone 227206 (TRAV12-1, TRAJ45)
CVVLSGGGGADGLTF

SEQ ID NO: 454412 - protein, 13 aa, Homo sapiens
  CDR3 for beta chain variable domain of TCR clone 227206 (TRBV7-3, TRBJ1-1)
CASSQDWGAEAFL

SEQ ID NO: 454413 - protein, 15 aa, Homo sapiens
  CDR3 for alpha chain variable domain of TCR clone 227207 (TRAV17, TRAJ23)
CATDAEDNQGGKLIF

SEQ ID NO: 454414 - protein, 19 aa, Homo sapiens
  CDR3 for beta chain variable domain of TCR clone 227207 (TRBV23-1, TRBJ2-3)
TVSLRQQPRSTGSTDTQYF

SEQ ID NO: 454415 - protein, 14 aa, Homo sapiens
  CDR3 for alpha chain variable domain of TCR clone 227208 (TRAV2, TRAJ9)
CAVEDRCGGFKTIF

SEQ ID NO: 454416 - protein, 16 aa, Homo sapiens
  CDR3 for beta chain variable domain of TCR clone 227208 (TRBV27, TRBJ2-2)
CASSFRGLVRTGELFF

SEQ ID NO: 454417 - protein, 19 aa, Homo sapiens
  CDR3 for alpha chain variable domain of TCR clone 227209 (TRAV3, TRAJ6)
CAVRDRNPSRSGGSYKPTF

SEQ ID NO: 454418 - protein, 15 aa, Homo sapiens
  CDR3 for beta chain variable domain of TCR clone 227209 (TRBV18, TRBJ2-7)
CAGSPTFMDSYEQYF

SEQ ID NO: 454419 - protein, 17 aa, Homo sapiens
  CDR3 for alpha chain variable domain of TCR clone 227210 (TRAV3, TRAJ42)
CAVRGRDYGGSQGNLIF

SEQ ID NO: 454420 - protein, 15 aa, Homo sapiens
  CDR3 for beta chain variable domain of TCR clone 227210 (TRBV3-1, TRBJ2-1)
CASSQVVDDGEEQFF

SEQ ID NO: 454421 - protein, 14 aa, Homo sapiens
  CDR3 for alpha chain variable domain of TCR clone 227211 (TRAV1-2, TRAJ8)
CAVREDTGFQKLVF

SEQ ID NO: 454422 - protein, 16 aa, Homo sapiens
  CDR3 for beta chain variable domain of TCR clone 227211 (TRBV6-1, TRBJ2-5)
CASSETLGRGAETQYF

SEQ ID NO: 454423 - protein, 12 aa, Homo sapiens
  CDR3 for alpha chain variable domain of TCR clone 227212 (TRAV17, TRAJ20)
CATQSNDYKLSF

SEQ ID NO: 454424 - protein, 14 aa, Homo sapiens
  CDR3 for beta chain variable domain of TCR clone 227212 (TRBV19, TRBJ1-1)
CASRPRDRDTEAFF

SEQ ID NO: 454425 - protein, 16 aa, Homo sapiens
  CDR3 for alpha chain variable domain of TCR clone 227213 (TRAV12-1, TRAJ53)
CVVTSVAGGSNYKLTF

SEQ ID NO: 454426 - protein, 15 aa, Homo sapiens
  CDR3 for beta chain variable domain of TCR clone 227213 (TRBV27, TRBJ2-1)
CASSNGGGSSNEQFF

SEQ ID NO: 454427 - protein, 12 aa, Homo sapiens
  CDR3 for alpha chain variable domain of TCR clone 227214 (TRAV13-1, TRAJ3)
CAASIYQQCFQD

SEQ ID NO: 454428 - protein, 17 aa, Homo sapiens
  CDR3 for beta chain variable domain of TCR clone 227214 (TRBV5-1, TRBJ2-7)
CASSKPEGREASYEQYF

SEQ ID NO: 454429 - protein, 11 aa, Homo sapiens
  CDR3 for alpha chain variable domain of TCR clone 227215 (TRAV12-2, TRAJ43)
CASPIGNDMRF

SEQ ID NO: 454430 - protein, 15 aa, Homo sapiens
  CDR3 for beta chain variable domain of TCR clone 227215 (TRBV4-1, TRBJ1-4)
CASSDTGGTNEKLSF

SEQ ID NO: 454431 - protein, 15 aa, Homo sapiens
  CDR3 for alpha chain variable domain of TCR clone 227216 (TRAV26-1, TRAJ29)
CIVRVEGSGNTPIVF

SEQ ID NO: 454432 - protein, 14 aa, Homo sapiens
  CDR3 for beta chain variable domain of TCR clone 227216 (TRBV18, TRBJ2-5)
CAGSPGVSQETQYF

SEQ ID NO: 454433 - protein, 14 aa, Homo sapiens
  CDR3 for alpha chain variable domain of TCR clone 227217 (TRAV8-3, TRAJ4)
CAVAASGGYNKLIF

SEQ ID NO: 454434 - protein, 16 aa, Homo sapiens
  CDR3 for beta chain variable domain of TCR clone 227217 (TRBV4-3, TRBJ2-2)
CASSHLQGSGTGELFF

SEQ ID NO: 454435 - protein, 14 aa, Homo sapiens
  CDR3 for alpha chain variable domain of TCR clone 227218 (TRAV12-2, TRAJ17)
CAVLFKAAGNKLTL

SEQ ID NO: 454436 - protein, 14 aa, Homo sapiens
  CDR3 for beta chain variable domain of TCR clone 227218 (TRBV7-3, TRBJ1-1)
CASSLKGGNTEAFF

SEQ ID NO: 454437 - protein, 14 aa, Homo sapiens
  CDR3 for alpha chain variable domain of TCR clone 227219 (TRAV20, TRAJ32)
CCGRYGGATNKLIF

SEQ ID NO: 454438 - protein, 15 aa, Homo sapiens
  CDR3 for beta chain variable domain of TCR clone 227219 (TRBV19, TRBJ2-2)
CQPISRTGATGELFF

SEQ ID NO: 454439 - protein, 17 aa, Homo sapiens
  CDR3 for alpha chain variable domain of TCR clone 227220 (TRAV3, TRAJ6)
CAVRDGPRAGGSYIHTF

SEQ ID NO: 454440 - protein, 16 aa, Homo sapiens
  CDR3 for beta chain variable domain of TCR clone 227220 (TRBV12-4, TRBJ2-7)
CASSLIGGTGTYEQYF

SEQ ID NO: 454441 - protein, 13 aa, Homo sapiens
  CDR3 for alpha chain variable domain of TCR clone 227221 (TRAV36/DV7, TRAJ37)
CAVFSSNTGKLII

SEQ ID NO: 454442 - protein, 15 aa, Homo sapiens
  CDR3 for beta chain variable domain of TCR clone 227221 (TRBV5-1, TRBJ2-2)
CASSSQGGNTGELFF

SEQ ID NO: 454443 - protein, 13 aa, Homo sapiens
  CDR3 for alpha chain variable domain of TCR clone 227222 (TRAV3, TRAJ20)
CCEAFCNEYKLSF

SEQ ID NO: 454444 - protein, 16 aa, Homo sapiens
  CDR3 for beta chain variable domain of TCR clone 227222 (TRBV12-5, TRBJ2-5)
CASGPRTSGNQETQYF

SEQ ID NO: 454445 - protein, 13 aa, Homo sapiens
  CDR3 for alpha chain variable domain of TCR clone 227223 (TRAV12-3, TRAJ13)
CAMSAGGYQKVTF

SEQ ID NO: 454446 - protein, 14 aa, Homo sapiens
  CDR3 for beta chain variable domain of TCR clone 227223 (TRBV5-1, TRBJ2-5)
CASSLAGKQETQYF

SEQ ID NO: 454447 - protein, 14 aa, Homo sapiens
  CDR3 for alpha chain variable domain of TCR clone 227224 (TRAV26-1, TRAJ45)
CIEVTGGGADGLTF

SEQ ID NO: 454448 - protein, 13 aa, Homo sapiens
  CDR3 for beta chain variable domain of TCR clone 227224 (TRBV7-6, TRBJ1-2)
FASSVVADYGYTF

SEQ ID NO: 454449 - protein, 13 aa, Homo sapiens
  CDR3 for alpha chain variable domain of TCR clone 227225 (TRAV21, TRAJ36)
CAVIKTWANNLFF

SEQ ID NO: 454450 - protein, 13 aa, Homo sapiens
  CDR3 for beta chain variable domain of TCR clone 227225 (TRBV29-1, TRBJ2-3)
CSATRGGRDTQYF

SEQ ID NO: 454451 - protein, 15 aa, Homo sapiens
  CDR3 for alpha chain variable domain of TCR clone 227226 (TRAV12-1, TRAJ9)
CVVSFGDTGGFKTIF

SEQ ID NO: 454452 - protein, 15 aa, Homo sapiens
  CDR3 for beta chain variable domain of TCR clone 227226 (TRBV5-1, TRBJ2-7)
CASSLGDFTTYEQYF

SEQ ID NO: 454453 - protein, 12 aa, Homo sapiens
  CDR3 for alpha chain variable domain of TCR clone 227227 (TRAV29/DV5, TRAJ36)
CAARRKTGATTS

SEQ ID NO: 454454 - protein, 14 aa, Homo sapiens
  CDR3 for beta chain variable domain of TCR clone 227227 (TRBV12-5, TRBJ2-5)
CASGSRTHQETQYF

SEQ ID NO: 454455 - protein, 14 aa, Homo sapiens
  CDR3 for alpha chain variable domain of TCR clone 227228 (TRAV17, TRAJ37)
CATDGSSNTGKLIF

SEQ ID NO: 454456 - protein, 13 aa, Homo sapiens
  CDR3 for beta chain variable domain of TCR clone 227228 (TRBV11-2, TRBJ2-1)
CASSLGLAGGRFF

SEQ ID NO: 454457 - protein, 13 aa, Homo sapiens
  CDR3 for alpha chain variable domain of TCR clone 227229 (TRAV9-2, TRAJ49)
CALRHFTGNHFYF

SEQ ID NO: 454458 - protein, 16 aa, Homo sapiens
  CDR3 for beta chain variable domain of TCR clone 227229 (TRBV7-9, TRBJ2-1)
CASSPRLGSSYNEQFF

SEQ ID NO: 454459 - protein, 20 aa, Homo sapiens
  CDR3 for alpha chain variable domain of TCR clone 227230 (TRAV26-1, TRAJ38)
CIADNAGNNHIQNPDPAVYQ

SEQ ID NO: 454460 - protein, 12 aa, Homo sapiens
  CDR3 for beta chain variable domain of TCR clone 227230 (TRBV11-2, TRBJ2-2)
CASRLGGGELFF

SEQ ID NO: 454461 - protein, 14 aa, Homo sapiens
  CDR3 for alpha chain variable domain of TCR clone 227231 (TRAV21, TRAJ4)
CAAPGLGGYNKLIF

SEQ ID NO: 454462 - protein, 13 aa, Homo sapiens
  CDR3 for beta chain variable domain of TCR clone 227231 (TRBV7-3, TRBJ2-1)
CASSPGSYNEQFF

SEQ ID NO: 454463 - protein, 13 aa, Homo sapiens
  CDR3 for alpha chain variable domain of TCR clone 227232 (TRAV8-3, TRAJ47)
CAVGARRGNKLVF

SEQ ID NO: 454464 - protein, 15 aa, Homo sapiens
  CDR3 for beta chain variable domain of TCR clone 227232 (TRBV6-5, TRBJ1-4)
CASSSVGGAGEKLFF

SEQ ID NO: 454465 - protein, 14 aa, Homo sapiens
  CDR3 for alpha chain variable domain of TCR clone 227233 (TRAV26-1, TRAJ38)
CIADNAGNNRKLIW

SEQ ID NO: 454466 - protein, 14 aa, Homo sapiens
  CDR3 for beta chain variable domain of TCR clone 227233 (TRBV6-1, TRBJ1-3)
CASVLGGGGNTIYF

SEQ ID NO: 454467 - protein, 10 aa, Homo sapiens
  CDR3 for alpha chain variable domain of TCR clone 227234 (TRAV12-3, TRAJ49)
CAMNDDQLYF

SEQ ID NO: 454468 - protein, 16 aa, Homo sapiens
  CDR3 for beta chain variable domain of TCR clone 227234 (TRBV20-1, TRBJ1-4)
CSAPGQGLVTNEKLFF

SEQ ID NO: 454469 - protein, 13 aa, Homo sapiens
  CDR3 for alpha chain variable domain of TCR clone 227235 (TRAV1-2, TRAJ11)
CAVRREGYSTLTF

SEQ ID NO: 454470 - protein, 13 aa, Homo sapiens
  CDR3 for beta chain variable domain of TCR clone 227235 (TRBV20-1, TRBJ2-5)
CSAATELQETQYF

SEQ ID NO: 454471 - protein, 13 aa, Homo sapiens
  CDR3 for alpha chain variable domain of TCR clone 227236 (TRAV12-3, TRAJ31)
CAMSANNNARLMF

SEQ ID NO: 454472 - protein, 16 aa, Homo sapiens
  CDR3 for beta chain variable domain of TCR clone 227236 (TRBV7-9, TRBJ1-2)
CASSLGCSSGEDGYTF

SEQ ID NO: 454473 - protein, 10 aa, Homo sapiens
  CDR3 for alpha chain variable domain of TCR clone 227237 (TRAV1-2, TRAJ31)
CVSEDARLMF

SEQ ID NO: 454474 - protein, 14 aa, Homo sapiens
  CDR3 for beta chain variable domain of TCR clone 227237 (TRBV19, TRBJ2-1)
CASPTFVLSGERFF

SEQ ID NO: 454475 - protein, 10 aa, Homo sapiens
  CDR3 for alpha chain variable domain of TCR clone 227238 (TRAV1-2, TRAJ31)
CAFFDARLMF

SEQ ID NO: 454476 - protein, 10 aa, Homo sapiens
  CDR3 for beta chain variable domain of TCR clone 227238 (TRBV5-3, TRBJ2-5)
AKSGEETQYF

SEQ ID NO: 454477 - protein, 12 aa, Homo sapiens
  CDR3 for alpha chain variable domain of TCR clone 227239 (TRAV23/DV6, TRAJ16)
CAARGRGQKLLF

SEQ ID NO: 454478 - protein, 14 aa, Homo sapiens
  CDR3 for beta chain variable domain of TCR clone 227239 (TRBV4-1, TRBJ1-1)
CASSRAGQSFEAFF

SEQ ID NO: 454479 - protein, 11 aa, Homo sapiens
  CDR3 for alpha chain variable domain of TCR clone 227240 (TRAV13-1, TRAJ15)
CAATPGTSLIF

SEQ ID NO: 454480 - protein, 17 aa, Homo sapiens
  CDR3 for beta chain variable domain of TCR clone 227240 (TRBV13, TRBJ2-3)
CASSLSRVAGGRNTQYF

SEQ ID NO: 454481 - protein, 10 aa, Homo sapiens
  CDR3 for alpha chain variable domain of TCR clone 227241 (TRAV23/DV6, TRAJ3)
CAATTFALGG

SEQ ID NO: 454482 - protein, 15 aa, Homo sapiens
  CDR3 for beta chain variable domain of TCR clone 227241 (TRBV19, TRBJ1-6)
CASSTQGAVGSPLDF

SEQ ID NO: 454483 - protein, 14 aa, Homo sapiens
  CDR3 for alpha chain variable domain of TCR clone 227242 (TRAV14/DV4, TRAJ30)
CNERGPNRDDKIIF

SEQ ID NO: 454484 - protein, 16 aa, Homo sapiens
  CDR3 for beta chain variable domain of TCR clone 227242 (TRBV12-5, TRBJ2-5)
CASGPRTSGNQETQYF

SEQ ID NO: 454485 - protein, 16 aa, Homo sapiens
  CDR3 for alpha chain variable domain of TCR clone 227243 (TRAV6, TRAJ37)
CSLDIFGSSNTGKLIL

SEQ ID NO: 454486 - protein, 14 aa, Homo sapiens
  CDR3 for beta chain variable domain of TCR clone 227243 (TRBV5-7, TRBJ2-7)
CASSLRSATYEQYF

SEQ ID NO: 454487 - protein, 16 aa, Homo sapiens
  CDR3 for alpha chain variable domain of TCR clone 227244 (TRAV12-2, TRAJ40)
CAVISGGTSGTYKYIF

SEQ ID NO: 454488 - protein, 16 aa, Homo sapiens
  CDR3 for beta chain variable domain of TCR clone 227244 (TRBV7-9, TRBJ2-1)
CASSDVAGGSYNEQFF

SEQ ID NO: 454489 - protein, 15 aa, Homo sapiens
  CDR3 for alpha chain variable domain of TCR clone 227245 (TRAV4, TRAJ27)
CLVGDEGTNAGKSTF

SEQ ID NO: 454490 - protein, 15 aa, Homo sapiens
  CDR3 for beta chain variable domain of TCR clone 227245 (TRBV5-1, TRBJ2-5)
CASSSGREMVETQYF

SEQ ID NO: 454491 - protein, 13 aa, Homo sapiens
  CDR3 for alpha chain variable domain of TCR clone 227246 (TRAV8-6, TRAJ49)
CAVITNTGNQFYF

SEQ ID NO: 454492 - protein, 17 aa, Homo sapiens
  CDR3 for beta chain variable domain of TCR clone 227246 (TRBV11-2, TRBJ2-1)
CASGLYPPGVEYNEQFF

SEQ ID NO: 454493 - protein, 11 aa, Homo sapiens
  CDR3 for alpha chain variable domain of TCR clone 227247 (TRAV4, TRAJ23)
RLVAPGGKLIF

SEQ ID NO: 454494 - protein, 15 aa, Homo sapiens
  CDR3 for beta chain variable domain of TCR clone 227247 (TRBV7-2, TRBJ2-1)
CAGSFQADEYNEQFF

SEQ ID NO: 454495 - protein, 10 aa, Homo sapiens
  CDR3 for alpha chain variable domain of TCR clone 227248 (TRAV13-1, TRAJ26)
CAPYGKNFVF

SEQ ID NO: 454496 - protein, 15 aa, Homo sapiens
  CDR3 for beta chain variable domain of TCR clone 227248 (TRBV28, TRBJ2-3)
CASSQELGGTDTQYF

SEQ ID NO: 454497 - protein, 15 aa, Homo sapiens
  CDR3 for alpha chain variable domain of TCR clone 227249 (TRAV12-1, TRAJ9)
VVVSFGDTGGFKTIF

SEQ ID NO: 454498 - protein, 19 aa, Homo sapiens
  CDR3 for beta chain variable domain of TCR clone 227249 (TRBV25-1, TRBJ2-2)
CAILVYRVDRGRKTGELFF

SEQ ID NO: 454499 - protein, 12 aa, Homo sapiens
  CDR3 for alpha chain variable domain of TCR clone 227250 (TRAV12-2, TRAJ9)
CAVYNGGFTTIF

SEQ ID NO: 454500 - protein, 14 aa, Homo sapiens
  CDR3 for beta chain variable domain of TCR clone 227250 (TRBV6-1, TRBJ1-5)
CASSETGMEQPQHF

SEQ ID NO: 454501 - protein, 17 aa, Homo sapiens
  CDR3 for alpha chain variable domain of TCR clone 227251 (TRAV26-1, TRAJ10)
CIVSFRGLTGGGNKLTF

SEQ ID NO: 454502 - protein, 14 aa, Homo sapiens
  CDR3 for beta chain variable domain of TCR clone 227251 (TRBV25-1, TRBJ1-1)
CASTHLGGNTEAFF

SEQ ID NO: 454503 - protein, 13 aa, Homo sapiens
  CDR3 for alpha chain variable domain of TCR clone 227252 (TRAV3, TRAJ41)
CAVSSNSGYSLNF

SEQ ID NO: 454504 - protein, 13 aa, Homo sapiens
  CDR3 for beta chain variable domain of TCR clone 227252 (TRBV20-1, TRBJ2-2)
CSALSGGAGELFF

SEQ ID NO: 454505 - protein, 15 aa, Homo sapiens
  CDR3 for alpha chain variable domain of TCR clone 227253 (TRAV21, TRAJ53)
CATLNSGGSNYKLTF

SEQ ID NO: 454506 - protein, 12 aa, Homo sapiens
  CDR3 for beta chain variable domain of TCR clone 227253 (TRBV5-4, TRBJ2-7)
CASSWEAYEQYF

SEQ ID NO: 454507 - protein, 10 aa, Homo sapiens
  CDR3 for alpha chain variable domain of TCR clone 227254 (TRAV1-2, TRAJ31)
CAFFDARLMF

SEQ ID NO: 454508 - protein, 14 aa, Homo sapiens
  CDR3 for beta chain variable domain of TCR clone 227254 (TRBV23-1, TRBJ2-5)
CASSFLRSQETQYF

SEQ ID NO: 454509 - protein, 14 aa, Homo sapiens
  CDR3 for alpha chain variable domain of TCR clone 227255 (TRAV12-1, TRAJ12)
CVVTRMDSSYKLIF

SEQ ID NO: 454510 - protein, 13 aa, Homo sapiens
  CDR3 for beta chain variable domain of TCR clone 227255 (TRBV20-1, TRBJ1-1)
CSARGGGNTEAYF

SEQ ID NO: 454511 - protein, 13 aa, Homo sapiens
  CDR3 for alpha chain variable domain of TCR clone 227256 (TRAV21, TRAJ20)
CAVGLRVDYKLRF

SEQ ID NO: 454512 - protein, 12 aa, Homo sapiens
  CDR3 for beta chain variable domain of TCR clone 227256 (TRBV27, TRBJ2-5)
CASSPTGETQYF

SEQ ID NO: 454513 - protein, 12 aa, Homo sapiens
  CDR3 for alpha chain variable domain of TCR clone 227257 (TRAV21, TRAJ11)
CAVRGGNITLTF

SEQ ID NO: 454514 - protein, 15 aa, Homo sapiens
  CDR3 for beta chain variable domain of TCR clone 227257 (TRBV6-1, TRBJ2-7)
CASSEPIAATTEQYF

SEQ ID NO: 454515 - protein, 11 aa, Homo sapiens
  CDR3 for alpha chain variable domain of TCR clone 227258 (TRAV2, TRAJ33)
CAVDSNYQLIW

SEQ ID NO: 454516 - protein, 16 aa, Homo sapiens
  CDR3 for beta chain variable domain of TCR clone 227258 (TRBV5-1, TRBJ2-3)
CASSLGLAVYTDTQYF

SEQ ID NO: 454517 - protein, 14 aa, Homo sapiens
  CDR3 for alpha chain variable domain of TCR clone 227259 (TRAV1-2, TRAJ16)
CAVNRLSDGQKLLF

SEQ ID NO: 454518 - protein, 13 aa, Homo sapiens
  CDR3 for beta chain variable domain of TCR clone 227259 (TRBV4-1, TRBJ2-1)
CASRQAGGDEQFF

SEQ ID NO: 454519 - protein, 10 aa, Homo sapiens
  CDR3 for alpha chain variable domain of TCR clone 227260 (TRAV26-1, TRAJ22)
CIAGSRQLTF

SEQ ID NO: 454520 - protein, 15 aa, Homo sapiens
  CDR3 for beta chain variable domain of TCR clone 227260 (TRBV4-1, TRBJ2-7)
CASSQNTGRLYEQYF

SEQ ID NO: 454521 - protein, 15 aa, Homo sapiens
  CDR3 for alpha chain variable domain of TCR clone 227261 (TRAV3, TRAJ22)
CAVRDRGGYARQLTF

SEQ ID NO: 454522 - protein, 16 aa, Homo sapiens
  CDR3 for beta chain variable domain of TCR clone 227261 (TRBV20-1, TRBJ1-4)
CSAPGQGLLTNEKLFF

SEQ ID NO: 454523 - protein, 14 aa, Homo sapiens
  CDR3 for alpha chain variable domain of TCR clone 227262 (TRAV4, TRAJ12)
CLVGDADSSYKLIF

SEQ ID NO: 454524 - protein, 16 aa, Homo sapiens
  CDR3 for beta chain variable domain of TCR clone 227262 (TRBV13, TRBJ2-3)
CQQPLQGSGGRNTQYF

SEQ ID NO: 454525 - protein, 12 aa, Homo sapiens
  CDR3 for alpha chain variable domain of TCR clone 227263 (TRAV16, TRAJ10)
CSRTGGGNKLTF

SEQ ID NO: 454526 - protein, 16 aa, Homo sapiens
  CDR3 for beta chain variable domain of TCR clone 227263 (TRBV19, TRBJ1-1)
CASRVDVTGAAWGAFF

SEQ ID NO: 454527 - protein, 12 aa, Homo sapiens
  CDR3 for alpha chain variable domain of TCR clone 227264 (TRAV12-3, TRAJ17)
CAMTLTGNKLTF

SEQ ID NO: 454528 - protein, 16 aa, Homo sapiens
  CDR3 for beta chain variable domain of TCR clone 227264 (TRBV12-4, TRBJ2-5)
GASSFFVRGRQETQYF

SEQ ID NO: 454529 - protein, 12 aa, Homo sapiens
  CDR3 for alpha chain variable domain of TCR clone 227265 (TRAV12-2, TRAJ47)
CAVAGYGNNLVF

SEQ ID NO: 454530 - protein, 14 aa, Homo sapiens
  CDR3 for beta chain variable domain of TCR clone 227265 (TRBV20-1, TRBJ1-1)
CSAMGGTANTEAFF

SEQ ID NO: 454531 - protein, 15 aa, Homo sapiens
  CDR3 for alpha chain variable domain of TCR clone 227266 (TRAV3, TRAJ3)
CAVRDMSSSASKILF

SEQ ID NO: 454532 - protein, 14 aa, Homo sapiens
  CDR3 for beta chain variable domain of TCR clone 227266 (TRBV6-6, TRBJ2-7)
CASSIAGGVDEQYF

SEQ ID NO: 454533 - protein, 15 aa, Homo sapiens
  CDR3 for alpha chain variable domain of TCR clone 227267 (TRAV27, TRAJ38)
CAARRNAGNTRKLMW

SEQ ID NO: 454534 - protein, 13 aa, Homo sapiens
  CDR3 for beta chain variable domain of TCR clone 227267 (TRBV12-5, TRBJ2-3)
CASGDRQSDTQYF

SEQ ID NO: 454535 - protein, 13 aa, Homo sapiens
  CDR3 for alpha chain variable domain of TCR clone 227268 (TRAV27, TRAJ53)
CAGQGSSNYKLTF

SEQ ID NO: 454536 - protein, 16 aa, Homo sapiens
  CDR3 for beta chain variable domain of TCR clone 227268 (TRBV7-3, TRBJ2-2)
CASSLKRGTLSGELFF

SEQ ID NO: 454537 - protein, 13 aa, Homo sapiens
  CDR3 for alpha chain variable domain of TCR clone 227269 (TRAV21, TRAJ20)
CAVGLRVDNKLSF

SEQ ID NO: 454538 - protein, 13 aa, Homo sapiens
  CDR3 for beta chain variable domain of TCR clone 227269 (TRBV6-1, TRBJ1-1)
CASSRQGNTEAFF

SEQ ID NO: 454539 - protein, 15 aa, Homo sapiens
  CDR3 for alpha chain variable domain of TCR clone 227270 (TRAV3, TRAJ22)
CAVRDRGGSARQLTF

SEQ ID NO: 454540 - protein, 15 aa, Homo sapiens
  CDR3 for beta chain variable domain of TCR clone 227270 (TRBV18, TRBJ2-1)
CASLPDRGRDNEQFF

SEQ ID NO: 454541 - protein, 16 aa, Homo sapiens
  CDR3 for alpha chain variable domain of TCR clone 227271 (TRAV13-1, TRAJ22)
CAAKGGRSGSASQLTF

SEQ ID NO: 454542 - protein, 15 aa, Homo sapiens
  CDR3 for beta chain variable domain of TCR clone 227271 (TRBV9, TRBJ1-6)
CASSVAGTGDSPLHF

SEQ ID NO: 454543 - protein, 16 aa, Homo sapiens
  CDR3 for alpha chain variable domain of TCR clone 227272 (TRAV3, TRAJ10)
CAVRDMRAAGGNKLTF

SEQ ID NO: 454544 - protein, 15 aa, Homo sapiens
  CDR3 for beta chain variable domain of TCR clone 227272 (TRBV20-1, TRBJ2-1)
CSAEGGLLAGDEQFF

SEQ ID NO: 454545 - protein, 14 aa, Homo sapiens
  CDR3 for alpha chain variable domain of TCR clone 227273 (TRAV27, TRAJ22)
CAGLPSGSARQLTF

SEQ ID NO: 454546 - protein, 16 aa, Homo sapiens
  CDR3 for beta chain variable domain of TCR clone 227273 (TRBV7-8, TRBJ2-4)
CASSAERTLAKNIQYF

SEQ ID NO: 454547 - protein, 20 aa, Homo sapiens
  CDR3 for alpha chain variable domain of TCR clone 227274 (TRAV26-1, TRAJ42)
CCVLFHRQTYYGGSQGNLIF

SEQ ID NO: 454548 - protein, 16 aa, Homo sapiens
  CDR3 for beta chain variable domain of TCR clone 227274 (TRBV7-3, TRBJ2-2)
CACSLKRGTLSGELFF

SEQ ID NO: 454549 - protein, 16 aa, Homo sapiens
  CDR3 for alpha chain variable domain of TCR clone 227275 (TRAV21, TRAJ37)
CAVRTAGSSNTGKLIF

SEQ ID NO: 454550 - protein, 15 aa, Homo sapiens
  CDR3 for beta chain variable domain of TCR clone 227275 (TRBV19, TRBJ1-2)
CASSVGQVLNYGYTF

SEQ ID NO: 454551 - protein, 12 aa, Homo sapiens
  CDR3 for alpha chain variable domain of TCR clone 227276 (TRAV3, TRAJ20)
CAVRDPDYKLSF

SEQ ID NO: 454552 - protein, 14 aa, Homo sapiens
  CDR3 for beta chain variable domain of TCR clone 227276 (TRBV4-2, TRBJ2-1)
CSSGLDRAYNEQFF

SEQ ID NO: 454553 - protein, 15 aa, Homo sapiens
  CDR3 for alpha chain variable domain of TCR clone 227277 (TRAV21, TRAJ53)
CATLNSGGSNYKLTF

SEQ ID NO: 454554 - protein, 16 aa, Homo sapiens
  CDR3 for beta chain variable domain of TCR clone 227277 (TRBV9, TRBJ2-1)
CASSVGGGENYNEQFF

SEQ ID NO: 454555 - protein, 15 aa, Homo sapiens
  CDR3 for alpha chain variable domain of TCR clone 227278 (TRAV26-1, TRAJ17)
CIVSSFKAAGNKLTF

SEQ ID NO: 454556 - protein, 12 aa, Homo sapiens
  CDR3 for beta chain variable domain of TCR clone 227278 (TRBV11-2, TRBJ2-2)
CASSLGGGELFF

SEQ ID NO: 454557 - protein, 14 aa, Homo sapiens
  CDR3 for alpha chain variable domain of TCR clone 227279 (TRAV17, TRAJ16)
CATADFSDGQKLLF

SEQ ID NO: 454558 - protein, 12 aa, Homo sapiens
  CDR3 for beta chain variable domain of TCR clone 227279 (TRBV24-1, TRBJ1-1)
CATIYPDTEAFF

SEQ ID NO: 454559 - protein, 14 aa, Homo sapiens
  CDR3 for alpha chain variable domain of TCR clone 227280 (TRAV12-2, TRAJ11)
CAVNRESGYSSLTF

SEQ ID NO: 454560 - protein, 10 aa, Homo sapiens
  CDR3 for beta chain variable domain of TCR clone 227280 (TRBV20-1, TRBJ2-5)
CSARLETQYF

SEQ ID NO: 454561 - protein, 18 aa, Homo sapiens
  CDR3 for alpha chain variable domain of TCR clone 227281 (TRAV26-1, TRAJ22)
CIVRVALIYSGSASQLTF

SEQ ID NO: 454562 - protein, 13 aa, Homo sapiens
  CDR3 for beta chain variable domain of TCR clone 227281 (TRBV13, TRBJ2-5)
CASSPEVGETQYF

SEQ ID NO: 454563 - protein, 15 aa, Homo sapiens
  CDR3 for alpha chain variable domain of TCR clone 227282 (TRAV26-1, TRAJ17)
CIVSSFKAAGNKLTF

SEQ ID NO: 454564 - protein, 16 aa, Homo sapiens
  CDR3 for beta chain variable domain of TCR clone 227282 (TRBV5-7, TRBJ2-1)
CASSGGLAGAYNEQFF

SEQ ID NO: 454565 - protein, 11 aa, Homo sapiens
  CDR3 for alpha chain variable domain of TCR clone 227283 (TRAV2, TRAJ13)
CASGGYQTVTF

SEQ ID NO: 454566 - protein, 16 aa, Homo sapiens
  CDR3 for beta chain variable domain of TCR clone 227283 (TRBV19, TRBJ2-1)
CASSMGGGSSYNEQFF

SEQ ID NO: 454567 - protein, 13 aa, Homo sapiens
  CDR3 for alpha chain variable domain of TCR clone 227284 (TRAV8-3, TRAJ48)
CCGCNFGNEKLTF

SEQ ID NO: 454568 - protein, 12 aa, Homo sapiens
  CDR3 for beta chain variable domain of TCR clone 227284 (TRBV7-2, TRBJ2-5)
CASSQYQETQFF

SEQ ID NO: 454569 - protein, 14 aa, Homo sapiens
  CDR3 for alpha chain variable domain of TCR clone 227285 (TRAV9-2, TRAJ39)
CALYIYNAGNMLTF

SEQ ID NO: 454570 - protein, 13 aa, Homo sapiens
  CDR3 for beta chain variable domain of TCR clone 227285 (TRBV2, TRBJ1-1)
CASRWTVNTEAFF

SEQ ID NO: 454571 - protein, 12 aa, Homo sapiens
  CDR3 for alpha chain variable domain of TCR clone 227286 (TRAV30, TRAJ43)
CGTEERGNDMRF

SEQ ID NO: 454572 - protein, 16 aa, Homo sapiens
  CDR3 for beta chain variable domain of TCR clone 227286 (TRBV19, TRBJ1-5)
CASSIDRGGPRQPQHF

SEQ ID NO: 454573 - protein, 13 aa, Homo sapiens
  CDR3 for alpha chain variable domain of TCR clone 227287 (TRAV21, TRAJ20)
CAVRVFADYKLSF

SEQ ID NO: 454574 - protein, 14 aa, Homo sapiens
  CDR3 for beta chain variable domain of TCR clone 227287 (TRBV4-2, TRBJ1-4)
CASSPSSGNEKLFF

SEQ ID NO: 454575 - protein, 14 aa, Homo sapiens
  CDR3 for alpha chain variable domain of TCR clone 227288 (TRAV20, TRAJ56)
CAVQFGGANSKLTF

SEQ ID NO: 454576 - protein, 14 aa, Homo sapiens
  CDR3 for beta chain variable domain of TCR clone 227288 (TRBV20-1, TRBJ2-1)
CSAKRGRSSYEQYF

SEQ ID NO: 454577 - protein, 14 aa, Homo sapiens
  CDR3 for alpha chain variable domain of TCR clone 227289 (TRAV26-1, TRAJ21)
CIVRVVYNFNKFYF

SEQ ID NO: 454578 - protein, 17 aa, Homo sapiens
  CDR3 for beta chain variable domain of TCR clone 227289 (TRBV11-2, TRBJ2-1)
CASSLDPPGVEYNEQFF

SEQ ID NO: 454579 - protein, 15 aa, Homo sapiens
  CDR3 for alpha chain variable domain of TCR clone 227290 (TRAV4, )
CLVDIQNPDPAVYQL

SEQ ID NO: 454580 - protein, 15 aa, Homo sapiens
  CDR3 for beta chain variable domain of TCR clone 227290 (TRBV20-1, TRBJ1-5)
CSASRRGDLGQPQHF

SEQ ID NO: 454581 - protein, 13 aa, Homo sapiens
  CDR3 for alpha chain variable domain of TCR clone 227291 (TRAV12-1, TRAJ20)
CLGQRFNDYKLSF

SEQ ID NO: 454582 - protein, 14 aa, Homo sapiens
  CDR3 for beta chain variable domain of TCR clone 227291 (TRBV6-3, TRBJ1-5)
CASSYSRFAQPQHF

SEQ ID NO: 454583 - protein, 11 aa, Homo sapiens
  CDR3 for alpha chain variable domain of TCR clone 227292 (TRAV4, TRAJ23)
CLVAPGGKLIF

SEQ ID NO: 454584 - protein, 13 aa, Homo sapiens
  CDR3 for beta chain variable domain of TCR clone 227292 (TRBV4-2, TRBJ1-1)
CASSPTGDTEAFF

SEQ ID NO: 454585 - protein, 18 aa, Homo sapiens
  CDR3 for alpha chain variable domain of TCR clone 227293 (TRAV13-1, TRAJ52)
CVASKRSAGGTSYGKLTF

SEQ ID NO: 454586 - protein, 13 aa, Homo sapiens
  CDR3 for beta chain variable domain of TCR clone 227293 (TRBV12-4, TRBJ1-2)
CASSLRQGEGYTF

SEQ ID NO: 454587 - protein, 14 aa, Homo sapiens
  CDR3 for alpha chain variable domain of TCR clone 227294 (TRAV13-1, TRAJ20)
CAARPGSNDYKLSF

SEQ ID NO: 454588 - protein, 15 aa, Homo sapiens
  CDR3 for beta chain variable domain of TCR clone 227294 (TRBV7-3, TRBJ2-1)
CASSLGQGPFGEQFF

SEQ ID NO: 454589 - protein, 11 aa, Homo sapiens
  CDR3 for alpha chain variable domain of TCR clone 227295 (TRAV12-3, TRAJ43)
CAMSVSNDMRF

SEQ ID NO: 454590 - protein, 15 aa, Homo sapiens
  CDR3 for beta chain variable domain of TCR clone 227295 (TRBV7-2, TRBJ2-1)
CASSPGLAGGNEQFF

SEQ ID NO: 454591 - protein, 10 aa, Homo sapiens
  CDR3 for alpha chain variable domain of TCR clone 227296 (TRAV16, TRAJ22)
LAMYLRQLTF

SEQ ID NO: 454592 - protein, 15 aa, Homo sapiens
  CDR3 for beta chain variable domain of TCR clone 227296 (TRBV7-9, TRBJ1-6)
CASSSTGRGNSPLHF

SEQ ID NO: 454593 - protein, 20 aa, Homo sapiens
  CDR3 for alpha chain variable domain of TCR clone 227297 (TRAV1-1, TRAJ9)
CLLLLRCEGFLSGGYNKLIF

SEQ ID NO: 454594 - protein, 16 aa, Homo sapiens
  CDR3 for beta chain variable domain of TCR clone 227297 (TRBV28, TRBJ1-4)
CASSPPYRGRSEKLFF

SEQ ID NO: 454595 - protein, 14 aa, Homo sapiens
  CDR3 for alpha chain variable domain of TCR clone 227298 (TRAV8-1, TRAJ5)
CAVRTDTGRIALTF

SEQ ID NO: 454596 - protein, 15 aa, Homo sapiens
  CDR3 for beta chain variable domain of TCR clone 227298 (TRBV7-2, TRBJ1-2)
CASSPRAGWNYGYTF

SEQ ID NO: 454597 - protein, 15 aa, Homo sapiens
  CDR3 for alpha chain variable domain of TCR clone 227299 (TRAV26-1, TRAJ22)
CIVRVSFWFCKATDR

SEQ ID NO: 454598 - protein, 14 aa, Homo sapiens
  CDR3 for beta chain variable domain of TCR clone 227299 (TRBV18, TRBJ2-7)
CASSPRGGAYEQYF

SEQ ID NO: 454599 - protein, 10 aa, Homo sapiens
  CDR3 for alpha chain variable domain of TCR clone 227300 (TRAV21, TRAJ43)
CAVRIGDMSF

SEQ ID NO: 454600 - protein, 13 aa, Homo sapiens
  CDR3 for beta chain variable domain of TCR clone 227300 (TRBV20-1, TRBJ2-7)
CSAPGLADYEQYF

SEQ ID NO: 454601 - protein, 16 aa, Homo sapiens
  CDR3 for alpha chain variable domain of TCR clone 227301 (TRAV3, TRAJ6)
SAVRDGMGRRKLHTYI

SEQ ID NO: 454602 - protein, 15 aa, Homo sapiens
  CDR3 for beta chain variable domain of TCR clone 227301 (TRBV9, TRBJ2-1)
CASSLAGSSYNELFF

SEQ ID NO: 454603 - protein, 14 aa, Homo sapiens
  CDR3 for alpha chain variable domain of TCR clone 227302 (TRAV1-2, TRAJ24)
CAVLTTDSWGQFQF

SEQ ID NO: 454604 - protein, 15 aa, Homo sapiens
  CDR3 for beta chain variable domain of TCR clone 227302 (TRBV6-6, TRBJ2-7)
CASSYSYGGSYEQYF

SEQ ID NO: 454605 - protein, 13 aa, Homo sapiens
  CDR3 for alpha chain variable domain of TCR clone 227303 (TRAV1-2, TRAJ9)
CAALNTVGFRTIF

SEQ ID NO: 454606 - protein, 13 aa, Homo sapiens
  CDR3 for beta chain variable domain of TCR clone 227303 (TRBV19, TRBJ1-2)
CASSVPGQDGYTF

SEQ ID NO: 454607 - protein, 11 aa, Homo sapiens
  CDR3 for alpha chain variable domain of TCR clone 227304 (TRAV2, TRAJ13)
CASVGYQKVTF

SEQ ID NO: 454608 - protein, 16 aa, Homo sapiens
  CDR3 for beta chain variable domain of TCR clone 227304 (TRBV6-1, TRBJ2-5)
CVSSETLDRGAETQYF

SEQ ID NO: 454609 - protein, 15 aa, Homo sapiens
  CDR3 for alpha chain variable domain of TCR clone 227305 (TRAV13-1, TRAJ52)
CAATSPRTSYGKLTF

SEQ ID NO: 454610 - protein, 16 aa, Homo sapiens
  CDR3 for beta chain variable domain of TCR clone 227305 (TRBV7-6, TRBJ1-6)
CASSLSSRIGDSPLHF

SEQ ID NO: 454611 - protein, 14 aa, Homo sapiens
  CDR3 for alpha chain variable domain of TCR clone 227306 (TRAV1-2, TRAJ16)
CAVNRFSDGQKLLF

SEQ ID NO: 454612 - protein, 14 aa, Homo sapiens
  CDR3 for beta chain variable domain of TCR clone 227306 (TRBV11-2, TRBJ2-3)
FASSRLARTDTQYF

SEQ ID NO: 454613 - protein, 15 aa, Homo sapiens
  CDR3 for alpha chain variable domain of TCR clone 227307 (TRAV30, TRAJ54)
CGTEQIRDSGSSGSP

SEQ ID NO: 454614 - protein, 11 aa, Homo sapiens
  CDR3 for beta chain variable domain of TCR clone 227307 (TRBV25-1, TRBJ2-4)
CQSRDQNIQYF

SEQ ID NO: 454615 - protein, 11 aa, Homo sapiens
  CDR3 for alpha chain variable domain of TCR clone 227308 (TRAV12-1, TRAJ30)
CVVNGQDKIIF

SEQ ID NO: 454616 - protein, 12 aa, Homo sapiens
  CDR3 for beta chain variable domain of TCR clone 227308 (TRBV27, TRBJ2-2)
CASKLLTGELFF

SEQ ID NO: 454617 - protein, 11 aa, Homo sapiens
  CDR3 for alpha chain variable domain of TCR clone 227309 (TRAV23/DV6, TRAJ43)
CAASSENDMRF

SEQ ID NO: 454618 - protein, 14 aa, Homo sapiens
  CDR3 for beta chain variable domain of TCR clone 227309 (TRBV4-1, TRBJ1-2)
CASSQDPLPYGYTF

SEQ ID NO: 454619 - protein, 15 aa, Homo sapiens
  CDR3 for alpha chain variable domain of TCR clone 227310 (TRAV26-1, TRAJ15)
CIVRAANQAGTALNF

SEQ ID NO: 454620 - protein, 15 aa, Homo sapiens
  CDR3 for beta chain variable domain of TCR clone 227310 (TRBV20-1, TRBJ1-1)
CSARSAATSNTEAFL

SEQ ID NO: 454621 - protein, 21 aa, Homo sapiens
  CDR3 for alpha chain variable domain of TCR clone 227311 (TRAV2, TRAJ27)
ILQVREADAAVYSANAGKSTF

SEQ ID NO: 454622 - protein, 15 aa, Homo sapiens
  CDR3 for beta chain variable domain of TCR clone 227311 (TRBV7-7, TRBJ1-3)
CASSQGENSGNTIYF

SEQ ID NO: 454623 - protein, 16 aa, Homo sapiens
  CDR3 for alpha chain variable domain of TCR clone 227312 (TRAV3, TRAJ10)
CAVRDMRAGGGNKLTF

SEQ ID NO: 454624 - protein, 17 aa, Homo sapiens
  CDR3 for beta chain variable domain of TCR clone 227312 (TRBV3-1, TRBJ2-5)
CASSQDTLAGGGETQYF

SEQ ID NO: 454625 - protein, 14 aa, Homo sapiens
  CDR3 for alpha chain variable domain of TCR clone 227313 (TRAV17, TRAJ45)
CASASGGGADGLTF

SEQ ID NO: 454626 - protein, 15 aa, Homo sapiens
  CDR3 for beta chain variable domain of TCR clone 227313 (TRBV11-2, TRBJ2-1)
CASSRNRGLMYEQFF

SEQ ID NO: 454627 - protein, 12 aa, Homo sapiens
  CDR3 for alpha chain variable domain of TCR clone 227314 (TRAV8-3, TRAJ20)
CAVGANDYKLSF

SEQ ID NO: 454628 - protein, 17 aa, Homo sapiens
  CDR3 for beta chain variable domain of TCR clone 227314 (TRBV19, TRBJ2-7)
CASSISFYDSYPYEQYF

SEQ ID NO: 454629 - protein, 14 aa, Homo sapiens
  CDR3 for alpha chain variable domain of TCR clone 227315 (TRAV3, TRAJ17)
CAVRDAAAGNKLTF

SEQ ID NO: 454630 - protein, 14 aa, Homo sapiens
  CDR3 for beta chain variable domain of TCR clone 227315 (TRBV12-5, TRBJ2-5)
CASGSRTHQETQYF

SEQ ID NO: 454631 - protein, 10 aa, Homo sapiens
  CDR3 for alpha chain variable domain of TCR clone 227316 (TRAV23/DV6, TRAJ57)
CAASSTLSQG

SEQ ID NO: 454632 - protein, 15 aa, Homo sapiens
  CDR3 for beta chain variable domain of TCR clone 227316 (TRBV7-3, TRBJ2-1)
CASSLGQGPFGEQFF

SEQ ID NO: 454633 - protein, 16 aa, Homo sapiens
  CDR3 for alpha chain variable domain of TCR clone 227317 (TRAV36/DV7, TRAJ30)
CAVETYGLDIDDKIIF

SEQ ID NO: 454634 - protein, 15 aa, Homo sapiens
  CDR3 for beta chain variable domain of TCR clone 227317 (TRBV6-6, TRBJ2-5)
CASSYGKIIQETQYF

SEQ ID NO: 454635 - protein, 17 aa, Homo sapiens
  CDR3 for alpha chain variable domain of TCR clone 227318 (TRAV3, TRAJ6)
CAVRDGPRAGGSYIPTF

SEQ ID NO: 454636 - protein, 18 aa, Homo sapiens
  CDR3 for beta chain variable domain of TCR clone 227318 (TRBV7-3, TRBJ2-3)
CASSSTGNYPGSTDTQYF

SEQ ID NO: 454637 - protein, 12 aa, Homo sapiens
  CDR3 for alpha chain variable domain of TCR clone 227319 (TRAV8-3, TRAJ43)
CAVVDNNNDMRF

SEQ ID NO: 454638 - protein, 13 aa, Homo sapiens
  CDR3 for beta chain variable domain of TCR clone 227319 (TRBV7-3, TRBJ1-1)
CASSQDWGAEAFF

SEQ ID NO: 454639 - protein, 18 aa, Homo sapiens
  CDR3 for alpha chain variable domain of TCR clone 227320 (TRAV21, TRAJ52)
CAVRPSPAGGPSYGKLTF

SEQ ID NO: 454640 - protein, 12 aa, Homo sapiens
  CDR3 for beta chain variable domain of TCR clone 227320 (TRBV11-2, TRBJ2-2)
CASSLGGGELFF

SEQ ID NO: 454641 - protein, 11 aa, Homo sapiens
  CDR3 for alpha chain variable domain of TCR clone 227321 (TRAV3, TRAJ21)
CAVGNFNKFYF

SEQ ID NO: 454642 - protein, 13 aa, Homo sapiens
  CDR3 for beta chain variable domain of TCR clone 227321 (TRBV11-2, TRBJ2-5)
CASSRGPSETQYF

SEQ ID NO: 454643 - protein, 16 aa, Homo sapiens
  CDR3 for alpha chain variable domain of TCR clone 227322 (TRAV23/DV6, TRAJ9)
CAASIGGNTGGFKTIF

SEQ ID NO: 454644 - protein, 14 aa, Homo sapiens
  CDR3 for beta chain variable domain of TCR clone 227322 (TRBV9, TRBJ2-7)
CASSVGVGSYEQYI

SEQ ID NO: 454645 - protein, 15 aa, Homo sapiens
  CDR3 for alpha chain variable domain of TCR clone 227323 (TRAV17, TRAJ16)
CATALRFSDGRKLLF

SEQ ID NO: 454646 - protein, 15 aa, Homo sapiens
  CDR3 for beta chain variable domain of TCR clone 227323 (TRBV20-1, TRBJ1-1)
CSASRGVTGNTEAFF

SEQ ID NO: 454647 - protein, 16 aa, Homo sapiens
  CDR3 for alpha chain variable domain of TCR clone 227324 (TRAV12-1, TRAJ22)
CVVNLFLNRSARQLTF

SEQ ID NO: 454648 - protein, 16 aa, Homo sapiens
  CDR3 for beta chain variable domain of TCR clone 227324 (TRBV13, TRBJ2-2)
CASSPRTGEHTGELFF

SEQ ID NO: 454649 - protein, 12 aa, Homo sapiens
  CDR3 for alpha chain variable domain of TCR clone 227325 (TRAV30, TRAJ43)
CGTEERGNDMSF

SEQ ID NO: 454650 - protein, 11 aa, Homo sapiens
  CDR3 for beta chain variable domain of TCR clone 227325 (TRBV29-1, TRBJ2-5)
CSEDRTGTQYF

SEQ ID NO: 454651 - protein, 14 aa, Homo sapiens
  CDR3 for alpha chain variable domain of TCR clone 227326 (TRAV23/DV6, TRAJ22)
CADISSGSARQLTF

SEQ ID NO: 454652 - protein, 15 aa, Homo sapiens
  CDR3 for beta chain variable domain of TCR clone 227326 (TRBV29-1, TRBJ2-7)
CSVEFFDRGSYEQYF

SEQ ID NO: 454653 - protein, 14 aa, Homo sapiens
  CDR3 for alpha chain variable domain of TCR clone 227327 (TRAV1-2, TRAJ8)
CAVREDTGFQKLVF

SEQ ID NO: 454654 - protein, 12 aa, Homo sapiens
  CDR3 for beta chain variable domain of TCR clone 227327 (TRBV19, TRBJ2-1)
CASSMQDTEQSF

SEQ ID NO: 454655 - protein, 13 aa, Homo sapiens
  CDR3 for alpha chain variable domain of TCR clone 227328 (TRAV12-2, TRAJ42)
CAVKRGGQGNLIF

SEQ ID NO: 454656 - protein, 16 aa, Homo sapiens
  CDR3 for beta chain variable domain of TCR clone 227328 (TRBV9, TRBJ2-2)
CASSAMGKGNTGELFF

SEQ ID NO: 454657 - protein, 14 aa, Homo sapiens
  CDR3 for alpha chain variable domain of TCR clone 227329 (TRAV1-2, TRAJ8)
CAVREDTGFQKLVF

SEQ ID NO: 454658 - protein, 15 aa, Homo sapiens
  CDR3 for beta chain variable domain of TCR clone 227329 (TRBV19, TRBJ2-1)
CASSLTGGAYNEQFF

SEQ ID NO: 454659 - protein, 12 aa, Homo sapiens
  CDR3 for alpha chain variable domain of TCR clone 227330 (TRAV13-1, TRAJ49)
CAAPTTGNQFNF

SEQ ID NO: 454660 - protein, 17 aa, Homo sapiens
  CDR3 for beta chain variable domain of TCR clone 227330 (TRBV25-1, TRBJ2-7)
CASSDARVVFSSYEQYF

SEQ ID NO: 454661 - protein, 10 aa, Homo sapiens
  CDR3 for alpha chain variable domain of TCR clone 227331 (TRAV8-4, TRAJ43)
CAVSADDMRF

SEQ ID NO: 454662 - protein, 15 aa, Homo sapiens
  CDR3 for beta chain variable domain of TCR clone 227331 (TRBV5-1, TRBJ2-3)
CASSVTSASTDTQYF

SEQ ID NO: 454663 - protein, 13 aa, Homo sapiens
  CDR3 for alpha chain variable domain of TCR clone 227332 (TRAV21, TRAJ27)
CAARPGNAGKSTF

SEQ ID NO: 454664 - protein, 15 aa, Homo sapiens
  CDR3 for beta chain variable domain of TCR clone 227332 (TRBV20-1, TRBJ2-7)
CSARDRVSGMDEHYF

SEQ ID NO: 454665 - protein, 12 aa, Homo sapiens
  CDR3 for alpha chain variable domain of TCR clone 227333 (TRAV12-3, TRAJ17)
CAMTLTGNKLTF

SEQ ID NO: 454666 - protein, 13 aa, Homo sapiens
  CDR3 for beta chain variable domain of TCR clone 227333 (TRBV7-6, TRBJ1-6)
CASSFRGNSPLHF

SEQ ID NO: 454667 - protein, 14 aa, Homo sapiens
  CDR3 for alpha chain variable domain of TCR clone 227334 (TRAV20, TRAJ16)
CAVRFFSDGQKLLF

SEQ ID NO: 454668 - protein, 13 aa, Homo sapiens
  CDR3 for beta chain variable domain of TCR clone 227334 (TRBV19, TRBJ2-5)
CASSMGGAGTQYC

SEQ ID NO: 454669 - protein, 14 aa, Homo sapiens
  CDR3 for alpha chain variable domain of TCR clone 227335 (TRAV13-1, TRAJ13)
CAPSRVGGYQKVTF

SEQ ID NO: 454670 - protein, 14 aa, Homo sapiens
  CDR3 for beta chain variable domain of TCR clone 227335 (TRBV5-1, TRBJ2-7)
CASSATGGYDEQYF

SEQ ID NO: 454671 - protein, 12 aa, Homo sapiens
  CDR3 for alpha chain variable domain of TCR clone 227336 (TRAV8-3, TRAJ20)
CAVGANDYKLSF

SEQ ID NO: 454672 - protein, 17 aa, Homo sapiens
  CDR3 for beta chain variable domain of TCR clone 227336 (TRBV13, TRBJ2-3)
CASSLPRVAGGRNTQYF

SEQ ID NO: 454673 - protein, 14 aa, Homo sapiens
  CDR3 for alpha chain variable domain of TCR clone 227337 (TRAV12-2, TRAJ40)
CAVKIPPGTYKYIF

SEQ ID NO: 454674 - protein, 14 aa, Homo sapiens
  CDR3 for beta chain variable domain of TCR clone 227337 (TRBV7-2, TRBJ2-7)
CASSPKTSFYEQYF

SEQ ID NO: 454675 - protein, 13 aa, Homo sapiens
  CDR3 for alpha chain variable domain of TCR clone 227338 (TRAV3, TRAJ33)
CAVRDRSNYKLIW

SEQ ID NO: 454676 - protein, 16 aa, Homo sapiens
  CDR3 for beta chain variable domain of TCR clone 227338 (TRBV4-2, TRBJ2-7)
CASSQDRGTSSYEQYF

SEQ ID NO: 454677 - protein, 14 aa, Homo sapiens
  CDR3 for alpha chain variable domain of TCR clone 227339 (TRAV20, TRAJ22)
CAVALGGSARQLTF

SEQ ID NO: 454678 - protein, 17 aa, Homo sapiens
  CDR3 for beta chain variable domain of TCR clone 227339 (TRBV7-2, TRBJ1-1)
CASSFAGDRDTEAFLDK

SEQ ID NO: 454679 - protein, 18 aa, Homo sapiens
  CDR3 for alpha chain variable domain of TCR clone 227340 (TRAV17, TRAJ45)
CATSLDLYSGGGADGLTF

SEQ ID NO: 454680 - protein, 15 aa, Homo sapiens
  CDR3 for beta chain variable domain of TCR clone 227340 (TRBV5-1, TRBJ2-3)
CASSVTSGSTDTQYF

SEQ ID NO: 454681 - protein, 13 aa, Homo sapiens
  CDR3 for alpha chain variable domain of TCR clone 227341 (TRAV12-3, TRAJ33)
CAMSVNSNYQLIW

SEQ ID NO: 454682 - protein, 12 aa, Homo sapiens
  CDR3 for beta chain variable domain of TCR clone 227341 (TRBV28, TRBJ2-3)
CASSLYRDTQYF

SEQ ID NO: 454683 - protein, 13 aa, Homo sapiens
  CDR3 for alpha chain variable domain of TCR clone 227342 (TRAV20, TRAJ37)
CEGCSSNTGKLIF

SEQ ID NO: 454684 - protein, 11 aa, Homo sapiens
  CDR3 for beta chain variable domain of TCR clone 227342 (TRBV12-4, TRBJ2-3)
CASTATDTQYF

SEQ ID NO: 454685 - protein, 14 aa, Homo sapiens
  CDR3 for alpha chain variable domain of TCR clone 227343 (TRAV13-2, TRAJ43)
CAEIPTYNNNDMRF

SEQ ID NO: 454686 - protein, 15 aa, Homo sapiens
  CDR3 for beta chain variable domain of TCR clone 227343 (TRBV7-9, TRBJ2-2)
CASGPLDTFLGELFF

SEQ ID NO: 454687 - protein, 14 aa, Homo sapiens
  CDR3 for alpha chain variable domain of TCR clone 227344 (TRAV35, TRAJ50)
CAGHRKTSYDKAIF

SEQ ID NO: 454688 - protein, 13 aa, Homo sapiens
  CDR3 for beta chain variable domain of TCR clone 227344 (TRBV7-7, TRBJ2-3)
CASSLRRADTQYF

SEQ ID NO: 454689 - protein, 17 aa, Homo sapiens
  CDR3 for alpha chain variable domain of TCR clone 227345 (TRAV3, TRAJ12)
CAVRDGRRMDSSYKLIF

SEQ ID NO: 454690 - protein, 14 aa, Homo sapiens
  CDR3 for beta chain variable domain of TCR clone 227345 (TRBV6-5, TRBJ1-2)
CASTRGGGSDGYTF

SEQ ID NO: 454691 - protein, 12 aa, Homo sapiens
  CDR3 for alpha chain variable domain of TCR clone 227346 (TRAV38-1, TRAJ57)
CAFMKLPPTLFF

SEQ ID NO: 454692 - protein, 13 aa, Homo sapiens
  CDR3 for beta chain variable domain of TCR clone 227346 (TRBV19, TRBJ2-7)
CASSTSGSYEQYF

SEQ ID NO: 454693 - protein, 15 aa, Homo sapiens
  CDR3 for alpha chain variable domain of TCR clone 227347 (TRAV3, TRAJ5)
CAVRDLDTGRRALTF

SEQ ID NO: 454694 - protein, 15 aa, Homo sapiens
  CDR3 for beta chain variable domain of TCR clone 227347 (TRBV20-1, TRBJ2-1)
CSARSLGGPGNEQFF

SEQ ID NO: 454695 - protein, 15 aa, Homo sapiens
  CDR3 for alpha chain variable domain of TCR clone 227348 (TRAV8-3, TRAJ45)
CASSYYGGGAAGLTF

SEQ ID NO: 454696 - protein, 13 aa, Homo sapiens
  CDR3 for beta chain variable domain of TCR clone 227348 (TRBV10-3, TRBJ2-7)
CASKLAVNYEQYF

SEQ ID NO: 454697 - protein, 17 aa, Homo sapiens
  CDR3 for alpha chain variable domain of TCR clone 227349 (TRAV3, TRAJ6)
CAVRDGPRAGGSYIPPF

SEQ ID NO: 454698 - protein, 12 aa, Homo sapiens
  CDR3 for beta chain variable domain of TCR clone 227349 (TRBV11-2, TRBJ2-1)
CASSPGNNEQFF

SEQ ID NO: 454699 - protein, 14 aa, Homo sapiens
  CDR3 for alpha chain variable domain of TCR clone 227350 (TRAV3, TRAJ34)
CALRDINNTDKLIF

SEQ ID NO: 454700 - protein, 14 aa, Homo sapiens
  CDR3 for beta chain variable domain of TCR clone 227350 (TRBV7-2, TRBJ2-2)
CASSLGQNTGELFF

SEQ ID NO: 454701 - protein, 13 aa, Homo sapiens
  CDR3 for alpha chain variable domain of TCR clone 227351 (TRAV20, TRAJ48)
CSVQGVGNEKLTF

SEQ ID NO: 454702 - protein, 14 aa, Homo sapiens
  CDR3 for beta chain variable domain of TCR clone 227351 (TRBV27, TRBJ2-7)
CASSFRDGPYEQYF

SEQ ID NO: 454703 - protein, 16 aa, Homo sapiens
  CDR3 for alpha chain variable domain of TCR clone 227352 (TRAV12-3, TRAJ53)
CAMSPGSGGSNYKMKF

SEQ ID NO: 454704 - protein, 11 aa, Homo sapiens
  CDR3 for beta chain variable domain of TCR clone 227352 (TRBV29-1, TRBJ2-5)
CSEDRTGTQYF

SEQ ID NO: 454705 - protein, 14 aa, Homo sapiens
  CDR3 for alpha chain variable domain of TCR clone 227353 (TRAV6, TRAJ37)
CAPGSQGNTGKLIL

SEQ ID NO: 454706 - protein, 15 aa, Homo sapiens
  CDR3 for beta chain variable domain of TCR clone 227353 (TRBV2, TRBJ2-1)
CASSEEREGDNEQFF

SEQ ID NO: 454707 - protein, 14 aa, Homo sapiens
  CDR3 for alpha chain variable domain of TCR clone 227354 (TRAV16, TRAJ15)
CALSFNQAGTALIF

SEQ ID NO: 454708 - protein, 13 aa, Homo sapiens
  CDR3 for beta chain variable domain of TCR clone 227354 (TRBV19, TRBJ1-1)
CASSITGESEAFF

SEQ ID NO: 454709 - protein, 14 aa, Homo sapiens
  CDR3 for alpha chain variable domain of TCR clone 227355 (TRAV26-1, TRAJ40)
CIVRLLSGTYIYIF

SEQ ID NO: 454710 - protein, 13 aa, Homo sapiens
  CDR3 for beta chain variable domain of TCR clone 227355 (TRBV3-1, TRBJ1-1)
CASSQLQGAEAFF

SEQ ID NO: 454711 - protein, 14 aa, Homo sapiens
  CDR3 for alpha chain variable domain of TCR clone 227356 (TRAV2, TRAJ9)
CAVEDRSGGFKTIF

SEQ ID NO: 454712 - protein, 16 aa, Homo sapiens
  CDR3 for beta chain variable domain of TCR clone 227356 (TRBV7-3, TRBJ2-1)
CASSVEGYRSYNEQFF

SEQ ID NO: 454713 - protein, 21 aa, Homo sapiens
  CDR3 for alpha chain variable domain of TCR clone 227357 (TRAV30, TRAJ43)
GLPAQLLRNLLPIIELNDMRF

SEQ ID NO: 454714 - protein, 14 aa, Homo sapiens
  CDR3 for beta chain variable domain of TCR clone 227357 (TRBV27, TRBJ2-1)
CASRYLGGGKEQFF

SEQ ID NO: 454715 - protein, 12 aa, Homo sapiens
  CDR3 for alpha chain variable domain of TCR clone 227358 (TRAV29/DV5, TRAJ49)
CAATDTGNQFYF

SEQ ID NO: 454716 - protein, 15 aa, Homo sapiens
  CDR3 for beta chain variable domain of TCR clone 227358 (TRBV7-2, TRBJ2-3)
CASSLAGAFIDTQYF

SEQ ID NO: 454717 - protein, 23 aa, Homo sapiens
  CDR3 for alpha chain variable domain of TCR clone 227359 (TRAV12-2, TRAJ22)
CAVSFRVHPGPPIVSGSARQLTF

SEQ ID NO: 454718 - protein, 13 aa, Homo sapiens
  CDR3 for beta chain variable domain of TCR clone 227359 (TRBV12-4, TRBJ1-2)
CASSLDSNYGYAF

SEQ ID NO: 454719 - protein, 17 aa, Homo sapiens
  CDR3 for alpha chain variable domain of TCR clone 227360 (TRAV3, TRAJ6)
CAVRDGPRAGGSYIPTF

SEQ ID NO: 454720 - protein, 20 aa, Homo sapiens
  CDR3 for beta chain variable domain of TCR clone 227360 (TRBV28, TRBJ2-1)
CASTTIGRSPGLAGGNEQSF

SEQ ID NO: 454721 - protein, 11 aa, Homo sapiens
  CDR3 for alpha chain variable domain of TCR clone 227361 (TRAV12-1, TRAJ3)
CVVSSASKIIF

SEQ ID NO: 454722 - protein, 14 aa, Homo sapiens
  CDR3 for beta chain variable domain of TCR clone 227361 (TRBV5-1, TRBJ2-1)
CASSALWAGNEQFF

SEQ ID NO: 454723 - protein, 13 aa, Homo sapiens
  CDR3 for alpha chain variable domain of TCR clone 227362 (TRAV17, TRAJ29)
CATFGSGNTPLVF

SEQ ID NO: 454724 - protein, 15 aa, Homo sapiens
  CDR3 for beta chain variable domain of TCR clone 227362 (TRBV25-1, TRBJ1-4)
CASSPGDSTNEKLFF

SEQ ID NO: 454725 - protein, 23 aa, Homo sapiens
  CDR3 for alpha chain variable domain of TCR clone 227363 (TRAV13-1, )
CAASTRRAQIPDIQNPDPAVYQL

SEQ ID NO: 454726 - protein, 17 aa, Homo sapiens
  CDR3 for beta chain variable domain of TCR clone 227363 (TRBV11-2, TRBJ2-1)
CASSLYPPGVEYNEQFF

SEQ ID NO: 454727 - protein, 14 aa, Homo sapiens
  CDR3 for alpha chain variable domain of TCR clone 227364 (TRAV9-2, TRAJ39)
CALYLYNAGNMLTF

SEQ ID NO: 454728 - protein, 15 aa, Homo sapiens
  CDR3 for beta chain variable domain of TCR clone 227364 (TRBV20-1, TRBJ1-5)
CSAREGGYSNQPQHF

SEQ ID NO: 454729 - protein, 18 aa, Homo sapiens
  CDR3 for alpha chain variable domain of TCR clone 227365 (TRAV12-3, TRAJ52)
CAMSRTNAGGTSYGKLTF

SEQ ID NO: 454730 - protein, 16 aa, Homo sapiens
  CDR3 for beta chain variable domain of TCR clone 227365 (TRBV19, TRBJ2-7)
CASSPAGSGSLNEQYF

SEQ ID NO: 454731 - protein, 14 aa, Homo sapiens
  CDR3 for alpha chain variable domain of TCR clone 227366 (TRAV35, TRAJ33)
CAGSSQDSNYQLIW

SEQ ID NO: 454732 - protein, 14 aa, Homo sapiens
  CDR3 for beta chain variable domain of TCR clone 227366 (TRBV18, TRBJ2-7)
CAGSPRGGAYEQYF

SEQ ID NO: 454733 - protein, 14 aa, Homo sapiens
  CDR3 for alpha chain variable domain of TCR clone 227367 (TRAV13-1, TRAJ35)
CAASKGGFGNVLHC

SEQ ID NO: 454734 - protein, 13 aa, Homo sapiens
  CDR3 for beta chain variable domain of TCR clone 227367 (TRBV27, TRBJ1-6)
CASSGTGDSPLHF

SEQ ID NO: 454735 - protein, 18 aa, Homo sapiens
  CDR3 for alpha chain variable domain of TCR clone 227368 (TRAV26-1, TRAJ23)
CIVRVGLEAWNQGGKLIF

SEQ ID NO: 454736 - protein, 13 aa, Homo sapiens
  CDR3 for beta chain variable domain of TCR clone 227368 (TRBV4-2, TRBJ1-1)
CASSQAGNTEAFF

SEQ ID NO: 454737 - protein, 13 aa, Homo sapiens
  CDR3 for alpha chain variable domain of TCR clone 227369 (TRAV9-2, TRAJ33)
CALRMDSNYQLIW

SEQ ID NO: 454738 - protein, 13 aa, Homo sapiens
  CDR3 for beta chain variable domain of TCR clone 227369 (TRBV7-3, TRBJ2-5)
CASSFRGGETQYF

SEQ ID NO: 454739 - protein, 15 aa, Homo sapiens
  CDR3 for alpha chain variable domain of TCR clone 227370 (TRAV38-1, TRAJ45)
CAFMKGGGGADGLTF

SEQ ID NO: 454740 - protein, 13 aa, Homo sapiens
  CDR3 for beta chain variable domain of TCR clone 227370 (TRBV7-9, TRBJ1-2)
CASSLKQNYGYSF

SEQ ID NO: 454741 - protein, 16 aa, Homo sapiens
  CDR3 for alpha chain variable domain of TCR clone 227371 (TRAV8-3, TRAJ8)
CAVPRDGNTGFQKLVF

SEQ ID NO: 454742 - protein, 14 aa, Homo sapiens
  CDR3 for beta chain variable domain of TCR clone 227371 (TRBV4-1, TRBJ2-2)
CASSQAMNTGELFF

SEQ ID NO: 454743 - protein, 14 aa, Homo sapiens
  CDR3 for alpha chain variable domain of TCR clone 227372 (TRAV12-2, TRAJ9)
CAVNMEGGGFKTIF

SEQ ID NO: 454744 - protein, 12 aa, Homo sapiens
  CDR3 for beta chain variable domain of TCR clone 227372 (TRBV14, TRBJ1-1)
CASSQLKGLAFF

SEQ ID NO: 454745 - protein, 11 aa, Homo sapiens
  CDR3 for alpha chain variable domain of TCR clone 227373 (TRAV2, TRAJ13)
CASWGYQKVTF

SEQ ID NO: 454746 - protein, 17 aa, Homo sapiens
  CDR3 for beta chain variable domain of TCR clone 227373 (TRBV7-3, TRBJ2-3)
CASSLMKRMRGADTQYF

SEQ ID NO: 454747 - protein, 14 aa, Homo sapiens
  CDR3 for alpha chain variable domain of TCR clone 227374 (TRAV8-3, TRAJ4)
CAVGASGGYNKLIF

SEQ ID NO: 454748 - protein, 17 aa, Homo sapiens
  CDR3 for beta chain variable domain of TCR clone 227374 (TRBV11-2, TRBJ2-1)
CASSLYPPGVEYNEKFF

SEQ ID NO: 454749 - protein, 11 aa, Homo sapiens
  CDR3 for alpha chain variable domain of TCR clone 227375 (TRAV2, TRAJ33)
CAVDSNYQLIW

SEQ ID NO: 454750 - protein, 15 aa, Homo sapiens
  CDR3 for beta chain variable domain of TCR clone 227375 (TRBV19, TRBJ1-2)
CASSVRQVLSYGYTF

SEQ ID NO: 454751 - protein, 12 aa, Homo sapiens
  CDR3 for alpha chain variable domain of TCR clone 227376 (TRAV8-3, TRAJ20)
CAVGANDYKLSF

SEQ ID NO: 454752 - protein, 14 aa, Homo sapiens
  CDR3 for beta chain variable domain of TCR clone 227376 (TRBV4-2, TRBJ2-7)
CASSRAVTSYEQYF

SEQ ID NO: 454753 - protein, 14 aa, Homo sapiens
  CDR3 for alpha chain variable domain of TCR clone 227377 (TRAV8-4, TRAJ9)
CAVRINTGGFKTIF

SEQ ID NO: 454754 - protein, 15 aa, Homo sapiens
  CDR3 for beta chain variable domain of TCR clone 227377 (TRBV24-1, TRBJ1-4)
CATSDPQGADEKLFF

SEQ ID NO: 454755 - protein, 14 aa, Homo sapiens
  CDR3 for alpha chain variable domain of TCR clone 227378 (TRAV6, TRAJ37)
CALGSLGNTGKLIF

SEQ ID NO: 454756 - protein, 15 aa, Homo sapiens
  CDR3 for beta chain variable domain of TCR clone 227378 (TRBV2, TRBJ2-1)
CASSEEREGDNEQFF

SEQ ID NO: 454757 - protein, 13 aa, Homo sapiens
  CDR3 for alpha chain variable domain of TCR clone 227379 (TRAV12-2, TRAJ20)
CAVYPSNDYKLSF

SEQ ID NO: 454758 - protein, 15 aa, Homo sapiens
  CDR3 for beta chain variable domain of TCR clone 227379 (TRBV2, TRBJ1-2)
CASSESRTVNYGYTF

SEQ ID NO: 454759 - protein, 12 aa, Homo sapiens
  CDR3 for alpha chain variable domain of TCR clone 227380 (TRAV30, TRAJ43)
CGTEERGNNMRF

SEQ ID NO: 454760 - protein, 13 aa, Homo sapiens
  CDR3 for beta chain variable domain of TCR clone 227380 (TRBV7-9, TRBJ2-3)
CASSPGSTDTQYF

SEQ ID NO: 454761 - protein, 16 aa, Homo sapiens
  CDR3 for alpha chain variable domain of TCR clone 227381 (TRAV4, TRAJ6)
CLVGVYASGGSYIPTL

SEQ ID NO: 454762 - protein, 15 aa, Homo sapiens
  CDR3 for beta chain variable domain of TCR clone 227381 (TRBV14, TRBJ2-5)
CASSQGDRDQETQYF

SEQ ID NO: 454763 - protein, 18 aa, Homo sapiens
  CDR3 for alpha chain variable domain of TCR clone 227382 (TRAV26-2, TRAJ54)
CILRDVEVGIQGAQKLGF

SEQ ID NO: 454764 - protein, 14 aa, Homo sapiens
  CDR3 for beta chain variable domain of TCR clone 227382 (TRBV19, TRBJ1-4)
CASAIEAEGEKLFF

SEQ ID NO: 454765 - protein, 11 aa, Homo sapiens
  CDR3 for alpha chain variable domain of TCR clone 227383 (TRAV12-1, TRAJ34)
CVGNKGRELIF

SEQ ID NO: 454766 - protein, 12 aa, Homo sapiens
  CDR3 for beta chain variable domain of TCR clone 227383 (TRBV2, TRBJ2-1)
CAYGPPGNEQFF

SEQ ID NO: 454767 - protein, 14 aa, Homo sapiens
  CDR3 for alpha chain variable domain of TCR clone 227384 (TRAV16, TRAJ33)
CALSAMDSNYQLIW

SEQ ID NO: 454768 - protein, 12 aa, Homo sapiens
  CDR3 for beta chain variable domain of TCR clone 227384 (TRBV2, TRBJ2-4)
CASQGDSGIQYF

SEQ ID NO: 454769 - protein, 13 aa, Homo sapiens
  CDR3 for alpha chain variable domain of TCR clone 227385 (TRAV13-1, TRAJ40)
CAASKGGTYNYIF

SEQ ID NO: 454770 - protein, 13 aa, Homo sapiens
  CDR3 for beta chain variable domain of TCR clone 227385 (TRBV7-6, TRBJ1-2)
CASSLVADYGYTF

SEQ ID NO: 454771 - protein, 13 aa, Homo sapiens
  CDR3 for alpha chain variable domain of TCR clone 227386 (TRAV17, TRAJ13)
CATDSGGYQKVTF

SEQ ID NO: 454772 - protein, 15 aa, Homo sapiens
  CDR3 for beta chain variable domain of TCR clone 227386 (TRBV5-1, TRBJ2-7)
CASSLNGGPAREQYF

SEQ ID NO: 454773 - protein, 17 aa, Homo sapiens
  CDR3 for alpha chain variable domain of TCR clone 227387 (TRAV13-1, TRAJ31)
CAPRDRPMFGDGTQLVV

SEQ ID NO: 454774 - protein, 17 aa, Homo sapiens
  CDR3 for beta chain variable domain of TCR clone 227387 (TRBV13, TRBJ2-3)
CASSLSRVAGGRNTQYF

SEQ ID NO: 454775 - protein, 18 aa, Homo sapiens
  CDR3 for alpha chain variable domain of TCR clone 227388 (TRAV13-1, TRAJ52)
CPASKRSAGGTSYGKLTF

SEQ ID NO: 454776 - protein, 15 aa, Homo sapiens
  CDR3 for beta chain variable domain of TCR clone 227388 (TRBV6-3, TRBJ2-7)
CASSSPGTVFYEQYF

SEQ ID NO: 454777 - protein, 11 aa, Homo sapiens
  CDR3 for alpha chain variable domain of TCR clone 227389 (TRAV12-2, TRAJ49)
CALQGGNQFYF

SEQ ID NO: 454778 - protein, 13 aa, Homo sapiens
  CDR3 for beta chain variable domain of TCR clone 227389 (TRBV4-1, TRBJ1-1)
CSSSQLGTGEAFF

SEQ ID NO: 454779 - protein, 14 aa, Homo sapiens
  CDR3 for alpha chain variable domain of TCR clone 227390 (TRAV8-3, TRAJ4)
CAGGAAGGYNKLIF

SEQ ID NO: 454780 - protein, 13 aa, Homo sapiens
  CDR3 for beta chain variable domain of TCR clone 227390 (TRBV4-1, TRBJ2-1)
CASSQAGGDEQFF

SEQ ID NO: 454781 - protein, 13 aa, Homo sapiens
  CDR3 for alpha chain variable domain of TCR clone 227391 (TRAV3, TRAJ21)
CAVREPDFNKFYF

SEQ ID NO: 454782 - protein, 15 aa, Homo sapiens
  CDR3 for beta chain variable domain of TCR clone 227391 (TRBV24-1, TRBJ2-1)
CATSEPGQGYNEQFF

SEQ ID NO: 454783 - protein, 14 aa, Homo sapiens
  CDR3 for alpha chain variable domain of TCR clone 227392 (TRAV12-1, TRAJ43)
CVVNGRSNNNDMCF

SEQ ID NO: 454784 - protein, 13 aa, Homo sapiens
  CDR3 for beta chain variable domain of TCR clone 227392 (TRBV2, TRBJ1-4)
CASSELGVEKLFF

SEQ ID NO: 454785 - protein, 11 aa, Homo sapiens
  CDR3 for alpha chain variable domain of TCR clone 227393 (TRAV3, TRAJ49)
CAPITGNQFYF

SEQ ID NO: 454786 - protein, 16 aa, Homo sapiens
  CDR3 for beta chain variable domain of TCR clone 227393 (TRBV5-1, TRBJ2-3)
CASSVFPMSGTDTQYF

SEQ ID NO: 454787 - protein, 13 aa, Homo sapiens
  CDR3 for alpha chain variable domain of TCR clone 227394 (TRAV8-4, TRAJ9)
CAVSETGGFKTIF

SEQ ID NO: 454788 - protein, 14 aa, Homo sapiens
  CDR3 for beta chain variable domain of TCR clone 227394 (TRBV2, TRBJ2-7)
CASSLTSGGYEQYF

SEQ ID NO: 454789 - protein, 13 aa, Homo sapiens
  CDR3 for alpha chain variable domain of TCR clone 227395 (TRAV13-1, TRAJ5)
CAASDTGRRALTF

SEQ ID NO: 454790 - protein, 14 aa, Homo sapiens
  CDR3 for beta chain variable domain of TCR clone 227395 (TRBV28, TRBJ2-5)
CASTGAGGVETQYF

SEQ ID NO: 454791 - protein, 16 aa, Homo sapiens
  CDR3 for alpha chain variable domain of TCR clone 227396 (TRAV27, TRAJ13)
CAGAKSDSGGYQKVTF

SEQ ID NO: 454792 - protein, 14 aa, Homo sapiens
  CDR3 for beta chain variable domain of TCR clone 227396 (TRBV5-7, TRBJ2-3)
CASRTSGGTDTQYF

SEQ ID NO: 454793 - protein, 13 aa, Homo sapiens
  CDR3 for alpha chain variable domain of TCR clone 227397 (TRAV12-1, TRAJ26)
CVVRRNYGQNFVF

SEQ ID NO: 454794 - protein, 15 aa, Homo sapiens
  CDR3 for beta chain variable domain of TCR clone 227397 (TRBV6-3, TRBJ2-7)
CASSSPGTVFYEQYF

SEQ ID NO: 454795 - protein, 12 aa, Homo sapiens
  CDR3 for alpha chain variable domain of TCR clone 227398 (TRAV8-3, TRAJ26)
CAGDNYGQNFVF

SEQ ID NO: 454796 - protein, 16 aa, Homo sapiens
  CDR3 for beta chain variable domain of TCR clone 227398 (TRBV7-2, TRBJ2-6)
CASSERRASGANVLTF

SEQ ID NO: 454797 - protein, 11 aa, Homo sapiens
  CDR3 for alpha chain variable domain of TCR clone 227399 (TRAV1-2, TRAJ20)
CAVSNDYKLSF

SEQ ID NO: 454798 - protein, 11 aa, Homo sapiens
  CDR3 for beta chain variable domain of TCR clone 227399 (TRBV6-3, TRBJ2-3)
CATGQADTQYF

SEQ ID NO: 454799 - protein, 16 aa, Homo sapiens
  CDR3 for alpha chain variable domain of TCR clone 227400 (TRAV35, TRAJ28)
CAGQKYSGAGSYQLTF

SEQ ID NO: 454800 - protein, 13 aa, Homo sapiens
  CDR3 for beta chain variable domain of TCR clone 227400 (TRBV6-5, TRBJ2-1)
CASRGRVGDEQFF

SEQ ID NO: 454801 - protein, 13 aa, Homo sapiens
  CDR3 for alpha chain variable domain of TCR clone 227401 (TRAV12-3, TRAJ33)
CAMSVNSNYQLIW

SEQ ID NO: 454802 - protein, 13 aa, Homo sapiens
  CDR3 for beta chain variable domain of TCR clone 227401 (TRBV7-2, TRBJ2-2)
CAGSVAVTGELFF

SEQ ID NO: 454803 - protein, 13 aa, Homo sapiens
  CDR3 for alpha chain variable domain of TCR clone 227402 (TRAV12-3, TRAJ13)
CAMTSGGYQKVTF

SEQ ID NO: 454804 - protein, 13 aa, Homo sapiens
  CDR3 for beta chain variable domain of TCR clone 227402 (TRBV20-1, TRBJ2-2)
SAVLLAGGRGAVF

SEQ ID NO: 454805 - protein, 13 aa, Homo sapiens
  CDR3 for alpha chain variable domain of TCR clone 227403 (TRAV36/DV7, TRAJ37)
CAVFSSNTGNLIF

SEQ ID NO: 454806 - protein, 12 aa, Homo sapiens
  CDR3 for beta chain variable domain of TCR clone 227403 (TRBV11-2, TRBJ2-2)
CASSLGGGELFF

SEQ ID NO: 454807 - protein, 14 aa, Homo sapiens
  CDR3 for alpha chain variable domain of TCR clone 227404 (TRAV1-2, TRAJ16)
CAVNRFSDGQKLLF

SEQ ID NO: 454808 - protein, 13 aa, Homo sapiens
  CDR3 for beta chain variable domain of TCR clone 227404 (TRBV11-3, TRBJ1-1)
CASSSNRDTEAFF

SEQ ID NO: 454809 - protein, 14 aa, Homo sapiens
  CDR3 for alpha chain variable domain of TCR clone 227405 (TRAV1-2, TRAJ8)
CAVREDTGFQTLGF

SEQ ID NO: 454810 - protein, 15 aa, Homo sapiens
  CDR3 for beta chain variable domain of TCR clone 227405 (TRBV6-3, TRBJ2-7)
CASSSPGTVFYEQYF

SEQ ID NO: 454811 - protein, 16 aa, Homo sapiens
  CDR3 for alpha chain variable domain of TCR clone 227406 (TRAV8-3, TRAJ44)
CAVGASNTGTASKLTF

SEQ ID NO: 454812 - protein, 15 aa, Homo sapiens
  CDR3 for beta chain variable domain of TCR clone 227406 (TRBV27, TRBJ1-5)
CASTFNRGNNQPQHF

SEQ ID NO: 454813 - protein, 15 aa, Homo sapiens
  CDR3 for alpha chain variable domain of TCR clone 227407 (TRAV21, TRAJ32)
CAVNSYGGATNKLIF

SEQ ID NO: 454814 - protein, 18 aa, Homo sapiens
  CDR3 for beta chain variable domain of TCR clone 227407 (TRBV7-9, TRBJ2-1)
CASSAGLAEGSSYNEQFF

SEQ ID NO: 454815 - protein, 10 aa, Homo sapiens
  CDR3 for alpha chain variable domain of TCR clone 227408 (TRAV27, TRAJ38)
VAGNNRKLIW

SEQ ID NO: 454816 - protein, 13 aa, Homo sapiens
  CDR3 for beta chain variable domain of TCR clone 227408 (TRBV19, TRBJ1-4)
CASPTQGNEKLFF

SEQ ID NO: 454817 - protein, 11 aa, Homo sapiens
  CDR3 for alpha chain variable domain of TCR clone 227409 (TRAV1-1, TRAJ23)
CAVRQGGKLIF

SEQ ID NO: 454818 - protein, 16 aa, Homo sapiens
  CDR3 for beta chain variable domain of TCR clone 227409 (TRBV29-1, TRBJ2-6)
CSVEDITYSGANVLTF

SEQ ID NO: 454819 - protein, 15 aa, Homo sapiens
  CDR3 for alpha chain variable domain of TCR clone 227410 (TRAV3, TRAJ20)
WAVRDSRSNDYKLSF

SEQ ID NO: 454820 - protein, 14 aa, Homo sapiens
  CDR3 for beta chain variable domain of TCR clone 227410 (TRBV20-1, TRBJ2-7)
CSARRGNGIYEQYF

SEQ ID NO: 454821 - protein, 14 aa, Homo sapiens
  CDR3 for alpha chain variable domain of TCR clone 227411 (TRAV12-3, TRAJ10)
SHLPLTGGGNKLTF

SEQ ID NO: 454822 - protein, 18 aa, Homo sapiens
  CDR3 for beta chain variable domain of TCR clone 227411 (TRBV7-7, TRBJ2-1)
CASSLALTSGRSYNEQFF

SEQ ID NO: 454823 - protein, 13 aa, Homo sapiens
  CDR3 for alpha chain variable domain of TCR clone 227412 (TRAV2, TRAJ40)
CAVVPSGTYKYIF

SEQ ID NO: 454824 - protein, 16 aa, Homo sapiens
  CDR3 for beta chain variable domain of TCR clone 227412 (TRBV7-9, TRBJ1-3)
CASSLGAGSAGNTIYF

SEQ ID NO: 454825 - protein, 15 aa, Homo sapiens
  CDR3 for alpha chain variable domain of TCR clone 227413 (TRAV8-3, TRAJ44)
CAVGAGAGTASKLTF

SEQ ID NO: 454826 - protein, 16 aa, Homo sapiens
  CDR3 for beta chain variable domain of TCR clone 227413 (TRBV7-8, TRBJ1-5)
CASSPWGPEGNQPQHF

SEQ ID NO: 454827 - protein, 14 aa, Homo sapiens
  CDR3 for alpha chain variable domain of TCR clone 227414 (TRAV8-6, TRAJ6)
CAVHASGGSYIPTF

SEQ ID NO: 454828 - protein, 12 aa, Homo sapiens
  CDR3 for beta chain variable domain of TCR clone 227414 (TRBV7-8, TRBJ2-5)
CASSLRAETQYF

SEQ ID NO: 454829 - protein, 13 aa, Homo sapiens
  CDR3 for alpha chain variable domain of TCR clone 227415 (TRAV26-1, TRAJ35)
CIVSRRVGEMLHA

SEQ ID NO: 454830 - protein, 17 aa, Homo sapiens
  CDR3 for beta chain variable domain of TCR clone 227415 (TRBV7-9, TRBJ2-7)
CASSFDGSRGGAYEQYF

SEQ ID NO: 454831 - protein, 13 aa, Homo sapiens
  CDR3 for alpha chain variable domain of TCR clone 227416 (TRAV21, TRAJ26)
CAVIGNYGQNFVF

SEQ ID NO: 454832 - protein, 13 aa, Homo sapiens
  CDR3 for beta chain variable domain of TCR clone 227416 (TRBV19, TRBJ1-5)
CASSMRGYQPQHF

SEQ ID NO: 454833 - protein, 16 aa, Homo sapiens
  CDR3 for alpha chain variable domain of TCR clone 227417 (TRAV3, TRAJ37)
CAVRPHGSGNTGKLIF

SEQ ID NO: 454834 - protein, 14 aa, Homo sapiens
  CDR3 for beta chain variable domain of TCR clone 227417 (TRBV7-9, TRBJ2-2)
CASSLVQDTGELFF

SEQ ID NO: 454835 - protein, 14 aa, Homo sapiens
  CDR3 for alpha chain variable domain of TCR clone 227418 (TRAV34, TRAJ44)
CGADGTGTASKLTF

SEQ ID NO: 454836 - protein, 12 aa, Homo sapiens
  CDR3 for beta chain variable domain of TCR clone 227418 (TRBV6-3, TRBJ2-7)
CASSRQGYEQDF

SEQ ID NO: 454837 - protein, 12 aa, Homo sapiens
  CDR3 for alpha chain variable domain of TCR clone 227419 (TRAV3, TRAJ20)
CAVRDGDYKLSF

SEQ ID NO: 454838 - protein, 14 aa, Homo sapiens
  CDR3 for beta chain variable domain of TCR clone 227419 (TRBV19, TRBJ2-3)
CASSRLGTTDTQYF

SEQ ID NO: 454839 - protein, 18 aa, Homo sapiens
  CDR3 for alpha chain variable domain of TCR clone 227420 (TRAV21, TRAJ52)
CAVSPSPAGGTSYGKLTF

SEQ ID NO: 454840 - protein, 13 aa, Homo sapiens
  CDR3 for beta chain variable domain of TCR clone 227420 (TRBV2, TRBJ1-5)
CATAGPGNQPQHF

SEQ ID NO: 454841 - protein, 15 aa, Homo sapiens
  CDR3 for alpha chain variable domain of TCR clone 227421 (TRAV3, TRAJ4)
CAVRDGTGGYNKLIF

SEQ ID NO: 454842 - protein, 15 aa, Homo sapiens
  CDR3 for beta chain variable domain of TCR clone 227421 (TRBV5-5, TRBJ1-5)
CASSSTPGSNQPQHF

SEQ ID NO: 454843 - protein, 17 aa, Homo sapiens
  CDR3 for alpha chain variable domain of TCR clone 227422 (TRAV3, TRAJ6)
CAVRDGPRAGGGYIPTF

SEQ ID NO: 454844 - protein, 20 aa, Homo sapiens
  CDR3 for beta chain variable domain of TCR clone 227422 (TRBV28, TRBJ2-1)
CAITPIGRSPGLAGGNEQFF

SEQ ID NO: 454845 - protein, 11 aa, Homo sapiens
  CDR3 for alpha chain variable domain of TCR clone 227423 (TRAV12-2, TRAJ33)
CAVTSNYQLIW

SEQ ID NO: 454846 - protein, 15 aa, Homo sapiens
  CDR3 for beta chain variable domain of TCR clone 227423 (TRBV7-2, TRBJ1-2)
CASSPRAGWNYGYTF

SEQ ID NO: 454847 - protein, 11 aa, Homo sapiens
  CDR3 for alpha chain variable domain of TCR clone 227424 (TRAV8-3, TRAJ18)
CAVGGRQRLNP

SEQ ID NO: 454848 - protein, 15 aa, Homo sapiens
  CDR3 for beta chain variable domain of TCR clone 227424 (TRBV14, TRBJ2-5)
CASSQGEAVQETQYF

SEQ ID NO: 454849 - protein, 15 aa, Homo sapiens
  CDR3 for alpha chain variable domain of TCR clone 227425 (TRAV2, TRAJ15)
CAVEDRGQAGTALIF

SEQ ID NO: 454850 - protein, 15 aa, Homo sapiens
  CDR3 for beta chain variable domain of TCR clone 227425 (TRBV6-5, TRBJ2-1)
CASSYDAGAGNEQFF

SEQ ID NO: 454851 - protein, 12 aa, Homo sapiens
  CDR3 for alpha chain variable domain of TCR clone 227426 (TRAV13-1, TRAJ5)
CAARVTGRALTF

SEQ ID NO: 454852 - protein, 15 aa, Homo sapiens
  CDR3 for beta chain variable domain of TCR clone 227426 (TRBV7-9, TRBJ2-7)
CASSPGGGLTYEQYF

SEQ ID NO: 454853 - protein, 13 aa, Homo sapiens
  CDR3 for alpha chain variable domain of TCR clone 227427 (TRAV8-4, TRAJ34)
CAVTLYNTDKLIF

SEQ ID NO: 454854 - protein, 13 aa, Homo sapiens
  CDR3 for beta chain variable domain of TCR clone 227427 (TRBV7-2, TRBJ2-2)
CASSPSWRGGRDR

SEQ ID NO: 454855 - protein, 14 aa, Homo sapiens
  CDR3 for alpha chain variable domain of TCR clone 227428 (TRAV3, TRAJ37)
CAVKESGNTGKLIF

SEQ ID NO: 454856 - protein, 15 aa, Homo sapiens
  CDR3 for beta chain variable domain of TCR clone 227428 (TRBV7-3, TRBJ2-2)
CASSLEVLPTGELFF

SEQ ID NO: 454857 - protein, 17 aa, Homo sapiens
  CDR3 for alpha chain variable domain of TCR clone 227429 (TRAV3, TRAJ6)
CSVRDGPRAGGSYIPTF

SEQ ID NO: 454858 - protein, 13 aa, Homo sapiens
  CDR3 for beta chain variable domain of TCR clone 227429 (TRBV27, TRBJ2-1)
CASRTLGVGEQFF

SEQ ID NO: 454859 - protein, 13 aa, Homo sapiens
  CDR3 for alpha chain variable domain of TCR clone 227430 (TRAV20, TRAJ54)
CAVQAGGAQKLVF

SEQ ID NO: 454860 - protein, 15 aa, Homo sapiens
  CDR3 for beta chain variable domain of TCR clone 227430 (TRBV7-3, TRBJ2-2)
CASSETGQGTGELFF

SEQ ID NO: 454861 - protein, 12 aa, Homo sapiens
  CDR3 for alpha chain variable domain of TCR clone 227431 (TRAV8-3, TRAJ26)
CAGDNYGQNFVF

SEQ ID NO: 454862 - protein, 11 aa, Homo sapiens
  CDR3 for beta chain variable domain of TCR clone 227431 (TRBV6-3, TRBJ2-3)
CATGQADTQYF

SEQ ID NO: 454863 - protein, 11 aa, Homo sapiens
  CDR3 for alpha chain variable domain of TCR clone 227432 (TRAV17, TRAJ31)
CATDRTARLMF

SEQ ID NO: 454864 - protein, 15 aa, Homo sapiens
  CDR3 for beta chain variable domain of TCR clone 227432 (TRBV11-3, TRBJ2-3)
CASLKDGREGDTQYF

SEQ ID NO: 454865 - protein, 15 aa, Homo sapiens
  CDR3 for alpha chain variable domain of TCR clone 227433 (TRAV25, TRAJ23)
CALAPNYNQGGKLIF

SEQ ID NO: 454866 - protein, 13 aa, Homo sapiens
  CDR3 for beta chain variable domain of TCR clone 227433 (TRBV11-3, TRBJ1-1)
CARSWDGNTEAFF

SEQ ID NO: 454867 - protein, 15 aa, Homo sapiens
  CDR3 for alpha chain variable domain of TCR clone 227434 (TRAV38-1, TRAJ57)
CAFMDSQGGSEKLVF

SEQ ID NO: 454868 - protein, 14 aa, Homo sapiens
  CDR3 for beta chain variable domain of TCR clone 227434 (TRBV7-2, TRBJ1-1)
CASSFLTGTTEAFF

SEQ ID NO: 454869 - protein, 14 aa, Homo sapiens
  CDR3 for alpha chain variable domain of TCR clone 227435 (TRAV12-3, TRAJ10)
SHLPLTGGGNKLNF

SEQ ID NO: 454870 - protein, 15 aa, Homo sapiens
  CDR3 for beta chain variable domain of TCR clone 227435 (TRBV10-2, TRBJ2-6)
CASSEQGTGANVLTF

SEQ ID NO: 454871 - protein, 13 aa, Homo sapiens
  CDR3 for alpha chain variable domain of TCR clone 227436 (TRAV19, TRAJ26)
CALTFDYGQNFVF

SEQ ID NO: 454872 - protein, 14 aa, Homo sapiens
  CDR3 for beta chain variable domain of TCR clone 227436 (TRBV12-5, TRBJ2-5)
CASGSRTHQETQYF

SEQ ID NO: 454873 - protein, 14 aa, Homo sapiens
  CDR3 for alpha chain variable domain of TCR clone 227437 (TRAV12-2, TRAJ21)
CAVNKANNFNKFYF

SEQ ID NO: 454874 - protein, 14 aa, Homo sapiens
  CDR3 for beta chain variable domain of TCR clone 227437 (TRBV19, TRBJ2-1)
CASPTCVLSGEQFF

SEQ ID NO: 454875 - protein, 15 aa, Homo sapiens
  CDR3 for alpha chain variable domain of TCR clone 227438 (TRAV8-3, TRAJ27)
CAVGLSTTNAGKSTF

SEQ ID NO: 454876 - protein, 15 aa, Homo sapiens
  CDR3 for beta chain variable domain of TCR clone 227438 (TRBV7-2, TRBJ2-1)
CASSSGLAGGNEQFF

SEQ ID NO: 454877 - protein, 13 aa, Homo sapiens
  CDR3 for alpha chain variable domain of TCR clone 227439 (TRAV21, TRAJ27)
CAARPGNAGKSTF

SEQ ID NO: 454878 - protein, 14 aa, Homo sapiens
  CDR3 for beta chain variable domain of TCR clone 227439 (TRBV7-6, TRBJ2-3)
CARRLGTVTDTQYF

SEQ ID NO: 454879 - protein, 14 aa, Homo sapiens
  CDR3 for alpha chain variable domain of TCR clone 227440 (TRAV1-2, TRAJ8)
CAVREDTVFQKLVF

SEQ ID NO: 454880 - protein, 14 aa, Homo sapiens
  CDR3 for beta chain variable domain of TCR clone 227440 (TRBV7-3, TRBJ2-1)
CASSLAGGTNEQFF

SEQ ID NO: 454881 - protein, 15 aa, Homo sapiens
  CDR3 for alpha chain variable domain of TCR clone 227441 (TRAV13-1, TRAJ17)
CAASIERAAGNKLTF

SEQ ID NO: 454882 - protein, 17 aa, Homo sapiens
  CDR3 for beta chain variable domain of TCR clone 227441 (TRBV4-1, TRBJ1-4)
CASSQEGPRGVEEKLFF

SEQ ID NO: 454883 - protein, 14 aa, Homo sapiens
  CDR3 for alpha chain variable domain of TCR clone 227442 (TRAV17, TRAJ32)
CATDPGGATNKLIF

SEQ ID NO: 454884 - protein, 10 aa, Homo sapiens
  CDR3 for beta chain variable domain of TCR clone 227442 (TRBV2, TRBJ1-5)
VKTGAVSQHF

SEQ ID NO: 454885 - protein, 10 aa, Homo sapiens
  CDR3 for alpha chain variable domain of TCR clone 227443 (TRAV21, TRAJ43)
CAVRIGDMRF

SEQ ID NO: 454886 - protein, 13 aa, Homo sapiens
  CDR3 for beta chain variable domain of TCR clone 227443 (TRBV20-1, TRBJ2-7)
CSAPVLADYEQYF

SEQ ID NO: 454887 - protein, 14 aa, Homo sapiens
  CDR3 for alpha chain variable domain of TCR clone 227444 (TRAV26-1, TRAJ38)
CIADNAGNNRQLIW

SEQ ID NO: 454888 - protein, 14 aa, Homo sapiens
  CDR3 for beta chain variable domain of TCR clone 227444 (TRBV4-1, TRBJ2-2)
CASSQAVNTGELFF

SEQ ID NO: 454889 - protein, 14 aa, Homo sapiens
  CDR3 for alpha chain variable domain of TCR clone 227445 (TRAV29/DV5, TRAJ48)
CAAMALFGNEKLNF

SEQ ID NO: 454890 - protein, 15 aa, Homo sapiens
  CDR3 for beta chain variable domain of TCR clone 227445 (TRBV7-2, TRBJ2-1)
CASTHGTGIYNEQFF

SEQ ID NO: 454891 - protein, 14 aa, Homo sapiens
  CDR3 for alpha chain variable domain of TCR clone 227446 (TRAV1-2, TRAJ8)
CAVREDTGFQKLVF

SEQ ID NO: 454892 - protein, 15 aa, Homo sapiens
  CDR3 for beta chain variable domain of TCR clone 227446 (TRBV6-3, TRBJ2-7)
CASSSPGPVFYEQYF

SEQ ID NO: 454893 - protein, 17 aa, Homo sapiens
  CDR3 for alpha chain variable domain of TCR clone 227447 (TRAV3, TRAJ6)
CAVRDGPRAGGSYIPTF

SEQ ID NO: 454894 - protein, 16 aa, Homo sapiens
  CDR3 for beta chain variable domain of TCR clone 227447 (TRBV28, TRBJ2-7)
CASSPWVATGDLSQYF

SEQ ID NO: 454895 - protein, 12 aa, Homo sapiens
  CDR3 for alpha chain variable domain of TCR clone 227448 (TRAV23/DV6, TRAJ30)
CAASKGDDKIMF

SEQ ID NO: 454896 - protein, 18 aa, Homo sapiens
  CDR3 for beta chain variable domain of TCR clone 227448 (TRBV10-3, TRBJ2-3)
CAISESRVGPMRGDTQYF

SEQ ID NO: 454897 - protein, 13 aa, Homo sapiens
  CDR3 for alpha chain variable domain of TCR clone 227449 (TRAV12-3, TRAJ13)
CAMRNSGLPESYL

SEQ ID NO: 454898 - protein, 14 aa, Homo sapiens
  CDR3 for beta chain variable domain of TCR clone 227449 (TRBV4-1, TRBJ1-6)
CASSPGSDSSPLHF

SEQ ID NO: 454899 - protein, 14 aa, Homo sapiens
  CDR3 for alpha chain variable domain of TCR clone 227450 (TRAV1-1, TRAJ34)
CAVRPSYNTAKLIF

SEQ ID NO: 454900 - protein, 16 aa, Homo sapiens
  CDR3 for beta chain variable domain of TCR clone 227450 (TRBV19, TRBJ2-1)
CASSSKGTRSYNEQFF

SEQ ID NO: 454901 - protein, 13 aa, Homo sapiens
  CDR3 for alpha chain variable domain of TCR clone 227451 (TRAV25, TRAJ10)
CAGRTGRGNKLTF

SEQ ID NO: 454902 - protein, 15 aa, Homo sapiens
  CDR3 for beta chain variable domain of TCR clone 227451 (TRBV19, TRBJ2-1)
CAISSPGVPLDEQFF

SEQ ID NO: 454903 - protein, 12 aa, Homo sapiens
  CDR3 for alpha chain variable domain of TCR clone 227452 (TRAV26-1, TRAJ35)
CIGLSFGNVLHC

SEQ ID NO: 454904 - protein, 15 aa, Homo sapiens
  CDR3 for beta chain variable domain of TCR clone 227452 (TRBV6-3, TRBJ2-7)
CASSSPGTVFYEQYF

SEQ ID NO: 454905 - protein, 14 aa, Homo sapiens
  CDR3 for alpha chain variable domain of TCR clone 227453 (TRAV12-3, TRAJ10)
SHLPLTGGGSKLTF

SEQ ID NO: 454906 - protein, 15 aa, Homo sapiens
  CDR3 for beta chain variable domain of TCR clone 227453 (TRBV7-9, TRBJ1-4)
CASSRTGGFNEKLFF

SEQ ID NO: 454907 - protein, 14 aa, Homo sapiens
  CDR3 for alpha chain variable domain of TCR clone 227454 (TRAV13-1, TRAJ8)
CAASEDTGFQKFVF

SEQ ID NO: 454908 - protein, 13 aa, Homo sapiens
  CDR3 for beta chain variable domain of TCR clone 227454 (TRBV19, TRBJ1-5)
CASSTRRDQPQHF

SEQ ID NO: 454909 - protein, 11 aa, Homo sapiens
  CDR3 for alpha chain variable domain of TCR clone 227455 (TRAV21, TRAJ48)
CAVDGNEKLTF

SEQ ID NO: 454910 - protein, 16 aa, Homo sapiens
  CDR3 for beta chain variable domain of TCR clone 227455 (TRBV15, TRBJ2-3)
CATRLSGGRAPDTQYF

SEQ ID NO: 454911 - protein, 13 aa, Homo sapiens
  CDR3 for alpha chain variable domain of TCR clone 227456 (TRAV2, TRAJ16)
CAVEDRDGQKLLF

SEQ ID NO: 454912 - protein, 14 aa, Homo sapiens
  CDR3 for beta chain variable domain of TCR clone 227456 (TRBV6-1, TRBJ2-6)
CASQQGAGANVLTF

SEQ ID NO: 454913 - protein, 13 aa, Homo sapiens
  CDR3 for alpha chain variable domain of TCR clone 227457 (TRAV12-1, TRAJ22)
CVVYFGSARQLTF

SEQ ID NO: 454914 - protein, 10 aa, Homo sapiens
  CDR3 for beta chain variable domain of TCR clone 227457 (TRBV6-3, TRBJ2-2)
CASRDGELFF

SEQ ID NO: 454915 - protein, 13 aa, Homo sapiens
  CDR3 for alpha chain variable domain of TCR clone 227458 (TRAV8-3, TRAJ28)
CAVGAVGSYQLTF

SEQ ID NO: 454916 - protein, 13 aa, Homo sapiens
  CDR3 for beta chain variable domain of TCR clone 227458 (TRBV5-1, TRBJ1-5)
CVSSLGAGQPQHF

SEQ ID NO: 454917 - protein, 20 aa, Homo sapiens
  CDR3 for alpha chain variable domain of TCR clone 227459 (TRAV12-1, TRAJ42)
SSVIQPPTSVKGGSQGNLIF

SEQ ID NO: 454918 - protein, 15 aa, Homo sapiens
  CDR3 for beta chain variable domain of TCR clone 227459 (TRBV4-1, TRBJ2-7)
CASSQNTGRLNEQYF

SEQ ID NO: 454919 - protein, 13 aa, Homo sapiens
  CDR3 for alpha chain variable domain of TCR clone 227460 (TRAV8-1, TRAJ30)
CAVIMRRDDKIIF

SEQ ID NO: 454920 - protein, 14 aa, Homo sapiens
  CDR3 for beta chain variable domain of TCR clone 227460 (TRBV7-2, TRBJ1-6)
CASSLQGANSPLHF

SEQ ID NO: 454921 - protein, 14 aa, Homo sapiens
  CDR3 for alpha chain variable domain of TCR clone 227461 (TRAV13-1, TRAJ53)
CAASISGSNYKLTF

SEQ ID NO: 454922 - protein, 15 aa, Homo sapiens
  CDR3 for beta chain variable domain of TCR clone 227461 (TRBV4-1, TRBJ1-4)
CASSDTGGTNEKLVF

SEQ ID NO: 454923 - protein, 17 aa, Homo sapiens
  CDR3 for alpha chain variable domain of TCR clone 227462 (TRAV13-2, TRAJ31)
CAENARLMFGVGTQLVV

SEQ ID NO: 454924 - protein, 13 aa, Homo sapiens
  CDR3 for beta chain variable domain of TCR clone 227462 (TRBV19, TRBJ1-2)
CASSVPGQDGYTF

SEQ ID NO: 454925 - protein, 15 aa, Homo sapiens
  CDR3 for alpha chain variable domain of TCR clone 227463 (TRAV26-1, TRAJ22)
CIVRLSFWFCKATDL

SEQ ID NO: 454926 - protein, 14 aa, Homo sapiens
  CDR3 for beta chain variable domain of TCR clone 227463 (TRBV18, TRBJ2-7)
CASSPRGGAYEQYF

SEQ ID NO: 454927 - protein, 11 aa, Homo sapiens
  CDR3 for alpha chain variable domain of TCR clone 227464 (TRAV1-1, TRAJ23)
CAVRQGGKLIF

SEQ ID NO: 454928 - protein, 13 aa, Homo sapiens
  CDR3 for beta chain variable domain of TCR clone 227464 (TRBV15, TRBJ1-6)
CATSGGLNAPLHL

SEQ ID NO: 454929 - protein, 14 aa, Homo sapiens
  CDR3 for alpha chain variable domain of TCR clone 227465 (TRAV12-2, TRAJ17)
CAVLFKAAGNKLTF

SEQ ID NO: 454930 - protein, 17 aa, Homo sapiens
  CDR3 for beta chain variable domain of TCR clone 227465 (TRBV3-1, TRBJ2-2)
CASSQFRDKVDTGELFF

SEQ ID NO: 454931 - protein, 17 aa, Homo sapiens
  CDR3 for alpha chain variable domain of TCR clone 227466 (TRAV13-1, TRAJ31)
CAPRDRPIFGDGTQLVV

SEQ ID NO: 454932 - protein, 12 aa, Homo sapiens
  CDR3 for beta chain variable domain of TCR clone 227466 (TRBV7-9, TRBJ2-7)
CASSLEGYEQYF

SEQ ID NO: 454933 - protein, 14 aa, Homo sapiens
  CDR3 for alpha chain variable domain of TCR clone 227467 (TRAV1-2, TRAJ8)
CAVTEDTGFQKLVF

SEQ ID NO: 454934 - protein, 12 aa, Homo sapiens
  CDR3 for beta chain variable domain of TCR clone 227467 (TRBV2, TRBJ2-1)
CAYGPPGNEQFF

SEQ ID NO: 454935 - protein, 14 aa, Homo sapiens
  CDR3 for alpha chain variable domain of TCR clone 227468 (TRAV17, TRAJ22)
CATSPSGSARQLTF

SEQ ID NO: 454936 - protein, 12 aa, Homo sapiens
  CDR3 for beta chain variable domain of TCR clone 227468 (TRBV5-1, TRBJ2-3)
CASSLAADTQYF

SEQ ID NO: 454937 - protein, 11 aa, Homo sapiens
  CDR3 for alpha chain variable domain of TCR clone 227469 (TRAV26-1, TRAJ27)
CIDPNACKSTF

SEQ ID NO: 454938 - protein, 18 aa, Homo sapiens
  CDR3 for beta chain variable domain of TCR clone 227469 (TRBV7-9, TRBJ2-6)
CASSFPGAGISGANVLTF

SEQ ID NO: 454939 - protein, 14 aa, Homo sapiens
  CDR3 for alpha chain variable domain of TCR clone 227470 (TRAV13-2, TRAJ32)
CAENYGGATNKLIF

SEQ ID NO: 454940 - protein, 15 aa, Homo sapiens
  CDR3 for beta chain variable domain of TCR clone 227470 (TRBV12-4, TRBJ2-5)
CASTLSSGRGETQYF

SEQ ID NO: 454941 - protein, 14 aa, Homo sapiens
  CDR3 for alpha chain variable domain of TCR clone 227471 (TRAV8-2, TRAJ45)
CVVSAGGGADGLTF

SEQ ID NO: 454942 - protein, 14 aa, Homo sapiens
  CDR3 for beta chain variable domain of TCR clone 227471 (TRBV7-9, TRBJ2-2)
CASSLVQDTGELFF

SEQ ID NO: 454943 - protein, 16 aa, Homo sapiens
  CDR3 for alpha chain variable domain of TCR clone 227472 (TRAV38-1, TRAJ56)
CAFMKRQTGANSKLTF

SEQ ID NO: 454944 - protein, 11 aa, Homo sapiens
  CDR3 for beta chain variable domain of TCR clone 227472 (TRBV7-8, TRBJ2-7)
CASSLSLEQYF

SEQ ID NO: 454945 - protein, 14 aa, Homo sapiens
  CDR3 for alpha chain variable domain of TCR clone 227473 (TRAV1-2, TRAJ16)
CAVNRFSDGQKPLF

SEQ ID NO: 454946 - protein, 14 aa, Homo sapiens
  CDR3 for beta chain variable domain of TCR clone 227473 (TRBV7-2, TRBJ2-7)
CASSPKTSFYEQYF

SEQ ID NO: 454947 - protein, 14 aa, Homo sapiens
  CDR3 for alpha chain variable domain of TCR clone 227474 (TRAV21, TRAJ37)
CAVKGSSNTGKLIC

SEQ ID NO: 454948 - protein, 14 aa, Homo sapiens
  CDR3 for beta chain variable domain of TCR clone 227474 (TRBV7-2, TRBJ2-1)
CASSRGGARNEQFF

SEQ ID NO: 454949 - protein, 16 aa, Homo sapiens
  CDR3 for alpha chain variable domain of TCR clone 227475 (TRAV2, TRAJ10)
CCGGSTVTGGGNKLTF

SEQ ID NO: 454950 - protein, 16 aa, Homo sapiens
  CDR3 for beta chain variable domain of TCR clone 227475 (TRBV18, TRBJ1-5)
CASSPSTGNSNQPQNF

SEQ ID NO: 454951 - protein, 13 aa, Homo sapiens
  CDR3 for alpha chain variable domain of TCR clone 227476 (TRAV12-1, TRAJ40)
CVVPTSGTYKYIF

SEQ ID NO: 454952 - protein, 18 aa, Homo sapiens
  CDR3 for beta chain variable domain of TCR clone 227476 (TRBV7-6, TRBJ2-1)
CASSPRTSGRSSYNEQFF

SEQ ID NO: 454953 - protein, 16 aa, Homo sapiens
  CDR3 for alpha chain variable domain of TCR clone 227477 (TRAV30, TRAJ24)
CGTEIVDADSWGKFQF

SEQ ID NO: 454954 - protein, 16 aa, Homo sapiens
  CDR3 for beta chain variable domain of TCR clone 227477 (TRBV4-3, TRBJ1-2)
CASSQDLTGALGGYTF

SEQ ID NO: 454955 - protein, 11 aa, Homo sapiens
  CDR3 for alpha chain variable domain of TCR clone 227478 (TRAV35, TRAJ30)
CAGPGDDKIIF

SEQ ID NO: 454956 - protein, 15 aa, Homo sapiens
  CDR3 for beta chain variable domain of TCR clone 227478 (TRBV6-3, TRBJ2-7)
CASSSPGTVFCEQYF

SEQ ID NO: 454957 - protein, 12 aa, Homo sapiens
  CDR3 for alpha chain variable domain of TCR clone 227479 (TRAV25, TRAJ35)
CAGKGFGNVLHC

SEQ ID NO: 454958 - protein, 12 aa, Homo sapiens
  CDR3 for beta chain variable domain of TCR clone 227479 (TRBV6-3, TRBJ2-7)
CASSRQGYEQYF

SEQ ID NO: 454959 - protein, 14 aa, Homo sapiens
  CDR3 for alpha chain variable domain of TCR clone 227480 (TRAV12-2, TRAJ17)
CAVNIKAAGNKLTF

SEQ ID NO: 454960 - protein, 18 aa, Homo sapiens
  CDR3 for beta chain variable domain of TCR clone 227480 (TRBV15, TRBJ2-3)
CATSRDGARSWDTDTQYF

SEQ ID NO: 454961 - protein, 14 aa, Homo sapiens
  CDR3 for alpha chain variable domain of TCR clone 227481 (TRAV12-2, TRAJ17)
CAVLFKAAGNKLTF

SEQ ID NO: 454962 - protein, 14 aa, Homo sapiens
  CDR3 for beta chain variable domain of TCR clone 227481 (TRBV19, TRBJ1-5)
CASGTEVYNQPQHF

SEQ ID NO: 454963 - protein, 16 aa, Homo sapiens
  CDR3 for alpha chain variable domain of TCR clone 227482 (TRAV30, TRAJ24)
CGTEIVDAESWGKFQF

SEQ ID NO: 454964 - protein, 13 aa, Homo sapiens
  CDR3 for beta chain variable domain of TCR clone 227482 (TRBV19, TRBJ1-2)
CASSVPGQDGYAF

SEQ ID NO: 454965 - protein, 12 aa, Homo sapiens
  CDR3 for alpha chain variable domain of TCR clone 227483 (TRAV8-3, TRAJ20)
CAVGANDYKLSF

SEQ ID NO: 454966 - protein, 15 aa, Homo sapiens
  CDR3 for beta chain variable domain of TCR clone 227483 (TRBV2, TRBJ2-7)
CASTLLGSGATEQYF

SEQ ID NO: 454967 - protein, 14 aa, Homo sapiens
  CDR3 for alpha chain variable domain of TCR clone 227484 (TRAV1-2, TRAJ8)
CAVREDTGFQKIVF

SEQ ID NO: 454968 - protein, 12 aa, Homo sapiens
  CDR3 for beta chain variable domain of TCR clone 227484 (TRBV2, TRBJ2-1)
CAYGPPGNDQFF

SEQ ID NO: 454969 - protein, 16 aa, Homo sapiens
  CDR3 for alpha chain variable domain of TCR clone 227485 (TRAV3, TRAJ37)
CAVRGKGSGNTGKLIF

SEQ ID NO: 454970 - protein, 14 aa, Homo sapiens
  CDR3 for beta chain variable domain of TCR clone 227485 (TRBV5-8, TRBJ2-7)
CASKLGQGAYEQYF

SEQ ID NO: 454971 - protein, 15 aa, Homo sapiens
  CDR3 for alpha chain variable domain of TCR clone 227486 (TRAV21, TRAJ53)
CATLNSGGSNYKLTF

SEQ ID NO: 454972 - protein, 14 aa, Homo sapiens
  CDR3 for beta chain variable domain of TCR clone 227486 (TRBV11-2, TRBJ2-1)
CASTTGQGNNEQFF

SEQ ID NO: 454973 - protein, 17 aa, Homo sapiens
  CDR3 for alpha chain variable domain of TCR clone 227487 (TRAV13-1, TRAJ52)
CSNNPNAGGTIYGKLTF

SEQ ID NO: 454974 - protein, 14 aa, Homo sapiens
  CDR3 for beta chain variable domain of TCR clone 227487 (TRBV6-5, TRBJ1-1)
CASSFGQGLTEAFF

SEQ ID NO: 454975 - protein, 13 aa, Homo sapiens
  CDR3 for alpha chain variable domain of TCR clone 227488 (TRAV27, TRAJ23)
CAGVLPKGGKLIF

SEQ ID NO: 454976 - protein, 15 aa, Homo sapiens
  CDR3 for beta chain variable domain of TCR clone 227488 (TRBV27, TRBJ2-1)
CASSNGGGSSNEQFF

SEQ ID NO: 454977 - protein, 14 aa, Homo sapiens
  CDR3 for alpha chain variable domain of TCR clone 227489 (TRAV3, TRAJ21)
CAVRDKYNFNKFYF

SEQ ID NO: 454978 - protein, 14 aa, Homo sapiens
  CDR3 for beta chain variable domain of TCR clone 227489 (TRBV12-5, TRBJ2-5)
CASGSRTHQETQYF

SEQ ID NO: 454979 - protein, 15 aa, Homo sapiens
  CDR3 for alpha chain variable domain of TCR clone 227490 (TRAV26-1, TRAJ29)
CIVRVEGSGNTPLVS

SEQ ID NO: 454980 - protein, 15 aa, Homo sapiens
  CDR3 for beta chain variable domain of TCR clone 227490 (TRBV12-4, TRBJ1-1)
CQQQDRVVANTEAFF

SEQ ID NO: 454981 - protein, 14 aa, Homo sapiens
  CDR3 for alpha chain variable domain of TCR clone 227491 (TRAV12-3, TRAJ13)
CAMKNSGGYQKVTF

SEQ ID NO: 454982 - protein, 13 aa, Homo sapiens
  CDR3 for beta chain variable domain of TCR clone 227491 (TRBV29-1, TRBJ2-5)
CSARGRAEETQYF

SEQ ID NO: 454983 - protein, 15 aa, Homo sapiens
  CDR3 for alpha chain variable domain of TCR clone 227492 (TRAV12-3, TRAJ11)
CAMREENSGYSTLTF

SEQ ID NO: 454984 - protein, 16 aa, Homo sapiens
  CDR3 for beta chain variable domain of TCR clone 227492 (TRBV5-1, TRBJ2-7)
CASSLEGLAGLYEQYF

SEQ ID NO: 454985 - protein, 15 aa, Homo sapiens
  CDR3 for alpha chain variable domain of TCR clone 227493 (TRAV17, TRAJ54)
CATDAGEPRSWYLAK

SEQ ID NO: 454986 - protein, 17 aa, Homo sapiens
  CDR3 for beta chain variable domain of TCR clone 227493 (TRBV25-1, TRBJ1-6)
CASSEYIGERGNSPLHF

SEQ ID NO: 454987 - protein, 18 aa, Homo sapiens
  CDR3 for alpha chain variable domain of TCR clone 227494 (TRAV26-2, TRAJ17)
CCVLLHPAIKAAGNKLTF

SEQ ID NO: 454988 - protein, 16 aa, Homo sapiens
  CDR3 for beta chain variable domain of TCR clone 227494 (TRBV7-9, TRBJ2-1)
CASSDVAGGSYNEQFF

SEQ ID NO: 454989 - protein, 13 aa, Homo sapiens
  CDR3 for alpha chain variable domain of TCR clone 227495 (TRAV2, TRAJ40)
CAVVTSGTYKYIF

SEQ ID NO: 454990 - protein, 14 aa, Homo sapiens
  CDR3 for beta chain variable domain of TCR clone 227495 (TRBV5-4, TRBJ1-2)
CASSLEVSHYGYTF

SEQ ID NO: 454991 - protein, 14 aa, Homo sapiens
  CDR3 for alpha chain variable domain of TCR clone 227496 (TRAV20, TRAJ56)
CAVQFGGANSKLTF

SEQ ID NO: 454992 - protein, 15 aa, Homo sapiens
  CDR3 for beta chain variable domain of TCR clone 227496 (TRBV20-1, TRBJ2-1)
CSAKRGRSSYNEQFF

SEQ ID NO: 454993 - protein, 15 aa, Homo sapiens
  CDR3 for alpha chain variable domain of TCR clone 227497 (TRAV12-1, TRAJ23)
CGERSRCNQGGKLIF

SEQ ID NO: 454994 - protein, 12 aa, Homo sapiens
  CDR3 for beta chain variable domain of TCR clone 227497 (TRBV12-4, TRBJ2-7)
CASSLGGYEQYF

SEQ ID NO: 454995 - protein, 15 aa, Homo sapiens
  CDR3 for alpha chain variable domain of TCR clone 227498 (TRAV12-3, TRAJ49)
CAMAVTPNTGNQFYF

SEQ ID NO: 454996 - protein, 14 aa, Homo sapiens
  CDR3 for beta chain variable domain of TCR clone 227498 (TRBV7-8, TRBJ2-3)
CASSLEAGTDTLYF

SEQ ID NO: 454997 - protein, 14 aa, Homo sapiens
  CDR3 for alpha chain variable domain of TCR clone 227499 (TRAV12-3, TRAJ10)
SHLPLTGGGNKLTF

SEQ ID NO: 454998 - protein, 15 aa, Homo sapiens
  CDR3 for beta chain variable domain of TCR clone 227499 (TRBV7-9, TRBJ1-6)
CASSSPGRGNSPLHV

SEQ ID NO: 454999 - protein, 10 aa, Homo sapiens
  CDR3 for alpha chain variable domain of TCR clone 227500 (TRAV13-1, TRAJ52)
CAAKTPMLVV

SEQ ID NO: 455000 - protein, 14 aa, Homo sapiens
  CDR3 for beta chain variable domain of TCR clone 227500 (TRBV6-5, TRBJ1-1)
CDSSFGQGLTEAFF

SEQ ID NO: 455001 - protein, 13 aa, Homo sapiens
  CDR3 for alpha chain variable domain of TCR clone 227501 (TRAV35, TRAJ33)
CAGQLYGVDQLIW

SEQ ID NO: 455002 - protein, 14 aa, Homo sapiens
  CDR3 for beta chain variable domain of TCR clone 227501 (TRBV7-2, TRBJ1-1)
CASSLGGAGTEAFF

SEQ ID NO: 455003 - protein, 12 aa, Homo sapiens
  CDR3 for alpha chain variable domain of TCR clone 227502 (TRAV8-3, TRAJ26)
CAGDNYGQNFVF

SEQ ID NO: 455004 - protein, 17 aa, Homo sapiens
  CDR3 for beta chain variable domain of TCR clone 227502 (TRBV7-3, TRBJ2-3)
CASSRGLAGEVPDTQYF

SEQ ID NO: 455005 - protein, 15 aa, Homo sapiens
  CDR3 for alpha chain variable domain of TCR clone 227503 (TRAV27, TRAJ38)
CAARLNAGNNRKLIW

SEQ ID NO: 455006 - protein, 17 aa, Homo sapiens
  CDR3 for beta chain variable domain of TCR clone 227503 (TRBV20-1, TRBJ2-2)
CSASGSGQGGLTGELFF

SEQ ID NO: 455007 - protein, 15 aa, Homo sapiens
  CDR3 for alpha chain variable domain of TCR clone 227504 (TRAV8-3, TRAJ11)
CAVGLLSSGYSTLTF

SEQ ID NO: 455008 - protein, 23 aa, Homo sapiens
  CDR3 for beta chain variable domain of TCR clone 227504 (TRBV7-9, TRBJ1-2)
EAQLEKSRLLSDRFSSGEDGYTF

SEQ ID NO: 455009 - protein, 13 aa, Homo sapiens
  CDR3 for alpha chain variable domain of TCR clone 227505 (TRAV36/DV7, TRAJ29)
CAVEPSGNTPLVF

SEQ ID NO: 455010 - protein, 16 aa, Homo sapiens
  CDR3 for beta chain variable domain of TCR clone 227505 (TRBV7-8, TRBJ2-4)
CASSAERTLAKNIQYF

SEQ ID NO: 455011 - protein, 15 aa, Homo sapiens
  CDR3 for alpha chain variable domain of TCR clone 227506 (TRAV3, TRAJ13)
CAVRDIAGGYQKVTF

SEQ ID NO: 455012 - protein, 13 aa, Homo sapiens
  CDR3 for beta chain variable domain of TCR clone 227506 (TRBV2, TRBJ2-2)
CASSKKNIGELFF

SEQ ID NO: 455013 - protein, 21 aa, Homo sapiens
  CDR3 for alpha chain variable domain of TCR clone 227507 (TRAV3, )
CAVRPTPDIHNPDPAVYQLRD

SEQ ID NO: 455014 - protein, 15 aa, Homo sapiens
  CDR3 for beta chain variable domain of TCR clone 227507 (TRBV11-3, TRBJ2-5)
CASSDTSGGIETQYF

SEQ ID NO: 455015 - protein, 12 aa, Homo sapiens
  CDR3 for alpha chain variable domain of TCR clone 227508 (TRAV12-3, TRAJ17)
CAMTLTGNKLTF

SEQ ID NO: 455016 - protein, 15 aa, Homo sapiens
  CDR3 for beta chain variable domain of TCR clone 227508 (TRBV20-1, TRBJ2-7)
CSARERVSGKDEQYF

SEQ ID NO: 455017 - protein, 23 aa, Homo sapiens
  CDR3 for alpha chain variable domain of TCR clone 227509 (TRAV1-2, TRAJ32)
CAVRPPAVLQTSSSLELSLCLLS

SEQ ID NO: 455018 - protein, 14 aa, Homo sapiens
  CDR3 for beta chain variable domain of TCR clone 227509 (TRBV18, TRBJ2-7)
CASSPRGGAYEQYF

SEQ ID NO: 455019 - protein, 13 aa, Homo sapiens
  CDR3 for alpha chain variable domain of TCR clone 227510 (TRAV20, TRAJ21)
CAVEGYNLNKFYF

SEQ ID NO: 455020 - protein, 14 aa, Homo sapiens
  CDR3 for beta chain variable domain of TCR clone 227510 (TRBV12-5, TRBJ2-5)
CASGSRTHQETQYF

SEQ ID NO: 455021 - protein, 14 aa, Homo sapiens
  CDR3 for alpha chain variable domain of TCR clone 227511 (TRAV12-3, TRAJ42)
CAMNYGGSQGNLIF

SEQ ID NO: 455022 - protein, 15 aa, Homo sapiens
  CDR3 for beta chain variable domain of TCR clone 227511 (TRBV7-2, TRBJ1-6)
CASSLGPDRGMPLHF

SEQ ID NO: 455023 - protein, 14 aa, Homo sapiens
  CDR3 for alpha chain variable domain of TCR clone 227512 (TRAV17, TRAJ57)
CATDPQGGSEKLVF

SEQ ID NO: 455024 - protein, 16 aa, Homo sapiens
  CDR3 for beta chain variable domain of TCR clone 227512 (TRBV20-1, TRBJ1-4)
CSAPGQGLLANEKLFF

SEQ ID NO: 455025 - protein, 13 aa, Homo sapiens
  CDR3 for alpha chain variable domain of TCR clone 227513 (TRAV27, TRAJ6)
CAGGTRGSYIPTF

SEQ ID NO: 455026 - protein, 15 aa, Homo sapiens
  CDR3 for beta chain variable domain of TCR clone 227513 (TRBV7-2, TRBJ2-2)
CASRRPGQNTGELFF

SEQ ID NO: 455027 - protein, 18 aa, Homo sapiens
  CDR3 for alpha chain variable domain of TCR clone 227514 (TRAV13-1, TRAJ52)
CAASKRSAGGTSYGKLTF

SEQ ID NO: 455028 - protein, 12 aa, Homo sapiens
  CDR3 for beta chain variable domain of TCR clone 227514 (TRBV12-4, TRBJ2-3)
CASSTLPDTQYF

SEQ ID NO: 455029 - protein, 14 aa, Homo sapiens
  CDR3 for alpha chain variable domain of TCR clone 227515 (TRAV2, TRAJ9)
CAVEVRSGGFKTIF

SEQ ID NO: 455030 - protein, 15 aa, Homo sapiens
  CDR3 for beta chain variable domain of TCR clone 227515 (TRBV5-7, TRBJ1-5)
CASSYGKLWDQPQHF

SEQ ID NO: 455031 - protein, 23 aa, Homo sapiens
  CDR3 for alpha chain variable domain of TCR clone 227516 (TRAV26-1, TRAJ38)
CIADNAGNNHIQSPDPAGYHLRD

SEQ ID NO: 455032 - protein, 13 aa, Homo sapiens
  CDR3 for beta chain variable domain of TCR clone 227516 (TRBV20-1, TRBJ1-1)
CSARGGGNTEAFF

SEQ ID NO: 455033 - protein, 12 aa, Homo sapiens
  CDR3 for alpha chain variable domain of TCR clone 227517 (TRAV1-1, TRAJ39)
CAVPMVGNMLTF

SEQ ID NO: 455034 - protein, 13 aa, Homo sapiens
  CDR3 for beta chain variable domain of TCR clone 227517 (TRBV12-4, TRBJ2-7)
CASSPTETYEQYF

SEQ ID NO: 455035 - protein, 14 aa, Homo sapiens
  CDR3 for alpha chain variable domain of TCR clone 227518 (TRAV12-3, TRAJ10)
SHLPLTGGGNKLTF

SEQ ID NO: 455036 - protein, 13 aa, Homo sapiens
  CDR3 for beta chain variable domain of TCR clone 227518 (TRBV9, TRBJ2-1)
CACSPSGGNEQFL

SEQ ID NO: 455037 - protein, 12 aa, Homo sapiens
  CDR3 for alpha chain variable domain of TCR clone 227519 (TRAV17, TRAJ57)
CATDGGSEKLVF

SEQ ID NO: 455038 - protein, 13 aa, Homo sapiens
  CDR3 for beta chain variable domain of TCR clone 227519 (TRBV4-1, TRBJ1-1)
CASSREMNTEAFF

SEQ ID NO: 455039 - protein, 16 aa, Homo sapiens
  CDR3 for alpha chain variable domain of TCR clone 227520 (TRAV17, TRAJ22)
CATDAISSGSARQLTF

SEQ ID NO: 455040 - protein, 15 aa, Homo sapiens
  CDR3 for beta chain variable domain of TCR clone 227520 (TRBV18, TRBJ2-7)
CASSPTFMDSYEQYF

SEQ ID NO: 455041 - protein, 14 aa, Homo sapiens
  CDR3 for alpha chain variable domain of TCR clone 227521 (TRAV16, TRAJ39)
CALSKNNAGNMLTF

SEQ ID NO: 455042 - protein, 17 aa, Homo sapiens
  CDR3 for beta chain variable domain of TCR clone 227521 (TRBV23-1, TRBJ1-2)
CDSSNTGGGLLWLHLRF

SEQ ID NO: 455043 - protein, 12 aa, Homo sapiens
  CDR3 for alpha chain variable domain of TCR clone 227522 (TRAV13-1, TRAJ21)
CAAKEDFNKFYF

SEQ ID NO: 455044 - protein, 15 aa, Homo sapiens
  CDR3 for beta chain variable domain of TCR clone 227522 (TRBV15, TRBJ1-5)
CATSRDPVSNQPQHF

SEQ ID NO: 455045 - protein, 22 aa, Homo sapiens
  CDR3 for alpha chain variable domain of TCR clone 227523 (TRAV21, TRAJ38)
CAVRQDAGNNHNQNPDPAVYQL

SEQ ID NO: 455046 - protein, 16 aa, Homo sapiens
  CDR3 for beta chain variable domain of TCR clone 227523 (TRBV4-2, TRBJ1-1)
CASRPLDGGGDTEAFF

SEQ ID NO: 455047 - protein, 13 aa, Homo sapiens
  CDR3 for alpha chain variable domain of TCR clone 227524 (TRAV13-1, TRAJ10)
CAALEGGGNKLTF

SEQ ID NO: 455048 - protein, 13 aa, Homo sapiens
  CDR3 for beta chain variable domain of TCR clone 227524 (TRBV12-4, TRBJ1-2)
CASSLRQGKGYTF

SEQ ID NO: 455049 - protein, 16 aa, Homo sapiens
  CDR3 for alpha chain variable domain of TCR clone 227525 (TRAV3, TRAJ10)
CAVRDVRAGGGNKLTF

SEQ ID NO: 455050 - protein, 16 aa, Homo sapiens
  CDR3 for beta chain variable domain of TCR clone 227525 (TRBV19, TRBJ2-2)
CASSFPGQGLAGELFF

SEQ ID NO: 455051 - protein, 13 aa, Homo sapiens
  CDR3 for alpha chain variable domain of TCR clone 227526 (TRAV20, TRAJ37)
RAGCSSNTDKLIF

SEQ ID NO: 455052 - protein, 11 aa, Homo sapiens
  CDR3 for beta chain variable domain of TCR clone 227526 (TRBV12-4, TRBJ2-3)
CASTATDTQYF

SEQ ID NO: 455053 - protein, 18 aa, Homo sapiens
  CDR3 for alpha chain variable domain of TCR clone 227527 (TRAV13-1, TRAJ37)
CAPPPGPHGSSNTGKLIF

SEQ ID NO: 455054 - protein, 15 aa, Homo sapiens
  CDR3 for beta chain variable domain of TCR clone 227527 (TRBV7-2, TRBJ2-7)
CASSLKGALTYEQYF

SEQ ID NO: 455055 - protein, 13 aa, Homo sapiens
  CDR3 for alpha chain variable domain of TCR clone 227528 (TRAV1-2, TRAJ9)
CAALNTGGFKTIF

SEQ ID NO: 455056 - protein, 16 aa, Homo sapiens
  CDR3 for beta chain variable domain of TCR clone 227528 (TRBV6-1, TRBJ2-5)
CASSERTGCTWETQYF

SEQ ID NO: 455057 - protein, 12 aa, Homo sapiens
  CDR3 for alpha chain variable domain of TCR clone 227529 (TRAV23/DV6, TRAJ49)
CAASSTGNQFHF

SEQ ID NO: 455058 - protein, 15 aa, Homo sapiens
  CDR3 for beta chain variable domain of TCR clone 227529 (TRBV10-3, TRBJ2-3)
CAIDTSGRRTDTQYF

SEQ ID NO: 455059 - protein, 14 aa, Homo sapiens
  CDR3 for alpha chain variable domain of TCR clone 227530 (TRAV16, TRAJ15)
CALSFNKAGTALIF

SEQ ID NO: 455060 - protein, 16 aa, Homo sapiens
  CDR3 for beta chain variable domain of TCR clone 227530 (TRBV9, TRBJ2-7)
CASSAGPDRSPYEQYF

SEQ ID NO: 455061 - protein, 15 aa, Homo sapiens
  CDR3 for alpha chain variable domain of TCR clone 227531 (TRAV21, TRAJ53)
CATLNSGGSHYKLTF

SEQ ID NO: 455062 - protein, 14 aa, Homo sapiens
  CDR3 for beta chain variable domain of TCR clone 227531 (TRBV7-2, TRBJ2-7)
CASRSQGAAYEQSF

SEQ ID NO: 455063 - protein, 14 aa, Homo sapiens
  CDR3 for alpha chain variable domain of TCR clone 227532 (TRAV8-3, TRAJ49)
CAVGEPNTGNQFYF

SEQ ID NO: 455064 - protein, 17 aa, Homo sapiens
  CDR3 for beta chain variable domain of TCR clone 227532 (TRBV7-3, TRBJ2-3)
CASSPRGQGYGTDTQYF

SEQ ID NO: 455065 - protein, 20 aa, Homo sapiens
  CDR3 for alpha chain variable domain of TCR clone 227533 (TRAV12-1, TRAJ42)
SSGIQPPTSVKGGSQGNLIF

SEQ ID NO: 455066 - protein, 18 aa, Homo sapiens
  CDR3 for beta chain variable domain of TCR clone 227533 (TRBV11-2, TRBJ2-3)
CASSLGGASRGAPNTQYF

SEQ ID NO: 455067 - protein, 13 aa, Homo sapiens
  CDR3 for alpha chain variable domain of TCR clone 227534 (TRAV2, TRAJ40)
CAVVTSGTYKHIF

SEQ ID NO: 455068 - protein, 16 aa, Homo sapiens
  CDR3 for beta chain variable domain of TCR clone 227534 (TRBV7-9, TRBJ1-3)
CASSLGAGSSGNTIYF

SEQ ID NO: 455069 - protein, 13 aa, Homo sapiens
  CDR3 for alpha chain variable domain of TCR clone 227535 (TRAV1-2, TRAJ11)
CAVRREGYSTLAF

SEQ ID NO: 455070 - protein, 14 aa, Homo sapiens
  CDR3 for beta chain variable domain of TCR clone 227535 (TRBV25-1, TRBJ1-1)
CASTHLGGNTEAFF

SEQ ID NO: 455071 - protein, 14 aa, Homo sapiens
  CDR3 for alpha chain variable domain of TCR clone 227536 (TRAV26-1, TRAJ49)
CIVRLTNTGNQFYF

SEQ ID NO: 455072 - protein, 13 aa, Homo sapiens
  CDR3 for beta chain variable domain of TCR clone 227536 (TRBV10-1, TRBJ1-1)
CDSQGQTNTEAFF

SEQ ID NO: 455073 - protein, 19 aa, Homo sapiens
  CDR3 for alpha chain variable domain of TCR clone 227537 (TRAV1-1, TRAJ30)
CAGSEMTRSSLEKGHDFIF

SEQ ID NO: 455074 - protein, 14 aa, Homo sapiens
  CDR3 for beta chain variable domain of TCR clone 227537 (TRBV28, TRBJ2-1)
CASSLVAPYNEQFF

SEQ ID NO: 455075 - protein, 13 aa, Homo sapiens
  CDR3 for alpha chain variable domain of TCR clone 227538 (TRAV12-2, TRAJ24)
CAVSTDSWGNLQF

SEQ ID NO: 455076 - protein, 15 aa, Homo sapiens
  CDR3 for beta chain variable domain of TCR clone 227538 (TRBV7-2, TRBJ2-2)
CASSPTGANTGELFF

SEQ ID NO: 455077 - protein, 13 aa, Homo sapiens
  CDR3 for alpha chain variable domain of TCR clone 227539 (TRAV8-3, TRAJ28)
CAVGAVGSYQLTF

SEQ ID NO: 455078 - protein, 11 aa, Homo sapiens
  CDR3 for beta chain variable domain of TCR clone 227539 (TRBV7-8, TRBJ2-7)
CASPEKGEQYV

SEQ ID NO: 455079 - protein, 13 aa, Homo sapiens
  CDR3 for alpha chain variable domain of TCR clone 227540 (TRAV30, TRAJ16)
CGTFGGDGQKLLF

SEQ ID NO: 455080 - protein, 13 aa, Homo sapiens
  CDR3 for beta chain variable domain of TCR clone 227540 (TRBV7-9, TRBJ2-5)
CASGKVGIETQYF

SEQ ID NO: 455081 - protein, 14 aa, Homo sapiens
  CDR3 for alpha chain variable domain of TCR clone 227541 (TRAV13-1, TRAJ44)
CAAKATGTASKLTF

SEQ ID NO: 455082 - protein, 17 aa, Homo sapiens
  CDR3 for beta chain variable domain of TCR clone 227541 (TRBV7-3, TRBJ2-3)
RASSLMKRIRGADTQYF

SEQ ID NO: 455083 - protein, 17 aa, Homo sapiens
  CDR3 for alpha chain variable domain of TCR clone 227542 (TRAV3, TRAJ6)
CAVRDGPRAGGSYIPTF

SEQ ID NO: 455084 - protein, 14 aa, Homo sapiens
  CDR3 for beta chain variable domain of TCR clone 227542 (TRBV11-2, TRBJ1-2)
CASSLYRGNYGYTF

SEQ ID NO: 455085 - protein, 14 aa, Homo sapiens
  CDR3 for alpha chain variable domain of TCR clone 227543 (TRAV12-3, TRAJ10)
SHLPLTGGGNKLTF

SEQ ID NO: 455086 - protein, 15 aa, Homo sapiens
  CDR3 for beta chain variable domain of TCR clone 227543 (TRBV5-1, TRBJ1-4)
CASSLTADSDEKLFF

SEQ ID NO: 455087 - protein, 14 aa, Homo sapiens
  CDR3 for alpha chain variable domain of TCR clone 227544 (TRAV1-2, TRAJ16)
CAVNRFPDGQKLLF

SEQ ID NO: 455088 - protein, 12 aa, Homo sapiens
  CDR3 for beta chain variable domain of TCR clone 227544 (TRBV11-2, TRBJ2-2)
CASSLGGGELFF

SEQ ID NO: 455089 - protein, 18 aa, Homo sapiens
  CDR3 for alpha chain variable domain of TCR clone 227545 (TRAV13-1, TRAJ52)
CAASKRSAGDTSDGKLTF

SEQ ID NO: 455090 - protein, 14 aa, Homo sapiens
  CDR3 for beta chain variable domain of TCR clone 227545 (TRBV7-2, TRBJ2-5)
CASSTGGELKTQYF

SEQ ID NO: 455091 - protein, 14 aa, Homo sapiens
  CDR3 for alpha chain variable domain of TCR clone 227546 (TRAV8-4, TRAJ8)
CAASEDTGFQKLVF

SEQ ID NO: 455092 - protein, 16 aa, Homo sapiens
  CDR3 for beta chain variable domain of TCR clone 227546 (TRBV7-3, TRBJ2-1)
CASSKPLAGGYNEQFF

SEQ ID NO: 455093 - protein, 16 aa, Homo sapiens
  CDR3 for alpha chain variable domain of TCR clone 227547 (TRAV20, TRAJ22)
CAVQASSSGSARQLTF

SEQ ID NO: 455094 - protein, 13 aa, Homo sapiens
  CDR3 for beta chain variable domain of TCR clone 227547 (TRBV7-2, TRBJ2-5)
CASSQTSEETKYF

SEQ ID NO: 455095 - protein, 15 aa, Homo sapiens
  CDR3 for alpha chain variable domain of TCR clone 227548 (TRAV21, TRAJ53)
CATLNSGGSNYKLTF

SEQ ID NO: 455096 - protein, 17 aa, Homo sapiens
  CDR3 for beta chain variable domain of TCR clone 227548 (TRBV19, TRBJ2-6)
CASSTGQVVSGANDLTF

SEQ ID NO: 455097 - protein, 12 aa, Homo sapiens
  CDR3 for alpha chain variable domain of TCR clone 227549 (TRAV10, TRAJ43)
CVVVRVGNDMRF

SEQ ID NO: 455098 - protein, 13 aa, Homo sapiens
  CDR3 for beta chain variable domain of TCR clone 227549 (TRBV19, TRBJ1-2)
CASSVPGQDGYTF

SEQ ID NO: 455099 - protein, 13 aa, Homo sapiens
  CDR3 for alpha chain variable domain of TCR clone 227550 (TRAV12-2, TRAJ52)
CNAGGTSYGKLTF

SEQ ID NO: 455100 - protein, 11 aa, Homo sapiens
  CDR3 for beta chain variable domain of TCR clone 227550 (TRBV5-1, TRBJ2-1)
CASSIGQEQFF

SEQ ID NO: 455101 - protein, 13 aa, Homo sapiens
  CDR3 for alpha chain variable domain of TCR clone 227551 (TRAV35, TRAJ42)
CAGFPGSQGNLIF

SEQ ID NO: 455102 - protein, 13 aa, Homo sapiens
  CDR3 for beta chain variable domain of TCR clone 227551 (TRBV28, TRBJ1-2)
CAGRDRGNYGYTF

SEQ ID NO: 455103 - protein, 15 aa, Homo sapiens
  CDR3 for alpha chain variable domain of TCR clone 227552 (TRAV21, TRAJ24)
CAARSSTDSWGKLQF

SEQ ID NO: 455104 - protein, 13 aa, Homo sapiens
  CDR3 for beta chain variable domain of TCR clone 227552 (TRBV11-2, TRBJ2-5)
CASSSTAEETQYF

SEQ ID NO: 455105 - protein, 18 aa, Homo sapiens
  CDR3 for alpha chain variable domain of TCR clone 227553 (TRAV21, TRAJ52)
CAVRPSPAGGTSDGKLTF

SEQ ID NO: 455106 - protein, 17 aa, Homo sapiens
  CDR3 for beta chain variable domain of TCR clone 227553 (TRBV13, TRBJ2-3)
CASSLSRVAGGRNTQYY

SEQ ID NO: 455107 - protein, 13 aa, Homo sapiens
  CDR3 for alpha chain variable domain of TCR clone 227554 (TRAV12-2, TRAJ7)
CAVNLYGNNRLAF

SEQ ID NO: 455108 - protein, 15 aa, Homo sapiens
  CDR3 for beta chain variable domain of TCR clone 227554 (TRBV7-9, TRBJ1-6)
CASSSPGRGNSPLHF

SEQ ID NO: 455109 - protein, 14 aa, Homo sapiens
  CDR3 for alpha chain variable domain of TCR clone 227555 (TRAV12-2, TRAJ6)
CASKWGGGSYIPTF

SEQ ID NO: 455110 - protein, 14 aa, Homo sapiens
  CDR3 for beta chain variable domain of TCR clone 227555 (TRBV7-2, TRBJ2-7)
CASSPKTSFYEQYF

SEQ ID NO: 455111 - protein, 16 aa, Homo sapiens
  CDR3 for alpha chain variable domain of TCR clone 227556 (TRAV12-3, TRAJ53)
CAMSPGSGGSNYKLTF

SEQ ID NO: 455112 - protein, 17 aa, Homo sapiens
  CDR3 for beta chain variable domain of TCR clone 227556 (TRBV4-2, TRBJ1-1)
CASTQFGGGSGNTGAFF

SEQ ID NO: 455113 - protein, 14 aa, Homo sapiens
  CDR3 for alpha chain variable domain of TCR clone 227557 (TRAV12-2, TRAJ11)
CAVNRESGYSPLTF

SEQ ID NO: 455114 - protein, 10 aa, Homo sapiens
  CDR3 for beta chain variable domain of TCR clone 227557 (TRBV20-1, TRBJ2-5)
CSARFETQYF

SEQ ID NO: 455115 - protein, 13 aa, Homo sapiens
  CDR3 for alpha chain variable domain of TCR clone 227558 (TRAV30, TRAJ24)
CGIVTDSWGKLQF

SEQ ID NO: 455116 - protein, 16 aa, Homo sapiens
  CDR3 for beta chain variable domain of TCR clone 227558 (TRBV7-3, TRBJ2-2)
CASSLKRGTLSGELFF

SEQ ID NO: 455117 - protein, 14 aa, Homo sapiens
  CDR3 for alpha chain variable domain of TCR clone 227559 (TRAV12-1, TRAJ13)
CVVNDSGGYKKVTF

SEQ ID NO: 455118 - protein, 14 aa, Homo sapiens
  CDR3 for beta chain variable domain of TCR clone 227559 (TRBV7-2, TRBJ1-6)
CASSYAAYNSPLHF

SEQ ID NO: 455119 - protein, 14 aa, Homo sapiens
  CDR3 for alpha chain variable domain of TCR clone 227560 (TRAV1-2, TRAJ8)
CAVREDTGFQKLEF

SEQ ID NO: 455120 - protein, 12 aa, Homo sapiens
  CDR3 for beta chain variable domain of TCR clone 227560 (TRBV11-2, TRBJ2-2)
CASSLPTGELFF

SEQ ID NO: 455121 - protein, 17 aa, Homo sapiens
  CDR3 for alpha chain variable domain of TCR clone 227561 (TRAV26-2, TRAJ42)
CILRDVGYGGSQGNLIF

SEQ ID NO: 455122 - protein, 16 aa, Homo sapiens
  CDR3 for beta chain variable domain of TCR clone 227561 (TRBV12-4, TRBJ2-7)
CASSLIGGTGTYEQHF

SEQ ID NO: 455123 - protein, 12 aa, Homo sapiens
  CDR3 for alpha chain variable domain of TCR clone 227562 (TRAV16, TRAJ22)
CALEVSARQPTF

SEQ ID NO: 455124 - protein, 14 aa, Homo sapiens
  CDR3 for beta chain variable domain of TCR clone 227562 (TRBV11-2, TRBJ2-3)
CASSSIASTDTQYF

SEQ ID NO: 455125 - protein, 15 aa, Homo sapiens
  CDR3 for alpha chain variable domain of TCR clone 227563 (TRAV8-4, TRAJ48)
CAVSAAYFGNEKLTF

SEQ ID NO: 455126 - protein, 12 aa, Homo sapiens
  CDR3 for beta chain variable domain of TCR clone 227563 (TRBV3-1, TRBJ2-5)
CASGQRGETQYF

SEQ ID NO: 455127 - protein, 12 aa, Homo sapiens
  CDR3 for alpha chain variable domain of TCR clone 227564 (TRAV23/DV6, TRAJ30)
CAASKGDDKIIF

SEQ ID NO: 455128 - protein, 18 aa, Homo sapiens
  CDR3 for beta chain variable domain of TCR clone 227564 (TRBV10-3, TRBJ2-3)
CAISESRVGPMRGDTHYF

SEQ ID NO: 455129 - protein, 10 aa, Homo sapiens
  CDR3 for alpha chain variable domain of TCR clone 227565 (TRAV1-2, TRAJ20)
CVPNDYKLSF

SEQ ID NO: 455130 - protein, 18 aa, Homo sapiens
  CDR3 for beta chain variable domain of TCR clone 227565 (TRBV6-5, TRBJ2-5)
CASSYSQAGGSYQETQYF

SEQ ID NO: 455131 - protein, 14 aa, Homo sapiens
  CDR3 for alpha chain variable domain of TCR clone 227566 (TRAV36/DV7, TRAJ13)
WGSGENGGYQNVTF

SEQ ID NO: 455132 - protein, 15 aa, Homo sapiens
  CDR3 for beta chain variable domain of TCR clone 227566 (TRBV19, TRBJ2-1)
CASSTGTSSYNEQFF

SEQ ID NO: 455133 - protein, 17 aa, Homo sapiens
  CDR3 for alpha chain variable domain of TCR clone 227567 (TRAV3, TRAJ37)
CAVRDMRTPGNTGKLIF

SEQ ID NO: 455134 - protein, 16 aa, Homo sapiens
  CDR3 for beta chain variable domain of TCR clone 227567 (TRBV2, TRBJ2-7)
CASSEPWTGPSYEQYF

SEQ ID NO: 455135 - protein, 12 aa, Homo sapiens
  CDR3 for alpha chain variable domain of TCR clone 227568 (TRAV3, TRAJ31)
CAVRPRGPRLMF

SEQ ID NO: 455136 - protein, 14 aa, Homo sapiens
  CDR3 for beta chain variable domain of TCR clone 227568 (TRBV25-1, TRBJ1-1)
CASTHLGGNTEAFF

SEQ ID NO: 455137 - protein, 14 aa, Homo sapiens
  CDR3 for alpha chain variable domain of TCR clone 227569 (TRAV1-2, TRAJ8)
CAVREDTGFQKLVF

SEQ ID NO: 455138 - protein, 20 aa, Homo sapiens
  CDR3 for beta chain variable domain of TCR clone 227569 (TRBV7-8, TRBJ2-2)
CVSSHLFPGPTIHITGELFF

SEQ ID NO: 455139 - protein, 16 aa, Homo sapiens
  CDR3 for alpha chain variable domain of TCR clone 227570 (TRAV10, TRAJ41)
CGERELNSNSGYALNF

SEQ ID NO: 455140 - protein, 12 aa, Homo sapiens
  CDR3 for beta chain variable domain of TCR clone 227570 (TRBV19, TRBJ1-1)
CASNLTVRRAFF

SEQ ID NO: 455141 - protein, 11 aa, Homo sapiens
  CDR3 for alpha chain variable domain of TCR clone 227571 (TRAV2, TRAJ31)
CAVYHNARLMF

SEQ ID NO: 455142 - protein, 16 aa, Homo sapiens
  CDR3 for beta chain variable domain of TCR clone 227571 (TRBV28, TRBJ1-6)
CASSSLLEGDNSPLHF

SEQ ID NO: 455143 - protein, 16 aa, Homo sapiens
  CDR3 for alpha chain variable domain of TCR clone 227572 (TRAV39, TRAJ32)
CAVDMEYGGATNKLIF

SEQ ID NO: 455144 - protein, 11 aa, Homo sapiens
  CDR3 for beta chain variable domain of TCR clone 227572 (TRBV12-4, TRBJ2-3)
CASTATDTQYF

SEQ ID NO: 455145 - protein, 15 aa, Homo sapiens
  CDR3 for alpha chain variable domain of TCR clone 227573 (TRAV26-1, TRAJ29)
CIVRVEGSGNTPLVF

SEQ ID NO: 455146 - protein, 12 aa, Homo sapiens
  CDR3 for beta chain variable domain of TCR clone 227573 (TRBV12-4, TRBJ2-7)
CASSLGGYEQYF

SEQ ID NO: 455147 - protein, 13 aa, Homo sapiens
  CDR3 for alpha chain variable domain of TCR clone 227574 (TRAV39, TRAJ49)
CAGEANTGNQFYF

SEQ ID NO: 455148 - protein, 13 aa, Homo sapiens
  CDR3 for beta chain variable domain of TCR clone 227574 (TRBV7-2, TRBJ2-2)
CASSSVRAGELFF

SEQ ID NO: 455149 - protein, 13 aa, Homo sapiens
  CDR3 for alpha chain variable domain of TCR clone 227575 (TRAV29/DV5, TRAJ31)
YAASRNNNARLMF

SEQ ID NO: 455150 - protein, 13 aa, Homo sapiens
  CDR3 for beta chain variable domain of TCR clone 227575 (TRBV7-9, TRBJ2-5)
CASLPSGRETQYF

SEQ ID NO: 455151 - protein, 12 aa, Homo sapiens
  CDR3 for alpha chain variable domain of TCR clone 227576 (TRAV12-3, TRAJ17)
CAMTLTGNKLTF

SEQ ID NO: 455152 - protein, 15 aa, Homo sapiens
  CDR3 for beta chain variable domain of TCR clone 227576 (TRBV20-1, TRBJ2-7)
CSARDRVWGMDEQYF

SEQ ID NO: 455153 - protein, 14 aa, Homo sapiens
  CDR3 for alpha chain variable domain of TCR clone 227577 (TRAV8-6, TRAJ6)
CAVREGGGSYIPTF

SEQ ID NO: 455154 - protein, 15 aa, Homo sapiens
  CDR3 for beta chain variable domain of TCR clone 227577 (TRBV9, TRBJ1-6)
CASSVAGTGDSPLHF

SEQ ID NO: 455155 - protein, 14 aa, Homo sapiens
  CDR3 for alpha chain variable domain of TCR clone 227578 (TRAV12-2, TRAJ17)
CAVLFKAAGNKLTF

SEQ ID NO: 455156 - protein, 14 aa, Homo sapiens
  CDR3 for beta chain variable domain of TCR clone 227578 (TRBV7-2, TRBJ2-7)
CASRLQGAAYEQYF

SEQ ID NO: 455157 - protein, 13 aa, Homo sapiens
  CDR3 for alpha chain variable domain of TCR clone 227579 (TRAV16, TRAJ58)
CALSIPSGSRLTF

SEQ ID NO: 455158 - protein, 16 aa, Homo sapiens
  CDR3 for beta chain variable domain of TCR clone 227579 (TRBV11-3, TRBJ2-3)
CASSSGSGGGTDTQYF

SEQ ID NO: 455159 - protein, 14 aa, Homo sapiens
  CDR3 for alpha chain variable domain of TCR clone 227580 (TRAV12-3, TRAJ10)
SHLPLTGGGNKLTF

SEQ ID NO: 455160 - protein, 16 aa, Homo sapiens
  CDR3 for beta chain variable domain of TCR clone 227580 (TRBV19, TRBJ2-1)
CAGSKAGPSSYNEQFF

SEQ ID NO: 455161 - protein, 16 aa, Homo sapiens
  CDR3 for alpha chain variable domain of TCR clone 227581 (TRAV3, TRAJ17)
CAVRDGSPAAGNKLTF

SEQ ID NO: 455162 - protein, 16 aa, Homo sapiens
  CDR3 for beta chain variable domain of TCR clone 227581 (TRBV6-1, TRBJ2-5)
CASSETLDRGAETQYF

SEQ ID NO: 455163 - protein, 14 aa, Homo sapiens
  CDR3 for alpha chain variable domain of TCR clone 227582 (TRAV26-1, TRAJ38)
CIADNAGNSRKLIW

SEQ ID NO: 455164 - protein, 15 aa, Homo sapiens
  CDR3 for beta chain variable domain of TCR clone 227582 (TRBV20-1, TRBJ1-1)
CSASRGVTGNTEAFF

SEQ ID NO: 455165 - protein, 14 aa, Homo sapiens
  CDR3 for alpha chain variable domain of TCR clone 227583 (TRAV21, TRAJ21)
CAGKCFGNFNKFYF

SEQ ID NO: 455166 - protein, 13 aa, Homo sapiens
  CDR3 for beta chain variable domain of TCR clone 227583 (TRBV18, TRBJ1-1)
CASSPETKPEAFF

SEQ ID NO: 455167 - protein, 11 aa, Homo sapiens
  CDR3 for alpha chain variable domain of TCR clone 227584 (TRAV1-2, TRAJ31)
CAVNNNARLMF

SEQ ID NO: 455168 - protein, 15 aa, Homo sapiens
  CDR3 for beta chain variable domain of TCR clone 227584 (TRBV28, TRBJ2-1)
CASSIIAGGRSEKFF

SEQ ID NO: 455169 - protein, 14 aa, Homo sapiens
  CDR3 for alpha chain variable domain of TCR clone 227585 (TRAV17, TRAJ40)
CATALTSGTYKSIF

SEQ ID NO: 455170 - protein, 13 aa, Homo sapiens
  CDR3 for beta chain variable domain of TCR clone 227585 (TRBV27, TRBJ2-1)
CASSSGSYNEQFF

SEQ ID NO: 455171 - protein, 14 aa, Homo sapiens
  CDR3 for alpha chain variable domain of TCR clone 227586 (TRAV13-2, TRAJ41)
CAERPDWAGYALNF

SEQ ID NO: 455172 - protein, 15 aa, Homo sapiens
  CDR3 for beta chain variable domain of TCR clone 227586 (TRBV19, TRBJ2-1)
CASSSPGVPLDEQFF

SEQ ID NO: 455173 - protein, 15 aa, Homo sapiens
  CDR3 for alpha chain variable domain of TCR clone 227587 (TRAV3, TRAJ5)
CAVRVRKTGRRALTF

SEQ ID NO: 455174 - protein, 15 aa, Homo sapiens
  CDR3 for beta chain variable domain of TCR clone 227587 (TRBV7-8, TRBJ2-1)
CASSLADSLHNEQFF

SEQ ID NO: 455175 - protein, 12 aa, Homo sapiens
  CDR3 for alpha chain variable domain of TCR clone 227588 (TRAV3, TRAJ31)
CAVRDGNARLMF

SEQ ID NO: 455176 - protein, 13 aa, Homo sapiens
  CDR3 for beta chain variable domain of TCR clone 227588 (TRBV7-2, TRBJ1-5)
CASSFARNQPQHF

SEQ ID NO: 455177 - protein, 18 aa, Homo sapiens
  CDR3 for alpha chain variable domain of TCR clone 227589 (TRAV21, TRAJ52)
CAVRPSPAGGTSYGKLTF

SEQ ID NO: 455178 - protein, 15 aa, Homo sapiens
  CDR3 for beta chain variable domain of TCR clone 227589 (TRBV7-9, TRBJ2-7)
CASSSSALAVYEQYF

SEQ ID NO: 455179 - protein, 14 aa, Homo sapiens
  CDR3 for alpha chain variable domain of TCR clone 227590 (TRAV12-2, TRAJ13)
CAVKKTGGYQKVTF

SEQ ID NO: 455180 - protein, 17 aa, Homo sapiens
  CDR3 for beta chain variable domain of TCR clone 227590 (TRBV20-1, TRBJ2-2)
CNASGSGQGGLTGELFF

SEQ ID NO: 455181 - protein, 13 aa, Homo sapiens
  CDR3 for alpha chain variable domain of TCR clone 227591 (TRAV3, TRAJ31)
CAVREGNNARIMF

SEQ ID NO: 455182 - protein, 15 aa, Homo sapiens
  CDR3 for beta chain variable domain of TCR clone 227591 (TRBV6-1, TRBJ1-1)
CASRTPGQLNTEAFF

SEQ ID NO: 455183 - protein, 12 aa, Homo sapiens
  CDR3 for alpha chain variable domain of TCR clone 227592 (TRAV17, TRAJ12)
CAGGDSSYKLIF

SEQ ID NO: 455184 - protein, 14 aa, Homo sapiens
  CDR3 for beta chain variable domain of TCR clone 227592 (TRBV7-2, TRBJ2-7)
CASSPKTSFYEQYF

SEQ ID NO: 455185 - protein, 14 aa, Homo sapiens
  CDR3 for alpha chain variable domain of TCR clone 227593 (TRAV1-2, TRAJ16)
CAVNRFSAGQKLHF

SEQ ID NO: 455186 - protein, 15 aa, Homo sapiens
  CDR3 for beta chain variable domain of TCR clone 227593 (TRBV9, TRBJ1-6)
CASSVAGTGDSPLHF

SEQ ID NO: 455187 - protein, 13 aa, Homo sapiens
  CDR3 for alpha chain variable domain of TCR clone 227594 (TRAV26-2, TRAJ43)
CILRAVNNNDMRF

SEQ ID NO: 455188 - protein, 15 aa, Homo sapiens
  CDR3 for beta chain variable domain of TCR clone 227594 (TRBV5-1, TRBJ2-2)
CASSSQGGNTGELFF

SEQ ID NO: 455189 - protein, 15 aa, Homo sapiens
  CDR3 for alpha chain variable domain of TCR clone 227595 (TRAV13-1, TRAJ48)
CAPLGSNFGNEKLTF

SEQ ID NO: 455190 - protein, 14 aa, Homo sapiens
  CDR3 for beta chain variable domain of TCR clone 227595 (TRBV7-2, TRBJ2-7)
CASSPKTSFYEQYF

SEQ ID NO: 455191 - protein, 13 aa, Homo sapiens
  CDR3 for alpha chain variable domain of TCR clone 227596 (TRAV2, TRAJ40)
CAVVTSGTYKYIF

SEQ ID NO: 455192 - protein, 19 aa, Homo sapiens
  CDR3 for beta chain variable domain of TCR clone 227596 (TRBV5-8, TRBJ2-3)
CASSFLGTSGSHRTDTQYF

SEQ ID NO: 455193 - protein, 11 aa, Homo sapiens
  CDR3 for alpha chain variable domain of TCR clone 227597 (TRAV1-1, TRAJ23)
CAVRQGGKLIF

SEQ ID NO: 455194 - protein, 20 aa, Homo sapiens
  CDR3 for beta chain variable domain of TCR clone 227597 (TRBV11-2, TRBJ1-6)
CASSLVFATGGSVHPSSLGT

SEQ ID NO: 455195 - protein, 14 aa, Homo sapiens
  CDR3 for alpha chain variable domain of TCR clone 227598 (TRAV16, TRAJ8)
CALLMNTGFQKLVF

SEQ ID NO: 455196 - protein, 15 aa, Homo sapiens
  CDR3 for beta chain variable domain of TCR clone 227598 (TRBV7-9, TRBJ1-4)
CASSRTGGFNEKLFF

SEQ ID NO: 455197 - protein, 16 aa, Homo sapiens
  CDR3 for alpha chain variable domain of TCR clone 227599 (TRAV30, TRAJ24)
CGTEIVDADSWGKFQF

SEQ ID NO: 455198 - protein, 18 aa, Homo sapiens
  CDR3 for beta chain variable domain of TCR clone 227599 (TRBV7-9, TRBJ2-7)
CASSLTTSESRTWYEQYF

SEQ ID NO: 455199 - protein, 13 aa, Homo sapiens
  CDR3 for alpha chain variable domain of TCR clone 227600 (TRAV27, TRAJ43)
CAGAGNNNNEMRF

SEQ ID NO: 455200 - protein, 14 aa, Homo sapiens
  CDR3 for beta chain variable domain of TCR clone 227600 (TRBV7-2, TRBJ2-7)
CASRSQGAAYEQYF

SEQ ID NO: 455201 - protein, 14 aa, Homo sapiens
  CDR3 for alpha chain variable domain of TCR clone 227601 (TRAV27, TRAJ38)
CAGDRAGNDRKLIW

SEQ ID NO: 455202 - protein, 12 aa, Homo sapiens
  CDR3 for beta chain variable domain of TCR clone 227601 (TRBV6-1, TRBJ2-7)
CASSLYGNEQYF

SEQ ID NO: 455203 - protein, 15 aa, Homo sapiens
  CDR3 for alpha chain variable domain of TCR clone 227602 (TRAV21, TRAJ52)
CAVRGGGTSNGKLTF

SEQ ID NO: 455204 - protein, 15 aa, Homo sapiens
  CDR3 for beta chain variable domain of TCR clone 227602 (TRBV18, TRBJ1-5)
CASSPSDRSNQPQHF

SEQ ID NO: 455205 - protein, 13 aa, Homo sapiens
  CDR3 for alpha chain variable domain of TCR clone 227603 (TRAV26-1, TRAJ30)
CIVRVESNDTIIF

SEQ ID NO: 455206 - protein, 17 aa, Homo sapiens
  CDR3 for beta chain variable domain of TCR clone 227603 (TRBV13, TRBJ2-3)
CASSLSRVARGRNTHYF

SEQ ID NO: 455207 - protein, 15 aa, Homo sapiens
  CDR3 for alpha chain variable domain of TCR clone 227604 (TRAV8-4, TRAJ40)
CAVSSITLGTYKYIF

SEQ ID NO: 455208 - protein, 13 aa, Homo sapiens
  CDR3 for beta chain variable domain of TCR clone 227604 (TRBV2, TRBJ2-1)
CATSRGTDNEQFF

SEQ ID NO: 455209 - protein, 18 aa, Homo sapiens
  CDR3 for alpha chain variable domain of TCR clone 227605 (TRAV13-1, TRAJ52)
CAAKNTNAGGTSYGKLTF

SEQ ID NO: 455210 - protein, 12 aa, Homo sapiens
  CDR3 for beta chain variable domain of TCR clone 227605 (TRBV5-1, TRBJ1-2)
CASSQDTYGYTF

SEQ ID NO: 455211 - protein, 15 aa, Homo sapiens
  CDR3 for alpha chain variable domain of TCR clone 227606 (TRAV8-4, TRAJ11)
CAVSRALSGYSTLTF

SEQ ID NO: 455212 - protein, 17 aa, Homo sapiens
  CDR3 for beta chain variable domain of TCR clone 227606 (TRBV19, TRBJ1-5)
CASSPGAYSGESQPQHF

SEQ ID NO: 455213 - protein, 22 aa, Homo sapiens
  CDR3 for alpha chain variable domain of TCR clone 227607 (TRAV26-1, TRAJ42)
CIVRPIMEEAKEISSLEKDLNF

SEQ ID NO: 455214 - protein, 16 aa, Homo sapiens
  CDR3 for beta chain variable domain of TCR clone 227607 (TRBV7-3, TRBJ2-2)
CASSLKRGTLSGELFF

SEQ ID NO: 455215 - protein, 12 aa, Homo sapiens
  CDR3 for alpha chain variable domain of TCR clone 227608 (TRAV23/DV6, TRAJ30)
CAASKGDDKSIF

SEQ ID NO: 455216 - protein, 13 aa, Homo sapiens
  CDR3 for beta chain variable domain of TCR clone 227608 (TRBV19, TRBJ1-2)
CASSVPGQDGYTF

SEQ ID NO: 455217 - protein, 14 aa, Homo sapiens
  CDR3 for alpha chain variable domain of TCR clone 227609 (TRAV1-2, TRAJ17)
CALRRGAAGNKLTF

SEQ ID NO: 455218 - protein, 16 aa, Homo sapiens
  CDR3 for beta chain variable domain of TCR clone 227609 (TRBV19, TRBJ2-1)
CASSKAGPSSYNEQFF

SEQ ID NO: 455219 - protein, 14 aa, Homo sapiens
  CDR3 for alpha chain variable domain of TCR clone 227610 (TRAV1-2, TRAJ16)
CAVNRFSDGQKLPF

SEQ ID NO: 455220 - protein, 12 aa, Homo sapiens
  CDR3 for beta chain variable domain of TCR clone 227610 (TRBV5-1, TRBJ1-2)
CASSQDTYGYTF

SEQ ID NO: 455221 - protein, 11 aa, Homo sapiens
  CDR3 for alpha chain variable domain of TCR clone 227611 (TRAV12-3, TRAJ27)
CAMANAGKSTF

SEQ ID NO: 455222 - protein, 15 aa, Homo sapiens
  CDR3 for beta chain variable domain of TCR clone 227611 (TRBV11-2, TRBJ1-3)
CASSLDGTVGNTIYF

SEQ ID NO: 455223 - protein, 14 aa, Homo sapiens
  CDR3 for alpha chain variable domain of TCR clone 227612 (TRAV12-2, TRAJ40)
CAVKIPSGTYKYIF

SEQ ID NO: 455224 - protein, 15 aa, Homo sapiens
  CDR3 for beta chain variable domain of TCR clone 227612 (TRBV5-8, TRBJ2-2)
CASSLDRGATGELFF

SEQ ID NO: 455225 - protein, 14 aa, Homo sapiens
  CDR3 for alpha chain variable domain of TCR clone 227613 (TRAV38-1, TRAJ45)
CASHSGGGADGLTF

SEQ ID NO: 455226 - protein, 10 aa, Homo sapiens
  CDR3 for beta chain variable domain of TCR clone 227613 (TRBV10-3, TRBJ1-2)
CASVNGTAMA

SEQ ID NO: 455227 - protein, 16 aa, Homo sapiens
  CDR3 for alpha chain variable domain of TCR clone 227614 (TRAV3, TRAJ40)
CALRDRIASGTYKYIF

SEQ ID NO: 455228 - protein, 14 aa, Homo sapiens
  CDR3 for beta chain variable domain of TCR clone 227614 (TRBV7-3, TRBJ2-1)
CASSLAGGTNEQFF

SEQ ID NO: 455229 - protein, 14 aa, Homo sapiens
  CDR3 for alpha chain variable domain of TCR clone 227615 (TRAV13-1, TRAJ3)
CAAEGYSSASKIIF

SEQ ID NO: 455230 - protein, 14 aa, Homo sapiens
  CDR3 for beta chain variable domain of TCR clone 227615 (TRBV19, TRBJ2-5)
CASSSSGIHETQYF

SEQ ID NO: 455231 - protein, 14 aa, Homo sapiens
  CDR3 for alpha chain variable domain of TCR clone 227616 (TRAV25, TRAJ23)
CAGQGDNQGEKLIF

SEQ ID NO: 455232 - protein, 12 aa, Homo sapiens
  CDR3 for beta chain variable domain of TCR clone 227616 (TRBV7-9, TRBJ1-1)
CASSLVRGEAFF

SEQ ID NO: 455233 - protein, 13 aa, Homo sapiens
  CDR3 for alpha chain variable domain of TCR clone 227617 (TRAV3, TRAJ21)
CAVREPDFNKFYF

SEQ ID NO: 455234 - protein, 12 aa, Homo sapiens
  CDR3 for beta chain variable domain of TCR clone 227617 (TRBV5-1, TRBJ2-4)
LAGEWTKNIQFF

SEQ ID NO: 455235 - protein, 23 aa, Homo sapiens
  CDR3 for alpha chain variable domain of TCR clone 227618 (TRAV26-1, TRAJ38)
CIDDNAGNNHIQNPDPAVYQLRD

SEQ ID NO: 455236 - protein, 13 aa, Homo sapiens
  CDR3 for beta chain variable domain of TCR clone 227618 (TRBV20-1, TRBJ1-1)
CSARGGGNTEAFF

SEQ ID NO: 455237 - protein, 13 aa, Homo sapiens
  CDR3 for alpha chain variable domain of TCR clone 227619 (TRAV13-2, TRAJ23)
CAERQGRKAYLRT

SEQ ID NO: 455238 - protein, 14 aa, Homo sapiens
  CDR3 for beta chain variable domain of TCR clone 227619 (TRBV6-1, TRBJ1-3)
CASVQGGGGNTIYF

SEQ ID NO: 455239 - protein, 11 aa, Homo sapiens
  CDR3 for alpha chain variable domain of TCR clone 227620 (TRAV2, TRAJ33)
CAVESNYQLIW

SEQ ID NO: 455240 - protein, 14 aa, Homo sapiens
  CDR3 for beta chain variable domain of TCR clone 227620 (TRBV19, TRBJ2-7)
CASSIFAGTYEQYF

SEQ ID NO: 455241 - protein, 16 aa, Homo sapiens
  CDR3 for alpha chain variable domain of TCR clone 227621 (TRAV12-3, TRAJ53)
CAMSAGSGGSNYKLTF

SEQ ID NO: 455242 - protein, 13 aa, Homo sapiens
  CDR3 for beta chain variable domain of TCR clone 227621 (TRBV29-1, TRBJ2-3)
CSVGPRGTDTQNF

SEQ ID NO: 455243 - protein, 17 aa, Homo sapiens
  CDR3 for alpha chain variable domain of TCR clone 227622 (TRAV13-1, TRAJ52)
CAASSGAGGTSYGKLTF

SEQ ID NO: 455244 - protein, 14 aa, Homo sapiens
  CDR3 for beta chain variable domain of TCR clone 227622 (TRBV7-2, TRBJ2-7)
CASRSQGAAYEQYF

SEQ ID NO: 455245 - protein, 11 aa, Homo sapiens
  CDR3 for alpha chain variable domain of TCR clone 227623 (TRAV12-1, TRAJ34)
SVVNKGRELIF

SEQ ID NO: 455246 - protein, 12 aa, Homo sapiens
  CDR3 for beta chain variable domain of TCR clone 227623 (TRBV2, TRBJ2-1)
CAYGPPGNEQFF

SEQ ID NO: 455247 - protein, 14 aa, Homo sapiens
  CDR3 for alpha chain variable domain of TCR clone 227624 (TRAV17, TRAJ16)
CATADFSDGQMLLF

SEQ ID NO: 455248 - protein, 15 aa, Homo sapiens
  CDR3 for beta chain variable domain of TCR clone 227624 (TRBV18, TRBJ2-1)
CASSPPSASYNEQFF

SEQ ID NO: 455249 - protein, 12 aa, Homo sapiens
  CDR3 for alpha chain variable domain of TCR clone 227625 (TRAV13-1, TRAJ21)
CAAKEGFNKFYF

SEQ ID NO: 455250 - protein, 15 aa, Homo sapiens
  CDR3 for beta chain variable domain of TCR clone 227625 (TRBV11-2, TRBJ2-2)
CASSSDRVNAGELFF

SEQ ID NO: 455251 - protein, 16 aa, Homo sapiens
  CDR3 for alpha chain variable domain of TCR clone 227626 (TRAV3, TRAJ21)
CAVRDIERGNFNKFYF

SEQ ID NO: 455252 - protein, 16 aa, Homo sapiens
  CDR3 for beta chain variable domain of TCR clone 227626 (TRBV12-4, TRBJ1-5)
CASSQPVGGSNQPQHF

SEQ ID NO: 455253 - protein, 14 aa, Homo sapiens
  CDR3 for alpha chain variable domain of TCR clone 227627 (TRAV23/DV6, TRAJ15)
CAASKYQAGTALIF

SEQ ID NO: 455254 - protein, 12 aa, Homo sapiens
  CDR3 for beta chain variable domain of TCR clone 227627 (TRBV19, TRBJ1-1)
CASSIGTEEAFF

SEQ ID NO: 455255 - protein, 14 aa, Homo sapiens
  CDR3 for alpha chain variable domain of TCR clone 227628 (TRAV1-2, TRAJ8)
CAVREDTGFQTLVF

SEQ ID NO: 455256 - protein, 15 aa, Homo sapiens
  CDR3 for beta chain variable domain of TCR clone 227628 (TRBV4-1, TRBJ2-7)
CASSQNTGRLYEQYF

SEQ ID NO: 455257 - protein, 12 aa, Homo sapiens
  CDR3 for alpha chain variable domain of TCR clone 227629 (TRAV12-2, TRAJ4)
GWPEGGCNKLIF

SEQ ID NO: 455258 - protein, 16 aa, Homo sapiens
  CDR3 for beta chain variable domain of TCR clone 227629 (TRBV6-1, TRBJ2-5)
CASSETLDRGAETQYF

SEQ ID NO: 455259 - protein, 12 aa, Homo sapiens
  CDR3 for alpha chain variable domain of TCR clone 227630 (TRAV20, TRAJ56)
CAVTGANTKLTF

SEQ ID NO: 455260 - protein, 14 aa, Homo sapiens
  CDR3 for beta chain variable domain of TCR clone 227630 (TRBV20-1, TRBJ2-5)
CSALVPGYQETQYF

SEQ ID NO: 455261 - protein, 14 aa, Homo sapiens
  CDR3 for alpha chain variable domain of TCR clone 227631 (TRAV3, TRAJ21)
CAVRDKYNFNKFYF

SEQ ID NO: 455262 - protein, 16 aa, Homo sapiens
  CDR3 for beta chain variable domain of TCR clone 227631 (TRBV20-1, TRBJ2-6)
CSASSQGYDGANVLTF

SEQ ID NO: 455263 - protein, 15 aa, Homo sapiens
  CDR3 for alpha chain variable domain of TCR clone 227632 (TRAV2, TRAJ9)
CAVEDRGTGGFKNIF

SEQ ID NO: 455264 - protein, 19 aa, Homo sapiens
  CDR3 for beta chain variable domain of TCR clone 227632 (TRBV28, TRBJ2-7)
CASSYSGTSRLGWVYEQYF

SEQ ID NO: 455265 - protein, 14 aa, Homo sapiens
  CDR3 for alpha chain variable domain of TCR clone 227633 (TRAV8-4, TRAJ8)
CAVSLNTGFHKLVF

SEQ ID NO: 455266 - protein, 13 aa, Homo sapiens
  CDR3 for beta chain variable domain of TCR clone 227633 (TRBV7-9, TRBJ2-3)
CASSPGSTDTQYF

SEQ ID NO: 455267 - protein, 16 aa, Homo sapiens
  CDR3 for alpha chain variable domain of TCR clone 227634 (TRAV12-2, TRAJ18)
CAVTTDRGSTLGRLSF

SEQ ID NO: 455268 - protein, 13 aa, Homo sapiens
  CDR3 for beta chain variable domain of TCR clone 227634 (TRBV7-3, TRBJ1-1)
CASSQDWGAEAFF

SEQ ID NO: 455269 - protein, 14 aa, Homo sapiens
  CDR3 for alpha chain variable domain of TCR clone 227635 (TRAV26-1, TRAJ54)
CIVRVGGGAQKLVF

SEQ ID NO: 455270 - protein, 13 aa, Homo sapiens
  CDR3 for beta chain variable domain of TCR clone 227635 (TRBV12-4, TRBJ1-2)
CASSSGSKDGYTF

SEQ ID NO: 455271 - protein, 13 aa, Homo sapiens
  CDR3 for alpha chain variable domain of TCR clone 227636 (TRAV2, TRAJ40)
CAVVTSGTYKYLF

SEQ ID NO: 455272 - protein, 15 aa, Homo sapiens
  CDR3 for beta chain variable domain of TCR clone 227636 (TRBV28, TRBJ2-1)
CASSGLAEVDNEQFF

SEQ ID NO: 455273 - protein, 16 aa, Homo sapiens
  CDR3 for alpha chain variable domain of TCR clone 227637 (TRAV3, TRAJ37)
CAVRPHGSGNNGKLIF

SEQ ID NO: 455274 - protein, 16 aa, Homo sapiens
  CDR3 for beta chain variable domain of TCR clone 227637 (TRBV9, TRBJ1-2)
CASSVEEKVSPYGHTF

SEQ ID NO: 455275 - protein, 14 aa, Homo sapiens
  CDR3 for alpha chain variable domain of TCR clone 227638 (TRAV8-4, TRAJ49)
CAVKRGLPVTSSIL

SEQ ID NO: 455276 - protein, 12 aa, Homo sapiens
  CDR3 for beta chain variable domain of TCR clone 227638 (TRBV11-2, TRBJ2-2)
CASSLGGGELFF

SEQ ID NO: 455277 - protein, 11 aa, Homo sapiens
  CDR3 for alpha chain variable domain of TCR clone 227639 (TRAV26-2, TRAJ37)
SAASNTGKLIF

SEQ ID NO: 455278 - protein, 16 aa, Homo sapiens
  CDR3 for beta chain variable domain of TCR clone 227639 (TRBV7-2, TRBJ2-5)
CASSPGGARRGETQYF

SEQ ID NO: 455279 - protein, 11 aa, Homo sapiens
  CDR3 for alpha chain variable domain of TCR clone 227640 (TRAV12-3, TRAJ17)
CAMTLRQQANF

SEQ ID NO: 455280 - protein, 15 aa, Homo sapiens
  CDR3 for beta chain variable domain of TCR clone 227640 (TRBV19, TRBJ2-1)
CASSILGEGRNEQFF

SEQ ID NO: 455281 - protein, 14 aa, Homo sapiens
  CDR3 for alpha chain variable domain of TCR clone 227641 (TRAV8-3, TRAJ4)
CAVGAAGGYNKLIF

SEQ ID NO: 455282 - protein, 16 aa, Homo sapiens
  CDR3 for beta chain variable domain of TCR clone 227641 (TRBV18, TRBJ1-3)
CASSLGILNGENTIYF

SEQ ID NO: 455283 - protein, 12 aa, Homo sapiens
  CDR3 for alpha chain variable domain of TCR clone 227642 (TRAV2, TRAJ16)
CAVVRDGQKLLF

SEQ ID NO: 455284 - protein, 16 aa, Homo sapiens
  CDR3 for beta chain variable domain of TCR clone 227642 (TRBV19, TRBJ2-1)
CASSKAGPSSYNEQFF

SEQ ID NO: 455285 - protein, 17 aa, Homo sapiens
  CDR3 for alpha chain variable domain of TCR clone 227643 (TRAV3, TRAJ6)
CAVRDGPRAGGSYIPTF

SEQ ID NO: 455286 - protein, 20 aa, Homo sapiens
  CDR3 for beta chain variable domain of TCR clone 227643 (TRBV28, TRBJ2-1)
CASTPIGRTPGLAGGNEQFF

SEQ ID NO: 455287 - protein, 13 aa, Homo sapiens
  CDR3 for alpha chain variable domain of TCR clone 227644 (TRAV2, TRAJ40)
CAVVTLGTYKYIF

SEQ ID NO: 455288 - protein, 16 aa, Homo sapiens
  CDR3 for beta chain variable domain of TCR clone 227644 (TRBV2, TRBJ2-1)
CASSVGGALSYNEQFF

SEQ ID NO: 455289 - protein, 15 aa, Homo sapiens
  CDR3 for alpha chain variable domain of TCR clone 227645 (TRAV12-1, TRAJ45)
CVVLSGGGGADGLTF

SEQ ID NO: 455290 - protein, 15 aa, Homo sapiens
  CDR3 for beta chain variable domain of TCR clone 227645 (TRBV9, TRBJ2-1)
CVSSLAGSSYNEQFF

SEQ ID NO: 455291 - protein, 10 aa, Homo sapiens
  CDR3 for alpha chain variable domain of TCR clone 227646 (TRAV12-3, TRAJ49)
CAMNDDQFYF

SEQ ID NO: 455292 - protein, 13 aa, Homo sapiens
  CDR3 for beta chain variable domain of TCR clone 227646 (TRBV7-9, TRBJ2-5)
CASLPSGRETQYF

SEQ ID NO: 455293 - protein, 16 aa, Homo sapiens
  CDR3 for alpha chain variable domain of TCR clone 227647 (TRAV23/DV6, TRAJ9)
CAASIGGNTGGFKTIF

SEQ ID NO: 455294 - protein, 15 aa, Homo sapiens
  CDR3 for beta chain variable domain of TCR clone 227647 (TRBV19, TRBJ2-1)
CASSTTSGRMNEQFF

SEQ ID NO: 455295 - protein, 14 aa, Homo sapiens
  CDR3 for alpha chain variable domain of TCR clone 227648 (TRAV12-2, TRAJ13)
CAVKKTGGYQKVTF

SEQ ID NO: 455296 - protein, 16 aa, Homo sapiens
  CDR3 for beta chain variable domain of TCR clone 227648 (TRBV12-5, TRBJ2-5)
CASGPLTSGNQGTQYF

SEQ ID NO: 455297 - protein, 12 aa, Homo sapiens
  CDR3 for alpha chain variable domain of TCR clone 227649 (TRAV21, TRAJ49)
CAVNDGGNQFFF

SEQ ID NO: 455298 - protein, 14 aa, Homo sapiens
  CDR3 for beta chain variable domain of TCR clone 227649 (TRBV18, TRBJ2-7)
CASSPRGGSYEQYF

SEQ ID NO: 455299 - protein, 11 aa, Homo sapiens
  CDR3 for alpha chain variable domain of TCR clone 227650 (TRAV16, TRAJ20)
CALSEGFKAAL

SEQ ID NO: 455300 - protein, 13 aa, Homo sapiens
  CDR3 for beta chain variable domain of TCR clone 227650 (TRBV7-9, TRBJ2-3)
CASSPGSSDTQYF

SEQ ID NO: 455301 - protein, 17 aa, Homo sapiens
  CDR3 for alpha chain variable domain of TCR clone 227651 (TRAV3, TRAJ6)
CAVRDGPRAGGSYIPTF

SEQ ID NO: 455302 - protein, 14 aa, Homo sapiens
  CDR3 for beta chain variable domain of TCR clone 227651 (TRBV7-2, TRBJ2-1)
CASSARLVTAEQFF

SEQ ID NO: 455303 - protein, 14 aa, Homo sapiens
  CDR3 for alpha chain variable domain of TCR clone 227652 (TRAV26-1, TRAJ44)
CIVRPTGTASKLTF

SEQ ID NO: 455304 - protein, 14 aa, Homo sapiens
  CDR3 for beta chain variable domain of TCR clone 227652 (TRBV7-8, TRBJ2-3)
CASSLEAGTDTQYF

SEQ ID NO: 455305 - protein, 15 aa, Homo sapiens
  CDR3 for alpha chain variable domain of TCR clone 227653 (TRAV13-1, TRAJ36)
CAASISQTGANNLFF

SEQ ID NO: 455306 - protein, 17 aa, Homo sapiens
  CDR3 for beta chain variable domain of TCR clone 227653 (TRBV20-1, TRBJ2-2)
CSARDRTSGRHTGELFF

SEQ ID NO: 455307 - protein, 15 aa, Homo sapiens
  CDR3 for alpha chain variable domain of TCR clone 227654 (TRAV14/DV4, TRAJ49)
CAMREGRDTGNQFYF

SEQ ID NO: 455308 - protein, 14 aa, Homo sapiens
  CDR3 for beta chain variable domain of TCR clone 227654 (TRBV7-6, TRBJ2-7)
CASSFRQGADEQYF

SEQ ID NO: 455309 - protein, 14 aa, Homo sapiens
  CDR3 for alpha chain variable domain of TCR clone 227655 (TRAV12-2, TRAJ40)
CAVKIPSGTYKYIF

SEQ ID NO: 455310 - protein, 12 aa, Homo sapiens
  CDR3 for beta chain variable domain of TCR clone 227655 (TRBV14, TRBJ2-5)
CASSHLKETQYF

SEQ ID NO: 455311 - protein, 14 aa, Homo sapiens
  CDR3 for alpha chain variable domain of TCR clone 227656 (TRAV12-2, TRAJ9)
CAVNALEGGFKTIF

SEQ ID NO: 455312 - protein, 16 aa, Homo sapiens
  CDR3 for beta chain variable domain of TCR clone 227656 (TRBV19, TRBJ1-6)
CASSMAPVAGNSPLHF

SEQ ID NO: 455313 - protein, 13 aa, Homo sapiens
  CDR3 for alpha chain variable domain of TCR clone 227657 (TRAV1-1, TRAJ9)
FDAKNTGCFKTIF

SEQ ID NO: 455314 - protein, 14 aa, Homo sapiens
  CDR3 for beta chain variable domain of TCR clone 227657 (TRBV20-1, TRBJ2-1)
CSAQIGGSANEQFF

SEQ ID NO: 455315 - protein, 16 aa, Homo sapiens
  CDR3 for alpha chain variable domain of TCR clone 227658 (TRAV30, TRAJ24)
CGTEIVDADSWGKFQL

SEQ ID NO: 455316 - protein, 13 aa, Homo sapiens
  CDR3 for beta chain variable domain of TCR clone 227658 (TRBV4-1, TRBJ2-2)
CASSQENTGELFF

SEQ ID NO: 455317 - protein, 12 aa, Homo sapiens
  CDR3 for alpha chain variable domain of TCR clone 227659 (TRAV21, TRAJ37)
CAVRGNTGELIF

SEQ ID NO: 455318 - protein, 14 aa, Homo sapiens
  CDR3 for beta chain variable domain of TCR clone 227659 (TRBV19, TRBJ2-1)
CASEVTGARNEQFF

SEQ ID NO: 455319 - protein, 16 aa, Homo sapiens
  CDR3 for alpha chain variable domain of TCR clone 227660 (TRAV38-1, TRAJ37)
CAFKGEGSSNTGKLIF

SEQ ID NO: 455320 - protein, 13 aa, Homo sapiens
  CDR3 for beta chain variable domain of TCR clone 227660 (TRBV12-4, TRBJ2-5)
CASSLFRRETQYF

SEQ ID NO: 455321 - protein, 15 aa, Homo sapiens
  CDR3 for alpha chain variable domain of TCR clone 227661 (TRAV12-3, TRAJ49)
CAMAVTPTTGNQFYF

SEQ ID NO: 455322 - protein, 13 aa, Homo sapiens
  CDR3 for beta chain variable domain of TCR clone 227661 (TRBV7-3, TRBJ1-1)
CASSQDWGAEAFF

SEQ ID NO: 455323 - protein, 11 aa, Homo sapiens
  CDR3 for alpha chain variable domain of TCR clone 227662 (TRAV35, TRAJ33)
NFSDSNYQLIW

SEQ ID NO: 455324 - protein, 11 aa, Homo sapiens
  CDR3 for beta chain variable domain of TCR clone 227662 (TRBV29-1, TRBJ2-5)
CSEDRTGTQYF

SEQ ID NO: 455325 - protein, 13 aa, Homo sapiens
  CDR3 for alpha chain variable domain of TCR clone 227663 (TRAV2, TRAJ29)
CAAQNSGNTPLVF

SEQ ID NO: 455326 - protein, 14 aa, Homo sapiens
  CDR3 for beta chain variable domain of TCR clone 227663 (TRBV7-2, TRBJ2-1)
CASSLEGGYNEQFF

SEQ ID NO: 455327 - protein, 15 aa, Homo sapiens
  CDR3 for alpha chain variable domain of TCR clone 227664 (TRAV3, TRAJ22)
CAVRDRGGSARPLTF

SEQ ID NO: 455328 - protein, 13 aa, Homo sapiens
  CDR3 for beta chain variable domain of TCR clone 227664 (TRBV2, TRBJ1-5)
CATAGPGNQPQHF

SEQ ID NO: 455329 - protein, 16 aa, Homo sapiens
  CDR3 for alpha chain variable domain of TCR clone 227665 (TRAV36/DV7, TRAJ33)
WRPGNKVPDSNYQLIW

SEQ ID NO: 455330 - protein, 15 aa, Homo sapiens
  CDR3 for beta chain variable domain of TCR clone 227665 (TRBV29-1, TRBJ2-1)
CSVGRHALFYNEQFF

SEQ ID NO: 455331 - protein, 23 aa, Homo sapiens
  CDR3 for alpha chain variable domain of TCR clone 227666 (TRAV26-1, TRAJ38)
CIADNAGNNHIQNPDPAVYQLRD

SEQ ID NO: 455332 - protein, 13 aa, Homo sapiens
  CDR3 for beta chain variable domain of TCR clone 227666 (TRBV12-4, TRBJ1-1)
CASSPWTGFEAFF

SEQ ID NO: 455333 - protein, 14 aa, Homo sapiens
  CDR3 for alpha chain variable domain of TCR clone 227667 (TRAV12-1, TRAJ9)
CVVTLNTGGFKTIF

SEQ ID NO: 455334 - protein, 11 aa, Homo sapiens
  CDR3 for beta chain variable domain of TCR clone 227667 (TRBV29-1, TRBJ2-5)
SAEDRTGTQYF

SEQ ID NO: 455335 - protein, 17 aa, Homo sapiens
  CDR3 for alpha chain variable domain of TCR clone 227668 (TRAV3, TRAJ6)
CAVRDGPRAVRSYIPTF

SEQ ID NO: 455336 - protein, 14 aa, Homo sapiens
  CDR3 for beta chain variable domain of TCR clone 227668 (TRBV7-2, TRBJ2-7)
CASSPKTSFYEQYF

SEQ ID NO: 455337 - protein, 15 aa, Homo sapiens
  CDR3 for alpha chain variable domain of TCR clone 227669 (TRAV22, TRAJ24)
CAVPLSTDSWGKLQF

SEQ ID NO: 455338 - protein, 18 aa, Homo sapiens
  CDR3 for beta chain variable domain of TCR clone 227669 (TRBV25-1, TRBJ1-2)
CASSGLQNGQGLIFGYTF

SEQ ID NO: 455339 - protein, 13 aa, Homo sapiens
  CDR3 for alpha chain variable domain of TCR clone 227670 (TRAV12-1, TRAJ31)
CVVNMNNNARLMF

SEQ ID NO: 455340 - protein, 13 aa, Homo sapiens
  CDR3 for beta chain variable domain of TCR clone 227670 (TRBV7-7, TRBJ2-2)
CASSLTSAGELFF

SEQ ID NO: 455341 - protein, 18 aa, Homo sapiens
  CDR3 for alpha chain variable domain of TCR clone 227671 (TRAV13-1, TRAJ52)
CAAKNPNAGGTSYGKLTF

SEQ ID NO: 455342 - protein, 16 aa, Homo sapiens
  CDR3 for beta chain variable domain of TCR clone 227671 (TRBV7-6, TRBJ2-1)
CASSAPGPSSYNEQFF

SEQ ID NO: 455343 - protein, 13 aa, Homo sapiens
  CDR3 for alpha chain variable domain of TCR clone 227672 (TRAV2, TRAJ40)
CAVVTSGTYKYIF

SEQ ID NO: 455344 - protein, 15 aa, Homo sapiens
  CDR3 for beta chain variable domain of TCR clone 227672 (TRBV27, TRBJ2-1)
CTSSNGGGSSNEQFF

SEQ ID NO: 455345 - protein, 15 aa, Homo sapiens
  CDR3 for alpha chain variable domain of TCR clone 227673 (TRAV3, TRAJ32)
CAVRSYGGATNKLIL

SEQ ID NO: 455346 - protein, 13 aa, Homo sapiens
  CDR3 for beta chain variable domain of TCR clone 227673 (TRBV20-1, TRBJ2-7)
CSARPSTNYEQYF

SEQ ID NO: 455347 - protein, 17 aa, Homo sapiens
  CDR3 for alpha chain variable domain of TCR clone 227674 (TRAV3, TRAJ6)
CAVRDGPRAGGSYIPKF

SEQ ID NO: 455348 - protein, 15 aa, Homo sapiens
  CDR3 for beta chain variable domain of TCR clone 227674 (TRBV20-1, TRBJ1-1)
CSASWDRFLNTEAFF

SEQ ID NO: 455349 - protein, 23 aa, Homo sapiens
  CDR3 for alpha chain variable domain of TCR clone 227675 (TRAV12-1, )
CVVNDAGYNHIQNPDPAVYQLRD

SEQ ID NO: 455350 - protein, 14 aa, Homo sapiens
  CDR3 for beta chain variable domain of TCR clone 227675 (TRBV11-2, TRBJ2-3)
CASSRLARTDTQYF

SEQ ID NO: 455351 - protein, 14 aa, Homo sapiens
  CDR3 for alpha chain variable domain of TCR clone 227676 (TRAV1-2, TRAJ8)
CAVREDTGFQKLVF

SEQ ID NO: 455352 - protein, 13 aa, Homo sapiens
  CDR3 for beta chain variable domain of TCR clone 227676 (TRBV27, TRBJ1-1)
CASSLSIGAEAFV

SEQ ID NO: 455353 - protein, 16 aa, Homo sapiens
  CDR3 for alpha chain variable domain of TCR clone 227677 (TRAV3, TRAJ21)
CAVRDIEIGNFNKFYF

SEQ ID NO: 455354 - protein, 13 aa, Homo sapiens
  CDR3 for beta chain variable domain of TCR clone 227677 (TRBV4-2, TRBJ1-1)
CASSQAGNTEAFF

SEQ ID NO: 455355 - protein, 10 aa, Homo sapiens
  CDR3 for alpha chain variable domain of TCR clone 227678 (TRAV2, TRAJ34)
CAVVNDKLIF

SEQ ID NO: 455356 - protein, 12 aa, Homo sapiens
  CDR3 for beta chain variable domain of TCR clone 227678 (TRBV7-8, TRBJ2-5)
CASSLGDREQYF

SEQ ID NO: 455357 - protein, 10 aa, Homo sapiens
  CDR3 for alpha chain variable domain of TCR clone 227679 (TRAV1-2, TRAJ20)
CALNDYKLSF

SEQ ID NO: 455358 - protein, 16 aa, Homo sapiens
  CDR3 for beta chain variable domain of TCR clone 227679 (TRBV4-1, TRBJ2-3)
CASSQSTSGAEDTQYF

SEQ ID NO: 455359 - protein, 13 aa, Homo sapiens
  CDR3 for alpha chain variable domain of TCR clone 227680 (TRAV26-1, TRAJ36)
CIVVGTGANNLFF

SEQ ID NO: 455360 - protein, 15 aa, Homo sapiens
  CDR3 for beta chain variable domain of TCR clone 227680 (TRBV10-3, TRBJ2-1)
CHQWSGDGGGGEQFF

SEQ ID NO: 455361 - protein, 18 aa, Homo sapiens
  CDR3 for alpha chain variable domain of TCR clone 227681 (TRAV17, TRAJ45)
CATSLDLYSGGGADGLTF

SEQ ID NO: 455362 - protein, 17 aa, Homo sapiens
  CDR3 for beta chain variable domain of TCR clone 227681 (TRBV11-2, TRBJ2-1)
CASSLYPPGVEYNEQFF

SEQ ID NO: 455363 - protein, 13 aa, Homo sapiens
  CDR3 for alpha chain variable domain of TCR clone 227682 (TRAV38-2/DV8, TRAJ34)
CAYRNYNNDKLIF

SEQ ID NO: 455364 - protein, 15 aa, Homo sapiens
  CDR3 for beta chain variable domain of TCR clone 227682 (TRBV20-1, TRBJ2-5)
CSAEGTGGLQETQYF

SEQ ID NO: 455365 - protein, 14 aa, Homo sapiens
  CDR3 for alpha chain variable domain of TCR clone 227683 (TRAV12-2, TRAJ6)
CASKWGGGSYIPTF

SEQ ID NO: 455366 - protein, 13 aa, Homo sapiens
  CDR3 for beta chain variable domain of TCR clone 227683 (TRBV20-1, TRBJ1-1)
CSAGTVGNTEAFF

SEQ ID NO: 455367 - protein, 15 aa, Homo sapiens
  CDR3 for alpha chain variable domain of TCR clone 227684 (TRAV8-2, TRAJ40)
CVVLGTTSGTYKYIF

SEQ ID NO: 455368 - protein, 16 aa, Homo sapiens
  CDR3 for beta chain variable domain of TCR clone 227684 (TRBV7-3, TRBJ2-1)
CASNLEGYRSYNEQFF

SEQ ID NO: 455369 - protein, 13 aa, Homo sapiens
  CDR3 for alpha chain variable domain of TCR clone 227685 (TRAV12-1, TRAJ31)
CVVNMNNNTRLMF

SEQ ID NO: 455370 - protein, 15 aa, Homo sapiens
  CDR3 for beta chain variable domain of TCR clone 227685 (TRBV4-1, TRBJ1-2)
CASSQGQGAAYGYTF

SEQ ID NO: 455371 - protein, 14 aa, Homo sapiens
  CDR3 for alpha chain variable domain of TCR clone 227686 (TRAV27, TRAJ42)
CAGASGGSQGNLIF

SEQ ID NO: 455372 - protein, 19 aa, Homo sapiens
  CDR3 for beta chain variable domain of TCR clone 227686 (TRBV19, TRBJ2-2)
CASTRPGLAGGRVTGELFF

SEQ ID NO: 455373 - protein, 13 aa, Homo sapiens
  CDR3 for alpha chain variable domain of TCR clone 227687 (TRAV12-2, TRAJ39)
CAVNNNAGNMLTF

SEQ ID NO: 455374 - protein, 17 aa, Homo sapiens
  CDR3 for beta chain variable domain of TCR clone 227687 (TRBV25-1, TRBJ2-1)
CASSAYGQGRGVYEQFF

SEQ ID NO: 455375 - protein, 17 aa, Homo sapiens
  CDR3 for alpha chain variable domain of TCR clone 227688 (TRAV2, TRAJ36)
CALEDRGNWGKQPLLWD

SEQ ID NO: 455376 - protein, 14 aa, Homo sapiens
  CDR3 for beta chain variable domain of TCR clone 227688 (TRBV7-9, TRBJ2-5)
CASSLDTAQETQYF

SEQ ID NO: 455377 - protein, 14 aa, Homo sapiens
  CDR3 for alpha chain variable domain of TCR clone 227689 (TRAV13-1, TRAJ40)
CAASMTSGTYKYIF

SEQ ID NO: 455378 - protein, 14 aa, Homo sapiens
  CDR3 for beta chain variable domain of TCR clone 227689 (TRBV12-4, TRBJ2-3)
CASTIAGWGDAQYF

SEQ ID NO: 455379 - protein, 13 aa, Homo sapiens
  CDR3 for alpha chain variable domain of TCR clone 227690 (TRAV3, TRAJ21)
CAVREPDFKKFYF

SEQ ID NO: 455380 - protein, 12 aa, Homo sapiens
  CDR3 for beta chain variable domain of TCR clone 227690 (TRBV28, TRBJ2-6)
CAIQAGANVLTF

SEQ ID NO: 455381 - protein, 14 aa, Homo sapiens
  CDR3 for alpha chain variable domain of TCR clone 227691 (TRAV21, TRAJ45)
CAVSSGGGADGLTF

SEQ ID NO: 455382 - protein, 15 aa, Homo sapiens
  CDR3 for beta chain variable domain of TCR clone 227691 (TRBV10-2, TRBJ2-6)
CASSEQGTGANGLTF

SEQ ID NO: 455383 - protein, 14 aa, Homo sapiens
  CDR3 for alpha chain variable domain of TCR clone 227692 (TRAV2, TRAJ37)
CAVDFTSNTAKLIF

SEQ ID NO: 455384 - protein, 11 aa, Homo sapiens
  CDR3 for beta chain variable domain of TCR clone 227692 (TRBV29-1, TRBJ2-5)
CSEDRTGTQYF

SEQ ID NO: 455385 - protein, 13 aa, Homo sapiens
  CDR3 for alpha chain variable domain of TCR clone 227693 (TRAV3, TRAJ21)
CAVREPDFNKFYF

SEQ ID NO: 455386 - protein, 13 aa, Homo sapiens
  CDR3 for beta chain variable domain of TCR clone 227693 (TRBV9, TRBJ2-1)
CASSPSGGNEHFF

SEQ ID NO: 455387 - protein, 14 aa, Homo sapiens
  CDR3 for alpha chain variable domain of TCR clone 227694 (TRAV27, TRAJ45)
CAGAQEEVLTATPL

SEQ ID NO: 455388 - protein, 17 aa, Homo sapiens
  CDR3 for beta chain variable domain of TCR clone 227694 (TRBV11-2, TRBJ2-1)
CASSLYPPGVEYNEQFF

SEQ ID NO: 455389 - protein, 15 aa, Homo sapiens
  CDR3 for alpha chain variable domain of TCR clone 227695 (TRAV1-2, TRAJ30)
CAVRPHGHRDDKIIF

SEQ ID NO: 455390 - protein, 13 aa, Homo sapiens
  CDR3 for beta chain variable domain of TCR clone 227695 (TRBV4-1, TRBJ2-7)
CASSQGQADEQYF

SEQ ID NO: 455391 - protein, 14 aa, Homo sapiens
  CDR3 for alpha chain variable domain of TCR clone 227696 (TRAV26-1, TRAJ38)
CIADNAGNSRKRIW

SEQ ID NO: 455392 - protein, 13 aa, Homo sapiens
  CDR3 for beta chain variable domain of TCR clone 227696 (TRBV20-1, TRBJ1-1)
CSARGGGNTEAFF

SEQ ID NO: 455393 - protein, 12 aa, Homo sapiens
  CDR3 for alpha chain variable domain of TCR clone 227697 (TRAV2, TRAJ31)
CAVEDNNARLMF

SEQ ID NO: 455394 - protein, 15 aa, Homo sapiens
  CDR3 for beta chain variable domain of TCR clone 227697 (TRBV2, TRBJ2-1)
CASSELAGSYNEQFF

SEQ ID NO: 455395 - protein, 16 aa, Homo sapiens
  CDR3 for alpha chain variable domain of TCR clone 227698 (TRAV8-3, TRAJ44)
CAVGASNTGTAIKLTF

SEQ ID NO: 455396 - protein, 15 aa, Homo sapiens
  CDR3 for beta chain variable domain of TCR clone 227698 (TRBV27, TRBJ1-5)
CASTFNRGSNQPQHF

SEQ ID NO: 455397 - protein, 17 aa, Homo sapiens
  CDR3 for alpha chain variable domain of TCR clone 227699 (TRAV3, TRAJ37)
CAVRDMRTPANTGKLIF

SEQ ID NO: 455398 - protein, 13 aa, Homo sapiens
  CDR3 for beta chain variable domain of TCR clone 227699 (TRBV12-5, TRBJ2-3)
CASGDRQSDTQYF

SEQ ID NO: 455399 - protein, 14 aa, Homo sapiens
  CDR3 for alpha chain variable domain of TCR clone 227700 (TRAV12-3, TRAJ9)
CAMSPYTGGFKTIF

SEQ ID NO: 455400 - protein, 12 aa, Homo sapiens
  CDR3 for beta chain variable domain of TCR clone 227700 (TRBV19, TRBJ1-5)
CASSIAQQPQHF

SEQ ID NO: 455401 - protein, 17 aa, Homo sapiens
  CDR3 for alpha chain variable domain of TCR clone 227701 (TRAV3, TRAJ6)
CAVRDVPRAGGSYIPIF

SEQ ID NO: 455402 - protein, 14 aa, Homo sapiens
  CDR3 for beta chain variable domain of TCR clone 227701 (TRBV7-2, TRBJ2-7)
CASSPKTSFYEQYF

SEQ ID NO: 455403 - protein, 16 aa, Homo sapiens
  CDR3 for alpha chain variable domain of TCR clone 227702 (TRAV3, TRAJ37)
CAVRGKGSGNTGKLIF

SEQ ID NO: 455404 - protein, 15 aa, Homo sapiens
  CDR3 for beta chain variable domain of TCR clone 227702 (TRBV7-3, TRBJ2-2)
CASSETVQGTGELFF

SEQ ID NO: 455405 - protein, 17 aa, Homo sapiens
  CDR3 for alpha chain variable domain of TCR clone 227703 (TRAV3, TRAJ6)
CAVRDGPMSGGSYIPTF

SEQ ID NO: 455406 - protein, 14 aa, Homo sapiens
  CDR3 for beta chain variable domain of TCR clone 227703 (TRBV7-2, TRBJ2-7)
CASSPKTSFYEQYF

SEQ ID NO: 455407 - protein, 15 aa, Homo sapiens
  CDR3 for alpha chain variable domain of TCR clone 227704 (TRAV17, TRAJ57)
CATGPSQGGSEKLGF

SEQ ID NO: 455408 - protein, 13 aa, Homo sapiens
  CDR3 for beta chain variable domain of TCR clone 227704 (TRBV5-5, TRBJ1-2)
CASSFWRGEDYTF

SEQ ID NO: 455409 - protein, 11 aa, Homo sapiens
  CDR3 for alpha chain variable domain of TCR clone 227705 (TRAV12-3, TRAJ27)
CAMANAGKSSF

SEQ ID NO: 455410 - protein, 13 aa, Homo sapiens
  CDR3 for beta chain variable domain of TCR clone 227705 (TRBV20-1, TRBJ1-1)
CSARVGGNTEAFF

SEQ ID NO: 455411 - protein, 16 aa, Homo sapiens
  CDR3 for alpha chain variable domain of TCR clone 227706 (TRAV1-2, TRAJ10)
CAVRGVLTGGGNKLTF

SEQ ID NO: 455412 - protein, 16 aa, Homo sapiens
  CDR3 for beta chain variable domain of TCR clone 227706 (TRBV28, TRBJ2-1)
CASSSPEYPRDNEQFF

SEQ ID NO: 455413 - protein, 17 aa, Homo sapiens
  CDR3 for alpha chain variable domain of TCR clone 227707 (TRAV3, TRAJ6)
CAVRDGPRAGGSYIPTF

SEQ ID NO: 455414 - protein, 16 aa, Homo sapiens
  CDR3 for beta chain variable domain of TCR clone 227707 (TRBV19, TRBJ1-1)
CASRFGGPVTGTEAFF

SEQ ID NO: 455415 - protein, 17 aa, Homo sapiens
  CDR3 for alpha chain variable domain of TCR clone 227708 (TRAV14/DV4, TRAJ22)
CAMILGGSSGSARQLTF

SEQ ID NO: 455416 - protein, 14 aa, Homo sapiens
  CDR3 for beta chain variable domain of TCR clone 227708 (TRBV4-1, TRBJ2-2)
CASSQAVDTGELFF

SEQ ID NO: 455417 - protein, 20 aa, Homo sapiens
  CDR3 for alpha chain variable domain of TCR clone 227709 (TRAV12-1, TRAJ42)
SSVIQPPTSVKGGSQGNLIF

SEQ ID NO: 455418 - protein, 18 aa, Homo sapiens
  CDR3 for beta chain variable domain of TCR clone 227709 (TRBV11-2, TRBJ2-3)
CASSIGGASRGAPNTQYF

SEQ ID NO: 455419 - protein, 12 aa, Homo sapiens
  CDR3 for alpha chain variable domain of TCR clone 227710 (TRAV27, TRAJ42)
CAGGGSQVNLIF

SEQ ID NO: 455420 - protein, 13 aa, Homo sapiens
  CDR3 for beta chain variable domain of TCR clone 227710 (TRBV19, TRBJ2-7)
CASSIRSSYEQYF

SEQ ID NO: 455421 - protein, 18 aa, Homo sapiens
  CDR3 for alpha chain variable domain of TCR clone 227711 (TRAV36/DV7, )
CALTDIQNPAPAVYQLRD

SEQ ID NO: 455422 - protein, 13 aa, Homo sapiens
  CDR3 for beta chain variable domain of TCR clone 227711 (TRBV4-1, TRBJ2-7)
CASSQGQAYEQYF

SEQ ID NO: 455423 - protein, 13 aa, Homo sapiens
  CDR3 for alpha chain variable domain of TCR clone 227712 (TRAV2, TRAJ24)
CAVTTDSWGKLQF

SEQ ID NO: 455424 - protein, 14 aa, Homo sapiens
  CDR3 for beta chain variable domain of TCR clone 227712 (TRBV13, TRBJ2-5)
CASSLDRGQETQYF

SEQ ID NO: 455425 - protein, 17 aa, Homo sapiens
  CDR3 for alpha chain variable domain of TCR clone 227713 (TRAV12-2, TRAJ48)
CASNEKLTFGTGTKLTI

SEQ ID NO: 455426 - protein, 14 aa, Homo sapiens
  CDR3 for beta chain variable domain of TCR clone 227713 (TRBV5-1, TRBJ2-5)
CASSLAGKQETQYF

SEQ ID NO: 455427 - protein, 12 aa, Homo sapiens
  CDR3 for alpha chain variable domain of TCR clone 227714 (TRAV17, TRAJ53)
CATEGSNDKLTF

SEQ ID NO: 455428 - protein, 19 aa, Homo sapiens
  CDR3 for beta chain variable domain of TCR clone 227714 (TRBV5-1, TRBJ2-3)
CASSLWTSGGITTPDTQYF

SEQ ID NO: 455429 - protein, 13 aa, Homo sapiens
  CDR3 for alpha chain variable domain of TCR clone 227715 (TRAV13-2, TRAJ13)
CAERPWGYQKVTF

SEQ ID NO: 455430 - protein, 14 aa, Homo sapiens
  CDR3 for beta chain variable domain of TCR clone 227715 (TRBV23-1, TRBJ2-5)
CASSFLRSQETQYF

SEQ ID NO: 455431 - protein, 14 aa, Homo sapiens
  CDR3 for alpha chain variable domain of TCR clone 227716 (TRAV2, TRAJ9)
CAVEDRSGGFKTSF

SEQ ID NO: 455432 - protein, 15 aa, Homo sapiens
  CDR3 for beta chain variable domain of TCR clone 227716 (TRBV7-2, TRBJ2-1)
CASSSGLAGGNEQFF

SEQ ID NO: 455433 - protein, 13 aa, Homo sapiens
  CDR3 for alpha chain variable domain of TCR clone 227717 (TRAV3, TRAJ20)
CAVRDTPRYKLIF

SEQ ID NO: 455434 - protein, 14 aa, Homo sapiens
  CDR3 for beta chain variable domain of TCR clone 227717 (TRBV11-1, TRBJ2-7)
CASTFAVPSYEQYF

SEQ ID NO: 455435 - protein, 14 aa, Homo sapiens
  CDR3 for alpha chain variable domain of TCR clone 227718 (TRAV2, TRAJ37)
CAVDFTSNTGKLIF

SEQ ID NO: 455436 - protein, 18 aa, Homo sapiens
  CDR3 for beta chain variable domain of TCR clone 227718 (TRBV6-6, TRBJ1-3)
CASSYSKWDSISGNTIYF

SEQ ID NO: 455437 - protein, 11 aa, Homo sapiens
  CDR3 for alpha chain variable domain of TCR clone 227719 (TRAV17, TRAJ9)
CATTGGFKTIL

SEQ ID NO: 455438 - protein, 14 aa, Homo sapiens
  CDR3 for beta chain variable domain of TCR clone 227719 (TRBV19, TRBJ2-7)
CASSIFAGTYEQYF

SEQ ID NO: 455439 - protein, 14 aa, Homo sapiens
  CDR3 for alpha chain variable domain of TCR clone 227720 (TRAV12-3, TRAJ10)
SHLPLTGGGNKLTF

SEQ ID NO: 455440 - protein, 10 aa, Homo sapiens
  CDR3 for beta chain variable domain of TCR clone 227720 (TRBV2, TRBJ2-5)
CASSAATQYF

SEQ ID NO: 455441 - protein, 15 aa, Homo sapiens
  CDR3 for alpha chain variable domain of TCR clone 227721 (TRAV17, TRAJ17)
CATDASIIRRQQANF

SEQ ID NO: 455442 - protein, 15 aa, Homo sapiens
  CDR3 for beta chain variable domain of TCR clone 227721 (TRBV2, TRBJ2-1)
CASSELAGSYNEQFF

SEQ ID NO: 455443 - protein, 14 aa, Homo sapiens
  CDR3 for alpha chain variable domain of TCR clone 227722 (TRAV12-2, TRAJ17)
CAVNVKAAGNKLTF

SEQ ID NO: 455444 - protein, 12 aa, Homo sapiens
  CDR3 for beta chain variable domain of TCR clone 227722 (TRBV7-8, TRBJ2-7)
CASSLGDREQYF

SEQ ID NO: 455445 - protein, 10 aa, Homo sapiens
  CDR3 for alpha chain variable domain of TCR clone 227723 (TRAV38-2/DV8, TRAJ40)
CASGTYKYIF

SEQ ID NO: 455446 - protein, 11 aa, Homo sapiens
  CDR3 for beta chain variable domain of TCR clone 227723 (TRBV7-2, TRBJ2-3)
CASSSSDTQYF

SEQ ID NO: 455447 - protein, 13 aa, Homo sapiens
  CDR3 for alpha chain variable domain of TCR clone 227724 (TRAV13-1, TRAJ20)
CAARVSNDYKLSF

SEQ ID NO: 455448 - protein, 12 aa, Homo sapiens
  CDR3 for beta chain variable domain of TCR clone 227724 (TRBV20-1, TRBJ2-1)
CSARVGTDGQFF

SEQ ID NO: 455449 - protein, 14 aa, Homo sapiens
  CDR3 for alpha chain variable domain of TCR clone 227725 (TRAV13-1, TRAJ44)
CAAKATGTASKLTF

SEQ ID NO: 455450 - protein, 14 aa, Homo sapiens
  CDR3 for beta chain variable domain of TCR clone 227725 (TRBV25-1, TRBJ1-1)
CASTHLGGNTEAFV

SEQ ID NO: 455451 - protein, 12 aa, Homo sapiens
  CDR3 for alpha chain variable domain of TCR clone 227726 (TRAV13-2, TRAJ39)
CAENNAGNMLSF

SEQ ID NO: 455452 - protein, 13 aa, Homo sapiens
  CDR3 for beta chain variable domain of TCR clone 227726 (TRBV7-6, TRBJ1-1)
CASSLKLGTEAFF

SEQ ID NO: 455453 - protein, 10 aa, Homo sapiens
  CDR3 for alpha chain variable domain of TCR clone 227727 (TRAV1-2, TRAJ34)
CAVNTDKLIF

SEQ ID NO: 455454 - protein, 14 aa, Homo sapiens
  CDR3 for beta chain variable domain of TCR clone 227727 (TRBV5-7, TRBJ1-1)
CASSLVGSYSEAFF

SEQ ID NO: 455455 - protein, 14 aa, Homo sapiens
  CDR3 for alpha chain variable domain of TCR clone 227728 (TRAV13-1, TRAJ23)
SVQSTYNQGGKLIF

SEQ ID NO: 455456 - protein, 14 aa, Homo sapiens
  CDR3 for beta chain variable domain of TCR clone 227728 (TRBV7-6, TRBJ2-7)
CASSFRQGADEQYF

SEQ ID NO: 455457 - protein, 15 aa, Homo sapiens
  CDR3 for alpha chain variable domain of TCR clone 227729 (TRAV13-1, TRAJ17)
CAASIERAAGNKLTF

SEQ ID NO: 455458 - protein, 12 aa, Homo sapiens
  CDR3 for beta chain variable domain of TCR clone 227729 (TRBV5-7, TRBJ1-1)
CACSLGRGKAFF

SEQ ID NO: 455459 - protein, 13 aa, Homo sapiens
  CDR3 for alpha chain variable domain of TCR clone 227730 (TRAV21, TRAJ57)
CAVTQGGSEKLVF

SEQ ID NO: 455460 - protein, 11 aa, Homo sapiens
  CDR3 for beta chain variable domain of TCR clone 227730 (TRBV11-2, TRBJ2-2)
CASSVPGELFF

SEQ ID NO: 455461 - protein, 13 aa, Homo sapiens
  CDR3 for alpha chain variable domain of TCR clone 227731 (TRAV12-2, TRAJ39)
CAVNNNAGNMLTF

SEQ ID NO: 455462 - protein, 12 aa, Homo sapiens
  CDR3 for beta chain variable domain of TCR clone 227731 (TRBV7-8, TRBJ2-7)
CASSLGDREQYF

SEQ ID NO: 455463 - protein, 16 aa, Homo sapiens
  CDR3 for alpha chain variable domain of TCR clone 227732 (TRAV3, TRAJ37)
CAVRGKGSGNTGKLIF

SEQ ID NO: 455464 - protein, 16 aa, Homo sapiens
  CDR3 for beta chain variable domain of TCR clone 227732 (TRBV10-3, TRBJ2-1)
CAISGVGDVGGGEQFF

SEQ ID NO: 455465 - protein, 12 aa, Homo sapiens
  CDR3 for alpha chain variable domain of TCR clone 227733 (TRAV36/DV7, TRAJ40)
CAVGTGTYKYIF

SEQ ID NO: 455466 - protein, 14 aa, Homo sapiens
  CDR3 for beta chain variable domain of TCR clone 227733 (TRBV11-2, TRBJ2-5)
CASRPLAGRETQYF

SEQ ID NO: 455467 - protein, 12 aa, Homo sapiens
  CDR3 for alpha chain variable domain of TCR clone 227734 (TRAV2, TRAJ32)
CAVGGATNKLIF

SEQ ID NO: 455468 - protein, 16 aa, Homo sapiens
  CDR3 for beta chain variable domain of TCR clone 227734 (TRBV7-2, TRBJ2-3)
CASSLVALYSTDTQYF

SEQ ID NO: 455469 - protein, 10 aa, Homo sapiens
  CDR3 for alpha chain variable domain of TCR clone 227735 (TRAV26-1, TRAJ48)
SNFGNEQLTF

SEQ ID NO: 455470 - protein, 14 aa, Homo sapiens
  CDR3 for beta chain variable domain of TCR clone 227735 (TRBV13, TRBJ2-7)
CASSLKGASYEQYF

SEQ ID NO: 455471 - protein, 18 aa, Homo sapiens
  CDR3 for alpha chain variable domain of TCR clone 227736 (TRAV21, TRAJ52)
CAVRPSPAGGTSYGKLTF

SEQ ID NO: 455472 - protein, 13 aa, Homo sapiens
  CDR3 for beta chain variable domain of TCR clone 227736 (TRBV7-3, TRBJ1-1)
CASSQDCGAEAFF

SEQ ID NO: 455473 - protein, 15 aa, Homo sapiens
  CDR3 for alpha chain variable domain of TCR clone 227737 (TRAV20, TRAJ50)
CAVRQMKTYYDKVIF

SEQ ID NO: 455474 - protein, 16 aa, Homo sapiens
  CDR3 for beta chain variable domain of TCR clone 227737 (TRBV7-3, TRBJ2-2)
CASSLKRGTLSGELFF

SEQ ID NO: 455475 - protein, 13 aa, Homo sapiens
  CDR3 for alpha chain variable domain of TCR clone 227738 (TRAV12-1, TRAJ53)
CVVNAENNYKLTF

SEQ ID NO: 455476 - protein, 13 aa, Homo sapiens
  CDR3 for beta chain variable domain of TCR clone 227738 (TRBV7-2, TRBJ1-5)
CASSLAQDQPQHF

SEQ ID NO: 455477 - protein, 15 aa, Homo sapiens
  CDR3 for alpha chain variable domain of TCR clone 227739 (TRAV13-2, TRAJ5)
CAENPYWTGRRALTF

SEQ ID NO: 455478 - protein, 14 aa, Homo sapiens
  CDR3 for beta chain variable domain of TCR clone 227739 (TRBV5-7, TRBJ2-7)
CASSFKGATGEQYF

SEQ ID NO: 455479 - protein, 17 aa, Homo sapiens
  CDR3 for alpha chain variable domain of TCR clone 227740 (TRAV3, TRAJ42)
CAVRDRDYGGSQGNLIF

SEQ ID NO: 455480 - protein, 16 aa, Homo sapiens
  CDR3 for beta chain variable domain of TCR clone 227740 (TRBV12-4, TRBJ1-5)
CASSSGPRGSNQPQHF

SEQ ID NO: 455481 - protein, 13 aa, Homo sapiens
  CDR3 for alpha chain variable domain of TCR clone 227741 (TRAV13-2, TRAJ48)
CAEMDFGNEKLTF

SEQ ID NO: 455482 - protein, 16 aa, Homo sapiens
  CDR3 for beta chain variable domain of TCR clone 227741 (TRBV12-4, TRBJ1-5)
CASSRPVGGSNQPQHF

SEQ ID NO: 455483 - protein, 13 aa, Homo sapiens
  CDR3 for alpha chain variable domain of TCR clone 227742 (TRAV39, TRAJ49)
CAVARNTGNQFYF

SEQ ID NO: 455484 - protein, 12 aa, Homo sapiens
  CDR3 for beta chain variable domain of TCR clone 227742 (TRBV24-1, TRBJ1-1)
CATLYPDTEAFF

SEQ ID NO: 455485 - protein, 14 aa, Homo sapiens
  CDR3 for alpha chain variable domain of TCR clone 227743 (TRAV16, TRAJ32)
CALKSGGATNKLIF

SEQ ID NO: 455486 - protein, 13 aa, Homo sapiens
  CDR3 for beta chain variable domain of TCR clone 227743 (TRBV7-3, TRBJ1-2)
CASSLKQNYGYTF

SEQ ID NO: 455487 - protein, 14 aa, Homo sapiens
  CDR3 for alpha chain variable domain of TCR clone 227744 (TRAV12-3, TRAJ10)
SHLPLTGGGNKLTF

SEQ ID NO: 455488 - protein, 18 aa, Homo sapiens
  CDR3 for beta chain variable domain of TCR clone 227744 (TRBV28, TRBJ2-5)
CASSFPNFGTGGGETQYF

SEQ ID NO: 455489 - protein, 14 aa, Homo sapiens
  CDR3 for alpha chain variable domain of TCR clone 227745 (TRAV2, TRAJ22)
CAVGRGGSARQLTF

SEQ ID NO: 455490 - protein, 17 aa, Homo sapiens
  CDR3 for beta chain variable domain of TCR clone 227745 (TRBV11-2, TRBJ2-1)
CASSLYPPGVEYNEQFF

SEQ ID NO: 455491 - protein, 12 aa, Homo sapiens
  CDR3 for alpha chain variable domain of TCR clone 227746 (TRAV12-1, TRAJ48)
CVARRGNEKLTF

SEQ ID NO: 455492 - protein, 18 aa, Homo sapiens
  CDR3 for beta chain variable domain of TCR clone 227746 (TRBV4-1, TRBJ2-3)
CASSHQLAGGRSTDTQYF

SEQ ID NO: 455493 - protein, 14 aa, Homo sapiens
  CDR3 for alpha chain variable domain of TCR clone 227747 (TRAV16, TRAJ33)
CALSAMDSNYQLIW

SEQ ID NO: 455494 - protein, 16 aa, Homo sapiens
  CDR3 for beta chain variable domain of TCR clone 227747 (TRBV15, TRBJ1-2)
CTTSRGPRTGGGGYTF

SEQ ID NO: 455495 - protein, 14 aa, Homo sapiens
  CDR3 for alpha chain variable domain of TCR clone 227748 (TRAV8-6, TRAJ37)
CAVRSRSNTGKLIF

SEQ ID NO: 455496 - protein, 13 aa, Homo sapiens
  CDR3 for beta chain variable domain of TCR clone 227748 (TRBV7-3, TRBJ1-5)
CASSPDRAQPQHF

SEQ ID NO: 455497 - protein, 15 aa, Homo sapiens
  CDR3 for alpha chain variable domain of TCR clone 227749 (TRAV3, TRAJ22)
CAVRDRGGFARQLTF

SEQ ID NO: 455498 - protein, 17 aa, Homo sapiens
  CDR3 for beta chain variable domain of TCR clone 227749 (TRBV13, TRBJ2-3)
CASSLSRVAGGRNTQYF

SEQ ID NO: 455499 - protein, 23 aa, Homo sapiens
  CDR3 for alpha chain variable domain of TCR clone 227750 (TRAV12-2, TRAJ22)
CAVSFRFHPGPPIVSGSARQLTF

SEQ ID NO: 455500 - protein, 13 aa, Homo sapiens
  CDR3 for beta chain variable domain of TCR clone 227750 (TRBV12-4, TRBJ1-2)
CASSLDSNYGYTF

SEQ ID NO: 455501 - protein, 12 aa, Homo sapiens
  CDR3 for alpha chain variable domain of TCR clone 227751 (TRAV17, TRAJ20)
CATQANDYKLSF

SEQ ID NO: 455502 - protein, 19 aa, Homo sapiens
  CDR3 for beta chain variable domain of TCR clone 227751 (TRBV23-1, TRBJ1-6)
CASSGTPHSAIIHPSTLGT

SEQ ID NO: 455503 - protein, 12 aa, Homo sapiens
  CDR3 for alpha chain variable domain of TCR clone 227752 (TRAV12-3, TRAJ17)
LAMTLTGNKPTF

SEQ ID NO: 455504 - protein, 15 aa, Homo sapiens
  CDR3 for beta chain variable domain of TCR clone 227752 (TRBV20-1, TRBJ2-7)
CSARDRVSGMDEQYF

SEQ ID NO: 455505 - protein, 16 aa, Homo sapiens
  CDR3 for alpha chain variable domain of TCR clone 227753 (TRAV16, TRAJ57)
CAPYLITQGGSEKLVF

SEQ ID NO: 455506 - protein, 19 aa, Homo sapiens
  CDR3 for beta chain variable domain of TCR clone 227753 (TRBV7-2, TRBJ2-3)
CASSFLSRNWGGGTDTQYF

SEQ ID NO: 455507 - protein, 11 aa, Homo sapiens
  CDR3 for alpha chain variable domain of TCR clone 227754 (TRAV26-1, TRAJ47)
CIFFHGIWKQT

SEQ ID NO: 455508 - protein, 13 aa, Homo sapiens
  CDR3 for beta chain variable domain of TCR clone 227754 (TRBV24-1, TRBJ2-7)
CATSDLGPCEQYF

SEQ ID NO: 455509 - protein, 19 aa, Homo sapiens
  CDR3 for alpha chain variable domain of TCR clone 227755 (TRAV13-1, TRAJ52)
CAASSSPNAGRTSYGELTF

SEQ ID NO: 455510 - protein, 15 aa, Homo sapiens
  CDR3 for beta chain variable domain of TCR clone 227755 (TRBV9, TRBJ1-6)
CASSTGGGVDSPLHF

SEQ ID NO: 455511 - protein, 14 aa, Homo sapiens
  CDR3 for alpha chain variable domain of TCR clone 227756 (TRAV12-3, TRAJ57)
CAMSAWGGSEKLVF

SEQ ID NO: 455512 - protein, 14 aa, Homo sapiens
  CDR3 for beta chain variable domain of TCR clone 227756 (TRBV18, TRBJ2-5)
CASSPGVSQETLYF

SEQ ID NO: 455513 - protein, 14 aa, Homo sapiens
  CDR3 for alpha chain variable domain of TCR clone 227757 (TRAV12-2, TRAJ17)
CALLFKAAGNKLTF

SEQ ID NO: 455514 - protein, 14 aa, Homo sapiens
  CDR3 for beta chain variable domain of TCR clone 227757 (TRBV12-5, TRBJ2-5)
CASGSRTHQETQYF

SEQ ID NO: 455515 - protein, 14 aa, Homo sapiens
  CDR3 for alpha chain variable domain of TCR clone 227758 (TRAV29/DV5, TRAJ20)
CAATIRSNDYKLSF

SEQ ID NO: 455516 - protein, 15 aa, Homo sapiens
  CDR3 for beta chain variable domain of TCR clone 227758 (TRBV4-1, TRBJ2-5)
CASSQWDLYQETQYF

SEQ ID NO: 455517 - protein, 15 aa, Homo sapiens
  CDR3 for alpha chain variable domain of TCR clone 227759 (TRAV8-3, TRAJ11)
CAVGLFNSGYTTLTF

SEQ ID NO: 455518 - protein, 15 aa, Homo sapiens
  CDR3 for beta chain variable domain of TCR clone 227759 (TRBV13, TRBJ2-1)
CASSLLSGLNNEQFF

SEQ ID NO: 455519 - protein, 16 aa, Homo sapiens
  CDR3 for alpha chain variable domain of TCR clone 227760 (TRAV30, TRAJ24)
CGTEIVDADSWGKFQF

SEQ ID NO: 455520 - protein, 15 aa, Homo sapiens
  CDR3 for beta chain variable domain of TCR clone 227760 (TRBV15, TRBJ1-5)
CATSRDPVSNQAQHF

SEQ ID NO: 455521 - protein, 12 aa, Homo sapiens
  CDR3 for alpha chain variable domain of TCR clone 227761 (TRAV12-3, TRAJ17)
CAMTLTGNKLTF

SEQ ID NO: 455522 - protein, 15 aa, Homo sapiens
  CDR3 for beta chain variable domain of TCR clone 227761 (TRBV11-3, TRBJ2-7)
CVSSPGPASSYEQYF

SEQ ID NO: 455523 - protein, 10 aa, Homo sapiens
  CDR3 for alpha chain variable domain of TCR clone 227762 (TRAV12-3, TRAJ49)
WAMNDDQYYF

SEQ ID NO: 455524 - protein, 13 aa, Homo sapiens
  CDR3 for beta chain variable domain of TCR clone 227762 (TRBV12-4, TRBJ1-1)
CASSPGTGFEAFS

SEQ ID NO: 455525 - protein, 13 aa, Homo sapiens
  CDR3 for alpha chain variable domain of TCR clone 227763 (TRAV27, TRAJ41)
CAGEGNSGYALNF

SEQ ID NO: 455526 - protein, 14 aa, Homo sapiens
  CDR3 for beta chain variable domain of TCR clone 227763 (TRBV20-1, TRBJ1-3)
CSASPTGAGNTIYF

SEQ ID NO: 455527 - protein, 16 aa, Homo sapiens
  CDR3 for alpha chain variable domain of TCR clone 227764 (TRAV30, TRAJ24)
CGTEIVDADSWGKFQF

SEQ ID NO: 455528 - protein, 12 aa, Homo sapiens
  CDR3 for beta chain variable domain of TCR clone 227764 (TRBV11-3, TRBJ2-2)
CASSLGGGELLF

SEQ ID NO: 455529 - protein, 13 aa, Homo sapiens
  CDR3 for alpha chain variable domain of TCR clone 227765 (TRAV12-1, TRAJ6)
CVVFPGGSYIPTF

SEQ ID NO: 455530 - protein, 14 aa, Homo sapiens
  CDR3 for beta chain variable domain of TCR clone 227765 (TRBV19, TRBJ1-1)
CASRRGQGNTEAFF

SEQ ID NO: 455531 - protein, 11 aa, Homo sapiens
  CDR3 for alpha chain variable domain of TCR clone 227766 (TRAV8-3, TRAJ15)
CAVGPGTALIF

SEQ ID NO: 455532 - protein, 18 aa, Homo sapiens
  CDR3 for beta chain variable domain of TCR clone 227766 (TRBV18, TRBJ2-3)
CASSYTSGAAGGTDTQYC

SEQ ID NO: 455533 - protein, 13 aa, Homo sapiens
  CDR3 for alpha chain variable domain of TCR clone 227767 (TRAV35, TRAJ28)
VGVEGAGSYQLTF

SEQ ID NO: 455534 - protein, 13 aa, Homo sapiens
  CDR3 for beta chain variable domain of TCR clone 227767 (TRBV9, TRBJ2-1)
CASSPSGGSEQFF

SEQ ID NO: 455535 - protein, 16 aa, Homo sapiens
  CDR3 for alpha chain variable domain of TCR clone 227768 (TRAV12-3, TRAJ50)
CAMRDPMKTSYDKEIF

SEQ ID NO: 455536 - protein, 13 aa, Homo sapiens
  CDR3 for beta chain variable domain of TCR clone 227768 (TRBV4-1, TRBJ2-3)
CASRLDFTDTQYF

SEQ ID NO: 455537 - protein, 12 aa, Homo sapiens
  CDR3 for alpha chain variable domain of TCR clone 227769 (TRAV3, TRAJ26)
CAVRDYGKNFVF

SEQ ID NO: 455538 - protein, 16 aa, Homo sapiens
  CDR3 for beta chain variable domain of TCR clone 227769 (TRBV11-2, TRBJ1-2)
SASSPSGREANYGYTF

SEQ ID NO: 455539 - protein, 16 aa, Homo sapiens
  CDR3 for alpha chain variable domain of TCR clone 227770 (TRAV12-2, TRAJ13)
CAVDSAGARGYQEVTF

SEQ ID NO: 455540 - protein, 14 aa, Homo sapiens
  CDR3 for beta chain variable domain of TCR clone 227770 (TRBV20-1, TRBJ1-4)
CSARDGSGWEKLFF

SEQ ID NO: 455541 - protein, 14 aa, Homo sapiens
  CDR3 for alpha chain variable domain of TCR clone 227771 (TRAV13-1, TRAJ35)
CAASKGGFGNVLHC

SEQ ID NO: 455542 - protein, 18 aa, Homo sapiens
  CDR3 for beta chain variable domain of TCR clone 227771 (TRBV7-7, TRBJ2-1)
CASSLALTSGRSYNEQFF

SEQ ID NO: 455543 - protein, 13 aa, Homo sapiens
  CDR3 for alpha chain variable domain of TCR clone 227772 (TRAV35, TRAJ35)
CAGTNALGMCCIA

SEQ ID NO: 455544 - protein, 14 aa, Homo sapiens
  CDR3 for beta chain variable domain of TCR clone 227772 (TRBV7-9, TRBJ2-1)
CASSPRDSLYEQFF

SEQ ID NO: 455545 - protein, 13 aa, Homo sapiens
  CDR3 for alpha chain variable domain of TCR clone 227773 (TRAV13-1, TRAJ11)
CAAVLAGYSTLPF

SEQ ID NO: 455546 - protein, 17 aa, Homo sapiens
  CDR3 for beta chain variable domain of TCR clone 227773 (TRBV25-1, TRBJ2-7)
CASSDARVVFSSYERYF

SEQ ID NO: 455547 - protein, 10 aa, Homo sapiens
  CDR3 for alpha chain variable domain of TCR clone 227774 (TRAV26-1, TRAJ40)
CIAGTYKYIF

SEQ ID NO: 455548 - protein, 13 aa, Homo sapiens
  CDR3 for beta chain variable domain of TCR clone 227774 (TRBV20-1, TRBJ2-5)
CSAATELQETQYF

SEQ ID NO: 455549 - protein, 11 aa, Homo sapiens
  CDR3 for alpha chain variable domain of TCR clone 227775 (TRAV35, TRAJ30)
CAGPGDDKIIF

SEQ ID NO: 455550 - protein, 13 aa, Homo sapiens
  CDR3 for beta chain variable domain of TCR clone 227775 (TRBV20-1, TRBJ1-1)
CSAPLGGGTEAFF

SEQ ID NO: 455551 - protein, 13 aa, Homo sapiens
  CDR3 for alpha chain variable domain of TCR clone 227776 (TRAV21, TRAJ27)
CAALNTNAGKSTF

SEQ ID NO: 455552 - protein, 11 aa, Homo sapiens
  CDR3 for beta chain variable domain of TCR clone 227776 (TRBV7-9, TRBJ2-3)
CASSGPDTQYF

SEQ ID NO: 455553 - protein, 12 aa, Homo sapiens
  CDR3 for alpha chain variable domain of TCR clone 227777 (TRAV12-3, TRAJ3)
CAIDSSASKIIF

SEQ ID NO: 455554 - protein, 17 aa, Homo sapiens
  CDR3 for beta chain variable domain of TCR clone 227777 (TRBV7-9, TRBJ2-3)
CASSLVEAGAYPDTQYF

SEQ ID NO: 455555 - protein, 11 aa, Homo sapiens
  CDR3 for alpha chain variable domain of TCR clone 227778 (TRAV21, TRAJ11)
CAGNGYSTLTF

SEQ ID NO: 455556 - protein, 16 aa, Homo sapiens
  CDR3 for beta chain variable domain of TCR clone 227778 (TRBV4-3, TRBJ2-2)
CASSHLQGSGTGELFF

SEQ ID NO: 455557 - protein, 14 aa, Homo sapiens
  CDR3 for alpha chain variable domain of TCR clone 227779 (TRAV3, TRAJ26)
CAVRDYNYGQNFVF

SEQ ID NO: 455558 - protein, 13 aa, Homo sapiens
  CDR3 for beta chain variable domain of TCR clone 227779 (TRBV12-4, TRBJ2-7)
CASSPTETYEQYF

SEQ ID NO: 455559 - protein, 16 aa, Homo sapiens
  CDR3 for alpha chain variable domain of TCR clone 227780 (TRAV8-3, TRAJ13)
CAVGAYPSGGYQKVTF

SEQ ID NO: 455560 - protein, 18 aa, Homo sapiens
  CDR3 for beta chain variable domain of TCR clone 227780 (TRBV11-2, TRBJ2-3)
CASSLGGASRGAPNTQYF

SEQ ID NO: 455561 - protein, 14 aa, Homo sapiens
  CDR3 for alpha chain variable domain of TCR clone 227781 (TRAV8-3, TRAJ4)
CAVGASGGYNKLSF

SEQ ID NO: 455562 - protein, 13 aa, Homo sapiens
  CDR3 for beta chain variable domain of TCR clone 227781 (TRBV10-3, TRBJ2-7)
CASKLAVNYEQYF

SEQ ID NO: 455563 - protein, 12 aa, Homo sapiens
  CDR3 for alpha chain variable domain of TCR clone 227782 (TRAV26-1, TRAJ26)
CIVFIYGQNFVF

SEQ ID NO: 455564 - protein, 13 aa, Homo sapiens
  CDR3 for beta chain variable domain of TCR clone 227782 (TRBV27, TRBJ1-1)
CASSLSIGAESFF

SEQ ID NO: 455565 - protein, 14 aa, Homo sapiens
  CDR3 for alpha chain variable domain of TCR clone 227783 (TRAV3, TRAJ37)
CAVKESGNTGKLIF

SEQ ID NO: 455566 - protein, 15 aa, Homo sapiens
  CDR3 for beta chain variable domain of TCR clone 227783 (TRBV4-1, TRBJ2-5)
CASSQWDLYQETQYF

SEQ ID NO: 455567 - protein, 21 aa, Homo sapiens
  CDR3 for alpha chain variable domain of TCR clone 227784 (TRAV1-1, TRAJ6)
CLLLQRCERLERTGGSYIPTF

SEQ ID NO: 455568 - protein, 13 aa, Homo sapiens
  CDR3 for beta chain variable domain of TCR clone 227784 (TRBV10-2, TRBJ2-7)
CASGASGGYEQYF

SEQ ID NO: 455569 - protein, 15 aa, Homo sapiens
  CDR3 for alpha chain variable domain of TCR clone 227785 (TRAV26-1, TRAJ44)
CIVRANTGTASKLPF

SEQ ID NO: 455570 - protein, 16 aa, Homo sapiens
  CDR3 for beta chain variable domain of TCR clone 227785 (TRBV7-7, TRBJ2-1)
CASSLASGTSYNEQVF

SEQ ID NO: 455571 - protein, 12 aa, Homo sapiens
  CDR3 for alpha chain variable domain of TCR clone 227786 (TRAV16, TRAJ10)
CSRTGGGNKLTF

SEQ ID NO: 455572 - protein, 16 aa, Homo sapiens
  CDR3 for beta chain variable domain of TCR clone 227786 (TRBV12-4, TRBJ2-7)
CASSLIGGTGTYEQYF

SEQ ID NO: 455573 - protein, 11 aa, Homo sapiens
  CDR3 for alpha chain variable domain of TCR clone 227787 (TRAV4, TRAJ31)
CLVGLNARLMF

SEQ ID NO: 455574 - protein, 13 aa, Homo sapiens
  CDR3 for beta chain variable domain of TCR clone 227787 (TRBV4-2, TRBJ1-1)
CASSQAGNTEAFF

SEQ ID NO: 455575 - protein, 17 aa, Homo sapiens
  CDR3 for alpha chain variable domain of TCR clone 227788 (TRAV3, TRAJ6)
CAVRDGPRAGGSYIPTF

SEQ ID NO: 455576 - protein, 14 aa, Homo sapiens
  CDR3 for beta chain variable domain of TCR clone 227788 (TRBV7-2, TRBJ2-7)
CASSHKTNFYEQYF

SEQ ID NO: 455577 - protein, 14 aa, Homo sapiens
  CDR3 for alpha chain variable domain of TCR clone 227789 (TRAV12-2, TRAJ13)
CAVKNTGGYQKVTF

SEQ ID NO: 455578 - protein, 14 aa, Homo sapiens
  CDR3 for beta chain variable domain of TCR clone 227789 (TRBV10-3, TRBJ2-1)
CAISSDLAYNEQFF

SEQ ID NO: 455579 - protein, 10 aa, Homo sapiens
  CDR3 for alpha chain variable domain of TCR clone 227790 (TRAV1-2, TRAJ34)
CAVNTVKLIF

SEQ ID NO: 455580 - protein, 13 aa, Homo sapiens
  CDR3 for beta chain variable domain of TCR clone 227790 (TRBV10-1, TRBJ2-1)
CASSAGPDNEQFF

SEQ ID NO: 455581 - protein, 12 aa, Homo sapiens
  CDR3 for alpha chain variable domain of TCR clone 227791 (TRAV3, TRAJ4)
CAVSGGYNKLIF

SEQ ID NO: 455582 - protein, 17 aa, Homo sapiens
  CDR3 for beta chain variable domain of TCR clone 227791 (TRBV6-5, TRBJ2-6)
CASSSATSGPGANVLTL

SEQ ID NO: 455583 - protein, 14 aa, Homo sapiens
  CDR3 for alpha chain variable domain of TCR clone 227792 (TRAV8-2, TRAJ4)
CVVSPSGGYNKLIF

SEQ ID NO: 455584 - protein, 16 aa, Homo sapiens
  CDR3 for beta chain variable domain of TCR clone 227792 (TRBV7-9, TRBJ2-7)
CASSFGLAGPSYEQYF

SEQ ID NO: 455585 - protein, 12 aa, Homo sapiens
  CDR3 for alpha chain variable domain of TCR clone 227793 (TRAV30, TRAJ43)
CGTEERGNDMRF

SEQ ID NO: 455586 - protein, 13 aa, Homo sapiens
  CDR3 for beta chain variable domain of TCR clone 227793 (TRBV27, TRBJ2-7)
CASSFSQGYEQIF

SEQ ID NO: 455587 - protein, 13 aa, Homo sapiens
  CDR3 for alpha chain variable domain of TCR clone 227794 (TRAV35, TRAJ21)
CAGLLSNFNKFYF

SEQ ID NO: 455588 - protein, 16 aa, Homo sapiens
  CDR3 for beta chain variable domain of TCR clone 227794 (TRBV4-3, TRBJ2-2)
CASSRLQGSGTGELFF

SEQ ID NO: 455589 - protein, 13 aa, Homo sapiens
  CDR3 for alpha chain variable domain of TCR clone 227795 (TRAV3, TRAJ27)
CAVRPLRSGKSTF

SEQ ID NO: 455590 - protein, 12 aa, Homo sapiens
  CDR3 for beta chain variable domain of TCR clone 227795 (TRBV7-9, TRBJ2-7)
CATRTDAYEQYF

SEQ ID NO: 455591 - protein, 15 aa, Homo sapiens
  CDR3 for alpha chain variable domain of TCR clone 227796 (TRAV21, TRAJ43)
CAVRPSKAVFDDMRF

SEQ ID NO: 455592 - protein, 15 aa, Homo sapiens
  CDR3 for beta chain variable domain of TCR clone 227796 (TRBV2, TRBJ2-3)
CASSDFEKATDTQYF

SEQ ID NO: 455593 - protein, 14 aa, Homo sapiens
  CDR3 for alpha chain variable domain of TCR clone 227797 (TRAV20, TRAJ42)
CAVQGWRSQGNLIF

SEQ ID NO: 455594 - protein, 13 aa, Homo sapiens
  CDR3 for beta chain variable domain of TCR clone 227797 (TRBV10-3, TRBJ2-7)
CASKLAVNYEKYF

SEQ ID NO: 455595 - protein, 16 aa, Homo sapiens
  CDR3 for alpha chain variable domain of TCR clone 227798 (TRAV12-3, TRAJ20)
CAMDKLSFGAGTTVTV

SEQ ID NO: 455596 - protein, 14 aa, Homo sapiens
  CDR3 for beta chain variable domain of TCR clone 227798 (TRBV5-4, TRBJ2-2)
CASSLTSRTRELFF

SEQ ID NO: 455597 - protein, 12 aa, Homo sapiens
  CDR3 for alpha chain variable domain of TCR clone 227799 (TRAV17, TRAJ30)
CVPERRDDKIIF

SEQ ID NO: 455598 - protein, 15 aa, Homo sapiens
  CDR3 for beta chain variable domain of TCR clone 227799 (TRBV6-5, TRBJ2-7)
CASSRTSGFSYEQYF

SEQ ID NO: 455599 - protein, 16 aa, Homo sapiens
  CDR3 for alpha chain variable domain of TCR clone 227800 (TRAV12-3, TRAJ53)
CSMSPGSGGSNYKLTF

SEQ ID NO: 455600 - protein, 17 aa, Homo sapiens
  CDR3 for beta chain variable domain of TCR clone 227800 (TRBV28, TRBJ2-7)
CASSPLRGRRWKGGQYF

SEQ ID NO: 455601 - protein, 16 aa, Homo sapiens
  CDR3 for alpha chain variable domain of TCR clone 227801 (TRAV3, TRAJ37)
CAVSGKGSGNTGKLIF

SEQ ID NO: 455602 - protein, 13 aa, Homo sapiens
  CDR3 for beta chain variable domain of TCR clone 227801 (TRBV12-4, TRBJ2-7)
CASSPTETYEQYF

SEQ ID NO: 455603 - protein, 14 aa, Homo sapiens
  CDR3 for alpha chain variable domain of TCR clone 227802 (TRAV13-1, TRAJ5)
CAASGGTCRRALTF

SEQ ID NO: 455604 - protein, 13 aa, Homo sapiens
  CDR3 for beta chain variable domain of TCR clone 227802 (TRBV7-3, TRBJ1-1)
CASSQDWGAEAFF

SEQ ID NO: 455605 - protein, 10 aa, Homo sapiens
  CDR3 for alpha chain variable domain of TCR clone 227803 (TRAV1-1, TRAJ26)
CALRGLWSEF

SEQ ID NO: 455606 - protein, 15 aa, Homo sapiens
  CDR3 for beta chain variable domain of TCR clone 227803 (TRBV5-1, TRBJ2-5)
CASSFKGGDQETQYF

SEQ ID NO: 455607 - protein, 16 aa, Homo sapiens
  CDR3 for alpha chain variable domain of TCR clone 227804 (TRAV27, TRAJ13)
CAGAISDSGGYQKVTF

SEQ ID NO: 455608 - protein, 15 aa, Homo sapiens
  CDR3 for beta chain variable domain of TCR clone 227804 (TRBV29-1, TRBJ2-1)
CSVGRHALFYNEQFF

SEQ ID NO: 455609 - protein, 13 aa, Homo sapiens
  CDR3 for alpha chain variable domain of TCR clone 227805 (TRAV27, TRAJ39)
CAGAQGAGNMLTF

SEQ ID NO: 455610 - protein, 13 aa, Homo sapiens
  CDR3 for beta chain variable domain of TCR clone 227805 (TRBV7-3, TRBJ1-1)
CASSQDWGAEAFF

SEQ ID NO: 455611 - protein, 15 aa, Homo sapiens
  CDR3 for alpha chain variable domain of TCR clone 227806 (TRAV3, TRAJ36)
CAVRASQTGANNLFF

SEQ ID NO: 455612 - protein, 12 aa, Homo sapiens
  CDR3 for beta chain variable domain of TCR clone 227806 (TRBV28, TRBJ2-1)
CASSIRAGKQFF

SEQ ID NO: 455613 - protein, 13 aa, Homo sapiens
  CDR3 for alpha chain variable domain of TCR clone 227807 (TRAV8-3, TRAJ48)
CSVVPFGNEKLTF

SEQ ID NO: 455614 - protein, 15 aa, Homo sapiens
  CDR3 for beta chain variable domain of TCR clone 227807 (TRBV11-2, TRBJ2-1)
CASSSPSPRYNEQFF

SEQ ID NO: 455615 - protein, 17 aa, Homo sapiens
  CDR3 for alpha chain variable domain of TCR clone 227808 (TRAV3, TRAJ6)
CAVRDGPRAGGSYIPTF

SEQ ID NO: 455616 - protein, 13 aa, Homo sapiens
  CDR3 for beta chain variable domain of TCR clone 227808 (TRBV4-1, TRBJ2-2)
CASSQESTGELFF

SEQ ID NO: 455617 - protein, 18 aa, Homo sapiens
  CDR3 for alpha chain variable domain of TCR clone 227809 (TRAV26-2, TRAJ45)
CILRLWGYSGGGADGLTF

SEQ ID NO: 455618 - protein, 17 aa, Homo sapiens
  CDR3 for beta chain variable domain of TCR clone 227809 (TRBV28, TRBJ2-3)
CASSSTPAGGRVDTQYF

SEQ ID NO: 455619 - protein, 14 aa, Homo sapiens
  CDR3 for alpha chain variable domain of TCR clone 227810 (TRAV30, TRAJ33)
CGTVAPRSNYQLIR

SEQ ID NO: 455620 - protein, 14 aa, Homo sapiens
  CDR3 for beta chain variable domain of TCR clone 227810 (TRBV19, TRBJ2-1)
CASPTFVLSGEQFF

SEQ ID NO: 455621 - protein, 16 aa, Homo sapiens
  CDR3 for alpha chain variable domain of TCR clone 227811 (TRAV4, TRAJ5)
CLVGPDHGHGQESTYF

SEQ ID NO: 455622 - protein, 13 aa, Homo sapiens
  CDR3 for beta chain variable domain of TCR clone 227811 (TRBV20-1, TRBJ1-1)
CSAPPGGHTEAFF

SEQ ID NO: 455623 - protein, 13 aa, Homo sapiens
  CDR3 for alpha chain variable domain of TCR clone 227812 (TRAV12-1, TRAJ6)
CVVFPGGSYIPTF

SEQ ID NO: 455624 - protein, 12 aa, Homo sapiens
  CDR3 for beta chain variable domain of TCR clone 227812 (TRBV7-9, TRBJ2-7)
CASSLEGYEQYF

SEQ ID NO: 455625 - protein, 13 aa, Homo sapiens
  CDR3 for alpha chain variable domain of TCR clone 227813 (TRAV29/DV5, TRAJ31)
CAASRNTNARLMF

SEQ ID NO: 455626 - protein, 15 aa, Homo sapiens
  CDR3 for beta chain variable domain of TCR clone 227813 (TRBV2, TRBJ2-1)
CASSELAGSYNEQFF

SEQ ID NO: 455627 - protein, 11 aa, Homo sapiens
  CDR3 for alpha chain variable domain of TCR clone 227814 (TRAV35, TRAJ30)
CAGPGDDKIIF

SEQ ID NO: 455628 - protein, 18 aa, Homo sapiens
  CDR3 for beta chain variable domain of TCR clone 227814 (TRBV7-6, TRBJ2-1)
CASSSRTSGMSSYNEQFF

SEQ ID NO: 455629 - protein, 12 aa, Homo sapiens
  CDR3 for alpha chain variable domain of TCR clone 227815 (TRAV2, TRAJ9)
CAVGAGGFKTIF

SEQ ID NO: 455630 - protein, 14 aa, Homo sapiens
  CDR3 for beta chain variable domain of TCR clone 227815 (TRBV6-1, TRBJ1-3)
CASVEGGGGNTIYF

SEQ ID NO: 455631 - protein, 15 aa, Homo sapiens
  CDR3 for alpha chain variable domain of TCR clone 227816 (TRAV8-3, TRAJ11)
CAVGLLNSGYSTLNF

SEQ ID NO: 455632 - protein, 11 aa, Homo sapiens
  CDR3 for beta chain variable domain of TCR clone 227816 (TRBV29-1, TRBJ2-5)
CSEDRTGTQYF

SEQ ID NO: 455633 - protein, 15 aa, Homo sapiens
  CDR3 for alpha chain variable domain of TCR clone 227817 (TRAV26-1, TRAJ44)
CIVRANSGTASKLTF

SEQ ID NO: 455634 - protein, 16 aa, Homo sapiens
  CDR3 for beta chain variable domain of TCR clone 227817 (TRBV7-7, TRBJ2-1)
CASSLASGTSYNEQFF

SEQ ID NO: 455635 - protein, 12 aa, Homo sapiens
  CDR3 for alpha chain variable domain of TCR clone 227818 (TRAV1-2, TRAJ33)
CAALDSNYQLIG

SEQ ID NO: 455636 - protein, 16 aa, Homo sapiens
  CDR3 for beta chain variable domain of TCR clone 227818 (TRBV24-1, TRBJ2-3)
CATSDRRQDLTDTQYF

SEQ ID NO: 455637 - protein, 12 aa, Homo sapiens
  CDR3 for alpha chain variable domain of TCR clone 227819 (TRAV3, TRAJ34)
CAVLGNTDKLIF

SEQ ID NO: 455638 - protein, 13 aa, Homo sapiens
  CDR3 for beta chain variable domain of TCR clone 227819 (TRBV19, TRBJ2-1)
CATSIGTGNEQFF

SEQ ID NO: 455639 - protein, 15 aa, Homo sapiens
  CDR3 for alpha chain variable domain of TCR clone 227820 (TRAV21, TRAJ53)
CATLNSGGSNYKLTF

SEQ ID NO: 455640 - protein, 14 aa, Homo sapiens
  CDR3 for beta chain variable domain of TCR clone 227820 (TRBV4-2, TRBJ2-1)
CASGLGRAYNEQFF

SEQ ID NO: 455641 - protein, 13 aa, Homo sapiens
  CDR3 for alpha chain variable domain of TCR clone 227821 (TRAV12-1, TRAJ7)
CVVNMRGNNRLAC

SEQ ID NO: 455642 - protein, 15 aa, Homo sapiens
  CDR3 for beta chain variable domain of TCR clone 227821 (TRBV28, TRBJ1-3)
CASSMGWASGNTIYF

SEQ ID NO: 455643 - protein, 15 aa, Homo sapiens
  CDR3 for alpha chain variable domain of TCR clone 227822 (TRAV14/DV4, TRAJ12)
CAMREGWDSSYKLIF

SEQ ID NO: 455644 - protein, 14 aa, Homo sapiens
  CDR3 for beta chain variable domain of TCR clone 227822 (TRBV7-8, TRBJ2-3)
CASSLEAGTDTQYF

SEQ ID NO: 455645 - protein, 11 aa, Homo sapiens
  CDR3 for alpha chain variable domain of TCR clone 227823 (TRAV13-2, TRAJ20)
CADSNDYKLSF

SEQ ID NO: 455646 - protein, 12 aa, Homo sapiens
  CDR3 for beta chain variable domain of TCR clone 227823 (TRBV11-2, TRBJ2-2)
CASSVGGGELFF

SEQ ID NO: 455647 - protein, 12 aa, Homo sapiens
  CDR3 for alpha chain variable domain of TCR clone 227824 (TRAV21, TRAJ58)
CAVTPIQTRLTF

SEQ ID NO: 455648 - protein, 15 aa, Homo sapiens
  CDR3 for beta chain variable domain of TCR clone 227824 (TRBV7-3, TRBJ2-1)
CASSPTGGGEVEQFF

SEQ ID NO: 455649 - protein, 13 aa, Homo sapiens
  CDR3 for alpha chain variable domain of TCR clone 227825 (TRAV17, TRAJ5)
CALRGMGRRALTF

SEQ ID NO: 455650 - protein, 15 aa, Homo sapiens
  CDR3 for beta chain variable domain of TCR clone 227825 (TRBV9, TRBJ1-6)
CASSVAGTGDSPLHF

SEQ ID NO: 455651 - protein, 11 aa, Homo sapiens
  CDR3 for alpha chain variable domain of TCR clone 227826 (TRAV35, TRAJ30)
CAGEKDDKIIF

SEQ ID NO: 455652 - protein, 14 aa, Homo sapiens
  CDR3 for beta chain variable domain of TCR clone 227826 (TRBV15, TRBJ2-5)
CATSGDRGQETQYF

SEQ ID NO: 455653 - protein, 12 aa, Homo sapiens
  CDR3 for alpha chain variable domain of TCR clone 227827 (TRAV13-2, TRAJ13)
CRETRGYQKVTF

SEQ ID NO: 455654 - protein, 14 aa, Homo sapiens
  CDR3 for beta chain variable domain of TCR clone 227827 (TRBV23-1, TRBJ2-5)
CASSFLRSQETQYF

SEQ ID NO: 455655 - protein, 13 aa, Homo sapiens
  CDR3 for alpha chain variable domain of TCR clone 227828 (TRAV3, TRAJ21)
CAVRELDFNKFYF

SEQ ID NO: 455656 - protein, 15 aa, Homo sapiens
  CDR3 for beta chain variable domain of TCR clone 227828 (TRBV6-5, TRBJ2-1)
CASSYDAGAGNEQFF

SEQ ID NO: 455657 - protein, 14 aa, Homo sapiens
  CDR3 for alpha chain variable domain of TCR clone 227829 (TRAV3, TRAJ34)
CAVRDINNTDKPHF

SEQ ID NO: 455658 - protein, 14 aa, Homo sapiens
  CDR3 for beta chain variable domain of TCR clone 227829 (TRBV7-2, TRBJ2-2)
CASSLGQNTGELFF

SEQ ID NO: 455659 - protein, 16 aa, Homo sapiens
  CDR3 for alpha chain variable domain of TCR clone 227830 (TRAV23/DV6, TRAJ9)
CAAGIGGNTGGFKTIF

SEQ ID NO: 455660 - protein, 13 aa, Homo sapiens
  CDR3 for beta chain variable domain of TCR clone 227830 (TRBV7-9, TRBJ1-2)
CASSLKQNYGYTF

SEQ ID NO: 455661 - protein, 12 aa, Homo sapiens
  CDR3 for alpha chain variable domain of TCR clone 227831 (TRAV13-1, TRAJ21)
CAAKEGFNKFYF

SEQ ID NO: 455662 - protein, 19 aa, Homo sapiens
  CDR3 for beta chain variable domain of TCR clone 227831 (TRBV28, TRBJ2-1)
CQHPYWTVTGTSGRNEQFF

SEQ ID NO: 455663 - protein, 16 aa, Homo sapiens
  CDR3 for alpha chain variable domain of TCR clone 227832 (TRAV35, TRAJ28)
CAGQRYYGAGSYQLTF

SEQ ID NO: 455664 - protein, 13 aa, Homo sapiens
  CDR3 for beta chain variable domain of TCR clone 227832 (TRBV19, TRBJ1-2)
CASSQGQVYGYTF

SEQ ID NO: 455665 - protein, 17 aa, Homo sapiens
  CDR3 for alpha chain variable domain of TCR clone 227833 (TRAV12-2, TRAJ4)
CAVNVRPVSGGYNKLIF

SEQ ID NO: 455666 - protein, 16 aa, Homo sapiens
  CDR3 for beta chain variable domain of TCR clone 227833 (TRBV19, TRBJ2-1)
CASSKAGPSSYNEQFF

SEQ ID NO: 455667 - protein, 23 aa, Homo sapiens
  CDR3 for alpha chain variable domain of TCR clone 227834 (TRAV8-6, TRAJ38)
CAVRNAGNNHIQNPDPAVYQLTV

SEQ ID NO: 455668 - protein, 15 aa, Homo sapiens
  CDR3 for beta chain variable domain of TCR clone 227834 (TRBV4-1, TRBJ2-2)
CASSEGQGITGELFF

SEQ ID NO: 455669 - protein, 12 aa, Homo sapiens
  CDR3 for alpha chain variable domain of TCR clone 227835 (TRAV12-1, TRAJ34)
CVVAGATDKLIF

SEQ ID NO: 455670 - protein, 12 aa, Homo sapiens
  CDR3 for beta chain variable domain of TCR clone 227835 (TRBV7-9, TRBJ1-1)
CASSLVRCEAFF

SEQ ID NO: 455671 - protein, 14 aa, Homo sapiens
  CDR3 for alpha chain variable domain of TCR clone 227836 (TRAV17, TRAJ39)
CATDPVRAGNMLTF

SEQ ID NO: 455672 - protein, 16 aa, Homo sapiens
  CDR3 for beta chain variable domain of TCR clone 227836 (TRBV28, TRBJ2-5)
CASSFSPAGGWETQYF

SEQ ID NO: 455673 - protein, 10 aa, Homo sapiens
  CDR3 for alpha chain variable domain of TCR clone 227837 (TRAV13-2, TRAJ20)
CARRDYKLSF

SEQ ID NO: 455674 - protein, 14 aa, Homo sapiens
  CDR3 for beta chain variable domain of TCR clone 227837 (TRBV7-9, TRBJ2-1)
CASSPRDSLYEQFF

SEQ ID NO: 455675 - protein, 12 aa, Homo sapiens
  CDR3 for alpha chain variable domain of TCR clone 227838 (TRAV4, TRAJ26)
CLVGDYGQNFVL

SEQ ID NO: 455676 - protein, 17 aa, Homo sapiens
  CDR3 for beta chain variable domain of TCR clone 227838 (TRBV6-3, TRBJ2-1)
CASSYSSGTRGLDEQFF

SEQ ID NO: 455677 - protein, 11 aa, Homo sapiens
  CDR3 for alpha chain variable domain of TCR clone 227839 (TRAV12-3, TRAJ43)
CAMSVSNDMRF

SEQ ID NO: 455678 - protein, 13 aa, Homo sapiens
  CDR3 for beta chain variable domain of TCR clone 227839 (TRBV20-1, TRBJ1-1)
CSAPLGGGTEAIF

SEQ ID NO: 455679 - protein, 12 aa, Homo sapiens
  CDR3 for alpha chain variable domain of TCR clone 227840 (TRAV23/DV6, TRAJ31)
CAARRIGARLIF

SEQ ID NO: 455680 - protein, 13 aa, Homo sapiens
  CDR3 for beta chain variable domain of TCR clone 227840 (TRBV28, TRBJ2-7)
CASKAGGVYEQYF

SEQ ID NO: 455681 - protein, 17 aa, Homo sapiens
  CDR3 for alpha chain variable domain of TCR clone 227841 (TRAV27, TRAJ52)
CAGAGWAGGTSYGKLTF

SEQ ID NO: 455682 - protein, 16 aa, Homo sapiens
  CDR3 for beta chain variable domain of TCR clone 227841 (TRBV12-4, TRBJ2-5)
CASSFFVRGRQETQYF

SEQ ID NO: 455683 - protein, 15 aa, Homo sapiens
  CDR3 for alpha chain variable domain of TCR clone 227842 (TRAV12-3, TRAJ6)
CAMSATTGGSYIPKF

SEQ ID NO: 455684 - protein, 16 aa, Homo sapiens
  CDR3 for beta chain variable domain of TCR clone 227842 (TRBV20-1, TRBJ1-2)
CSASMGQSVANYGYTF

SEQ ID NO: 455685 - protein, 13 aa, Homo sapiens
  CDR3 for alpha chain variable domain of TCR clone 227843 (TRAV12-3, TRAJ54)
CAMTLQGAQKLVF

SEQ ID NO: 455686 - protein, 14 aa, Homo sapiens
  CDR3 for beta chain variable domain of TCR clone 227843 (TRBV4-1, TRBJ2-2)
CASSQSVNTGELFF

SEQ ID NO: 455687 - protein, 13 aa, Homo sapiens
  CDR3 for alpha chain variable domain of TCR clone 227844 (TRAV26-2, TRAJ43)
CILRAVNNNDMRF

SEQ ID NO: 455688 - protein, 16 aa, Homo sapiens
  CDR3 for beta chain variable domain of TCR clone 227844 (TRBV15, TRBJ2-7)
CATSARQARSSYEQYF

SEQ ID NO: 455689 - protein, 15 aa, Homo sapiens
  CDR3 for alpha chain variable domain of TCR clone 227845 (TRAV21, TRAJ32)
CAAAPYGGATNKLIF

SEQ ID NO: 455690 - protein, 16 aa, Homo sapiens
  CDR3 for beta chain variable domain of TCR clone 227845 (TRBV18, TRBJ2-3)
CQLTIWGRRIHRYAVF

SEQ ID NO: 455691 - protein, 13 aa, Homo sapiens
  CDR3 for alpha chain variable domain of TCR clone 227846 (TRAV12-1, TRAJ49)
CVVILNTGNQFYF

SEQ ID NO: 455692 - protein, 13 aa, Homo sapiens
  CDR3 for beta chain variable domain of TCR clone 227846 (TRBV10-3, TRBJ2-7)
CASKRAVNYEQYF

SEQ ID NO: 455693 - protein, 14 aa, Homo sapiens
  CDR3 for alpha chain variable domain of TCR clone 227847 (TRAV16, TRAJ17)
CALSRRAAGNKLTF

SEQ ID NO: 455694 - protein, 17 aa, Homo sapiens
  CDR3 for beta chain variable domain of TCR clone 227847 (TRBV18, TRBJ2-6)
CASSPRQGAVGANVLTF

SEQ ID NO: 455695 - protein, 14 aa, Homo sapiens
  CDR3 for alpha chain variable domain of TCR clone 227848 (TRAV1-2, TRAJ16)
CAVNRFSDGQKLPF

SEQ ID NO: 455696 - protein, 18 aa, Homo sapiens
  CDR3 for beta chain variable domain of TCR clone 227848 (TRBV5-4, TRBJ2-3)
CASSPTAGFLPSTDTQYF

SEQ ID NO: 455697 - protein, 12 aa, Homo sapiens
  CDR3 for alpha chain variable domain of TCR clone 227849 (TRAV12-3, TRAJ17)
CAMTLTGNKLTF

SEQ ID NO: 455698 - protein, 15 aa, Homo sapiens
  CDR3 for beta chain variable domain of TCR clone 227849 (TRBV19, TRBJ2-1)
CASSILGEGRDEQFF

SEQ ID NO: 455699 - protein, 16 aa, Homo sapiens
  CDR3 for alpha chain variable domain of TCR clone 227850 (TRAV12-3, TRAJ53)
CAMSPGSGGSNYKLTF

SEQ ID NO: 455700 - protein, 14 aa, Homo sapiens
  CDR3 for beta chain variable domain of TCR clone 227850 (TRBV27, TRBJ2-5)
CASSSLKGWETQYF

SEQ ID NO: 455701 - protein, 14 aa, Homo sapiens
  CDR3 for alpha chain variable domain of TCR clone 227851 (TRAV12-3, TRAJ10)
SHLPLTGGGNKLTF

SEQ ID NO: 455702 - protein, 16 aa, Homo sapiens
  CDR3 for beta chain variable domain of TCR clone 227851 (TRBV9, TRBJ2-7)
CASSAGPDRSPYEQYF

SEQ ID NO: 455703 - protein, 14 aa, Homo sapiens
  CDR3 for alpha chain variable domain of TCR clone 227852 (TRAV16, TRAJ29)
CALTRYSGNTPLVF

SEQ ID NO: 455704 - protein, 12 aa, Homo sapiens
  CDR3 for beta chain variable domain of TCR clone 227852 (TRBV2, TRBJ2-1)
CAKREGYNEQFF

SEQ ID NO: 455705 - protein, 13 aa, Homo sapiens
  CDR3 for alpha chain variable domain of TCR clone 227853 (TRAV13-2, TRAJ48)
CAEMDFGNEKLTF

SEQ ID NO: 455706 - protein, 13 aa, Homo sapiens
  CDR3 for beta chain variable domain of TCR clone 227853 (TRBV7-9, TRBJ1-2)
CASSVKQNYGYTF

SEQ ID NO: 455707 - protein, 15 aa, Homo sapiens
  CDR3 for alpha chain variable domain of TCR clone 227854 (TRAV23/DV6, TRAJ13)
CAAWPGGGGYQKVTF

SEQ ID NO: 455708 - protein, 17 aa, Homo sapiens
  CDR3 for beta chain variable domain of TCR clone 227854 (TRBV19, TRBJ2-7)
CASSISFYDSYPYEQCF

SEQ ID NO: 455709 - protein, 18 aa, Homo sapiens
  CDR3 for alpha chain variable domain of TCR clone 227855 (TRAV8-4, TRAJ52)
CAVTRANAGGTSYGKLTF

SEQ ID NO: 455710 - protein, 14 aa, Homo sapiens
  CDR3 for beta chain variable domain of TCR clone 227855 (TRBV11-2, TRBJ2-3)
CASSRLARTDTQYF

SEQ ID NO: 455711 - protein, 15 aa, Homo sapiens
  CDR3 for alpha chain variable domain of TCR clone 227856 (TRAV3, TRAJ33)
CAVRDLMDSNYQLIG

SEQ ID NO: 455712 - protein, 16 aa, Homo sapiens
  CDR3 for beta chain variable domain of TCR clone 227856 (TRBV12-5, TRBJ2-5)
CASGPRTSGNQETQYF

SEQ ID NO: 455713 - protein, 14 aa, Homo sapiens
  CDR3 for alpha chain variable domain of TCR clone 227857 (TRAV26-1, TRAJ45)
CIEVTGGGADGLTF

SEQ ID NO: 455714 - protein, 13 aa, Homo sapiens
  CDR3 for beta chain variable domain of TCR clone 227857 (TRBV4-1, TRBJ2-7)
CASSQGQAYEQYF

SEQ ID NO: 455715 - protein, 18 aa, Homo sapiens
  CDR3 for alpha chain variable domain of TCR clone 227858 (TRAV21, TRAJ52)
CAVRPSPAGGTSYGKLTF

SEQ ID NO: 455716 - protein, 16 aa, Homo sapiens
  CDR3 for beta chain variable domain of TCR clone 227858 (TRBV13, TRBJ2-3)
CQQPLQGSGGRNTQYV

SEQ ID NO: 455717 - protein, 11 aa, Homo sapiens
  CDR3 for alpha chain variable domain of TCR clone 227859 (TRAV29/DV5, TRAJ49)
CAAVPGNQFYF

SEQ ID NO: 455718 - protein, 14 aa, Homo sapiens
  CDR3 for beta chain variable domain of TCR clone 227859 (TRBV19, TRBJ1-4)
CASSINRGGEKLFF

SEQ ID NO: 455719 - protein, 14 aa, Homo sapiens
  CDR3 for alpha chain variable domain of TCR clone 227860 (TRAV12-2, TRAJ13)
CAVKKTGGYKKVTF

SEQ ID NO: 455720 - protein, 13 aa, Homo sapiens
  CDR3 for beta chain variable domain of TCR clone 227860 (TRBV2, TRBJ2-7)
CASSVGGSGEQYF

SEQ ID NO: 455721 - protein, 15 aa, Homo sapiens
  CDR3 for alpha chain variable domain of TCR clone 227861 (TRAV12-2, TRAJ50)
CAVNGLETSSDKVIF

SEQ ID NO: 455722 - protein, 15 aa, Homo sapiens
  CDR3 for beta chain variable domain of TCR clone 227861 (TRBV2, TRBJ2-1)
CASSELAGSYNEQFF

SEQ ID NO: 455723 - protein, 14 aa, Homo sapiens
  CDR3 for alpha chain variable domain of TCR clone 227862 (TRAV17, TRAJ39)
CATDPVRAGNMLTS

SEQ ID NO: 455724 - protein, 13 aa, Homo sapiens
  CDR3 for beta chain variable domain of TCR clone 227862 (TRBV19, TRBJ1-2)
CASSVPGQDGYTF

SEQ ID NO: 455725 - protein, 10 aa, Homo sapiens
  CDR3 for alpha chain variable domain of TCR clone 227863 (TRAV8-3, TRAJ43)
CAVALADMRF

SEQ ID NO: 455726 - protein, 14 aa, Homo sapiens
  CDR3 for beta chain variable domain of TCR clone 227863 (TRBV4-2, TRBJ2-1)
CASGLHRAYNEQFF

SEQ ID NO: 455727 - protein, 15 aa, Homo sapiens
  CDR3 for alpha chain variable domain of TCR clone 227864 (TRAV8-3, TRAJ45)
CASSYSGGGADGLTF

SEQ ID NO: 455728 - protein, 17 aa, Homo sapiens
  CDR3 for beta chain variable domain of TCR clone 227864 (TRBV7-8, TRBJ1-2)
CATSLRPLQGHLYGYTF

SEQ ID NO: 455729 - protein, 12 aa, Homo sapiens
  CDR3 for alpha chain variable domain of TCR clone 227865 (TRAV25, TRAJ48)
CAGDFGNEKLTF

SEQ ID NO: 455730 - protein, 14 aa, Homo sapiens
  CDR3 for beta chain variable domain of TCR clone 227865 (TRBV7-2, TRBJ1-6)
CASSLQGANSPLHF

SEQ ID NO: 455731 - protein, 15 aa, Homo sapiens
  CDR3 for alpha chain variable domain of TCR clone 227866 (TRAV23/DV6, TRAJ18)
CAARYRGSTLGRLYF

SEQ ID NO: 455732 - protein, 14 aa, Homo sapiens
  CDR3 for beta chain variable domain of TCR clone 227866 (TRBV11-2, TRBJ2-5)
CASSRTGGIETQYF

SEQ ID NO: 455733 - protein, 14 aa, Homo sapiens
  CDR3 for alpha chain variable domain of TCR clone 227867 (TRAV13-2, TRAJ43)
CTEIPTYNNNDMRF

SEQ ID NO: 455734 - protein, 15 aa, Homo sapiens
  CDR3 for beta chain variable domain of TCR clone 227867 (TRBV7-9, TRBJ2-2)
CASGPLDTFPGELFF

SEQ ID NO: 455735 - protein, 16 aa, Homo sapiens
  CDR3 for alpha chain variable domain of TCR clone 227868 (TRAV30, TRAJ24)
CGTEIVDADSWGKFQF

SEQ ID NO: 455736 - protein, 14 aa, Homo sapiens
  CDR3 for beta chain variable domain of TCR clone 227868 (TRBV19, TRBJ2-2)
CASTVTANTGELFF

SEQ ID NO: 455737 - protein, 18 aa, Homo sapiens
  CDR3 for alpha chain variable domain of TCR clone 227869 (TRAV29/DV5, TRAJ52)
CAAGFRGAGGTSYGKLTF

SEQ ID NO: 455738 - protein, 12 aa, Homo sapiens
  CDR3 for beta chain variable domain of TCR clone 227869 (TRBV6-3, TRBJ2-7)
CASSLTPYEQYF

SEQ ID NO: 455739 - protein, 11 aa, Homo sapiens
  CDR3 for alpha chain variable domain of TCR clone 227870 (TRAV1-2, TRAJ20)
CAVSNDYKLSF

SEQ ID NO: 455740 - protein, 17 aa, Homo sapiens
  CDR3 for beta chain variable domain of TCR clone 227870 (TRBV28, TRBJ2-5)
CASSTPEGDALQETQYF

SEQ ID NO: 455741 - protein, 14 aa, Homo sapiens
  CDR3 for alpha chain variable domain of TCR clone 227871 (TRAV17, TRAJ57)
CATDPPGGSEKLVF

SEQ ID NO: 455742 - protein, 14 aa, Homo sapiens
  CDR3 for beta chain variable domain of TCR clone 227871 (TRBV5-8, TRBJ2-3)
CASSLGQGTDTQYF

SEQ ID NO: 455743 - protein, 16 aa, Homo sapiens
  CDR3 for alpha chain variable domain of TCR clone 227872 (TRAV3, TRAJ37)
CAVRPHGSGNTGKLIF

SEQ ID NO: 455744 - protein, 16 aa, Homo sapiens
  CDR3 for beta chain variable domain of TCR clone 227872 (TRBV9, TRBJ1-2)
CASSVEEEVAPYGYTF

SEQ ID NO: 455745 - protein, 13 aa, Homo sapiens
  CDR3 for alpha chain variable domain of TCR clone 227873 (TRAV6, TRAJ23)
CALDQNQGGKLIF

SEQ ID NO: 455746 - protein, 15 aa, Homo sapiens
  CDR3 for beta chain variable domain of TCR clone 227873 (TRBV28, TRBJ1-2)
CASSGSEQRAFGDTF

SEQ ID NO: 455747 - protein, 14 aa, Homo sapiens
  CDR3 for alpha chain variable domain of TCR clone 227874 (TRAV40, TRAJ41)
CLLGPPSSGYALNF

SEQ ID NO: 455748 - protein, 11 aa, Homo sapiens
  CDR3 for beta chain variable domain of TCR clone 227874 (TRBV19, TRBJ2-7)
CASSILGEQYF

SEQ ID NO: 455749 - protein, 14 aa, Homo sapiens
  CDR3 for alpha chain variable domain of TCR clone 227875 (TRAV17, TRAJ57)
CATDPQGGSGKLVF

SEQ ID NO: 455750 - protein, 13 aa, Homo sapiens
  CDR3 for beta chain variable domain of TCR clone 227875 (TRBV19, TRBJ2-7)
CASSPRQSYEQYF

SEQ ID NO: 455751 - protein, 13 aa, Homo sapiens
  CDR3 for alpha chain variable domain of TCR clone 227876 (TRAV27, TRAJ8)
CAGGPTGFQKLVF

SEQ ID NO: 455752 - protein, 15 aa, Homo sapiens
  CDR3 for beta chain variable domain of TCR clone 227876 (TRBV6-1, TRBJ2-7)
CTSSESMGDFYEQYF

SEQ ID NO: 455753 - protein, 16 aa, Homo sapiens
  CDR3 for alpha chain variable domain of TCR clone 227877 (TRAV21, TRAJ22)
CAVKKVSSGSASQLTF

SEQ ID NO: 455754 - protein, 14 aa, Homo sapiens
  CDR3 for beta chain variable domain of TCR clone 227877 (TRBV7-2, TRBJ2-5)
CASSPRGSSETQYF

SEQ ID NO: 455755 - protein, 15 aa, Homo sapiens
  CDR3 for alpha chain variable domain of TCR clone 227878 (TRAV4, TRAJ10)
CLVGDGSGGGNKLTF

SEQ ID NO: 455756 - protein, 15 aa, Homo sapiens
  CDR3 for beta chain variable domain of TCR clone 227878 (TRBV27, TRBJ2-3)
CAGSSLAGVIDTQYF

SEQ ID NO: 455757 - protein, 11 aa, Homo sapiens
  CDR3 for alpha chain variable domain of TCR clone 227879 (TRAV4, TRAJ31)
CLVGGNARLMF

SEQ ID NO: 455758 - protein, 16 aa, Homo sapiens
  CDR3 for beta chain variable domain of TCR clone 227879 (TRBV7-2, TRBJ2-5)
CASSSKWLSGQETQYF

SEQ ID NO: 455759 - protein, 14 aa, Homo sapiens
  CDR3 for alpha chain variable domain of TCR clone 227880 (TRAV12-3, TRAJ10)
SHLPLTGGGSKLTF

SEQ ID NO: 455760 - protein, 15 aa, Homo sapiens
  CDR3 for beta chain variable domain of TCR clone 227880 (TRBV5-1, TRBJ2-7)
CASSLMTSGSNEQYF

SEQ ID NO: 455761 - protein, 10 aa, Homo sapiens
  CDR3 for alpha chain variable domain of TCR clone 227881 (TRAV13-1, TRAJ30)
CAARDDKIIF

SEQ ID NO: 455762 - protein, 16 aa, Homo sapiens
  CDR3 for beta chain variable domain of TCR clone 227881 (TRBV20-1, TRBJ1-2)
CSASMGQGVANYGYTF

SEQ ID NO: 455763 - protein, 14 aa, Homo sapiens
  CDR3 for alpha chain variable domain of TCR clone 227882 (TRAV14/DV4, TRAJ54)
CAMREAPGAQKLEF

SEQ ID NO: 455764 - protein, 15 aa, Homo sapiens
  CDR3 for beta chain variable domain of TCR clone 227882 (TRBV5-1, TRBJ2-7)
CASSLNGGPAREQYL

SEQ ID NO: 455765 - protein, 14 aa, Homo sapiens
  CDR3 for alpha chain variable domain of TCR clone 227883 (TRAV2, TRAJ37)
CAVDFTRNTGKLIV

SEQ ID NO: 455766 - protein, 15 aa, Homo sapiens
  CDR3 for beta chain variable domain of TCR clone 227883 (TRBV20-1, TRBJ1-1)
CSASRGVTGNTEAFF

SEQ ID NO: 455767 - protein, 19 aa, Homo sapiens
  CDR3 for alpha chain variable domain of TCR clone 227884 (TRAV26-1, TRAJ52)
CIVRAHRNAGGTSYGKLTF

SEQ ID NO: 455768 - protein, 16 aa, Homo sapiens
  CDR3 for beta chain variable domain of TCR clone 227884 (TRBV12-4, TRBJ2-5)
CASSWRPSGDLETQYF

SEQ ID NO: 455769 - protein, 15 aa, Homo sapiens
  CDR3 for alpha chain variable domain of TCR clone 227885 (TRAV12-3, TRAJ27)
CAMRAYNTNAGKYTF

SEQ ID NO: 455770 - protein, 13 aa, Homo sapiens
  CDR3 for beta chain variable domain of TCR clone 227885 (TRBV11-2, TRBJ2-5)
CASSRGPSETQYF

SEQ ID NO: 455771 - protein, 14 aa, Homo sapiens
  CDR3 for alpha chain variable domain of TCR clone 227886 (TRAV21, TRAJ52)
CGRAGGTSYGKLTV

SEQ ID NO: 455772 - protein, 14 aa, Homo sapiens
  CDR3 for beta chain variable domain of TCR clone 227886 (TRBV19, TRBJ1-2)
CASSVLGYNYGYTF

SEQ ID NO: 455773 - protein, 13 aa, Homo sapiens
  CDR3 for alpha chain variable domain of TCR clone 227887 (TRAV13-2, TRAJ53)
CAENMGSNYKLTF

SEQ ID NO: 455774 - protein, 13 aa, Homo sapiens
  CDR3 for beta chain variable domain of TCR clone 227887 (TRBV4-1, TRBJ2-2)
CGSSQENTGELFF

SEQ ID NO: 455775 - protein, 20 aa, Homo sapiens
  CDR3 for alpha chain variable domain of TCR clone 227888 (TRAV12-3, TRAJ41)
SLFIRDSQPSDSATPEALNF

SEQ ID NO: 455776 - protein, 15 aa, Homo sapiens
  CDR3 for beta chain variable domain of TCR clone 227888 (TRBV5-1, TRBJ2-7)
CASSLDLTSSYGQYF

SEQ ID NO: 455777 - protein, 16 aa, Homo sapiens
  CDR3 for alpha chain variable domain of TCR clone 227889 (TRAV20, TRAJ48)
CAVPVGSNFGNEQLTF

SEQ ID NO: 455778 - protein, 16 aa, Homo sapiens
  CDR3 for beta chain variable domain of TCR clone 227889 (TRBV2, TRBJ2-3)
CASSTSVEGVTDTQYF

SEQ ID NO: 455779 - protein, 14 aa, Homo sapiens
  CDR3 for alpha chain variable domain of TCR clone 227890 (TRAV8-4, TRAJ54)
CAGREVLGAQKLVF

SEQ ID NO: 455780 - protein, 13 aa, Homo sapiens
  CDR3 for beta chain variable domain of TCR clone 227890 (TRBV27, TRBJ2-7)
CASSFVSSYEQYF

SEQ ID NO: 455781 - protein, 12 aa, Homo sapiens
  CDR3 for alpha chain variable domain of TCR clone 227891 (TRAV16, TRAJ10)
CSRTGGGNKLTF

SEQ ID NO: 455782 - protein, 14 aa, Homo sapiens
  CDR3 for beta chain variable domain of TCR clone 227891 (TRBV7-3, TRBJ2-3)
CASSPGASRDTQYF

SEQ ID NO: 455783 - protein, 15 aa, Homo sapiens
  CDR3 for alpha chain variable domain of TCR clone 227892 (TRAV35, TRAJ58)
CAGRRQETSGSRLNF

SEQ ID NO: 455784 - protein, 11 aa, Homo sapiens
  CDR3 for beta chain variable domain of TCR clone 227892 (TRBV11-2, TRBJ1-1)
CASSINTEAFF

SEQ ID NO: 455785 - protein, 13 aa, Homo sapiens
  CDR3 for alpha chain variable domain of TCR clone 227893 (TRAV26-1, TRAJ33)
CIVRVEGNYQLIW

SEQ ID NO: 455786 - protein, 12 aa, Homo sapiens
  CDR3 for beta chain variable domain of TCR clone 227893 (TRBV20-1, TRBJ1-1)
QCSTWGGTEAFF

SEQ ID NO: 455787 - protein, 16 aa, Homo sapiens
  CDR3 for alpha chain variable domain of TCR clone 227894 (TRAV26-1, TRAJ28)
CIVRPYSGAGSYQLTF

SEQ ID NO: 455788 - protein, 15 aa, Homo sapiens
  CDR3 for beta chain variable domain of TCR clone 227894 (TRBV6-1, TRBJ2-5)
CASPRWGTEGQTQYF

SEQ ID NO: 455789 - protein, 11 aa, Homo sapiens
  CDR3 for alpha chain variable domain of TCR clone 227895 (TRAV21, TRAJ11)
CAVNGYSTLTF

SEQ ID NO: 455790 - protein, 14 aa, Homo sapiens
  CDR3 for beta chain variable domain of TCR clone 227895 (TRBV4-2, TRBJ2-1)
CASGLDRAYNEQFF

SEQ ID NO: 455791 - protein, 10 aa, Homo sapiens
  CDR3 for alpha chain variable domain of TCR clone 227896 (TRAV12-1, TRAJ23)
CVVSGGKLIF

SEQ ID NO: 455792 - protein, 14 aa, Homo sapiens
  CDR3 for beta chain variable domain of TCR clone 227896 (TRBV11-3, TRBJ2-7)
CASSPAVPPYEQYF

SEQ ID NO: 455793 - protein, 14 aa, Homo sapiens
  CDR3 for alpha chain variable domain of TCR clone 227897 (TRAV3, TRAJ17)
CAVRDAAAGNKLTF

SEQ ID NO: 455794 - protein, 18 aa, Homo sapiens
  CDR3 for beta chain variable domain of TCR clone 227897 (TRBV4-3, TRBJ1-6)
CASSQETPASSYNSPLHF

SEQ ID NO: 455795 - protein, 16 aa, Homo sapiens
  CDR3 for alpha chain variable domain of TCR clone 227898 (TRAV16, TRAJ4)
GALSRMFSGGYNKLIF

SEQ ID NO: 455796 - protein, 16 aa, Homo sapiens
  CDR3 for beta chain variable domain of TCR clone 227898 (TRBV12-4, TRBJ1-5)
CASSRPVGGSNQPQHF

SEQ ID NO: 455797 - protein, 13 aa, Homo sapiens
  CDR3 for alpha chain variable domain of TCR clone 227899 (TRAV36/DV7, TRAJ54)
CAVLIQGAQKLVF

SEQ ID NO: 455798 - protein, 13 aa, Homo sapiens
  CDR3 for beta chain variable domain of TCR clone 227899 (TRBV29-1, TRBJ2-4)
CIVGEGTKNIQYF

SEQ ID NO: 455799 - protein, 14 aa, Homo sapiens
  CDR3 for alpha chain variable domain of TCR clone 227900 (TRAV13-1, TRAJ35)
CAASKGGFGNVLHC

SEQ ID NO: 455800 - protein, 13 aa, Homo sapiens
  CDR3 for beta chain variable domain of TCR clone 227900 (TRBV5-1, TRBJ2-1)
CASSLGSYNEQFF

SEQ ID NO: 455801 - protein, 12 aa, Homo sapiens
  CDR3 for alpha chain variable domain of TCR clone 227901 (TRAV12-3, TRAJ17)
CAMTLTGNKLTF

SEQ ID NO: 455802 - protein, 16 aa, Homo sapiens
  CDR3 for beta chain variable domain of TCR clone 227901 (TRBV20-1, TRBJ2-1)
CSASASGYSSYNEQFF

SEQ ID NO: 455803 - protein, 13 aa, Homo sapiens
  CDR3 for alpha chain variable domain of TCR clone 227902 (TRAV23/DV6, TRAJ43)
CAASMGGNNDMRF

SEQ ID NO: 455804 - protein, 16 aa, Homo sapiens
  CDR3 for beta chain variable domain of TCR clone 227902 (TRBV2, TRBJ1-4)
CASNLLQGATNEKLFF

SEQ ID NO: 455805 - protein, 14 aa, Homo sapiens
  CDR3 for alpha chain variable domain of TCR clone 227903 (TRAV17, TRAJ6)
CATDASGGSYIPTF

SEQ ID NO: 455806 - protein, 15 aa, Homo sapiens
  CDR3 for beta chain variable domain of TCR clone 227903 (TRBV7-3, TRBJ2-2)
CASSETGQGTGELFF

SEQ ID NO: 455807 - protein, 21 aa, Homo sapiens
  CDR3 for alpha chain variable domain of TCR clone 227904 (TRAV8-3, )
CAVVTTRIPVIQNPDPAVYQL

SEQ ID NO: 455808 - protein, 14 aa, Homo sapiens
  CDR3 for beta chain variable domain of TCR clone 227904 (TRBV11-2, TRBJ2-7)
CASSPSTTSYEQYF

SEQ ID NO: 455809 - protein, 13 aa, Homo sapiens
  CDR3 for alpha chain variable domain of TCR clone 227905 (TRAV21, TRAJ45)
CAVMGGGADGLTF

SEQ ID NO: 455810 - protein, 17 aa, Homo sapiens
  CDR3 for beta chain variable domain of TCR clone 227905 (TRBV7-3, TRBJ2-2)
CASSLSGTSGGTGELFF

SEQ ID NO: 455811 - protein, 18 aa, Homo sapiens
  CDR3 for alpha chain variable domain of TCR clone 227906 (TRAV3, TRAJ42)
CAVRDEGTGGGSKGNLLF

SEQ ID NO: 455812 - protein, 16 aa, Homo sapiens
  CDR3 for beta chain variable domain of TCR clone 227906 (TRBV9, TRBJ1-2)
CASSVAKGRVDYGYTF

SEQ ID NO: 455813 - protein, 12 aa, Homo sapiens
  CDR3 for alpha chain variable domain of TCR clone 227907 (TRAV2, TRAJ17)
CCGGAAGNKLTF

SEQ ID NO: 455814 - protein, 14 aa, Homo sapiens
  CDR3 for beta chain variable domain of TCR clone 227907 (TRBV7-8, TRBJ2-3)
CASSFKSSTDTQYF

SEQ ID NO: 455815 - protein, 14 aa, Homo sapiens
  CDR3 for alpha chain variable domain of TCR clone 227908 (TRAV8-3, TRAJ4)
CAVGAAGGYNKLIF

SEQ ID NO: 455816 - protein, 14 aa, Homo sapiens
  CDR3 for beta chain variable domain of TCR clone 227908 (TRBV5-5, TRBJ1-5)
CASSGQGVDQPQHF

SEQ ID NO: 455817 - protein, 17 aa, Homo sapiens
  CDR3 for alpha chain variable domain of TCR clone 227909 (TRAV23/DV6, TRAJ12)
CAAIDLGAMDSSYKLIF

SEQ ID NO: 455818 - protein, 14 aa, Homo sapiens
  CDR3 for beta chain variable domain of TCR clone 227909 (TRBV7-9, TRBJ2-7)
CASSSGQGGYEQYF

SEQ ID NO: 455819 - protein, 13 aa, Homo sapiens
  CDR3 for alpha chain variable domain of TCR clone 227910 (TRAV8-3, TRAJ28)
CAVGAVGSYQLTF

SEQ ID NO: 455820 - protein, 12 aa, Homo sapiens
  CDR3 for beta chain variable domain of TCR clone 227910 (TRBV7-3, TRBJ1-1)
CQQLKGGAEAFF

SEQ ID NO: 455821 - protein, 17 aa, Homo sapiens
  CDR3 for alpha chain variable domain of TCR clone 227911 (TRAV1-1, TRAJ32)
CAVRVDELWWCYKQAHL

SEQ ID NO: 455822 - protein, 12 aa, Homo sapiens
  CDR3 for beta chain variable domain of TCR clone 227911 (TRBV12-4, TRBJ2-7)
CASSLGGYEQYF

SEQ ID NO: 455823 - protein, 17 aa, Homo sapiens
  CDR3 for alpha chain variable domain of TCR clone 227912 (TRAV3, TRAJ38)
CAVRDCLNAGNNRKLIW

SEQ ID NO: 455824 - protein, 16 aa, Homo sapiens
  CDR3 for beta chain variable domain of TCR clone 227912 (TRBV6-5, TRBJ2-7)
CASSSDPTSGFYEQYF

SEQ ID NO: 455825 - protein, 13 aa, Homo sapiens
  CDR3 for alpha chain variable domain of TCR clone 227913 (TRAV13-2, TRAJ48)
CSEMDFGNEKLTF

SEQ ID NO: 455826 - protein, 15 aa, Homo sapiens
  CDR3 for beta chain variable domain of TCR clone 227913 (TRBV7-9, TRBJ1-6)
CASSSPGRGNSPLYF

SEQ ID NO: 455827 - protein, 14 aa, Homo sapiens
  CDR3 for alpha chain variable domain of TCR clone 227914 (TRAV8-4, TRAJ13)
CAVTLSVGCQKVTL

SEQ ID NO: 455828 - protein, 14 aa, Homo sapiens
  CDR3 for beta chain variable domain of TCR clone 227914 (TRBV7-2, TRBJ1-2)
CASSQTGSTYGYTF

SEQ ID NO: 455829 - protein, 16 aa, Homo sapiens
  CDR3 for alpha chain variable domain of TCR clone 227915 (TRAV26-1, TRAJ52)
CTVSNAGGTSYGKLTF

SEQ ID NO: 455830 - protein, 15 aa, Homo sapiens
  CDR3 for beta chain variable domain of TCR clone 227915 (TRBV7-3, TRBJ2-1)
CASSPTGGGEVEQFF

SEQ ID NO: 455831 - protein, 15 aa, Homo sapiens
  CDR3 for alpha chain variable domain of TCR clone 227916 (TRAV25, TRAJ53)
CPTSNNGGSNYKLTF

SEQ ID NO: 455832 - protein, 14 aa, Homo sapiens
  CDR3 for beta chain variable domain of TCR clone 227916 (TRBV11-2, TRBJ2-3)
CASSRLARTDTQYF

SEQ ID NO: 455833 - protein, 16 aa, Homo sapiens
  CDR3 for alpha chain variable domain of TCR clone 227917 (TRAV3, TRAJ10)
CAVRDMRAGGGNKLTF

SEQ ID NO: 455834 - protein, 15 aa, Homo sapiens
  CDR3 for beta chain variable domain of TCR clone 227917 (TRBV11-2, TRBJ1-6)
CGSTGFGTAVSPLHF

SEQ ID NO: 455835 - protein, 11 aa, Homo sapiens
  CDR3 for alpha chain variable domain of TCR clone 227918 (TRAV29/DV5, TRAJ43)
CAAKTNNDMHF

SEQ ID NO: 455836 - protein, 14 aa, Homo sapiens
  CDR3 for beta chain variable domain of TCR clone 227918 (TRBV11-2, TRBJ2-7)
CASSPSTTSYEQYF

SEQ ID NO: 455837 - protein, 14 aa, Homo sapiens
  CDR3 for alpha chain variable domain of TCR clone 227919 (TRAV13-1, TRAJ22)
CAASYSGSVRQLTF

SEQ ID NO: 455838 - protein, 13 aa, Homo sapiens
  CDR3 for beta chain variable domain of TCR clone 227919 (TRBV6-3, TRBJ1-2)
CASSLTGDYGYTF

SEQ ID NO: 455839 - protein, 13 aa, Homo sapiens
  CDR3 for alpha chain variable domain of TCR clone 227920 (TRAV21, TRAJ57)
CAVIEGGSEKLVF

SEQ ID NO: 455840 - protein, 15 aa, Homo sapiens
  CDR3 for beta chain variable domain of TCR clone 227920 (TRBV9, TRBJ1-6)
CASSVAGTGDSPLHF

SEQ ID NO: 455841 - protein, 14 aa, Homo sapiens
  CDR3 for alpha chain variable domain of TCR clone 227921 (TRAV12-1, TRAJ30)
CVVNIGGRDDKIIF

SEQ ID NO: 455842 - protein, 13 aa, Homo sapiens
  CDR3 for beta chain variable domain of TCR clone 227921 (TRBV12-5, TRBJ2-1)
RASVWGRGNEHFF

SEQ ID NO: 455843 - protein, 14 aa, Homo sapiens
  CDR3 for alpha chain variable domain of TCR clone 227922 (TRAV3, TRAJ21)
CAVRDAHNFNKFYF

SEQ ID NO: 455844 - protein, 17 aa, Homo sapiens
  CDR3 for beta chain variable domain of TCR clone 227922 (TRBV20-1, TRBJ1-6)
CSARGGYTVSYNSPLHF

SEQ ID NO: 455845 - protein, 14 aa, Homo sapiens
  CDR3 for alpha chain variable domain of TCR clone 227923 (TRAV1-2, TRAJ16)
CAVNRFSDGQKLLF

SEQ ID NO: 455846 - protein, 13 aa, Homo sapiens
  CDR3 for beta chain variable domain of TCR clone 227923 (TRBV5-4, TRBJ1-1)
CASSSAGNTEAFF

SEQ ID NO: 455847 - protein, 13 aa, Homo sapiens
  CDR3 for alpha chain variable domain of TCR clone 227924 (TRAV13-1, TRAJ5)
CAASDTGRRALTF

SEQ ID NO: 455848 - protein, 13 aa, Homo sapiens
  CDR3 for beta chain variable domain of TCR clone 227924 (TRBV29-1, TRBJ2-1)
CSVDGGASDEQFF

SEQ ID NO: 455849 - protein, 18 aa, Homo sapiens
  CDR3 for alpha chain variable domain of TCR clone 227925 (TRAV26-2, TRAJ45)
CILRLWGYSGGGVDGLTF

SEQ ID NO: 455850 - protein, 13 aa, Homo sapiens
  CDR3 for beta chain variable domain of TCR clone 227925 (TRBV7-8, TRBJ2-7)
CASSLTGGREQYF

SEQ ID NO: 455851 - protein, 12 aa, Homo sapiens
  CDR3 for alpha chain variable domain of TCR clone 227926 (TRAV6, TRAJ9)
CALVTGGFKTIF

SEQ ID NO: 455852 - protein, 13 aa, Homo sapiens
  CDR3 for beta chain variable domain of TCR clone 227926 (TRBV7-9, TRBJ1-2)
CASSLKQNYGYTF

SEQ ID NO: 455853 - protein, 12 aa, Homo sapiens
  CDR3 for alpha chain variable domain of TCR clone 227927 (TRAV20, TRAJ33)
CAVRGSNYQLIW

SEQ ID NO: 455854 - protein, 15 aa, Homo sapiens
  CDR3 for beta chain variable domain of TCR clone 227927 (TRBV11-3, TRBJ2-3)
CASLKNGREGDTQYF

SEQ ID NO: 455855 - protein, 14 aa, Homo sapiens
  CDR3 for alpha chain variable domain of TCR clone 227928 (TRAV1-2, TRAJ16)
CAVNRSSDGEKLLF

SEQ ID NO: 455856 - protein, 15 aa, Homo sapiens
  CDR3 for beta chain variable domain of TCR clone 227928 (TRBV7-9, TRBJ1-6)
CASSSPGRGNSPLHF

SEQ ID NO: 455857 - protein, 12 aa, Homo sapiens
  CDR3 for alpha chain variable domain of TCR clone 227929 (TRAV16, TRAJ49)
CALNAGGNQFYF

SEQ ID NO: 455858 - protein, 14 aa, Homo sapiens
  CDR3 for beta chain variable domain of TCR clone 227929 (TRBV7-9, TRBJ2-1)
CASRPTGLRNEQFF

SEQ ID NO: 455859 - protein, 11 aa, Homo sapiens
  CDR3 for alpha chain variable domain of TCR clone 227930 (TRAV12-3, TRAJ27)
CAMANAGKSTF

SEQ ID NO: 455860 - protein, 13 aa, Homo sapiens
  CDR3 for beta chain variable domain of TCR clone 227930 (TRBV20-1, TRBJ1-1)
GSARVGGNTEAFF

SEQ ID NO: 455861 - protein, 15 aa, Homo sapiens
  CDR3 for alpha chain variable domain of TCR clone 227931 (TRAV12-1, TRAJ8)
CVVNVENKGFQKLVF

SEQ ID NO: 455862 - protein, 16 aa, Homo sapiens
  CDR3 for beta chain variable domain of TCR clone 227931 (TRBV7-2, TRBJ2-7)
CASSLEAGGPWYEQYF

SEQ ID NO: 455863 - protein, 11 aa, Homo sapiens
  CDR3 for alpha chain variable domain of TCR clone 227932 (TRAV1-2, TRAJ31)
CAVNNNARLMF

SEQ ID NO: 455864 - protein, 14 aa, Homo sapiens
  CDR3 for beta chain variable domain of TCR clone 227932 (TRBV6-1, TRBJ1-3)
CASVQGGGGNTMYF

SEQ ID NO: 455865 - protein, 17 aa, Homo sapiens
  CDR3 for alpha chain variable domain of TCR clone 227933 (TRAV38-2/DV8, TRAJ28)
CAFLTLYSGAGSYQLTF

SEQ ID NO: 455866 - protein, 14 aa, Homo sapiens
  CDR3 for beta chain variable domain of TCR clone 227933 (TRBV6-6, TRBJ2-7)
CASSYSGESYEQYF

SEQ ID NO: 455867 - protein, 13 aa, Homo sapiens
  CDR3 for alpha chain variable domain of TCR clone 227934 (TRAV3, TRAJ27)
CAVRPLGAGKSTF

SEQ ID NO: 455868 - protein, 14 aa, Homo sapiens
  CDR3 for beta chain variable domain of TCR clone 227934 (TRBV18, TRBJ2-7)
CASSPRGGAYEQYF

SEQ ID NO: 455869 - protein, 14 aa, Homo sapiens
  CDR3 for alpha chain variable domain of TCR clone 227935 (TRAV12-2, TRAJ45)
CAVNIGGGADGITF

SEQ ID NO: 455870 - protein, 17 aa, Homo sapiens
  CDR3 for beta chain variable domain of TCR clone 227935 (TRBV7-8, TRBJ2-6)
CASSAGTGGAGANVLTF

SEQ ID NO: 455871 - protein, 14 aa, Homo sapiens
  CDR3 for alpha chain variable domain of TCR clone 227936 (TRAV12-2, TRAJ15)
CAPHTGQAGTALIF

SEQ ID NO: 455872 - protein, 16 aa, Homo sapiens
  CDR3 for beta chain variable domain of TCR clone 227936 (TRBV5-1, TRBJ2-7)
CASSLEGLAGLYEQYF

SEQ ID NO: 455873 - protein, 15 aa, Homo sapiens
  CDR3 for alpha chain variable domain of TCR clone 227937 (TRAV12-3, TRAJ6)
CAMSATTGGGYIPTF

SEQ ID NO: 455874 - protein, 15 aa, Homo sapiens
  CDR3 for beta chain variable domain of TCR clone 227937 (TRBV28, TRBJ2-1)
CASSIIAGGRSEQFF

SEQ ID NO: 455875 - protein, 17 aa, Homo sapiens
  CDR3 for alpha chain variable domain of TCR clone 227938 (TRAV4, TRAJ18)
CLVVAAGRGSTLGRLYF

SEQ ID NO: 455876 - protein, 17 aa, Homo sapiens
  CDR3 for beta chain variable domain of TCR clone 227938 (TRBV28, TRBJ2-2)
CASSLATGMGDAGELFC

SEQ ID NO: 455877 - protein, 14 aa, Homo sapiens
  CDR3 for alpha chain variable domain of TCR clone 227939 (TRAV8-3, TRAJ4)
CAVGASGGYSKLIF

SEQ ID NO: 455878 - protein, 13 aa, Homo sapiens
  CDR3 for beta chain variable domain of TCR clone 227939 (TRBV18, TRBJ2-5)
CASSLQGQETQYF

SEQ ID NO: 455879 - protein, 15 aa, Homo sapiens
  CDR3 for alpha chain variable domain of TCR clone 227940 (TRAV25, TRAJ52)
CAWRPGGTSYGKLTF

SEQ ID NO: 455880 - protein, 16 aa, Homo sapiens
  CDR3 for beta chain variable domain of TCR clone 227940 (TRBV12-4, TRBJ1-5)
CASSSGPRGSNQPQHF

SEQ ID NO: 455881 - protein, 17 aa, Homo sapiens
  CDR3 for alpha chain variable domain of TCR clone 227941 (TRAV3, TRAJ42)
CAVRDRDYGGSQGNLIF

SEQ ID NO: 455882 - protein, 15 aa, Homo sapiens
  CDR3 for beta chain variable domain of TCR clone 227941 (TRBV20-1, TRBJ1-6)
CSARVQGQGVSPLHF

SEQ ID NO: 455883 - protein, 15 aa, Homo sapiens
  CDR3 for alpha chain variable domain of TCR clone 227942 (TRAV35, TRAJ40)
CAGQLGEAGTYKYIF

SEQ ID NO: 455884 - protein, 14 aa, Homo sapiens
  CDR3 for beta chain variable domain of TCR clone 227942 (TRBV7-3, TRBJ2-1)
CASSLTGGANEQFF

SEQ ID NO: 455885 - protein, 15 aa, Homo sapiens
  CDR3 for alpha chain variable domain of TCR clone 227943 (TRAV38-1, TRAJ37)
FAFIFGSGNTGKLIF

SEQ ID NO: 455886 - protein, 12 aa, Homo sapiens
  CDR3 for beta chain variable domain of TCR clone 227943 (TRBV7-9, TRBJ2-7)
CASSLKGYEQYF

SEQ ID NO: 455887 - protein, 14 aa, Homo sapiens
  CDR3 for alpha chain variable domain of TCR clone 227944 (TRAV1-2, TRAJ16)
CAVNRFSDGQKLLF

SEQ ID NO: 455888 - protein, 14 aa, Homo sapiens
  CDR3 for beta chain variable domain of TCR clone 227944 (TRBV6-5, TRBJ2-7)
CASSPHRGLREQYF

SEQ ID NO: 455889 - protein, 14 aa, Homo sapiens
  CDR3 for alpha chain variable domain of TCR clone 227945 (TRAV12-3, TRAJ10)
SHLPLTGGGNKLTF

SEQ ID NO: 455890 - protein, 13 aa, Homo sapiens
  CDR3 for beta chain variable domain of TCR clone 227945 (TRBV4-2, TRBJ1-1)
CASIQAGNTEAFF

SEQ ID NO: 455891 - protein, 14 aa, Homo sapiens
  CDR3 for alpha chain variable domain of TCR clone 227946 (TRAV3, TRAJ28)
GAVRRGAGSYQLTF

SEQ ID NO: 455892 - protein, 16 aa, Homo sapiens
  CDR3 for beta chain variable domain of TCR clone 227946 (TRBV4-1, TRBJ2-7)
CASSQEWTSGPLEQYF

SEQ ID NO: 455893 - protein, 14 aa, Homo sapiens
  CDR3 for alpha chain variable domain of TCR clone 227947 (TRAV36/DV7, TRAJ48)
CAQRRDFGNEKLTF

SEQ ID NO: 455894 - protein, 14 aa, Homo sapiens
  CDR3 for beta chain variable domain of TCR clone 227947 (TRBV28, TRBJ2-4)
CASTQVTGVNIQFF

SEQ ID NO: 455895 - protein, 13 aa, Homo sapiens
  CDR3 for alpha chain variable domain of TCR clone 227948 (TRAV30, TRAJ49)
CGTEPNTGNQFYF

SEQ ID NO: 455896 - protein, 14 aa, Homo sapiens
  CDR3 for beta chain variable domain of TCR clone 227948 (TRBV12-5, TRBJ2-5)
CASGLEGYQETQYF

SEQ ID NO: 455897 - protein, 14 aa, Homo sapiens
  CDR3 for alpha chain variable domain of TCR clone 227949 (TRAV14/DV4, TRAJ42)
CPRGSLRSQGNLIF

SEQ ID NO: 455898 - protein, 14 aa, Homo sapiens
  CDR3 for beta chain variable domain of TCR clone 227949 (TRBV19, TRBJ2-5)
CASSMTGQQETQYF

SEQ ID NO: 455899 - protein, 14 aa, Homo sapiens
  CDR3 for alpha chain variable domain of TCR clone 227950 (TRAV23/DV6, TRAJ37)
CAASTSSNTGKQIF

SEQ ID NO: 455900 - protein, 12 aa, Homo sapiens
  CDR3 for beta chain variable domain of TCR clone 227950 (TRBV27, TRBJ2-2)
CASKLFTGELFF

SEQ ID NO: 455901 - protein, 15 aa, Homo sapiens
  CDR3 for alpha chain variable domain of TCR clone 227951 (TRAV25, TRAJ43)
CAVFMRYGAGTRLTV

SEQ ID NO: 455902 - protein, 13 aa, Homo sapiens
  CDR3 for beta chain variable domain of TCR clone 227951 (TRBV7-9, TRBJ1-2)
CASSLKQNYGYTF

SEQ ID NO: 455903 - protein, 12 aa, Homo sapiens
  CDR3 for alpha chain variable domain of TCR clone 227952 (TRAV21, TRAJ30)
CAVMNRDDKIIF

SEQ ID NO: 455904 - protein, 15 aa, Homo sapiens
  CDR3 for beta chain variable domain of TCR clone 227952 (TRBV11-2, TRBJ2-2)
CASSSDRVNAGELFF

SEQ ID NO: 455905 - protein, 13 aa, Homo sapiens
  CDR3 for alpha chain variable domain of TCR clone 227953 (TRAV26-1, TRAJ35)
CIVSRRVGELLHC

SEQ ID NO: 455906 - protein, 17 aa, Homo sapiens
  CDR3 for beta chain variable domain of TCR clone 227953 (TRBV7-9, TRBJ2-7)
CASSFDGSRGGAYEQYF

SEQ ID NO: 455907 - protein, 16 aa, Homo sapiens
  CDR3 for alpha chain variable domain of TCR clone 227954 (TRAV21, TRAJ52)
CAVTNAGGTSYGKLTF

SEQ ID NO: 455908 - protein, 16 aa, Homo sapiens
  CDR3 for beta chain variable domain of TCR clone 227954 (TRBV2, TRBJ2-1)
CASSGGGSLSYNEQFF

SEQ ID NO: 455909 - protein, 13 aa, Homo sapiens
  CDR3 for alpha chain variable domain of TCR clone 227955 (TRAV8-6, TRAJ33)
CAVSEGSNYQLIW

SEQ ID NO: 455910 - protein, 17 aa, Homo sapiens
  CDR3 for beta chain variable domain of TCR clone 227955 (TRBV5-1, TRBJ2-3)
CASSLGASTSGTDTQYF

SEQ ID NO: 455911 - protein, 16 aa, Homo sapiens
  CDR3 for alpha chain variable domain of TCR clone 227956 (TRAV12-1, TRAJ43)
CVVNPHRLGAGTRLTV

SEQ ID NO: 455912 - protein, 13 aa, Homo sapiens
  CDR3 for beta chain variable domain of TCR clone 227956 (TRBV20-1, TRBJ1-1)
CSARGGGNTEAFF

SEQ ID NO: 455913 - protein, 11 aa, Homo sapiens
  CDR3 for alpha chain variable domain of TCR clone 227957 (TRAV12-2, TRAJ31)
CAVTRWARLMF

SEQ ID NO: 455914 - protein, 15 aa, Homo sapiens
  CDR3 for beta chain variable domain of TCR clone 227957 (TRBV19, TRBJ2-7)
CASSIGGGLVNGQYF

SEQ ID NO: 455915 - protein, 15 aa, Homo sapiens
  CDR3 for alpha chain variable domain of TCR clone 227958 (TRAV26-1, TRAJ37)
CIVRVATGNTGKLIF

SEQ ID NO: 455916 - protein, 12 aa, Homo sapiens
  CDR3 for beta chain variable domain of TCR clone 227958 (TRBV4-1, TRBJ2-3)
CASSQGTDTQYF

SEQ ID NO: 455917 - protein, 16 aa, Homo sapiens
  CDR3 for alpha chain variable domain of TCR clone 227959 (TRAV21, TRAJ37)
CAVRTAGSSNTGKLIF

SEQ ID NO: 455918 - protein, 13 aa, Homo sapiens
  CDR3 for beta chain variable domain of TCR clone 227959 (TRBV12-4, TRBJ1-2)
CASSSGPNYGYTF

SEQ ID NO: 455919 - protein, 17 aa, Homo sapiens
  CDR3 for alpha chain variable domain of TCR clone 227960 (TRAV38-2/DV8, TRAJ57)
CAYRSVLTQGGSEKLVF

SEQ ID NO: 455920 - protein, 16 aa, Homo sapiens
  CDR3 for beta chain variable domain of TCR clone 227960 (TRBV7-3, TRBJ2-2)
CASSLKRGTLSGEMFF

SEQ ID NO: 455921 - protein, 14 aa, Homo sapiens
  CDR3 for alpha chain variable domain of TCR clone 227961 (TRAV13-1, TRAJ5)
CSAHPDTGRRALTF

SEQ ID NO: 455922 - protein, 14 aa, Homo sapiens
  CDR3 for beta chain variable domain of TCR clone 227961 (TRBV6-4, TRBJ1-1)
CASRADREGTEAFF

SEQ ID NO: 455923 - protein, 14 aa, Homo sapiens
  CDR3 for alpha chain variable domain of TCR clone 227962 (TRAV1-2, TRAJ8)
CAVREDTGFQKLVL

SEQ ID NO: 455924 - protein, 13 aa, Homo sapiens
  CDR3 for beta chain variable domain of TCR clone 227962 (TRBV12-4, TRBJ2-5)
CASRKRGKETQYF

SEQ ID NO: 455925 - protein, 14 aa, Homo sapiens
  CDR3 for alpha chain variable domain of TCR clone 227963 (TRAV26-1, TRAJ45)
CIEVTGGGADGLTF

SEQ ID NO: 455926 - protein, 13 aa, Homo sapiens
  CDR3 for beta chain variable domain of TCR clone 227963 (TRBV7-9, TRBJ2-7)
CASSFYGSYEQYF

SEQ ID NO: 455927 - protein, 14 aa, Homo sapiens
  CDR3 for alpha chain variable domain of TCR clone 227964 (TRAV14/DV4, TRAJ54)
YAMSPIQGAQKLVF

SEQ ID NO: 455928 - protein, 15 aa, Homo sapiens
  CDR3 for beta chain variable domain of TCR clone 227964 (TRBV5-1, TRBJ2-3)
CASRSNREGTDTQYF

SEQ ID NO: 455929 - protein, 16 aa, Homo sapiens
  CDR3 for alpha chain variable domain of TCR clone 227965 (TRAV3, TRAJ17)
CALYSPRGAAGNKLTF

SEQ ID NO: 455930 - protein, 16 aa, Homo sapiens
  CDR3 for beta chain variable domain of TCR clone 227965 (TRBV7-6, TRBJ2-1)
CASSAPGPSSYNEQFF

SEQ ID NO: 455931 - protein, 14 aa, Homo sapiens
  CDR3 for alpha chain variable domain of TCR clone 227966 (TRAV34, TRAJ44)
RGADGTGPASKLTF

SEQ ID NO: 455932 - protein, 12 aa, Homo sapiens
  CDR3 for beta chain variable domain of TCR clone 227966 (TRBV11-2, TRBJ2-2)
CASSLGGGELFF

SEQ ID NO: 455933 - protein, 13 aa, Homo sapiens
  CDR3 for alpha chain variable domain of TCR clone 227967 (TRAV39, TRAJ58)
CAGEETSGSRLTF

SEQ ID NO: 455934 - protein, 13 aa, Homo sapiens
  CDR3 for beta chain variable domain of TCR clone 227967 (TRBV15, TRBJ2-7)
CATSTTGHYVQYF

SEQ ID NO: 455935 - protein, 13 aa, Homo sapiens
  CDR3 for alpha chain variable domain of TCR clone 227968 (TRAV1-1, TRAJ9)
CAAKNTGGFKTIF

SEQ ID NO: 455936 - protein, 14 aa, Homo sapiens
  CDR3 for beta chain variable domain of TCR clone 227968 (TRBV28, TRBJ1-5)
CASSRTGLNQPQHF

SEQ ID NO: 455937 - protein, 19 aa, Homo sapiens
  CDR3 for alpha chain variable domain of TCR clone 227969 (TRAV3, TRAJ6)
CAVRYRNPSRSGGSYIPTF

SEQ ID NO: 455938 - protein, 15 aa, Homo sapiens
  CDR3 for beta chain variable domain of TCR clone 227969 (TRBV18, TRBJ2-7)
CASSPTFMDSYEQYF

SEQ ID NO: 455939 - protein, 16 aa, Homo sapiens
  CDR3 for alpha chain variable domain of TCR clone 227970 (TRAV13-1, TRAJ18)
CAASRMRGSTLGRLYF

SEQ ID NO: 455940 - protein, 12 aa, Homo sapiens
  CDR3 for beta chain variable domain of TCR clone 227970 (TRBV11-2, TRBJ2-5)
CASSPPAETQYF

SEQ ID NO: 455941 - protein, 12 aa, Homo sapiens
  CDR3 for alpha chain variable domain of TCR clone 227971 (TRAV21, TRAJ11)
CAATSGYSTLTF

SEQ ID NO: 455942 - protein, 14 aa, Homo sapiens
  CDR3 for beta chain variable domain of TCR clone 227971 (TRBV20-1, TRBJ2-7)
SAVPQSWRESEQYF

SEQ ID NO: 455943 - protein, 13 aa, Homo sapiens
  CDR3 for alpha chain variable domain of TCR clone 227972 (TRAV2, TRAJ13)
CAVESGGYRKVTF

SEQ ID NO: 455944 - protein, 13 aa, Homo sapiens
  CDR3 for beta chain variable domain of TCR clone 227972 (TRBV28, TRBJ2-5)
CASSFAGGETQYV

SEQ ID NO: 455945 - protein, 15 aa, Homo sapiens
  CDR3 for alpha chain variable domain of TCR clone 227973 (TRAV12-1, TRAJ36)
CVVNEHQTGANNLFF

SEQ ID NO: 455946 - protein, 13 aa, Homo sapiens
  CDR3 for beta chain variable domain of TCR clone 227973 (TRBV29-1, TRBJ2-3)
SAALQGGADTQYF

SEQ ID NO: 455947 - protein, 13 aa, Homo sapiens
  CDR3 for alpha chain variable domain of TCR clone 227974 (TRAV1-2, TRAJ9)
CAALNTGGFKTIF

SEQ ID NO: 455948 - protein, 14 aa, Homo sapiens
  CDR3 for beta chain variable domain of TCR clone 227974 (TRBV7-2, TRBJ2-1)
CASSPGTFYNEQFF

SEQ ID NO: 455949 - protein, 12 aa, Homo sapiens
  CDR3 for alpha chain variable domain of TCR clone 227975 (TRAV25, TRAJ35)
CAGIGFGNVLHC

SEQ ID NO: 455950 - protein, 13 aa, Homo sapiens
  CDR3 for beta chain variable domain of TCR clone 227975 (TRBV12-4, TRBJ1-2)
CASSLDSNYGYTF

SEQ ID NO: 455951 - protein, 14 aa, Homo sapiens
  CDR3 for alpha chain variable domain of TCR clone 227976 (TRAV16, TRAJ57)
CALPTQGGSEKLVF

SEQ ID NO: 455952 - protein, 15 aa, Homo sapiens
  CDR3 for beta chain variable domain of TCR clone 227976 (TRBV28, TRBJ1-3)
CASWRGHLSGNTIYF

SEQ ID NO: 455953 - protein, 18 aa, Homo sapiens
  CDR3 for alpha chain variable domain of TCR clone 227977 (TRAV26-1, TRAJ22)
CIVRVALISSGSARQLTF

SEQ ID NO: 455954 - protein, 15 aa, Homo sapiens
  CDR3 for beta chain variable domain of TCR clone 227977 (TRBV7-9, TRBJ1-6)
CASSSPGRGNSPLYF

SEQ ID NO: 455955 - protein, 12 aa, Homo sapiens
  CDR3 for alpha chain variable domain of TCR clone 227978 (TRAV29/DV5, TRAJ49)
CAATDTGNRFYF

SEQ ID NO: 455956 - protein, 12 aa, Homo sapiens
  CDR3 for beta chain variable domain of TCR clone 227978 (TRBV12-4, TRBJ2-7)
CASSLGGYEQYF

SEQ ID NO: 455957 - protein, 15 aa, Homo sapiens
  CDR3 for alpha chain variable domain of TCR clone 227979 (TRAV12-3, TRAJ42)
CAMITSVGSQGNLIF

SEQ ID NO: 455958 - protein, 15 aa, Homo sapiens
  CDR3 for beta chain variable domain of TCR clone 227979 (TRBV29-1, TRBJ2-7)
SAAPGTDLTSSTSGR

SEQ ID NO: 455959 - protein, 14 aa, Homo sapiens
  CDR3 for alpha chain variable domain of TCR clone 227980 (TRAV20, TRAJ29)
CAVQAWVGNTPLVF

SEQ ID NO: 455960 - protein, 14 aa, Homo sapiens
  CDR3 for beta chain variable domain of TCR clone 227980 (TRBV11-2, TRBJ2-3)
CASSKLARTDTQYF

SEQ ID NO: 455961 - protein, 13 aa, Homo sapiens
  CDR3 for alpha chain variable domain of TCR clone 227981 (TRAV3, TRAJ21)
CAVREPDFNKFYF

SEQ ID NO: 455962 - protein, 18 aa, Homo sapiens
  CDR3 for beta chain variable domain of TCR clone 227981 (TRBV11-2, TRBJ2-3)
CASSLGGASRGATNTQYF

SEQ ID NO: 455963 - protein, 14 aa, Homo sapiens
  CDR3 for alpha chain variable domain of TCR clone 227982 (TRAV38-1, TRAJ40)
CALRPTSGTYKYII

SEQ ID NO: 455964 - protein, 14 aa, Homo sapiens
  CDR3 for beta chain variable domain of TCR clone 227982 (TRBV25-1, TRBJ1-1)
CASTHLGGNTEAFF

SEQ ID NO: 455965 - protein, 14 aa, Homo sapiens
  CDR3 for alpha chain variable domain of TCR clone 227983 (TRAV12-2, TRAJ40)
CAVKIPSGTYKYIF

SEQ ID NO: 455966 - protein, 12 aa, Homo sapiens
  CDR3 for beta chain variable domain of TCR clone 227983 (TRBV2, TRBJ2-5)
CASRGLEETQYF

SEQ ID NO: 455967 - protein, 14 aa, Homo sapiens
  CDR3 for alpha chain variable domain of TCR clone 227984 (TRAV12-3, TRAJ9)
CAMSPNTGGIKTIF

SEQ ID NO: 455968 - protein, 12 aa, Homo sapiens
  CDR3 for beta chain variable domain of TCR clone 227984 (TRBV19, TRBJ1-5)
CASSIAQQPQHF

SEQ ID NO: 455969 - protein, 14 aa, Homo sapiens
  CDR3 for alpha chain variable domain of TCR clone 227985 (TRAV21, TRAJ4)
CAAPGVGGHNKLIF

SEQ ID NO: 455970 - protein, 13 aa, Homo sapiens
  CDR3 for beta chain variable domain of TCR clone 227985 (TRBV7-3, TRBJ2-1)
CASSPGSYNEQFF

SEQ ID NO: 455971 - protein, 16 aa, Homo sapiens
  CDR3 for alpha chain variable domain of TCR clone 227986 (TRAV30, TRAJ24)
CGTEIVDADSWGKFQF

SEQ ID NO: 455972 - protein, 10 aa, Homo sapiens
  CDR3 for beta chain variable domain of TCR clone 227986 (TRBV5-3, TRBJ2-5)
AKSGEETQYF

SEQ ID NO: 455973 - protein, 16 aa, Homo sapiens
  CDR3 for alpha chain variable domain of TCR clone 227987 (TRAV23/DV6, TRAJ9)
CAASIGGNTGGVKTIF

SEQ ID NO: 455974 - protein, 11 aa, Homo sapiens
  CDR3 for beta chain variable domain of TCR clone 227987 (TRBV11-2, TRBJ2-2)
CASSLPGELFF

SEQ ID NO: 455975 - protein, 17 aa, Homo sapiens
  CDR3 for alpha chain variable domain of TCR clone 227988 (TRAV3, TRAJ38)
CAVRDCLNAGNNRKLIW

SEQ ID NO: 455976 - protein, 16 aa, Homo sapiens
  CDR3 for beta chain variable domain of TCR clone 227988 (TRBV20-1, TRBJ1-4)
CSARPYGGELNENLFF

SEQ ID NO: 455977 - protein, 13 aa, Homo sapiens
  CDR3 for alpha chain variable domain of TCR clone 227989 (TRAV2, TRAJ13)
CAVESGGYQKVNF

SEQ ID NO: 455978 - protein, 12 aa, Homo sapiens
  CDR3 for beta chain variable domain of TCR clone 227989 (TRBV29-1, TRBJ2-3)
CSVTGGADTQYF

SEQ ID NO: 455979 - protein, 14 aa, Homo sapiens
  CDR3 for alpha chain variable domain of TCR clone 227990 (TRAV13-2, TRAJ9)
CAENLENGGFKTIF

SEQ ID NO: 455980 - protein, 16 aa, Homo sapiens
  CDR3 for beta chain variable domain of TCR clone 227990 (TRBV28, TRBJ2-5)
CASSFSPAGGWETQYF

SEQ ID NO: 455981 - protein, 14 aa, Homo sapiens
  CDR3 for alpha chain variable domain of TCR clone 227991 (TRAV1-2, TRAJ16)
CAVNRFSDGQKLLF

SEQ ID NO: 455982 - protein, 16 aa, Homo sapiens
  CDR3 for beta chain variable domain of TCR clone 227991 (TRBV19, TRBJ2-1)
CASSKAGPSSYIEQFF

SEQ ID NO: 455983 - protein, 13 aa, Homo sapiens
  CDR3 for alpha chain variable domain of TCR clone 227992 (TRAV12-1, TRAJ29)
CVVNGPGNTPLVF

SEQ ID NO: 455984 - protein, 12 aa, Homo sapiens
  CDR3 for beta chain variable domain of TCR clone 227992 (TRBV11-2, TRBJ2-2)
CASSLPTGELFF

SEQ ID NO: 455985 - protein, 15 aa, Homo sapiens
  CDR3 for alpha chain variable domain of TCR clone 227993 (TRAV13-2, TRAJ10)
CAENRDTGGGKKLTF

SEQ ID NO: 455986 - protein, 16 aa, Homo sapiens
  CDR3 for beta chain variable domain of TCR clone 227993 (TRBV2, TRBJ1-3)
CASSRTGGSTGNTIYF

SEQ ID NO: 455987 - protein, 15 aa, Homo sapiens
  CDR3 for alpha chain variable domain of TCR clone 227994 (TRAV21, TRAJ53)
CATLISGGSNYKLTF

SEQ ID NO: 455988 - protein, 16 aa, Homo sapiens
  CDR3 for beta chain variable domain of TCR clone 227994 (TRBV12-4, TRBJ1-5)
GASSRPVGGSNQPQHF

SEQ ID NO: 455989 - protein, 19 aa, Homo sapiens
  CDR3 for alpha chain variable domain of TCR clone 227995 (TRAV1-2, TRAJ18)
CLLPLCCERRGSTLGWLYF

SEQ ID NO: 455990 - protein, 15 aa, Homo sapiens
  CDR3 for beta chain variable domain of TCR clone 227995 (TRBV20-1, TRBJ2-1)
CSAEGGLLAGDEQFF

SEQ ID NO: 455991 - protein, 15 aa, Homo sapiens
  CDR3 for alpha chain variable domain of TCR clone 227996 (TRAV13-1, TRAJ11)
CAPSNRNSGYSTLTF

SEQ ID NO: 455992 - protein, 11 aa, Homo sapiens
  CDR3 for beta chain variable domain of TCR clone 227996 (TRBV20-1, TRBJ2-7)
CSARLSYEQYF

SEQ ID NO: 455993 - protein, 11 aa, Homo sapiens
  CDR3 for alpha chain variable domain of TCR clone 227997 (TRAV1-2, TRAJ20)
CAVANDYKLSF

SEQ ID NO: 455994 - protein, 18 aa, Homo sapiens
  CDR3 for beta chain variable domain of TCR clone 227997 (TRBV20-1, TRBJ2-6)
CSAETTPTHGSGANVMTF

SEQ ID NO: 455995 - protein, 13 aa, Homo sapiens
  CDR3 for alpha chain variable domain of TCR clone 227998 (TRAV39, TRAJ58)
CAGEETSGSRLTF

SEQ ID NO: 455996 - protein, 15 aa, Homo sapiens
  CDR3 for beta chain variable domain of TCR clone 227998 (TRBV20-1, TRBJ2-7)
CSARDRVAGMDEQYF

SEQ ID NO: 455997 - protein, 19 aa, Homo sapiens
  CDR3 for alpha chain variable domain of TCR clone 227999 (TRAV38-1, TRAJ53)
CAFMKHGLESGGCNYKLTF

SEQ ID NO: 455998 - protein, 13 aa, Homo sapiens
  CDR3 for beta chain variable domain of TCR clone 227999 (TRBV19, TRBJ2-7)
CASSPRQSYEQYF

SEQ ID NO: 455999 - protein, 17 aa, Homo sapiens
  CDR3 for alpha chain variable domain of TCR clone 228000 (TRAV8-2, )
CVVNNQNPDPAVYQLRD

SEQ ID NO: 456000 - protein, 14 aa, Homo sapiens
  CDR3 for beta chain variable domain of TCR clone 228000 (TRBV7-9, TRBJ2-5)
CASSLVGGEETQYF

SEQ ID NO: 456001 - protein, 16 aa, Homo sapiens
  CDR3 for alpha chain variable domain of TCR clone 228001 (TRAV8-1, TRAJ42)
CAMTSRYGGSQGNLIF

SEQ ID NO: 456002 - protein, 12 aa, Homo sapiens
  CDR3 for beta chain variable domain of TCR clone 228001 (TRBV6-3, TRBJ2-7)
CASSLGRRELYF

SEQ ID NO: 456003 - protein, 12 aa, Homo sapiens
  CDR3 for alpha chain variable domain of TCR clone 228002 (TRAV13-2, TRAJ8)
CAPWLGFQKLVF

SEQ ID NO: 456004 - protein, 14 aa, Homo sapiens
  CDR3 for beta chain variable domain of TCR clone 228002 (TRBV7-8, TRBJ2-3)
RASSLEAGTDTQYF

SEQ ID NO: 456005 - protein, 13 aa, Homo sapiens
  CDR3 for alpha chain variable domain of TCR clone 228003 (TRAV13-1, TRAJ6)
CAARRGGSYIPSF

SEQ ID NO: 456006 - protein, 16 aa, Homo sapiens
  CDR3 for beta chain variable domain of TCR clone 228003 (TRBV7-9, TRBJ2-2)
CASSLATGVGTGELFF

SEQ ID NO: 456007 - protein, 15 aa, Homo sapiens
  CDR3 for alpha chain variable domain of TCR clone 228004 (TRAV21, TRAJ24)
CAARSSTDSWGKLQF

SEQ ID NO: 456008 - protein, 12 aa, Homo sapiens
  CDR3 for beta chain variable domain of TCR clone 228004 (TRBV12-4, TRBJ2-4)
CASSSSGNIQYF

SEQ ID NO: 456009 - protein, 14 aa, Homo sapiens
  CDR3 for alpha chain variable domain of TCR clone 228005 (TRAV26-1, TRAJ38)
CIADNAGNNRKLIW

SEQ ID NO: 456010 - protein, 13 aa, Homo sapiens
  CDR3 for beta chain variable domain of TCR clone 228005 (TRBV4-2, TRBJ2-1)
CASSPGTYNEQFF

SEQ ID NO: 456011 - protein, 18 aa, Homo sapiens
  CDR3 for alpha chain variable domain of TCR clone 228006 (TRAV26-1, TRAJ57)
CIVRVALRFQGGSEKLAF

SEQ ID NO: 456012 - protein, 15 aa, Homo sapiens
  CDR3 for beta chain variable domain of TCR clone 228006 (TRBV27, TRBJ2-1)
CASSNGGGSSNEQFF

SEQ ID NO: 456013 - protein, 16 aa, Homo sapiens
  CDR3 for alpha chain variable domain of TCR clone 228007 (TRAV3, TRAJ37)
CAVRGKGSGNTGKLII

SEQ ID NO: 456014 - protein, 15 aa, Homo sapiens
  CDR3 for beta chain variable domain of TCR clone 228007 (TRBV5-1, TRBJ2-7)
CASSLNGGPAREQYF

SEQ ID NO: 456015 - protein, 16 aa, Homo sapiens
  CDR3 for alpha chain variable domain of TCR clone 228008 (TRAV23/DV6, TRAJ9)
CAASIGGNTGGFKTIF

SEQ ID NO: 456016 - protein, 14 aa, Homo sapiens
  CDR3 for beta chain variable domain of TCR clone 228008 (TRBV7-2, TRBJ2-7)
CASSLGRASYEQYF

SEQ ID NO: 456017 - protein, 14 aa, Homo sapiens
  CDR3 for alpha chain variable domain of TCR clone 228009 (TRAV8-4, TRAJ9)
CAVRINTGGFKNIF

SEQ ID NO: 456018 - protein, 15 aa, Homo sapiens
  CDR3 for beta chain variable domain of TCR clone 228009 (TRBV10-2, TRBJ2-6)
CASSEQGTGANDLTF

SEQ ID NO: 456019 - protein, 15 aa, Homo sapiens
  CDR3 for alpha chain variable domain of TCR clone 228010 (TRAV8-3, TRAJ41)
CAVGSNSNSGYELNF

SEQ ID NO: 456020 - protein, 17 aa, Homo sapiens
  CDR3 for beta chain variable domain of TCR clone 228010 (TRBV25-1, TRBJ2-1)
CASSAYGRGRGVYEQFF

SEQ ID NO: 456021 - protein, 17 aa, Homo sapiens
  CDR3 for alpha chain variable domain of TCR clone 228011 (TRAV3, TRAJ6)
CAVRDGPRAGGSYIPTF

SEQ ID NO: 456022 - protein, 16 aa, Homo sapiens
  CDR3 for beta chain variable domain of TCR clone 228011 (TRBV28, TRBJ2-7)
CASSFLGRLAGNEQYV

SEQ ID NO: 456023 - protein, 12 aa, Homo sapiens
  CDR3 for alpha chain variable domain of TCR clone 228012 (TRAV12-2, TRAJ52)
IGGGTSYGKLTF

SEQ ID NO: 456024 - protein, 12 aa, Homo sapiens
  CDR3 for beta chain variable domain of TCR clone 228012 (TRBV11-2, TRBJ2-4)
CASSSASGSEYF

SEQ ID NO: 456025 - protein, 14 aa, Homo sapiens
  CDR3 for alpha chain variable domain of TCR clone 228013 (TRAV17, TRAJ35)
CATDRPGFGNVLHC

SEQ ID NO: 456026 - protein, 14 aa, Homo sapiens
  CDR3 for beta chain variable domain of TCR clone 228013 (TRBV7-2, TRBJ2-7)
CASRSQGAAYEQYF

SEQ ID NO: 456027 - protein, 12 aa, Homo sapiens
  CDR3 for alpha chain variable domain of TCR clone 228014 (TRAV21, TRAJ3)
CCFYSSASKIIF

SEQ ID NO: 456028 - protein, 13 aa, Homo sapiens
  CDR3 for beta chain variable domain of TCR clone 228014 (TRBV27, TRBJ1-4)
CASSLMGDEKLFF

SEQ ID NO: 456029 - protein, 15 aa, Homo sapiens
  CDR3 for alpha chain variable domain of TCR clone 228015 (TRAV12-3, TRAJ6)
CAMSATTGGIYIPTF

SEQ ID NO: 456030 - protein, 16 aa, Homo sapiens
  CDR3 for beta chain variable domain of TCR clone 228015 (TRBV7-6, TRBJ2-7)
CASSGGTGALSYEQYF

SEQ ID NO: 456031 - protein, 16 aa, Homo sapiens
  CDR3 for alpha chain variable domain of TCR clone 228016 (TRAV3, TRAJ10)
CAVRDMNEGGGNKLTF

SEQ ID NO: 456032 - protein, 16 aa, Homo sapiens
  CDR3 for beta chain variable domain of TCR clone 228016 (TRBV6-3, TRBJ1-2)
CASSYSRRASNYGYTF

SEQ ID NO: 456033 - protein, 14 aa, Homo sapiens
  CDR3 for alpha chain variable domain of TCR clone 228017 (TRAV2, TRAJ9)
CAVEDRSGGFKTIF

SEQ ID NO: 456034 - protein, 15 aa, Homo sapiens
  CDR3 for beta chain variable domain of TCR clone 228017 (TRBV28, TRBJ2-5)
CASSPGQGSIETQYF

SEQ ID NO: 456035 - protein, 12 aa, Homo sapiens
  CDR3 for alpha chain variable domain of TCR clone 228018 (TRAV21, TRAJ33)
CAKMDSNYKLLW

SEQ ID NO: 456036 - protein, 14 aa, Homo sapiens
  CDR3 for beta chain variable domain of TCR clone 228018 (TRBV2, TRBJ2-7)
CASSLTSGGYEQYF

SEQ ID NO: 456037 - protein, 13 aa, Homo sapiens
  CDR3 for alpha chain variable domain of TCR clone 228019 (TRAV12-1, TRAJ22)
CVVYSGSARQLTF

SEQ ID NO: 456038 - protein, 13 aa, Homo sapiens
  CDR3 for beta chain variable domain of TCR clone 228019 (TRBV5-7, TRBJ2-3)
CASSLGRTDTQYF

SEQ ID NO: 456039 - protein, 15 aa, Homo sapiens
  CDR3 for alpha chain variable domain of TCR clone 228020 (TRAV3, TRAJ5)
CAVRDLDTGRRALTF

SEQ ID NO: 456040 - protein, 15 aa, Homo sapiens
  CDR3 for beta chain variable domain of TCR clone 228020 (TRBV11-2, TRBJ2-1)
CASTHGTGIYNEQSF

SEQ ID NO: 456041 - protein, 15 aa, Homo sapiens
  CDR3 for alpha chain variable domain of TCR clone 228021 (TRAV8-3, TRAJ45)
RASSYSGGGSDGLTF

SEQ ID NO: 456042 - protein, 13 aa, Homo sapiens
  CDR3 for beta chain variable domain of TCR clone 228021 (TRBV10-3, TRBJ2-7)
CASKLAVNYEQYF

SEQ ID NO: 456043 - protein, 18 aa, Homo sapiens
  CDR3 for alpha chain variable domain of TCR clone 228022 (TRAV26-2, TRAJ17)
CCVLPHPAIKAAGNKLTF

SEQ ID NO: 456044 - protein, 12 aa, Homo sapiens
  CDR3 for beta chain variable domain of TCR clone 228022 (TRBV29-1, TRBJ2-7)
CSARDRPYEQYF

SEQ ID NO: 456045 - protein, 12 aa, Homo sapiens
  CDR3 for alpha chain variable domain of TCR clone 228023 (TRAV1-2, TRAJ17)
CAVRAAGNKLTF

SEQ ID NO: 456046 - protein, 16 aa, Homo sapiens
  CDR3 for beta chain variable domain of TCR clone 228023 (TRBV20-1, TRBJ2-1)
CIAPGLAGSYSDEQFF

SEQ ID NO: 456047 - protein, 12 aa, Homo sapiens
  CDR3 for alpha chain variable domain of TCR clone 228024 (TRAV25, TRAJ11)
CAGASGYSTLTF

SEQ ID NO: 456048 - protein, 15 aa, Homo sapiens
  CDR3 for beta chain variable domain of TCR clone 228024 (TRBV5-5, TRBJ1-5)
CASSLKGGGEQPQHF

SEQ ID NO: 456049 - protein, 14 aa, Homo sapiens
  CDR3 for alpha chain variable domain of TCR clone 228025 (TRAV20, TRAJ56)
CAVQFGGANSKLTF

SEQ ID NO: 456050 - protein, 14 aa, Homo sapiens
  CDR3 for beta chain variable domain of TCR clone 228025 (TRBV20-1, TRBJ2-7)
CSVKRGRGSYEQYF

SEQ ID NO: 456051 - protein, 15 aa, Homo sapiens
  CDR3 for alpha chain variable domain of TCR clone 228026 (TRAV3, TRAJ20)
CAVRDIKLSDYKLTF

SEQ ID NO: 456052 - protein, 18 aa, Homo sapiens
  CDR3 for beta chain variable domain of TCR clone 228026 (TRBV20-1, TRBJ2-5)
CSQTGDSGRLGGKETQYF

SEQ ID NO: 456053 - protein, 14 aa, Homo sapiens
  CDR3 for alpha chain variable domain of TCR clone 228027 (TRAV8-3, TRAJ9)
CAVVYNTGGFQTIF

SEQ ID NO: 456054 - protein, 14 aa, Homo sapiens
  CDR3 for beta chain variable domain of TCR clone 228027 (TRBV7-3, TRBJ2-2)
CASSSGGYTGELFF

SEQ ID NO: 456055 - protein, 15 aa, Homo sapiens
  CDR3 for alpha chain variable domain of TCR clone 228028 (TRAV12-2, TRAJ45)
CAVLLGGGGADGLTF

SEQ ID NO: 456056 - protein, 15 aa, Homo sapiens
  CDR3 for beta chain variable domain of TCR clone 228028 (TRBV7-2, TRBJ2-1)
CASSLASGRVNEHFF

SEQ ID NO: 456057 - protein, 13 aa, Homo sapiens
  CDR3 for alpha chain variable domain of TCR clone 228029 (TRAV17, TRAJ26)
CSTVDNYGQNFVF

SEQ ID NO: 456058 - protein, 16 aa, Homo sapiens
  CDR3 for beta chain variable domain of TCR clone 228029 (TRBV2, TRBJ2-1)
CASSVGGSLSYNEQFF

SEQ ID NO: 456059 - protein, 15 aa, Homo sapiens
  CDR3 for alpha chain variable domain of TCR clone 228030 (TRAV27, TRAJ38)
CAGRFNAGNNRKRIW

SEQ ID NO: 456060 - protein, 12 aa, Homo sapiens
  CDR3 for beta chain variable domain of TCR clone 228030 (TRBV11-2, TRBJ2-2)
CASSLPTGELFF

SEQ ID NO: 456061 - protein, 16 aa, Homo sapiens
  CDR3 for alpha chain variable domain of TCR clone 228031 (TRAV17, TRAJ53)
CATDALSGGSNYKLTF

SEQ ID NO: 456062 - protein, 15 aa, Homo sapiens
  CDR3 for beta chain variable domain of TCR clone 228031 (TRBV9, TRBJ1-3)
CASSVTGLSGNTIYF

SEQ ID NO: 456063 - protein, 13 aa, Homo sapiens
  CDR3 for alpha chain variable domain of TCR clone 228032 (TRAV13-1, TRAJ12)
CAASPDSSYELIF

SEQ ID NO: 456064 - protein, 16 aa, Homo sapiens
  CDR3 for beta chain variable domain of TCR clone 228032 (TRBV15, TRBJ2-1)
CATSRERLAGAYEQFF

SEQ ID NO: 456065 - protein, 13 aa, Homo sapiens
  CDR3 for alpha chain variable domain of TCR clone 228033 (TRAV26-1, TRAJ36)
CIAVRRGANNLFL

SEQ ID NO: 456066 - protein, 19 aa, Homo sapiens
  CDR3 for beta chain variable domain of TCR clone 228033 (TRBV27, TRBJ2-1)
CASSLEILSPGAAGNEQFF

SEQ ID NO: 456067 - protein, 17 aa, Homo sapiens
  CDR3 for alpha chain variable domain of TCR clone 228034 (TRAV3, TRAJ6)
CAVRDGPRAGGSYIPTY

SEQ ID NO: 456068 - protein, 14 aa, Homo sapiens
  CDR3 for beta chain variable domain of TCR clone 228034 (TRBV7-2, TRBJ2-7)
CASRPKTSFYEQYF

SEQ ID NO: 456069 - protein, 14 aa, Homo sapiens
  CDR3 for alpha chain variable domain of TCR clone 228035 (TRAV12-3, TRAJ54)
CAMRGIQGAQKLVF

SEQ ID NO: 456070 - protein, 15 aa, Homo sapiens
  CDR3 for beta chain variable domain of TCR clone 228035 (TRBV20-1, TRBJ2-7)
CSARDRVSGMDEQYF

SEQ ID NO: 456071 - protein, 14 aa, Homo sapiens
  CDR3 for alpha chain variable domain of TCR clone 228036 (TRAV1-2, TRAJ16)
CAVNRFSDGQKLLF

SEQ ID NO: 456072 - protein, 18 aa, Homo sapiens
  CDR3 for beta chain variable domain of TCR clone 228036 (TRBV7-2, TRBJ2-7)
CASSLAQGLRDSSYEQYF

SEQ ID NO: 456073 - protein, 12 aa, Homo sapiens
  CDR3 for alpha chain variable domain of TCR clone 228037 (TRAV12-3, TRAJ17)
CAMTPTGNKLTF

SEQ ID NO: 456074 - protein, 15 aa, Homo sapiens
  CDR3 for beta chain variable domain of TCR clone 228037 (TRBV20-1, TRBJ2-7)
CSARDRVSGMEEQYF

SEQ ID NO: 456075 - protein, 13 aa, Homo sapiens
  CDR3 for alpha chain variable domain of TCR clone 228038 (TRAV12-2, TRAJ20)
CAVPLSNDYKLSF

SEQ ID NO: 456076 - protein, 12 aa, Homo sapiens
  CDR3 for beta chain variable domain of TCR clone 228038 (TRBV11-2, TRBJ2-2)
CASSLPTGELFL

SEQ ID NO: 456077 - protein, 13 aa, Homo sapiens
  CDR3 for alpha chain variable domain of TCR clone 228039 (TRAV12-1, TRAJ26)
CVVRRNYGQNFVF

SEQ ID NO: 456078 - protein, 16 aa, Homo sapiens
  CDR3 for beta chain variable domain of TCR clone 228039 (TRBV28, TRBJ2-5)
CASSFSPAGGWETQYF

SEQ ID NO: 456079 - protein, 23 aa, Homo sapiens
  CDR3 for alpha chain variable domain of TCR clone 228040 (TRAV12-2, TRAJ36)
SLLIRDSQPSDSATLERANNLFF

SEQ ID NO: 456080 - protein, 15 aa, Homo sapiens
  CDR3 for beta chain variable domain of TCR clone 228040 (TRBV6-1, TRBJ2-3)
CASSERGGITDTQYF

SEQ ID NO: 456081 - protein, 15 aa, Homo sapiens
  CDR3 for alpha chain variable domain of TCR clone 228041 (TRAV25, TRAJ52)
CAGRPGGTSYGKLPF

SEQ ID NO: 456082 - protein, 14 aa, Homo sapiens
  CDR3 for beta chain variable domain of TCR clone 228041 (TRBV9, TRBJ2-1)
CASSVDPRGKEQFS

SEQ ID NO: 456083 - protein, 22 aa, Homo sapiens
  CDR3 for alpha chain variable domain of TCR clone 228042 (TRAV27, TRAJ41)
CAVRTQIPDIQNPDPAVYHVRY

SEQ ID NO: 456084 - protein, 16 aa, Homo sapiens
  CDR3 for beta chain variable domain of TCR clone 228042 (TRBV5-1, TRBJ2-3)
CASSLGLAVYTDTQYF

SEQ ID NO: 456085 - protein, 15 aa, Homo sapiens
  CDR3 for alpha chain variable domain of TCR clone 228043 (TRAV38-2/DV8, TRAJ45)
CAYWDSGGGADGLTF

SEQ ID NO: 456086 - protein, 15 aa, Homo sapiens
  CDR3 for beta chain variable domain of TCR clone 228043 (TRBV7-8, TRBJ1-5)
CASSLERRGLEPQHF

SEQ ID NO: 456087 - protein, 15 aa, Homo sapiens
  CDR3 for alpha chain variable domain of TCR clone 228044 (TRAV3, TRAJ20)
CAVRDIKLSDYKLSF

SEQ ID NO: 456088 - protein, 15 aa, Homo sapiens
  CDR3 for beta chain variable domain of TCR clone 228044 (TRBV6-3, TRBJ2-7)
CASSSPGTVFYEQYF

SEQ ID NO: 456089 - protein, 21 aa, Homo sapiens
  CDR3 for alpha chain variable domain of TCR clone 228045 (TRAV4, TRAJ3)
CCVLLPRGCPPGYSSASKIIF

SEQ ID NO: 456090 - protein, 14 aa, Homo sapiens
  CDR3 for beta chain variable domain of TCR clone 228045 (TRBV2, TRBJ1-6)
CALSPSEPRSPLHV

SEQ ID NO: 456091 - protein, 13 aa, Homo sapiens
  CDR3 for alpha chain variable domain of TCR clone 228046 (TRAV35, TRAJ53)
CAGQESSNYKLTF

SEQ ID NO: 456092 - protein, 11 aa, Homo sapiens
  CDR3 for beta chain variable domain of TCR clone 228046 (TRBV29-1, TRBJ2-5)
CSEDRTGTQCF

SEQ ID NO: 456093 - protein, 16 aa, Homo sapiens
  CDR3 for alpha chain variable domain of TCR clone 228047 (TRAV38-2/DV8, TRAJ47)
CAYRRAIIEYGNKLVF

SEQ ID NO: 456094 - protein, 14 aa, Homo sapiens
  CDR3 for beta chain variable domain of TCR clone 228047 (TRBV19, TRBJ2-7)
CASSIFAGTYEQYF

SEQ ID NO: 456095 - protein, 15 aa, Homo sapiens
  CDR3 for alpha chain variable domain of TCR clone 228048 (TRAV17, TRAJ57)
CATGPSQGGSVKLVF

SEQ ID NO: 456096 - protein, 15 aa, Homo sapiens
  CDR3 for beta chain variable domain of TCR clone 228048 (TRBV25-1, TRBJ1-4)
CASSPGDSTNEKLFF

SEQ ID NO: 456097 - protein, 14 aa, Homo sapiens
  CDR3 for alpha chain variable domain of TCR clone 228049 (TRAV12-2, TRAJ17)
CAVLFKAEGNKLTF

SEQ ID NO: 456098 - protein, 15 aa, Homo sapiens
  CDR3 for beta chain variable domain of TCR clone 228049 (TRBV20-1, TRBJ2-7)
CSARDRVSGMDEQYF

SEQ ID NO: 456099 - protein, 13 aa, Homo sapiens
  CDR3 for alpha chain variable domain of TCR clone 228050 (TRAV8-3, TRAJ47)
CAVSMEYGNKLVF

SEQ ID NO: 456100 - protein, 14 aa, Homo sapiens
  CDR3 for beta chain variable domain of TCR clone 228050 (TRBV2, TRBJ1-5)
CVSSGTGFNQPQHF

SEQ ID NO: 456101 - protein, 15 aa, Homo sapiens
  CDR3 for alpha chain variable domain of TCR clone 228051 (TRAV17, TRAJ57)
CATGPSQGGSEKLVF

SEQ ID NO: 456102 - protein, 14 aa, Homo sapiens
  CDR3 for beta chain variable domain of TCR clone 228051 (TRBV7-2, TRBJ2-5)
CASSTGGELKTQYF

SEQ ID NO: 456103 - protein, 14 aa, Homo sapiens
  CDR3 for alpha chain variable domain of TCR clone 228052 (TRAV12-2, TRAJ17)
RAALFNAAGNKLTF

SEQ ID NO: 456104 - protein, 16 aa, Homo sapiens
  CDR3 for beta chain variable domain of TCR clone 228052 (TRBV20-1, TRBJ2-2)
CSASASGSPGAGELFF

SEQ ID NO: 456105 - protein, 14 aa, Homo sapiens
  CDR3 for alpha chain variable domain of TCR clone 228053 (TRAV29/DV5, TRAJ20)
CAASAPIEDYTLSF

SEQ ID NO: 456106 - protein, 13 aa, Homo sapiens
  CDR3 for beta chain variable domain of TCR clone 228053 (TRBV2, TRBJ2-7)
CASSVGGSGEQYF

SEQ ID NO: 456107 - protein, 14 aa, Homo sapiens
  CDR3 for alpha chain variable domain of TCR clone 228054 (TRAV1-2, TRAJ16)
CAVNRFSDGQKLLF

SEQ ID NO: 456108 - protein, 13 aa, Homo sapiens
  CDR3 for beta chain variable domain of TCR clone 228054 (TRBV4-1, TRBJ2-1)
CASSQAGGDEQVF

SEQ ID NO: 456109 - protein, 13 aa, Homo sapiens
  CDR3 for alpha chain variable domain of TCR clone 228055 (TRAV8-3, TRAJ28)
CAVGAVGSYQLTF

SEQ ID NO: 456110 - protein, 14 aa, Homo sapiens
  CDR3 for beta chain variable domain of TCR clone 228055 (TRBV7-8, TRBJ2-3)
CASSLEAGTDTQYF

SEQ ID NO: 456111 - protein, 12 aa, Homo sapiens
  CDR3 for alpha chain variable domain of TCR clone 228056 (TRAV13-1, TRAJ15)
CAASQAGTALIF

SEQ ID NO: 456112 - protein, 16 aa, Homo sapiens
  CDR3 for beta chain variable domain of TCR clone 228056 (TRBV6-5, TRBJ2-7)
CASSSDPTSGFYEQYF

SEQ ID NO: 456113 - protein, 14 aa, Homo sapiens
  CDR3 for alpha chain variable domain of TCR clone 228057 (TRAV38-1, TRAJ40)
CALLPTSGTYKYIF

SEQ ID NO: 456114 - protein, 16 aa, Homo sapiens
  CDR3 for beta chain variable domain of TCR clone 228057 (TRBV15, TRBJ2-6)
CATSVNGGFLANVLTF

SEQ ID NO: 456115 - protein, 13 aa, Homo sapiens
  CDR3 for alpha chain variable domain of TCR clone 228058 (TRAV8-2, TRAJ29)
CALPGAGNTPLVF

SEQ ID NO: 456116 - protein, 15 aa, Homo sapiens
  CDR3 for beta chain variable domain of TCR clone 228058 (TRBV9, TRBJ1-6)
CASSVAGTGDSPLHF

SEQ ID NO: 456117 - protein, 13 aa, Homo sapiens
  CDR3 for alpha chain variable domain of TCR clone 228059 (TRAV30, TRAJ26)
CGTEIPLGQNFVF

SEQ ID NO: 456118 - protein, 15 aa, Homo sapiens
  CDR3 for beta chain variable domain of TCR clone 228059 (TRBV2, TRBJ2-1)
CASSEARSAYNEQFF

SEQ ID NO: 456119 - protein, 18 aa, Homo sapiens
  CDR3 for alpha chain variable domain of TCR clone 228060 (TRAV26-2, TRAJ45)
CILRLWGFSGGGADGLTF

SEQ ID NO: 456120 - protein, 17 aa, Homo sapiens
  CDR3 for beta chain variable domain of TCR clone 228060 (TRBV28, TRBJ2-3)
CASSPTPAGGRVDTQYF

SEQ ID NO: 456121 - protein, 18 aa, Homo sapiens
  CDR3 for alpha chain variable domain of TCR clone 228061 (TRAV12-2, )
CAVEDIHNPDPAVYQLRD

SEQ ID NO: 456122 - protein, 16 aa, Homo sapiens
  CDR3 for beta chain variable domain of TCR clone 228061 (TRBV6-1, TRBJ1-2)
CASSGAWQGRSHGYTF

SEQ ID NO: 456123 - protein, 11 aa, Homo sapiens
  CDR3 for alpha chain variable domain of TCR clone 228062 (TRAV21, TRAJ34)
CAVTNTDKLNF

SEQ ID NO: 456124 - protein, 16 aa, Homo sapiens
  CDR3 for beta chain variable domain of TCR clone 228062 (TRBV18, TRBJ1-1)
CASSPGVGGRGGEAFF

SEQ ID NO: 456125 - protein, 16 aa, Homo sapiens
  CDR3 for alpha chain variable domain of TCR clone 228063 (TRAV38-2/DV8, TRAJ10)
CAYRSLLGGGGNKLTF

SEQ ID NO: 456126 - protein, 14 aa, Homo sapiens
  CDR3 for beta chain variable domain of TCR clone 228063 (TRBV19, TRBJ2-1)
CASPTFVLSGEQFF

SEQ ID NO: 456127 - protein, 15 aa, Homo sapiens
  CDR3 for alpha chain variable domain of TCR clone 228064 (TRAV26-1, TRAJ40)
CIVRVSTSGTYKSIF

SEQ ID NO: 456128 - protein, 14 aa, Homo sapiens
  CDR3 for beta chain variable domain of TCR clone 228064 (TRBV12-5, TRBJ2-5)
CASGSRTHQETQYF

SEQ ID NO: 456129 - protein, 14 aa, Homo sapiens
  CDR3 for alpha chain variable domain of TCR clone 228065 (TRAV13-1, TRAJ35)
CAASKGGIGNVLHC

SEQ ID NO: 456130 - protein, 13 aa, Homo sapiens
  CDR3 for beta chain variable domain of TCR clone 228065 (TRBV7-3, TRBJ1-1)
CASSQDWGAKAFF

SEQ ID NO: 456131 - protein, 13 aa, Homo sapiens
  CDR3 for alpha chain variable domain of TCR clone 228066 (TRAV27, TRAJ39)
CAGVNNAGNMLTF

SEQ ID NO: 456132 - protein, 19 aa, Homo sapiens
  CDR3 for beta chain variable domain of TCR clone 228066 (TRBV5-1, TRBJ2-3)
CASSLRLAGGITTTDTQYF

SEQ ID NO: 456133 - protein, 16 aa, Homo sapiens
  CDR3 for alpha chain variable domain of TCR clone 228067 (TRAV26-1, TRAJ53)
CIVRVAMGGSNDKLTF

SEQ ID NO: 456134 - protein, 12 aa, Homo sapiens
  CDR3 for beta chain variable domain of TCR clone 228067 (TRBV7-9, TRBJ1-5)
CVSSPQGQPQHF

SEQ ID NO: 456135 - protein, 13 aa, Homo sapiens
  CDR3 for alpha chain variable domain of TCR clone 228068 (TRAV8-3, TRAJ48)
CAVVPFGNEKLTF

SEQ ID NO: 456136 - protein, 18 aa, Homo sapiens
  CDR3 for beta chain variable domain of TCR clone 228068 (TRBV25-1, TRBJ2-2)
CHPSLPGGQGVQTGELFF

SEQ ID NO: 456137 - protein, 12 aa, Homo sapiens
  CDR3 for alpha chain variable domain of TCR clone 228069 (TRAV13-2, TRAJ8)
CAPWLGFQKLVF

SEQ ID NO: 456138 - protein, 15 aa, Homo sapiens
  CDR3 for beta chain variable domain of TCR clone 228069 (TRBV6-1, TRBJ2-1)
CASSEEGPSYNEQFF

SEQ ID NO: 456139 - protein, 15 aa, Homo sapiens
  CDR3 for alpha chain variable domain of TCR clone 228070 (TRAV2, TRAJ9)
CAVAALNTGGFTTIF

SEQ ID NO: 456140 - protein, 14 aa, Homo sapiens
  CDR3 for beta chain variable domain of TCR clone 228070 (TRBV7-8, TRBJ2-5)
CASSATGGQETQYF

SEQ ID NO: 456141 - protein, 17 aa, Homo sapiens
  CDR3 for alpha chain variable domain of TCR clone 228071 (TRAV4, TRAJ13)
CLVGVQGSSGGYQKVTF

SEQ ID NO: 456142 - protein, 18 aa, Homo sapiens
  CDR3 for beta chain variable domain of TCR clone 228071 (TRBV15, TRBJ2-3)
SATSRDGARSWDTDTQYF

SEQ ID NO: 456143 - protein, 14 aa, Homo sapiens
  CDR3 for alpha chain variable domain of TCR clone 228072 (TRAV12-2, TRAJ53)
CAVKGGGSNYKLTF

SEQ ID NO: 456144 - protein, 12 aa, Homo sapiens
  CDR3 for beta chain variable domain of TCR clone 228072 (TRBV5-1, TRBJ2-7)
CASSLDSYEQYF

SEQ ID NO: 456145 - protein, 13 aa, Homo sapiens
  CDR3 for alpha chain variable domain of TCR clone 228073 (TRAV13-1, TRAJ12)
SAASPDSSYKLIF

SEQ ID NO: 456146 - protein, 16 aa, Homo sapiens
  CDR3 for beta chain variable domain of TCR clone 228073 (TRBV15, TRBJ2-1)
CATSRERLAGAYEQFF

SEQ ID NO: 456147 - protein, 14 aa, Homo sapiens
  CDR3 for alpha chain variable domain of TCR clone 228074 (TRAV2, TRAJ37)
CAVDFTSNTGKLIF

SEQ ID NO: 456148 - protein, 12 aa, Homo sapiens
  CDR3 for beta chain variable domain of TCR clone 228074 (TRBV18, TRBJ2-1)
CASSSDEDEQFF

SEQ ID NO: 456149 - protein, 14 aa, Homo sapiens
  CDR3 for alpha chain variable domain of TCR clone 228075 (TRAV13-2, TRAJ32)
CAESLGGATNKLIF

SEQ ID NO: 456150 - protein, 12 aa, Homo sapiens
  CDR3 for beta chain variable domain of TCR clone 228075 (TRBV11-2, TRBJ2-1)
CARSPGNNEQFF

SEQ ID NO: 456151 - protein, 15 aa, Homo sapiens
  CDR3 for alpha chain variable domain of TCR clone 228076 (TRAV3, TRAJ20)
CAVRDVKLSDYKLSC

SEQ ID NO: 456152 - protein, 15 aa, Homo sapiens
  CDR3 for beta chain variable domain of TCR clone 228076 (TRBV7-9, TRBJ1-6)
CASSSPGRGNSPLHF

SEQ ID NO: 456153 - protein, 14 aa, Homo sapiens
  CDR3 for alpha chain variable domain of TCR clone 228077 (TRAV29/DV5, TRAJ22)
CAASATGSARQLAF

SEQ ID NO: 456154 - protein, 14 aa, Homo sapiens
  CDR3 for beta chain variable domain of TCR clone 228077 (TRBV19, TRBJ2-1)
CASSPGLAPNEQFF

SEQ ID NO: 456155 - protein, 14 aa, Homo sapiens
  CDR3 for alpha chain variable domain of TCR clone 228078 (TRAV12-3, TRAJ10)
SHLPLTGGGNKLTF

SEQ ID NO: 456156 - protein, 16 aa, Homo sapiens
  CDR3 for beta chain variable domain of TCR clone 228078 (TRBV9, TRBJ2-1)
CASSALGGIGNNEQFF

SEQ ID NO: 456157 - protein, 15 aa, Homo sapiens
  CDR3 for alpha chain variable domain of TCR clone 228079 (TRAV4, TRAJ39)
CLVGPNNNAGNMLPF

SEQ ID NO: 456158 - protein, 16 aa, Homo sapiens
  CDR3 for beta chain variable domain of TCR clone 228079 (TRBV27, TRBJ2-2)
CASSFRGLVRTGELFF

SEQ ID NO: 456159 - protein, 13 aa, Homo sapiens
  CDR3 for alpha chain variable domain of TCR clone 228080 (TRAV13-1, TRAJ21)
CAASIYNFNKFYF

SEQ ID NO: 456160 - protein, 16 aa, Homo sapiens
  CDR3 for beta chain variable domain of TCR clone 228080 (TRBV7-2, TRBJ2-5)
CASSSKWLSGQETQYF

SEQ ID NO: 456161 - protein, 19 aa, Homo sapiens
  CDR3 for alpha chain variable domain of TCR clone 228081 (TRAV2, TRAJ8)
CAVEHRLSETCIWNWHPTS

SEQ ID NO: 456162 - protein, 14 aa, Homo sapiens
  CDR3 for beta chain variable domain of TCR clone 228081 (TRBV7-2, TRBJ2-2)
CASRGQGAAGELFF

SEQ ID NO: 456163 - protein, 11 aa, Homo sapiens
  CDR3 for alpha chain variable domain of TCR clone 228082 (TRAV2, TRAJ20)
CAVADDYKLSF

SEQ ID NO: 456164 - protein, 12 aa, Homo sapiens
  CDR3 for beta chain variable domain of TCR clone 228082 (TRBV7-8, TRBJ2-7)
CASSLGDREQYF

SEQ ID NO: 456165 - protein, 13 aa, Homo sapiens
  CDR3 for alpha chain variable domain of TCR clone 228083 (TRAV29/DV5, TRAJ40)
CAASEAGTYKYIF

SEQ ID NO: 456166 - protein, 18 aa, Homo sapiens
  CDR3 for beta chain variable domain of TCR clone 228083 (TRBV14, TRBJ2-1)
CDSSQEYGGAYLRGEQFF

SEQ ID NO: 456167 - protein, 18 aa, Homo sapiens
  CDR3 for alpha chain variable domain of TCR clone 228084 (TRAV13-1, TRAJ52)
CAASKRSAGGTSYGKLTF

SEQ ID NO: 456168 - protein, 14 aa, Homo sapiens
  CDR3 for beta chain variable domain of TCR clone 228084 (TRBV12-4, TRBJ1-1)
CASSLGTGGTEAFF

SEQ ID NO: 456169 - protein, 14 aa, Homo sapiens
  CDR3 for alpha chain variable domain of TCR clone 228085 (TRAV1-2, TRAJ33)
CAVRAPDSNYQLIW

SEQ ID NO: 456170 - protein, 15 aa, Homo sapiens
  CDR3 for beta chain variable domain of TCR clone 228085 (TRBV10-3, TRBJ2-3)
CSISLTSGGTDTQYF

SEQ ID NO: 456171 - protein, 13 aa, Homo sapiens
  CDR3 for alpha chain variable domain of TCR clone 228086 (TRAV12-2, TRAJ10)
CAVPTGGGNKLTF

SEQ ID NO: 456172 - protein, 14 aa, Homo sapiens
  CDR3 for beta chain variable domain of TCR clone 228086 (TRBV7-9, TRBJ2-2)
CASSLVQDTGELFF

SEQ ID NO: 456173 - protein, 15 aa, Homo sapiens
  CDR3 for alpha chain variable domain of TCR clone 228087 (TRAV3, TRAJ17)
CAVSPKEAAGNKLTF

SEQ ID NO: 456174 - protein, 12 aa, Homo sapiens
  CDR3 for beta chain variable domain of TCR clone 228087 (TRBV11-2, TRBJ2-2)
CASSLGGGELFF

SEQ ID NO: 456175 - protein, 14 aa, Homo sapiens
  CDR3 for alpha chain variable domain of TCR clone 228088 (TRAV8-4, TRAJ38)
CARLNAGNNRKLIW

SEQ ID NO: 456176 - protein, 13 aa, Homo sapiens
  CDR3 for beta chain variable domain of TCR clone 228088 (TRBV7-2, TRBJ1-1)
CASNLKGAKVAFF

SEQ ID NO: 456177 - protein, 14 aa, Homo sapiens
  CDR3 for alpha chain variable domain of TCR clone 228089 (TRAV1-2, TRAJ8)
CAVREDTGFQKLVF

SEQ ID NO: 456178 - protein, 16 aa, Homo sapiens
  CDR3 for beta chain variable domain of TCR clone 228089 (TRBV12-5, TRBJ2-5)
CASCPRTSGNQETQYF

SEQ ID NO: 456179 - protein, 15 aa, Homo sapiens
  CDR3 for alpha chain variable domain of TCR clone 228090 (TRAV12-2, TRAJ53)
CAVAGGGGSNYKLTF

SEQ ID NO: 456180 - protein, 17 aa, Homo sapiens
  CDR3 for beta chain variable domain of TCR clone 228090 (TRBV7-3, TRBJ2-3)
CASSLMKRMRGADTQYF

SEQ ID NO: 456181 - protein, 12 aa, Homo sapiens
  CDR3 for alpha chain variable domain of TCR clone 228091 (TRAV26-1, TRAJ36)
CIVRVRADNLFF

SEQ ID NO: 456182 - protein, 11 aa, Homo sapiens
  CDR3 for beta chain variable domain of TCR clone 228091 (TRBV7-2, TRBJ2-7)
CASSSGLWQYF

SEQ ID NO: 456183 - protein, 13 aa, Homo sapiens
  CDR3 for alpha chain variable domain of TCR clone 228092 (TRAV3, TRAJ27)
CAVRPLCAGKSTF

SEQ ID NO: 456184 - protein, 15 aa, Homo sapiens
  CDR3 for beta chain variable domain of TCR clone 228092 (TRBV19, TRBJ1-1)
CASSIRRQMNTEAFF

SEQ ID NO: 456185 - protein, 13 aa, Homo sapiens
  CDR3 for alpha chain variable domain of TCR clone 228093 (TRAV17, TRAJ5)
CALRGTGRRALTF

SEQ ID NO: 456186 - protein, 15 aa, Homo sapiens
  CDR3 for beta chain variable domain of TCR clone 228093 (TRBV20-1, TRBJ2-1)
CSARGIGGTYNKQFF

SEQ ID NO: 456187 - protein, 13 aa, Homo sapiens
  CDR3 for alpha chain variable domain of TCR clone 228094 (TRAV12-3, TRAJ29)
CAMTLSGNTPLVV

SEQ ID NO: 456188 - protein, 15 aa, Homo sapiens
  CDR3 for beta chain variable domain of TCR clone 228094 (TRBV5-1, TRBJ2-6)
CASSLDPSGANVLTF

SEQ ID NO: 456189 - protein, 12 aa, Homo sapiens
  CDR3 for alpha chain variable domain of TCR clone 228095 (TRAV13-1, TRAJ17)
CAARTAGNKLTF

SEQ ID NO: 456190 - protein, 15 aa, Homo sapiens
  CDR3 for beta chain variable domain of TCR clone 228095 (TRBV7-6, TRBJ1-1)
CASSPQGGENTEAFF

SEQ ID NO: 456191 - protein, 17 aa, Homo sapiens
  CDR3 for alpha chain variable domain of TCR clone 228096 (TRAV3, TRAJ6)
CAVRDGPRAGGSFIPTF

SEQ ID NO: 456192 - protein, 20 aa, Homo sapiens
  CDR3 for beta chain variable domain of TCR clone 228096 (TRBV28, TRBJ2-1)
CASTPIGRSPGLAGGNERFF

SEQ ID NO: 456193 - protein, 15 aa, Homo sapiens
  CDR3 for alpha chain variable domain of TCR clone 228097 (TRAV13-1, TRAJ50)
CAAKGSETSYDKVIF

SEQ ID NO: 456194 - protein, 14 aa, Homo sapiens
  CDR3 for beta chain variable domain of TCR clone 228097 (TRBV13, TRBJ2-5)
CASYRRLAEETQYF

SEQ ID NO: 456195 - protein, 15 aa, Homo sapiens
  CDR3 for alpha chain variable domain of TCR clone 228098 (TRAV14/DV4, TRAJ26)
CAMREGQNYGQNFVF

SEQ ID NO: 456196 - protein, 13 aa, Homo sapiens
  CDR3 for beta chain variable domain of TCR clone 228098 (TRBV7-2, TRBJ2-7)
CASSSPSGSEQYF

SEQ ID NO: 456197 - protein, 14 aa, Homo sapiens
  CDR3 for alpha chain variable domain of TCR clone 228099 (TRAV8-3, TRAJ26)
CAVAPGNHGQNFVF

SEQ ID NO: 456198 - protein, 16 aa, Homo sapiens
  CDR3 for beta chain variable domain of TCR clone 228099 (TRBV3-1, TRBJ2-1)
CASSQVGGTSYNEQFF

SEQ ID NO: 456199 - protein, 17 aa, Homo sapiens
  CDR3 for alpha chain variable domain of TCR clone 228100 (TRAV3, TRAJ12)
CAVRDGGRLDSSYKLIF

SEQ ID NO: 456200 - protein, 12 aa, Homo sapiens
  CDR3 for beta chain variable domain of TCR clone 228100 (TRBV18, TRBJ2-5)
CASSPSKETQYF

SEQ ID NO: 456201 - protein, 14 aa, Homo sapiens
  CDR3 for alpha chain variable domain of TCR clone 228101 (TRAV12-2, TRAJ13)
CAVKKTGGYQKVTF

SEQ ID NO: 456202 - protein, 15 aa, Homo sapiens
  CDR3 for beta chain variable domain of TCR clone 228101 (TRBV7-2, TRBJ2-1)
CAISLASGRVNEQFF

SEQ ID NO: 456203 - protein, 12 aa, Homo sapiens
  CDR3 for alpha chain variable domain of TCR clone 228102 (TRAV17, TRAJ39)
CATEGAGNMLTV

SEQ ID NO: 456204 - protein, 15 aa, Homo sapiens
  CDR3 for beta chain variable domain of TCR clone 228102 (TRBV12-4, TRBJ2-1)
CASSLLATGNNEQFF

SEQ ID NO: 456205 - protein, 16 aa, Homo sapiens
  CDR3 for alpha chain variable domain of TCR clone 228103 (TRAV26-1, TRAJ32)
CIVRTNSGGATNKLIF

SEQ ID NO: 456206 - protein, 14 aa, Homo sapiens
  CDR3 for beta chain variable domain of TCR clone 228103 (TRBV27, TRBJ1-1)
CASSLLSGLSEAFF

SEQ ID NO: 456207 - protein, 14 aa, Homo sapiens
  CDR3 for alpha chain variable domain of TCR clone 228104 (TRAV17, TRAJ15)
RATGPNQAGTALIF

SEQ ID NO: 456208 - protein, 15 aa, Homo sapiens
  CDR3 for beta chain variable domain of TCR clone 228104 (TRBV11-2, TRBJ2-2)
CASSSDRVNAGELFF

SEQ ID NO: 456209 - protein, 15 aa, Homo sapiens
  CDR3 for alpha chain variable domain of TCR clone 228105 (TRAV3, TRAJ9)
CAVRGLNTGGFKTTF

SEQ ID NO: 456210 - protein, 14 aa, Homo sapiens
  CDR3 for beta chain variable domain of TCR clone 228105 (TRBV19, TRBJ1-2)
CASEGTGVTYGYTF

SEQ ID NO: 456211 - protein, 16 aa, Homo sapiens
  CDR3 for alpha chain variable domain of TCR clone 228106 (TRAV26-1, TRAJ53)
CIVRVAMGGSNYKLTF

SEQ ID NO: 456212 - protein, 14 aa, Homo sapiens
  CDR3 for beta chain variable domain of TCR clone 228106 (TRBV7-2, TRBJ2-5)
CASSPRGSSETQYF

SEQ ID NO: 456213 - protein, 14 aa, Homo sapiens
  CDR3 for alpha chain variable domain of TCR clone 228107 (TRAV12-2, TRAJ13)
CAGKKTGGYQQVTF

SEQ ID NO: 456214 - protein, 15 aa, Homo sapiens
  CDR3 for beta chain variable domain of TCR clone 228107 (TRBV27, TRBJ2-1)
CASSNGGGSSNEQFF

SEQ ID NO: 456215 - protein, 14 aa, Homo sapiens
  CDR3 for alpha chain variable domain of TCR clone 228108 (TRAV8-1, TRAJ5)
CAVRTDTGRRALTF

SEQ ID NO: 456216 - protein, 15 aa, Homo sapiens
  CDR3 for beta chain variable domain of TCR clone 228108 (TRBV7-9, TRBJ1-5)
CASSQGHQPNQPQHF

SEQ ID NO: 456217 - protein, 17 aa, Homo sapiens
  CDR3 for alpha chain variable domain of TCR clone 228109 (TRAV3, TRAJ6)
CAVRDGPRAGGSYTPTF

SEQ ID NO: 456218 - protein, 16 aa, Homo sapiens
  CDR3 for beta chain variable domain of TCR clone 228109 (TRBV4-1, TRBJ2-7)
CASSLTAGQATYEQYF

SEQ ID NO: 456219 - protein, 14 aa, Homo sapiens
  CDR3 for alpha chain variable domain of TCR clone 228110 (TRAV2, TRAJ3)
CAVRPYSSASKIIF

SEQ ID NO: 456220 - protein, 20 aa, Homo sapiens
  CDR3 for beta chain variable domain of TCR clone 228110 (TRBV7-6, TRBJ2-2)
CASSHLFPGPTIHITGELFF

SEQ ID NO: 456221 - protein, 16 aa, Homo sapiens
  CDR3 for alpha chain variable domain of TCR clone 228111 (TRAV21, TRAJ37)
CAVRTAGPSNTGKLIF

SEQ ID NO: 456222 - protein, 13 aa, Homo sapiens
  CDR3 for beta chain variable domain of TCR clone 228111 (TRBV7-9, TRBJ2-5)
CASLPPGRETQYF

SEQ ID NO: 456223 - protein, 21 aa, Homo sapiens
  CDR3 for alpha chain variable domain of TCR clone 228112 (TRAV30, TRAJ43)
GLPAQLLRNLLPIIELNDMLF

SEQ ID NO: 456224 - protein, 14 aa, Homo sapiens
  CDR3 for beta chain variable domain of TCR clone 228112 (TRBV27, TRBJ2-1)
CASRHLGGGKEQFF

SEQ ID NO: 456225 - protein, 14 aa, Homo sapiens
  CDR3 for alpha chain variable domain of TCR clone 228113 (TRAV35, TRAJ22)
CAGLRPGSARQLTF

SEQ ID NO: 456226 - protein, 14 aa, Homo sapiens
  CDR3 for beta chain variable domain of TCR clone 228113 (TRBV12-4, TRBJ2-5)
CQQSPDSLQETQYF

SEQ ID NO: 456227 - protein, 18 aa, Homo sapiens
  CDR3 for alpha chain variable domain of TCR clone 228114 (TRAV13-1, TRAJ52)
CAAKNPNAGGTSYGKLTF

SEQ ID NO: 456228 - protein, 15 aa, Homo sapiens
  CDR3 for beta chain variable domain of TCR clone 228114 (TRBV25-1, TRBJ2-5)
CASTLMGQNQETQYF

SEQ ID NO: 456229 - protein, 12 aa, Homo sapiens
  CDR3 for alpha chain variable domain of TCR clone 228115 (TRAV21, TRAJ33)
CAKMDSNYQLIW

SEQ ID NO: 456230 - protein, 15 aa, Homo sapiens
  CDR3 for beta chain variable domain of TCR clone 228115 (TRBV19, TRBJ2-7)
CASSIGGGLANEQYF

SEQ ID NO: 456231 - protein, 17 aa, Homo sapiens
  CDR3 for alpha chain variable domain of TCR clone 228116 (TRAV3, TRAJ6)
CAVRDGPGAGGSYIPTF

SEQ ID NO: 456232 - protein, 14 aa, Homo sapiens
  CDR3 for beta chain variable domain of TCR clone 228116 (TRBV7-9, TRBJ2-1)
CASSPRDSLYEQFF

SEQ ID NO: 456233 - protein, 13 aa, Homo sapiens
  CDR3 for alpha chain variable domain of TCR clone 228117 (TRAV1-2, TRAJ9)
CAALNTGGFKTIL

SEQ ID NO: 456234 - protein, 14 aa, Homo sapiens
  CDR3 for beta chain variable domain of TCR clone 228117 (TRBV7-3, TRBJ2-1)
CASSLAGGTNEHFF

SEQ ID NO: 456235 - protein, 14 aa, Homo sapiens
  CDR3 for alpha chain variable domain of TCR clone 228118 (TRAV8-3, TRAJ39)
CAVGANNAGNLLIF

SEQ ID NO: 456236 - protein, 19 aa, Homo sapiens
  CDR3 for beta chain variable domain of TCR clone 228118 (TRBV25-1, TRBJ2-2)
CAILVYRVDRGRKTGELFF

SEQ ID NO: 456237 - protein, 11 aa, Homo sapiens
  CDR3 for alpha chain variable domain of TCR clone 228119 (TRAV2, TRAJ33)
CAVESNYQLIW

SEQ ID NO: 456238 - protein, 12 aa, Homo sapiens
  CDR3 for beta chain variable domain of TCR clone 228119 (TRBV11-2, TRBJ2-2)
CASSLGGAELFF

SEQ ID NO: 456239 - protein, 13 aa, Homo sapiens
  CDR3 for alpha chain variable domain of TCR clone 228120 (TRAV12-2, TRAJ4)
CAGFSGGYNKLIF

SEQ ID NO: 456240 - protein, 15 aa, Homo sapiens
  CDR3 for beta chain variable domain of TCR clone 228120 (TRBV4-1, TRBJ2-5)
CASSQSRGDQETQYF

SEQ ID NO: 456241 - protein, 14 aa, Homo sapiens
  CDR3 for alpha chain variable domain of TCR clone 228121 (TRAV12-2, TRAJ36)
CAVKISTGANNLFF

SEQ ID NO: 456242 - protein, 14 aa, Homo sapiens
  CDR3 for beta chain variable domain of TCR clone 228121 (TRBV20-1, TRBJ2-3)
CSARGGTSTDTQYF

SEQ ID NO: 456243 - protein, 13 aa, Homo sapiens
  CDR3 for alpha chain variable domain of TCR clone 228122 (TRAV12-2, TRAJ20)
CAVYPSNDYKLSF

SEQ ID NO: 456244 - protein, 15 aa, Homo sapiens
  CDR3 for beta chain variable domain of TCR clone 228122 (TRBV11-3, TRBJ2-7)
CASSPGPASSYEQYF

SEQ ID NO: 456245 - protein, 17 aa, Homo sapiens
  CDR3 for alpha chain variable domain of TCR clone 228123 (TRAV13-1, TRAJ52)
CAAGRNAGGTSYGKLTV

SEQ ID NO: 456246 - protein, 13 aa, Homo sapiens
  CDR3 for beta chain variable domain of TCR clone 228123 (TRBV7-2, TRBJ1-1)
CASNLKGAKVAFF

SEQ ID NO: 456247 - protein, 12 aa, Homo sapiens
  CDR3 for alpha chain variable domain of TCR clone 228124 (TRAV35, TRAJ49)
CAGWNTGTQFYF

SEQ ID NO: 456248 - protein, 16 aa, Homo sapiens
  CDR3 for beta chain variable domain of TCR clone 228124 (TRBV5-1, TRBJ2-2)
CASSLWDTTNTGELFF

SEQ ID NO: 456249 - protein, 14 aa, Homo sapiens
  CDR3 for alpha chain variable domain of TCR clone 228125 (TRAV13-1, TRAJ24)
CAASKADSWGKLQF

SEQ ID NO: 456250 - protein, 15 aa, Homo sapiens
  CDR3 for beta chain variable domain of TCR clone 228125 (TRBV7-8, TRBJ1-1)
CASSLGDSRNTEASF

SEQ ID NO: 456251 - protein, 11 aa, Homo sapiens
  CDR3 for alpha chain variable domain of TCR clone 228126 (TRAV12-1, TRAJ33)
CVVNMNYQLIW

SEQ ID NO: 456252 - protein, 11 aa, Homo sapiens
  CDR3 for beta chain variable domain of TCR clone 228126 (TRBV10-1, TRBJ2-3)
CASSDSDTQYF

SEQ ID NO: 456253 - protein, 14 aa, Homo sapiens
  CDR3 for alpha chain variable domain of TCR clone 228127 (TRAV12-1, TRAJ30)
CVVIIGGRDDKIIF

SEQ ID NO: 456254 - protein, 14 aa, Homo sapiens
  CDR3 for beta chain variable domain of TCR clone 228127 (TRBV20-1, TRBJ2-1)
CSAQIGGSANEQFF

SEQ ID NO: 456255 - protein, 15 aa, Homo sapiens
  CDR3 for alpha chain variable domain of TCR clone 228128 (TRAV2, TRAJ15)
CAVEDREQAGTVLIF

SEQ ID NO: 456256 - protein, 13 aa, Homo sapiens
  CDR3 for beta chain variable domain of TCR clone 228128 (TRBV10-2, TRBJ2-7)
CASGTSGGYEQYF

SEQ ID NO: 456257 - protein, 14 aa, Homo sapiens
  CDR3 for alpha chain variable domain of TCR clone 228129 (TRAV12-2, TRAJ17)
CAVLFKAAGNKQTF

SEQ ID NO: 456258 - protein, 14 aa, Homo sapiens
  CDR3 for beta chain variable domain of TCR clone 228129 (TRBV12-5, TRBJ2-5)
CASGSRTHQETQYF

SEQ ID NO: 456259 - protein, 11 aa, Homo sapiens
  CDR3 for alpha chain variable domain of TCR clone 228130 (TRAV16, TRAJ20)
CALSEGFKAAL

SEQ ID NO: 456260 - protein, 13 aa, Homo sapiens
  CDR3 for beta chain variable domain of TCR clone 228130 (TRBV7-3, TRBJ2-1)
CASSLDSYKEQFF

SEQ ID NO: 456261 - protein, 16 aa, Homo sapiens
  CDR3 for alpha chain variable domain of TCR clone 228131 (TRAV19, TRAJ50)
CALSEAQRTSYDKVIF

SEQ ID NO: 456262 - protein, 17 aa, Homo sapiens
  CDR3 for beta chain variable domain of TCR clone 228131 (TRBV12-4, TRBJ1-5)
CASSRHQAGGVNQPQHF

SEQ ID NO: 456263 - protein, 15 aa, Homo sapiens
  CDR3 for alpha chain variable domain of TCR clone 228132 (TRAV3, TRAJ15)
CAVRPANQAGTALIF

SEQ ID NO: 456264 - protein, 14 aa, Homo sapiens
  CDR3 for beta chain variable domain of TCR clone 228132 (TRBV4-1, TRBJ2-2)
CASSHAVNTGELFF

SEQ ID NO: 456265 - protein, 14 aa, Homo sapiens
  CDR3 for alpha chain variable domain of TCR clone 228133 (TRAV26-1, TRAJ45)
CIEATGGGADGLTF

SEQ ID NO: 456266 - protein, 12 aa, Homo sapiens
  CDR3 for beta chain variable domain of TCR clone 228133 (TRBV12-4, TRBJ2-7)
CASSLGGYEQYF

SEQ ID NO: 456267 - protein, 14 aa, Homo sapiens
  CDR3 for alpha chain variable domain of TCR clone 228134 (TRAV1-2, TRAJ16)
CAVNRFSAGQKLLF

SEQ ID NO: 456268 - protein, 14 aa, Homo sapiens
  CDR3 for beta chain variable domain of TCR clone 228134 (TRBV7-2, TRBJ2-7)
CASSPKTSFYGQYF

SEQ ID NO: 456269 - protein, 13 aa, Homo sapiens
  CDR3 for alpha chain variable domain of TCR clone 228135 (TRAV2, TRAJ20)
CAVEDPSEYKLSF

SEQ ID NO: 456270 - protein, 14 aa, Homo sapiens
  CDR3 for beta chain variable domain of TCR clone 228135 (TRBV25-1, TRBJ1-1)
CASTHLGGNTEAFF

SEQ ID NO: 456271 - protein, 13 aa, Homo sapiens
  CDR3 for alpha chain variable domain of TCR clone 228136 (TRAV12-3, TRAJ7)
CALSASGNNRLAF

SEQ ID NO: 456272 - protein, 14 aa, Homo sapiens
  CDR3 for beta chain variable domain of TCR clone 228136 (TRBV13, TRBJ2-5)
CASSLGPRGETQYF

SEQ ID NO: 456273 - protein, 11 aa, Homo sapiens
  CDR3 for alpha chain variable domain of TCR clone 228137 (TRAV1-2, TRAJ20)
CAVANDYKLSF

SEQ ID NO: 456274 - protein, 14 aa, Homo sapiens
  CDR3 for beta chain variable domain of TCR clone 228137 (TRBV6-5, TRBJ1-1)
CASSPGQGTTEAFF

SEQ ID NO: 456275 - protein, 12 aa, Homo sapiens
  CDR3 for alpha chain variable domain of TCR clone 228138 (TRAV12-2, TRAJ52)
IGGGTSYGQLTF

SEQ ID NO: 456276 - protein, 13 aa, Homo sapiens
  CDR3 for beta chain variable domain of TCR clone 228138 (TRBV12-4, TRBJ1-1)
CASSPGTGFEAFF

SEQ ID NO: 456277 - protein, 21 aa, Homo sapiens
  CDR3 for alpha chain variable domain of TCR clone 228139 (TRAV24, TRAJ5)
CAPGEHLLLGVEQDSKCNQIS

SEQ ID NO: 456278 - protein, 12 aa, Homo sapiens
  CDR3 for beta chain variable domain of TCR clone 228139 (TRBV24-1, TRBJ1-2)
CATSDDGGRYTF

SEQ ID NO: 456279 - protein, 15 aa, Homo sapiens
  CDR3 for alpha chain variable domain of TCR clone 228140 (TRAV2, TRAJ15)
CAVEDRGQAGTALIF

SEQ ID NO: 456280 - protein, 14 aa, Homo sapiens
  CDR3 for beta chain variable domain of TCR clone 228140 (TRBV11-2, TRBJ2-7)
CASSSTGEGYEQYF

SEQ ID NO: 456281 - protein, 14 aa, Homo sapiens
  CDR3 for alpha chain variable domain of TCR clone 228141 (TRAV12-3, TRAJ29)
CAMILLSGNTPLVF

SEQ ID NO: 456282 - protein, 16 aa, Homo sapiens
  CDR3 for beta chain variable domain of TCR clone 228141 (TRBV28, TRBJ2-7)
CASSSGTSWRGYEQYF

SEQ ID NO: 456283 - protein, 13 aa, Homo sapiens
  CDR3 for alpha chain variable domain of TCR clone 228142 (TRAV13-1, TRAJ41)
CADTPNSGYAPNF

SEQ ID NO: 456284 - protein, 13 aa, Homo sapiens
  CDR3 for beta chain variable domain of TCR clone 228142 (TRBV19, TRBJ2-7)
CASEGTTTYEQYF

SEQ ID NO: 456285 - protein, 14 aa, Homo sapiens
  CDR3 for alpha chain variable domain of TCR clone 228143 (TRAV16, TRAJ33)
CALSAMDSNYQLIW

SEQ ID NO: 456286 - protein, 16 aa, Homo sapiens
  CDR3 for beta chain variable domain of TCR clone 228143 (TRBV12-4, TRBJ2-3)
CASSFPANTNTDTQCF

SEQ ID NO: 456287 - protein, 11 aa, Homo sapiens
  CDR3 for alpha chain variable domain of TCR clone 228144 (TRAV17, TRAJ9)
CATTGGFKTIF

SEQ ID NO: 456288 - protein, 14 aa, Homo sapiens
  CDR3 for beta chain variable domain of TCR clone 228144 (TRBV5-1, TRBJ1-6)
CASRPGTSNSPLHF

SEQ ID NO: 456289 - protein, 15 aa, Homo sapiens
  CDR3 for alpha chain variable domain of TCR clone 228145 (TRAV17, TRAJ22)
CATVAPSGFARQLTF

SEQ ID NO: 456290 - protein, 16 aa, Homo sapiens
  CDR3 for beta chain variable domain of TCR clone 228145 (TRBV10-3, TRBJ2-7)
CAISADFADRPYEQYF

SEQ ID NO: 456291 - protein, 14 aa, Homo sapiens
  CDR3 for alpha chain variable domain of TCR clone 228146 (TRAV8-6, TRAJ49)
CAVRVRYTGNQFYF

SEQ ID NO: 456292 - protein, 19 aa, Homo sapiens
  CDR3 for beta chain variable domain of TCR clone 228146 (TRBV28, TRBJ2-1)
CASSFSIRGSGRTRYEQFF

SEQ ID NO: 456293 - protein, 12 aa, Homo sapiens
  CDR3 for alpha chain variable domain of TCR clone 228147 (TRAV17, TRAJ57)
CATDGGSEKLVF

SEQ ID NO: 456294 - protein, 16 aa, Homo sapiens
  CDR3 for beta chain variable domain of TCR clone 228147 (TRBV11-3, TRBJ2-5)
CASSSVVAGSTETQYF

SEQ ID NO: 456295 - protein, 14 aa, Homo sapiens
  CDR3 for alpha chain variable domain of TCR clone 228148 (TRAV10, TRAJ48)
CVVSAGLWKLEINL

SEQ ID NO: 456296 - protein, 16 aa, Homo sapiens
  CDR3 for beta chain variable domain of TCR clone 228148 (TRBV12-4, TRBJ2-5)
CASSWRPSGDLETQYF

SEQ ID NO: 456297 - protein, 15 aa, Homo sapiens
  CDR3 for alpha chain variable domain of TCR clone 228149 (TRAV40, TRAJ53)
CLLANSGGSNYKLTF

SEQ ID NO: 456298 - protein, 14 aa, Homo sapiens
  CDR3 for beta chain variable domain of TCR clone 228149 (TRBV10-3, TRBJ1-1)
CAISDTDRGVEAFF

SEQ ID NO: 456299 - protein, 13 aa, Homo sapiens
  CDR3 for alpha chain variable domain of TCR clone 228150 (TRAV2, TRAJ40)
RAVVTSVTYKYIF

SEQ ID NO: 456300 - protein, 14 aa, Homo sapiens
  CDR3 for beta chain variable domain of TCR clone 228150 (TRBV19, TRBJ2-1)
CASPTFVLSGEQFF

SEQ ID NO: 456301 - protein, 12 aa, Homo sapiens
  CDR3 for alpha chain variable domain of TCR clone 228151 (TRAV13-1, TRAJ21)
CAAFFNFNKFYF

SEQ ID NO: 456302 - protein, 13 aa, Homo sapiens
  CDR3 for beta chain variable domain of TCR clone 228151 (TRBV11-2, TRBJ2-5)
CASSSTGEETQYF

SEQ ID NO: 456303 - protein, 15 aa, Homo sapiens
  CDR3 for alpha chain variable domain of TCR clone 228152 (TRAV21, TRAJ40)
CAVRPQTSGTYKYIF

SEQ ID NO: 456304 - protein, 15 aa, Homo sapiens
  CDR3 for beta chain variable domain of TCR clone 228152 (TRBV7-9, TRBJ1-4)
CASSRTGGFNEKLFF

SEQ ID NO: 456305 - protein, 11 aa, Homo sapiens
  CDR3 for alpha chain variable domain of TCR clone 228153 (TRAV13-1, TRAJ39)
CASHAGNMLTF

SEQ ID NO: 456306 - protein, 16 aa, Homo sapiens
  CDR3 for beta chain variable domain of TCR clone 228153 (TRBV4-2, TRBJ2-3)
CASSQELAGDTDTQYF

SEQ ID NO: 456307 - protein, 15 aa, Homo sapiens
  CDR3 for alpha chain variable domain of TCR clone 228154 (TRAV17, TRAJ57)
CATGPSQGGSEKLVF

SEQ ID NO: 456308 - protein, 13 aa, Homo sapiens
  CDR3 for beta chain variable domain of TCR clone 228154 (TRBV27, TRBJ2-1)
CASGTLGVGEQFF

SEQ ID NO: 456309 - protein, 15 aa, Homo sapiens
  CDR3 for alpha chain variable domain of TCR clone 228155 (TRAV17, TRAJ6)
CATALPSGGSYIPTF

SEQ ID NO: 456310 - protein, 16 aa, Homo sapiens
  CDR3 for beta chain variable domain of TCR clone 228155 (TRBV4-1, TRBJ2-7)
CASSQDPTGYSYEQYF

SEQ ID NO: 456311 - protein, 14 aa, Homo sapiens
  CDR3 for alpha chain variable domain of TCR clone 228156 (TRAV2, TRAJ9)
CAVEDRSGGFKTTF

SEQ ID NO: 456312 - protein, 16 aa, Homo sapiens
  CDR3 for beta chain variable domain of TCR clone 228156 (TRBV20-1, TRBJ2-3)
CSAVRDRGPIADTQYF

SEQ ID NO: 456313 - protein, 12 aa, Homo sapiens
  CDR3 for alpha chain variable domain of TCR clone 228157 (TRAV12-2, TRAJ52)
IGGGTSYGKLTF

SEQ ID NO: 456314 - protein, 13 aa, Homo sapiens
  CDR3 for beta chain variable domain of TCR clone 228157 (TRBV12-4, TRBJ1-1)
CASSPGTGLEAFF

SEQ ID NO: 456315 - protein, 14 aa, Homo sapiens
  CDR3 for alpha chain variable domain of TCR clone 228158 (TRAV29/DV5, TRAJ49)
CAASAQNTGNPFYF

SEQ ID NO: 456316 - protein, 16 aa, Homo sapiens
  CDR3 for beta chain variable domain of TCR clone 228158 (TRBV12-4, TRBJ1-5)
CASRQPVEGSNQPQHF

SEQ ID NO: 456317 - protein, 17 aa, Homo sapiens
  CDR3 for alpha chain variable domain of TCR clone 228159 (TRAV17, TRAJ28)
CATDPRRGGAGSYQLTF

SEQ ID NO: 456318 - protein, 17 aa, Homo sapiens
  CDR3 for beta chain variable domain of TCR clone 228159 (TRBV5-1, TRBJ1-6)
CASSPSLQGSDNSPLHF

SEQ ID NO: 456319 - protein, 14 aa, Homo sapiens
  CDR3 for alpha chain variable domain of TCR clone 228160 (TRAV24, TRAJ39)
CAFPSSQCRHHAHL

SEQ ID NO: 456320 - protein, 13 aa, Homo sapiens
  CDR3 for beta chain variable domain of TCR clone 228160 (TRBV6-5, TRBJ1-6)
CASSYERSTPLHF

SEQ ID NO: 456321 - protein, 14 aa, Homo sapiens
  CDR3 for alpha chain variable domain of TCR clone 228161 (TRAV23/DV6, TRAJ27)
CAASRDTNAGKSTF

SEQ ID NO: 456322 - protein, 13 aa, Homo sapiens
  CDR3 for beta chain variable domain of TCR clone 228161 (TRBV10-2, TRBJ2-7)
CASGASGGYEQYF

SEQ ID NO: 456323 - protein, 14 aa, Homo sapiens
  CDR3 for alpha chain variable domain of TCR clone 228162 (TRAV13-1, TRAJ44)
CAAKATGTASKLTF

SEQ ID NO: 456324 - protein, 16 aa, Homo sapiens
  CDR3 for beta chain variable domain of TCR clone 228162 (TRBV15, TRBJ1-2)
CATSRGPRTGGGGDTF

SEQ ID NO: 456325 - protein, 15 aa, Homo sapiens
  CDR3 for alpha chain variable domain of TCR clone 228163 (TRAV38-1, TRAJ37)
CAFIFGSGNTGKLIF

SEQ ID NO: 456326 - protein, 15 aa, Homo sapiens
  CDR3 for beta chain variable domain of TCR clone 228163 (TRBV6-1, TRBJ2-1)
CASSELRGQYNEQFF

SEQ ID NO: 456327 - protein, 14 aa, Homo sapiens
  CDR3 for alpha chain variable domain of TCR clone 228164 (TRAV12-1, TRAJ4)
CVGDFSGGYNKLIF

SEQ ID NO: 456328 - protein, 13 aa, Homo sapiens
  CDR3 for beta chain variable domain of TCR clone 228164 (TRBV3-1, TRBJ1-1)
CASSPGVITEAFF

SEQ ID NO: 456329 - protein, 11 aa, Homo sapiens
  CDR3 for alpha chain variable domain of TCR clone 228165 (TRAV12-3, TRAJ49)
CAANTGNQFYF

SEQ ID NO: 456330 - protein, 15 aa, Homo sapiens
  CDR3 for beta chain variable domain of TCR clone 228165 (TRBV10-3, TRBJ2-3)
CAISVLGQETDTQYF

SEQ ID NO: 456331 - protein, 14 aa, Homo sapiens
  CDR3 for alpha chain variable domain of TCR clone 228166 (TRAV13-1, TRAJ9)
CAASALTGGFKTIF

SEQ ID NO: 456332 - protein, 16 aa, Homo sapiens
  CDR3 for beta chain variable domain of TCR clone 228166 (TRBV7-8, TRBJ2-4)
CANSAERTLAKNIQYF

SEQ ID NO: 456333 - protein, 17 aa, Homo sapiens
  CDR3 for alpha chain variable domain of TCR clone 228167 (TRAV26-1, TRAJ11)
CIVRVGQSNSGYSTLTF

SEQ ID NO: 456334 - protein, 13 aa, Homo sapiens
  CDR3 for beta chain variable domain of TCR clone 228167 (TRBV19, TRBJ1-2)
CASSVPGQDGYTF

SEQ ID NO: 456335 - protein, 14 aa, Homo sapiens
  CDR3 for alpha chain variable domain of TCR clone 228168 (TRAV26-1, TRAJ38)
CIADNAGNNRKLSW

SEQ ID NO: 456336 - protein, 15 aa, Homo sapiens
  CDR3 for beta chain variable domain of TCR clone 228168 (TRBV20-1, TRBJ2-7)
CSARDRVSGMDEQYF

SEQ ID NO: 456337 - protein, 14 aa, Homo sapiens
  CDR3 for alpha chain variable domain of TCR clone 228169 (TRAV29/DV5, TRAJ36)
CAARRKTGSNNLFF

SEQ ID NO: 456338 - protein, 14 aa, Homo sapiens
  CDR3 for beta chain variable domain of TCR clone 228169 (TRBV7-6, TRBJ2-3)
CASSLGTVTDTQYF

SEQ ID NO: 456339 - protein, 11 aa, Homo sapiens
  CDR3 for alpha chain variable domain of TCR clone 228170 (TRAV3, TRAJ21)
CAVGNFNKFYF

SEQ ID NO: 456340 - protein, 13 aa, Homo sapiens
  CDR3 for beta chain variable domain of TCR clone 228170 (TRBV7-2, TRBJ2-7)
CASSSPSGGEQYF

SEQ ID NO: 456341 - protein, 17 aa, Homo sapiens
  CDR3 for alpha chain variable domain of TCR clone 228171 (TRAV3, TRAJ6)
CAVRDGPRTGGSSIPTF

SEQ ID NO: 456342 - protein, 14 aa, Homo sapiens
  CDR3 for beta chain variable domain of TCR clone 228171 (TRBV7-2, TRBJ2-7)
CASSPKTSFYEQYF

SEQ ID NO: 456343 - protein, 12 aa, Homo sapiens
  CDR3 for alpha chain variable domain of TCR clone 228172 (TRAV13-1, TRAJ15)
CAASQAGNALIF

SEQ ID NO: 456344 - protein, 14 aa, Homo sapiens
  CDR3 for beta chain variable domain of TCR clone 228172 (TRBV25-1, TRBJ1-1)
CASTHLGGNTEAFF

SEQ ID NO: 456345 - protein, 14 aa, Homo sapiens
  CDR3 for alpha chain variable domain of TCR clone 228173 (TRAV8-1, TRAJ24)
CAVNAADSRGKLQF

SEQ ID NO: 456346 - protein, 16 aa, Homo sapiens
  CDR3 for beta chain variable domain of TCR clone 228173 (TRBV4-3, TRBJ2-1)
CASSPALDRGVNEQLF

SEQ ID NO: 456347 - protein, 13 aa, Homo sapiens
  CDR3 for alpha chain variable domain of TCR clone 228174 (TRAV12-2, TRAJ6)
CAVNVSRKLHTYI

SEQ ID NO: 456348 - protein, 15 aa, Homo sapiens
  CDR3 for beta chain variable domain of TCR clone 228174 (TRBV28, TRBJ2-4)
CVAGSGTLLMGIQYF

SEQ ID NO: 456349 - protein, 11 aa, Homo sapiens
  CDR3 for alpha chain variable domain of TCR clone 228175 (TRAV21, TRAJ31)
CAVRNNARLMF

SEQ ID NO: 456350 - protein, 15 aa, Homo sapiens
  CDR3 for beta chain variable domain of TCR clone 228175 (TRBV11-2, TRBJ1-2)
CASSLEGVQRNGYTF

SEQ ID NO: 456351 - protein, 15 aa, Homo sapiens
  CDR3 for alpha chain variable domain of TCR clone 228176 (TRAV3, TRAJ5)
CAVRDLDTGRRALTF

SEQ ID NO: 456352 - protein, 12 aa, Homo sapiens
  CDR3 for beta chain variable domain of TCR clone 228176 (TRBV18, TRBJ1-1)
CASSPGGTEAFF

SEQ ID NO: 456353 - protein, 16 aa, Homo sapiens
  CDR3 for alpha chain variable domain of TCR clone 228177 (TRAV16, TRAJ4)
CALSRMFSGVYNKLIF

SEQ ID NO: 456354 - protein, 14 aa, Homo sapiens
  CDR3 for beta chain variable domain of TCR clone 228177 (TRBV4-1, TRBJ2-2)
CASSQAVNTGELFF

SEQ ID NO: 456355 - protein, 13 aa, Homo sapiens
  CDR3 for alpha chain variable domain of TCR clone 228178 (TRAV2, TRAJ15)
CAVASQAGTALIF

SEQ ID NO: 456356 - protein, 17 aa, Homo sapiens
  CDR3 for beta chain variable domain of TCR clone 228178 (TRBV19, TRBJ1-1)
CASSRGGQALLNTEAFF

SEQ ID NO: 456357 - protein, 16 aa, Homo sapiens
  CDR3 for alpha chain variable domain of TCR clone 228179 (TRAV3, TRAJ10)
CAVRYMRAGGGKKLTF

SEQ ID NO: 456358 - protein, 15 aa, Homo sapiens
  CDR3 for beta chain variable domain of TCR clone 228179 (TRBV9, TRBJ1-6)
CASSVAGTGDSPLHF

SEQ ID NO: 456359 - protein, 17 aa, Homo sapiens
  CDR3 for alpha chain variable domain of TCR clone 228180 (TRAV12-2, TRAJ22)
CAVNRIPFSGSARQRTF

SEQ ID NO: 456360 - protein, 13 aa, Homo sapiens
  CDR3 for beta chain variable domain of TCR clone 228180 (TRBV11-3, TRBJ1-1)
CASSSNRDTEAFF

SEQ ID NO: 456361 - protein, 17 aa, Homo sapiens
  CDR3 for alpha chain variable domain of TCR clone 228181 (TRAV4, TRAJ18)
CLVGERSGGSTLGRLYF

SEQ ID NO: 456362 - protein, 16 aa, Homo sapiens
  CDR3 for beta chain variable domain of TCR clone 228181 (TRBV19, TRBJ2-1)
CASSKAGPSSYNEQFF

SEQ ID NO: 456363 - protein, 12 aa, Homo sapiens
  CDR3 for alpha chain variable domain of TCR clone 228182 (TRAV36/DV7, TRAJ37)
CACYGNTGKLIF

SEQ ID NO: 456364 - protein, 17 aa, Homo sapiens
  CDR3 for beta chain variable domain of TCR clone 228182 (TRBV20-1, TRBJ2-1)
CSASSSGLAGSYNEQFF

SEQ ID NO: 456365 - protein, 14 aa, Homo sapiens
  CDR3 for alpha chain variable domain of TCR clone 228183 (TRAV12-1, TRAJ13)
CVVIDSGGYQKVTF

SEQ ID NO: 456366 - protein, 16 aa, Homo sapiens
  CDR3 for beta chain variable domain of TCR clone 228183 (TRBV24-1, TRBJ2-3)
CATSDPGTGATDTQYF

SEQ ID NO: 456367 - protein, 12 aa, Homo sapiens
  CDR3 for alpha chain variable domain of TCR clone 228184 (TRAV1-2, TRAJ26)
CAVRYYGQNFVF

SEQ ID NO: 456368 - protein, 15 aa, Homo sapiens
  CDR3 for beta chain variable domain of TCR clone 228184 (TRBV19, TRBJ2-7)
CASSPAGSGEAVRYF

SEQ ID NO: 456369 - protein, 11 aa, Homo sapiens
  CDR3 for alpha chain variable domain of TCR clone 228185 (TRAV5, TRAJ31)
CAESNNARLMF

SEQ ID NO: 456370 - protein, 15 aa, Homo sapiens
  CDR3 for beta chain variable domain of TCR clone 228185 (TRBV6-3, TRBJ2-7)
CASSSPGTVFYEQYF

SEQ ID NO: 456371 - protein, 14 aa, Homo sapiens
  CDR3 for alpha chain variable domain of TCR clone 228186 (TRAV1-2, TRAJ16)
CAVNRFSDGQKLLF

SEQ ID NO: 456372 - protein, 16 aa, Homo sapiens
  CDR3 for beta chain variable domain of TCR clone 228186 (TRBV7-3, TRBJ2-2)
FDSSLKRGTLSGELFF

SEQ ID NO: 456373 - protein, 18 aa, Homo sapiens
  CDR3 for alpha chain variable domain of TCR clone 228187 (TRAV21, TRAJ52)
CAVRPSPAGGTSYGKLTF

SEQ ID NO: 456374 - protein, 13 aa, Homo sapiens
  CDR3 for beta chain variable domain of TCR clone 228187 (TRBV10-3, TRBJ2-7)
FASKLAVNYEQYF

SEQ ID NO: 456375 - protein, 12 aa, Homo sapiens
  CDR3 for alpha chain variable domain of TCR clone 228188 (TRAV12-2, TRAJ16)
CAVNLDGQKLLF

SEQ ID NO: 456376 - protein, 15 aa, Homo sapiens
  CDR3 for beta chain variable domain of TCR clone 228188 (TRBV11-2, TRBJ2-3)
CASSPGGGATDTQYF

SEQ ID NO: 456377 - protein, 17 aa, Homo sapiens
  CDR3 for alpha chain variable domain of TCR clone 228189 (TRAV3, TRAJ12)
CAVRDGGRMDSSYKLIF

SEQ ID NO: 456378 - protein, 16 aa, Homo sapiens
  CDR3 for beta chain variable domain of TCR clone 228189 (TRBV9, TRBJ2-2)
CASSARGKGNTGELFF

SEQ ID NO: 456379 - protein, 13 aa, Homo sapiens
  CDR3 for alpha chain variable domain of TCR clone 228190 (TRAV20, TRAJ37)
CAGCSSNTGKLIF

SEQ ID NO: 456380 - protein, 15 aa, Homo sapiens
  CDR3 for beta chain variable domain of TCR clone 228190 (TRBV5-1, TRBJ2-1)
CASSPPRAPYNEQFF

SEQ ID NO: 456381 - protein, 15 aa, Homo sapiens
  CDR3 for alpha chain variable domain of TCR clone 228191 (TRAV21, TRAJ53)
CATLNCGGSNYKLTF

SEQ ID NO: 456382 - protein, 15 aa, Homo sapiens
  CDR3 for beta chain variable domain of TCR clone 228191 (TRBV18, TRBJ2-1)
CASSPPSASYNEQFF

SEQ ID NO: 456383 - protein, 18 aa, Homo sapiens
  CDR3 for alpha chain variable domain of TCR clone 228192 (TRAV13-1, TRAJ52)
CAAKNHNAGGTSYGKLTF

SEQ ID NO: 456384 - protein, 13 aa, Homo sapiens
  CDR3 for beta chain variable domain of TCR clone 228192 (TRBV27, TRBJ1-1)
CASSLSIGAEAFF

SEQ ID NO: 456385 - protein, 12 aa, Homo sapiens
  CDR3 for alpha chain variable domain of TCR clone 228193 (TRAV17, TRAJ57)
CATDGGSEKLVF

SEQ ID NO: 456386 - protein, 16 aa, Homo sapiens
  CDR3 for beta chain variable domain of TCR clone 228193 (TRBV19, TRBJ2-2)
CASSFPGQGLAGELFF

SEQ ID NO: 456387 - protein, 16 aa, Homo sapiens
  CDR3 for alpha chain variable domain of TCR clone 228194 (TRAV3, TRAJ10)
CAVRDRRAGGGNKLTF

SEQ ID NO: 456388 - protein, 15 aa, Homo sapiens
  CDR3 for beta chain variable domain of TCR clone 228194 (TRBV6-6, TRBJ2-5)
CASSPGGGLEETQYF

SEQ ID NO: 456389 - protein, 15 aa, Homo sapiens
  CDR3 for alpha chain variable domain of TCR clone 228195 (TRAV8-3, TRAJ6)
CAVGPLGGGSYIPTF

SEQ ID NO: 456390 - protein, 14 aa, Homo sapiens
  CDR3 for beta chain variable domain of TCR clone 228195 (TRBV19, TRBJ2-2)
CASNTGQGAGELFF

SEQ ID NO: 456391 - protein, 12 aa, Homo sapiens
  CDR3 for alpha chain variable domain of TCR clone 228196 (TRAV8-6, TRAJ43)
CAVSNNNNDMRF

SEQ ID NO: 456392 - protein, 18 aa, Homo sapiens
  CDR3 for beta chain variable domain of TCR clone 228196 (TRBV7-3, TRBJ2-3)
CASSSTGTYPGSTDTQYF

SEQ ID NO: 456393 - protein, 22 aa, Homo sapiens
  CDR3 for alpha chain variable domain of TCR clone 228197 (TRAV13-1, TRAJ32)
CAASNGWWCYKQAHLWNWHPAF

SEQ ID NO: 456394 - protein, 15 aa, Homo sapiens
  CDR3 for beta chain variable domain of TCR clone 228197 (TRBV20-1, TRBJ1-2)
CSAIRTGAFNYGYTF

SEQ ID NO: 456395 - protein, 15 aa, Homo sapiens
  CDR3 for alpha chain variable domain of TCR clone 228198 (TRAV3, TRAJ22)
CAVRDRGGSARQLTF

SEQ ID NO: 456396 - protein, 15 aa, Homo sapiens
  CDR3 for beta chain variable domain of TCR clone 228198 (TRBV20-1, TRBJ1-1)
CSASRGVTWNTEAFF

SEQ ID NO: 456397 - protein, 12 aa, Homo sapiens
  CDR3 for alpha chain variable domain of TCR clone 228199 (TRAV27, TRAJ41)
CAGRNSGYALNF

SEQ ID NO: 456398 - protein, 16 aa, Homo sapiens
  CDR3 for beta chain variable domain of TCR clone 228199 (TRBV20-1, TRBJ2-3)
CSAVRDRGPIADTQYF

SEQ ID NO: 456399 - protein, 10 aa, Homo sapiens
  CDR3 for alpha chain variable domain of TCR clone 228200 (TRAV12-2, TRAJ43)
CAVKILSMRF

SEQ ID NO: 456400 - protein, 14 aa, Homo sapiens
  CDR3 for beta chain variable domain of TCR clone 228200 (TRBV11-2, TRBJ2-7)
CAISLGNSLYEQYF

SEQ ID NO: 456401 - protein, 13 aa, Homo sapiens
  CDR3 for alpha chain variable domain of TCR clone 228201 (TRAV16, TRAJ31)
CALSDHNNARLMF

SEQ ID NO: 456402 - protein, 17 aa, Homo sapiens
  CDR3 for beta chain variable domain of TCR clone 228201 (TRBV12-4, TRBJ2-1)
CASSPGLAGGRINEQFF

SEQ ID NO: 456403 - protein, 14 aa, Homo sapiens
  CDR3 for alpha chain variable domain of TCR clone 228202 (TRAV16, TRAJ17)
CALSGRAAGNKLTF

SEQ ID NO: 456404 - protein, 15 aa, Homo sapiens
  CDR3 for beta chain variable domain of TCR clone 228202 (TRBV28, TRBJ2-1)
CASSIIAGGRSEQFF

SEQ ID NO: 456405 - protein, 16 aa, Homo sapiens
  CDR3 for alpha chain variable domain of TCR clone 228203 (TRAV8-3, TRAJ8)
CAVPRDGNKGFQKLVF

SEQ ID NO: 456406 - protein, 14 aa, Homo sapiens
  CDR3 for beta chain variable domain of TCR clone 228203 (TRBV4-1, TRBJ2-2)
CAISQAVNTGELFF

SEQ ID NO: 456407 - protein, 15 aa, Homo sapiens
  CDR3 for alpha chain variable domain of TCR clone 228204 (TRAV25, TRAJ52)
CAGTSGGTSYGKLTF

SEQ ID NO: 456408 - protein, 16 aa, Homo sapiens
  CDR3 for beta chain variable domain of TCR clone 228204 (TRBV15, TRBJ1-2)
CAASRGPRTGGGGYFF

SEQ ID NO: 456409 - protein, 16 aa, Homo sapiens
  CDR3 for alpha chain variable domain of TCR clone 228205 (TRAV30, TRAJ24)
CGTEIVDADSWGKFQF

SEQ ID NO: 456410 - protein, 15 aa, Homo sapiens
  CDR3 for beta chain variable domain of TCR clone 228205 (TRBV7-3, TRBJ2-2)
CQQLKAGTLSGELFF

SEQ ID NO: 456411 - protein, 13 aa, Homo sapiens
  CDR3 for alpha chain variable domain of TCR clone 228206 (TRAV27, TRAJ16)
CAGACSDGQKLLF

SEQ ID NO: 456412 - protein, 14 aa, Homo sapiens
  CDR3 for beta chain variable domain of TCR clone 228206 (TRBV11-2, TRBJ1-3)
CASSLAVPGNTIDF

SEQ ID NO: 456413 - protein, 14 aa, Homo sapiens
  CDR3 for alpha chain variable domain of TCR clone 228207 (TRAV26-1, TRAJ21)
CIGRPPYNFNKFYF

SEQ ID NO: 456414 - protein, 14 aa, Homo sapiens
  CDR3 for beta chain variable domain of TCR clone 228207 (TRBV19, TRBJ2-1)
CASPTFVLSGEQFF

SEQ ID NO: 456415 - protein, 16 aa, Homo sapiens
  CDR3 for alpha chain variable domain of TCR clone 228208 (TRAV16, TRAJ37)
CSKWPDGSSNTGKLIF

SEQ ID NO: 456416 - protein, 13 aa, Homo sapiens
  CDR3 for beta chain variable domain of TCR clone 228208 (TRBV7-2, TRBJ2-2)
CASSLAVTGELLF

SEQ ID NO: 456417 - protein, 13 aa, Homo sapiens
  CDR3 for alpha chain variable domain of TCR clone 228209 (TRAV8-6, TRAJ49)
CAVITNTGNKFYF

SEQ ID NO: 456418 - protein, 12 aa, Homo sapiens
  CDR3 for beta chain variable domain of TCR clone 228209 (TRBV11-2, TRBJ2-2)
CASSLGGGELFF

SEQ ID NO: 456419 - protein, 13 aa, Homo sapiens
  CDR3 for alpha chain variable domain of TCR clone 228210 (TRAV27, TRAJ6)
CAGGTRGSYIPTF

SEQ ID NO: 456420 - protein, 17 aa, Homo sapiens
  CDR3 for beta chain variable domain of TCR clone 228210 (TRBV5-5, TRBJ1-1)
CASSLRFRGLMNTEAFF

SEQ ID NO: 456421 - protein, 14 aa, Homo sapiens
  CDR3 for alpha chain variable domain of TCR clone 228211 (TRAV23/DV6, TRAJ22)
CAASVSGSARQLTF

SEQ ID NO: 456422 - protein, 16 aa, Homo sapiens
  CDR3 for beta chain variable domain of TCR clone 228211 (TRBV19, TRBJ2-2)
CASSFPGQGLSGELFF

SEQ ID NO: 456423 - protein, 15 aa, Homo sapiens
  CDR3 for alpha chain variable domain of TCR clone 228212 (TRAV8-3, TRAJ45)
CASSYSGGGADGLTF

SEQ ID NO: 456424 - protein, 16 aa, Homo sapiens
  CDR3 for beta chain variable domain of TCR clone 228212 (TRBV7-9, TRBJ2-2)
CASSGFGCANTGELFF

SEQ ID NO: 456425 - protein, 13 aa, Homo sapiens
  CDR3 for alpha chain variable domain of TCR clone 228213 (TRAV12-3, TRAJ7)
CAMSASGNNRLAF

SEQ ID NO: 456426 - protein, 14 aa, Homo sapiens
  CDR3 for beta chain variable domain of TCR clone 228213 (TRBV13, TRBJ2-5)
CASSLGTRGETQYF

SEQ ID NO: 456427 - protein, 14 aa, Homo sapiens
  CDR3 for alpha chain variable domain of TCR clone 228214 (TRAV26-1, TRAJ26)
CIVRVASYGQNFVF

SEQ ID NO: 456428 - protein, 15 aa, Homo sapiens
  CDR3 for beta chain variable domain of TCR clone 228214 (TRBV6-5, TRBJ2-1)
CASSYDAGAGNEQFF

SEQ ID NO: 456429 - protein, 15 aa, Homo sapiens
  CDR3 for alpha chain variable domain of TCR clone 228215 (TRAV36/DV7, TRAJ57)
CAVGATQGGSEKLVF

SEQ ID NO: 456430 - protein, 14 aa, Homo sapiens
  CDR3 for beta chain variable domain of TCR clone 228215 (TRBV25-1, TRBJ1-1)
CASTHLGGNTEAFF

SEQ ID NO: 456431 - protein, 14 aa, Homo sapiens
  CDR3 for alpha chain variable domain of TCR clone 228216 (TRAV23/DV6, TRAJ5)
CAAKRPAGRRALPF

SEQ ID NO: 456432 - protein, 15 aa, Homo sapiens
  CDR3 for beta chain variable domain of TCR clone 228216 (TRBV27, TRBJ1-5)
CASSSSGTGNQPQHF

SEQ ID NO: 456433 - protein, 16 aa, Homo sapiens
  CDR3 for alpha chain variable domain of TCR clone 228217 (TRAV13-2, TRAJ53)
CAENANSRGSNYKLTF

SEQ ID NO: 456434 - protein, 19 aa, Homo sapiens
  CDR3 for beta chain variable domain of TCR clone 228217 (TRBV28, TRBJ2-7)
CASSYSGTSRLGWVYEQYF

SEQ ID NO: 456435 - protein, 12 aa, Homo sapiens
  CDR3 for alpha chain variable domain of TCR clone 228218 (TRAV22, TRAJ29)
CAPPSGNKPLVF

SEQ ID NO: 456436 - protein, 15 aa, Homo sapiens
  CDR3 for beta chain variable domain of TCR clone 228218 (TRBV19, TRBJ1-1)
CASTSGQIQNTEAFF

SEQ ID NO: 456437 - protein, 12 aa, Homo sapiens
  CDR3 for alpha chain variable domain of TCR clone 228219 (TRAV23/DV6, TRAJ58)
CAARLLRGEPSG

SEQ ID NO: 456438 - protein, 13 aa, Homo sapiens
  CDR3 for beta chain variable domain of TCR clone 228219 (TRBV6-4, TRBJ1-5)
CASSADLNQPQHF

SEQ ID NO: 456439 - protein, 21 aa, Homo sapiens
  CDR3 for alpha chain variable domain of TCR clone 228220 (TRAV27, TRAJ38)
CAARRNAGNNHNQNPDPAVYQ

SEQ ID NO: 456440 - protein, 13 aa, Homo sapiens
  CDR3 for beta chain variable domain of TCR clone 228220 (TRBV12-5, TRBJ2-3)
CASGDRQSDTQYF

SEQ ID NO: 456441 - protein, 12 aa, Homo sapiens
  CDR3 for alpha chain variable domain of TCR clone 228221 (TRAV27, TRAJ9)
CAGESGGFKTIF

SEQ ID NO: 456442 - protein, 18 aa, Homo sapiens
  CDR3 for beta chain variable domain of TCR clone 228221 (TRBV10-2, TRBJ2-2)
CFSGPAVHRQADAGELFF

SEQ ID NO: 456443 - protein, 12 aa, Homo sapiens
  CDR3 for alpha chain variable domain of TCR clone 228222 (TRAV4, TRAJ26)
CLVGDYGQNFVF

SEQ ID NO: 456444 - protein, 16 aa, Homo sapiens
  CDR3 for beta chain variable domain of TCR clone 228222 (TRBV6-1, TRBJ2-5)
CASSETLDRGAETQYF

SEQ ID NO: 456445 - protein, 11 aa, Homo sapiens
  CDR3 for alpha chain variable domain of TCR clone 228223 (TRAV1-1, TRAJ20)
CAVFNDYKLNF

SEQ ID NO: 456446 - protein, 16 aa, Homo sapiens
  CDR3 for beta chain variable domain of TCR clone 228223 (TRBV29-1, TRBJ2-2)
CSVEKTSEGNTGELFF

SEQ ID NO: 456447 - protein, 13 aa, Homo sapiens
  CDR3 for alpha chain variable domain of TCR clone 228224 (TRAV3, TRAJ21)
CAVREPDFNKFYF

SEQ ID NO: 456448 - protein, 17 aa, Homo sapiens
  CDR3 for beta chain variable domain of TCR clone 228224 (TRBV18, TRBJ2-2)
CASSQRSSGQGPGELFF

SEQ ID NO: 456449 - protein, 14 aa, Homo sapiens
  CDR3 for alpha chain variable domain of TCR clone 228225 (TRAV12-2, TRAJ13)
CAVKKTGGYQKVTF

SEQ ID NO: 456450 - protein, 15 aa, Homo sapiens
  CDR3 for beta chain variable domain of TCR clone 228225 (TRBV10-3, TRBJ2-1)
CATNGGPGQGDEQFF

SEQ ID NO: 456451 - protein, 14 aa, Homo sapiens
  CDR3 for alpha chain variable domain of TCR clone 228226 (TRAV35, TRAJ22)
CAGLRPGSARQLTF

SEQ ID NO: 456452 - protein, 15 aa, Homo sapiens
  CDR3 for beta chain variable domain of TCR clone 228226 (TRBV12-3, TRBJ1-6)
CASSFQAGGGSPLHF

SEQ ID NO: 456453 - protein, 18 aa, Homo sapiens
  CDR3 for alpha chain variable domain of TCR clone 228227 (TRAV21, TRAJ52)
CAVRPSPACGTSYGQLTF

SEQ ID NO: 456454 - protein, 17 aa, Homo sapiens
  CDR3 for beta chain variable domain of TCR clone 228227 (TRBV13, TRBJ2-3)
CASSLSRVAGGRNTQYF

SEQ ID NO: 456455 - protein, 12 aa, Homo sapiens
  CDR3 for alpha chain variable domain of TCR clone 228228 (TRAV2, TRAJ33)
CAVPDSNYQLIW

SEQ ID NO: 456456 - protein, 15 aa, Homo sapiens
  CDR3 for beta chain variable domain of TCR clone 228228 (TRBV12-4, TRBJ2-5)
CASSPPTGLQETQYF

SEQ ID NO: 456457 - protein, 10 aa, Homo sapiens
  CDR3 for alpha chain variable domain of TCR clone 228229 (TRAV12-3, TRAJ49)
CAMNDDQVYF

SEQ ID NO: 456458 - protein, 13 aa, Homo sapiens
  CDR3 for beta chain variable domain of TCR clone 228229 (TRBV12-4, TRBJ1-1)
CASSPGRGFEAFF

SEQ ID NO: 456459 - protein, 14 aa, Homo sapiens
  CDR3 for alpha chain variable domain of TCR clone 228230 (TRAV3, TRAJ7)
CAVREEKREQQTRF

SEQ ID NO: 456460 - protein, 12 aa, Homo sapiens
  CDR3 for beta chain variable domain of TCR clone 228230 (TRBV7-8, TRBJ2-7)
CASSLGDREQYL

SEQ ID NO: 456461 - protein, 16 aa, Homo sapiens
  CDR3 for alpha chain variable domain of TCR clone 228231 (TRAV35, TRAJ52)
CAVQGSGGTSYGKLTF

SEQ ID NO: 456462 - protein, 17 aa, Homo sapiens
  CDR3 for beta chain variable domain of TCR clone 228231 (TRBV13, TRBJ2-3)
CASSLSRVAGGRNTQYF

SEQ ID NO: 456463 - protein, 18 aa, Homo sapiens
  CDR3 for alpha chain variable domain of TCR clone 228232 (TRAV21, TRAJ52)
CAVRPSPAGGTSYGKLTF

SEQ ID NO: 456464 - protein, 15 aa, Homo sapiens
  CDR3 for beta chain variable domain of TCR clone 228232 (TRBV19, TRBJ1-1)
CASTSEQIQNTEAFF

SEQ ID NO: 456465 - protein, 14 aa, Homo sapiens
  CDR3 for alpha chain variable domain of TCR clone 228233 (TRAV16, TRAJ57)
CALSGQGGSEKLVF

SEQ ID NO: 456466 - protein, 13 aa, Homo sapiens
  CDR3 for beta chain variable domain of TCR clone 228233 (TRBV5-4, TRBJ2-5)
CASSLQGPREQSF

SEQ ID NO: 456467 - protein, 12 aa, Homo sapiens
  CDR3 for alpha chain variable domain of TCR clone 228234 (TRAV29/DV5, TRAJ31)
CAATKNNARLMF

SEQ ID NO: 456468 - protein, 12 aa, Homo sapiens
  CDR3 for beta chain variable domain of TCR clone 228234 (TRBV11-2, TRBJ2-2)
CASSLGGGELFF

SEQ ID NO: 456469 - protein, 12 aa, Homo sapiens
  CDR3 for alpha chain variable domain of TCR clone 228235 (TRAV12-1, TRAJ23)
CVVNSCGGKLIF

SEQ ID NO: 456470 - protein, 13 aa, Homo sapiens
  CDR3 for beta chain variable domain of TCR clone 228235 (TRBV10-3, TRBJ2-7)
CASKLAVNYEQYF

SEQ ID NO: 456471 - protein, 17 aa, Homo sapiens
  CDR3 for alpha chain variable domain of TCR clone 228236 (TRAV38-1, TRAJ28)
CAFMKPTSGAGSYQLTF

SEQ ID NO: 456472 - protein, 14 aa, Homo sapiens
  CDR3 for beta chain variable domain of TCR clone 228236 (TRBV7-6, TRBJ2-7)
CASSFRQGADEQYF

SEQ ID NO: 456473 - protein, 14 aa, Homo sapiens
  CDR3 for alpha chain variable domain of TCR clone 228237 (TRAV27, TRAJ22)
CAGVSVLGKRQLTF

SEQ ID NO: 456474 - protein, 14 aa, Homo sapiens
  CDR3 for beta chain variable domain of TCR clone 228237 (TRBV11-2, TRBJ1-2)
CASSLGTANYGYTF

SEQ ID NO: 456475 - protein, 17 aa, Homo sapiens
  CDR3 for alpha chain variable domain of TCR clone 228238 (TRAV3, TRAJ42)
CAVRDRDYGGRQGSLIF

SEQ ID NO: 456476 - protein, 15 aa, Homo sapiens
  CDR3 for beta chain variable domain of TCR clone 228238 (TRBV6-6, TRBJ2-7)
CASSYSYGGSYEQYF

SEQ ID NO: 456477 - protein, 13 aa, Homo sapiens
  CDR3 for alpha chain variable domain of TCR clone 228239 (TRAV1-1, TRAJ9)
CAAKNTGGFKTIF

SEQ ID NO: 456478 - protein, 14 aa, Homo sapiens
  CDR3 for beta chain variable domain of TCR clone 228239 (TRBV19, TRBJ2-5)
CASSMTGQQETQYF

SEQ ID NO: 456479 - protein, 11 aa, Homo sapiens
  CDR3 for alpha chain variable domain of TCR clone 228240 (TRAV12-1, TRAJ21)
CVVYNFNKFYY

SEQ ID NO: 456480 - protein, 14 aa, Homo sapiens
  CDR3 for beta chain variable domain of TCR clone 228240 (TRBV19, TRBJ2-7)
CASSMGQGAIEQYF

SEQ ID NO: 456481 - protein, 13 aa, Homo sapiens
  CDR3 for alpha chain variable domain of TCR clone 228241 (TRAV1-1, TRAJ31)
CASYLNNNARLMV

SEQ ID NO: 456482 - protein, 14 aa, Homo sapiens
  CDR3 for beta chain variable domain of TCR clone 228241 (TRBV4-1, TRBJ2-5)
CASSRSGSGETQYF

SEQ ID NO: 456483 - protein, 15 aa, Homo sapiens
  CDR3 for alpha chain variable domain of TCR clone 228242 (TRAV13-1, TRAJ52)
CAATSPHTSYGKLTF

SEQ ID NO: 456484 - protein, 12 aa, Homo sapiens
  CDR3 for beta chain variable domain of TCR clone 228242 (TRBV7-8, TRBJ2-7)
CASSLGDREQYF

SEQ ID NO: 456485 - protein, 15 aa, Homo sapiens
  CDR3 for alpha chain variable domain of TCR clone 228243 (TRAV12-3, TRAJ6)
CAMSPASGGSYIPTF

SEQ ID NO: 456486 - protein, 13 aa, Homo sapiens
  CDR3 for beta chain variable domain of TCR clone 228243 (TRBV7-9, TRBJ1-2)
CASSLKQNYGYTF

SEQ ID NO: 456487 - protein, 13 aa, Homo sapiens
  CDR3 for alpha chain variable domain of TCR clone 228244 (TRAV2, TRAJ40)
CAVVTSGTYKYIF

SEQ ID NO: 456488 - protein, 16 aa, Homo sapiens
  CDR3 for beta chain variable domain of TCR clone 228244 (TRBV29-1, TRBJ1-2)
CSFEANRDIANYGYTF

SEQ ID NO: 456489 - protein, 11 aa, Homo sapiens
  CDR3 for alpha chain variable domain of TCR clone 228245 (TRAV35, TRAJ30)
CAGPGGDKIIF

SEQ ID NO: 456490 - protein, 14 aa, Homo sapiens
  CDR3 for beta chain variable domain of TCR clone 228245 (TRBV7-6, TRBJ1-6)
CASSQAGGGSPLLF

SEQ ID NO: 456491 - protein, 15 aa, Homo sapiens
  CDR3 for alpha chain variable domain of TCR clone 228246 (TRAV4, TRAJ26)
CLGGDMNNYGQNFVF

SEQ ID NO: 456492 - protein, 16 aa, Homo sapiens
  CDR3 for beta chain variable domain of TCR clone 228246 (TRBV28, TRBJ1-4)
CASSSRTGAANEQLFF

SEQ ID NO: 456493 - protein, 13 aa, Homo sapiens
  CDR3 for alpha chain variable domain of TCR clone 228247 (TRAV27, TRAJ37)
CAGGPSNTGKLIF

SEQ ID NO: 456494 - protein, 13 aa, Homo sapiens
  CDR3 for beta chain variable domain of TCR clone 228247 (TRBV12-4, TRBJ2-7)
CASSPTETYEQYF

SEQ ID NO: 456495 - protein, 15 aa, Homo sapiens
  CDR3 for alpha chain variable domain of TCR clone 228248 (TRAV8-3, TRAJ11)
CAVGLLNSRYSTLTF

SEQ ID NO: 456496 - protein, 16 aa, Homo sapiens
  CDR3 for beta chain variable domain of TCR clone 228248 (TRBV7-9, TRBJ1-2)
CASSVGFSSGEDGYTF

SEQ ID NO: 456497 - protein, 11 aa, Homo sapiens
  CDR3 for alpha chain variable domain of TCR clone 228249 (TRAV29/DV5, TRAJ43)
CAAKTNNDMRF

SEQ ID NO: 456498 - protein, 14 aa, Homo sapiens
  CDR3 for beta chain variable domain of TCR clone 228249 (TRBV11-2, TRBJ2-7)
CASSPSTISYEQYF

SEQ ID NO: 456499 - protein, 10 aa, Homo sapiens
  CDR3 for alpha chain variable domain of TCR clone 228250 (TRAV2, TRAJ34)
CAVVNDKLIF

SEQ ID NO: 456500 - protein, 15 aa, Homo sapiens
  CDR3 for beta chain variable domain of TCR clone 228250 (TRBV20-1, TRBJ2-3)
CSARPSGCYTDTQYF

SEQ ID NO: 456501 - protein, 14 aa, Homo sapiens
  CDR3 for alpha chain variable domain of TCR clone 228251 (TRAV8-4, TRAJ40)
CAVIPTSGTYKYIF

SEQ ID NO: 456502 - protein, 14 aa, Homo sapiens
  CDR3 for beta chain variable domain of TCR clone 228251 (TRBV6-3, TRBJ1-1)
CASSYQRRDTEAFF

SEQ ID NO: 456503 - protein, 16 aa, Homo sapiens
  CDR3 for alpha chain variable domain of TCR clone 228252 (TRAV30, TRAJ49)
SAAQRVGPNIGNQFYF

SEQ ID NO: 456504 - protein, 15 aa, Homo sapiens
  CDR3 for beta chain variable domain of TCR clone 228252 (TRBV2, TRBJ2-1)
CASSELAGSYNEQFF

SEQ ID NO: 456505 - protein, 13 aa, Homo sapiens
  CDR3 for alpha chain variable domain of TCR clone 228253 (TRAV8-4, TRAJ46)
CAVKKSSGDKLTF

SEQ ID NO: 456506 - protein, 15 aa, Homo sapiens
  CDR3 for beta chain variable domain of TCR clone 228253 (TRBV7-2, TRBJ2-7)
CASSLKGALTYEQYF

SEQ ID NO: 456507 - protein, 14 aa, Homo sapiens
  CDR3 for alpha chain variable domain of TCR clone 228254 (TRAV1-2, TRAJ16)
CAVNRFSDGQKLLF

SEQ ID NO: 456508 - protein, 15 aa, Homo sapiens
  CDR3 for beta chain variable domain of TCR clone 228254 (TRBV20-1, TRBJ2-7)
CSARDRVSGMDELYF

SEQ ID NO: 456509 - protein, 14 aa, Homo sapiens
  CDR3 for alpha chain variable domain of TCR clone 228255 (TRAV14/DV4, TRAJ41)
CARGGPDSGYALNL

SEQ ID NO: 456510 - protein, 15 aa, Homo sapiens
  CDR3 for beta chain variable domain of TCR clone 228255 (TRBV19, TRBJ2-1)
CASSIQATSYNEQFF

SEQ ID NO: 456511 - protein, 16 aa, Homo sapiens
  CDR3 for alpha chain variable domain of TCR clone 228256 (TRAV3, TRAJ37)
CAVRPHGSGNTGKLIF

SEQ ID NO: 456512 - protein, 17 aa, Homo sapiens
  CDR3 for beta chain variable domain of TCR clone 228256 (TRBV25-1, TRBJ2-7)
CASSDARVVFSSYEQYF

SEQ ID NO: 456513 - protein, 16 aa, Homo sapiens
  CDR3 for alpha chain variable domain of TCR clone 228257 (TRAV3, TRAJ37)
CAVRGKGSANTGKLIF

SEQ ID NO: 456514 - protein, 16 aa, Homo sapiens
  CDR3 for beta chain variable domain of TCR clone 228257 (TRBV12-4, TRBJ1-5)
CASSRPVGGSNQPQHF

SEQ ID NO: 456515 - protein, 12 aa, Homo sapiens
  CDR3 for alpha chain variable domain of TCR clone 228258 (TRAV6, TRAJ20)
CALDRGDYKLSF

SEQ ID NO: 456516 - protein, 12 aa, Homo sapiens
  CDR3 for beta chain variable domain of TCR clone 228258 (TRBV7-9, TRBJ2-7)
CASSLEGYEQYF

SEQ ID NO: 456517 - protein, 11 aa, Homo sapiens
  CDR3 for alpha chain variable domain of TCR clone 228259 (TRAV12-1, TRAJ21)
CVVNNFNKFYF

SEQ ID NO: 456518 - protein, 13 aa, Homo sapiens
  CDR3 for beta chain variable domain of TCR clone 228259 (TRBV7-9, TRBJ2-3)
CASSPGSTDTQYF

SEQ ID NO: 456519 - protein, 15 aa, Homo sapiens
  CDR3 for alpha chain variable domain of TCR clone 228260 (TRAV21, TRAJ52)
CATRGGGTSYGKLTF

SEQ ID NO: 456520 - protein, 14 aa, Homo sapiens
  CDR3 for beta chain variable domain of TCR clone 228260 (TRBV28, TRBJ2-3)
CASSSVPSTDTQYF

SEQ ID NO: 456521 - protein, 14 aa, Homo sapiens
  CDR3 for alpha chain variable domain of TCR clone 228261 (TRAV2, TRAJ9)
CAVDPNTGGFKTVF

SEQ ID NO: 456522 - protein, 15 aa, Homo sapiens
  CDR3 for beta chain variable domain of TCR clone 228261 (TRBV5-1, TRBJ1-1)
CASSLAPRGNTEAFF

SEQ ID NO: 456523 - protein, 13 aa, Homo sapiens
  CDR3 for alpha chain variable domain of TCR clone 228262 (TRAV4, TRAJ22)
CLGGSGSARQLTF

SEQ ID NO: 456524 - protein, 15 aa, Homo sapiens
  CDR3 for beta chain variable domain of TCR clone 228262 (TRBV7-9, TRBJ1-6)
CASSSPGRGNSPLLC

SEQ ID NO: 456525 - protein, 15 aa, Homo sapiens
  CDR3 for alpha chain variable domain of TCR clone 228263 (TRAV12-2, TRAJ53)
CAVNGGGGSNYKLTF

SEQ ID NO: 456526 - protein, 16 aa, Homo sapiens
  CDR3 for beta chain variable domain of TCR clone 228263 (TRBV11-2, TRBJ1-2)
CASSLDTGGADYGYTF

SEQ ID NO: 456527 - protein, 14 aa, Homo sapiens
  CDR3 for alpha chain variable domain of TCR clone 228264 (TRAV21, TRAJ23)
CAIIIYNQGGKLIF

SEQ ID NO: 456528 - protein, 18 aa, Homo sapiens
  CDR3 for beta chain variable domain of TCR clone 228264 (TRBV20-1, TRBJ2-6)
CSAETTPTHGSGANVLTF

SEQ ID NO: 456529 - protein, 11 aa, Homo sapiens
  CDR3 for alpha chain variable domain of TCR clone 228265 (TRAV12-3, TRAJ29)
CSKEGNTPLVF

SEQ ID NO: 456530 - protein, 17 aa, Homo sapiens
  CDR3 for beta chain variable domain of TCR clone 228265 (TRBV18, TRBJ2-1)
CASSPLAAGAGDNEQFF

SEQ ID NO: 456531 - protein, 14 aa, Homo sapiens
  CDR3 for alpha chain variable domain of TCR clone 228266 (TRAV1-2, TRAJ12)
CAVSGTDSSYKLIF

SEQ ID NO: 456532 - protein, 15 aa, Homo sapiens
  CDR3 for beta chain variable domain of TCR clone 228266 (TRBV2, TRBJ2-4)
CASSGTNLAKNTQYF

SEQ ID NO: 456533 - protein, 11 aa, Homo sapiens
  CDR3 for alpha chain variable domain of TCR clone 228267 (TRAV17, TRAJ43)
CATPRSNGMRF

SEQ ID NO: 456534 - protein, 15 aa, Homo sapiens
  CDR3 for beta chain variable domain of TCR clone 228267 (TRBV11-2, TRBJ2-1)
SASSLGTSGLNEQFF

SEQ ID NO: 456535 - protein, 12 aa, Homo sapiens
  CDR3 for alpha chain variable domain of TCR clone 228268 (TRAV12-3, TRAJ17)
CAMTLTGNKLTF

SEQ ID NO: 456536 - protein, 15 aa, Homo sapiens
  CDR3 for beta chain variable domain of TCR clone 228268 (TRBV27, TRBJ2-3)
CASSLGLAATDTQYF

SEQ ID NO: 456537 - protein, 14 aa, Homo sapiens
  CDR3 for alpha chain variable domain of TCR clone 228269 (TRAV12-2, TRAJ13)
CAVKKTGGYQKVTF

SEQ ID NO: 456538 - protein, 13 aa, Homo sapiens
  CDR3 for beta chain variable domain of TCR clone 228269 (TRBV18, TRBJ2-5)
CASSPIPGETQYF

SEQ ID NO: 456539 - protein, 14 aa, Homo sapiens
  CDR3 for alpha chain variable domain of TCR clone 228270 (TRAV12-2, TRAJ13)
CAVKKTGGYQKVTF

SEQ ID NO: 456540 - protein, 17 aa, Homo sapiens
  CDR3 for beta chain variable domain of TCR clone 228270 (TRBV7-3, TRBJ2-3)
RASSLMKRMRGADTQYF

SEQ ID NO: 456541 - protein, 13 aa, Homo sapiens
  CDR3 for alpha chain variable domain of TCR clone 228271 (TRAV2, TRAJ47)
CAVDREYGNKLFF

SEQ ID NO: 456542 - protein, 17 aa, Homo sapiens
  CDR3 for beta chain variable domain of TCR clone 228271 (TRBV15, TRBJ1-5)
CATSRVKGIYRNQPQHF

SEQ ID NO: 456543 - protein, 12 aa, Homo sapiens
  CDR3 for alpha chain variable domain of TCR clone 228272 (TRAV12-3, TRAJ17)
CAMTLTGNKQTY

SEQ ID NO: 456544 - protein, 15 aa, Homo sapiens
  CDR3 for beta chain variable domain of TCR clone 228272 (TRBV20-1, TRBJ2-7)
CSARDWVSGMDEQYF

SEQ ID NO: 456545 - protein, 14 aa, Homo sapiens
  CDR3 for alpha chain variable domain of TCR clone 228273 (TRAV12-1, TRAJ42)
CVVIYGGSQGNLIF

SEQ ID NO: 456546 - protein, 15 aa, Homo sapiens
  CDR3 for beta chain variable domain of TCR clone 228273 (TRBV19, TRBJ1-6)
CASSTQGAVGSPLHF

SEQ ID NO: 456547 - protein, 11 aa, Homo sapiens
  CDR3 for alpha chain variable domain of TCR clone 228274 (TRAV1-2, TRAJ40)
CAVPGTYQYFF

SEQ ID NO: 456548 - protein, 16 aa, Homo sapiens
  CDR3 for beta chain variable domain of TCR clone 228274 (TRBV29-1, TRBJ2-7)
CSVEVVGTSGSYEQYF

SEQ ID NO: 456549 - protein, 10 aa, Homo sapiens
  CDR3 for alpha chain variable domain of TCR clone 228275 (TRAV8-6, TRAJ34)
CAVNTDKLIF

SEQ ID NO: 456550 - protein, 17 aa, Homo sapiens
  CDR3 for beta chain variable domain of TCR clone 228275 (TRBV7-9, TRBJ2-3)
CASSLEEAGAYPDTQYF

SEQ ID NO: 456551 - protein, 16 aa, Homo sapiens
  CDR3 for alpha chain variable domain of TCR clone 228276 (TRAV30, TRAJ24)
CGTEIVDADSWGKFQF

SEQ ID NO: 456552 - protein, 14 aa, Homo sapiens
  CDR3 for beta chain variable domain of TCR clone 228276 (TRBV12-5, TRBJ2-5)
CASGSRTHQATPYF

SEQ ID NO: 456553 - protein, 15 aa, Homo sapiens
  CDR3 for alpha chain variable domain of TCR clone 228277 (TRAV3, TRAJ5)
CAVRDLDTGRRALTF

SEQ ID NO: 456554 - protein, 15 aa, Homo sapiens
  CDR3 for beta chain variable domain of TCR clone 228277 (TRBV7-3, TRBJ2-1)
CASSPTGGGEVEQFF

SEQ ID NO: 456555 - protein, 11 aa, Homo sapiens
  CDR3 for alpha chain variable domain of TCR clone 228278 (TRAV12-1, TRAJ21)
CVGNNFNKFYF

SEQ ID NO: 456556 - protein, 14 aa, Homo sapiens
  CDR3 for beta chain variable domain of TCR clone 228278 (TRBV15, TRBJ1-5)
CATSIEQSNQPQHF

SEQ ID NO: 456557 - protein, 16 aa, Homo sapiens
  CDR3 for alpha chain variable domain of TCR clone 228279 (TRAV14/DV4, TRAJ53)
CAMREGGGGSNYKMTF

SEQ ID NO: 456558 - protein, 14 aa, Homo sapiens
  CDR3 for beta chain variable domain of TCR clone 228279 (TRBV20-1, TRBJ2-7)
CSAKTGTGGYEQYF

SEQ ID NO: 456559 - protein, 13 aa, Homo sapiens
  CDR3 for alpha chain variable domain of TCR clone 228280 (TRAV6, TRAJ20)
CALAVSNDYKLSF

SEQ ID NO: 456560 - protein, 12 aa, Homo sapiens
  CDR3 for beta chain variable domain of TCR clone 228280 (TRBV11-2, TRBJ2-1)
CASSPGNNEQFF

SEQ ID NO: 456561 - protein, 14 aa, Homo sapiens
  CDR3 for alpha chain variable domain of TCR clone 228281 (TRAV12-2, TRAJ13)
CAVKKTGGDQKVTF

SEQ ID NO: 456562 - protein, 15 aa, Homo sapiens
  CDR3 for beta chain variable domain of TCR clone 228281 (TRBV7-2, TRBJ2-1)
CASSLASGRVNEQFF

SEQ ID NO: 456563 - protein, 11 aa, Homo sapiens
  CDR3 for alpha chain variable domain of TCR clone 228282 (TRAV13-1, TRAJ15)
CAATPGTALIF

SEQ ID NO: 456564 - protein, 17 aa, Homo sapiens
  CDR3 for beta chain variable domain of TCR clone 228282 (TRBV13, TRBJ2-3)
CASSLSRVAGGRNTQYC

SEQ ID NO: 456565 - protein, 11 aa, Homo sapiens
  CDR3 for alpha chain variable domain of TCR clone 228283 (TRAV12-1, TRAJ34)
CVVNKGRELIF

SEQ ID NO: 456566 - protein, 16 aa, Homo sapiens
  CDR3 for beta chain variable domain of TCR clone 228283 (TRBV5-4, TRBJ2-3)
CASQQPGAGGADTQHF

SEQ ID NO: 456567 - protein, 15 aa, Homo sapiens
  CDR3 for alpha chain variable domain of TCR clone 228284 (TRAV17, TRAJ57)
CATGPFQGGSEKLVF

SEQ ID NO: 456568 - protein, 15 aa, Homo sapiens
  CDR3 for beta chain variable domain of TCR clone 228284 (TRBV25-1, TRBJ1-4)
CASSPGDSTNEKLFF

SEQ ID NO: 456569 - protein, 15 aa, Homo sapiens
  CDR3 for alpha chain variable domain of TCR clone 228285 (TRAV23/DV6, TRAJ18)
CAARYRGSTLGRLYF

SEQ ID NO: 456570 - protein, 12 aa, Homo sapiens
  CDR3 for beta chain variable domain of TCR clone 228285 (TRBV19, TRBJ2-1)
CASGTSLNEQFF

SEQ ID NO: 456571 - protein, 13 aa, Homo sapiens
  CDR3 for alpha chain variable domain of TCR clone 228286 (TRAV16, TRAJ26)
CITVLCLGQNFVF

SEQ ID NO: 456572 - protein, 12 aa, Homo sapiens
  CDR3 for beta chain variable domain of TCR clone 228286 (TRBV11-2, TRBJ2-1)
CASCPGNNEQFF

SEQ ID NO: 456573 - protein, 16 aa, Homo sapiens
  CDR3 for alpha chain variable domain of TCR clone 228287 (TRAV12-2, TRAJ28)
CAVNEYSGAGSYQLTF

SEQ ID NO: 456574 - protein, 13 aa, Homo sapiens
  CDR3 for beta chain variable domain of TCR clone 228287 (TRBV11-2, TRBJ2-1)
CASSLDLVNEQFF

SEQ ID NO: 456575 - protein, 14 aa, Homo sapiens
  CDR3 for alpha chain variable domain of TCR clone 228288 (TRAV13-1, TRAJ23)
CAASRLGRGGKLIF

SEQ ID NO: 456576 - protein, 13 aa, Homo sapiens
  CDR3 for beta chain variable domain of TCR clone 228288 (TRBV20-1, TRBJ1-1)
CSTQLGGGTEAFL

SEQ ID NO: 456577 - protein, 14 aa, Homo sapiens
  CDR3 for alpha chain variable domain of TCR clone 228289 (TRAV21, TRAJ28)
CAVGSGGGSYQLTF

SEQ ID NO: 456578 - protein, 14 aa, Homo sapiens
  CDR3 for beta chain variable domain of TCR clone 228289 (TRBV18, TRBJ1-4)
CASSPGPNGEKLFF

SEQ ID NO: 456579 - protein, 13 aa, Homo sapiens
  CDR3 for alpha chain variable domain of TCR clone 228290 (TRAV17, TRAJ7)
CATDNYGNNRLAF

SEQ ID NO: 456580 - protein, 16 aa, Homo sapiens
  CDR3 for beta chain variable domain of TCR clone 228290 (TRBV4-1, TRBJ2-5)
CVSSQAIAASSATQYF

SEQ ID NO: 456581 - protein, 14 aa, Homo sapiens
  CDR3 for alpha chain variable domain of TCR clone 228291 (TRAV16, TRAJ42)
CALLAGGSQGNLIF

SEQ ID NO: 456582 - protein, 12 aa, Homo sapiens
  CDR3 for beta chain variable domain of TCR clone 228291 (TRBV7-3, TRBJ2-1)
CASSFINNEQFF

SEQ ID NO: 456583 - protein, 12 aa, Homo sapiens
  CDR3 for alpha chain variable domain of TCR clone 228292 (TRAV3, TRAJ17)
CAVRSCRQQANF

SEQ ID NO: 456584 - protein, 15 aa, Homo sapiens
  CDR3 for beta chain variable domain of TCR clone 228292 (TRBV2, TRBJ2-4)
CASSGTNLAKNMQHF

SEQ ID NO: 456585 - protein, 11 aa, Homo sapiens
  CDR3 for alpha chain variable domain of TCR clone 228293 (TRAV17, TRAJ31)
CATSNNARLMF

SEQ ID NO: 456586 - protein, 13 aa, Homo sapiens
  CDR3 for beta chain variable domain of TCR clone 228293 (TRBV18, TRBJ2-7)
CASSPRGGAYEQY

SEQ ID NO: 456587 - protein, 14 aa, Homo sapiens
  CDR3 for alpha chain variable domain of TCR clone 228294 (TRAV9-2, TRAJ39)
CALYIYNAGNMPTF

SEQ ID NO: 456588 - protein, 11 aa, Homo sapiens
  CDR3 for beta chain variable domain of TCR clone 228294 (TRBV29-1, TRBJ2-5)
CSAASGETQYF

SEQ ID NO: 456589 - protein, 17 aa, Homo sapiens
  CDR3 for alpha chain variable domain of TCR clone 228295 (TRAV13-2, TRAJ5)
CAESVVIVEHGQESTYF

SEQ ID NO: 456590 - protein, 18 aa, Homo sapiens
  CDR3 for beta chain variable domain of TCR clone 228295 (TRBV4-1, TRBJ2-3)
CASSHQLAGGRSTDTQYF

SEQ ID NO: 456591 - protein, 14 aa, Homo sapiens
  CDR3 for alpha chain variable domain of TCR clone 228296 (TRAV8-2, TRAJ5)
CVVIMDTGRRALTF

SEQ ID NO: 456592 - protein, 15 aa, Homo sapiens
  CDR3 for beta chain variable domain of TCR clone 228296 (TRBV7-8, TRBJ2-1)
CASSLADSLYNEQFF

SEQ ID NO: 456593 - protein, 13 aa, Homo sapiens
  CDR3 for alpha chain variable domain of TCR clone 228297 (TRAV36/DV7, TRAJ53)
CALRGGSNYKLTF

SEQ ID NO: 456594 - protein, 17 aa, Homo sapiens
  CDR3 for beta chain variable domain of TCR clone 228297 (TRBV20-1, TRBJ2-1)
CSAPPRLAGTRYNEQFF

SEQ ID NO: 456595 - protein, 15 aa, Homo sapiens
  CDR3 for alpha chain variable domain of TCR clone 228298 (TRAV8-1, TRAJ6)
CAVNAGAGGSYIPTF

SEQ ID NO: 456596 - protein, 14 aa, Homo sapiens
  CDR3 for beta chain variable domain of TCR clone 228298 (TRBV25-1, TRBJ1-6)
CASSLSADISTLHV

SEQ ID NO: 456597 - protein, 13 aa, Homo sapiens
  CDR3 for alpha chain variable domain of TCR clone 228299 (TRAV13-2, TRAJ13)
CAERPGGYQKVTF

SEQ ID NO: 456598 - protein, 14 aa, Homo sapiens
  CDR3 for beta chain variable domain of TCR clone 228299 (TRBV19, TRBJ2-1)
CASSMGSGRRSSSS

SEQ ID NO: 456599 - protein, 14 aa, Homo sapiens
  CDR3 for alpha chain variable domain of TCR clone 228300 (TRAV38-1, TRAJ40)
CALRPTSGTYKYTL

SEQ ID NO: 456600 - protein, 14 aa, Homo sapiens
  CDR3 for beta chain variable domain of TCR clone 228300 (TRBV25-1, TRBJ1-1)
CASTHLGGSTEAFF

SEQ ID NO: 456601 - protein, 14 aa, Homo sapiens
  CDR3 for alpha chain variable domain of TCR clone 228301 (TRAV3, TRAJ26)
CAVRERNYGQNFVF

SEQ ID NO: 456602 - protein, 14 aa, Homo sapiens
  CDR3 for beta chain variable domain of TCR clone 228301 (TRBV19, TRBJ2-1)
CASKDPSSYNEQFF

SEQ ID NO: 456603 - protein, 23 aa, Homo sapiens
  CDR3 for alpha chain variable domain of TCR clone 228302 (TRAV26-1, TRAJ38)
CIADNAGNNHIQNPDPAVYQLRD

SEQ ID NO: 456604 - protein, 15 aa, Homo sapiens
  CDR3 for beta chain variable domain of TCR clone 228302 (TRBV5-1, TRBJ1-4)
FAPAAWKDGNEKLFF

SEQ ID NO: 456605 - protein, 14 aa, Homo sapiens
  CDR3 for alpha chain variable domain of TCR clone 228303 (TRAV9-2, TRAJ39)
CALYIYNAGNMLTF

SEQ ID NO: 456606 - protein, 16 aa, Homo sapiens
  CDR3 for beta chain variable domain of TCR clone 228303 (TRBV20-1, TRBJ1-4)
CSAPGQCLLTNEKLFF

SEQ ID NO: 456607 - protein, 13 aa, Homo sapiens
  CDR3 for alpha chain variable domain of TCR clone 228304 (TRAV2, TRAJ20)
CAVEDPSEYKLSF

SEQ ID NO: 456608 - protein, 16 aa, Homo sapiens
  CDR3 for beta chain variable domain of TCR clone 228304 (TRBV25-1, TRBJ2-7)
CASRELTGGGIYEQYF

SEQ ID NO: 456609 - protein, 11 aa, Homo sapiens
  CDR3 for alpha chain variable domain of TCR clone 228305 (TRAV17, TRAJ36)
CAPTGANNLFF

SEQ ID NO: 456610 - protein, 16 aa, Homo sapiens
  CDR3 for beta chain variable domain of TCR clone 228305 (TRBV7-2, TRBJ1-2)
CASSRQGGGANYGYTF

SEQ ID NO: 456611 - protein, 18 aa, Homo sapiens
  CDR3 for alpha chain variable domain of TCR clone 228306 (TRAV12-3, TRAJ52)
CAMSVGEAGGTSYGKLTF

SEQ ID NO: 456612 - protein, 17 aa, Homo sapiens
  CDR3 for beta chain variable domain of TCR clone 228306 (TRBV13, TRBJ2-3)
CASSLSRVAGGRDTQYF

SEQ ID NO: 456613 - protein, 19 aa, Homo sapiens
  CDR3 for alpha chain variable domain of TCR clone 228307 (TRAV1-2, TRAJ26)
CLLPLFCERPDNYGQNFVF

SEQ ID NO: 456614 - protein, 11 aa, Homo sapiens
  CDR3 for beta chain variable domain of TCR clone 228307 (TRBV29-1, TRBJ2-5)
CSEDRTGTQYF

SEQ ID NO: 456615 - protein, 16 aa, Homo sapiens
  CDR3 for alpha chain variable domain of TCR clone 228308 (TRAV3, TRAJ13)
CAVRDPNSGCYQKVTF

SEQ ID NO: 456616 - protein, 13 aa, Homo sapiens
  CDR3 for beta chain variable domain of TCR clone 228308 (TRBV7-9, TRBJ2-7)
CASSLQGSYEQYF

SEQ ID NO: 456617 - protein, 14 aa, Homo sapiens
  CDR3 for alpha chain variable domain of TCR clone 228309 (TRAV16, TRAJ39)
CALSKNNAGNLLTF

SEQ ID NO: 456618 - protein, 16 aa, Homo sapiens
  CDR3 for beta chain variable domain of TCR clone 228309 (TRBV6-6, TRBJ2-1)
CASSYSFSGSYNEQFF

SEQ ID NO: 456619 - protein, 17 aa, Homo sapiens
  CDR3 for alpha chain variable domain of TCR clone 228310 (TRAV8-6, TRAJ58)
CAVSSWVGETSGSRLTF

SEQ ID NO: 456620 - protein, 15 aa, Homo sapiens
  CDR3 for beta chain variable domain of TCR clone 228310 (TRBV20-1, TRBJ2-7)
CSARVPAAYFYEQYF

SEQ ID NO: 456621 - protein, 17 aa, Homo sapiens
  CDR3 for alpha chain variable domain of TCR clone 228311 (TRAV26-2, TRAJ42)
FILRDVGYGGSQGNPIF

SEQ ID NO: 456622 - protein, 16 aa, Homo sapiens
  CDR3 for beta chain variable domain of TCR clone 228311 (TRBV12-4, TRBJ2-7)
CASSLIGGTGTYEQYF

SEQ ID NO: 456623 - protein, 13 aa, Homo sapiens
  CDR3 for alpha chain variable domain of TCR clone 228312 (TRAV13-1, TRAJ33)
CSASRAGNYQLIW

SEQ ID NO: 456624 - protein, 15 aa, Homo sapiens
  CDR3 for beta chain variable domain of TCR clone 228312 (TRBV2, TRBJ2-7)
EDSAMYFCASSEQYF

SEQ ID NO: 456625 - protein, 12 aa, Homo sapiens
  CDR3 for alpha chain variable domain of TCR clone 228313 (TRAV12-3, TRAJ17)
CALTLTGNKLTS

SEQ ID NO: 456626 - protein, 15 aa, Homo sapiens
  CDR3 for beta chain variable domain of TCR clone 228313 (TRBV20-1, TRBJ2-7)
CSARDRVSGMDEQYF

SEQ ID NO: 456627 - protein, 14 aa, Homo sapiens
  CDR3 for alpha chain variable domain of TCR clone 228314 (TRAV12-2, TRAJ13)
CAVKKTGGYQKVTF

SEQ ID NO: 456628 - protein, 17 aa, Homo sapiens
  CDR3 for beta chain variable domain of TCR clone 228314 (TRBV6-5, TRBJ2-2)
CASSYSTSGGNTGELFF

SEQ ID NO: 456629 - protein, 20 aa, Homo sapiens
  CDR3 for alpha chain variable domain of TCR clone 228315 (TRAV26-1, TRAJ42)
CCVLLHRQTYYGGSQGNLIF

SEQ ID NO: 456630 - protein, 16 aa, Homo sapiens
  CDR3 for beta chain variable domain of TCR clone 228315 (TRBV7-3, TRBJ2-2)
CASCLKRGTLSGELFF

SEQ ID NO: 456631 - protein, 17 aa, Homo sapiens
  CDR3 for alpha chain variable domain of TCR clone 228316 (TRAV14/DV4, TRAJ28)
CAMRGRSSGAGSYQLTF

SEQ ID NO: 456632 - protein, 13 aa, Homo sapiens
  CDR3 for beta chain variable domain of TCR clone 228316 (TRBV28, TRBJ2-5)
CASSFAGGETQYF

SEQ ID NO: 456633 - protein, 13 aa, Homo sapiens
  CDR3 for alpha chain variable domain of TCR clone 228317 (TRAV27, TRAJ41)
CAGEGNTGYALNF

SEQ ID NO: 456634 - protein, 15 aa, Homo sapiens
  CDR3 for beta chain variable domain of TCR clone 228317 (TRBV6-3, TRBJ2-7)
CASSSPGTVFYEQYF

SEQ ID NO: 456635 - protein, 13 aa, Homo sapiens
  CDR3 for alpha chain variable domain of TCR clone 228318 (TRAV27, TRAJ42)
CAGARGSQGNLIF

SEQ ID NO: 456636 - protein, 14 aa, Homo sapiens
  CDR3 for beta chain variable domain of TCR clone 228318 (TRBV20-1, TRBJ1-1)
CSAQTRIGGTEAVS

SEQ ID NO: 456637 - protein, 11 aa, Homo sapiens
  CDR3 for alpha chain variable domain of TCR clone 228319 (TRAV13-2, TRAJ50)
CAENLNDNVIF

SEQ ID NO: 456638 - protein, 13 aa, Homo sapiens
  CDR3 for beta chain variable domain of TCR clone 228319 (TRBV11-2, TRBJ2-7)
CASSTSRSLEQYF

SEQ ID NO: 456639 - protein, 12 aa, Homo sapiens
  CDR3 for alpha chain variable domain of TCR clone 228320 (TRAV13-2, TRAJ23)
CADRHRGGKLIF

SEQ ID NO: 456640 - protein, 13 aa, Homo sapiens
  CDR3 for beta chain variable domain of TCR clone 228320 (TRBV15, TRBJ1-6)
CATSGGLNSPLHF

SEQ ID NO: 456641 - protein, 13 aa, Homo sapiens
  CDR3 for alpha chain variable domain of TCR clone 228321 (TRAV35, TRAJ44)
CAGLSGTASKLTF

SEQ ID NO: 456642 - protein, 17 aa, Homo sapiens
  CDR3 for beta chain variable domain of TCR clone 228321 (TRBV7-8, TRBJ1-2)
CASSLRPLQGHLYRHTF

SEQ ID NO: 456643 - protein, 15 aa, Homo sapiens
  CDR3 for alpha chain variable domain of TCR clone 228322 (TRAV8-4, TRAJ39)
CAVSHHRGAGNMLTF

SEQ ID NO: 456644 - protein, 14 aa, Homo sapiens
  CDR3 for beta chain variable domain of TCR clone 228322 (TRBV7-2, TRBJ2-7)
CASSPKTSFYEQYF

SEQ ID NO: 456645 - protein, 14 aa, Homo sapiens
  CDR3 for alpha chain variable domain of TCR clone 228323 (TRAV2, TRAJ9)
CAVEDRSGGFETII

SEQ ID NO: 456646 - protein, 13 aa, Homo sapiens
  CDR3 for beta chain variable domain of TCR clone 228323 (TRBV7-9, TRBJ1-2)
CASSLKQNYGYTF

SEQ ID NO: 456647 - protein, 13 aa, Homo sapiens
  CDR3 for alpha chain variable domain of TCR clone 228324 (TRAV8-3, TRAJ43)
CAVAPYNNNDMRF

SEQ ID NO: 456648 - protein, 17 aa, Homo sapiens
  CDR3 for beta chain variable domain of TCR clone 228324 (TRBV7-7, TRBJ1-1)
CASIGDRPNLGVTEAFF

SEQ ID NO: 456649 - protein, 13 aa, Homo sapiens
  CDR3 for alpha chain variable domain of TCR clone 228325 (TRAV13-1, TRAJ6)
CAARRGGSYIPTF

SEQ ID NO: 456650 - protein, 16 aa, Homo sapiens
  CDR3 for beta chain variable domain of TCR clone 228325 (TRBV7-9, TRBJ2-2)
CAGSLATGVGTGELSF

SEQ ID NO: 456651 - protein, 13 aa, Homo sapiens
  CDR3 for alpha chain variable domain of TCR clone 228326 (TRAV35, TRAJ48)
CAGHEFGNEKLTF

SEQ ID NO: 456652 - protein, 14 aa, Homo sapiens
  CDR3 for beta chain variable domain of TCR clone 228326 (TRBV19, TRBJ2-1)
CASPTFVLSGEQVF

SEQ ID NO: 456653 - protein, 12 aa, Homo sapiens
  CDR3 for alpha chain variable domain of TCR clone 228327 (TRAV8-3, TRAJ41)
CAVGALGYALNF

SEQ ID NO: 456654 - protein, 13 aa, Homo sapiens
  CDR3 for beta chain variable domain of TCR clone 228327 (TRBV5-7, TRBJ1-2)
CASSLIRAPGYTF

SEQ ID NO: 456655 - protein, 14 aa, Homo sapiens
  CDR3 for alpha chain variable domain of TCR clone 228328 (TRAV1-2, TRAJ16)
YAVNRFSDGQKLLF

SEQ ID NO: 456656 - protein, 15 aa, Homo sapiens
  CDR3 for beta chain variable domain of TCR clone 228328 (TRBV9, TRBJ1-6)
CASSVAGTGGSPLHF

SEQ ID NO: 456657 - protein, 13 aa, Homo sapiens
  CDR3 for alpha chain variable domain of TCR clone 228329 (TRAV1-1, TRAJ11)
CAVLNSGYSTLTF

SEQ ID NO: 456658 - protein, 20 aa, Homo sapiens
  CDR3 for beta chain variable domain of TCR clone 228329 (TRBV7-8, TRBJ2-2)
CASSHLFPGSTIHITGELFF

SEQ ID NO: 456659 - protein, 12 aa, Homo sapiens
  CDR3 for alpha chain variable domain of TCR clone 228330 (TRAV20, TRAJ39)
CSVGNAGNMLTF

SEQ ID NO: 456660 - protein, 16 aa, Homo sapiens
  CDR3 for beta chain variable domain of TCR clone 228330 (TRBV15, TRBJ1-2)
CATSRGPRTGGGGYTF

SEQ ID NO: 456661 - protein, 11 aa, Homo sapiens
  CDR3 for alpha chain variable domain of TCR clone 228331 (TRAV22, TRAJ20)
CAPLHDYKLSF

SEQ ID NO: 456662 - protein, 15 aa, Homo sapiens
  CDR3 for beta chain variable domain of TCR clone 228331 (TRBV2, TRBJ2-1)
CASSELAGSYNEQFF

SEQ ID NO: 456663 - protein, 12 aa, Homo sapiens
  CDR3 for alpha chain variable domain of TCR clone 228332 (TRAV12-3, TRAJ17)
CAMTLTGNKLTF

SEQ ID NO: 456664 - protein, 15 aa, Homo sapiens
  CDR3 for beta chain variable domain of TCR clone 228332 (TRBV20-1, TRBJ2-7)
CSATDRVSGMDEQYY

SEQ ID NO: 456665 - protein, 14 aa, Homo sapiens
  CDR3 for alpha chain variable domain of TCR clone 228333 (TRAV38-1, TRAJ40)
CSLRPTSGTYKYIF

SEQ ID NO: 456666 - protein, 14 aa, Homo sapiens
  CDR3 for beta chain variable domain of TCR clone 228333 (TRBV5-4, TRBJ1-1)
CASSLDSRRDEAFF

SEQ ID NO: 456667 - protein, 13 aa, Homo sapiens
  CDR3 for alpha chain variable domain of TCR clone 228334 (TRAV20, TRAJ20)
CAVQAGSGYKLSF

SEQ ID NO: 456668 - protein, 16 aa, Homo sapiens
  CDR3 for beta chain variable domain of TCR clone 228334 (TRBV5-1, TRBJ2-3)
CASSLAAGISTDTQYF

SEQ ID NO: 456669 - protein, 14 aa, Homo sapiens
  CDR3 for alpha chain variable domain of TCR clone 228335 (TRAV27, TRAJ22)
CAGVSVLGERQLTF

SEQ ID NO: 456670 - protein, 17 aa, Homo sapiens
  CDR3 for beta chain variable domain of TCR clone 228335 (TRBV14, TRBJ2-1)
YASSQDRRVTSYNEQFF

SEQ ID NO: 456671 - protein, 14 aa, Homo sapiens
  CDR3 for alpha chain variable domain of TCR clone 228336 (TRAV12-2, TRAJ44)
CAVHPAGTASKPTF

SEQ ID NO: 456672 - protein, 13 aa, Homo sapiens
  CDR3 for beta chain variable domain of TCR clone 228336 (TRBV20-1, TRBJ1-6)
CSAPLGVGSPLHF

SEQ ID NO: 456673 - protein, 15 aa, Homo sapiens
  CDR3 for alpha chain variable domain of TCR clone 228337 (TRAV26-1, TRAJ22)
ASSEYRSGSARQLTF

SEQ ID NO: 456674 - protein, 13 aa, Homo sapiens
  CDR3 for beta chain variable domain of TCR clone 228337 (TRBV7-9, TRBJ1-2)
CASSLKQNYGYTF

SEQ ID NO: 456675 - protein, 16 aa, Homo sapiens
  CDR3 for alpha chain variable domain of TCR clone 228338 (TRAV3, TRAJ37)
CAVRVRGSGNTGKVIF

SEQ ID NO: 456676 - protein, 13 aa, Homo sapiens
  CDR3 for beta chain variable domain of TCR clone 228338 (TRBV14, TRBJ2-1)
CASSRDRRNEQFF

SEQ ID NO: 456677 - protein, 14 aa, Homo sapiens
  CDR3 for alpha chain variable domain of TCR clone 228339 (TRAV12-1, TRAJ17)
FVVNYKAAGNKLTF

SEQ ID NO: 456678 - protein, 17 aa, Homo sapiens
  CDR3 for beta chain variable domain of TCR clone 228339 (TRBV20-1, TRBJ2-1)
CSASSSGLAGSYKEQFF

SEQ ID NO: 456679 - protein, 14 aa, Homo sapiens
  CDR3 for alpha chain variable domain of TCR clone 228340 (TRAV9-2, TRAJ15)
CALSESQAGTALIF

SEQ ID NO: 456680 - protein, 15 aa, Homo sapiens
  CDR3 for beta chain variable domain of TCR clone 228340 (TRBV11-2, TRBJ2-2)
CASSSDRVNAGELFF

SEQ ID NO: 456681 - protein, 15 aa, Homo sapiens
  CDR3 for alpha chain variable domain of TCR clone 228341 (TRAV27, TRAJ38)
CAARRNAGNNRKLIW

SEQ ID NO: 456682 - protein, 17 aa, Homo sapiens
  CDR3 for beta chain variable domain of TCR clone 228341 (TRBV20-1, TRBJ2-2)
GSASGSGQGGLTGELFF

SEQ ID NO: 456683 - protein, 17 aa, Homo sapiens
  CDR3 for alpha chain variable domain of TCR clone 228342 (TRAV3, TRAJ6)
CAVRDGPRAGGSYIPQV

SEQ ID NO: 456684 - protein, 16 aa, Homo sapiens
  CDR3 for beta chain variable domain of TCR clone 228342 (TRBV7-8, TRBJ2-3)
CASSTEGQRETDTQYF

SEQ ID NO: 456685 - protein, 14 aa, Homo sapiens
  CDR3 for alpha chain variable domain of TCR clone 228343 (TRAV1-2, TRAJ8)
CAVREDTGFQKLVF

SEQ ID NO: 456686 - protein, 15 aa, Homo sapiens
  CDR3 for beta chain variable domain of TCR clone 228343 (TRBV6-1, TRBJ2-7)
CASSEGVGNPYEQYF

SEQ ID NO: 456687 - protein, 12 aa, Homo sapiens
  CDR3 for alpha chain variable domain of TCR clone 228344 (TRAV27, TRAJ48)
CSGARGNEKLTF

SEQ ID NO: 456688 - protein, 14 aa, Homo sapiens
  CDR3 for beta chain variable domain of TCR clone 228344 (TRBV12-5, TRBJ2-5)
CASGSRTHQETQYF

SEQ ID NO: 456689 - protein, 12 aa, Homo sapiens
  CDR3 for alpha chain variable domain of TCR clone 228345 (TRAV38-1, TRAJ43)
CAFMTRLADMRF

SEQ ID NO: 456690 - protein, 14 aa, Homo sapiens
  CDR3 for beta chain variable domain of TCR clone 228345 (TRBV6-1, TRBJ1-3)
CACVQGGGGNTIYF

SEQ ID NO: 456691 - protein, 14 aa, Homo sapiens
  CDR3 for alpha chain variable domain of TCR clone 228346 (TRAV12-2, TRAJ13)
CAVNPSGGYQKVSF

SEQ ID NO: 456692 - protein, 13 aa, Homo sapiens
  CDR3 for beta chain variable domain of TCR clone 228346 (TRBV20-1, TRBJ1-6)
CSAKLGGTSPLHF

SEQ ID NO: 456693 - protein, 15 aa, Homo sapiens
  CDR3 for alpha chain variable domain of TCR clone 228347 (TRAV12-2, TRAJ53)
CAVNGGGGSNYKLTF

SEQ ID NO: 456694 - protein, 12 aa, Homo sapiens
  CDR3 for beta chain variable domain of TCR clone 228347 (TRBV24-1, TRBJ1-1)
CATSDSDMGAFF

SEQ ID NO: 456695 - protein, 13 aa, Homo sapiens
  CDR3 for alpha chain variable domain of TCR clone 228348 (TRAV12-2, TRAJ40)
CAVKGPGTYKYIF

SEQ ID NO: 456696 - protein, 15 aa, Homo sapiens
  CDR3 for beta chain variable domain of TCR clone 228348 (TRBV28, TRBJ1-2)
CASSFRDRPSYGDTF

SEQ ID NO: 456697 - protein, 14 aa, Homo sapiens
  CDR3 for alpha chain variable domain of TCR clone 228349 (TRAV12-2, TRAJ17)
CAALFKAAGNKLTF

SEQ ID NO: 456698 - protein, 16 aa, Homo sapiens
  CDR3 for beta chain variable domain of TCR clone 228349 (TRBV20-1, TRBJ2-2)
CSGSASGIPGAGELFF

SEQ ID NO: 456699 - protein, 14 aa, Homo sapiens
  CDR3 for alpha chain variable domain of TCR clone 228350 (TRAV12-1, TRAJ27)
CGEHIRTNAGKLTL

SEQ ID NO: 456700 - protein, 15 aa, Homo sapiens
  CDR3 for beta chain variable domain of TCR clone 228350 (TRBV19, TRBJ1-1)
CASTSGQIQNTEAFF

SEQ ID NO: 456701 - protein, 13 aa, Homo sapiens
  CDR3 for alpha chain variable domain of TCR clone 228351 (TRAV16, TRAJ48)
CSPLIFGNEKLTF

SEQ ID NO: 456702 - protein, 11 aa, Homo sapiens
  CDR3 for beta chain variable domain of TCR clone 228351 (TRBV7-9, TRBJ2-3)
CASSPTDTQYF

SEQ ID NO: 456703 - protein, 15 aa, Homo sapiens
  CDR3 for alpha chain variable domain of TCR clone 228352 (TRAV3, TRAJ29)
CAVRYINSGNTPLVF

SEQ ID NO: 456704 - protein, 16 aa, Homo sapiens
  CDR3 for beta chain variable domain of TCR clone 228352 (TRBV4-1, TRBJ2-5)
CASSQTFYGDQETQYF

SEQ ID NO: 456705 - protein, 12 aa, Homo sapiens
  CDR3 for alpha chain variable domain of TCR clone 228353 (TRAV29/DV5, TRAJ36)
CAARRKTGQTTS

SEQ ID NO: 456706 - protein, 13 aa, Homo sapiens
  CDR3 for beta chain variable domain of TCR clone 228353 (TRBV25-1, TRBJ2-5)
CASSPGGVETQYF

SEQ ID NO: 456707 - protein, 15 aa, Homo sapiens
  CDR3 for alpha chain variable domain of TCR clone 228354 (TRAV27, TRAJ50)
CAGRERGTSYDKVIF

SEQ ID NO: 456708 - protein, 15 aa, Homo sapiens
  CDR3 for beta chain variable domain of TCR clone 228354 (TRBV10-3, TRBJ2-7)
CAISDMTALSYEQYF

SEQ ID NO: 456709 - protein, 14 aa, Homo sapiens
  CDR3 for alpha chain variable domain of TCR clone 228355 (TRAV12-2, TRAJ13)
CAVKKTGGYQKVTF

SEQ ID NO: 456710 - protein, 15 aa, Homo sapiens
  CDR3 for beta chain variable domain of TCR clone 228355 (TRBV27, TRBJ2-1)
CASRNGGGSSHEQFF

SEQ ID NO: 456711 - protein, 12 aa, Homo sapiens
  CDR3 for alpha chain variable domain of TCR clone 228356 (TRAV29/DV5, TRAJ27)
CAANTNAGKSTF

SEQ ID NO: 456712 - protein, 18 aa, Homo sapiens
  CDR3 for beta chain variable domain of TCR clone 228356 (TRBV2, TRBJ2-1)
CASSEGGTSVRGHNEQFF

SEQ ID NO: 456713 - protein, 14 aa, Homo sapiens
  CDR3 for alpha chain variable domain of TCR clone 228357 (TRAV3, TRAJ36)
CAVRDGTGANNLFF

SEQ ID NO: 456714 - protein, 16 aa, Homo sapiens
  CDR3 for beta chain variable domain of TCR clone 228357 (TRBV7-3, TRBJ2-5)
YASIQPGGSVQETQYF

SEQ ID NO: 456715 - protein, 14 aa, Homo sapiens
  CDR3 for alpha chain variable domain of TCR clone 228358 (TRAV12-2, TRAJ13)
CAVKRTGGDQKVTF

SEQ ID NO: 456716 - protein, 15 aa, Homo sapiens
  CDR3 for beta chain variable domain of TCR clone 228358 (TRBV27, TRBJ2-1)
CASSNGGGSSNEQFF

SEQ ID NO: 456717 - protein, 13 aa, Homo sapiens
  CDR3 for alpha chain variable domain of TCR clone 228359 (TRAV12-1, TRAJ33)
CGDSPDSNYQLIW

SEQ ID NO: 456718 - protein, 12 aa, Homo sapiens
  CDR3 for beta chain variable domain of TCR clone 228359 (TRBV11-2, TRBJ2-2)
CASSLGGGELFF

SEQ ID NO: 456719 - protein, 13 aa, Homo sapiens
  CDR3 for alpha chain variable domain of TCR clone 228360 (TRAV20, TRAJ31)
CAVQAWNNARLMF

SEQ ID NO: 456720 - protein, 15 aa, Homo sapiens
  CDR3 for beta chain variable domain of TCR clone 228360 (TRBV13, TRBJ1-2)
CASSLGRQPGYGYTF

SEQ ID NO: 456721 - protein, 12 aa, Homo sapiens
  CDR3 for alpha chain variable domain of TCR clone 228361 (TRAV12-3, TRAJ29)
CAAREGNTPLVF

SEQ ID NO: 456722 - protein, 17 aa, Homo sapiens
  CDR3 for beta chain variable domain of TCR clone 228361 (TRBV18, TRBJ2-1)
CASSPLAAGAGDNEQLF

SEQ ID NO: 456723 - protein, 13 aa, Homo sapiens
  CDR3 for alpha chain variable domain of TCR clone 228362 (TRAV3, TRAJ20)
CAVRSLNDYKLSF

SEQ ID NO: 456724 - protein, 12 aa, Homo sapiens
  CDR3 for beta chain variable domain of TCR clone 228362 (TRBV6-1, TRBJ2-1)
CASYSTDNEQFF

SEQ ID NO: 456725 - protein, 13 aa, Homo sapiens
  CDR3 for alpha chain variable domain of TCR clone 228363 (TRAV3, TRAJ21)
CAVREPDFNKFYF

SEQ ID NO: 456726 - protein, 17 aa, Homo sapiens
  CDR3 for beta chain variable domain of TCR clone 228363 (TRBV7-8, TRBJ2-6)
CASSAGTGGAGANVLTL

SEQ ID NO: 456727 - protein, 17 aa, Homo sapiens
  CDR3 for alpha chain variable domain of TCR clone 228364 (TRAV3, TRAJ6)
CAVRDGPRAGGSYIPTF

SEQ ID NO: 456728 - protein, 13 aa, Homo sapiens
  CDR3 for beta chain variable domain of TCR clone 228364 (TRBV20-1, TRBJ1-1)
CSARGGGYTEAFF

SEQ ID NO: 456729 - protein, 14 aa, Homo sapiens
  CDR3 for alpha chain variable domain of TCR clone 228365 (TRAV12-2, TRAJ9)
CAVNMEGGGFKTIF

SEQ ID NO: 456730 - protein, 14 aa, Homo sapiens
  CDR3 for beta chain variable domain of TCR clone 228365 (TRBV2, TRBJ2-5)
CASSELLAQETQYF

SEQ ID NO: 456731 - protein, 14 aa, Homo sapiens
  CDR3 for alpha chain variable domain of TCR clone 228366 (TRAV14/DV4, TRAJ15)
CAMRRDQAGTVLIF

SEQ ID NO: 456732 - protein, 16 aa, Homo sapiens
  CDR3 for beta chain variable domain of TCR clone 228366 (TRBV15, TRBJ2-3)
CATSRDLGIVTDTQYF

SEQ ID NO: 456733 - protein, 15 aa, Homo sapiens
  CDR3 for alpha chain variable domain of TCR clone 228367 (TRAV3, TRAJ5)
CAVRDLDTGRRALTF

SEQ ID NO: 456734 - protein, 13 aa, Homo sapiens
  CDR3 for beta chain variable domain of TCR clone 228367 (TRBV12-4, TRBJ2-7)
CASSPTETCEQYV

SEQ ID NO: 456735 - protein, 12 aa, Homo sapiens
  CDR3 for alpha chain variable domain of TCR clone 228368 (TRAV8-3, TRAJ41)
CAVALSRYALNF

SEQ ID NO: 456736 - protein, 17 aa, Homo sapiens
  CDR3 for beta chain variable domain of TCR clone 228368 (TRBV7-3, TRBJ2-2)
CASSLSGTSGGTGELFF

SEQ ID NO: 456737 - protein, 16 aa, Homo sapiens
  CDR3 for alpha chain variable domain of TCR clone 228369 (TRAV12-3, TRAJ53)
CAMSPGSGGSNYKLTF

SEQ ID NO: 456738 - protein, 14 aa, Homo sapiens
  CDR3 for beta chain variable domain of TCR clone 228369 (TRBV7-3, TRBJ1-1)
CASSLKGGNTEAFF

SEQ ID NO: 456739 - protein, 13 aa, Homo sapiens
  CDR3 for alpha chain variable domain of TCR clone 228370 (TRAV26-2, TRAJ43)
CILRAVNNNDMRF

SEQ ID NO: 456740 - protein, 12 aa, Homo sapiens
  CDR3 for beta chain variable domain of TCR clone 228370 (TRBV5-1, TRBJ2-7)
CASSFRGYEQYF

SEQ ID NO: 456741 - protein, 13 aa, Homo sapiens
  CDR3 for alpha chain variable domain of TCR clone 228371 (TRAV27, TRAJ6)
CAGGTRGSYIPTF

SEQ ID NO: 456742 - protein, 13 aa, Homo sapiens
  CDR3 for beta chain variable domain of TCR clone 228371 (TRBV18, TRBJ1-1)
CASSGGRNTEAFF

SEQ ID NO: 456743 - protein, 18 aa, Homo sapiens
  CDR3 for alpha chain variable domain of TCR clone 228372 (TRAV3, TRAJ32)
CAVRDIRGYGGATNKLLF

SEQ ID NO: 456744 - protein, 15 aa, Homo sapiens
  CDR3 for beta chain variable domain of TCR clone 228372 (TRBV12-4, TRBJ2-2)
CASSLGVRHTGELFF

SEQ ID NO: 456745 - protein, 16 aa, Homo sapiens
  CDR3 for alpha chain variable domain of TCR clone 228373 (TRAV30, TRAJ24)
CGTEIVDADSWGKFQF

SEQ ID NO: 456746 - protein, 14 aa, Homo sapiens
  CDR3 for beta chain variable domain of TCR clone 228373 (TRBV7-2, TRBJ2-7)
CASSLDPGGGEQYF

SEQ ID NO: 456747 - protein, 13 aa, Homo sapiens
  CDR3 for alpha chain variable domain of TCR clone 228374 (TRAV1-2, TRAJ9)
CSALNTGGFKTIF

SEQ ID NO: 456748 - protein, 13 aa, Homo sapiens
  CDR3 for beta chain variable domain of TCR clone 228374 (TRBV19, TRBJ1-2)
CASSVPGQDGYTF

SEQ ID NO: 456749 - protein, 14 aa, Homo sapiens
  CDR3 for alpha chain variable domain of TCR clone 228375 (TRAV3, TRAJ32)
CCERRAGATNKLIF

SEQ ID NO: 456750 - protein, 12 aa, Homo sapiens
  CDR3 for beta chain variable domain of TCR clone 228375 (TRBV7-8, TRBJ2-7)
CASSLGDREQYF

SEQ ID NO: 456751 - protein, 14 aa, Homo sapiens
  CDR3 for alpha chain variable domain of TCR clone 228376 (TRAV13-1, TRAJ35)
CAASEGGFGNVLHC

SEQ ID NO: 456752 - protein, 13 aa, Homo sapiens
  CDR3 for beta chain variable domain of TCR clone 228376 (TRBV7-3, TRBJ1-1)
CASSQDWGAEAVF

SEQ ID NO: 456753 - protein, 13 aa, Homo sapiens
  CDR3 for alpha chain variable domain of TCR clone 228377 (TRAV9-2, TRAJ53)
CALSGGSNYKLTF

SEQ ID NO: 456754 - protein, 15 aa, Homo sapiens
  CDR3 for beta chain variable domain of TCR clone 228377 (TRBV10-2, TRBJ2-6)
CASSEQGTGANVLTF

SEQ ID NO: 456755 - protein, 16 aa, Homo sapiens
  CDR3 for alpha chain variable domain of TCR clone 228378 (TRAV26-1, TRAJ37)
CIVRGDGSGNTGKLIF

SEQ ID NO: 456756 - protein, 17 aa, Homo sapiens
  CDR3 for beta chain variable domain of TCR clone 228378 (TRBV4-1, TRBJ2-7)
CASSRDPLGVRGGVQYF

SEQ ID NO: 456757 - protein, 13 aa, Homo sapiens
  CDR3 for alpha chain variable domain of TCR clone 228379 (TRAV27, TRAJ17)
CAGAATAGNKLTF

SEQ ID NO: 456758 - protein, 15 aa, Homo sapiens
  CDR3 for beta chain variable domain of TCR clone 228379 (TRBV5-1, TRBJ2-3)
CASRNLAGSTDTQYF

SEQ ID NO: 456759 - protein, 15 aa, Homo sapiens
  CDR3 for alpha chain variable domain of TCR clone 228380 (TRAV21, TRAJ53)
CATLNSGGSNYKLTF

SEQ ID NO: 456760 - protein, 14 aa, Homo sapiens
  CDR3 for beta chain variable domain of TCR clone 228380 (TRBV9, TRBJ1-1)
CQQLRGQMKTEAFF

SEQ ID NO: 456761 - protein, 15 aa, Homo sapiens
  CDR3 for alpha chain variable domain of TCR clone 228381 (TRAV25, TRAJ53)
CADTGGGGSNYKLTF

SEQ ID NO: 456762 - protein, 19 aa, Homo sapiens
  CDR3 for beta chain variable domain of TCR clone 228381 (TRBV7-2, TRBJ2-3)
CASSFLSRNWGGGTDTQYF

SEQ ID NO: 456763 - protein, 15 aa, Homo sapiens
  CDR3 for alpha chain variable domain of TCR clone 228382 (TRAV21, TRAJ52)
CAVRGGGTSYGELTF

SEQ ID NO: 456764 - protein, 15 aa, Homo sapiens
  CDR3 for beta chain variable domain of TCR clone 228382 (TRBV18, TRBJ1-5)
CASSPSDRSNQPQHF

SEQ ID NO: 456765 - protein, 13 aa, Homo sapiens
  CDR3 for alpha chain variable domain of TCR clone 228383 (TRAV17, TRAJ5)
CALRGTGRRALTF

SEQ ID NO: 456766 - protein, 14 aa, Homo sapiens
  CDR3 for beta chain variable domain of TCR clone 228383 (TRBV18, TRBJ2-5)
CASSPGVSQETQYF

SEQ ID NO: 456767 - protein, 14 aa, Homo sapiens
  CDR3 for alpha chain variable domain of TCR clone 228384 (TRAV12-2, TRAJ23)
CAVGGYNQGGKLIF

SEQ ID NO: 456768 - protein, 15 aa, Homo sapiens
  CDR3 for beta chain variable domain of TCR clone 228384 (TRBV20-1, TRBJ2-3)
RSASSGGPRTDTQYF

SEQ ID NO: 456769 - protein, 16 aa, Homo sapiens
  CDR3 for alpha chain variable domain of TCR clone 228385 (TRAV26-1, TRAJ53)
CIVRVAMGGSNYKLTL

SEQ ID NO: 456770 - protein, 16 aa, Homo sapiens
  CDR3 for beta chain variable domain of TCR clone 228385 (TRBV28, TRBJ2-7)
CASSLFFETGGPEQYF

SEQ ID NO: 456771 - protein, 14 aa, Homo sapiens
  CDR3 for alpha chain variable domain of TCR clone 228386 (TRAV12-1, TRAJ17)
CVGNYKAAGNKLTF

SEQ ID NO: 456772 - protein, 14 aa, Homo sapiens
  CDR3 for beta chain variable domain of TCR clone 228386 (TRBV7-3, TRBJ1-1)
CASSLGTGYTEAFF

SEQ ID NO: 456773 - protein, 15 aa, Homo sapiens
  CDR3 for alpha chain variable domain of TCR clone 228387 (TRAV13-1, TRAJ16)
CAARYQMARSCYLQG

SEQ ID NO: 456774 - protein, 13 aa, Homo sapiens
  CDR3 for beta chain variable domain of TCR clone 228387 (TRBV4-1, TRBJ2-1)
CASSQAGGDEQFF

SEQ ID NO: 456775 - protein, 15 aa, Homo sapiens
  CDR3 for alpha chain variable domain of TCR clone 228388 (TRAV29/DV5, TRAJ24)
CAASGATDSWGNFQF

SEQ ID NO: 456776 - protein, 13 aa, Homo sapiens
  CDR3 for beta chain variable domain of TCR clone 228388 (TRBV19, TRBJ1-2)
CASSVPGQDGYTF

SEQ ID NO: 456777 - protein, 16 aa, Homo sapiens
  CDR3 for alpha chain variable domain of TCR clone 228389 (TRAV14/DV4, TRAJ54)
CAMREGRIQGAQKLVF

SEQ ID NO: 456778 - protein, 16 aa, Homo sapiens
  CDR3 for beta chain variable domain of TCR clone 228389 (TRBV12-5, TRBJ2-5)
YASGPRTSGNQETQYF

SEQ ID NO: 456779 - protein, 16 aa, Homo sapiens
  CDR3 for alpha chain variable domain of TCR clone 228390 (TRAV3, TRAJ37)
CAVRGKGSGNTGTLIF

SEQ ID NO: 456780 - protein, 16 aa, Homo sapiens
  CDR3 for beta chain variable domain of TCR clone 228390 (TRBV12-5, TRBJ2-5)
CASGPRTSGNQETQYF

SEQ ID NO: 456781 - protein, 10 aa, Homo sapiens
  CDR3 for alpha chain variable domain of TCR clone 228391 (TRAV5, TRAJ34)
CAEDTDKLIF

SEQ ID NO: 456782 - protein, 14 aa, Homo sapiens
  CDR3 for beta chain variable domain of TCR clone 228391 (TRBV7-9, TRBJ2-1)
CASSPRDSLYEQYF

SEQ ID NO: 456783 - protein, 14 aa, Homo sapiens
  CDR3 for alpha chain variable domain of TCR clone 228392 (TRAV26-2, TRAJ31)
CILIPGNNNARLMF

SEQ ID NO: 456784 - protein, 16 aa, Homo sapiens
  CDR3 for beta chain variable domain of TCR clone 228392 (TRBV7-3, TRBJ2-1)
CASSLVSGSSKNEQFF

SEQ ID NO: 456785 - protein, 14 aa, Homo sapiens
  CDR3 for alpha chain variable domain of TCR clone 228393 (TRAV17, TRAJ49)
CATDARDTGNQFYF

SEQ ID NO: 456786 - protein, 14 aa, Homo sapiens
  CDR3 for beta chain variable domain of TCR clone 228393 (TRBV5-5, TRBJ1-2)
CASSFGQSNYGYTF

SEQ ID NO: 456787 - protein, 12 aa, Homo sapiens
  CDR3 for alpha chain variable domain of TCR clone 228394 (TRAV13-1, TRAJ21)
CSAKEGFNKFYF

SEQ ID NO: 456788 - protein, 15 aa, Homo sapiens
  CDR3 for beta chain variable domain of TCR clone 228394 (TRBV27, TRBJ2-7)
CASRFWGQGADEQYF

SEQ ID NO: 456789 - protein, 10 aa, Homo sapiens
  CDR3 for alpha chain variable domain of TCR clone 228395 (TRAV16, TRAJ22)
SAMYLRQLTF

SEQ ID NO: 456790 - protein, 15 aa, Homo sapiens
  CDR3 for beta chain variable domain of TCR clone 228395 (TRBV7-9, TRBJ1-6)
CASSSPGRGNSTLHL

SEQ ID NO: 456791 - protein, 12 aa, Homo sapiens
  CDR3 for alpha chain variable domain of TCR clone 228396 (TRAV21, TRAJ30)
CAVLNRDDKIIF

SEQ ID NO: 456792 - protein, 13 aa, Homo sapiens
  CDR3 for beta chain variable domain of TCR clone 228396 (TRBV19, TRBJ1-2)
CASSQGQVYGYTF

SEQ ID NO: 456793 - protein, 14 aa, Homo sapiens
  CDR3 for alpha chain variable domain of TCR clone 228397 (TRAV35, TRAJ22)
CAGLRPGSARQLTS

SEQ ID NO: 456794 - protein, 15 aa, Homo sapiens
  CDR3 for beta chain variable domain of TCR clone 228397 (TRBV12-4, TRBJ2-5)
CASSPPTGPQETQYF

SEQ ID NO: 456795 - protein, 14 aa, Homo sapiens
  CDR3 for alpha chain variable domain of TCR clone 228398 (TRAV17, TRAJ22)
CATSPSGSVRQLTF

SEQ ID NO: 456796 - protein, 15 aa, Homo sapiens
  CDR3 for beta chain variable domain of TCR clone 228398 (TRBV4-1, TRBJ2-5)
CASSQWDLYQETQYF

SEQ ID NO: 456797 - protein, 17 aa, Homo sapiens
  CDR3 for alpha chain variable domain of TCR clone 228399 (TRAV9-2, TRAJ45)
CALSRYYSGGGADGLTF

SEQ ID NO: 456798 - protein, 14 aa, Homo sapiens
  CDR3 for beta chain variable domain of TCR clone 228399 (TRBV7-6, TRBJ2-3)
CASSLGTVTDTQYF

SEQ ID NO: 456799 - protein, 15 aa, Homo sapiens
  CDR3 for alpha chain variable domain of TCR clone 228400 (TRAV26-1, TRAJ29)
CIVRAEGSGNTPLVF

SEQ ID NO: 456800 - protein, 16 aa, Homo sapiens
  CDR3 for beta chain variable domain of TCR clone 228400 (TRBV12-4, TRBJ1-5)
CASSRPVGGSNQPQHF

SEQ ID NO: 456801 - protein, 15 aa, Homo sapiens
  CDR3 for alpha chain variable domain of TCR clone 228401 (TRAV25, TRAJ52)
CAGRPGGTSYGKLTF

SEQ ID NO: 456802 - protein, 11 aa, Homo sapiens
  CDR3 for beta chain variable domain of TCR clone 228401 (TRBV28, TRBJ2-7)
CASGPLPEQYF

SEQ ID NO: 456803 - protein, 11 aa, Homo sapiens
  CDR3 for alpha chain variable domain of TCR clone 228402 (TRAV3, TRAJ21)
FAVGNFNKFYF

SEQ ID NO: 456804 - protein, 16 aa, Homo sapiens
  CDR3 for beta chain variable domain of TCR clone 228402 (TRBV19, TRBJ2-1)
CASSKAGPSSYNEQFF

SEQ ID NO: 456805 - protein, 17 aa, Homo sapiens
  CDR3 for alpha chain variable domain of TCR clone 228403 (TRAV8-6, TRAJ8)
CAVKEGIQNTGFQKLVF

SEQ ID NO: 456806 - protein, 15 aa, Homo sapiens
  CDR3 for beta chain variable domain of TCR clone 228403 (TRBV7-2, TRBJ2-1)
CASSSGLAGGNEQFF

SEQ ID NO: 456807 - protein, 12 aa, Homo sapiens
  CDR3 for alpha chain variable domain of TCR clone 228404 (TRAV16, TRAJ17)
CAPSAAGNKLTF

SEQ ID NO: 456808 - protein, 15 aa, Homo sapiens
  CDR3 for beta chain variable domain of TCR clone 228404 (TRBV12-4, TRBJ2-5)
CASSPPTGLQETQYF

SEQ ID NO: 456809 - protein, 16 aa, Homo sapiens
  CDR3 for alpha chain variable domain of TCR clone 228405 (TRAV22, TRAJ45)
CAVERGIRGGADGLTF

SEQ ID NO: 456810 - protein, 11 aa, Homo sapiens
  CDR3 for beta chain variable domain of TCR clone 228405 (TRBV29-1, TRBJ2-5)
CSEDRTGTQYF

SEQ ID NO: 456811 - protein, 17 aa, Homo sapiens
  CDR3 for alpha chain variable domain of TCR clone 228406 (TRAV3, TRAJ6)
CAVRDGPRAGGSYIPTF

SEQ ID NO: 456812 - protein, 18 aa, Homo sapiens
  CDR3 for beta chain variable domain of TCR clone 228406 (TRBV7-9, TRBJ2-7)
WASRLTTSGSRTWYEQYF

SEQ ID NO: 456813 - protein, 17 aa, Homo sapiens
  CDR3 for alpha chain variable domain of TCR clone 228407 (TRAV3, TRAJ6)
CAVRDGPRAGGSYIPTF

SEQ ID NO: 456814 - protein, 14 aa, Homo sapiens
  CDR3 for beta chain variable domain of TCR clone 228407 (TRBV7-2, TRBJ2-7)
CASSLKTSFYEQFF

SEQ ID NO: 456815 - protein, 15 aa, Homo sapiens
  CDR3 for alpha chain variable domain of TCR clone 228408 (TRAV2, TRAJ22)
CAVASRGGSARQLTF

SEQ ID NO: 456816 - protein, 11 aa, Homo sapiens
  CDR3 for beta chain variable domain of TCR clone 228408 (TRBV27, TRBJ2-3)
CASSLGDTQYF

SEQ ID NO: 456817 - protein, 12 aa, Homo sapiens
  CDR3 for alpha chain variable domain of TCR clone 228409 (TRAV12-3, TRAJ17)
CAMTLTGNKLTF

SEQ ID NO: 456818 - protein, 10 aa, Homo sapiens
  CDR3 for beta chain variable domain of TCR clone 228409 (TRBV20-1, TRBJ2-7)
SGSGMDEQYF

SEQ ID NO: 456819 - protein, 20 aa, Homo sapiens
  CDR3 for alpha chain variable domain of TCR clone 228410 (TRAV1-2, TRAJ8)
CAVREDRLSETCIWNWHPTS

SEQ ID NO: 456820 - protein, 14 aa, Homo sapiens
  CDR3 for beta chain variable domain of TCR clone 228410 (TRBV20-1, TRBJ1-1)
CSAQTRIGGTEAFF

SEQ ID NO: 456821 - protein, 15 aa, Homo sapiens
  CDR3 for alpha chain variable domain of TCR clone 228411 (TRAV3, TRAJ22)
CAVRERGGSARPLTF

SEQ ID NO: 456822 - protein, 13 aa, Homo sapiens
  CDR3 for beta chain variable domain of TCR clone 228411 (TRBV2, TRBJ1-5)
CATAGPGNQPQHF

SEQ ID NO: 456823 - protein, 13 aa, Homo sapiens
  CDR3 for alpha chain variable domain of TCR clone 228412 (TRAV8-4, TRAJ36)
CAVSEGGANNLFF

SEQ ID NO: 456824 - protein, 12 aa, Homo sapiens
  CDR3 for beta chain variable domain of TCR clone 228412 (TRBV28, TRBJ2-7)
CASTGSHYEQYF

SEQ ID NO: 456825 - protein, 15 aa, Homo sapiens
  CDR3 for alpha chain variable domain of TCR clone 228413 (TRAV35, TRAJ41)
CAGQLFSNSGYALNF

SEQ ID NO: 456826 - protein, 14 aa, Homo sapiens
  CDR3 for beta chain variable domain of TCR clone 228413 (TRBV7-2, TRBJ1-2)
CASSRGGTNYGYTL

SEQ ID NO: 456827 - protein, 14 aa, Homo sapiens
  CDR3 for alpha chain variable domain of TCR clone 228414 (TRAV26-1, TRAJ38)
CIADNAGNNRKLIW

SEQ ID NO: 456828 - protein, 12 aa, Homo sapiens
  CDR3 for beta chain variable domain of TCR clone 228414 (TRBV7-9, TRBJ2-7)
CASSLEGYEQYF

SEQ ID NO: 456829 - protein, 16 aa, Homo sapiens
  CDR3 for alpha chain variable domain of TCR clone 228415 (TRAV1-2, TRAJ10)
CAVRGVLTGGGNKLTF

SEQ ID NO: 456830 - protein, 13 aa, Homo sapiens
  CDR3 for beta chain variable domain of TCR clone 228415 (TRBV6-4, TRBJ1-5)
CASSADLNQPQHF

SEQ ID NO: 456831 - protein, 23 aa, Homo sapiens
  CDR3 for alpha chain variable domain of TCR clone 228416 (TRAV4, TRAJ26)
IPADRKSSTLSLPRVYYGQNFVF

SEQ ID NO: 456832 - protein, 16 aa, Homo sapiens
  CDR3 for beta chain variable domain of TCR clone 228416 (TRBV7-2, TRBJ1-2)
CASSSNQDGRGHGYTF

SEQ ID NO: 456833 - protein, 14 aa, Homo sapiens
  CDR3 for alpha chain variable domain of TCR clone 228417 (TRAV26-1, TRAJ52)
CIAAGGTSYGKLTF

SEQ ID NO: 456834 - protein, 15 aa, Homo sapiens
  CDR3 for beta chain variable domain of TCR clone 228417 (TRBV7-6, TRBJ2-5)
CASSSGLAGVETQYF

SEQ ID NO: 456835 - protein, 12 aa, Homo sapiens
  CDR3 for alpha chain variable domain of TCR clone 228418 (TRAV12-3, TRAJ17)
CAMTLTGNKLTF

SEQ ID NO: 456836 - protein, 16 aa, Homo sapiens
  CDR3 for beta chain variable domain of TCR clone 228418 (TRBV19, TRBJ2-1)
CDSSKAGPSSYNEQFF

SEQ ID NO: 456837 - protein, 14 aa, Homo sapiens
  CDR3 for alpha chain variable domain of TCR clone 228419 (TRAV23/DV6, TRAJ39)
CAASMRGAGNMLAF

SEQ ID NO: 456838 - protein, 14 aa, Homo sapiens
  CDR3 for beta chain variable domain of TCR clone 228419 (TRBV10-3, TRBJ2-3)
CAISVTRSRDTQYF

SEQ ID NO: 456839 - protein, 12 aa, Homo sapiens
  CDR3 for alpha chain variable domain of TCR clone 228420 (TRAV13-2, TRAJ41)
CAKNIGRYALNF

SEQ ID NO: 456840 - protein, 12 aa, Homo sapiens
  CDR3 for beta chain variable domain of TCR clone 228420 (TRBV7-9, TRBJ1-1)
CASSLSGGVAVF

SEQ ID NO: 456841 - protein, 15 aa, Homo sapiens
  CDR3 for alpha chain variable domain of TCR clone 228421 (TRAV8-2, TRAJ15)
CVVTMGNQAGTALSF

SEQ ID NO: 456842 - protein, 14 aa, Homo sapiens
  CDR3 for beta chain variable domain of TCR clone 228421 (TRBV12-5, TRBJ2-5)
CASGSRTHQETQYF

SEQ ID NO: 456843 - protein, 11 aa, Homo sapiens
  CDR3 for alpha chain variable domain of TCR clone 228422 (TRAV12-2, TRAJ29)
CAVTLRSPLFF

SEQ ID NO: 456844 - protein, 15 aa, Homo sapiens
  CDR3 for beta chain variable domain of TCR clone 228422 (TRBV4-1, TRBJ2-5)
CASSQWDLYQETQYF

SEQ ID NO: 456845 - protein, 15 aa, Homo sapiens
  CDR3 for alpha chain variable domain of TCR clone 228423 (TRAV3, TRAJ5)
CAVRDLDTGRRALTF

SEQ ID NO: 456846 - protein, 13 aa, Homo sapiens
  CDR3 for beta chain variable domain of TCR clone 228423 (TRBV7-8, TRBJ2-7)
CASSFAGLYEQYL

SEQ ID NO: 456847 - protein, 13 aa, Homo sapiens
  CDR3 for alpha chain variable domain of TCR clone 228424 (TRAV2, TRAJ40)
CAVVTSGTYKYIF

SEQ ID NO: 456848 - protein, 13 aa, Homo sapiens
  CDR3 for beta chain variable domain of TCR clone 228424 (TRBV11-3, TRBJ2-3)
CQPEGRAGDTQYF

SEQ ID NO: 456849 - protein, 10 aa, Homo sapiens
  CDR3 for alpha chain variable domain of TCR clone 228425 (TRAV12-2, TRAJ52)
RSTSYVKLTF

SEQ ID NO: 456850 - protein, 11 aa, Homo sapiens
  CDR3 for beta chain variable domain of TCR clone 228425 (TRBV11-2, TRBJ2-2)
CASSLPGELFF

SEQ ID NO: 456851 - protein, 15 aa, Homo sapiens
  CDR3 for alpha chain variable domain of TCR clone 228426 (TRAV19, TRAJ53)
CALSSRGGSNYKLTF

SEQ ID NO: 456852 - protein, 13 aa, Homo sapiens
  CDR3 for beta chain variable domain of TCR clone 228426 (TRBV7-6, TRBJ2-7)
CASSLDHTHEQYF

SEQ ID NO: 456853 - protein, 14 aa, Homo sapiens
  CDR3 for alpha chain variable domain of TCR clone 228427 (TRAV13-2, TRAJ9)
CAENSSTGGVETIF

SEQ ID NO: 456854 - protein, 13 aa, Homo sapiens
  CDR3 for beta chain variable domain of TCR clone 228427 (TRBV19, TRBJ2-7)
CASSIDRTYEQYF

SEQ ID NO: 456855 - protein, 11 aa, Homo sapiens
  CDR3 for alpha chain variable domain of TCR clone 228428 (TRAV4, TRAJ31)
CLVGDNARLMF

SEQ ID NO: 456856 - protein, 14 aa, Homo sapiens
  CDR3 for beta chain variable domain of TCR clone 228428 (TRBV4-1, TRBJ2-2)
CTSSQAVNTGELFF

SEQ ID NO: 456857 - protein, 14 aa, Homo sapiens
  CDR3 for alpha chain variable domain of TCR clone 228429 (TRAV1-2, TRAJ8)
CAVREDTGFQKLVF

SEQ ID NO: 456858 - protein, 17 aa, Homo sapiens
  CDR3 for beta chain variable domain of TCR clone 228429 (TRBV11-2, TRBJ2-1)
CANSLYPPGVEYNEQFL

SEQ ID NO: 456859 - protein, 14 aa, Homo sapiens
  CDR3 for alpha chain variable domain of TCR clone 228430 (TRAV8-4, TRAJ9)
CAVRINTGGFKTIF

SEQ ID NO: 456860 - protein, 17 aa, Homo sapiens
  CDR3 for beta chain variable domain of TCR clone 228430 (TRBV7-3, TRBJ2-2)
CASSLSGTSGGTGELFF

SEQ ID NO: 456861 - protein, 13 aa, Homo sapiens
  CDR3 for alpha chain variable domain of TCR clone 228431 (TRAV21, TRAJ27)
GAARPGNAGKSTF

SEQ ID NO: 456862 - protein, 15 aa, Homo sapiens
  CDR3 for beta chain variable domain of TCR clone 228431 (TRBV2, TRBJ2-3)
CASSDAGGPPDTQYF

SEQ ID NO: 456863 - protein, 13 aa, Homo sapiens
  CDR3 for alpha chain variable domain of TCR clone 228432 (TRAV16, TRAJ5)
WALTNTGRRALTF

SEQ ID NO: 456864 - protein, 15 aa, Homo sapiens
  CDR3 for beta chain variable domain of TCR clone 228432 (TRBV11-2, TRBJ2-4)
CASSRPGTGINTQYF

SEQ ID NO: 456865 - protein, 12 aa, Homo sapiens
  CDR3 for alpha chain variable domain of TCR clone 228433 (TRAV2, TRAJ33)
CAVEDSNYQLIW

SEQ ID NO: 456866 - protein, 16 aa, Homo sapiens
  CDR3 for beta chain variable domain of TCR clone 228433 (TRBV19, TRBJ1-4)
CASSINRGARNCFLAV

SEQ ID NO: 456867 - protein, 14 aa, Homo sapiens
  CDR3 for alpha chain variable domain of TCR clone 228434 (TRAV16, TRAJ15)
CALSGPQAGTALIF

SEQ ID NO: 456868 - protein, 11 aa, Homo sapiens
  CDR3 for beta chain variable domain of TCR clone 228434 (TRBV18, TRBJ2-5)
CQLTSKETQYF

SEQ ID NO: 456869 - protein, 12 aa, Homo sapiens
  CDR3 for alpha chain variable domain of TCR clone 228435 (TRAV3, TRAJ43)
CAVRDPNNDMRF

SEQ ID NO: 456870 - protein, 15 aa, Homo sapiens
  CDR3 for beta chain variable domain of TCR clone 228435 (TRBV6-5, TRBJ2-1)
CASNYDAGAGNEQFF

SEQ ID NO: 456871 - protein, 12 aa, Homo sapiens
  CDR3 for alpha chain variable domain of TCR clone 228436 (TRAV30, TRAJ20)
CGTESNDYKLSF

SEQ ID NO: 456872 - protein, 15 aa, Homo sapiens
  CDR3 for beta chain variable domain of TCR clone 228436 (TRBV20-1, TRBJ2-7)
CSATDRVSGMDEQYF

SEQ ID NO: 456873 - protein, 15 aa, Homo sapiens
  CDR3 for alpha chain variable domain of TCR clone 228437 (TRAV8-4, TRAJ9)
CAVSDRATGGFKTIF

SEQ ID NO: 456874 - protein, 13 aa, Homo sapiens
  CDR3 for beta chain variable domain of TCR clone 228437 (TRBV9, TRBJ2-1)
CASSPSGGSEQFF

SEQ ID NO: 456875 - protein, 13 aa, Homo sapiens
  CDR3 for alpha chain variable domain of TCR clone 228438 (TRAV17, TRAJ5)
CALRGTGRRALTF

SEQ ID NO: 456876 - protein, 18 aa, Homo sapiens
  CDR3 for beta chain variable domain of TCR clone 228438 (TRBV4-1, TRBJ1-5)
CASSQDPRGQGLNQPQHF

SEQ ID NO: 456877 - protein, 16 aa, Homo sapiens
  CDR3 for alpha chain variable domain of TCR clone 228439 (TRAV20, TRAJ52)
CALLPDGGTSYGKLTF

SEQ ID NO: 456878 - protein, 12 aa, Homo sapiens
  CDR3 for beta chain variable domain of TCR clone 228439 (TRBV19, TRBJ2-1)
CASSQISNEQFF

SEQ ID NO: 456879 - protein, 15 aa, Homo sapiens
  CDR3 for alpha chain variable domain of TCR clone 228440 (TRAV12-1, TRAJ15)
RVVTRANQAGTALIF

SEQ ID NO: 456880 - protein, 14 aa, Homo sapiens
  CDR3 for beta chain variable domain of TCR clone 228440 (TRBV5-1, TRBJ1-1)
CASSLVSINTEAFF

SEQ ID NO: 456881 - protein, 14 aa, Homo sapiens
  CDR3 for alpha chain variable domain of TCR clone 228441 (TRAV4, TRAJ33)
CLVGDVQSNYQLIW

SEQ ID NO: 456882 - protein, 15 aa, Homo sapiens
  CDR3 for beta chain variable domain of TCR clone 228441 (TRBV20-1, TRBJ2-7)
CSARDRVSGMDEQYF

SEQ ID NO: 456883 - protein, 14 aa, Homo sapiens
  CDR3 for alpha chain variable domain of TCR clone 228442 (TRAV13-1, TRAJ39)
CAASKNNAGNMLTF

SEQ ID NO: 456884 - protein, 15 aa, Homo sapiens
  CDR3 for beta chain variable domain of TCR clone 228442 (TRBV6-5, TRBJ2-1)
CASSYDAGAGNEQFF

SEQ ID NO: 456885 - protein, 13 aa, Homo sapiens
  CDR3 for alpha chain variable domain of TCR clone 228443 (TRAV25, TRAJ30)
CAGRGDRDEKIIF

SEQ ID NO: 456886 - protein, 17 aa, Homo sapiens
  CDR3 for beta chain variable domain of TCR clone 228443 (TRBV7-9, TRBJ2-6)
CASSFGAGYSGANVLTF

SEQ ID NO: 456887 - protein, 10 aa, Homo sapiens
  CDR3 for alpha chain variable domain of TCR clone 228444 (TRAV25, TRAJ20)
CAVNDYKLSF

SEQ ID NO: 456888 - protein, 17 aa, Homo sapiens
  CDR3 for beta chain variable domain of TCR clone 228444 (TRBV4-3, TRBJ2-1)
CASSQCSSGRASGEQFF

SEQ ID NO: 456889 - protein, 14 aa, Homo sapiens
  CDR3 for alpha chain variable domain of TCR clone 228445 (TRAV14/DV4, TRAJ34)
CAMREGRPHRQAHL

SEQ ID NO: 456890 - protein, 14 aa, Homo sapiens
  CDR3 for beta chain variable domain of TCR clone 228445 (TRBV19, TRBJ2-1)
CASPTFVLIGEQFF

SEQ ID NO: 456891 - protein, 15 aa, Homo sapiens
  CDR3 for alpha chain variable domain of TCR clone 228446 (TRAV13-1, TRAJ43)
CAATPELGGNNEMRF

SEQ ID NO: 456892 - protein, 15 aa, Homo sapiens
  CDR3 for beta chain variable domain of TCR clone 228446 (TRBV10-2, TRBJ2-6)
CASSEQGTGANGLTF

SEQ ID NO: 456893 - protein, 14 aa, Homo sapiens
  CDR3 for alpha chain variable domain of TCR clone 228447 (TRAV27, TRAJ37)
CRSQCSSNTGKLIF

SEQ ID NO: 456894 - protein, 13 aa, Homo sapiens
  CDR3 for beta chain variable domain of TCR clone 228447 (TRBV18, TRBJ1-1)
CASSGGRNTEAFF

SEQ ID NO: 456895 - protein, 13 aa, Homo sapiens
  CDR3 for alpha chain variable domain of TCR clone 228448 (TRAV8-3, TRAJ28)
CAVGEVGSYQLTF

SEQ ID NO: 456896 - protein, 13 aa, Homo sapiens
  CDR3 for beta chain variable domain of TCR clone 228448 (TRBV19, TRBJ1-2)
CASSVPGQDGYTF

SEQ ID NO: 456897 - protein, 14 aa, Homo sapiens
  CDR3 for alpha chain variable domain of TCR clone 228449 (TRAV1-2, TRAJ8)
CAVREDTGFQKLVF

SEQ ID NO: 456898 - protein, 15 aa, Homo sapiens
  CDR3 for beta chain variable domain of TCR clone 228449 (TRBV11-3, TRBJ2-3)
CAILKDGREGDTQYF

SEQ ID NO: 456899 - protein, 12 aa, Homo sapiens
  CDR3 for alpha chain variable domain of TCR clone 228450 (TRAV2, TRAJ33)
CAVWGSNYQLSW

SEQ ID NO: 456900 - protein, 16 aa, Homo sapiens
  CDR3 for beta chain variable domain of TCR clone 228450 (TRBV20-1, TRBJ1-4)
CSAPGQGLLTNEKLFF

SEQ ID NO: 456901 - protein, 13 aa, Homo sapiens
  CDR3 for alpha chain variable domain of TCR clone 228451 (TRAV38-2/DV8, TRAJ34)
CAYRTWNTDKLIF

SEQ ID NO: 456902 - protein, 18 aa, Homo sapiens
  CDR3 for beta chain variable domain of TCR clone 228451 (TRBV6-6, TRBJ1-3)
CASSYSKWDSISGNTIYV

SEQ ID NO: 456903 - protein, 14 aa, Homo sapiens
  CDR3 for alpha chain variable domain of TCR clone 228452 (TRAV12-3, TRAJ10)
SHLPLTGGGNKLTF

SEQ ID NO: 456904 - protein, 13 aa, Homo sapiens
  CDR3 for beta chain variable domain of TCR clone 228452 (TRBV20-1, TRBJ2-7)
CSARPSTNYEQYF

SEQ ID NO: 456905 - protein, 19 aa, Homo sapiens
  CDR3 for alpha chain variable domain of TCR clone 228453 (TRAV17, TRAJ40)
TASRAADTASYFCASKYIF

SEQ ID NO: 456906 - protein, 17 aa, Homo sapiens
  CDR3 for beta chain variable domain of TCR clone 228453 (TRBV11-2, TRBJ2-4)
CASSFLALGGAGEIQYF

SEQ ID NO: 456907 - protein, 12 aa, Homo sapiens
  CDR3 for alpha chain variable domain of TCR clone 228454 (TRAV1-2, TRAJ29)
CAVSSGNTPLVF

SEQ ID NO: 456908 - protein, 12 aa, Homo sapiens
  CDR3 for beta chain variable domain of TCR clone 228454 (TRBV12-4, TRBJ2-7)
CASSLGGYEQYF

SEQ ID NO: 456909 - protein, 13 aa, Homo sapiens
  CDR3 for alpha chain variable domain of TCR clone 228455 (TRAV38-1, TRAJ57)
CALVQGGSEKLVF

SEQ ID NO: 456910 - protein, 17 aa, Homo sapiens
  CDR3 for beta chain variable domain of TCR clone 228455 (TRBV29-1, TRBJ2-3)
CSVDSPPRGARADTQYF

SEQ ID NO: 456911 - protein, 12 aa, Homo sapiens
  CDR3 for alpha chain variable domain of TCR clone 228456 (TRAV21, TRAJ33)
CAKMDSNYQLIC

SEQ ID NO: 456912 - protein, 14 aa, Homo sapiens
  CDR3 for beta chain variable domain of TCR clone 228456 (TRBV7-8, TRBJ2-3)
CASSLEAGTDTQYF

SEQ ID NO: 456913 - protein, 20 aa, Homo sapiens
  CDR3 for alpha chain variable domain of TCR clone 228457 (TRAV26-1, TRAJ42)
CCVLLHRQTYHGGSQGNLIF

SEQ ID NO: 456914 - protein, 16 aa, Homo sapiens
  CDR3 for beta chain variable domain of TCR clone 228457 (TRBV7-3, TRBJ2-2)
CASSLKRGTSSGELFF

SEQ ID NO: 456915 - protein, 13 aa, Homo sapiens
  CDR3 for alpha chain variable domain of TCR clone 228458 (TRAV13-2, TRAJ48)
CAAMDFGNEKLTF

SEQ ID NO: 456916 - protein, 15 aa, Homo sapiens
  CDR3 for beta chain variable domain of TCR clone 228458 (TRBV7-9, TRBJ1-6)
RASSSPGRGNSPLHF

SEQ ID NO: 456917 - protein, 13 aa, Homo sapiens
  CDR3 for alpha chain variable domain of TCR clone 228459 (TRAV8-3, TRAJ28)
CAVGAVGSYQLTF

SEQ ID NO: 456918 - protein, 16 aa, Homo sapiens
  CDR3 for beta chain variable domain of TCR clone 228459 (TRBV15, TRBJ2-1)
CATSRERLAGAYEQFF

SEQ ID NO: 456919 - protein, 12 aa, Homo sapiens
  CDR3 for alpha chain variable domain of TCR clone 228460 (TRAV26-2, TRAJ21)
CILKGNFNKFYF

SEQ ID NO: 456920 - protein, 11 aa, Homo sapiens
  CDR3 for beta chain variable domain of TCR clone 228460 (TRBV7-9, TRBJ2-3)
CASSPTDTQYF

SEQ ID NO: 456921 - protein, 14 aa, Homo sapiens
  CDR3 for alpha chain variable domain of TCR clone 228461 (TRAV3, TRAJ8)
CAVSLNTGFQKLVF

SEQ ID NO: 456922 - protein, 16 aa, Homo sapiens
  CDR3 for beta chain variable domain of TCR clone 228461 (TRBV12-4, TRBJ2-1)
CASSAVGQGNGDEQFF

SEQ ID NO: 456923 - protein, 18 aa, Homo sapiens
  CDR3 for alpha chain variable domain of TCR clone 228462 (TRAV16, TRAJ52)
CALSGVDAGGTSYGKLTF

SEQ ID NO: 456924 - protein, 13 aa, Homo sapiens
  CDR3 for beta chain variable domain of TCR clone 228462 (TRBV7-9, TRBJ2-7)
CASSFAGAYEQYF

SEQ ID NO: 456925 - protein, 14 aa, Homo sapiens
  CDR3 for alpha chain variable domain of TCR clone 228463 (TRAV12-3, TRAJ57)
CAMSAWGGSEKLVF

SEQ ID NO: 456926 - protein, 14 aa, Homo sapiens
  CDR3 for beta chain variable domain of TCR clone 228463 (TRBV18, TRBJ2-5)
CASSAGVSQETQYF

SEQ ID NO: 456927 - protein, 17 aa, Homo sapiens
  CDR3 for alpha chain variable domain of TCR clone 228464 (TRAV12-2, TRAJ22)
CAVNRIPFSGSARQLTF

SEQ ID NO: 456928 - protein, 14 aa, Homo sapiens
  CDR3 for beta chain variable domain of TCR clone 228464 (TRBV18, TRBJ2-7)
CASSPRGGAYEQYF

SEQ ID NO: 456929 - protein, 16 aa, Homo sapiens
  CDR3 for alpha chain variable domain of TCR clone 228465 (TRAV30, TRAJ24)
CGTEIVDADSWGKFQL

SEQ ID NO: 456930 - protein, 15 aa, Homo sapiens
  CDR3 for beta chain variable domain of TCR clone 228465 (TRBV20-1, TRBJ2-7)
CSARDRVSGMDEQYF

SEQ ID NO: 456931 - protein, 16 aa, Homo sapiens
  CDR3 for alpha chain variable domain of TCR clone 228466 (TRAV8-3, TRAJ42)
CAVGEGNGGSQGNLIF

SEQ ID NO: 456932 - protein, 18 aa, Homo sapiens
  CDR3 for beta chain variable domain of TCR clone 228466 (TRBV5-4, TRBJ2-3)
CASSPTAGFLPSTDTQYF

SEQ ID NO: 456933 - protein, 16 aa, Homo sapiens
  CDR3 for alpha chain variable domain of TCR clone 228467 (TRAV17, TRAJ28)
CATDEYSGAGSYQLTF

SEQ ID NO: 456934 - protein, 13 aa, Homo sapiens
  CDR3 for beta chain variable domain of TCR clone 228467 (TRBV7-9, TRBJ1-2)
CASRTGPNYGYTC

SEQ ID NO: 456935 - protein, 11 aa, Homo sapiens
  CDR3 for alpha chain variable domain of TCR clone 228468 (TRAV3, TRAJ21)
CAVGNFNKFYL

SEQ ID NO: 456936 - protein, 16 aa, Homo sapiens
  CDR3 for beta chain variable domain of TCR clone 228468 (TRBV19, TRBJ2-1)
CASSKAGPSSYNEQLF

SEQ ID NO: 456937 - protein, 13 aa, Homo sapiens
  CDR3 for alpha chain variable domain of TCR clone 228469 (TRAV13-1, TRAJ5)
CAAEHTGRRALTF

SEQ ID NO: 456938 - protein, 12 aa, Homo sapiens
  CDR3 for beta chain variable domain of TCR clone 228469 (TRBV11-2, TRBJ2-2)
CASSLGGGELFF

SEQ ID NO: 456939 - protein, 12 aa, Homo sapiens
  CDR3 for alpha chain variable domain of TCR clone 228470 (TRAV13-1, TRAJ9)
CAARQNDYKLSF

SEQ ID NO: 456940 - protein, 14 aa, Homo sapiens
  CDR3 for beta chain variable domain of TCR clone 228470 (TRBV20-1, TRBJ2-1)
CSAQIGGSANEQFF

SEQ ID NO: 456941 - protein, 16 aa, Homo sapiens
  CDR3 for alpha chain variable domain of TCR clone 228471 (TRAV35, TRAJ28)
CAGQKYSGAGSYQLPF

SEQ ID NO: 456942 - protein, 13 aa, Homo sapiens
  CDR3 for beta chain variable domain of TCR clone 228471 (TRBV19, TRBJ1-2)
CASSQGQVYGYTF

SEQ ID NO: 456943 - protein, 14 aa, Homo sapiens
  CDR3 for alpha chain variable domain of TCR clone 228472 (TRAV1-2, TRAJ8)
CAVREDTGFQKLVF

SEQ ID NO: 456944 - protein, 14 aa, Homo sapiens
  CDR3 for beta chain variable domain of TCR clone 228472 (TRBV7-2, TRBJ2-7)
CASSLDPGRYEQYF

SEQ ID NO: 456945 - protein, 13 aa, Homo sapiens
  CDR3 for alpha chain variable domain of TCR clone 228473 (TRAV13-1, TRAJ11)
CAASIRGYSTLTF

SEQ ID NO: 456946 - protein, 18 aa, Homo sapiens
  CDR3 for beta chain variable domain of TCR clone 228473 (TRBV28, TRBJ2-1)
CASSSTSGRANSYNEQFF

SEQ ID NO: 456947 - protein, 10 aa, Homo sapiens
  CDR3 for alpha chain variable domain of TCR clone 228474 (TRAV30, TRAJ16)
CGTGGQKLLF

SEQ ID NO: 456948 - protein, 15 aa, Homo sapiens
  CDR3 for beta chain variable domain of TCR clone 228474 (TRBV7-9, TRBJ1-4)
CASSARTGGNEKLFF

SEQ ID NO: 456949 - protein, 14 aa, Homo sapiens
  CDR3 for alpha chain variable domain of TCR clone 228475 (TRAV2, TRAJ9)
CAVEDRSGGFKTIF

SEQ ID NO: 456950 - protein, 15 aa, Homo sapiens
  CDR3 for beta chain variable domain of TCR clone 228475 (TRBV4-1, TRBJ1-1)
CASSQEWGHYTEAFF

SEQ ID NO: 456951 - protein, 20 aa, Homo sapiens
  CDR3 for alpha chain variable domain of TCR clone 228476 (TRAV25, TRAJ33)
TATQTTDVGTSRGSNYQLIW

SEQ ID NO: 456952 - protein, 20 aa, Homo sapiens
  CDR3 for beta chain variable domain of TCR clone 228476 (TRBV7-8, TRBJ2-2)
CASSHLFPGPTIHITGELFF

SEQ ID NO: 456953 - protein, 12 aa, Homo sapiens
  CDR3 for alpha chain variable domain of TCR clone 228477 (TRAV12-2, TRAJ10)
WGVTGGGNKLTF

SEQ ID NO: 456954 - protein, 15 aa, Homo sapiens
  CDR3 for beta chain variable domain of TCR clone 228477 (TRBV20-1, TRBJ2-7)
CSARDRVSGMDEQYC

SEQ ID NO: 456955 - protein, 16 aa, Homo sapiens
  CDR3 for alpha chain variable domain of TCR clone 228478 (TRAV30, TRAJ24)
CGTEIVAADSWGKFQF

SEQ ID NO: 456956 - protein, 17 aa, Homo sapiens
  CDR3 for beta chain variable domain of TCR clone 228478 (TRBV13, TRBJ2-3)
CASSLSRVAGGRNTQYF

SEQ ID NO: 456957 - protein, 12 aa, Homo sapiens
  CDR3 for alpha chain variable domain of TCR clone 228479 (TRAV12-3, TRAJ5)
CAMDTGRRALTF

SEQ ID NO: 456958 - protein, 11 aa, Homo sapiens
  CDR3 for beta chain variable domain of TCR clone 228479 (TRBV12-4, TRBJ2-3)
CASTATDTQYF

SEQ ID NO: 456959 - protein, 13 aa, Homo sapiens
  CDR3 for alpha chain variable domain of TCR clone 228480 (TRAV13-1, TRAJ43)
CAASKNNNNDMRF

SEQ ID NO: 456960 - protein, 14 aa, Homo sapiens
  CDR3 for beta chain variable domain of TCR clone 228480 (TRBV14, TRBJ2-1)
CASSQVQVRGEQFF

SEQ ID NO: 456961 - protein, 13 aa, Homo sapiens
  CDR3 for alpha chain variable domain of TCR clone 228481 (TRAV27, TRAJ45)
CRSSGGGADGLTF

SEQ ID NO: 456962 - protein, 14 aa, Homo sapiens
  CDR3 for beta chain variable domain of TCR clone 228481 (TRBV13, TRBJ2-5)
CASGLGRGQETQYF

SEQ ID NO: 456963 - protein, 11 aa, Homo sapiens
  CDR3 for alpha chain variable domain of TCR clone 228482 (TRAV2, TRAJ33)
CAVDSNYQLIW

SEQ ID NO: 456964 - protein, 15 aa, Homo sapiens
  CDR3 for beta chain variable domain of TCR clone 228482 (TRBV5-1, TRBJ1-4)
FAPAAWKDGNEKLFF

SEQ ID NO: 456965 - protein, 11 aa, Homo sapiens
  CDR3 for alpha chain variable domain of TCR clone 228483 (TRAV3, TRAJ21)
CAVGNFNKFYF

SEQ ID NO: 456966 - protein, 15 aa, Homo sapiens
  CDR3 for beta chain variable domain of TCR clone 228483 (TRBV28, TRBJ2-7)
CASRPWDRFSYEQYF

SEQ ID NO: 456967 - protein, 15 aa, Homo sapiens
  CDR3 for alpha chain variable domain of TCR clone 228484 (TRAV17, TRAJ22)
CATAALLGSARQLTF

SEQ ID NO: 456968 - protein, 15 aa, Homo sapiens
  CDR3 for beta chain variable domain of TCR clone 228484 (TRBV7-3, TRBJ2-2)
CASKANGANTGELFF

SEQ ID NO: 456969 - protein, 14 aa, Homo sapiens
  CDR3 for alpha chain variable domain of TCR clone 228485 (TRAV2, TRAJ37)
CAVDFTSNTGKLIF

SEQ ID NO: 456970 - protein, 14 aa, Homo sapiens
  CDR3 for beta chain variable domain of TCR clone 228485 (TRBV7-9, TRBJ2-2)
CASSGLADTGELFF

SEQ ID NO: 456971 - protein, 14 aa, Homo sapiens
  CDR3 for alpha chain variable domain of TCR clone 228486 (TRAV22, TRAJ6)
CAGVGPGGSYIPTF

SEQ ID NO: 456972 - protein, 10 aa, Homo sapiens
  CDR3 for beta chain variable domain of TCR clone 228486 (TRBV29-1, TRBJ2-7)
CSATGVEQYF

SEQ ID NO: 456973 - protein, 13 aa, Homo sapiens
  CDR3 for alpha chain variable domain of TCR clone 228487 (TRAV3, TRAJ27)
CAVRPLGAGKPTS

SEQ ID NO: 456974 - protein, 15 aa, Homo sapiens
  CDR3 for beta chain variable domain of TCR clone 228487 (TRBV3-1, TRBJ2-7)
CASSQAPSGSYEQYF

SEQ ID NO: 456975 - protein, 14 aa, Homo sapiens
  CDR3 for alpha chain variable domain of TCR clone 228488 (TRAV12-3, TRAJ29)
CTMSPYSGNTPLVF

SEQ ID NO: 456976 - protein, 12 aa, Homo sapiens
  CDR3 for beta chain variable domain of TCR clone 228488 (TRBV12-4, TRBJ2-7)
CASNPGGGEQYF

SEQ ID NO: 456977 - protein, 13 aa, Homo sapiens
  CDR3 for alpha chain variable domain of TCR clone 228489 (TRAV17, TRAJ30)
CATGGNRDDKIIF

SEQ ID NO: 456978 - protein, 12 aa, Homo sapiens
  CDR3 for beta chain variable domain of TCR clone 228489 (TRBV7-8, TRBJ2-7)
CASSLGDREQYF

SEQ ID NO: 456979 - protein, 11 aa, Homo sapiens
  CDR3 for alpha chain variable domain of TCR clone 228490 (TRAV3, TRAJ21)
CAVGNFNKFYF

SEQ ID NO: 456980 - protein, 15 aa, Homo sapiens
  CDR3 for beta chain variable domain of TCR clone 228490 (TRBV19, TRBJ2-1)
CASSGGGTLYNEQFF

SEQ ID NO: 456981 - protein, 12 aa, Homo sapiens
  CDR3 for alpha chain variable domain of TCR clone 228491 (TRAV27, TRAJ41)
GAGRNSGYALNF

SEQ ID NO: 456982 - protein, 13 aa, Homo sapiens
  CDR3 for beta chain variable domain of TCR clone 228491 (TRBV12-4, TRBJ1-1)
CASSPGTGCEAFF

SEQ ID NO: 456983 - protein, 14 aa, Homo sapiens
  CDR3 for alpha chain variable domain of TCR clone 228492 (TRAV25, TRAJ35)
CARRTEGFGNVLHC

SEQ ID NO: 456984 - protein, 13 aa, Homo sapiens
  CDR3 for beta chain variable domain of TCR clone 228492 (TRBV7-2, TRBJ1-4)
CASSLAGLEKLFF

SEQ ID NO: 456985 - protein, 11 aa, Homo sapiens
  CDR3 for alpha chain variable domain of TCR clone 228493 (TRAV3, TRAJ21)
CAVGNFNKFYF

SEQ ID NO: 456986 - protein, 17 aa, Homo sapiens
  CDR3 for beta chain variable domain of TCR clone 228493 (TRBV5-1, TRBJ2-5)
CASAGTRQFGNKETQYF

SEQ ID NO: 456987 - protein, 16 aa, Homo sapiens
  CDR3 for alpha chain variable domain of TCR clone 228494 (TRAV25, TRAJ24)
CAQRRGTTDSWGKLQF

SEQ ID NO: 456988 - protein, 12 aa, Homo sapiens
  CDR3 for beta chain variable domain of TCR clone 228494 (TRBV6-3, TRBJ2-7)
CASSEPGCEQYF

SEQ ID NO: 456989 - protein, 10 aa, Homo sapiens
  CDR3 for alpha chain variable domain of TCR clone 228495 (TRAV1-2, TRAJ31)
CAFFDARLMF

SEQ ID NO: 456990 - protein, 13 aa, Homo sapiens
  CDR3 for beta chain variable domain of TCR clone 228495 (TRBV27, TRBJ2-7)
CASGRGGAYEQYF

SEQ ID NO: 456991 - protein, 16 aa, Homo sapiens
  CDR3 for alpha chain variable domain of TCR clone 228496 (TRAV3, TRAJ10)
CAVRDMRAGGGNKLTF

SEQ ID NO: 456992 - protein, 15 aa, Homo sapiens
  CDR3 for beta chain variable domain of TCR clone 228496 (TRBV11-2, TRBJ1-6)
CASTGFGAAVSPLHF

SEQ ID NO: 456993 - protein, 11 aa, Homo sapiens
  CDR3 for alpha chain variable domain of TCR clone 228497 (TRAV1-1, TRAJ23)
CAVRQGGKLIF

SEQ ID NO: 456994 - protein, 14 aa, Homo sapiens
  CDR3 for beta chain variable domain of TCR clone 228497 (TRBV15, TRBJ1-5)
CATSREQSNQPQHF

SEQ ID NO: 456995 - protein, 13 aa, Homo sapiens
  CDR3 for alpha chain variable domain of TCR clone 228498 (TRAV13-1, TRAJ39)
CSKYSNAGNMLTF

SEQ ID NO: 456996 - protein, 16 aa, Homo sapiens
  CDR3 for beta chain variable domain of TCR clone 228498 (TRBV20-1, TRBJ1-4)
CSAPAQGLLTNEKLFF

SEQ ID NO: 456997 - protein, 12 aa, Homo sapiens
  CDR3 for alpha chain variable domain of TCR clone 228499 (TRAV12-2, TRAJ9)
CAVYNGGFKTIF

SEQ ID NO: 456998 - protein, 13 aa, Homo sapiens
  CDR3 for beta chain variable domain of TCR clone 228499 (TRBV10-3, TRBJ2-7)
CASKLAVNYEQYF

SEQ ID NO: 456999 - protein, 16 aa, Homo sapiens
  CDR3 for alpha chain variable domain of TCR clone 228500 (TRAV3, TRAJ10)
CAVRDMRAGGGNKLTF

SEQ ID NO: 457000 - protein, 14 aa, Homo sapiens
  CDR3 for beta chain variable domain of TCR clone 228500 (TRBV7-9, TRBJ1-4)
CAITEGEANEKLFF

SEQ ID NO: 457001 - protein, 14 aa, Homo sapiens
  CDR3 for alpha chain variable domain of TCR clone 228501 (TRAV6, TRAJ37)
CALGSQGNTGKLIF

SEQ ID NO: 457002 - protein, 15 aa, Homo sapiens
  CDR3 for beta chain variable domain of TCR clone 228501 (TRBV2, TRBJ2-1)
CASSAEREGDNEQFF

SEQ ID NO: 457003 - protein, 13 aa, Homo sapiens
  CDR3 for alpha chain variable domain of TCR clone 228502 (TRAV13-1, TRAJ41)
CAASINSGYALNF

SEQ ID NO: 457004 - protein, 15 aa, Homo sapiens
  CDR3 for beta chain variable domain of TCR clone 228502 (TRBV7-9, TRBJ2-7)
CASSRAGESSYEQYF

SEQ ID NO: 457005 - protein, 16 aa, Homo sapiens
  CDR3 for alpha chain variable domain of TCR clone 228503 (TRAV12-3, TRAJ53)
CAMSPGSGGRHYKLTF

SEQ ID NO: 457006 - protein, 16 aa, Homo sapiens
  CDR3 for beta chain variable domain of TCR clone 228503 (TRBV4-2, TRBJ1-1)
CASSQAGFGMNTEAFF

SEQ ID NO: 457007 - protein, 12 aa, Homo sapiens
  CDR3 for alpha chain variable domain of TCR clone 228504 (TRAV27, TRAJ58)
CAGARDTSRLTF

SEQ ID NO: 457008 - protein, 15 aa, Homo sapiens
  CDR3 for beta chain variable domain of TCR clone 228504 (TRBV3-1, TRBJ2-7)
CASSQVAVAQYEQYF

SEQ ID NO: 457009 - protein, 15 aa, Homo sapiens
  CDR3 for alpha chain variable domain of TCR clone 228505 (TRAV17, TRAJ57)
CATGPSQGGSEKLVF

SEQ ID NO: 457010 - protein, 19 aa, Homo sapiens
  CDR3 for beta chain variable domain of TCR clone 228505 (TRBV11-3, TRBJ2-2)
CASSTRPGAKTTNTGELFF

SEQ ID NO: 457011 - protein, 10 aa, Homo sapiens
  CDR3 for alpha chain variable domain of TCR clone 228506 (TRAV8-2, TRAJ29)
CTGLNTPLVF

SEQ ID NO: 457012 - protein, 13 aa, Homo sapiens
  CDR3 for beta chain variable domain of TCR clone 228506 (TRBV20-1, TRBJ1-1)
CSARGGGNTEAFF

SEQ ID NO: 457013 - protein, 13 aa, Homo sapiens
  CDR3 for alpha chain variable domain of TCR clone 228507 (TRAV12-2, TRAJ20)
CAVYPSNDYKLSF

SEQ ID NO: 457014 - protein, 15 aa, Homo sapiens
  CDR3 for beta chain variable domain of TCR clone 228507 (TRBV6-1, TRBJ2-7)
CASSVQRGVYYEQYF

SEQ ID NO: 457015 - protein, 16 aa, Homo sapiens
  CDR3 for alpha chain variable domain of TCR clone 228508 (TRAV4, TRAJ18)
CCVLLIGGSTLGRLYF

SEQ ID NO: 457016 - protein, 10 aa, Homo sapiens
  CDR3 for beta chain variable domain of TCR clone 228508 (TRBV7-3, TRBJ2-2)
CASSLSGTSG

SEQ ID NO: 457017 - protein, 13 aa, Homo sapiens
  CDR3 for alpha chain variable domain of TCR clone 228509 (TRAV2, TRAJ15)
CAVASQVGTALIF

SEQ ID NO: 457018 - protein, 14 aa, Homo sapiens
  CDR3 for beta chain variable domain of TCR clone 228509 (TRBV6-1, TRBJ1-3)
CASVQGGGGNTIYF

SEQ ID NO: 457019 - protein, 13 aa, Homo sapiens
  CDR3 for alpha chain variable domain of TCR clone 228510 (TRAV12-3, TRAJ7)
CAMTPYGNNRLAF

SEQ ID NO: 457020 - protein, 16 aa, Homo sapiens
  CDR3 for beta chain variable domain of TCR clone 228510 (TRBV20-1, TRBJ1-4)
CSAPGQGLLTNENLFF

SEQ ID NO: 457021 - protein, 13 aa, Homo sapiens
  CDR3 for alpha chain variable domain of TCR clone 228511 (TRAV39, TRAJ48)
CAAANFGNEKLTF

SEQ ID NO: 457022 - protein, 12 aa, Homo sapiens
  CDR3 for beta chain variable domain of TCR clone 228511 (TRBV5-5, TRBJ2-5)
CASSYVGETQYF

SEQ ID NO: 457023 - protein, 11 aa, Homo sapiens
  CDR3 for alpha chain variable domain of TCR clone 228512 (TRAV13-1, TRAJ39)
CASHAGNMLTF

SEQ ID NO: 457024 - protein, 14 aa, Homo sapiens
  CDR3 for beta chain variable domain of TCR clone 228512 (TRBV11-2, TRBJ1-5)
CASSLDGGRQPQHF

SEQ ID NO: 457025 - protein, 13 aa, Homo sapiens
  CDR3 for alpha chain variable domain of TCR clone 228513 (TRAV3, TRAJ4)
CAVSDGGYNKLIF

SEQ ID NO: 457026 - protein, 14 aa, Homo sapiens
  CDR3 for beta chain variable domain of TCR clone 228513 (TRBV12-4, TRBJ1-2)
CASSSSAAGSSYTF

SEQ ID NO: 457027 - protein, 14 aa, Homo sapiens
  CDR3 for alpha chain variable domain of TCR clone 228514 (TRAV23/DV6, TRAJ17)
CAASIGAAGIKLTF

SEQ ID NO: 457028 - protein, 12 aa, Homo sapiens
  CDR3 for beta chain variable domain of TCR clone 228514 (TRBV20-1, TRBJ2-5)
CSAGGAGETQYF

SEQ ID NO: 457029 - protein, 12 aa, Homo sapiens
  CDR3 for alpha chain variable domain of TCR clone 228515 (TRAV12-3, TRAJ17)
CAMTLTGHKLTF

SEQ ID NO: 457030 - protein, 15 aa, Homo sapiens
  CDR3 for beta chain variable domain of TCR clone 228515 (TRBV20-1, TRBJ2-7)
CSARNRVSGMDEQYF

SEQ ID NO: 457031 - protein, 11 aa, Homo sapiens
  CDR3 for alpha chain variable domain of TCR clone 228516 (TRAV17, TRAJ43)
CATPRSNDMRF

SEQ ID NO: 457032 - protein, 13 aa, Homo sapiens
  CDR3 for beta chain variable domain of TCR clone 228516 (TRBV7-9, TRBJ2-3)
CASSPRGPDTQYF

SEQ ID NO: 457033 - protein, 12 aa, Homo sapiens
  CDR3 for alpha chain variable domain of TCR clone 228517 (TRAV12-3, TRAJ17)
CAMTLTGNRLTF

SEQ ID NO: 457034 - protein, 15 aa, Homo sapiens
  CDR3 for beta chain variable domain of TCR clone 228517 (TRBV6-6, TRBJ2-5)
CASSPGGGLEETQYF

SEQ ID NO: 457035 - protein, 13 aa, Homo sapiens
  CDR3 for alpha chain variable domain of TCR clone 228518 (TRAV30, TRAJ34)
CGTVGYNTDKLIF

SEQ ID NO: 457036 - protein, 13 aa, Homo sapiens
  CDR3 for beta chain variable domain of TCR clone 228518 (TRBV11-2, TRBJ1-1)
CASSLGNGAEAFF

SEQ ID NO: 457037 - protein, 12 aa, Homo sapiens
  CDR3 for alpha chain variable domain of TCR clone 228519 (TRAV12-3, TRAJ3)
CAIDSSASKIIF

SEQ ID NO: 457038 - protein, 14 aa, Homo sapiens
  CDR3 for beta chain variable domain of TCR clone 228519 (TRBV7-2, TRBJ2-7)
CASSPKTSFYEQYF

SEQ ID NO: 457039 - protein, 16 aa, Homo sapiens
  CDR3 for alpha chain variable domain of TCR clone 228520 (TRAV30, TRAJ24)
CGTEIVDADSSGKFQF

SEQ ID NO: 457040 - protein, 15 aa, Homo sapiens
  CDR3 for beta chain variable domain of TCR clone 228520 (TRBV7-9, TRBJ1-4)
CASSARTGGNEKLFF

SEQ ID NO: 457041 - protein, 11 aa, Homo sapiens
  CDR3 for alpha chain variable domain of TCR clone 228521 (TRAV12-1, TRAJ33)
CVVNMKLSVNL

SEQ ID NO: 457042 - protein, 11 aa, Homo sapiens
  CDR3 for beta chain variable domain of TCR clone 228521 (TRBV10-1, TRBJ2-3)
CASSDSDTQYF

SEQ ID NO: 457043 - protein, 16 aa, Homo sapiens
  CDR3 for alpha chain variable domain of TCR clone 228522 (TRAV8-4, TRAJ5)
CAVSPLTDTGRRALTF

SEQ ID NO: 457044 - protein, 14 aa, Homo sapiens
  CDR3 for beta chain variable domain of TCR clone 228522 (TRBV19, TRBJ1-6)
CASSTDGWNSPLHF

SEQ ID NO: 457045 - protein, 12 aa, Homo sapiens
  CDR3 for alpha chain variable domain of TCR clone 228523 (TRAV17, TRAJ57)
CATGGGSEKLVF

SEQ ID NO: 457046 - protein, 13 aa, Homo sapiens
  CDR3 for beta chain variable domain of TCR clone 228523 (TRBV7-9, TRBJ2-7)
CASRFAGAYEQYF

SEQ ID NO: 457047 - protein, 13 aa, Homo sapiens
  CDR3 for alpha chain variable domain of TCR clone 228524 (TRAV20, TRAJ20)
CAVQAGSGYKLSF

SEQ ID NO: 457048 - protein, 13 aa, Homo sapiens
  CDR3 for beta chain variable domain of TCR clone 228524 (TRBV7-3, TRBJ1-1)
CASSQDWGAEAFF

SEQ ID NO: 457049 - protein, 13 aa, Homo sapiens
  CDR3 for alpha chain variable domain of TCR clone 228525 (TRAV13-2, TRAJ48)
CAEMDFGNEKLTF

SEQ ID NO: 457050 - protein, 15 aa, Homo sapiens
  CDR3 for beta chain variable domain of TCR clone 228525 (TRBV13, TRBJ2-1)
CQQPPQRGENNEQFF

SEQ ID NO: 457051 - protein, 14 aa, Homo sapiens
  CDR3 for alpha chain variable domain of TCR clone 228526 (TRAV26-1, TRAJ38)
CIADNADNNRKLIW

SEQ ID NO: 457052 - protein, 17 aa, Homo sapiens
  CDR3 for beta chain variable domain of TCR clone 228526 (TRBV20-1, TRBJ1-5)
CSARDPSAQGFNQPQHF

SEQ ID NO: 457053 - protein, 15 aa, Homo sapiens
  CDR3 for alpha chain variable domain of TCR clone 228527 (TRAV8-2, TRAJ40)
CVVLGTTSGTYTYIF

SEQ ID NO: 457054 - protein, 16 aa, Homo sapiens
  CDR3 for beta chain variable domain of TCR clone 228527 (TRBV4-1, TRBJ2-7)
CASSRGDILNSYEQYF

SEQ ID NO: 457055 - protein, 18 aa, Homo sapiens
  CDR3 for alpha chain variable domain of TCR clone 228528 (TRAV13-1, TRAJ52)
CAAKNPNAGGTSYGKLTF

SEQ ID NO: 457056 - protein, 14 aa, Homo sapiens
  CDR3 for beta chain variable domain of TCR clone 228528 (TRBV13, TRBJ2-7)
CASSLKGASYEQYF

SEQ ID NO: 457057 - protein, 16 aa, Homo sapiens
  CDR3 for alpha chain variable domain of TCR clone 228529 (TRAV12-3, TRAJ53)
CAMSPGSGGSNYKLTF

SEQ ID NO: 457058 - protein, 14 aa, Homo sapiens
  CDR3 for beta chain variable domain of TCR clone 228529 (TRBV4-2, TRBJ2-1)
CASGLDRAYNEQFV

SEQ ID NO: 457059 - protein, 14 aa, Homo sapiens
  CDR3 for alpha chain variable domain of TCR clone 228530 (TRAV2, TRAJ9)
CAVEDRSGGFKTIF

SEQ ID NO: 457060 - protein, 14 aa, Homo sapiens
  CDR3 for beta chain variable domain of TCR clone 228530 (TRBV15, TRBJ2-5)
CATSGDRGQETQYF

SEQ ID NO: 457061 - protein, 12 aa, Homo sapiens
  CDR3 for alpha chain variable domain of TCR clone 228531 (TRAV21, TRAJ30)
CAVMNREDKIIF

SEQ ID NO: 457062 - protein, 17 aa, Homo sapiens
  CDR3 for beta chain variable domain of TCR clone 228531 (TRBV5-1, TRBJ1-1)
CASRPIRTGGVNTEAFF

SEQ ID NO: 457063 - protein, 16 aa, Homo sapiens
  CDR3 for alpha chain variable domain of TCR clone 228532 (TRAV12-1, TRAJ28)
CVVIAYSGAGSYQLTF

SEQ ID NO: 457064 - protein, 15 aa, Homo sapiens
  CDR3 for beta chain variable domain of TCR clone 228532 (TRBV14, TRBJ1-1)
CASSQEGMGFTEDFF

SEQ ID NO: 457065 - protein, 14 aa, Homo sapiens
  CDR3 for alpha chain variable domain of TCR clone 228533 (TRAV12-2, TRAJ13)
CAVKKNGGYQKVTF

SEQ ID NO: 457066 - protein, 15 aa, Homo sapiens
  CDR3 for beta chain variable domain of TCR clone 228533 (TRBV6-3, TRBJ2-7)
CASSSPGTVFYEQYF

SEQ ID NO: 457067 - protein, 23 aa, Homo sapiens
  CDR3 for alpha chain variable domain of TCR clone 228534 (TRAV26-1, TRAJ38)
CIADNAGNNHIQNPNPAVYQLRV

SEQ ID NO: 457068 - protein, 17 aa, Homo sapiens
  CDR3 for beta chain variable domain of TCR clone 228534 (TRBV11-2, TRBJ2-6)
CASSQRDIFSGANVLTF

SEQ ID NO: 457069 - protein, 13 aa, Homo sapiens
  CDR3 for alpha chain variable domain of TCR clone 228535 (TRAV17, TRAJ15)
CATDSRAGTALIF

SEQ ID NO: 457070 - protein, 15 aa, Homo sapiens
  CDR3 for beta chain variable domain of TCR clone 228535 (TRBV20-1, TRBJ2-7)
CSARDRVSGMDEQYF

SEQ ID NO: 457071 - protein, 16 aa, Homo sapiens
  CDR3 for alpha chain variable domain of TCR clone 228536 (TRAV30, TRAJ24)
CGAETVDADSWGKFQF

SEQ ID NO: 457072 - protein, 15 aa, Homo sapiens
  CDR3 for beta chain variable domain of TCR clone 228536 (TRBV9, TRBJ2-1)
CASSLAGSSYNEQFF

SEQ ID NO: 457073 - protein, 13 aa, Homo sapiens
  CDR3 for alpha chain variable domain of TCR clone 228537 (TRAV21, TRAJ22)
SGFSSGSARQLTF

SEQ ID NO: 457074 - protein, 14 aa, Homo sapiens
  CDR3 for beta chain variable domain of TCR clone 228537 (TRBV19, TRBJ1-5)
CASRAPDSFLSQHF

SEQ ID NO: 457075 - protein, 16 aa, Homo sapiens
  CDR3 for alpha chain variable domain of TCR clone 228538 (TRAV12-3, TRAJ53)
CAMSPGSGGSNYKLTF

SEQ ID NO: 457076 - protein, 14 aa, Homo sapiens
  CDR3 for beta chain variable domain of TCR clone 228538 (TRBV12-4, TRBJ1-6)
CQQLGGQGTSPLYF

SEQ ID NO: 457077 - protein, 15 aa, Homo sapiens
  CDR3 for alpha chain variable domain of TCR clone 228539 (TRAV2, TRAJ15)
CAVEDRGQAGTALIF

SEQ ID NO: 457078 - protein, 19 aa, Homo sapiens
  CDR3 for beta chain variable domain of TCR clone 228539 (TRBV23-1, TRBJ2-3)
TVSLRQQPRSTGSTDTQYF

SEQ ID NO: 457079 - protein, 16 aa, Homo sapiens
  CDR3 for alpha chain variable domain of TCR clone 228540 (TRAV12-1, TRAJ12)
CVVNTLLMDSSYKLIF

SEQ ID NO: 457080 - protein, 14 aa, Homo sapiens
  CDR3 for beta chain variable domain of TCR clone 228540 (TRBV7-2, TRBJ2-7)
CASSPKTSFYEQYF

SEQ ID NO: 457081 - protein, 11 aa, Homo sapiens
  CDR3 for alpha chain variable domain of TCR clone 228541 (TRAV2, TRAJ13)
CASGGYQKVTF

SEQ ID NO: 457082 - protein, 13 aa, Homo sapiens
  CDR3 for beta chain variable domain of TCR clone 228541 (TRBV4-1, TRBJ2-2)
CASSQENTGELFF

SEQ ID NO: 457083 - protein, 12 aa, Homo sapiens
  CDR3 for alpha chain variable domain of TCR clone 228542 (TRAV12-3, TRAJ17)
CAMTLAGNKLTF

SEQ ID NO: 457084 - protein, 12 aa, Homo sapiens
  CDR3 for beta chain variable domain of TCR clone 228542 (TRBV11-2, TRBJ2-2)
CASSLGGGELFF

SEQ ID NO: 457085 - protein, 23 aa, Homo sapiens
  CDR3 for alpha chain variable domain of TCR clone 228543 (TRAV26-1, TRAJ38)
CIADNAGNNHIQNPDPAVYQLRD

SEQ ID NO: 457086 - protein, 16 aa, Homo sapiens
  CDR3 for beta chain variable domain of TCR clone 228543 (TRBV6-3, TRBJ2-6)
CASSYGPGAGANVLTF

SEQ ID NO: 457087 - protein, 12 aa, Homo sapiens
  CDR3 for alpha chain variable domain of TCR clone 228544 (TRAV12-3, TRAJ17)
CAMTLTGIKLTF

SEQ ID NO: 457088 - protein, 15 aa, Homo sapiens
  CDR3 for beta chain variable domain of TCR clone 228544 (TRBV20-1, TRBJ2-7)
CSARDRVSGIDEQYF

SEQ ID NO: 457089 - protein, 12 aa, Homo sapiens
  CDR3 for alpha chain variable domain of TCR clone 228545 (TRAV2, TRAJ36)
CAELTGANNLFF

SEQ ID NO: 457090 - protein, 15 aa, Homo sapiens
  CDR3 for beta chain variable domain of TCR clone 228545 (TRBV4-1, TRBJ2-5)
CASSQWDLYQETQYF

SEQ ID NO: 457091 - protein, 19 aa, Homo sapiens
  CDR3 for alpha chain variable domain of TCR clone 228546 (TRAV3, TRAJ6)
CAVRDRNPSRSGGSYIPTF

SEQ ID NO: 457092 - protein, 15 aa, Homo sapiens
  CDR3 for beta chain variable domain of TCR clone 228546 (TRBV4-1, TRBJ1-4)
CASSDTGGTNEKLFF

SEQ ID NO: 457093 - protein, 13 aa, Homo sapiens
  CDR3 for alpha chain variable domain of TCR clone 228547 (TRAV38-2/DV8, TRAJ34)
CAYRTWNTDKLIF

SEQ ID NO: 457094 - protein, 18 aa, Homo sapiens
  CDR3 for beta chain variable domain of TCR clone 228547 (TRBV12-4, TRBJ2-2)
CASSLVAGTRGRTGELFF

SEQ ID NO: 457095 - protein, 14 aa, Homo sapiens
  CDR3 for alpha chain variable domain of TCR clone 228548 (TRAV23/DV6, TRAJ57)
CAASNQGGSEKLVF

SEQ ID NO: 457096 - protein, 14 aa, Homo sapiens
  CDR3 for beta chain variable domain of TCR clone 228548 (TRBV4-2, TRBJ2-1)
CASGLDRAYNEQFF

SEQ ID NO: 457097 - protein, 15 aa, Homo sapiens
  CDR3 for alpha chain variable domain of TCR clone 228549 (TRAV8-3, TRAJ45)
CGSSYSGGGADGLTF

SEQ ID NO: 457098 - protein, 16 aa, Homo sapiens
  CDR3 for beta chain variable domain of TCR clone 228549 (TRBV7-9, TRBJ2-2)
CASSGFGGANTGELFF

SEQ ID NO: 457099 - protein, 12 aa, Homo sapiens
  CDR3 for alpha chain variable domain of TCR clone 228550 (TRAV13-1, TRAJ21)
CAAKEGFNKFYF

SEQ ID NO: 457100 - protein, 16 aa, Homo sapiens
  CDR3 for beta chain variable domain of TCR clone 228550 (TRBV20-1, TRBJ2-2)
CSARAGLAGVTGELFF

SEQ ID NO: 457101 - protein, 18 aa, Homo sapiens
  CDR3 for alpha chain variable domain of TCR clone 228551 (TRAV17, TRAJ54)
CFLLLSTDANQGAQKLVF

SEQ ID NO: 457102 - protein, 12 aa, Homo sapiens
  CDR3 for beta chain variable domain of TCR clone 228551 (TRBV7-9, TRBJ2-7)
CASSIKREEQYF

SEQ ID NO: 457103 - protein, 14 aa, Homo sapiens
  CDR3 for alpha chain variable domain of TCR clone 228552 (TRAV2, TRAJ22)
CAAGRGGSARQLTF

SEQ ID NO: 457104 - protein, 12 aa, Homo sapiens
  CDR3 for beta chain variable domain of TCR clone 228552 (TRBV19, TRBJ2-1)
CASSMQDTEQFF

SEQ ID NO: 457105 - protein, 15 aa, Homo sapiens
  CDR3 for alpha chain variable domain of TCR clone 228553 (TRAV12-3, TRAJ49)
CAMAVTPNTGNQFYF

SEQ ID NO: 457106 - protein, 15 aa, Homo sapiens
  CDR3 for beta chain variable domain of TCR clone 228553 (TRBV20-1, TRBJ2-7)
CSAESGTSGAYEQYF

SEQ ID NO: 457107 - protein, 14 aa, Homo sapiens
  CDR3 for alpha chain variable domain of TCR clone 228554 (TRAV30, TRAJ26)
CGTEIVSYGQNFVF

SEQ ID NO: 457108 - protein, 16 aa, Homo sapiens
  CDR3 for beta chain variable domain of TCR clone 228554 (TRBV12-4, TRBJ1-5)
CASSRPVGGSNQPQHF

SEQ ID NO: 457109 - protein, 16 aa, Homo sapiens
  CDR3 for alpha chain variable domain of TCR clone 228555 (TRAV30, TRAJ24)
CGTEIVDAHSWGKFQF

SEQ ID NO: 457110 - protein, 12 aa, Homo sapiens
  CDR3 for beta chain variable domain of TCR clone 228555 (TRBV11-2, TRBJ2-2)
CASSLGGGELFF

SEQ ID NO: 457111 - protein, 11 aa, Homo sapiens
  CDR3 for alpha chain variable domain of TCR clone 228556 (TRAV20, TRAJ40)
CAVGGTYKYIF

SEQ ID NO: 457112 - protein, 15 aa, Homo sapiens
  CDR3 for beta chain variable domain of TCR clone 228556 (TRBV6-3, TRBJ2-2)
CARSFLATLTGELFF

SEQ ID NO: 457113 - protein, 16 aa, Homo sapiens
  CDR3 for alpha chain variable domain of TCR clone 228557 (TRAV30, TRAJ24)
CVTEIVDADSWGKFQC

SEQ ID NO: 457114 - protein, 14 aa, Homo sapiens
  CDR3 for beta chain variable domain of TCR clone 228557 (TRBV12-5, TRBJ2-5)
CASGSRTHQETQYF

SEQ ID NO: 457115 - protein, 15 aa, Homo sapiens
  CDR3 for alpha chain variable domain of TCR clone 228558 (TRAV16, TRAJ16)
CALQGGGSDGQKLLF

SEQ ID NO: 457116 - protein, 16 aa, Homo sapiens
  CDR3 for beta chain variable domain of TCR clone 228558 (TRBV20-1, TRBJ1-4)
CSAPGQGLLTNEKLFF

SEQ ID NO: 457117 - protein, 19 aa, Homo sapiens
  CDR3 for alpha chain variable domain of TCR clone 228559 (TRAV23/DV6, TRAJ9)
CSKPRLKGAGHTGGFKTNF

SEQ ID NO: 457118 - protein, 12 aa, Homo sapiens
  CDR3 for beta chain variable domain of TCR clone 228559 (TRBV7-8, TRBJ2-7)
CASSLGDREQYF

SEQ ID NO: 457119 - protein, 14 aa, Homo sapiens
  CDR3 for alpha chain variable domain of TCR clone 228560 (TRAV3, TRAJ9)
CAVRGNTGGFKTIF

SEQ ID NO: 457120 - protein, 16 aa, Homo sapiens
  CDR3 for beta chain variable domain of TCR clone 228560 (TRBV7-3, TRBJ2-2)
CASSLKRGTLSGELFF

SEQ ID NO: 457121 - protein, 12 aa, Homo sapiens
  CDR3 for alpha chain variable domain of TCR clone 228561 (TRAV17, TRAJ20)
CATDGDDYKLSC

SEQ ID NO: 457122 - protein, 20 aa, Homo sapiens
  CDR3 for beta chain variable domain of TCR clone 228561 (TRBV7-9, TRBJ2-1)
CASSSPRAPRTRSSYNEQFF

SEQ ID NO: 457123 - protein, 12 aa, Homo sapiens
  CDR3 for alpha chain variable domain of TCR clone 228562 (TRAV1-2, TRAJ29)
CAVPSGNTPLVF

SEQ ID NO: 457124 - protein, 12 aa, Homo sapiens
  CDR3 for beta chain variable domain of TCR clone 228562 (TRBV12-4, TRBJ2-7)
FASSLGGYEQYF

SEQ ID NO: 457125 - protein, 13 aa, Homo sapiens
  CDR3 for alpha chain variable domain of TCR clone 228563 (TRAV21, TRAJ20)
CAVGLRVDYKLSF

SEQ ID NO: 457126 - protein, 13 aa, Homo sapiens
  CDR3 for beta chain variable domain of TCR clone 228563 (TRBV6-1, TRBJ1-1)
CASSREGNTDAFF

SEQ ID NO: 457127 - protein, 12 aa, Homo sapiens
  CDR3 for alpha chain variable domain of TCR clone 228564 (TRAV38-1, TRAJ57)
CAFMKLPPTLVF

SEQ ID NO: 457128 - protein, 15 aa, Homo sapiens
  CDR3 for beta chain variable domain of TCR clone 228564 (TRBV13, TRBJ1-2)
CASSLGRQPGYGYTF

SEQ ID NO: 457129 - protein, 14 aa, Homo sapiens
  CDR3 for alpha chain variable domain of TCR clone 228565 (TRAV12-2, TRAJ5)
CAVNRSTGRRALTF

SEQ ID NO: 457130 - protein, 16 aa, Homo sapiens
  CDR3 for beta chain variable domain of TCR clone 228565 (TRBV12-4, TRBJ2-7)
CASSPEGQGSSYEQYF

SEQ ID NO: 457131 - protein, 13 aa, Homo sapiens
  CDR3 for alpha chain variable domain of TCR clone 228566 (TRAV13-2, TRAJ22)
CLGWISSARQLTF

SEQ ID NO: 457132 - protein, 15 aa, Homo sapiens
  CDR3 for beta chain variable domain of TCR clone 228566 (TRBV11-3, TRBJ2-7)
CASSPGPASSYEQYF

SEQ ID NO: 457133 - protein, 15 aa, Homo sapiens
  CDR3 for alpha chain variable domain of TCR clone 228567 (TRAV12-1, TRAJ9)
CVVSFGDTGGFKTIF

SEQ ID NO: 457134 - protein, 15 aa, Homo sapiens
  CDR3 for beta chain variable domain of TCR clone 228567 (TRBV4-1, TRBJ2-3)
CASSRGQGIPDTQYF

SEQ ID NO: 457135 - protein, 15 aa, Homo sapiens
  CDR3 for alpha chain variable domain of TCR clone 228568 (TRAV17, TRAJ45)
CATAYSAGGADGLTF

SEQ ID NO: 457136 - protein, 11 aa, Homo sapiens
  CDR3 for beta chain variable domain of TCR clone 228568 (TRBV7-8, TRBJ2-7)
CASGLSLEQYF

SEQ ID NO: 457137 - protein, 13 aa, Homo sapiens
  CDR3 for alpha chain variable domain of TCR clone 228569 (TRAV16, TRAJ37)
CALRGSNIGKLIF

SEQ ID NO: 457138 - protein, 10 aa, Homo sapiens
  CDR3 for beta chain variable domain of TCR clone 228569 (TRBV5-6, TRBJ2-7)
CASSGNEQYF

SEQ ID NO: 457139 - protein, 18 aa, Homo sapiens
  CDR3 for alpha chain variable domain of TCR clone 228570 (TRAV26-2, TRAJ54)
CILRDVEVGIQGAQKLVF

SEQ ID NO: 457140 - protein, 13 aa, Homo sapiens
  CDR3 for beta chain variable domain of TCR clone 228570 (TRBV7-9, TRBJ1-2)
CASSLKQNYGNTF

SEQ ID NO: 457141 - protein, 14 aa, Homo sapiens
  CDR3 for alpha chain variable domain of TCR clone 228571 (TRAV1-2, TRAJ16)
CAVNRFSDGQKLLV

SEQ ID NO: 457142 - protein, 16 aa, Homo sapiens
  CDR3 for beta chain variable domain of TCR clone 228571 (TRBV20-1, TRBJ1-4)
CSARPYGGELNEKLFF

SEQ ID NO: 457143 - protein, 13 aa, Homo sapiens
  CDR3 for alpha chain variable domain of TCR clone 228572 (TRAV22, TRAJ29)
CAVGGSVNTPLVF

SEQ ID NO: 457144 - protein, 13 aa, Homo sapiens
  CDR3 for beta chain variable domain of TCR clone 228572 (TRBV4-2, TRBJ1-1)
CASSQAGNTEAVF

SEQ ID NO: 457145 - protein, 16 aa, Homo sapiens
  CDR3 for alpha chain variable domain of TCR clone 228573 (TRAV12-2, TRAJ32)
CAVNLGQGGATNKLIF

SEQ ID NO: 457146 - protein, 13 aa, Homo sapiens
  CDR3 for beta chain variable domain of TCR clone 228573 (TRBV7-2, TRBJ2-4)
CASSREHANIQYF

SEQ ID NO: 457147 - protein, 15 aa, Homo sapiens
  CDR3 for alpha chain variable domain of TCR clone 228574 (TRAV12-2, TRAJ43)
CASDMRFGAGTRLTV

SEQ ID NO: 457148 - protein, 18 aa, Homo sapiens
  CDR3 for beta chain variable domain of TCR clone 228574 (TRBV20-1, TRBJ2-3)
CSASGLAGGPGTTDTHYF

SEQ ID NO: 457149 - protein, 16 aa, Homo sapiens
  CDR3 for alpha chain variable domain of TCR clone 228575 (TRAV3, TRAJ21)
CAVRDIVRGNFNKFYF

SEQ ID NO: 457150 - protein, 13 aa, Homo sapiens
  CDR3 for beta chain variable domain of TCR clone 228575 (TRBV27, TRBJ2-7)
CASSLTTGYEQYF

SEQ ID NO: 457151 - protein, 13 aa, Homo sapiens
  CDR3 for alpha chain variable domain of TCR clone 228576 (TRAV12-3, TRAJ33)
CAMSVNSNYQLIW

SEQ ID NO: 457152 - protein, 12 aa, Homo sapiens
  CDR3 for beta chain variable domain of TCR clone 228576 (TRBV7-2, TRBJ2-2)
CHSLAVTGELFF

SEQ ID NO: 457153 - protein, 16 aa, Homo sapiens
  CDR3 for alpha chain variable domain of TCR clone 228577 (TRAV3, TRAJ37)
CAVRPHGSGNTGKLIC

SEQ ID NO: 457154 - protein, 17 aa, Homo sapiens
  CDR3 for beta chain variable domain of TCR clone 228577 (TRBV20-1, TRBJ2-1)
CSASSSGLAGSYNEQFF

SEQ ID NO: 457155 - protein, 14 aa, Homo sapiens
  CDR3 for alpha chain variable domain of TCR clone 228578 (TRAV2, TRAJ9)
CAVEDRTGGFKTIF

SEQ ID NO: 457156 - protein, 16 aa, Homo sapiens
  CDR3 for beta chain variable domain of TCR clone 228578 (TRBV7-3, TRBJ2-1)
CASSLEGYRSYNEQFF

SEQ ID NO: 457157 - protein, 14 aa, Homo sapiens
  CDR3 for alpha chain variable domain of TCR clone 228579 (TRAV2, TRAJ21)
CAVEDLNNFNKFYF

SEQ ID NO: 457158 - protein, 13 aa, Homo sapiens
  CDR3 for beta chain variable domain of TCR clone 228579 (TRBV7-9, TRBJ1-2)
CASSLKQNYGYTF

SEQ ID NO: 457159 - protein, 15 aa, Homo sapiens
  CDR3 for alpha chain variable domain of TCR clone 228580 (TRAV3, TRAJ5)
CAVRDLDTGRRALTF

SEQ ID NO: 457160 - protein, 13 aa, Homo sapiens
  CDR3 for beta chain variable domain of TCR clone 228580 (TRBV12-4, TRBJ2-7)
CASSTREAYEQYF

SEQ ID NO: 457161 - protein, 12 aa, Homo sapiens
  CDR3 for alpha chain variable domain of TCR clone 228581 (TRAV12-2, TRAJ16)
CAVAPDGQKLLF

SEQ ID NO: 457162 - protein, 12 aa, Homo sapiens
  CDR3 for beta chain variable domain of TCR clone 228581 (TRBV5-8, TRBJ2-1)
CASRPGLLAQFF

SEQ ID NO: 457163 - protein, 15 aa, Homo sapiens
  CDR3 for alpha chain variable domain of TCR clone 228582 (TRAV13-1, TRAJ50)
CAAKGSETSYDKVIF

SEQ ID NO: 457164 - protein, 18 aa, Homo sapiens
  CDR3 for beta chain variable domain of TCR clone 228582 (TRBV10-3, TRBJ2-1)
CTSGPSVSLRGGVDEQFF

SEQ ID NO: 457165 - protein, 15 aa, Homo sapiens
  CDR3 for alpha chain variable domain of TCR clone 228583 (TRAV3, TRAJ24)
CAVRDKMTAGGTCSL

SEQ ID NO: 457166 - protein, 14 aa, Homo sapiens
  CDR3 for beta chain variable domain of TCR clone 228583 (TRBV7-2, TRBJ2-3)
RASSQTGSSYTQYF

SEQ ID NO: 457167 - protein, 14 aa, Homo sapiens
  CDR3 for alpha chain variable domain of TCR clone 228584 (TRAV1-2, TRAJ8)
CAVREDTGFQKLVF

SEQ ID NO: 457168 - protein, 13 aa, Homo sapiens
  CDR3 for beta chain variable domain of TCR clone 228584 (TRBV27, TRBJ2-7)
CASSLTTGYEQYC

SEQ ID NO: 457169 - protein, 12 aa, Homo sapiens
  CDR3 for alpha chain variable domain of TCR clone 228585 (TRAV12-3, TRAJ40)
CAVSSGTYKYIF

SEQ ID NO: 457170 - protein, 15 aa, Homo sapiens
  CDR3 for beta chain variable domain of TCR clone 228585 (TRBV7-9, TRBJ2-7)
CASSPGGGLTYEQDF

SEQ ID NO: 457171 - protein, 13 aa, Homo sapiens
  CDR3 for alpha chain variable domain of TCR clone 228586 (TRAV3, TRAJ29)
CAVRDIIDTPLVF

SEQ ID NO: 457172 - protein, 14 aa, Homo sapiens
  CDR3 for beta chain variable domain of TCR clone 228586 (TRBV27, TRBJ2-1)
CASSDTGGYNEQFF

SEQ ID NO: 457173 - protein, 14 aa, Homo sapiens
  CDR3 for alpha chain variable domain of TCR clone 228587 (TRAV2, TRAJ37)
CAVEGSSNTGKLIF

SEQ ID NO: 457174 - protein, 15 aa, Homo sapiens
  CDR3 for beta chain variable domain of TCR clone 228587 (TRBV24-1, TRBJ2-4)
CATSDPRDRANIQYV

SEQ ID NO: 457175 - protein, 15 aa, Homo sapiens
  CDR3 for alpha chain variable domain of TCR clone 228588 (TRAV8-3, TRAJ27)
CAVGPSKTNAGKSTF

SEQ ID NO: 457176 - protein, 15 aa, Homo sapiens
  CDR3 for beta chain variable domain of TCR clone 228588 (TRBV7-2, TRBJ2-1)
CACSSGLAGGNEQSF

SEQ ID NO: 457177 - protein, 12 aa, Homo sapiens
  CDR3 for alpha chain variable domain of TCR clone 228589 (TRAV4, TRAJ26)
CLVGDYGQNFVF

SEQ ID NO: 457178 - protein, 17 aa, Homo sapiens
  CDR3 for beta chain variable domain of TCR clone 228589 (TRBV7-8, TRBJ2-6)
CASSAGTGGAGANVLTF

SEQ ID NO: 457179 - protein, 11 aa, Homo sapiens
  CDR3 for alpha chain variable domain of TCR clone 228590 (TRAV2, TRAJ13)
CASGGYQKVTF

SEQ ID NO: 457180 - protein, 11 aa, Homo sapiens
  CDR3 for beta chain variable domain of TCR clone 228590 (TRBV6-3, TRBJ2-3)
CSVGQADTQYF

SEQ ID NO: 457181 - protein, 16 aa, Homo sapiens
  CDR3 for alpha chain variable domain of TCR clone 228591 (TRAV1-2, TRAJ10)
CAVRGVLTGGGTKLTF

SEQ ID NO: 457182 - protein, 16 aa, Homo sapiens
  CDR3 for beta chain variable domain of TCR clone 228591 (TRBV9, TRBJ2-1)
CASSVGGGGNYNEQFF

SEQ ID NO: 457183 - protein, 15 aa, Homo sapiens
  CDR3 for alpha chain variable domain of TCR clone 228592 (TRAV3, TRAJ22)
CAVRDRGGSARQLTF

SEQ ID NO: 457184 - protein, 14 aa, Homo sapiens
  CDR3 for beta chain variable domain of TCR clone 228592 (TRBV20-1, TRBJ2-2)
CSALYRGGTGELFF

SEQ ID NO: 457185 - protein, 14 aa, Homo sapiens
  CDR3 for alpha chain variable domain of TCR clone 228593 (TRAV1-2, TRAJ16)
CAVNRFSAGQKLLF

SEQ ID NO: 457186 - protein, 13 aa, Homo sapiens
  CDR3 for beta chain variable domain of TCR clone 228593 (TRBV12-4, TRBJ1-4)
CASAMGHNEKLFF

SEQ ID NO: 457187 - protein, 18 aa, Homo sapiens
  CDR3 for alpha chain variable domain of TCR clone 228594 (TRAV21, TRAJ52)
CAVRPSPAGGTSYGKLTF

SEQ ID NO: 457188 - protein, 13 aa, Homo sapiens
  CDR3 for beta chain variable domain of TCR clone 228594 (TRBV7-3, TRBJ1-1)
CDSSQDWGAEAFF

SEQ ID NO: 457189 - protein, 15 aa, Homo sapiens
  CDR3 for alpha chain variable domain of TCR clone 228595 (TRAV8-3, TRAJ28)
CCGCNSGAVSYQLTF

SEQ ID NO: 457190 - protein, 14 aa, Homo sapiens
  CDR3 for beta chain variable domain of TCR clone 228595 (TRBV7-2, TRBJ2-1)
CASSLGVGYNEQFF

SEQ ID NO: 457191 - protein, 12 aa, Homo sapiens
  CDR3 for alpha chain variable domain of TCR clone 228596 (TRAV3, TRAJ31)
CAVRDGNARLMF

SEQ ID NO: 457192 - protein, 11 aa, Homo sapiens
  CDR3 for beta chain variable domain of TCR clone 228596 (TRBV7-2, TRBJ2-3)
EGSGITDTQYF

SEQ ID NO: 457193 - protein, 15 aa, Homo sapiens
  CDR3 for alpha chain variable domain of TCR clone 228597 (TRAV3, TRAJ5)
CAVRDRKTGRRALTF

SEQ ID NO: 457194 - protein, 15 aa, Homo sapiens
  CDR3 for beta chain variable domain of TCR clone 228597 (TRBV7-8, TRBJ2-1)
CASSLADSLFNEQFF

SEQ ID NO: 457195 - protein, 12 aa, Homo sapiens
  CDR3 for alpha chain variable domain of TCR clone 228598 (TRAV2, TRAJ9)
CAVGSRYWRLQN

SEQ ID NO: 457196 - protein, 16 aa, Homo sapiens
  CDR3 for beta chain variable domain of TCR clone 228598 (TRBV24-1, TRBJ2-3)
CATSDPGTGATDTQYF

SEQ ID NO: 457197 - protein, 14 aa, Homo sapiens
  CDR3 for alpha chain variable domain of TCR clone 228599 (TRAV1-2, TRAJ27)
CAVTNNTNAGKSTF

SEQ ID NO: 457198 - protein, 15 aa, Homo sapiens
  CDR3 for beta chain variable domain of TCR clone 228599 (TRBV19, TRBJ1-1)
CASTSGQIQNTEAFF

SEQ ID NO: 457199 - protein, 13 aa, Homo sapiens
  CDR3 for alpha chain variable domain of TCR clone 228600 (TRAV12-3, TRAJ13)
CAMGTGGYQKVTF

SEQ ID NO: 457200 - protein, 15 aa, Homo sapiens
  CDR3 for beta chain variable domain of TCR clone 228600 (TRBV7-2, TRBJ1-5)
CASNLEGGGSRPQHF

SEQ ID NO: 457201 - protein, 11 aa, Homo sapiens
  CDR3 for alpha chain variable domain of TCR clone 228601 (TRAV2, TRAJ33)
CAVESNYQLVW

SEQ ID NO: 457202 - protein, 14 aa, Homo sapiens
  CDR3 for beta chain variable domain of TCR clone 228601 (TRBV7-8, TRBJ2-3)
CASSSRDSTDTQYF

SEQ ID NO: 457203 - protein, 18 aa, Homo sapiens
  CDR3 for alpha chain variable domain of TCR clone 228602 (TRAV26-1, TRAJ23)
CIVRVGLEVWNQGGKLIF

SEQ ID NO: 457204 - protein, 15 aa, Homo sapiens
  CDR3 for beta chain variable domain of TCR clone 228602 (TRBV28, TRBJ2-1)
CASSIIAGGRSEQFF

SEQ ID NO: 457205 - protein, 18 aa, Homo sapiens
  CDR3 for alpha chain variable domain of TCR clone 228603 (TRAV13-1, TRAJ52)
CAAKNPTAGGTSYGKLTF

SEQ ID NO: 457206 - protein, 13 aa, Homo sapiens
  CDR3 for beta chain variable domain of TCR clone 228603 (TRBV7-9, TRBJ1-2)
CASSLKQNYGYTF

SEQ ID NO: 457207 - protein, 13 aa, Homo sapiens
  CDR3 for alpha chain variable domain of TCR clone 228604 (TRAV21, TRAJ57)
CAVTQGGSEKLVF

SEQ ID NO: 457208 - protein, 18 aa, Homo sapiens
  CDR3 for beta chain variable domain of TCR clone 228604 (TRBV29-1, TRBJ2-7)
CSVEDAEDGRPTSSTSGR

SEQ ID NO: 457209 - protein, 17 aa, Homo sapiens
  CDR3 for alpha chain variable domain of TCR clone 228605 (TRAV20, TRAJ10)
CAVQGFILTGGGNKLTF

SEQ ID NO: 457210 - protein, 13 aa, Homo sapiens
  CDR3 for beta chain variable domain of TCR clone 228605 (TRBV12-5, TRBJ2-3)
CASGDRQSDTQYF

SEQ ID NO: 457211 - protein, 14 aa, Homo sapiens
  CDR3 for alpha chain variable domain of TCR clone 228606 (TRAV2, TRAJ39)
CAVEGDNAGNMLTF

SEQ ID NO: 457212 - protein, 14 aa, Homo sapiens
  CDR3 for beta chain variable domain of TCR clone 228606 (TRBV28, TRBJ2-7)
CAGSLRARGNEQYF

SEQ ID NO: 457213 - protein, 16 aa, Homo sapiens
  CDR3 for alpha chain variable domain of TCR clone 228607 (TRAV30, TRAJ24)
CGTEIVDADSWGNSSF

SEQ ID NO: 457214 - protein, 14 aa, Homo sapiens
  CDR3 for beta chain variable domain of TCR clone 228607 (TRBV12-5, TRBJ2-5)
CASGSRTHQETQYF

SEQ ID NO: 457215 - protein, 13 aa, Homo sapiens
  CDR3 for alpha chain variable domain of TCR clone 228608 (TRAV12-3, TRAJ33)
CAMSVNSNYQLIW

SEQ ID NO: 457216 - protein, 17 aa, Homo sapiens
  CDR3 for beta chain variable domain of TCR clone 228608 (TRBV7-8, TRBJ2-6)
CASSSGTGGAGANVLTF

SEQ ID NO: 457217 - protein, 14 aa, Homo sapiens
  CDR3 for alpha chain variable domain of TCR clone 228609 (TRAV12-2, TRAJ33)
CAVKRARSNYQLIW

SEQ ID NO: 457218 - protein, 12 aa, Homo sapiens
  CDR3 for beta chain variable domain of TCR clone 228609 (TRBV24-1, TRBJ2-3)
CATSDSTDTRYF

SEQ ID NO: 457219 - protein, 12 aa, Homo sapiens
  CDR3 for alpha chain variable domain of TCR clone 228610 (TRAV35, TRAJ39)
LAPNSAGNMLTF

SEQ ID NO: 457220 - protein, 16 aa, Homo sapiens
  CDR3 for beta chain variable domain of TCR clone 228610 (TRBV2, TRBJ2-3)
CASSTSVEGVTDTQYF

SEQ ID NO: 457221 - protein, 14 aa, Homo sapiens
  CDR3 for alpha chain variable domain of TCR clone 228611 (TRAV13-1, TRAJ35)
CAASQGGFGNLLHC

SEQ ID NO: 457222 - protein, 13 aa, Homo sapiens
  CDR3 for beta chain variable domain of TCR clone 228611 (TRBV7-3, TRBJ1-1)
CASSQDWGAEAFF

SEQ ID NO: 457223 - protein, 14 aa, Homo sapiens
  CDR3 for alpha chain variable domain of TCR clone 228612 (TRAV12-2, TRAJ13)
FAVKKTGGYQKVTF

SEQ ID NO: 457224 - protein, 13 aa, Homo sapiens
  CDR3 for beta chain variable domain of TCR clone 228612 (TRBV28, TRBJ2-7)
CASKAGGVYEQYF

SEQ ID NO: 457225 - protein, 16 aa, Homo sapiens
  CDR3 for alpha chain variable domain of TCR clone 228613 (TRAV38-1, TRAJ32)
CAFMKGGGGATNKPIF

SEQ ID NO: 457226 - protein, 13 aa, Homo sapiens
  CDR3 for beta chain variable domain of TCR clone 228613 (TRBV20-1, TRBJ2-5)
CSAREAFQETQYF

SEQ ID NO: 457227 - protein, 14 aa, Homo sapiens
  CDR3 for alpha chain variable domain of TCR clone 228614 (TRAV12-2, TRAJ13)
CALAGSGGYQKVTF

SEQ ID NO: 457228 - protein, 14 aa, Homo sapiens
  CDR3 for beta chain variable domain of TCR clone 228614 (TRBV6-5, TRBJ2-7)
CASSYGVGEAEQYF

SEQ ID NO: 457229 - protein, 18 aa, Homo sapiens
  CDR3 for alpha chain variable domain of TCR clone 228615 (TRAV21, TRAJ52)
CAVRPSPAGGTSYGKLTF

SEQ ID NO: 457230 - protein, 15 aa, Homo sapiens
  CDR3 for beta chain variable domain of TCR clone 228615 (TRBV7-2, TRBJ2-7)
CASSEGLARSYEQYF

SEQ ID NO: 457231 - protein, 14 aa, Homo sapiens
  CDR3 for alpha chain variable domain of TCR clone 228616 (TRAV29/DV5, TRAJ22)
CAASAPGSARQLTF

SEQ ID NO: 457232 - protein, 14 aa, Homo sapiens
  CDR3 for beta chain variable domain of TCR clone 228616 (TRBV19, TRBJ2-1)
CASSPGLAPNEQFF

SEQ ID NO: 457233 - protein, 17 aa, Homo sapiens
  CDR3 for alpha chain variable domain of TCR clone 228617 (TRAV38-2/DV8, TRAJ38)
CAYRSARGAGNNRKLIW

SEQ ID NO: 457234 - protein, 14 aa, Homo sapiens
  CDR3 for beta chain variable domain of TCR clone 228617 (TRBV13, TRBJ2-5)
CASSLERVGETQYF

SEQ ID NO: 457235 - protein, 17 aa, Homo sapiens
  CDR3 for alpha chain variable domain of TCR clone 228618 (TRAV12-2, TRAJ52)
CAVNPYAGGTSYGKLTF

SEQ ID NO: 457236 - protein, 13 aa, Homo sapiens
  CDR3 for beta chain variable domain of TCR clone 228618 (TRBV4-1, TRBJ1-1)
CASSLRGPTEAFF

SEQ ID NO: 457237 - protein, 13 aa, Homo sapiens
  CDR3 for alpha chain variable domain of TCR clone 228619 (TRAV1-2, TRAJ9)
CAALNTGGFKTIF

SEQ ID NO: 457238 - protein, 14 aa, Homo sapiens
  CDR3 for beta chain variable domain of TCR clone 228619 (TRBV7-9, TRBJ2-3)
CASSLEQGTNTQYF

SEQ ID NO: 457239 - protein, 17 aa, Homo sapiens
  CDR3 for alpha chain variable domain of TCR clone 228620 (TRAV21, TRAJ24)
CAGIRLRSTDSWGKLEF

SEQ ID NO: 457240 - protein, 15 aa, Homo sapiens
  CDR3 for beta chain variable domain of TCR clone 228620 (TRBV7-2, TRBJ2-3)
CASSPRGLSTDTQYF

SEQ ID NO: 457241 - protein, 13 aa, Homo sapiens
  CDR3 for alpha chain variable domain of TCR clone 228621 (TRAV3, TRAJ21)
CAVREPDFNKFYF

SEQ ID NO: 457242 - protein, 18 aa, Homo sapiens
  CDR3 for beta chain variable domain of TCR clone 228621 (TRBV11-2, TRBJ2-3)
YASSLGGASRGAPNTQYF

SEQ ID NO: 457243 - protein, 14 aa, Homo sapiens
  CDR3 for alpha chain variable domain of TCR clone 228622 (TRAV2, TRAJ23)
CAVGLRNQGGKLIF

SEQ ID NO: 457244 - protein, 14 aa, Homo sapiens
  CDR3 for beta chain variable domain of TCR clone 228622 (TRBV25-1, TRBJ1-1)
CASTHLGGNTEAFF

SEQ ID NO: 457245 - protein, 14 aa, Homo sapiens
  CDR3 for alpha chain variable domain of TCR clone 228623 (TRAV12-2, TRAJ13)
CAVKKTGGYQKVTF

SEQ ID NO: 457246 - protein, 14 aa, Homo sapiens
  CDR3 for beta chain variable domain of TCR clone 228623 (TRBV19, TRBJ2-1)
CASPTLVLSGEQFF

SEQ ID NO: 457247 - protein, 16 aa, Homo sapiens
  CDR3 for alpha chain variable domain of TCR clone 228624 (TRAV12-1, TRAJ48)
CVVNMRDNFGNEKLTF

SEQ ID NO: 457248 - protein, 11 aa, Homo sapiens
  CDR3 for beta chain variable domain of TCR clone 228624 (TRBV2, TRBJ2-2)
CASSPYGELFF

SEQ ID NO: 457249 - protein, 12 aa, Homo sapiens
  CDR3 for alpha chain variable domain of TCR clone 228625 (TRAV3, TRAJ9)
CAVLPAGFKTIF

SEQ ID NO: 457250 - protein, 12 aa, Homo sapiens
  CDR3 for beta chain variable domain of TCR clone 228625 (TRBV11-2, TRBJ2-2)
CASSLGGGELFF

SEQ ID NO: 457251 - protein, 14 aa, Homo sapiens
  CDR3 for alpha chain variable domain of TCR clone 228626 (TRAV2, TRAJ9)
CAVEDRSGGFKTIF

SEQ ID NO: 457252 - protein, 16 aa, Homo sapiens
  CDR3 for beta chain variable domain of TCR clone 228626 (TRBV7-3, TRBJ2-1)
CASSLEGYRSYNEQFL

SEQ ID NO: 457253 - protein, 19 aa, Homo sapiens
  CDR3 for alpha chain variable domain of TCR clone 228627 (TRAV2, TRAJ20)
ILQVREADAAVYRDCKLSF

SEQ ID NO: 457254 - protein, 15 aa, Homo sapiens
  CDR3 for beta chain variable domain of TCR clone 228627 (TRBV7-9, TRBJ1-5)
CASSQGHQPNQPQHF

SEQ ID NO: 457255 - protein, 11 aa, Homo sapiens
  CDR3 for alpha chain variable domain of TCR clone 228628 (TRAV3, TRAJ21)
CAVGNFNKFYF

SEQ ID NO: 457256 - protein, 16 aa, Homo sapiens
  CDR3 for beta chain variable domain of TCR clone 228628 (TRBV20-1, TRBJ2-1)
CSALTWTSGSYNEQFF

SEQ ID NO: 457257 - protein, 13 aa, Homo sapiens
  CDR3 for alpha chain variable domain of TCR clone 228629 (TRAV2, TRAJ16)
CAVEFGDGQKLLF

SEQ ID NO: 457258 - protein, 14 aa, Homo sapiens
  CDR3 for beta chain variable domain of TCR clone 228629 (TRBV6-3, TRBJ2-5)
CASSNSLREKTQYF

SEQ ID NO: 457259 - protein, 15 aa, Homo sapiens
  CDR3 for alpha chain variable domain of TCR clone 228630 (TRAV21, TRAJ24)
GAARSSTDSWGKLQF

SEQ ID NO: 457260 - protein, 13 aa, Homo sapiens
  CDR3 for beta chain variable domain of TCR clone 228630 (TRBV11-2, TRBJ2-5)
CASSSTGEETQYF

SEQ ID NO: 457261 - protein, 12 aa, Homo sapiens
  CDR3 for alpha chain variable domain of TCR clone 228631 (TRAV29/DV5, TRAJ43)
CAAPYNNNDMRF

SEQ ID NO: 457262 - protein, 10 aa, Homo sapiens
  CDR3 for beta chain variable domain of TCR clone 228631 (TRBV19, TRBJ2-6)
CASSTGQVFL

SEQ ID NO: 457263 - protein, 16 aa, Homo sapiens
  CDR3 for alpha chain variable domain of TCR clone 228632 (TRAV8-3, TRAJ44)
CAVGASKTGTASKLTF

SEQ ID NO: 457264 - protein, 15 aa, Homo sapiens
  CDR3 for beta chain variable domain of TCR clone 228632 (TRBV27, TRBJ1-5)
CASTFNRGSNQPQHF

SEQ ID NO: 457265 - protein, 15 aa, Homo sapiens
  CDR3 for alpha chain variable domain of TCR clone 228633 (TRAV12-3, TRAJ48)
YAMNAKNLGNEKLTF

SEQ ID NO: 457266 - protein, 14 aa, Homo sapiens
  CDR3 for beta chain variable domain of TCR clone 228633 (TRBV2, TRBJ1-6)
CASSESRNNSPLHF

SEQ ID NO: 457267 - protein, 15 aa, Homo sapiens
  CDR3 for alpha chain variable domain of TCR clone 228634 (TRAV27, TRAJ38)
CAARRNAGYNRKLIW

SEQ ID NO: 457268 - protein, 17 aa, Homo sapiens
  CDR3 for beta chain variable domain of TCR clone 228634 (TRBV20-1, TRBJ2-2)
CSASGSGQGGLTGELFF

SEQ ID NO: 457269 - protein, 18 aa, Homo sapiens
  CDR3 for alpha chain variable domain of TCR clone 228635 (TRAV21, TRAJ52)
CAVRPSPAGGTSYGKLTF

SEQ ID NO: 457270 - protein, 15 aa, Homo sapiens
  CDR3 for beta chain variable domain of TCR clone 228635 (TRBV6-6, TRBJ2-7)
CASSCSYGVSYEQYF

SEQ ID NO: 457271 - protein, 13 aa, Homo sapiens
  CDR3 for alpha chain variable domain of TCR clone 228636 (TRAV12-2, TRAJ24)
CAVSTDSGGKLQF

SEQ ID NO: 457272 - protein, 17 aa, Homo sapiens
  CDR3 for beta chain variable domain of TCR clone 228636 (TRBV20-1, TRBJ2-1)
CSASSSGLAGSYNEQFF

SEQ ID NO: 457273 - protein, 17 aa, Homo sapiens
  CDR3 for alpha chain variable domain of TCR clone 228637 (TRAV8-6, TRAJ58)
CAVSSWVGETSGSRLTF

SEQ ID NO: 457274 - protein, 17 aa, Homo sapiens
  CDR3 for beta chain variable domain of TCR clone 228637 (TRBV7-3, TRBJ2-3)
CASSLMKRMRGADTQYF

SEQ ID NO: 457275 - protein, 14 aa, Homo sapiens
  CDR3 for alpha chain variable domain of TCR clone 228638 (TRAV26-1, TRAJ48)
CTVRTNFGNEKLTF

SEQ ID NO: 457276 - protein, 12 aa, Homo sapiens
  CDR3 for beta chain variable domain of TCR clone 228638 (TRBV20-1, TRBJ2-7)
RSASSGANEQYF

SEQ ID NO: 457277 - protein, 12 aa, Homo sapiens
  CDR3 for alpha chain variable domain of TCR clone 228639 (TRAV12-3, TRAJ17)
CAMTLTGNKLTF

SEQ ID NO: 457278 - protein, 14 aa, Homo sapiens
  CDR3 for beta chain variable domain of TCR clone 228639 (TRBV7-9, TRBJ2-1)
CASSLGVADNEQFF

SEQ ID NO: 457279 - protein, 15 aa, Homo sapiens
  CDR3 for alpha chain variable domain of TCR clone 228640 (TRAV3, TRAJ3)
CAVRDMSSSASKIIF

SEQ ID NO: 457280 - protein, 17 aa, Homo sapiens
  CDR3 for beta chain variable domain of TCR clone 228640 (TRBV24-1, TRBJ2-1)
CATSDVSTSGTYNEQFV

SEQ ID NO: 457281 - protein, 12 aa, Homo sapiens
  CDR3 for alpha chain variable domain of TCR clone 228641 (TRAV2, TRAJ31)
CAVEDNNARLMF

SEQ ID NO: 457282 - protein, 16 aa, Homo sapiens
  CDR3 for beta chain variable domain of TCR clone 228641 (TRBV10-3, TRBJ2-1)
CAISEVGDGGGGEQFF

SEQ ID NO: 457283 - protein, 15 aa, Homo sapiens
  CDR3 for alpha chain variable domain of TCR clone 228642 (TRAV26-1, TRAJ3)
CIVRSGYSSASKIIF

SEQ ID NO: 457284 - protein, 17 aa, Homo sapiens
  CDR3 for beta chain variable domain of TCR clone 228642 (TRBV20-1, TRBJ2-1)
CSASSSGLAGSYNEQFF

SEQ ID NO: 457285 - protein, 11 aa, Homo sapiens
  CDR3 for alpha chain variable domain of TCR clone 228643 (TRAV23/DV6, TRAJ58)
CAARLLRGETS

SEQ ID NO: 457286 - protein, 15 aa, Homo sapiens
  CDR3 for beta chain variable domain of TCR clone 228643 (TRBV18, TRBJ2-7)
CASSPLQGRTYEQYF

SEQ ID NO: 457287 - protein, 14 aa, Homo sapiens
  CDR3 for alpha chain variable domain of TCR clone 228644 (TRAV26-1, TRAJ48)
CIVRVGFGNEKITF

SEQ ID NO: 457288 - protein, 13 aa, Homo sapiens
  CDR3 for beta chain variable domain of TCR clone 228644 (TRBV11-3, TRBJ2-3)
CASSHDTKDTQYF

SEQ ID NO: 457289 - protein, 13 aa, Homo sapiens
  CDR3 for alpha chain variable domain of TCR clone 228645 (TRAV12-3, TRAJ9)
CAMRNTGGFKTIF

SEQ ID NO: 457290 - protein, 17 aa, Homo sapiens
  CDR3 for beta chain variable domain of TCR clone 228645 (TRBV4-1, TRBJ2-1)
CASSQDPRGASYNEQFF

SEQ ID NO: 457291 - protein, 17 aa, Homo sapiens
  CDR3 for alpha chain variable domain of TCR clone 228646 (TRAV3, TRAJ6)
CAMRDGPRAGGSYIPTF

SEQ ID NO: 457292 - protein, 15 aa, Homo sapiens
  CDR3 for beta chain variable domain of TCR clone 228646 (TRBV6-1, TRBJ2-6)
CASSSRPSGANVLTF

SEQ ID NO: 457293 - protein, 14 aa, Homo sapiens
  CDR3 for alpha chain variable domain of TCR clone 228647 (TRAV12-2, TRAJ24)
CDVTPADSWGKLQF

SEQ ID NO: 457294 - protein, 12 aa, Homo sapiens
  CDR3 for beta chain variable domain of TCR clone 228647 (TRBV3-1, TRBJ2-1)
CASSQGSSGQFF

SEQ ID NO: 457295 - protein, 14 aa, Homo sapiens
  CDR3 for alpha chain variable domain of TCR clone 228648 (TRAV12-2, TRAJ13)
CAVKRTGGYQKVTF

SEQ ID NO: 457296 - protein, 15 aa, Homo sapiens
  CDR3 for beta chain variable domain of TCR clone 228648 (TRBV27, TRBJ2-1)
YASSNGGGSSNEQFF

SEQ ID NO: 457297 - protein, 14 aa, Homo sapiens
  CDR3 for alpha chain variable domain of TCR clone 228649 (TRAV12-1, TRAJ12)
CVMGPSVSSYKLIF

SEQ ID NO: 457298 - protein, 18 aa, Homo sapiens
  CDR3 for beta chain variable domain of TCR clone 228649 (TRBV11-2, TRBJ2-3)
CASSLGGASRGAPNTQYF

SEQ ID NO: 457299 - protein, 11 aa, Homo sapiens
  CDR3 for alpha chain variable domain of TCR clone 228650 (TRAV21, TRAJ48)
CAVDGNEKLTF

SEQ ID NO: 457300 - protein, 14 aa, Homo sapiens
  CDR3 for beta chain variable domain of TCR clone 228650 (TRBV12-5, TRBJ1-6)
CASRVGQINSPLHF

SEQ ID NO: 457301 - protein, 18 aa, Homo sapiens
  CDR3 for alpha chain variable domain of TCR clone 228651 (TRAV26-1, TRAJ52)
CIVDPVGAGGTSYGKLTF

SEQ ID NO: 457302 - protein, 17 aa, Homo sapiens
  CDR3 for beta chain variable domain of TCR clone 228651 (TRBV7-8, TRBJ2-6)
CASSAGTGGAGANVLTF

SEQ ID NO: 457303 - protein, 20 aa, Homo sapiens
  CDR3 for alpha chain variable domain of TCR clone 228652 (TRAV27, TRAJ10)
ASTSVPSRGILTGGGNKLTF

SEQ ID NO: 457304 - protein, 13 aa, Homo sapiens
  CDR3 for beta chain variable domain of TCR clone 228652 (TRBV28, TRBJ1-2)
CAGRDRGNYGYTF

SEQ ID NO: 457305 - protein, 12 aa, Homo sapiens
  CDR3 for alpha chain variable domain of TCR clone 228653 (TRAV21, TRAJ29)
CAVTSGNKPLVF

SEQ ID NO: 457306 - protein, 13 aa, Homo sapiens
  CDR3 for beta chain variable domain of TCR clone 228653 (TRBV4-2, TRBJ1-1)
CASSQAGNTEAFF

SEQ ID NO: 457307 - protein, 16 aa, Homo sapiens
  CDR3 for alpha chain variable domain of TCR clone 228654 (TRAV23/DV6, TRAJ9)
CAASIGGNTGGFKTNF

SEQ ID NO: 457308 - protein, 14 aa, Homo sapiens
  CDR3 for beta chain variable domain of TCR clone 228654 (TRBV7-3, TRBJ2-2)
CASSSGGYTGELFF

SEQ ID NO: 457309 - protein, 13 aa, Homo sapiens
  CDR3 for alpha chain variable domain of TCR clone 228655 (TRAV18, TRAJ27)
CAARPGNAGKSTF

SEQ ID NO: 457310 - protein, 14 aa, Homo sapiens
  CDR3 for beta chain variable domain of TCR clone 228655 (TRBV7-6, TRBJ2-3)
CASSLGTVTDTQYF

SEQ ID NO: 457311 - protein, 14 aa, Homo sapiens
  CDR3 for alpha chain variable domain of TCR clone 228656 (TRAV2, TRAJ12)
CVVDAMDSSYKLIF

SEQ ID NO: 457312 - protein, 13 aa, Homo sapiens
  CDR3 for beta chain variable domain of TCR clone 228656 (TRBV19, TRBJ2-1)
CASKVGAGGEQFF

SEQ ID NO: 457313 - protein, 14 aa, Homo sapiens
  CDR3 for alpha chain variable domain of TCR clone 228657 (TRAV2, TRAJ9)
CAVGDRSGGLRTIF

SEQ ID NO: 457314 - protein, 15 aa, Homo sapiens
  CDR3 for beta chain variable domain of TCR clone 228657 (TRBV19, TRBJ2-1)
CASSSPGVPLDEQFF

SEQ ID NO: 457315 - protein, 13 aa, Homo sapiens
  CDR3 for alpha chain variable domain of TCR clone 228658 (TRAV8-3, TRAJ28)
CAVGAVGSYQLTF

SEQ ID NO: 457316 - protein, 15 aa, Homo sapiens
  CDR3 for beta chain variable domain of TCR clone 228658 (TRBV10-2, TRBJ2-6)
CASSEQGTGANVLTF

SEQ ID NO: 457317 - protein, 17 aa, Homo sapiens
  CDR3 for alpha chain variable domain of TCR clone 228659 (TRAV8-6, TRAJ58)
CAESSWVGETSGPRLTF

SEQ ID NO: 457318 - protein, 14 aa, Homo sapiens
  CDR3 for beta chain variable domain of TCR clone 228659 (TRBV4-2, TRBJ2-1)
CTSGLDRAYNEQFF

SEQ ID NO: 457319 - protein, 12 aa, Homo sapiens
  CDR3 for alpha chain variable domain of TCR clone 228660 (TRAV21, TRAJ11)
CAATSGYSTLTF

SEQ ID NO: 457320 - protein, 15 aa, Homo sapiens
  CDR3 for beta chain variable domain of TCR clone 228660 (TRBV29-1, TRBJ2-7)
CSVEFFDRGSYEQYF

SEQ ID NO: 457321 - protein, 17 aa, Homo sapiens
  CDR3 for alpha chain variable domain of TCR clone 228661 (TRAV3, TRAJ42)
CAVRDRDYGGSQGNLIF

SEQ ID NO: 457322 - protein, 14 aa, Homo sapiens
  CDR3 for beta chain variable domain of TCR clone 228661 (TRBV19, TRBJ2-5)
CASSMTRQQETQYF

SEQ ID NO: 457323 - protein, 15 aa, Homo sapiens
  CDR3 for alpha chain variable domain of TCR clone 228662 (TRAV27, TRAJ38)
CAARRNAGNNRKMIW

SEQ ID NO: 457324 - protein, 13 aa, Homo sapiens
  CDR3 for beta chain variable domain of TCR clone 228662 (TRBV12-5, TRBJ2-3)
CASGDQQSDTQYF

SEQ ID NO: 457325 - protein, 15 aa, Homo sapiens
  CDR3 for alpha chain variable domain of TCR clone 228663 (TRAV25, TRAJ52)
CAGTSGGTSYGKLTF

SEQ ID NO: 457326 - protein, 16 aa, Homo sapiens
  CDR3 for beta chain variable domain of TCR clone 228663 (TRBV11-2, TRBJ2-7)
CASSPTTGGVSYEQYF

SEQ ID NO: 457327 - protein, 20 aa, Homo sapiens
  CDR3 for alpha chain variable domain of TCR clone 228664 (TRAV8-3, TRAJ44)
LSTSVLWVRLYTGTASKLTF

SEQ ID NO: 457328 - protein, 14 aa, Homo sapiens
  CDR3 for beta chain variable domain of TCR clone 228664 (TRBV25-1, TRBJ1-1)
CASTHLGGNTEAFF

SEQ ID NO: 457329 - protein, 14 aa, Homo sapiens
  CDR3 for alpha chain variable domain of TCR clone 228665 (TRAV2, TRAJ37)
CAVDFTSNTGKLIF

SEQ ID NO: 457330 - protein, 15 aa, Homo sapiens
  CDR3 for beta chain variable domain of TCR clone 228665 (TRBV20-1, TRBJ2-7)
CSARTPGTITYEQYF

SEQ ID NO: 457331 - protein, 14 aa, Homo sapiens
  CDR3 for alpha chain variable domain of TCR clone 228666 (TRAV12-2, TRAJ13)
CAVEKTGGYQKVTF

SEQ ID NO: 457332 - protein, 13 aa, Homo sapiens
  CDR3 for beta chain variable domain of TCR clone 228666 (TRBV10-3, TRBJ2-7)
CASKLAVNYEQYF

SEQ ID NO: 457333 - protein, 13 aa, Homo sapiens
  CDR3 for alpha chain variable domain of TCR clone 228667 (TRAV16, TRAJ28)
CALTGAGSYQVTF

SEQ ID NO: 457334 - protein, 16 aa, Homo sapiens
  CDR3 for beta chain variable domain of TCR clone 228667 (TRBV28, TRBJ1-5)
CASSLTGQGWNQPQHF

SEQ ID NO: 457335 - protein, 16 aa, Homo sapiens
  CDR3 for alpha chain variable domain of TCR clone 228668 (TRAV3, TRAJ21)
CAVRDIERGNFKKLYF

SEQ ID NO: 457336 - protein, 13 aa, Homo sapiens
  CDR3 for beta chain variable domain of TCR clone 228668 (TRBV27, TRBJ2-7)
CASSLTTGYEQYF

SEQ ID NO: 457337 - protein, 16 aa, Homo sapiens
  CDR3 for alpha chain variable domain of TCR clone 228669 (TRAV3, TRAJ37)
CAVRGKGSGNTGKLIL

SEQ ID NO: 457338 - protein, 15 aa, Homo sapiens
  CDR3 for beta chain variable domain of TCR clone 228669 (TRBV3-1, TRBJ2-7)
CASSQGVGVKVEQYF

SEQ ID NO: 457339 - protein, 14 aa, Homo sapiens
  CDR3 for alpha chain variable domain of TCR clone 228670 (TRAV1-2, TRAJ8)
CAVREDTGFQKLVF

SEQ ID NO: 457340 - protein, 13 aa, Homo sapiens
  CDR3 for beta chain variable domain of TCR clone 228670 (TRBV7-9, TRBJ1-2)
CASSSDSIYGYTF

SEQ ID NO: 457341 - protein, 19 aa, Homo sapiens
  CDR3 for alpha chain variable domain of TCR clone 228671 (TRAV4, TRAJ6)
CLVGFGTSIASGGSYIPTF

SEQ ID NO: 457342 - protein, 14 aa, Homo sapiens
  CDR3 for beta chain variable domain of TCR clone 228671 (TRBV7-2, TRBJ1-6)
CASSLQGANSPLHF

SEQ ID NO: 457343 - protein, 14 aa, Homo sapiens
  CDR3 for alpha chain variable domain of TCR clone 228672 (TRAV13-1, TRAJ35)
CAASKGGFGNVLHS

SEQ ID NO: 457344 - protein, 14 aa, Homo sapiens
  CDR3 for beta chain variable domain of TCR clone 228672 (TRBV4-1, TRBJ2-2)
CASSQAVNTGELFF

SEQ ID NO: 457345 - protein, 14 aa, Homo sapiens
  CDR3 for alpha chain variable domain of TCR clone 228673 (TRAV23/DV6, TRAJ39)
CAASIGNAGNMLTF

SEQ ID NO: 457346 - protein, 14 aa, Homo sapiens
  CDR3 for beta chain variable domain of TCR clone 228673 (TRBV6-1, TRBJ1-3)
CASVQGGGGNTIYF

SEQ ID NO: 457347 - protein, 15 aa, Homo sapiens
  CDR3 for alpha chain variable domain of TCR clone 228674 (TRAV23/DV6, TRAJ30)
SAASSQESRDDKIIF

SEQ ID NO: 457348 - protein, 17 aa, Homo sapiens
  CDR3 for beta chain variable domain of TCR clone 228674 (TRBV4-3, TRBJ2-1)
CASSQFSSGRASGEQFF

SEQ ID NO: 457349 - protein, 14 aa, Homo sapiens
  CDR3 for alpha chain variable domain of TCR clone 228675 (TRAV1-2, TRAJ17)
CALRRGAAGNKLTF

SEQ ID NO: 457350 - protein, 12 aa, Homo sapiens
  CDR3 for beta chain variable domain of TCR clone 228675 (TRBV29-1, TRBJ2-3)
CSVTGGADTQYF

SEQ ID NO: 457351 - protein, 11 aa, Homo sapiens
  CDR3 for alpha chain variable domain of TCR clone 228676 (TRAV1-2, TRAJ20)
CAVANDYKLSF

SEQ ID NO: 457352 - protein, 18 aa, Homo sapiens
  CDR3 for beta chain variable domain of TCR clone 228676 (TRBV20-1, TRBJ2-6)
GSAETTSTHGSGANVLTF

SEQ ID NO: 457353 - protein, 14 aa, Homo sapiens
  CDR3 for alpha chain variable domain of TCR clone 228677 (TRAV13-1, TRAJ44)
CAAKSTGTASKLTF

SEQ ID NO: 457354 - protein, 17 aa, Homo sapiens
  CDR3 for beta chain variable domain of TCR clone 228677 (TRBV7-3, TRBJ2-3)
RASSLMKRMRGADTQYF

SEQ ID NO: 457355 - protein, 12 aa, Homo sapiens
  CDR3 for alpha chain variable domain of TCR clone 228678 (TRAV3, TRAJ20)
CAVRDGDYKLSF

SEQ ID NO: 457356 - protein, 14 aa, Homo sapiens
  CDR3 for beta chain variable domain of TCR clone 228678 (TRBV7-2, TRBJ2-7)
CASSLYPGRYEQYF

SEQ ID NO: 457357 - protein, 11 aa, Homo sapiens
  CDR3 for alpha chain variable domain of TCR clone 228679 (TRAV27, TRAJ45)
CAGAQEEVLTD

SEQ ID NO: 457358 - protein, 16 aa, Homo sapiens
  CDR3 for beta chain variable domain of TCR clone 228679 (TRBV11-2, TRBJ2-1)
CQQLIPPGVEYNEQFF

SEQ ID NO: 457359 - protein, 15 aa, Homo sapiens
  CDR3 for alpha chain variable domain of TCR clone 228680 (TRAV26-1, TRAJ39)
CIVRVASNAGNMLTF

SEQ ID NO: 457360 - protein, 14 aa, Homo sapiens
  CDR3 for beta chain variable domain of TCR clone 228680 (TRBV7-6, TRBJ2-3)
CASSVAGSTDTQYF

SEQ ID NO: 457361 - protein, 15 aa, Homo sapiens
  CDR3 for alpha chain variable domain of TCR clone 228681 (TRAV3, TRAJ20)
CAVRDIKLSDYKLSF

SEQ ID NO: 457362 - protein, 15 aa, Homo sapiens
  CDR3 for beta chain variable domain of TCR clone 228681 (TRBV7-6, TRBJ1-1)
CASSPQGGANTEAFF

SEQ ID NO: 457363 - protein, 23 aa, Homo sapiens
  CDR3 for alpha chain variable domain of TCR clone 228682 (TRAV26-1, TRAJ38)
CIADNAGNNHIQNPDPAVYQLRD

SEQ ID NO: 457364 - protein, 17 aa, Homo sapiens
  CDR3 for beta chain variable domain of TCR clone 228682 (TRBV24-1, TRBJ2-1)
CATSDVSTSGTYNEQFF

SEQ ID NO: 457365 - protein, 12 aa, Homo sapiens
  CDR3 for alpha chain variable domain of TCR clone 228683 (TRAV12-2, TRAJ20)
CAVDWNDYKLSF

SEQ ID NO: 457366 - protein, 17 aa, Homo sapiens
  CDR3 for beta chain variable domain of TCR clone 228683 (TRBV13, TRBJ2-3)
CASSLSRVAGGRNTQYF

SEQ ID NO: 457367 - protein, 11 aa, Homo sapiens
  CDR3 for alpha chain variable domain of TCR clone 228684 (TRAV26-1, TRAJ37)
CIVRVGRKLIF

SEQ ID NO: 457368 - protein, 12 aa, Homo sapiens
  CDR3 for beta chain variable domain of TCR clone 228684 (TRBV7-9, TRBJ2-7)
CASSLARDEQYF

SEQ ID NO: 457369 - protein, 16 aa, Homo sapiens
  CDR3 for alpha chain variable domain of TCR clone 228685 (TRAV12-3, TRAJ53)
CAMIPGSGGSNYKLTF

SEQ ID NO: 457370 - protein, 14 aa, Homo sapiens
  CDR3 for beta chain variable domain of TCR clone 228685 (TRBV28, TRBJ1-2)
CASRIQGANYGYTF

SEQ ID NO: 457371 - protein, 12 aa, Homo sapiens
  CDR3 for alpha chain variable domain of TCR clone 228686 (TRAV25, TRAJ11)
CAGASGYSTLTF

SEQ ID NO: 457372 - protein, 17 aa, Homo sapiens
  CDR3 for beta chain variable domain of TCR clone 228686 (TRBV11-2, TRBJ2-1)
CASSLYPPGVEYTEQFF

SEQ ID NO: 457373 - protein, 16 aa, Homo sapiens
  CDR3 for alpha chain variable domain of TCR clone 228687 (TRAV3, TRAJ18)
CAVRDGRGSTPGRLYF

SEQ ID NO: 457374 - protein, 13 aa, Homo sapiens
  CDR3 for beta chain variable domain of TCR clone 228687 (TRBV14, TRBJ1-2)
CASSQDRRYGYTF

SEQ ID NO: 457375 - protein, 14 aa, Homo sapiens
  CDR3 for alpha chain variable domain of TCR clone 228688 (TRAV1-1, TRAJ35)
CAVRSIGFGNVLHL

SEQ ID NO: 457376 - protein, 14 aa, Homo sapiens
  CDR3 for beta chain variable domain of TCR clone 228688 (TRBV5-7, TRBJ2-7)
CASSGGLSSYEQYF

SEQ ID NO: 457377 - protein, 15 aa, Homo sapiens
  CDR3 for alpha chain variable domain of TCR clone 228689 (TRAV3, TRAJ4)
CAVRDGTGGYNKLIF

SEQ ID NO: 457378 - protein, 16 aa, Homo sapiens
  CDR3 for beta chain variable domain of TCR clone 228689 (TRBV27, TRBJ2-2)
CASSSSWVSNTGELFF

SEQ ID NO: 457379 - protein, 12 aa, Homo sapiens
  CDR3 for alpha chain variable domain of TCR clone 228690 (TRAV12-1, TRAJ40)
CVVYSGTYKYIF

SEQ ID NO: 457380 - protein, 15 aa, Homo sapiens
  CDR3 for beta chain variable domain of TCR clone 228690 (TRBV11-2, TRBJ2-1)
CASSLAGGPSNEQFF

SEQ ID NO: 457381 - protein, 15 aa, Homo sapiens
  CDR3 for alpha chain variable domain of TCR clone 228691 (TRAV20, TRAJ58)
CAVQDLETSGSRLSF

SEQ ID NO: 457382 - protein, 12 aa, Homo sapiens
  CDR3 for beta chain variable domain of TCR clone 228691 (TRBV9, TRBJ2-2)
CASSARTGELFF

SEQ ID NO: 457383 - protein, 16 aa, Homo sapiens
  CDR3 for alpha chain variable domain of TCR clone 228692 (TRAV14/DV4, TRAJ21)
CAMREGPEDNFNKFYF

SEQ ID NO: 457384 - protein, 20 aa, Homo sapiens
  CDR3 for beta chain variable domain of TCR clone 228692 (TRBV7-8, TRBJ2-2)
CASSHLFPGPTIHITGELFF

SEQ ID NO: 457385 - protein, 14 aa, Homo sapiens
  CDR3 for alpha chain variable domain of TCR clone 228693 (TRAV16, TRAJ33)
CALSAMDSNYKLIW

SEQ ID NO: 457386 - protein, 12 aa, Homo sapiens
  CDR3 for beta chain variable domain of TCR clone 228693 (TRBV5-1, TRBJ1-2)
CSSSHDTYGYTF

SEQ ID NO: 457387 - protein, 13 aa, Homo sapiens
  CDR3 for alpha chain variable domain of TCR clone 228694 (TRAV23/DV6, TRAJ12)
CAPGGDSSYKLIF

SEQ ID NO: 457388 - protein, 12 aa, Homo sapiens
  CDR3 for beta chain variable domain of TCR clone 228694 (TRBV11-2, TRBJ2-2)
CASSLGGGELFF

SEQ ID NO: 457389 - protein, 13 aa, Homo sapiens
  CDR3 for alpha chain variable domain of TCR clone 228695 (TRAV20, TRAJ31)
CAVQAIGGARLMF

SEQ ID NO: 457390 - protein, 12 aa, Homo sapiens
  CDR3 for beta chain variable domain of TCR clone 228695 (TRBV14, TRBJ2-7)
CASSLDQRGQYF

SEQ ID NO: 457391 - protein, 15 aa, Homo sapiens
  CDR3 for alpha chain variable domain of TCR clone 228696 (TRAV21, TRAJ40)
CAVRPQTSGTYKYIF

SEQ ID NO: 457392 - protein, 16 aa, Homo sapiens
  CDR3 for beta chain variable domain of TCR clone 228696 (TRBV28, TRBJ2-7)
CASSPWVATGDLSQYF

SEQ ID NO: 457393 - protein, 12 aa, Homo sapiens
  CDR3 for alpha chain variable domain of TCR clone 228697 (TRAV2, TRAJ34)
CAVERNTDKLLF

SEQ ID NO: 457394 - protein, 14 aa, Homo sapiens
  CDR3 for beta chain variable domain of TCR clone 228697 (TRBV7-9, TRBJ2-1)
CASSDNSGYNEQFF

SEQ ID NO: 457395 - protein, 16 aa, Homo sapiens
  CDR3 for alpha chain variable domain of TCR clone 228698 (TRAV30, TRAJ24)
CGTEIGDADSWGKFQF

SEQ ID NO: 457396 - protein, 13 aa, Homo sapiens
  CDR3 for beta chain variable domain of TCR clone 228698 (TRBV9, TRBJ1-1)
CASSPTGSTEAFF

SEQ ID NO: 457397 - protein, 15 aa, Homo sapiens
  CDR3 for alpha chain variable domain of TCR clone 228699 (TRAV26-1, TRAJ29)
FIVRVEGSGNIPLVF

SEQ ID NO: 457398 - protein, 14 aa, Homo sapiens
  CDR3 for beta chain variable domain of TCR clone 228699 (TRBV18, TRBJ2-5)
CASSPGVSQETQYF

SEQ ID NO: 457399 - protein, 14 aa, Homo sapiens
  CDR3 for alpha chain variable domain of TCR clone 228700 (TRAV21, TRAJ35)
CAVMPIGFGNVLHC

SEQ ID NO: 457400 - protein, 14 aa, Homo sapiens
  CDR3 for beta chain variable domain of TCR clone 228700 (TRBV6-6, TRBJ2-7)
CASSDSGAGYEQYF

SEQ ID NO: 457401 - protein, 15 aa, Homo sapiens
  CDR3 for alpha chain variable domain of TCR clone 228701 (TRAV12-2, TRAJ8)
CAVREENTGFQKLGF

SEQ ID NO: 457402 - protein, 16 aa, Homo sapiens
  CDR3 for beta chain variable domain of TCR clone 228701 (TRBV7-3, TRBJ2-2)
CASSLKRGTLSGELFF

SEQ ID NO: 457403 - protein, 13 aa, Homo sapiens
  CDR3 for alpha chain variable domain of TCR clone 228702 (TRAV1-2, TRAJ31)
CAVRGYDNARLMF

SEQ ID NO: 457404 - protein, 14 aa, Homo sapiens
  CDR3 for beta chain variable domain of TCR clone 228702 (TRBV12-4, TRBJ1-3)
CASTLTGAGNTIYF

SEQ ID NO: 457405 - protein, 13 aa, Homo sapiens
  CDR3 for alpha chain variable domain of TCR clone 228703 (TRAV3, TRAJ21)
CAVREPDFSKFYF

SEQ ID NO: 457406 - protein, 15 aa, Homo sapiens
  CDR3 for beta chain variable domain of TCR clone 228703 (TRBV2, TRBJ2-1)
CASSELAGGYNEQFF

SEQ ID NO: 457407 - protein, 13 aa, Homo sapiens
  CDR3 for alpha chain variable domain of TCR clone 228704 (TRAV12-1, TRAJ11)
CVVNRAGYSTLTF

SEQ ID NO: 457408 - protein, 12 aa, Homo sapiens
  CDR3 for beta chain variable domain of TCR clone 228704 (TRBV7-6, TRBJ2-7)
CASSLADSEQYF

SEQ ID NO: 457409 - protein, 12 aa, Homo sapiens
  CDR3 for alpha chain variable domain of TCR clone 228705 (TRAV12-3, TRAJ17)
CALTLTGNKLTF

SEQ ID NO: 457410 - protein, 14 aa, Homo sapiens
  CDR3 for beta chain variable domain of TCR clone 228705 (TRBV18, TRBJ2-7)
CASSPRGGAYEQYF

SEQ ID NO: 457411 - protein, 14 aa, Homo sapiens
  CDR3 for alpha chain variable domain of TCR clone 228706 (TRAV4, TRAJ6)
CLVGEAGGSYIPTF

SEQ ID NO: 457412 - protein, 16 aa, Homo sapiens
  CDR3 for beta chain variable domain of TCR clone 228706 (TRBV7-6, TRBJ2-1)
WASSLNEGPSYNEQFF

SEQ ID NO: 457413 - protein, 14 aa, Homo sapiens
  CDR3 for alpha chain variable domain of TCR clone 228707 (TRAV1-2, TRAJ8)
CAVREDTGFQKLVF

SEQ ID NO: 457414 - protein, 15 aa, Homo sapiens
  CDR3 for beta chain variable domain of TCR clone 228707 (TRBV5-1, TRBJ1-5)
CASSLSGNSNQPQHF

SEQ ID NO: 457415 - protein, 12 aa, Homo sapiens
  CDR3 for alpha chain variable domain of TCR clone 228708 (TRAV2, TRAJ33)
CAVPDSNYQLIW

SEQ ID NO: 457416 - protein, 13 aa, Homo sapiens
  CDR3 for beta chain variable domain of TCR clone 228708 (TRBV19, TRBJ1-2)
CASSVPGQDGYTF

SEQ ID NO: 457417 - protein, 13 aa, Homo sapiens
  CDR3 for alpha chain variable domain of TCR clone 228709 (TRAV35, TRAJ47)
CRTRTEYGNKLVF

SEQ ID NO: 457418 - protein, 11 aa, Homo sapiens
  CDR3 for beta chain variable domain of TCR clone 228709 (TRBV29-1, TRBJ1-1)
CSVEVGTRTFF

SEQ ID NO: 457419 - protein, 13 aa, Homo sapiens
  CDR3 for alpha chain variable domain of TCR clone 228710 (TRAV27, TRAJ41)
CAGEGNSGYALNF

SEQ ID NO: 457420 - protein, 15 aa, Homo sapiens
  CDR3 for beta chain variable domain of TCR clone 228710 (TRBV11-2, TRBJ2-2)
CASSSDRVNAGELFF

SEQ ID NO: 457421 - protein, 12 aa, Homo sapiens
  CDR3 for alpha chain variable domain of TCR clone 228711 (TRAV12-3, TRAJ42)
CAPGGSQGNLVF

SEQ ID NO: 457422 - protein, 14 aa, Homo sapiens
  CDR3 for beta chain variable domain of TCR clone 228711 (TRBV19, TRBJ2-1)
CASPTFVLSGEQFF

SEQ ID NO: 457423 - protein, 16 aa, Homo sapiens
  CDR3 for alpha chain variable domain of TCR clone 228712 (TRAV12-1, TRAJ41)
CVVSAANSNSGYALNF

SEQ ID NO: 457424 - protein, 12 aa, Homo sapiens
  CDR3 for beta chain variable domain of TCR clone 228712 (TRBV28, TRBJ2-3)
CASSLYRDTQYF

SEQ ID NO: 457425 - protein, 14 aa, Homo sapiens
  CDR3 for alpha chain variable domain of TCR clone 228713 (TRAV1-1, TRAJ23)
CAVSIYNQGGKLIF

SEQ ID NO: 457426 - protein, 13 aa, Homo sapiens
  CDR3 for beta chain variable domain of TCR clone 228713 (TRBV20-1, TRBJ2-7)
CSADPGATYEQYF

SEQ ID NO: 457427 - protein, 15 aa, Homo sapiens
  CDR3 for alpha chain variable domain of TCR clone 228714 (TRAV17, TRAJ6)
CATDLPSGGSYMPTF

SEQ ID NO: 457428 - protein, 16 aa, Homo sapiens
  CDR3 for beta chain variable domain of TCR clone 228714 (TRBV4-1, TRBJ2-7)
CASSQDPTGYSYEQYF

SEQ ID NO: 457429 - protein, 15 aa, Homo sapiens
  CDR3 for alpha chain variable domain of TCR clone 228715 (TRAV2, TRAJ13)
CATPSYSGGYQKVTF

SEQ ID NO: 457430 - protein, 14 aa, Homo sapiens
  CDR3 for beta chain variable domain of TCR clone 228715 (TRBV4-2, TRBJ2-1)
CASGLDRADNEQFF

SEQ ID NO: 457431 - protein, 16 aa, Homo sapiens
  CDR3 for alpha chain variable domain of TCR clone 228716 (TRAV3, TRAJ4)
CAVRPSPSCGYNKLIF

SEQ ID NO: 457432 - protein, 12 aa, Homo sapiens
  CDR3 for beta chain variable domain of TCR clone 228716 (TRBV7-9, TRBJ1-5)
CASSPQGQPQHF

SEQ ID NO: 457433 - protein, 13 aa, Homo sapiens
  CDR3 for alpha chain variable domain of TCR clone 228717 (TRAV20, TRAJ37)
CAGCSSNTGKLIF

SEQ ID NO: 457434 - protein, 11 aa, Homo sapiens
  CDR3 for beta chain variable domain of TCR clone 228717 (TRBV12-4, TRBJ2-3)
WASTGTDTQYF

SEQ ID NO: 457435 - protein, 15 aa, Homo sapiens
  CDR3 for alpha chain variable domain of TCR clone 228718 (TRAV34, TRAJ38)
CGADFTPGNNRKLIW

SEQ ID NO: 457436 - protein, 17 aa, Homo sapiens
  CDR3 for beta chain variable domain of TCR clone 228718 (TRBV7-9, TRBJ2-1)
CASSLVASYPSYNEQFF

SEQ ID NO: 457437 - protein, 18 aa, Homo sapiens
  CDR3 for alpha chain variable domain of TCR clone 228719 (TRAV21, TRAJ52)
CAVRPSPAGGTSYGKLTF

SEQ ID NO: 457438 - protein, 13 aa, Homo sapiens
  CDR3 for beta chain variable domain of TCR clone 228719 (TRBV7-3, TRBJ1-1)
CATSQDWGAEAFF

SEQ ID NO: 457439 - protein, 11 aa, Homo sapiens
  CDR3 for alpha chain variable domain of TCR clone 228720 (TRAV13-1, TRAJ20)
CAASKNYKLSF

SEQ ID NO: 457440 - protein, 16 aa, Homo sapiens
  CDR3 for beta chain variable domain of TCR clone 228720 (TRBV20-1, TRBJ1-4)
CSAPGQGLLTNEKLVF

SEQ ID NO: 457441 - protein, 13 aa, Homo sapiens
  CDR3 for alpha chain variable domain of TCR clone 228721 (TRAV35, TRAJ42)
CAGFPGSQGNLIF

SEQ ID NO: 457442 - protein, 14 aa, Homo sapiens
  CDR3 for beta chain variable domain of TCR clone 228721 (TRBV29-1, TRBJ2-2)
CSVLAETKTGELFF

SEQ ID NO: 457443 - protein, 14 aa, Homo sapiens
  CDR3 for alpha chain variable domain of TCR clone 228722 (TRAV1-2, TRAJ8)
RAVREDTGFQKLVF

SEQ ID NO: 457444 - protein, 16 aa, Homo sapiens
  CDR3 for beta chain variable domain of TCR clone 228722 (TRBV7-2, TRBJ2-5)
CASSPFPTGGEETQYF

SEQ ID NO: 457445 - protein, 13 aa, Homo sapiens
  CDR3 for alpha chain variable domain of TCR clone 228723 (TRAV6, TRAJ16)
CALDASDGQKLLF

SEQ ID NO: 457446 - protein, 16 aa, Homo sapiens
  CDR3 for beta chain variable domain of TCR clone 228723 (TRBV12-4, TRBJ1-6)
CASNLQGKGSPLHLGT

SEQ ID NO: 457447 - protein, 18 aa, Homo sapiens
  CDR3 for alpha chain variable domain of TCR clone 228724 (TRAV2, TRAJ20)
CAVEDLPPGSVNDYKLSF

SEQ ID NO: 457448 - protein, 15 aa, Homo sapiens
  CDR3 for beta chain variable domain of TCR clone 228724 (TRBV7-6, TRBJ1-5)
CASSQSSGINQPQHF

SEQ ID NO: 457449 - protein, 15 aa, Homo sapiens
  CDR3 for alpha chain variable domain of TCR clone 228725 (TRAV3, TRAJ22)
CAVRDRGGPARQLTF

SEQ ID NO: 457450 - protein, 15 aa, Homo sapiens
  CDR3 for beta chain variable domain of TCR clone 228725 (TRBV20-1, TRBJ1-1)
CSASRGVTGNTEAFF

SEQ ID NO: 457451 - protein, 16 aa, Homo sapiens
  CDR3 for alpha chain variable domain of TCR clone 228726 (TRAV12-2, TRAJ45)
CAVKRNPRGGADGLTF

SEQ ID NO: 457452 - protein, 12 aa, Homo sapiens
  CDR3 for beta chain variable domain of TCR clone 228726 (TRBV6-1, TRBJ2-5)
CASSEGRETQYF

SEQ ID NO: 457453 - protein, 13 aa, Homo sapiens
  CDR3 for alpha chain variable domain of TCR clone 228727 (TRAV1-1, TRAJ39)
CAVRDGAGNMLTF

SEQ ID NO: 457454 - protein, 14 aa, Homo sapiens
  CDR3 for beta chain variable domain of TCR clone 228727 (TRBV7-6, TRBJ2-3)
CASSLGIVTDTQYF

SEQ ID NO: 457455 - protein, 16 aa, Homo sapiens
  CDR3 for alpha chain variable domain of TCR clone 228728 (TRAV30, TRAJ24)
CGTEIVDADSCGKFQF

SEQ ID NO: 457456 - protein, 14 aa, Homo sapiens
  CDR3 for beta chain variable domain of TCR clone 228728 (TRBV12-5, TRBJ2-5)
CASGSRTDQETQYF

SEQ ID NO: 457457 - protein, 15 aa, Homo sapiens
  CDR3 for alpha chain variable domain of TCR clone 228729 (TRAV12-1, TRAJ45)
CVVLSGGGGADGLTF

SEQ ID NO: 457458 - protein, 13 aa, Homo sapiens
  CDR3 for beta chain variable domain of TCR clone 228729 (TRBV24-1, TRBJ2-2)
CATSDWSTGELFF

SEQ ID NO: 457459 - protein, 12 aa, Homo sapiens
  CDR3 for alpha chain variable domain of TCR clone 228730 (TRAV1-2, TRAJ33)
CAALDSNYQIIW

SEQ ID NO: 457460 - protein, 16 aa, Homo sapiens
  CDR3 for beta chain variable domain of TCR clone 228730 (TRBV6-4, TRBJ1-2)
CASSEAVGDPNYGYTF

SEQ ID NO: 457461 - protein, 17 aa, Homo sapiens
  CDR3 for alpha chain variable domain of TCR clone 228731 (TRAV3, TRAJ6)
CAVRDGPRAGGSYIPTF

SEQ ID NO: 457462 - protein, 13 aa, Homo sapiens
  CDR3 for beta chain variable domain of TCR clone 228731 (TRBV19, TRBJ2-7)
CASSPRQSYEQYF

SEQ ID NO: 457463 - protein, 12 aa, Homo sapiens
  CDR3 for alpha chain variable domain of TCR clone 228732 (TRAV2, TRAJ32)
CAVGGATNKLIF

SEQ ID NO: 457464 - protein, 15 aa, Homo sapiens
  CDR3 for beta chain variable domain of TCR clone 228732 (TRBV7-2, TRBJ2-1)
CASSSRASREDEQFF

SEQ ID NO: 457465 - protein, 12 aa, Homo sapiens
  CDR3 for alpha chain variable domain of TCR clone 228733 (TRAV2, TRAJ5)
CALDMGRRALTF

SEQ ID NO: 457466 - protein, 13 aa, Homo sapiens
  CDR3 for beta chain variable domain of TCR clone 228733 (TRBV15, TRBJ1-6)
CATSGGLNSPLHF

SEQ ID NO: 457467 - protein, 16 aa, Homo sapiens
  CDR3 for alpha chain variable domain of TCR clone 228734 (TRAV13-2, TRAJ32)
CAENINYGGATNKLIF

SEQ ID NO: 457468 - protein, 14 aa, Homo sapiens
  CDR3 for beta chain variable domain of TCR clone 228734 (TRBV15, TRBJ2-5)
CATSSTGYQETQYF

SEQ ID NO: 457469 - protein, 16 aa, Homo sapiens
  CDR3 for alpha chain variable domain of TCR clone 228735 (TRAV3, TRAJ37)
CAVRPHGFGNTGNLIF

SEQ ID NO: 457470 - protein, 16 aa, Homo sapiens
  CDR3 for beta chain variable domain of TCR clone 228735 (TRBV9, TRBJ1-2)
CASSVEEKVSPYGYTF

SEQ ID NO: 457471 - protein, 11 aa, Homo sapiens
  CDR3 for alpha chain variable domain of TCR clone 228736 (TRAV35, TRAJ30)
CAPGGDDKIIF

SEQ ID NO: 457472 - protein, 16 aa, Homo sapiens
  CDR3 for beta chain variable domain of TCR clone 228736 (TRBV15, TRBJ2-7)
CATSRGRAGGTYEQYF

SEQ ID NO: 457473 - protein, 15 aa, Homo sapiens
  CDR3 for alpha chain variable domain of TCR clone 228737 (TRAV8-3, TRAJ45)
CASSYLGGGADGLTF

SEQ ID NO: 457474 - protein, 13 aa, Homo sapiens
  CDR3 for beta chain variable domain of TCR clone 228737 (TRBV7-2, TRBJ2-4)
CASSREHANIQYF

SEQ ID NO: 457475 - protein, 17 aa, Homo sapiens
  CDR3 for alpha chain variable domain of TCR clone 228738 (TRAV12-2, TRAJ48)
CASNEKLTFGTGTRLTI

SEQ ID NO: 457476 - protein, 14 aa, Homo sapiens
  CDR3 for beta chain variable domain of TCR clone 228738 (TRBV7-3, TRBJ2-2)
CASSSGGYTGELFF

SEQ ID NO: 457477 - protein, 14 aa, Homo sapiens
  CDR3 for alpha chain variable domain of TCR clone 228739 (TRAV1-2, TRAJ16)
CAFNRFSDGQKLLF

SEQ ID NO: 457478 - protein, 18 aa, Homo sapiens
  CDR3 for beta chain variable domain of TCR clone 228739 (TRBV6-6, TRBJ2-5)
CASSYSWLQGALRETQYF

SEQ ID NO: 457479 - protein, 13 aa, Homo sapiens
  CDR3 for alpha chain variable domain of TCR clone 228740 (TRAV20, TRAJ37)
CAGCSSNTGKLIL

SEQ ID NO: 457480 - protein, 11 aa, Homo sapiens
  CDR3 for beta chain variable domain of TCR clone 228740 (TRBV12-4, TRBJ2-3)
CVSTATDTQYF

SEQ ID NO: 457481 - protein, 13 aa, Homo sapiens
  CDR3 for alpha chain variable domain of TCR clone 228741 (TRAV27, TRAJ6)
FAGGTRGSYIPTV

SEQ ID NO: 457482 - protein, 13 aa, Homo sapiens
  CDR3 for beta chain variable domain of TCR clone 228741 (TRBV4-1, TRBJ2-2)
CASSQENTGELFF

SEQ ID NO: 457483 - protein, 14 aa, Homo sapiens
  CDR3 for alpha chain variable domain of TCR clone 228742 (TRAV3, TRAJ27)
CAVRDDINAGKSTF

SEQ ID NO: 457484 - protein, 15 aa, Homo sapiens
  CDR3 for beta chain variable domain of TCR clone 228742 (TRBV7-7, TRBJ2-2)
CATSKLAKNTGELFF

SEQ ID NO: 457485 - protein, 12 aa, Homo sapiens
  CDR3 for alpha chain variable domain of TCR clone 228743 (TRAV13-1, TRAJ20)
CEAFLRGYKLSF

SEQ ID NO: 457486 - protein, 14 aa, Homo sapiens
  CDR3 for beta chain variable domain of TCR clone 228743 (TRBV29-1, TRBJ2-1)
CSVSREGRINEQFF

SEQ ID NO: 457487 - protein, 14 aa, Homo sapiens
  CDR3 for alpha chain variable domain of TCR clone 228744 (TRAV12-2, TRAJ17)
CAVLFKAAGNKLTF

SEQ ID NO: 457488 - protein, 14 aa, Homo sapiens
  CDR3 for beta chain variable domain of TCR clone 228744 (TRBV7-9, TRBJ1-2)
CASSRQGANYGYTF

SEQ ID NO: 457489 - protein, 14 aa, Homo sapiens
  CDR3 for alpha chain variable domain of TCR clone 228745 (TRAV8-3, TRAJ36)
CAVGPITGANNLHF

SEQ ID NO: 457490 - protein, 15 aa, Homo sapiens
  CDR3 for beta chain variable domain of TCR clone 228745 (TRBV4-1, TRBJ2-1)
CASSQDPGNYNEQFF

SEQ ID NO: 457491 - protein, 17 aa, Homo sapiens
  CDR3 for alpha chain variable domain of TCR clone 228746 (TRAV3, TRAJ6)
RAVRDGPRAGGSYIPTS

SEQ ID NO: 457492 - protein, 14 aa, Homo sapiens
  CDR3 for beta chain variable domain of TCR clone 228746 (TRBV7-2, TRBJ2-7)
CASSPKTSFYEQYF

SEQ ID NO: 457493 - protein, 14 aa, Homo sapiens
  CDR3 for alpha chain variable domain of TCR clone 228747 (TRAV13-1, TRAJ35)
CAASKGGFGNVLHC

SEQ ID NO: 457494 - protein, 16 aa, Homo sapiens
  CDR3 for beta chain variable domain of TCR clone 228747 (TRBV6-6, TRBJ2-3)
CASSYSHAGSTDTQYF

SEQ ID NO: 457495 - protein, 14 aa, Homo sapiens
  CDR3 for alpha chain variable domain of TCR clone 228748 (TRAV26-1, TRAJ44)
CIVSNTGTASKLTF

SEQ ID NO: 457496 - protein, 11 aa, Homo sapiens
  CDR3 for beta chain variable domain of TCR clone 228748 (TRBV19, TRBJ2-7)
CASSIPGEQYF

SEQ ID NO: 457497 - protein, 13 aa, Homo sapiens
  CDR3 for alpha chain variable domain of TCR clone 228749 (TRAV13-1, TRAJ6)
CAASKGGSYIPTF

SEQ ID NO: 457498 - protein, 13 aa, Homo sapiens
  CDR3 for beta chain variable domain of TCR clone 228749 (TRBV7-9, TRBJ2-5)
RASLPSGRETQYF

SEQ ID NO: 457499 - protein, 17 aa, Homo sapiens
  CDR3 for alpha chain variable domain of TCR clone 228750 (TRAV27, TRAJ26)
CAGARAPLDHYGQNFVF

SEQ ID NO: 457500 - protein, 15 aa, Homo sapiens
  CDR3 for beta chain variable domain of TCR clone 228750 (TRBV11-2, TRBJ2-5)
CASSPRSGGLETQYF

SEQ ID NO: 457501 - protein, 14 aa, Homo sapiens
  CDR3 for alpha chain variable domain of TCR clone 228751 (TRAV17, TRAJ57)
CATDASGASEKLVF

SEQ ID NO: 457502 - protein, 14 aa, Homo sapiens
  CDR3 for beta chain variable domain of TCR clone 228751 (TRBV4-2, TRBJ2-1)
CASGLDRAYNEQFF

SEQ ID NO: 457503 - protein, 15 aa, Homo sapiens
  CDR3 for alpha chain variable domain of TCR clone 228752 (TRAV13-1, TRAJ57)
CAASNTQGGSEKLVF

SEQ ID NO: 457504 - protein, 14 aa, Homo sapiens
  CDR3 for beta chain variable domain of TCR clone 228752 (TRBV7-2, TRBJ2-7)
CASRSQGAAYEQYF

SEQ ID NO: 457505 - protein, 17 aa, Homo sapiens
  CDR3 for alpha chain variable domain of TCR clone 228753 (TRAV21, TRAJ52)
CAVGVNAGGTSHGKLTF

SEQ ID NO: 457506 - protein, 13 aa, Homo sapiens
  CDR3 for beta chain variable domain of TCR clone 228753 (TRBV5-1, TRBJ1-2)
CASSFQGNYGYTF

SEQ ID NO: 457507 - protein, 13 aa, Homo sapiens
  CDR3 for alpha chain variable domain of TCR clone 228754 (TRAV12-3, TRAJ58)
CAMGETSGSRLTF

SEQ ID NO: 457508 - protein, 13 aa, Homo sapiens
  CDR3 for beta chain variable domain of TCR clone 228754 (TRBV7-3, TRBJ1-1)
CASSQDWGAEAFF

SEQ ID NO: 457509 - protein, 12 aa, Homo sapiens
  CDR3 for alpha chain variable domain of TCR clone 228755 (TRAV1-1, TRAJ8)
CAGGTGFQKLVF

SEQ ID NO: 457510 - protein, 15 aa, Homo sapiens
  CDR3 for beta chain variable domain of TCR clone 228755 (TRBV7-9, TRBJ1-4)
CASSRTGRFNEKLFF

SEQ ID NO: 457511 - protein, 13 aa, Homo sapiens
  CDR3 for alpha chain variable domain of TCR clone 228756 (TRAV12-3, TRAJ53)
CAMRGGSNYKLTF

SEQ ID NO: 457512 - protein, 15 aa, Homo sapiens
  CDR3 for beta chain variable domain of TCR clone 228756 (TRBV5-1, TRBJ1-1)
CASSSRTGRNTEAFF

SEQ ID NO: 457513 - protein, 15 aa, Homo sapiens
  CDR3 for alpha chain variable domain of TCR clone 228757 (TRAV21, TRAJ53)
CAVRQSGGSNYNLTF

SEQ ID NO: 457514 - protein, 14 aa, Homo sapiens
  CDR3 for beta chain variable domain of TCR clone 228757 (TRBV18, TRBJ2-5)
CASSPGVSQETQYF

SEQ ID NO: 457515 - protein, 14 aa, Homo sapiens
  CDR3 for alpha chain variable domain of TCR clone 228758 (TRAV8-4, TRAJ8)
CAVRVGTGFQTLVF

SEQ ID NO: 457516 - protein, 15 aa, Homo sapiens
  CDR3 for beta chain variable domain of TCR clone 228758 (TRBV2, TRBJ2-3)
CASSGEGTGTDTQYF

SEQ ID NO: 457517 - protein, 17 aa, Homo sapiens
  CDR3 for alpha chain variable domain of TCR clone 228759 (TRAV16, TRAJ58)
CITVLSNGETSGSRLTF

SEQ ID NO: 457518 - protein, 15 aa, Homo sapiens
  CDR3 for beta chain variable domain of TCR clone 228759 (TRBV25-1, TRBJ1-4)
CASSPGDSTNEKLFF

SEQ ID NO: 457519 - protein, 17 aa, Homo sapiens
  CDR3 for alpha chain variable domain of TCR clone 228760 (TRAV26-1, TRAJ53)
CIVRVDDSGGSNYKLTF

SEQ ID NO: 457520 - protein, 16 aa, Homo sapiens
  CDR3 for beta chain variable domain of TCR clone 228760 (TRBV20-1, TRBJ2-7)
CSARVPRTSTSSTSGR

SEQ ID NO: 457521 - protein, 18 aa, Homo sapiens
  CDR3 for alpha chain variable domain of TCR clone 228761 (TRAV21, TRAJ52)
CAVRPSPADGTSYGKLTF

SEQ ID NO: 457522 - protein, 13 aa, Homo sapiens
  CDR3 for beta chain variable domain of TCR clone 228761 (TRBV15, TRBJ1-6)
CATSGGLNSPLHF

SEQ ID NO: 457523 - protein, 15 aa, Homo sapiens
  CDR3 for alpha chain variable domain of TCR clone 228762 (TRAV1-2, TRAJ28)
CAVQYSGAGSYQLTF

SEQ ID NO: 457524 - protein, 12 aa, Homo sapiens
  CDR3 for beta chain variable domain of TCR clone 228762 (TRBV12-4, TRBJ1-5)
CASSLGRQPQHF

SEQ ID NO: 457525 - protein, 13 aa, Homo sapiens
  CDR3 for alpha chain variable domain of TCR clone 228763 (TRAV12-2, TRAJ17)
CRAFQSCRQQATF

SEQ ID NO: 457526 - protein, 14 aa, Homo sapiens
  CDR3 for beta chain variable domain of TCR clone 228763 (TRBV7-3, TRBJ1-1)
CASSLKGGNTEAFF

SEQ ID NO: 457527 - protein, 11 aa, Homo sapiens
  CDR3 for alpha chain variable domain of TCR clone 228764 (TRAV20, TRAJ23)
CACNQGGKLIF

SEQ ID NO: 457528 - protein, 14 aa, Homo sapiens
  CDR3 for beta chain variable domain of TCR clone 228764 (TRBV6-6, TRBJ2-7)
CASSDSGAGYEQYF

SEQ ID NO: 457529 - protein, 12 aa, Homo sapiens
  CDR3 for alpha chain variable domain of TCR clone 228765 (TRAV21, TRAJ3)
CCFYSSASKIIF

SEQ ID NO: 457530 - protein, 18 aa, Homo sapiens
  CDR3 for beta chain variable domain of TCR clone 228765 (TRBV12-4, TRBJ2-2)
CASSLVAGTRGRTGELVF

SEQ ID NO: 457531 - protein, 10 aa, Homo sapiens
  CDR3 for alpha chain variable domain of TCR clone 228766 (TRAV36/DV7, TRAJ48)
CAVGNERLTF

SEQ ID NO: 457532 - protein, 11 aa, Homo sapiens
  CDR3 for beta chain variable domain of TCR clone 228766 (TRBV6-9, TRBJ2-7)
CARRVASEQYF

SEQ ID NO: 457533 - protein, 14 aa, Homo sapiens
  CDR3 for alpha chain variable domain of TCR clone 228767 (TRAV1-2, TRAJ8)
CAVREDTGCQKLVF

SEQ ID NO: 457534 - protein, 18 aa, Homo sapiens
  CDR3 for beta chain variable domain of TCR clone 228767 (TRBV7-3, TRBJ2-1)
CASSQQGLAASSYNEQFF

SEQ ID NO: 457535 - protein, 20 aa, Homo sapiens
  CDR3 for alpha chain variable domain of TCR clone 228768 (TRAV1-2, TRAJ10)
CLLPLCCERGTHGGGNKLTF

SEQ ID NO: 457536 - protein, 12 aa, Homo sapiens
  CDR3 for beta chain variable domain of TCR clone 228768 (TRBV11-2, TRBJ2-1)
CASSPGNNEQFF

SEQ ID NO: 457537 - protein, 11 aa, Homo sapiens
  CDR3 for alpha chain variable domain of TCR clone 228769 (TRAV8-3, TRAJ31)
CAVDNNARLMF

SEQ ID NO: 457538 - protein, 15 aa, Homo sapiens
  CDR3 for beta chain variable domain of TCR clone 228769 (TRBV11-3, TRBJ2-5)
CASSDTSGGIETQYF

SEQ ID NO: 457539 - protein, 15 aa, Homo sapiens
  CDR3 for alpha chain variable domain of TCR clone 228770 (TRAV26-1, TRAJ29)
CIVRVEGSGNTPLVF

SEQ ID NO: 457540 - protein, 15 aa, Homo sapiens
  CDR3 for beta chain variable domain of TCR clone 228770 (TRBV4-1, TRBJ2-7)
CASSQNTGRLYEQYF

SEQ ID NO: 457541 - protein, 12 aa, Homo sapiens
  CDR3 for alpha chain variable domain of TCR clone 228771 (TRAV20, TRAJ20)
CAVRFNDYKLSF

SEQ ID NO: 457542 - protein, 14 aa, Homo sapiens
  CDR3 for beta chain variable domain of TCR clone 228771 (TRBV20-1, TRBJ2-1)
GSAQIGGSANEQFF

SEQ ID NO: 457543 - protein, 15 aa, Homo sapiens
  CDR3 for alpha chain variable domain of TCR clone 228772 (TRAV3, TRAJ17)
CAVSPKEAAGNKLTF

SEQ ID NO: 457544 - protein, 15 aa, Homo sapiens
  CDR3 for beta chain variable domain of TCR clone 228772 (TRBV3-1, TRBJ2-2)
CASSQDWTRAGELFF

SEQ ID NO: 457545 - protein, 13 aa, Homo sapiens
  CDR3 for alpha chain variable domain of TCR clone 228773 (TRAV26-1, TRAJ34)
CIVRPWITDKLIF

SEQ ID NO: 457546 - protein, 14 aa, Homo sapiens
  CDR3 for beta chain variable domain of TCR clone 228773 (TRBV7-2, TRBJ2-7)
RASRSQGAAYEQYF

SEQ ID NO: 457547 - protein, 13 aa, Homo sapiens
  CDR3 for alpha chain variable domain of TCR clone 228774 (TRAV21, TRAJ15)
CAVCNQAGTALIF

SEQ ID NO: 457548 - protein, 17 aa, Homo sapiens
  CDR3 for beta chain variable domain of TCR clone 228774 (TRBV11-2, TRBJ2-1)
CASSLYPPGVEYNEQFF

SEQ ID NO: 457549 - protein, 16 aa, Homo sapiens
  CDR3 for alpha chain variable domain of TCR clone 228775 (TRAV23/DV6, TRAJ9)
CAASIGGNTGGFKTIF

SEQ ID NO: 457550 - protein, 13 aa, Homo sapiens
  CDR3 for beta chain variable domain of TCR clone 228775 (TRBV7-3, TRBJ2-7)
CASSKRRGGEQYF

SEQ ID NO: 457551 - protein, 11 aa, Homo sapiens
  CDR3 for alpha chain variable domain of TCR clone 228776 (TRAV8-6, TRAJ34)
CAVWNTDKLSF

SEQ ID NO: 457552 - protein, 16 aa, Homo sapiens
  CDR3 for beta chain variable domain of TCR clone 228776 (TRBV5-1, TRBJ2-7)
CASSYASTSSGGEQYF

SEQ ID NO: 457553 - protein, 13 aa, Homo sapiens
  CDR3 for alpha chain variable domain of TCR clone 228777 (TRAV13-2, TRAJ53)
CAENMGSNYKLIF

SEQ ID NO: 457554 - protein, 12 aa, Homo sapiens
  CDR3 for beta chain variable domain of TCR clone 228777 (TRBV24-1, TRBJ1-1)
CATSDPGLEAFF

SEQ ID NO: 457555 - protein, 13 aa, Homo sapiens
  CDR3 for alpha chain variable domain of TCR clone 228778 (TRAV3, TRAJ36)
CAVRDTGANNLFF

SEQ ID NO: 457556 - protein, 15 aa, Homo sapiens
  CDR3 for beta chain variable domain of TCR clone 228778 (TRBV24-1, TRBJ2-1)
CATSGTGGFYNEQFF

SEQ ID NO: 457557 - protein, 14 aa, Homo sapiens
  CDR3 for alpha chain variable domain of TCR clone 228779 (TRAV26-1, )
CIVRVATGISRTLT

SEQ ID NO: 457558 - protein, 13 aa, Homo sapiens
  CDR3 for beta chain variable domain of TCR clone 228779 (TRBV7-9, TRBJ1-2)
CASSLKQNYGYTF

SEQ ID NO: 457559 - protein, 11 aa, Homo sapiens
  CDR3 for alpha chain variable domain of TCR clone 228780 (TRAV2, TRAJ33)
CAVESNYQLIW

SEQ ID NO: 457560 - protein, 18 aa, Homo sapiens
  CDR3 for beta chain variable domain of TCR clone 228780 (TRBV10-3, TRBJ2-2)
CTSVPSTRQGANTGELFF

SEQ ID NO: 457561 - protein, 20 aa, Homo sapiens
  CDR3 for alpha chain variable domain of TCR clone 228781 (TRAV21, TRAJ57)
SLVTQPPTSSLQGGSEKLVF

SEQ ID NO: 457562 - protein, 15 aa, Homo sapiens
  CDR3 for beta chain variable domain of TCR clone 228781 (TRBV28, TRBJ1-5)
CASSPPGQFNQPQHF

SEQ ID NO: 457563 - protein, 15 aa, Homo sapiens
  CDR3 for alpha chain variable domain of TCR clone 228782 (TRAV21, TRAJ40)
CAVRPQTSGTYKYIF

SEQ ID NO: 457564 - protein, 14 aa, Homo sapiens
  CDR3 for beta chain variable domain of TCR clone 228782 (TRBV20-1, TRBJ2-4)
CSASGRVGENIQYF

SEQ ID NO: 457565 - protein, 12 aa, Homo sapiens
  CDR3 for alpha chain variable domain of TCR clone 228783 (TRAV2, TRAJ33)
CAFIASNYQLIW

SEQ ID NO: 457566 - protein, 16 aa, Homo sapiens
  CDR3 for beta chain variable domain of TCR clone 228783 (TRBV2, TRBJ2-7)
CASSEPWTGPSYEQYF

SEQ ID NO: 457567 - protein, 14 aa, Homo sapiens
  CDR3 for alpha chain variable domain of TCR clone 228784 (TRAV13-1, TRAJ35)
CAASTGGFGNVLHC

SEQ ID NO: 457568 - protein, 12 aa, Homo sapiens
  CDR3 for beta chain variable domain of TCR clone 228784 (TRBV7-3, TRBJ1-1)
CQQPGLGAEAFF

SEQ ID NO: 457569 - protein, 11 aa, Homo sapiens
  CDR3 for alpha chain variable domain of TCR clone 228785 (TRAV12-3, TRAJ27)
CAMANAGKSTF

SEQ ID NO: 457570 - protein, 12 aa, Homo sapiens
  CDR3 for beta chain variable domain of TCR clone 228785 (TRBV12-4, TRBJ2-7)
CASSVGGYEQYF

SEQ ID NO: 457571 - protein, 14 aa, Homo sapiens
  CDR3 for alpha chain variable domain of TCR clone 228786 (TRAV13-1, TRAJ40)
CAARSTSGTYKYIF

SEQ ID NO: 457572 - protein, 13 aa, Homo sapiens
  CDR3 for beta chain variable domain of TCR clone 228786 (TRBV7-7, TRBJ2-3)
CASSLSRADTQYF

SEQ ID NO: 457573 - protein, 13 aa, Homo sapiens
  CDR3 for alpha chain variable domain of TCR clone 228787 (TRAV8-1, TRAJ32)
CAADDGATNNLIF

SEQ ID NO: 457574 - protein, 15 aa, Homo sapiens
  CDR3 for beta chain variable domain of TCR clone 228787 (TRBV7-9, TRBJ2-7)
CASSLALAEAYEQYF

SEQ ID NO: 457575 - protein, 12 aa, Homo sapiens
  CDR3 for alpha chain variable domain of TCR clone 228788 (TRAV2, TRAJ31)
CAVEDNNARLMF

SEQ ID NO: 457576 - protein, 14 aa, Homo sapiens
  CDR3 for beta chain variable domain of TCR clone 228788 (TRBV5-1, TRBJ2-7)
CASSRGESLYEQYF

SEQ ID NO: 457577 - protein, 14 aa, Homo sapiens
  CDR3 for alpha chain variable domain of TCR clone 228789 (TRAV12-2, TRAJ17)
CAVNIKAACNKLTF

SEQ ID NO: 457578 - protein, 16 aa, Homo sapiens
  CDR3 for beta chain variable domain of TCR clone 228789 (TRBV20-1, TRBJ2-6)
CSASSQGYDGANVLTF

SEQ ID NO: 457579 - protein, 16 aa, Homo sapiens
  CDR3 for alpha chain variable domain of TCR clone 228790 (TRAV3, TRAJ37)
CAVRPRGSGNTGKLIF

SEQ ID NO: 457580 - protein, 15 aa, Homo sapiens
  CDR3 for beta chain variable domain of TCR clone 228790 (TRBV7-9, TRBJ2-1)
CASSLGWGRANEQFF

SEQ ID NO: 457581 - protein, 15 aa, Homo sapiens
  CDR3 for alpha chain variable domain of TCR clone 228791 (TRAV21, TRAJ24)
CAARSSTDSWGKLQF

SEQ ID NO: 457582 - protein, 15 aa, Homo sapiens
  CDR3 for beta chain variable domain of TCR clone 228791 (TRBV19, TRBJ1-1)
CASTSGQIQNTEAFL

SEQ ID NO: 457583 - protein, 14 aa, Homo sapiens
  CDR3 for alpha chain variable domain of TCR clone 228792 (TRAV12-2, TRAJ17)
CAVLFKAAGNKLTF

SEQ ID NO: 457584 - protein, 13 aa, Homo sapiens
  CDR3 for beta chain variable domain of TCR clone 228792 (TRBV10-2, TRBJ1-1)
CASNDQMNTEAFF

SEQ ID NO: 457585 - protein, 13 aa, Homo sapiens
  CDR3 for alpha chain variable domain of TCR clone 228793 (TRAV17, TRAJ9)
CATDYTGGFKTIF

SEQ ID NO: 457586 - protein, 15 aa, Homo sapiens
  CDR3 for beta chain variable domain of TCR clone 228793 (TRBV7-3, TRBJ2-2)
CASSETGQGTGELFF

SEQ ID NO: 457587 - protein, 12 aa, Homo sapiens
  CDR3 for alpha chain variable domain of TCR clone 228794 (TRAV21, TRAJ58)
CALSASGARLTF

SEQ ID NO: 457588 - protein, 13 aa, Homo sapiens
  CDR3 for beta chain variable domain of TCR clone 228794 (TRBV5-7, TRBJ1-2)
CASSLGVFNGYTF

SEQ ID NO: 457589 - protein, 16 aa, Homo sapiens
  CDR3 for alpha chain variable domain of TCR clone 228795 (TRAV3, TRAJ10)
CAVRDMRAGGGNKLTF

SEQ ID NO: 457590 - protein, 13 aa, Homo sapiens
  CDR3 for beta chain variable domain of TCR clone 228795 (TRBV6-4, TRBJ2-3)
CANRDSGTDTQYF

SEQ ID NO: 457591 - protein, 13 aa, Homo sapiens
  CDR3 for alpha chain variable domain of TCR clone 228796 (TRAV8-3, TRAJ36)
CAVGATGANNLFF

SEQ ID NO: 457592 - protein, 13 aa, Homo sapiens
  CDR3 for beta chain variable domain of TCR clone 228796 (TRBV19, TRBJ2-3)
CATWDKITDTQYF

SEQ ID NO: 457593 - protein, 17 aa, Homo sapiens
  CDR3 for alpha chain variable domain of TCR clone 228797 (TRAV8-6, TRAJ58)
CAVSSCVGETSGSRLTF

SEQ ID NO: 457594 - protein, 14 aa, Homo sapiens
  CDR3 for beta chain variable domain of TCR clone 228797 (TRBV4-3, TRBJ2-1)
CASGLDRAYNEQFF

SEQ ID NO: 457595 - protein, 15 aa, Homo sapiens
  CDR3 for alpha chain variable domain of TCR clone 228798 (TRAV2, TRAJ15)
CTVEDREQAGTALIF

SEQ ID NO: 457596 - protein, 13 aa, Homo sapiens
  CDR3 for beta chain variable domain of TCR clone 228798 (TRBV10-2, TRBJ2-3)
CASSESGDHTQYF

SEQ ID NO: 457597 - protein, 11 aa, Homo sapiens
  CDR3 for alpha chain variable domain of TCR clone 228799 (TRAV2, TRAJ13)
CASGGYQKVTF

SEQ ID NO: 457598 - protein, 15 aa, Homo sapiens
  CDR3 for beta chain variable domain of TCR clone 228799 (TRBV2, TRBJ2-7)
CASTLLGSGATEQYF

SEQ ID NO: 457599 - protein, 12 aa, Homo sapiens
  CDR3 for alpha chain variable domain of TCR clone 228800 (TRAV21, TRAJ15)
CAVNQAGTALIF

SEQ ID NO: 457600 - protein, 13 aa, Homo sapiens
  CDR3 for beta chain variable domain of TCR clone 228800 (TRBV11-2, TRBJ2-5)
CASSSTGEETQYL

SEQ ID NO: 457601 - protein, 13 aa, Homo sapiens
  CDR3 for alpha chain variable domain of TCR clone 228801 (TRAV12-3, TRAJ4)
CNEQAGGYKKLIF

SEQ ID NO: 457602 - protein, 15 aa, Homo sapiens
  CDR3 for beta chain variable domain of TCR clone 228801 (TRBV5-1, TRBJ1-1)
CASSLSDLGGTEAFF

SEQ ID NO: 457603 - protein, 13 aa, Homo sapiens
  CDR3 for alpha chain variable domain of TCR clone 228802 (TRAV2, TRAJ23)
CAVMGNQGGKLIF

SEQ ID NO: 457604 - protein, 15 aa, Homo sapiens
  CDR3 for beta chain variable domain of TCR clone 228802 (TRBV9, TRBJ1-6)
CASSVAGTGDSPLHF

SEQ ID NO: 457605 - protein, 10 aa, Homo sapiens
  CDR3 for alpha chain variable domain of TCR clone 228803 (TRAV26-1, TRAJ22)
RSGSARQLTF

SEQ ID NO: 457606 - protein, 17 aa, Homo sapiens
  CDR3 for beta chain variable domain of TCR clone 228803 (TRBV13, TRBJ2-3)
CASSLSREAGGRNTQYF

SEQ ID NO: 457607 - protein, 18 aa, Homo sapiens
  CDR3 for alpha chain variable domain of TCR clone 228804 (TRAV13-1, TRAJ52)
CAAKNPNAGGTSYGKLTF

SEQ ID NO: 457608 - protein, 14 aa, Homo sapiens
  CDR3 for beta chain variable domain of TCR clone 228804 (TRBV7-3, TRBJ2-1)
CASSLAGGANEQFF

SEQ ID NO: 457609 - protein, 14 aa, Homo sapiens
  CDR3 for alpha chain variable domain of TCR clone 228805 (TRAV17, TRAJ40)
CATALTSGTYQYIF

SEQ ID NO: 457610 - protein, 13 aa, Homo sapiens
  CDR3 for beta chain variable domain of TCR clone 228805 (TRBV27, TRBJ2-1)
CASSSGSYNEQFF

SEQ ID NO: 457611 - protein, 17 aa, Homo sapiens
  CDR3 for alpha chain variable domain of TCR clone 228806 (TRAV12-3, TRAJ52)
CASPPFAGGTSYGKLTF

SEQ ID NO: 457612 - protein, 14 aa, Homo sapiens
  CDR3 for beta chain variable domain of TCR clone 228806 (TRBV12-5, TRBJ2-5)
CASGSRTHQETQYF

SEQ ID NO: 457613 - protein, 14 aa, Homo sapiens
  CDR3 for alpha chain variable domain of TCR clone 228807 (TRAV8-3, TRAJ4)
CAVGVAGGYNKLIF

SEQ ID NO: 457614 - protein, 15 aa, Homo sapiens
  CDR3 for beta chain variable domain of TCR clone 228807 (TRBV9, TRBJ1-6)
CASSVAGTGDSPLHF

SEQ ID NO: 457615 - protein, 16 aa, Homo sapiens
  CDR3 for alpha chain variable domain of TCR clone 228808 (TRAV3, TRAJ21)
CAVRDIERGNFNKFYF

SEQ ID NO: 457616 - protein, 15 aa, Homo sapiens
  CDR3 for beta chain variable domain of TCR clone 228808 (TRBV7-2, TRBJ2-2)
CASRRPGQNTGELFF

SEQ ID NO: 457617 - protein, 14 aa, Homo sapiens
  CDR3 for alpha chain variable domain of TCR clone 228809 (TRAV12-3, TRAJ29)
CAMILLSGNTPLAF

SEQ ID NO: 457618 - protein, 15 aa, Homo sapiens
  CDR3 for beta chain variable domain of TCR clone 228809 (TRBV19, TRBJ1-2)
CASSVGQVLNYGYTF

SEQ ID NO: 457619 - protein, 15 aa, Homo sapiens
  CDR3 for alpha chain variable domain of TCR clone 228810 (TRAV27, TRAJ28)
CAGAYSGAGSYQLTF

SEQ ID NO: 457620 - protein, 15 aa, Homo sapiens
  CDR3 for beta chain variable domain of TCR clone 228810 (TRBV6-1, TRBJ2-1)
CASSELRGQYNEQFF

SEQ ID NO: 457621 - protein, 15 aa, Homo sapiens
  CDR3 for alpha chain variable domain of TCR clone 228811 (TRAV26-1, TRAJ52)
CIVSDLGTSYGKLTF

SEQ ID NO: 457622 - protein, 14 aa, Homo sapiens
  CDR3 for beta chain variable domain of TCR clone 228811 (TRBV7-2, TRBJ2-7)
CASRSQGAAYEQYF

SEQ ID NO: 457623 - protein, 13 aa, Homo sapiens
  CDR3 for alpha chain variable domain of TCR clone 228812 (TRAV2, TRAJ40)
CAVVTSGTYKYIF

SEQ ID NO: 457624 - protein, 15 aa, Homo sapiens
  CDR3 for beta chain variable domain of TCR clone 228812 (TRBV11-3, TRBJ2-3)
CASLRDWREGDTQYF

SEQ ID NO: 457625 - protein, 18 aa, Homo sapiens
  CDR3 for alpha chain variable domain of TCR clone 228813 (TRAV12-3, TRAJ52)
CAMSVGGAGGTSYGKLTF

SEQ ID NO: 457626 - protein, 12 aa, Homo sapiens
  CDR3 for beta chain variable domain of TCR clone 228813 (TRBV14, TRBJ1-1)
CASSQLKGLAFF

SEQ ID NO: 457627 - protein, 17 aa, Homo sapiens
  CDR3 for alpha chain variable domain of TCR clone 228814 (TRAV8-6, TRAJ8)
CAVKEGIENTGLQKLAF

SEQ ID NO: 457628 - protein, 12 aa, Homo sapiens
  CDR3 for beta chain variable domain of TCR clone 228814 (TRBV19, TRBJ1-4)
CASKDWPGGLFF

SEQ ID NO: 457629 - protein, 23 aa, Homo sapiens
  CDR3 for alpha chain variable domain of TCR clone 228815 (TRAV2, TRAJ13)
CASGGYQKVTLELEQSSKSSQIS

SEQ ID NO: 457630 - protein, 16 aa, Homo sapiens
  CDR3 for beta chain variable domain of TCR clone 228815 (TRBV12-5, TRBJ2-5)
CASGPRTSGNQETQYF

SEQ ID NO: 457631 - protein, 13 aa, Homo sapiens
  CDR3 for alpha chain variable domain of TCR clone 228816 (TRAV27, TRAJ45)
CRSSGGGADGLTF

SEQ ID NO: 457632 - protein, 11 aa, Homo sapiens
  CDR3 for beta chain variable domain of TCR clone 228816 (TRBV19, TRBJ1-1)
CASSIGSEAFI

SEQ ID NO: 457633 - protein, 15 aa, Homo sapiens
  CDR3 for alpha chain variable domain of TCR clone 228817 (TRAV35, TRAJ34)
CAGTSIVRNTDKLIF

SEQ ID NO: 457634 - protein, 14 aa, Homo sapiens
  CDR3 for beta chain variable domain of TCR clone 228817 (TRBV25-1, TRBJ1-1)
CASTHLGGNTEGFF

SEQ ID NO: 457635 - protein, 13 aa, Homo sapiens
  CDR3 for alpha chain variable domain of TCR clone 228818 (TRAV23/DV6, TRAJ16)
CAASISDGQKLLF

SEQ ID NO: 457636 - protein, 13 aa, Homo sapiens
  CDR3 for beta chain variable domain of TCR clone 228818 (TRBV7-3, TRBJ1-1)
CASSQDWGAEAFF

SEQ ID NO: 457637 - protein, 16 aa, Homo sapiens
  CDR3 for alpha chain variable domain of TCR clone 228819 (TRAV1-2, TRAJ16)
CLTMFLEEKDGQKLLF

SEQ ID NO: 457638 - protein, 16 aa, Homo sapiens
  CDR3 for beta chain variable domain of TCR clone 228819 (TRBV2, TRBJ2-1)
CASRSPAGGKYNEQFF

SEQ ID NO: 457639 - protein, 17 aa, Homo sapiens
  CDR3 for alpha chain variable domain of TCR clone 228820 (TRAV3, TRAJ6)
CAVRAGPRAGGSYLPTF

SEQ ID NO: 457640 - protein, 14 aa, Homo sapiens
  CDR3 for beta chain variable domain of TCR clone 228820 (TRBV7-2, TRBJ2-7)
CASSPKTSFYEQYF

SEQ ID NO: 457641 - protein, 13 aa, Homo sapiens
  CDR3 for alpha chain variable domain of TCR clone 228821 (TRAV2, TRAJ40)
CAVVTSATYKYIF

SEQ ID NO: 457642 - protein, 15 aa, Homo sapiens
  CDR3 for beta chain variable domain of TCR clone 228821 (TRBV9, TRBJ1-6)
CASSVAGTGDSPLHF

SEQ ID NO: 457643 - protein, 11 aa, Homo sapiens
  CDR3 for alpha chain variable domain of TCR clone 228822 (TRAV2, TRAJ13)
CASGGYQKVTF

SEQ ID NO: 457644 - protein, 14 aa, Homo sapiens
  CDR3 for beta chain variable domain of TCR clone 228822 (TRBV28, TRBJ2-1)
CASSSVPPYNEQFF

SEQ ID NO: 457645 - protein, 15 aa, Homo sapiens
  CDR3 for alpha chain variable domain of TCR clone 228823 (TRAV26-1, TRAJ48)
CIVRVGDFGNEKLTF

SEQ ID NO: 457646 - protein, 16 aa, Homo sapiens
  CDR3 for beta chain variable domain of TCR clone 228823 (TRBV4-1, TRBJ2-3)
CASSQRAGGAHRYAVF

SEQ ID NO: 457647 - protein, 14 aa, Homo sapiens
  CDR3 for alpha chain variable domain of TCR clone 228824 (TRAV8-3, TRAJ11)
CCGLLNSGYSTLTF

SEQ ID NO: 457648 - protein, 16 aa, Homo sapiens
  CDR3 for beta chain variable domain of TCR clone 228824 (TRBV7-9, TRBJ1-2)
CASSLGFSAGEDGYTF

SEQ ID NO: 457649 - protein, 14 aa, Homo sapiens
  CDR3 for alpha chain variable domain of TCR clone 228825 (TRAV17, TRAJ17)
CATDDAAAGNKRTF

SEQ ID NO: 457650 - protein, 16 aa, Homo sapiens
  CDR3 for beta chain variable domain of TCR clone 228825 (TRBV19, TRBJ2-1)
CASSIETGSPYNEQFF

SEQ ID NO: 457651 - protein, 11 aa, Homo sapiens
  CDR3 for alpha chain variable domain of TCR clone 228826 (TRAV8-3, TRAJ18)
CAVGGRHRLNP

SEQ ID NO: 457652 - protein, 12 aa, Homo sapiens
  CDR3 for beta chain variable domain of TCR clone 228826 (TRBV28, TRBJ2-6)
CAIQAGANVLTF

SEQ ID NO: 457653 - protein, 12 aa, Homo sapiens
  CDR3 for alpha chain variable domain of TCR clone 228827 (TRAV3, TRAJ43)
CAVRDPNNDMRF

SEQ ID NO: 457654 - protein, 15 aa, Homo sapiens
  CDR3 for beta chain variable domain of TCR clone 228827 (TRBV28, TRBJ2-5)
CASSSGRTIQETQYF

SEQ ID NO: 457655 - protein, 11 aa, Homo sapiens
  CDR3 for alpha chain variable domain of TCR clone 228828 (TRAV35, TRAJ30)
CAPGGDDKIIF

SEQ ID NO: 457656 - protein, 13 aa, Homo sapiens
  CDR3 for beta chain variable domain of TCR clone 228828 (TRBV7-6, TRBJ2-1)
CQELGGGADEQFF

SEQ ID NO: 457657 - protein, 14 aa, Homo sapiens
  CDR3 for alpha chain variable domain of TCR clone 228829 (TRAV12-3, TRAJ10)
NHLPLTGGGNKLTF

SEQ ID NO: 457658 - protein, 15 aa, Homo sapiens
  CDR3 for beta chain variable domain of TCR clone 228829 (TRBV20-1, TRBJ1-6)
CSARAASSYNSPLHF

SEQ ID NO: 457659 - protein, 18 aa, Homo sapiens
  CDR3 for alpha chain variable domain of TCR clone 228830 (TRAV21, TRAJ52)
CAVRPSPAGGTSYGKLTF

SEQ ID NO: 457660 - protein, 15 aa, Homo sapiens
  CDR3 for beta chain variable domain of TCR clone 228830 (TRBV6-3, TRBJ2-7)
CASSSPGTVFYELYF

SEQ ID NO: 457661 - protein, 16 aa, Homo sapiens
  CDR3 for alpha chain variable domain of TCR clone 228831 (TRAV12-3, TRAJ53)
CAMSPGSGGSNYKLTF

SEQ ID NO: 457662 - protein, 13 aa, Homo sapiens
  CDR3 for beta chain variable domain of TCR clone 228831 (TRBV10-3, TRBJ2-7)
SASKLAVNYEQYF

SEQ ID NO: 457663 - protein, 12 aa, Homo sapiens
  CDR3 for alpha chain variable domain of TCR clone 228832 (TRAV23/DV6, TRAJ53)
CATSKLGSGGSN

SEQ ID NO: 457664 - protein, 14 aa, Homo sapiens
  CDR3 for beta chain variable domain of TCR clone 228832 (TRBV7-9, TRBJ2-3)
CASSLEQGTNTQYL

SEQ ID NO: 457665 - protein, 16 aa, Homo sapiens
  CDR3 for alpha chain variable domain of TCR clone 228833 (TRAV30, TRAJ24)
CGTEIVDADSWGRFQF

SEQ ID NO: 457666 - protein, 14 aa, Homo sapiens
  CDR3 for beta chain variable domain of TCR clone 228833 (TRBV12-5, TRBJ2-5)
CASGSRTHQENQYF

SEQ ID NO: 457667 - protein, 20 aa, Homo sapiens
  CDR3 for alpha chain variable domain of TCR clone 228834 (TRAV12-1, TRAJ42)
SSVIQPPTSVKGGSQGNLIF

SEQ ID NO: 457668 - protein, 18 aa, Homo sapiens
  CDR3 for beta chain variable domain of TCR clone 228834 (TRBV11-2, TRBJ2-3)
CASSLGGASRGAPNTQYR

SEQ ID NO: 457669 - protein, 21 aa, Homo sapiens
  CDR3 for alpha chain variable domain of TCR clone 228835 (TRAV13-1, TRAJ37)
CAATPKEIKRRQTNLWARDNF

SEQ ID NO: 457670 - protein, 13 aa, Homo sapiens
  CDR3 for beta chain variable domain of TCR clone 228835 (TRBV20-1, TRBJ2-7)
CSATSEDSYEQYF

SEQ ID NO: 457671 - protein, 14 aa, Homo sapiens
  CDR3 for alpha chain variable domain of TCR clone 228836 (TRAV16, TRAJ9)
CALTRNSGNTPLVF

SEQ ID NO: 457672 - protein, 16 aa, Homo sapiens
  CDR3 for beta chain variable domain of TCR clone 228836 (TRBV13, TRBJ2-2)
CASSPRTGEHTGELFF

SEQ ID NO: 457673 - protein, 13 aa, Homo sapiens
  CDR3 for alpha chain variable domain of TCR clone 228837 (TRAV8-3, TRAJ44)
CAVLPGTASKLTF

SEQ ID NO: 457674 - protein, 13 aa, Homo sapiens
  CDR3 for beta chain variable domain of TCR clone 228837 (TRBV10-3, TRBJ2-7)
CASKLAVNYEQYF

SEQ ID NO: 457675 - protein, 14 aa, Homo sapiens
  CDR3 for alpha chain variable domain of TCR clone 228838 (TRAV9-2, TRAJ39)
CALYIYNAGNMLTF

SEQ ID NO: 457676 - protein, 14 aa, Homo sapiens
  CDR3 for beta chain variable domain of TCR clone 228838 (TRBV19, TRBJ2-1)
CASSDNQGANEQFF

SEQ ID NO: 457677 - protein, 14 aa, Homo sapiens
  CDR3 for alpha chain variable domain of TCR clone 228839 (TRAV8-3, TRAJ39)
CAVGANNAGNMLTF

SEQ ID NO: 457678 - protein, 15 aa, Homo sapiens
  CDR3 for beta chain variable domain of TCR clone 228839 (TRBV27, TRBJ2-5)
CASSLYPRGGETQYF

SEQ ID NO: 457679 - protein, 12 aa, Homo sapiens
  CDR3 for alpha chain variable domain of TCR clone 228840 (TRAV21, TRAJ11)
CAATSGYSTLTF

SEQ ID NO: 457680 - protein, 14 aa, Homo sapiens
  CDR3 for beta chain variable domain of TCR clone 228840 (TRBV20-1, TRBJ2-7)
FSAPEPAGVGEQYF

SEQ ID NO: 457681 - protein, 14 aa, Homo sapiens
  CDR3 for alpha chain variable domain of TCR clone 228841 (TRAV8-3, TRAJ30)
CAVGAMNRDDKIIF

SEQ ID NO: 457682 - protein, 17 aa, Homo sapiens
  CDR3 for beta chain variable domain of TCR clone 228841 (TRBV19, TRBJ2-2)
CASSRNPGGFGTGELFF

SEQ ID NO: 457683 - protein, 12 aa, Homo sapiens
  CDR3 for alpha chain variable domain of TCR clone 228842 (TRAV22, TRAJ22)
CAPGGSARQLSF

SEQ ID NO: 457684 - protein, 13 aa, Homo sapiens
  CDR3 for beta chain variable domain of TCR clone 228842 (TRBV15, TRBJ1-6)
CATSGGLNSPLHF

SEQ ID NO: 457685 - protein, 17 aa, Homo sapiens
  CDR3 for alpha chain variable domain of TCR clone 228843 (TRAV26-2, TRAJ42)
CILRDVGYGGSQGNPIF

SEQ ID NO: 457686 - protein, 16 aa, Homo sapiens
  CDR3 for beta chain variable domain of TCR clone 228843 (TRBV12-4, TRBJ2-7)
CASSLIGGTGNYEQYF

SEQ ID NO: 457687 - protein, 13 aa, Homo sapiens
  CDR3 for alpha chain variable domain of TCR clone 228844 (TRAV8-4, TRAJ47)
CAVTALYGNKLVF

SEQ ID NO: 457688 - protein, 13 aa, Homo sapiens
  CDR3 for beta chain variable domain of TCR clone 228844 (TRBV7-2, TRBJ2-2)
CASSLAVTGELFF

SEQ ID NO: 457689 - protein, 17 aa, Homo sapiens
  CDR3 for alpha chain variable domain of TCR clone 228845 (TRAV4, TRAJ18)
CLVGERSVGSTLGRLYF

SEQ ID NO: 457690 - protein, 15 aa, Homo sapiens
  CDR3 for beta chain variable domain of TCR clone 228845 (TRBV19, TRBJ1-1)
CASTSGQIQNTEAFF

SEQ ID NO: 457691 - protein, 16 aa, Homo sapiens
  CDR3 for alpha chain variable domain of TCR clone 228846 (TRAV20, TRAJ22)
CAVRLVSSGSARQLTF

SEQ ID NO: 457692 - protein, 14 aa, Homo sapiens
  CDR3 for beta chain variable domain of TCR clone 228846 (TRBV19, TRBJ2-1)
CASPTFVLSGEQFF

SEQ ID NO: 457693 - protein, 18 aa, Homo sapiens
  CDR3 for alpha chain variable domain of TCR clone 228847 (TRAV21, TRAJ53)
CAVKGGENSGGSNYKLTF

SEQ ID NO: 457694 - protein, 17 aa, Homo sapiens
  CDR3 for beta chain variable domain of TCR clone 228847 (TRBV7-2, TRBJ2-3)
CASSLEARGTSTDTQYF

SEQ ID NO: 457695 - protein, 16 aa, Homo sapiens
  CDR3 for alpha chain variable domain of TCR clone 228848 (TRAV30, TRAJ24)
CGTEIVDADSWGTFQF

SEQ ID NO: 457696 - protein, 15 aa, Homo sapiens
  CDR3 for beta chain variable domain of TCR clone 228848 (TRBV12-4, TRBJ2-7)
CASSQRTSGNYEQYF

SEQ ID NO: 457697 - protein, 16 aa, Homo sapiens
  CDR3 for alpha chain variable domain of TCR clone 228849 (TRAV3, TRAJ10)
CAVRDMRAGGGNKLTF

SEQ ID NO: 457698 - protein, 15 aa, Homo sapiens
  CDR3 for beta chain variable domain of TCR clone 228849 (TRBV7-3, TRBJ2-7)
CASSLNAQGAYEQYF

SEQ ID NO: 457699 - protein, 13 aa, Homo sapiens
  CDR3 for alpha chain variable domain of TCR clone 228850 (TRAV8-4, TRAJ36)
CAVSVAGANNLFF

SEQ ID NO: 457700 - protein, 15 aa, Homo sapiens
  CDR3 for beta chain variable domain of TCR clone 228850 (TRBV7-2, TRBJ2-5)
CASSLEGRGVETQYV

SEQ ID NO: 457701 - protein, 15 aa, Homo sapiens
  CDR3 for alpha chain variable domain of TCR clone 228851 (TRAV12-3, TRAJ6)
CAMSATTGGSYIPTF

SEQ ID NO: 457702 - protein, 13 aa, Homo sapiens
  CDR3 for beta chain variable domain of TCR clone 228851 (TRBV4-1, TRBJ2-1)
CASSQAGGDEQFF

SEQ ID NO: 457703 - protein, 14 aa, Homo sapiens
  CDR3 for alpha chain variable domain of TCR clone 228852 (TRAV35, TRAJ42)
CAGRYGGSQGNLIF

SEQ ID NO: 457704 - protein, 13 aa, Homo sapiens
  CDR3 for beta chain variable domain of TCR clone 228852 (TRBV7-7, TRBJ2-3)
CASSLSRADTQYF

SEQ ID NO: 457705 - protein, 13 aa, Homo sapiens
  CDR3 for alpha chain variable domain of TCR clone 228853 (TRAV2, TRAJ15)
CAVASQAGTALIF

SEQ ID NO: 457706 - protein, 15 aa, Homo sapiens
  CDR3 for beta chain variable domain of TCR clone 228853 (TRBV19, TRBJ2-2)
CASSLNRGVTGELFF

SEQ ID NO: 457707 - protein, 13 aa, Homo sapiens
  CDR3 for alpha chain variable domain of TCR clone 228854 (TRAV17, TRAJ39)
CATDYGAGNMPTF

SEQ ID NO: 457708 - protein, 15 aa, Homo sapiens
  CDR3 for beta chain variable domain of TCR clone 228854 (TRBV10-1, TRBJ1-1)
CASSESQGGNTEAFF

SEQ ID NO: 457709 - protein, 12 aa, Homo sapiens
  CDR3 for alpha chain variable domain of TCR clone 228855 (TRAV13-2, TRAJ23)
CAERHRGGKLIF

SEQ ID NO: 457710 - protein, 14 aa, Homo sapiens
  CDR3 for beta chain variable domain of TCR clone 228855 (TRBV7-8, TRBJ2-3)
CASSSRDSTDTQYF

SEQ ID NO: 457711 - protein, 14 aa, Homo sapiens
  CDR3 for alpha chain variable domain of TCR clone 228856 (TRAV13-1, TRAJ26)
SAASSAHYGQNFVF

SEQ ID NO: 457712 - protein, 16 aa, Homo sapiens
  CDR3 for beta chain variable domain of TCR clone 228856 (TRBV4-3, TRBJ2-2)
CASSHLQGSGTGELFF

SEQ ID NO: 457713 - protein, 12 aa, Homo sapiens
  CDR3 for alpha chain variable domain of TCR clone 228857 (TRAV8-4, TRAJ43)
FAVSVNNNDMRF

SEQ ID NO: 457714 - protein, 13 aa, Homo sapiens
  CDR3 for beta chain variable domain of TCR clone 228857 (TRBV7-9, TRBJ1-2)
CASSLKQNYGYTF

SEQ ID NO: 457715 - protein, 16 aa, Homo sapiens
  CDR3 for alpha chain variable domain of TCR clone 228858 (TRAV1-2, TRAJ10)
CAVRGVLTGGGNKLTF

SEQ ID NO: 457716 - protein, 13 aa, Homo sapiens
  CDR3 for beta chain variable domain of TCR clone 228858 (TRBV12-4, TRBJ1-2)
CASSLRQGKGYTF

SEQ ID NO: 457717 - protein, 13 aa, Homo sapiens
  CDR3 for alpha chain variable domain of TCR clone 228859 (TRAV30, TRAJ6)
CGFIEGGSYIPTF

SEQ ID NO: 457718 - protein, 13 aa, Homo sapiens
  CDR3 for beta chain variable domain of TCR clone 228859 (TRBV5-4, TRBJ2-5)
CASSPVSQETRYF

SEQ ID NO: 457719 - protein, 12 aa, Homo sapiens
  CDR3 for alpha chain variable domain of TCR clone 228860 (TRAV20, TRAJ33)
CAVRGSNYQLIW

SEQ ID NO: 457720 - protein, 15 aa, Homo sapiens
  CDR3 for beta chain variable domain of TCR clone 228860 (TRBV11-3, TRBJ2-3)
CASLKDGREGDTQYF

SEQ ID NO: 457721 - protein, 16 aa, Homo sapiens
  CDR3 for alpha chain variable domain of TCR clone 228861 (TRAV12-3, TRAJ53)
CAMSPGSGGSNYKLTF

SEQ ID NO: 457722 - protein, 15 aa, Homo sapiens
  CDR3 for beta chain variable domain of TCR clone 228861 (TRBV19, TRBJ2-1)
CASSIQATSYNEQFF

SEQ ID NO: 457723 - protein, 15 aa, Homo sapiens
  CDR3 for alpha chain variable domain of TCR clone 228862 (TRAV19, TRAJ8)
CALSGPNTGFQKLVF

SEQ ID NO: 457724 - protein, 14 aa, Homo sapiens
  CDR3 for beta chain variable domain of TCR clone 228862 (TRBV5-7, TRBJ1-1)
CASSLAGDWTEAFF

SEQ ID NO: 457725 - protein, 12 aa, Homo sapiens
  CDR3 for alpha chain variable domain of TCR clone 228863 (TRAV4, TRAJ26)
CLVGDYGQNFVF

SEQ ID NO: 457726 - protein, 14 aa, Homo sapiens
  CDR3 for beta chain variable domain of TCR clone 228863 (TRBV6-6, TRBJ1-5)
CASVDSGFNQPQHF

SEQ ID NO: 457727 - protein, 13 aa, Homo sapiens
  CDR3 for alpha chain variable domain of TCR clone 228864 (TRAV2, TRAJ40)
CAVVTLGTYKYIF

SEQ ID NO: 457728 - protein, 12 aa, Homo sapiens
  CDR3 for beta chain variable domain of TCR clone 228864 (TRBV11-2, TRBJ2-2)
CASSLGGGELFF

SEQ ID NO: 457729 - protein, 15 aa, Homo sapiens
  CDR3 for alpha chain variable domain of TCR clone 228865 (TRAV13-1, TRAJ37)
CAASRTLATQANQSL

SEQ ID NO: 457730 - protein, 15 aa, Homo sapiens
  CDR3 for beta chain variable domain of TCR clone 228865 (TRBV2, TRBJ2-1)
CASSEEREGDNGQFF

SEQ ID NO: 457731 - protein, 14 aa, Homo sapiens
  CDR3 for alpha chain variable domain of TCR clone 228866 (TRAV27, TRAJ22)
CAGVVPGSARQLTL

SEQ ID NO: 457732 - protein, 16 aa, Homo sapiens
  CDR3 for beta chain variable domain of TCR clone 228866 (TRBV9, TRBJ2-7)
CASSVGLGGGTYEQYF

SEQ ID NO: 457733 - protein, 12 aa, Homo sapiens
  CDR3 for alpha chain variable domain of TCR clone 228867 (TRAV12-3, TRAJ17)
CAMTLTGNKLTF

SEQ ID NO: 457734 - protein, 13 aa, Homo sapiens
  CDR3 for beta chain variable domain of TCR clone 228867 (TRBV25-1, TRBJ1-2)
CASSPAGLYGYTF

SEQ ID NO: 457735 - protein, 17 aa, Homo sapiens
  CDR3 for alpha chain variable domain of TCR clone 228868 (TRAV27, TRAJ42)
CAERVSYYGGSHGNLIF

SEQ ID NO: 457736 - protein, 14 aa, Homo sapiens
  CDR3 for beta chain variable domain of TCR clone 228868 (TRBV6-6, TRBJ2-3)
CASRLQREADTQYF

SEQ ID NO: 457737 - protein, 10 aa, Homo sapiens
  CDR3 for alpha chain variable domain of TCR clone 228869 (TRAV1-2, TRAJ26)
CAVRDLITMF

SEQ ID NO: 457738 - protein, 15 aa, Homo sapiens
  CDR3 for beta chain variable domain of TCR clone 228869 (TRBV9, TRBJ1-6)
CASSVAGTGDSPLHF

SEQ ID NO: 457739 - protein, 15 aa, Homo sapiens
  CDR3 for alpha chain variable domain of TCR clone 228870 (TRAV12-1, TRAJ9)
CVVSFGDTGGFTTIF

SEQ ID NO: 457740 - protein, 13 aa, Homo sapiens
  CDR3 for beta chain variable domain of TCR clone 228870 (TRBV2, TRBJ1-4)
CASSERAGEKLFF

SEQ ID NO: 457741 - protein, 15 aa, Homo sapiens
  CDR3 for alpha chain variable domain of TCR clone 228871 (TRAV8-3, TRAJ45)
CASSYSGGGADGLTF

SEQ ID NO: 457742 - protein, 12 aa, Homo sapiens
  CDR3 for beta chain variable domain of TCR clone 228871 (TRBV7-9, TRBJ1-5)
CASSPQGQPQHF

SEQ ID NO: 457743 - protein, 14 aa, Homo sapiens
  CDR3 for alpha chain variable domain of TCR clone 228872 (TRAV13-1, TRAJ24)
CAASRTDSWGKLEF

SEQ ID NO: 457744 - protein, 14 aa, Homo sapiens
  CDR3 for beta chain variable domain of TCR clone 228872 (TRBV25-1, TRBJ1-1)
CASTHLGGNTEAFF

SEQ ID NO: 457745 - protein, 14 aa, Homo sapiens
  CDR3 for alpha chain variable domain of TCR clone 228873 (TRAV1-2, TRAJ16)
CAVNRFSDGQKLLF

SEQ ID NO: 457746 - protein, 17 aa, Homo sapiens
  CDR3 for beta chain variable domain of TCR clone 228873 (TRBV7-3, TRBJ2-3)
CASSLRKRMRGADTQYF

SEQ ID NO: 457747 - protein, 19 aa, Homo sapiens
  CDR3 for alpha chain variable domain of TCR clone 228874 (TRAV3, TRAJ6)
CAVRDGPGQEEATYLHLEE

SEQ ID NO: 457748 - protein, 14 aa, Homo sapiens
  CDR3 for beta chain variable domain of TCR clone 228874 (TRBV7-2, TRBJ2-7)
CASSPKTSFHEQYF

SEQ ID NO: 457749 - protein, 14 aa, Homo sapiens
  CDR3 for alpha chain variable domain of TCR clone 228875 (TRAV35, TRAJ22)
CAGLRPGSARQLTF

SEQ ID NO: 457750 - protein, 13 aa, Homo sapiens
  CDR3 for beta chain variable domain of TCR clone 228875 (TRBV2, TRBJ1-1)
CASRWTVNTEAFF

SEQ ID NO: 457751 - protein, 16 aa, Homo sapiens
  CDR3 for alpha chain variable domain of TCR clone 228876 (TRAV38-2/DV8, TRAJ45)
CAYRGNSGGGADGLTF

SEQ ID NO: 457752 - protein, 17 aa, Homo sapiens
  CDR3 for beta chain variable domain of TCR clone 228876 (TRBV11-3, TRBJ2-5)
CASSLPGVRGGKETQYV

SEQ ID NO: 457753 - protein, 12 aa, Homo sapiens
  CDR3 for alpha chain variable domain of TCR clone 228877 (TRAV23/DV6, TRAJ17)
CARVSCRQQANF

SEQ ID NO: 457754 - protein, 14 aa, Homo sapiens
  CDR3 for beta chain variable domain of TCR clone 228877 (TRBV7-2, TRBJ1-2)
CASSQTGSTYGYTF

SEQ ID NO: 457755 - protein, 12 aa, Homo sapiens
  CDR3 for alpha chain variable domain of TCR clone 228878 (TRAV13-1, TRAJ49)
CAAPNTGNQFYF

SEQ ID NO: 457756 - protein, 17 aa, Homo sapiens
  CDR3 for beta chain variable domain of TCR clone 228878 (TRBV25-1, TRBJ2-7)
CASSDARVVFSSYEKYF

SEQ ID NO: 457757 - protein, 14 aa, Homo sapiens
  CDR3 for alpha chain variable domain of TCR clone 228879 (TRAV3, TRAJ9)
CAVRLNTGCFKTIF

SEQ ID NO: 457758 - protein, 15 aa, Homo sapiens
  CDR3 for beta chain variable domain of TCR clone 228879 (TRBV7-9, TRBJ1-2)
CASSLDREPNYGYTF

SEQ ID NO: 457759 - protein, 16 aa, Homo sapiens
  CDR3 for alpha chain variable domain of TCR clone 228880 (TRAV12-3, TRAJ53)
CAMSPGSGGSNYKLTC

SEQ ID NO: 457760 - protein, 14 aa, Homo sapiens
  CDR3 for beta chain variable domain of TCR clone 228880 (TRBV4-2, TRBJ2-1)
CASGLDRAYNEQFF

SEQ ID NO: 457761 - protein, 11 aa, Homo sapiens
  CDR3 for alpha chain variable domain of TCR clone 228881 (TRAV21, TRAJ11)
CAVNGYSTLTF

SEQ ID NO: 457762 - protein, 14 aa, Homo sapiens
  CDR3 for beta chain variable domain of TCR clone 228881 (TRBV19, TRBJ2-1)
CASSDNQGANEQFF

SEQ ID NO: 457763 - protein, 15 aa, Homo sapiens
  CDR3 for alpha chain variable domain of TCR clone 228882 (TRAV8-3, TRAJ11)
CAVGLLNSGYSTLTF

SEQ ID NO: 457764 - protein, 15 aa, Homo sapiens
  CDR3 for beta chain variable domain of TCR clone 228882 (TRBV28, TRBJ1-3)
CASSMGWASGNTIYF

SEQ ID NO: 457765 - protein, 15 aa, Homo sapiens
  CDR3 for alpha chain variable domain of TCR clone 228883 (TRAV3, TRAJ36)
CAVRASQTGANNPFF

SEQ ID NO: 457766 - protein, 16 aa, Homo sapiens
  CDR3 for beta chain variable domain of TCR clone 228883 (TRBV19, TRBJ2-2)
CASRSPGTGATGELFF

SEQ ID NO: 457767 - protein, 16 aa, Homo sapiens
  CDR3 for alpha chain variable domain of TCR clone 228884 (TRAV34, TRAJ37)
CAVRTAGSSNTGKLIF

SEQ ID NO: 457768 - protein, 13 aa, Homo sapiens
  CDR3 for beta chain variable domain of TCR clone 228884 (TRBV7-9, TRBJ2-5)
CASLPSGRETQYF

SEQ ID NO: 457769 - protein, 13 aa, Homo sapiens
  CDR3 for alpha chain variable domain of TCR clone 228885 (TRAV17, TRAJ33)
CATDADSNHQLIW

SEQ ID NO: 457770 - protein, 17 aa, Homo sapiens
  CDR3 for beta chain variable domain of TCR clone 228885 (TRBV20-1, TRBJ2-3)
CSAVSPGLAGGQDTQYF

SEQ ID NO: 457771 - protein, 12 aa, Homo sapiens
  CDR3 for alpha chain variable domain of TCR clone 228886 (TRAV16, TRAJ10)
CSRTGGGNKLTF

SEQ ID NO: 457772 - protein, 14 aa, Homo sapiens
  CDR3 for beta chain variable domain of TCR clone 228886 (TRBV7-2, TRBJ1-5)
CASSTQGAGQPQHF

SEQ ID NO: 457773 - protein, 15 aa, Homo sapiens
  CDR3 for alpha chain variable domain of TCR clone 228887 (TRAV8-3, TRAJ15)
CAVGAPNQAGTALIF

SEQ ID NO: 457774 - protein, 13 aa, Homo sapiens
  CDR3 for beta chain variable domain of TCR clone 228887 (TRBV7-8, TRBJ2-7)
RRVRLTEMGEQYF

SEQ ID NO: 457775 - protein, 12 aa, Homo sapiens
  CDR3 for alpha chain variable domain of TCR clone 228888 (TRAV2, TRAJ15)
CAVGQAGTALIF

SEQ ID NO: 457776 - protein, 14 aa, Homo sapiens
  CDR3 for beta chain variable domain of TCR clone 228888 (TRBV20-1, TRBJ2-4)
CSAREGAGGNIQYF

SEQ ID NO: 457777 - protein, 15 aa, Homo sapiens
  CDR3 for alpha chain variable domain of TCR clone 228889 (TRAV12-3, TRAJ6)
CAMSATTGGSYIPTF

SEQ ID NO: 457778 - protein, 15 aa, Homo sapiens
  CDR3 for beta chain variable domain of TCR clone 228889 (TRBV5-1, TRBJ2-7)
CASSFRLAGVHEQYF

SEQ ID NO: 457779 - protein, 14 aa, Homo sapiens
  CDR3 for alpha chain variable domain of TCR clone 228890 (TRAV13-1, TRAJ40)
CAASITSGTYKYIF

SEQ ID NO: 457780 - protein, 15 aa, Homo sapiens
  CDR3 for beta chain variable domain of TCR clone 228890 (TRBV7-3, TRBJ2-1)
CASSPTGGGEVEQLF

SEQ ID NO: 457781 - protein, 14 aa, Homo sapiens
  CDR3 for alpha chain variable domain of TCR clone 228891 (TRAV35, TRAJ13)
CAGSTSGGYQQVTF

SEQ ID NO: 457782 - protein, 13 aa, Homo sapiens
  CDR3 for beta chain variable domain of TCR clone 228891 (TRBV29-1, TRBJ1-1)
CSVGDSRNTEAFF

SEQ ID NO: 457783 - protein, 13 aa, Homo sapiens
  CDR3 for alpha chain variable domain of TCR clone 228892 (TRAV26-1, TRAJ33)
CIVRVEGNYQLIW

SEQ ID NO: 457784 - protein, 17 aa, Homo sapiens
  CDR3 for beta chain variable domain of TCR clone 228892 (TRBV18, TRBJ2-1)
CASSKGLSGGADNEQFF

SEQ ID NO: 457785 - protein, 16 aa, Homo sapiens
  CDR3 for alpha chain variable domain of TCR clone 228893 (TRAV23/DV6, TRAJ9)
CAASIGGNTGGFKTIF

SEQ ID NO: 457786 - protein, 18 aa, Homo sapiens
  CDR3 for beta chain variable domain of TCR clone 228893 (TRBV10-3, TRBJ2-3)
CAISESRVGPMRGDTQYF

SEQ ID NO: 457787 - protein, 15 aa, Homo sapiens
  CDR3 for alpha chain variable domain of TCR clone 228894 (TRAV35, TRAJ40)
CAGQLGTSGAYTYIF

SEQ ID NO: 457788 - protein, 14 aa, Homo sapiens
  CDR3 for beta chain variable domain of TCR clone 228894 (TRBV7-3, TRBJ2-1)
CASSLVGGTNEQFF

SEQ ID NO: 457789 - protein, 13 aa, Homo sapiens
  CDR3 for alpha chain variable domain of TCR clone 228895 (TRAV27, TRAJ45)
CRSSGGGADGLTF

SEQ ID NO: 457790 - protein, 11 aa, Homo sapiens
  CDR3 for beta chain variable domain of TCR clone 228895 (TRBV7-2, TRBJ2-5)
CASSFGETQYF

SEQ ID NO: 457791 - protein, 16 aa, Homo sapiens
  CDR3 for alpha chain variable domain of TCR clone 228896 (TRAV3, TRAJ3)
RAVRDRAKSSASKIIF

SEQ ID NO: 457792 - protein, 16 aa, Homo sapiens
  CDR3 for beta chain variable domain of TCR clone 228896 (TRBV20-1, TRBJ2-4)
CSATSLAELAKNIQYF

SEQ ID NO: 457793 - protein, 16 aa, Homo sapiens
  CDR3 for alpha chain variable domain of TCR clone 228897 (TRAV2, TRAJ20)
TTVLWRFRSNDYKLSF

SEQ ID NO: 457794 - protein, 12 aa, Homo sapiens
  CDR3 for beta chain variable domain of TCR clone 228897 (TRBV7-6, TRBJ2-3)
CASSTGTDTQYF

SEQ ID NO: 457795 - protein, 12 aa, Homo sapiens
  CDR3 for alpha chain variable domain of TCR clone 228898 (TRAV20, TRAJ39)
CSLCNAGNMLTF

SEQ ID NO: 457796 - protein, 17 aa, Homo sapiens
  CDR3 for beta chain variable domain of TCR clone 228898 (TRBV4-1, TRBJ2-3)
CASSQGYVSGGTDTQYV

SEQ ID NO: 457797 - protein, 18 aa, Homo sapiens
  CDR3 for alpha chain variable domain of TCR clone 228899 (TRAV26-2, )
CILLDIQNPDPAVYQLRD

SEQ ID NO: 457798 - protein, 16 aa, Homo sapiens
  CDR3 for beta chain variable domain of TCR clone 228899 (TRBV6-5, TRBJ2-6)
CASSYPLSSGANVLTF

SEQ ID NO: 457799 - protein, 18 aa, Homo sapiens
  CDR3 for alpha chain variable domain of TCR clone 228900 (TRAV26-1, TRAJ23)
CIVRVVLEVWNQGGKLIF

SEQ ID NO: 457800 - protein, 14 aa, Homo sapiens
  CDR3 for beta chain variable domain of TCR clone 228900 (TRBV7-6, TRBJ2-3)
CASSLGTVTDTQYF

SEQ ID NO: 457801 - protein, 16 aa, Homo sapiens
  CDR3 for alpha chain variable domain of TCR clone 228901 (TRAV30, TRAJ24)
SGTEIVDADSWGKFQF

SEQ ID NO: 457802 - protein, 12 aa, Homo sapiens
  CDR3 for beta chain variable domain of TCR clone 228901 (TRBV7-2, TRBJ2-3)
CASSLIGETQYF

SEQ ID NO: 457803 - protein, 10 aa, Homo sapiens
  CDR3 for alpha chain variable domain of TCR clone 228902 (TRAV21, TRAJ31)
CAVDNARLMF

SEQ ID NO: 457804 - protein, 16 aa, Homo sapiens
  CDR3 for beta chain variable domain of TCR clone 228902 (TRBV19, TRBJ2-1)
CASSKAGPSSYNEQFF

SEQ ID NO: 457805 - protein, 11 aa, Homo sapiens
  CDR3 for alpha chain variable domain of TCR clone 228903 (TRAV6, TRAJ32)
CASRCYKQAHL

SEQ ID NO: 457806 - protein, 14 aa, Homo sapiens
  CDR3 for beta chain variable domain of TCR clone 228903 (TRBV5-5, TRBJ1-2)
CASSLDPYNYGYTF

SEQ ID NO: 457807 - protein, 14 aa, Homo sapiens
  CDR3 for alpha chain variable domain of TCR clone 228904 (TRAV1-2, TRAJ8)
CAVREDTGLQELVF

SEQ ID NO: 457808 - protein, 16 aa, Homo sapiens
  CDR3 for beta chain variable domain of TCR clone 228904 (TRBV7-3, TRBJ2-2)
CASSLKRGTLSGELFF

SEQ ID NO: 457809 - protein, 14 aa, Homo sapiens
  CDR3 for alpha chain variable domain of TCR clone 228905 (TRAV1-2, TRAJ16)
CAVNRFSDGQKLLF

SEQ ID NO: 457810 - protein, 14 aa, Homo sapiens
  CDR3 for beta chain variable domain of TCR clone 228905 (TRBV19, TRBJ2-5)
CASSSSGIQETQYF

SEQ ID NO: 457811 - protein, 13 aa, Homo sapiens
  CDR3 for alpha chain variable domain of TCR clone 228906 (TRAV27, TRAJ27)
CAGGITNAGKSTF

SEQ ID NO: 457812 - protein, 13 aa, Homo sapiens
  CDR3 for beta chain variable domain of TCR clone 228906 (TRBV20-1, TRBJ1-2)
CSASLGVGYGYTV

SEQ ID NO: 457813 - protein, 14 aa, Homo sapiens
  CDR3 for alpha chain variable domain of TCR clone 228907 (TRAV8-4, TRAJ13)
CAVTISGGYQKVTF

SEQ ID NO: 457814 - protein, 12 aa, Homo sapiens
  CDR3 for beta chain variable domain of TCR clone 228907 (TRBV19, TRBJ1-5)
CASSIAQQPQHF

SEQ ID NO: 457815 - protein, 15 aa, Homo sapiens
  CDR3 for alpha chain variable domain of TCR clone 228908 (TRAV8-3, TRAJ27)
CAVGPSKTNAGKSTF

SEQ ID NO: 457816 - protein, 14 aa, Homo sapiens
  CDR3 for beta chain variable domain of TCR clone 228908 (TRBV12-5, TRBJ2-5)
CASGSRTHQETQYF

SEQ ID NO: 457817 - protein, 13 aa, Homo sapiens
  CDR3 for alpha chain variable domain of TCR clone 228909 (TRAV17, TRAJ9)
CATDYTGGFKTIF

SEQ ID NO: 457818 - protein, 13 aa, Homo sapiens
  CDR3 for beta chain variable domain of TCR clone 228909 (TRBV7-9, TRBJ1-2)
CASSLKQNNGYTF

SEQ ID NO: 457819 - protein, 16 aa, Homo sapiens
  CDR3 for alpha chain variable domain of TCR clone 228910 (TRAV3, TRAJ37)
CAVRPHGTGNTGKLIF

SEQ ID NO: 457820 - protein, 11 aa, Homo sapiens
  CDR3 for beta chain variable domain of TCR clone 228910 (TRBV10-3, TRBJ2-7)
CVISEGLEQYF

SEQ ID NO: 457821 - protein, 17 aa, Homo sapiens
  CDR3 for alpha chain variable domain of TCR clone 228911 (TRAV2, TRAJ36)
CAVEDRGNWGKQPLLWD

SEQ ID NO: 457822 - protein, 14 aa, Homo sapiens
  CDR3 for beta chain variable domain of TCR clone 228911 (TRBV7-9, TRBJ2-5)
CASSVDTAKETQYF

SEQ ID NO: 457823 - protein, 12 aa, Homo sapiens
  CDR3 for alpha chain variable domain of TCR clone 228912 (TRAV3, TRAJ43)
CAVRDNNNDMRF

SEQ ID NO: 457824 - protein, 15 aa, Homo sapiens
  CDR3 for beta chain variable domain of TCR clone 228912 (TRBV7-9, TRBJ1-6)
CASSSPGRGNSPLHF

SEQ ID NO: 457825 - protein, 17 aa, Homo sapiens
  CDR3 for alpha chain variable domain of TCR clone 228913 (TRAV17, TRAJ28)
CATDPRRGRAGRYQLTF

SEQ ID NO: 457826 - protein, 16 aa, Homo sapiens
  CDR3 for beta chain variable domain of TCR clone 228913 (TRBV25-1, TRBJ1-1)
CASSGDRDRGRIEAVF

SEQ ID NO: 457827 - protein, 16 aa, Homo sapiens
  CDR3 for alpha chain variable domain of TCR clone 228914 (TRAV8-6, TRAJ4)
CAVSPTFSGGYNKLIF

SEQ ID NO: 457828 - protein, 16 aa, Homo sapiens
  CDR3 for beta chain variable domain of TCR clone 228914 (TRBV12-5, TRBJ2-5)
CASGPRTSGNQETQYF

SEQ ID NO: 457829 - protein, 14 aa, Homo sapiens
  CDR3 for alpha chain variable domain of TCR clone 228915 (TRAV13-1, TRAJ40)
CAASMTSGTYKYVF

SEQ ID NO: 457830 - protein, 23 aa, Homo sapiens
  CDR3 for beta chain variable domain of TCR clone 228915 (TRBV7-3, TRBJ2-1)
GGTQPCISVPAARRGGGEVEQFF

SEQ ID NO: 457831 - protein, 16 aa, Homo sapiens
  CDR3 for alpha chain variable domain of TCR clone 228916 (TRAV3, TRAJ18)
CAVRDGIGSTLGRLYF

SEQ ID NO: 457832 - protein, 17 aa, Homo sapiens
  CDR3 for beta chain variable domain of TCR clone 228916 (TRBV5-1, TRBJ2-3)
CASSKIGLADRTDTQYF

SEQ ID NO: 457833 - protein, 13 aa, Homo sapiens
  CDR3 for alpha chain variable domain of TCR clone 228917 (TRAV16, TRAJ58)
FALSIPSGSRLTF

SEQ ID NO: 457834 - protein, 16 aa, Homo sapiens
  CDR3 for beta chain variable domain of TCR clone 228917 (TRBV29-1, TRBJ2-6)
CSVEDITYSGANVLTF

SEQ ID NO: 457835 - protein, 14 aa, Homo sapiens
  CDR3 for alpha chain variable domain of TCR clone 228918 (TRAV38-1, TRAJ40)
CALRPTSGTYKYIF

SEQ ID NO: 457836 - protein, 13 aa, Homo sapiens
  CDR3 for beta chain variable domain of TCR clone 228918 (TRBV11-2, TRBJ2-5)
CASSSTGEETQYF

SEQ ID NO: 457837 - protein, 11 aa, Homo sapiens
  CDR3 for alpha chain variable domain of TCR clone 228919 (TRAV3, TRAJ21)
CAVGNFNKFYF

SEQ ID NO: 457838 - protein, 15 aa, Homo sapiens
  CDR3 for beta chain variable domain of TCR clone 228919 (TRBV19, TRBJ1-2)
CASSVGQVLNCGYTF

SEQ ID NO: 457839 - protein, 13 aa, Homo sapiens
  CDR3 for alpha chain variable domain of TCR clone 228920 (TRAV27, TRAJ39)
CAGVNNAGNMLTF

SEQ ID NO: 457840 - protein, 11 aa, Homo sapiens
  CDR3 for beta chain variable domain of TCR clone 228920 (TRBV12-4, TRBJ2-3)
CASTATDTQYF

SEQ ID NO: 457841 - protein, 15 aa, Homo sapiens
  CDR3 for alpha chain variable domain of TCR clone 228921 (TRAV21, TRAJ37)
CAVRPTLSNTGKLIF

SEQ ID NO: 457842 - protein, 16 aa, Homo sapiens
  CDR3 for beta chain variable domain of TCR clone 228921 (TRBV24-1, TRBJ2-3)
CATSDRRQNLTDTQYF

SEQ ID NO: 457843 - protein, 15 aa, Homo sapiens
  CDR3 for alpha chain variable domain of TCR clone 228922 (TRAV12-2, TRAJ45)
CAVLLGGGGADGLTF

SEQ ID NO: 457844 - protein, 17 aa, Homo sapiens
  CDR3 for beta chain variable domain of TCR clone 228922 (TRBV7-2, TRBJ2-1)
CASSSPNSHSSYNEQFF

SEQ ID NO: 457845 - protein, 13 aa, Homo sapiens
  CDR3 for alpha chain variable domain of TCR clone 228923 (TRAV8-4, TRAJ44)
CAVCTGTASKLTF

SEQ ID NO: 457846 - protein, 13 aa, Homo sapiens
  CDR3 for beta chain variable domain of TCR clone 228923 (TRBV27, TRBJ1-1)
CASSLSIGAEAFF

SEQ ID NO: 457847 - protein, 13 aa, Homo sapiens
  CDR3 for alpha chain variable domain of TCR clone 228924 (TRAV21, TRAJ27)
CAARPGNAGKSTF

SEQ ID NO: 457848 - protein, 15 aa, Homo sapiens
  CDR3 for beta chain variable domain of TCR clone 228924 (TRBV7-2, TRBJ2-7)
CASSTPGLTRGEQYF

SEQ ID NO: 457849 - protein, 14 aa, Homo sapiens
  CDR3 for alpha chain variable domain of TCR clone 228925 (TRAV29/DV5, TRAJ36)
CAARRKTGANNPFF

SEQ ID NO: 457850 - protein, 13 aa, Homo sapiens
  CDR3 for beta chain variable domain of TCR clone 228925 (TRBV19, TRBJ2-7)
CASSIDRTYEQYF

SEQ ID NO: 457851 - protein, 16 aa, Homo sapiens
  CDR3 for alpha chain variable domain of TCR clone 228926 (TRAV3, TRAJ37)
CAVRGKGSGNTGKLIF

SEQ ID NO: 457852 - protein, 15 aa, Homo sapiens
  CDR3 for beta chain variable domain of TCR clone 228926 (TRBV7-3, TRBJ2-2)
CASSDTGQGTGELFF

SEQ ID NO: 457853 - protein, 12 aa, Homo sapiens
  CDR3 for alpha chain variable domain of TCR clone 228927 (TRAV26-1, TRAJ36)
CIVRVRADNLFF

SEQ ID NO: 457854 - protein, 13 aa, Homo sapiens
  CDR3 for beta chain variable domain of TCR clone 228927 (TRBV13, TRBJ2-7)
CASSQGVSYEQYF

SEQ ID NO: 457855 - protein, 13 aa, Homo sapiens
  CDR3 for alpha chain variable domain of TCR clone 228928 (TRAV38-1, TRAJ42)
CARWGGSQGNLIF

SEQ ID NO: 457856 - protein, 16 aa, Homo sapiens
  CDR3 for beta chain variable domain of TCR clone 228928 (TRBV6-1, TRBJ1-3)
CASVQGGVETPYILER

SEQ ID NO: 457857 - protein, 14 aa, Homo sapiens
  CDR3 for alpha chain variable domain of TCR clone 228929 (TRAV23/DV6, TRAJ58)
CAGMRETSGSRFTV

SEQ ID NO: 457858 - protein, 13 aa, Homo sapiens
  CDR3 for beta chain variable domain of TCR clone 228929 (TRBV28, TRBJ2-7)
CASRSSGVYEQYF

SEQ ID NO: 457859 - protein, 14 aa, Homo sapiens
  CDR3 for alpha chain variable domain of TCR clone 228930 (TRAV16, TRAJ33)
CALSAMDSNYQLIW

SEQ ID NO: 457860 - protein, 16 aa, Homo sapiens
  CDR3 for beta chain variable domain of TCR clone 228930 (TRBV7-3, TRBJ2-1)
CASSLSSGGGAKEQFF

SEQ ID NO: 457861 - protein, 14 aa, Homo sapiens
  CDR3 for alpha chain variable domain of TCR clone 228931 (TRAV12-2, TRAJ11)
CAVEGGSGYSTLTF

SEQ ID NO: 457862 - protein, 12 aa, Homo sapiens
  CDR3 for beta chain variable domain of TCR clone 228931 (TRBV11-2, TRBJ2-1)
CASSPGNNEQFF

SEQ ID NO: 457863 - protein, 13 aa, Homo sapiens
  CDR3 for alpha chain variable domain of TCR clone 228932 (TRAV26-1, )
CIVSHRVEGFWNQ

SEQ ID NO: 457864 - protein, 14 aa, Homo sapiens
  CDR3 for beta chain variable domain of TCR clone 228932 (TRBV20-1, TRBJ2-7)
CSAWTALSYYEQYF

SEQ ID NO: 457865 - protein, 14 aa, Homo sapiens
  CDR3 for alpha chain variable domain of TCR clone 228933 (TRAV27, TRAJ13)
CRSSNSGVYQKVTF

SEQ ID NO: 457866 - protein, 12 aa, Homo sapiens
  CDR3 for beta chain variable domain of TCR clone 228933 (TRBV14, TRBJ2-5)
CASSQLKETQYF

SEQ ID NO: 457867 - protein, 12 aa, Homo sapiens
  CDR3 for alpha chain variable domain of TCR clone 228934 (TRAV13-1, TRAJ15)
CAANQAGTALIF

SEQ ID NO: 457868 - protein, 16 aa, Homo sapiens
  CDR3 for beta chain variable domain of TCR clone 228934 (TRBV3-1, TRBJ2-5)
CASSPGQFNGFGTQYF

SEQ ID NO: 457869 - protein, 13 aa, Homo sapiens
  CDR3 for alpha chain variable domain of TCR clone 228935 (TRAV12-1, TRAJ40)
CVVPTSGTYKYIF

SEQ ID NO: 457870 - protein, 16 aa, Homo sapiens
  CDR3 for beta chain variable domain of TCR clone 228935 (TRBV7-9, TRBJ1-2)
CASSLGCSSGEDGYTF

SEQ ID NO: 457871 - protein, 14 aa, Homo sapiens
  CDR3 for alpha chain variable domain of TCR clone 228936 (TRAV38-1, TRAJ40)
CALRPTSGPYKYIF

SEQ ID NO: 457872 - protein, 14 aa, Homo sapiens
  CDR3 for beta chain variable domain of TCR clone 228936 (TRBV25-1, TRBJ1-1)
CASTRLGGNTEAFF

SEQ ID NO: 457873 - protein, 23 aa, Homo sapiens
  CDR3 for alpha chain variable domain of TCR clone 228937 (TRAV30, TRAJ43)
CTLRPPSSVTQEPTSASLSDMRF

SEQ ID NO: 457874 - protein, 17 aa, Homo sapiens
  CDR3 for beta chain variable domain of TCR clone 228937 (TRBV24-1, TRBJ2-4)
CATSDAEARGVRNIQYF

SEQ ID NO: 457875 - protein, 14 aa, Homo sapiens
  CDR3 for alpha chain variable domain of TCR clone 228938 (TRAV26-2, TRAJ27)
CILRDISDAGKSTF

SEQ ID NO: 457876 - protein, 15 aa, Homo sapiens
  CDR3 for beta chain variable domain of TCR clone 228938 (TRBV10-3, TRBJ2-7)
CATREQGLRSYEQHF

SEQ ID NO: 457877 - protein, 20 aa, Homo sapiens
  CDR3 for alpha chain variable domain of TCR clone 228939 (TRAV4, TRAJ29)
CCVLLPRGCVPFSGNTHMVF

SEQ ID NO: 457878 - protein, 12 aa, Homo sapiens
  CDR3 for beta chain variable domain of TCR clone 228939 (TRBV6-1, TRBJ2-7)
CASSDYSYEQYF

SEQ ID NO: 457879 - protein, 12 aa, Homo sapiens
  CDR3 for alpha chain variable domain of TCR clone 228940 (TRAV21, TRAJ33)
CAKMDSNFQLIW

SEQ ID NO: 457880 - protein, 15 aa, Homo sapiens
  CDR3 for beta chain variable domain of TCR clone 228940 (TRBV12-4, TRBJ2-5)
CASSPPTGLQETQYF

SEQ ID NO: 457881 - protein, 16 aa, Homo sapiens
  CDR3 for alpha chain variable domain of TCR clone 228941 (TRAV12-2, TRAJ32)
CAVNLGQGGATNKLIF

SEQ ID NO: 457882 - protein, 16 aa, Homo sapiens
  CDR3 for beta chain variable domain of TCR clone 228941 (TRBV20-1, TRBJ2-2)
CSASASGIPGAGELFF

SEQ ID NO: 457883 - protein, 15 aa, Homo sapiens
  CDR3 for alpha chain variable domain of TCR clone 228942 (TRAV13-1, TRAJ17)
CAASIERAAGKQLTF

SEQ ID NO: 457884 - protein, 12 aa, Homo sapiens
  CDR3 for beta chain variable domain of TCR clone 228942 (TRBV5-7, TRBJ1-1)
CASSLGRGKAFF

SEQ ID NO: 457885 - protein, 14 aa, Homo sapiens
  CDR3 for alpha chain variable domain of TCR clone 228943 (TRAV1-2, TRAJ16)
CAVNRFSDGQKLLF

SEQ ID NO: 457886 - protein, 15 aa, Homo sapiens
  CDR3 for beta chain variable domain of TCR clone 228943 (TRBV2, TRBJ1-5)
CASSPGPTGNQPQHF

SEQ ID NO: 457887 - protein, 12 aa, Homo sapiens
  CDR3 for alpha chain variable domain of TCR clone 228944 (TRAV12-3, TRAJ17)
CAMTLTGNKLTF

SEQ ID NO: 457888 - protein, 11 aa, Homo sapiens
  CDR3 for beta chain variable domain of TCR clone 228944 (TRBV12-4, TRBJ2-3)
CASSSVRGRYF

SEQ ID NO: 457889 - protein, 14 aa, Homo sapiens
  CDR3 for alpha chain variable domain of TCR clone 228945 (TRAV1-2, TRAJ8)
CAVREDTGFQKLAF

SEQ ID NO: 457890 - protein, 12 aa, Homo sapiens
  CDR3 for beta chain variable domain of TCR clone 228945 (TRBV20-1, TRBJ2-3)
CSARVGTDTQYF

SEQ ID NO: 457891 - protein, 15 aa, Homo sapiens
  CDR3 for alpha chain variable domain of TCR clone 228946 (TRAV2, TRAJ22)
CAVPSRGGSARQLTF

SEQ ID NO: 457892 - protein, 16 aa, Homo sapiens
  CDR3 for beta chain variable domain of TCR clone 228946 (TRBV11-2, TRBJ2-7)
CASSLAPTGVNYEQYF

SEQ ID NO: 457893 - protein, 14 aa, Homo sapiens
  CDR3 for alpha chain variable domain of TCR clone 228947 (TRAV35, TRAJ22)
CAGLRPGSAMQLTF

SEQ ID NO: 457894 - protein, 20 aa, Homo sapiens
  CDR3 for beta chain variable domain of TCR clone 228947 (TRBV7-8, TRBJ2-2)
CASSHLFPGPTIHITGELFF

SEQ ID NO: 457895 - protein, 14 aa, Homo sapiens
  CDR3 for alpha chain variable domain of TCR clone 228948 (TRAV12-3, TRAJ56)
CAMSVTGDNSKLTF

SEQ ID NO: 457896 - protein, 15 aa, Homo sapiens
  CDR3 for beta chain variable domain of TCR clone 228948 (TRBV20-1, TRBJ2-7)
CSARDRVSGMDEQYF

SEQ ID NO: 457897 - protein, 14 aa, Homo sapiens
  CDR3 for alpha chain variable domain of TCR clone 228949 (TRAV20, TRAJ56)
CAVQFGGANSKLTF

SEQ ID NO: 457898 - protein, 20 aa, Homo sapiens
  CDR3 for beta chain variable domain of TCR clone 228949 (TRBV7-3, TRBJ2-7)
CASSPRGLAGMVAVLRAGHQ

SEQ ID NO: 457899 - protein, 11 aa, Homo sapiens
  CDR3 for alpha chain variable domain of TCR clone 228950 (TRAV12-3, TRAJ43)
CAMSVSNDVRF

SEQ ID NO: 457900 - protein, 13 aa, Homo sapiens
  CDR3 for beta chain variable domain of TCR clone 228950 (TRBV20-1, TRBJ1-1)
CSAPLGGGAEAFF

SEQ ID NO: 457901 - protein, 14 aa, Homo sapiens
  CDR3 for alpha chain variable domain of TCR clone 228951 (TRAV1-2, TRAJ16)
CAVNRFSDGQKLLF

SEQ ID NO: 457902 - protein, 17 aa, Homo sapiens
  CDR3 for beta chain variable domain of TCR clone 228951 (TRBV7-8, TRBJ2-6)
CASSAGTGGAGANALTF

SEQ ID NO: 457903 - protein, 14 aa, Homo sapiens
  CDR3 for alpha chain variable domain of TCR clone 228952 (TRAV12-3, TRAJ42)
CAMNYGGSQGNLIF

SEQ ID NO: 457904 - protein, 17 aa, Homo sapiens
  CDR3 for beta chain variable domain of TCR clone 228952 (TRBV7-3, TRBJ2-5)
CASSLGSVRSGSETQYF

SEQ ID NO: 457905 - protein, 15 aa, Homo sapiens
  CDR3 for alpha chain variable domain of TCR clone 228953 (TRAV14/DV4, TRAJ47)
CAMREALEYGNKLVF

SEQ ID NO: 457906 - protein, 15 aa, Homo sapiens
  CDR3 for beta chain variable domain of TCR clone 228953 (TRBV7-3, TRBJ2-1)
CASSLGQGPFGEQFF

SEQ ID NO: 457907 - protein, 13 aa, Homo sapiens
  CDR3 for alpha chain variable domain of TCR clone 228954 (TRAV8-3, TRAJ36)
CAVGATGSNNLFL

SEQ ID NO: 457908 - protein, 15 aa, Homo sapiens
  CDR3 for beta chain variable domain of TCR clone 228954 (TRBV7-2, TRBJ1-2)
CASSPRAGWNYGYTF

SEQ ID NO: 457909 - protein, 13 aa, Homo sapiens
  CDR3 for alpha chain variable domain of TCR clone 228955 (TRAV21, TRAJ20)
CAVGLRVDYKLSF

SEQ ID NO: 457910 - protein, 13 aa, Homo sapiens
  CDR3 for beta chain variable domain of TCR clone 228955 (TRBV6-1, TRBJ1-1)
CASSRQGNTEAFC

SEQ ID NO: 457911 - protein, 15 aa, Homo sapiens
  CDR3 for alpha chain variable domain of TCR clone 228956 (TRAV8-6, TRAJ10)
CAVSDQAGGGNKLTF

SEQ ID NO: 457912 - protein, 16 aa, Homo sapiens
  CDR3 for beta chain variable domain of TCR clone 228956 (TRBV7-9, TRBJ1-2)
CASSLGFSSGEDGYTF

SEQ ID NO: 457913 - protein, 13 aa, Homo sapiens
  CDR3 for alpha chain variable domain of TCR clone 228957 (TRAV27, TRAJ41)
CAGEGNSGYALNF

SEQ ID NO: 457914 - protein, 13 aa, Homo sapiens
  CDR3 for beta chain variable domain of TCR clone 228957 (TRBV4-2, TRBJ2-2)
CASEDRGTGELFF

SEQ ID NO: 457915 - protein, 14 aa, Homo sapiens
  CDR3 for alpha chain variable domain of TCR clone 228958 (TRAV17, TRAJ20)
CATLSGSNDYKLSF

SEQ ID NO: 457916 - protein, 12 aa, Homo sapiens
  CDR3 for beta chain variable domain of TCR clone 228958 (TRBV18, TRBJ2-3)
CASSPLSDTQYF

SEQ ID NO: 457917 - protein, 14 aa, Homo sapiens
  CDR3 for alpha chain variable domain of TCR clone 228959 (TRAV8-6, TRAJ39)
CAVSERDAGNMLTF

SEQ ID NO: 457918 - protein, 16 aa, Homo sapiens
  CDR3 for beta chain variable domain of TCR clone 228959 (TRBV7-3, TRBJ2-1)
CASSGGLAGTYNEQFF

SEQ ID NO: 457919 - protein, 15 aa, Homo sapiens
  CDR3 for alpha chain variable domain of TCR clone 228960 (TRAV13-1, TRAJ5)
CAASPRGHGQESTYF

SEQ ID NO: 457920 - protein, 17 aa, Homo sapiens
  CDR3 for beta chain variable domain of TCR clone 228960 (TRBV3-1, TRBJ2-2)
CASSQFRDKGDTGELFF

SEQ ID NO: 457921 - protein, 14 aa, Homo sapiens
  CDR3 for alpha chain variable domain of TCR clone 228961 (TRAV36/DV7, TRAJ40)
CAVETTSGSYKYIF

SEQ ID NO: 457922 - protein, 13 aa, Homo sapiens
  CDR3 for beta chain variable domain of TCR clone 228961 (TRBV10-3, TRBJ2-5)
CAMTSGAGETQYF

SEQ ID NO: 457923 - protein, 16 aa, Homo sapiens
  CDR3 for alpha chain variable domain of TCR clone 228962 (TRAV1-2, TRAJ17)
CAVVAGTRAAGNKLTF

SEQ ID NO: 457924 - protein, 14 aa, Homo sapiens
  CDR3 for beta chain variable domain of TCR clone 228962 (TRBV19, TRBJ2-1)
CASPTFVLSGEQFF

SEQ ID NO: 457925 - protein, 18 aa, Homo sapiens
  CDR3 for alpha chain variable domain of TCR clone 228963 (TRAV13-1, TRAJ52)
CAAKNPNAGGTSYGKLTF

SEQ ID NO: 457926 - protein, 13 aa, Homo sapiens
  CDR3 for beta chain variable domain of TCR clone 228963 (TRBV20-1, TRBJ2-5)
CSAREAFQETQYF

SEQ ID NO: 457927 - protein, 14 aa, Homo sapiens
  CDR3 for alpha chain variable domain of TCR clone 228964 (TRAV35, TRAJ22)
CAGLRPGSARQLTF

SEQ ID NO: 457928 - protein, 18 aa, Homo sapiens
  CDR3 for beta chain variable domain of TCR clone 228964 (TRBV7-9, TRBJ2-1)
CASSLAVSGTSGRNEQFF

SEQ ID NO: 457929 - protein, 14 aa, Homo sapiens
  CDR3 for alpha chain variable domain of TCR clone 228965 (TRAV17, TRAJ37)
CATDGSSNTGKLIF

SEQ ID NO: 457930 - protein, 18 aa, Homo sapiens
  CDR3 for beta chain variable domain of TCR clone 228965 (TRBV7-9, TRBJ2-7)
CASSLTTSGSRTWYEQYF

SEQ ID NO: 457931 - protein, 13 aa, Homo sapiens
  CDR3 for alpha chain variable domain of TCR clone 228966 (TRAV2, TRAJ15)
CAVASQAGTALIF

SEQ ID NO: 457932 - protein, 14 aa, Homo sapiens
  CDR3 for beta chain variable domain of TCR clone 228966 (TRBV11-2, TRBJ2-7)
CASSLGAGAYEQYF

SEQ ID NO: 457933 - protein, 14 aa, Homo sapiens
  CDR3 for alpha chain variable domain of TCR clone 228967 (TRAV12-2, TRAJ17)
CAVNIKAAGNKLTF

SEQ ID NO: 457934 - protein, 13 aa, Homo sapiens
  CDR3 for beta chain variable domain of TCR clone 228967 (TRBV7-2, TRBJ2-2)
CASSLAVTGELFF

SEQ ID NO: 457935 - protein, 14 aa, Homo sapiens
  CDR3 for alpha chain variable domain of TCR clone 228968 (TRAV27, TRAJ12)
CAGARMDSSYKLIF

SEQ ID NO: 457936 - protein, 18 aa, Homo sapiens
  CDR3 for beta chain variable domain of TCR clone 228968 (TRBV10-3, TRBJ2-7)
CTISESGRPSGGRVEQYF

SEQ ID NO: 457937 - protein, 12 aa, Homo sapiens
  CDR3 for alpha chain variable domain of TCR clone 228969 (TRAV3, TRAJ20)
CSVRDGDYKLSF

SEQ ID NO: 457938 - protein, 16 aa, Homo sapiens
  CDR3 for beta chain variable domain of TCR clone 228969 (TRBV20-1, TRBJ1-2)
CSASMGQGVANYGYTF

SEQ ID NO: 457939 - protein, 13 aa, Homo sapiens
  CDR3 for alpha chain variable domain of TCR clone 228970 (TRAV30, TRAJ16)
CGTFGGDGQKLLF

SEQ ID NO: 457940 - protein, 17 aa, Homo sapiens
  CDR3 for beta chain variable domain of TCR clone 228970 (TRBV13, TRBJ2-3)
CASSLSRVAGGRNTQYF

SEQ ID NO: 457941 - protein, 12 aa, Homo sapiens
  CDR3 for alpha chain variable domain of TCR clone 228971 (TRAV12-3, TRAJ17)
CAMTLTGNKLTF

SEQ ID NO: 457942 - protein, 12 aa, Homo sapiens
  CDR3 for beta chain variable domain of TCR clone 228971 (TRBV19, TRBJ1-1)
CASMNRYTEAFF

SEQ ID NO: 457943 - protein, 13 aa, Homo sapiens
  CDR3 for alpha chain variable domain of TCR clone 228972 (TRAV1-2, TRAJ20)
CAVRDGNDYKLSF

SEQ ID NO: 457944 - protein, 16 aa, Homo sapiens
  CDR3 for beta chain variable domain of TCR clone 228972 (TRBV7-9, TRBJ2-3)
CASSPWREVGTDTQYF

SEQ ID NO: 457945 - protein, 13 aa, Homo sapiens
  CDR3 for alpha chain variable domain of TCR clone 228973 (TRAV3, TRAJ27)
CAVSPLGAGKSTF

SEQ ID NO: 457946 - protein, 15 aa, Homo sapiens
  CDR3 for beta chain variable domain of TCR clone 228973 (TRBV4-2, TRBJ1-1)
CASSQAGTLKLSLDK

SEQ ID NO: 457947 - protein, 15 aa, Homo sapiens
  CDR3 for alpha chain variable domain of TCR clone 228974 (TRAV12-1, TRAJ36)
CVVNEHQTGANNIFF

SEQ ID NO: 457948 - protein, 12 aa, Homo sapiens
  CDR3 for beta chain variable domain of TCR clone 228974 (TRBV29-1, TRBJ2-3)
CSVTGGADTQYF

SEQ ID NO: 457949 - protein, 14 aa, Homo sapiens
  CDR3 for alpha chain variable domain of TCR clone 228975 (TRAV17, TRAJ15)
CATDRGQAGTALIF

SEQ ID NO: 457950 - protein, 17 aa, Homo sapiens
  CDR3 for beta chain variable domain of TCR clone 228975 (TRBV29-1, TRBJ2-1)
YSVVGLAGAYSYNEQFF

SEQ ID NO: 457951 - protein, 14 aa, Homo sapiens
  CDR3 for alpha chain variable domain of TCR clone 228976 (TRAV1-2, TRAJ8)
CAVREDTGSQKLGF

SEQ ID NO: 457952 - protein, 15 aa, Homo sapiens
  CDR3 for beta chain variable domain of TCR clone 228976 (TRBV6-3, TRBJ2-7)
CASSSPGTVFYEQYF

SEQ ID NO: 457953 - protein, 12 aa, Homo sapiens
  CDR3 for alpha chain variable domain of TCR clone 228977 (TRAV8-6, TRAJ33)
CAVTDSNYQLIC

SEQ ID NO: 457954 - protein, 15 aa, Homo sapiens
  CDR3 for beta chain variable domain of TCR clone 228977 (TRBV4-3, TRBJ1-2)
CASSRGQGRNYGYTF

SEQ ID NO: 457955 - protein, 10 aa, Homo sapiens
  CDR3 for alpha chain variable domain of TCR clone 228978 (TRAV12-1, TRAJ43)
CVVHNTDMRF

SEQ ID NO: 457956 - protein, 13 aa, Homo sapiens
  CDR3 for beta chain variable domain of TCR clone 228978 (TRBV12-4, TRBJ1-2)
CASSAGLTVISTF

SEQ ID NO: 457957 - protein, 12 aa, Homo sapiens
  CDR3 for alpha chain variable domain of TCR clone 228979 (TRAV17, TRAJ29)
CYASSGNTPLVF

SEQ ID NO: 457958 - protein, 13 aa, Homo sapiens
  CDR3 for beta chain variable domain of TCR clone 228979 (TRBV14, TRBJ2-7)
CASSKDRRYEQYF

SEQ ID NO: 457959 - protein, 16 aa, Homo sapiens
  CDR3 for alpha chain variable domain of TCR clone 228980 (TRAV30, TRAJ24)
CGTEIVDADSWGKFQF

SEQ ID NO: 457960 - protein, 15 aa, Homo sapiens
  CDR3 for beta chain variable domain of TCR clone 228980 (TRBV5-1, TRBJ2-2)
CASSLAAGGSGELFF

SEQ ID NO: 457961 - protein, 14 aa, Homo sapiens
  CDR3 for alpha chain variable domain of TCR clone 228981 (TRAV17, TRAJ34)
CATDSLEGTDKLIF

SEQ ID NO: 457962 - protein, 13 aa, Homo sapiens
  CDR3 for beta chain variable domain of TCR clone 228981 (TRBV11-2, TRBJ2-5)
CASSGTRPYEQYF

SEQ ID NO: 457963 - protein, 15 aa, Homo sapiens
  CDR3 for alpha chain variable domain of TCR clone 228982 (TRAV12-2, TRAJ8)
CAVREENTGFQKLVF

SEQ ID NO: 457964 - protein, 14 aa, Homo sapiens
  CDR3 for beta chain variable domain of TCR clone 228982 (TRBV7-2, TRBJ2-7)
CASSPKTSFYEQYF

SEQ ID NO: 457965 - protein, 12 aa, Homo sapiens
  CDR3 for alpha chain variable domain of TCR clone 228983 (TRAV12-3, TRAJ17)
CAMTLTGNKLTF

SEQ ID NO: 457966 - protein, 15 aa, Homo sapiens
  CDR3 for beta chain variable domain of TCR clone 228983 (TRBV6-4, TRBJ2-7)
CASSDQGPPNYEQYV

SEQ ID NO: 457967 - protein, 15 aa, Homo sapiens
  CDR3 for alpha chain variable domain of TCR clone 228984 (TRAV3, TRAJ5)
CAVRDRKTGRRALTF

SEQ ID NO: 457968 - protein, 21 aa, Homo sapiens
  CDR3 for beta chain variable domain of TCR clone 228984 (TRBV24-1, TRBJ2-5)
ESAIPNQTALYFCATRETQYF

SEQ ID NO: 457969 - protein, 16 aa, Homo sapiens
  CDR3 for alpha chain variable domain of TCR clone 228985 (TRAV16, TRAJ52)
CALSSAGGTSYGTLTF

SEQ ID NO: 457970 - protein, 12 aa, Homo sapiens
  CDR3 for beta chain variable domain of TCR clone 228985 (TRBV12-4, TRBJ1-3)
CASSFSGNTIYF

SEQ ID NO: 457971 - protein, 15 aa, Homo sapiens
  CDR3 for alpha chain variable domain of TCR clone 228986 (TRAV20, TRAJ53)
CAVQASGGSNYKLTF

SEQ ID NO: 457972 - protein, 15 aa, Homo sapiens
  CDR3 for beta chain variable domain of TCR clone 228986 (TRBV7-2, TRBJ2-7)
CASSLKGALTYEQYF

SEQ ID NO: 457973 - protein, 15 aa, Homo sapiens
  CDR3 for alpha chain variable domain of TCR clone 228987 (TRAV17, TRAJ56)
CATDANTGGNSKLTF

SEQ ID NO: 457974 - protein, 14 aa, Homo sapiens
  CDR3 for beta chain variable domain of TCR clone 228987 (TRBV19, TRBJ1-5)
CASSLGTGGQPQHF

SEQ ID NO: 457975 - protein, 15 aa, Homo sapiens
  CDR3 for alpha chain variable domain of TCR clone 228988 (TRAV3, TRAJ22)
CAVRDRGGSARQLTL

SEQ ID NO: 457976 - protein, 15 aa, Homo sapiens
  CDR3 for beta chain variable domain of TCR clone 228988 (TRBV7-3, TRBJ2-1)
CASSPTGGGEVEQLF

SEQ ID NO: 457977 - protein, 12 aa, Homo sapiens
  CDR3 for alpha chain variable domain of TCR clone 228989 (TRAV5, TRAJ36)
CAEKGGANDLFF

SEQ ID NO: 457978 - protein, 16 aa, Homo sapiens
  CDR3 for beta chain variable domain of TCR clone 228989 (TRBV5-4, TRBJ2-1)
CASSLALAGAYNEQFF

SEQ ID NO: 457979 - protein, 14 aa, Homo sapiens
  CDR3 for alpha chain variable domain of TCR clone 228990 (TRAV12-2, TRAJ13)
CAVKKTGGYQKVTF

SEQ ID NO: 457980 - protein, 12 aa, Homo sapiens
  CDR3 for beta chain variable domain of TCR clone 228990 (TRBV29-1, TRBJ1-1)
CSELDGNTEAFF

SEQ ID NO: 457981 - protein, 15 aa, Homo sapiens
  CDR3 for alpha chain variable domain of TCR clone 228991 (TRAV3, TRAJ32)
CAVSSYGGATNKLTF

SEQ ID NO: 457982 - protein, 16 aa, Homo sapiens
  CDR3 for beta chain variable domain of TCR clone 228991 (TRBV5-1, TRBJ2-5)
CASSLSLAGAQETQYF

SEQ ID NO: 457983 - protein, 15 aa, Homo sapiens
  CDR3 for alpha chain variable domain of TCR clone 228992 (TRAV8-3, TRAJ45)
CASSHSGGGADGLTF

SEQ ID NO: 457984 - protein, 14 aa, Homo sapiens
  CDR3 for beta chain variable domain of TCR clone 228992 (TRBV7-8, TRBJ2-3)
CASSLEAGTDTQYF

SEQ ID NO: 457985 - protein, 13 aa, Homo sapiens
  CDR3 for alpha chain variable domain of TCR clone 228993 (TRAV36/DV7, TRAJ7)
CAVERYGNNRLAF

SEQ ID NO: 457986 - protein, 15 aa, Homo sapiens
  CDR3 for beta chain variable domain of TCR clone 228993 (TRBV7-8, TRBJ2-7)
CASSLERAGSYEQYF

SEQ ID NO: 457987 - protein, 13 aa, Homo sapiens
  CDR3 for alpha chain variable domain of TCR clone 228994 (TRAV8-1, TRAJ39)
CAGLNNAGNMLTF

SEQ ID NO: 457988 - protein, 17 aa, Homo sapiens
  CDR3 for beta chain variable domain of TCR clone 228994 (TRBV19, TRBJ2-3)
CASSIDPAGGGTDTQYL

SEQ ID NO: 457989 - protein, 13 aa, Homo sapiens
  CDR3 for alpha chain variable domain of TCR clone 228995 (TRAV21, TRAJ27)
CAARPGNAGKSTF

SEQ ID NO: 457990 - protein, 18 aa, Homo sapiens
  CDR3 for beta chain variable domain of TCR clone 228995 (TRBV25-1, TRBJ1-2)
CASSGLQNGQGLIFGYTF

SEQ ID NO: 457991 - protein, 12 aa, Homo sapiens
  CDR3 for alpha chain variable domain of TCR clone 228996 (TRAV13-2, TRAJ8)
CAPWLGFQKLVF

SEQ ID NO: 457992 - protein, 16 aa, Homo sapiens
  CDR3 for beta chain variable domain of TCR clone 228996 (TRBV7-2, TRBJ2-7)
CASSLGLSGGAYEQYF

SEQ ID NO: 457993 - protein, 18 aa, Homo sapiens
  CDR3 for alpha chain variable domain of TCR clone 228997 (TRAV13-1, TRAJ52)
CAASKRSAGGTSYRKLTF

SEQ ID NO: 457994 - protein, 15 aa, Homo sapiens
  CDR3 for beta chain variable domain of TCR clone 228997 (TRBV19, TRBJ2-1)
CASSMGSGTGRQQFF

SEQ ID NO: 457995 - protein, 11 aa, Homo sapiens
  CDR3 for alpha chain variable domain of TCR clone 228998 (TRAV3, TRAJ21)
CAVGNFNKFYF

SEQ ID NO: 457996 - protein, 13 aa, Homo sapiens
  CDR3 for beta chain variable domain of TCR clone 228998 (TRBV19, TRBJ1-2)
CAWSVPGQDGYTF

SEQ ID NO: 457997 - protein, 13 aa, Homo sapiens
  CDR3 for alpha chain variable domain of TCR clone 228999 (TRAV27, TRAJ41)
CAGEGNSGYALNF

SEQ ID NO: 457998 - protein, 17 aa, Homo sapiens
  CDR3 for beta chain variable domain of TCR clone 228999 (TRBV7-3, TRBJ2-3)
CASSLMKRMRGADTQYF

SEQ ID NO: 457999 - protein, 15 aa, Homo sapiens
  CDR3 for alpha chain variable domain of TCR clone 229000 (TRAV25, TRAJ53)
CPTSNSGGSNYKLTF

SEQ ID NO: 458000 - protein, 15 aa, Homo sapiens
  CDR3 for beta chain variable domain of TCR clone 229000 (TRBV12-4, TRBJ2-1)
CASSPLSGRNNEQFF

SEQ ID NO: 458001 - protein, 15 aa, Homo sapiens
  CDR3 for alpha chain variable domain of TCR clone 229001 (TRAV8-3, TRAJ11)
CAVGLLNSGYSTLTY

SEQ ID NO: 458002 - protein, 16 aa, Homo sapiens
  CDR3 for beta chain variable domain of TCR clone 229001 (TRBV7-9, TRBJ1-2)
CASSLGFSSGEDGYTF

SEQ ID NO: 458003 - protein, 17 aa, Homo sapiens
  CDR3 for alpha chain variable domain of TCR clone 229002 (TRAV1-2, TRAJ37)
CAVRDFMALATQANSSL

SEQ ID NO: 458004 - protein, 14 aa, Homo sapiens
  CDR3 for beta chain variable domain of TCR clone 229002 (TRBV2, TRBJ2-5)
CASSEVLAQETQYF

SEQ ID NO: 458005 - protein, 13 aa, Homo sapiens
  CDR3 for alpha chain variable domain of TCR clone 229003 (TRAV6, TRAJ32)
CSRAGGATNKLIF

SEQ ID NO: 458006 - protein, 14 aa, Homo sapiens
  CDR3 for beta chain variable domain of TCR clone 229003 (TRBV25-1, TRBJ1-1)
CASTHLGGNTEAFF

SEQ ID NO: 458007 - protein, 15 aa, Homo sapiens
  CDR3 for alpha chain variable domain of TCR clone 229004 (TRAV3, TRAJ22)
CAVTDRGGSARQLTF

SEQ ID NO: 458008 - protein, 15 aa, Homo sapiens
  CDR3 for beta chain variable domain of TCR clone 229004 (TRBV27, TRBJ2-1)
CASSNGGGSSNEQFF

SEQ ID NO: 458009 - protein, 12 aa, Homo sapiens
  CDR3 for alpha chain variable domain of TCR clone 229005 (TRAV38-2/DV8, TRAJ48)
CALLSGNEKLTF

SEQ ID NO: 458010 - protein, 13 aa, Homo sapiens
  CDR3 for beta chain variable domain of TCR clone 229005 (TRBV12-4, TRBJ2-7)
CASSFVPTAEQYF

SEQ ID NO: 458011 - protein, 19 aa, Homo sapiens
  CDR3 for alpha chain variable domain of TCR clone 229006 (TRAV3, TRAJ6)
CAVRDRNPSRSGGSYIPTL

SEQ ID NO: 458012 - protein, 14 aa, Homo sapiens
  CDR3 for beta chain variable domain of TCR clone 229006 (TRBV25-1, TRBJ1-1)
CASTHLGGNTEAFF

SEQ ID NO: 458013 - protein, 13 aa, Homo sapiens
  CDR3 for alpha chain variable domain of TCR clone 229007 (TRAV17, TRAJ40)
CAGALGGTYKYIF

SEQ ID NO: 458014 - protein, 16 aa, Homo sapiens
  CDR3 for beta chain variable domain of TCR clone 229007 (TRBV7-2, TRBJ1-4)
CASSLDPGRRDEKLFF

SEQ ID NO: 458015 - protein, 14 aa, Homo sapiens
  CDR3 for alpha chain variable domain of TCR clone 229008 (TRAV12-3, TRAJ9)
CAMSPNTGGFKTIF

SEQ ID NO: 458016 - protein, 14 aa, Homo sapiens
  CDR3 for beta chain variable domain of TCR clone 229008 (TRBV28, TRBJ1-1)
RASSSEQGYTEAFF

SEQ ID NO: 458017 - protein, 14 aa, Homo sapiens
  CDR3 for alpha chain variable domain of TCR clone 229009 (TRAV23/DV6, TRAJ37)
CAASTSSNTGTLIF

SEQ ID NO: 458018 - protein, 15 aa, Homo sapiens
  CDR3 for beta chain variable domain of TCR clone 229009 (TRBV7-9, TRBJ2-7)
CASSPGGGLTYEQYF

SEQ ID NO: 458019 - protein, 16 aa, Homo sapiens
  CDR3 for alpha chain variable domain of TCR clone 229010 (TRAV12-3, TRAJ53)
CAVSPGSEGSNYKLTF

SEQ ID NO: 458020 - protein, 11 aa, Homo sapiens
  CDR3 for beta chain variable domain of TCR clone 229010 (TRBV29-1, TRBJ2-5)
CSEDRTGTQYF

SEQ ID NO: 458021 - protein, 10 aa, Homo sapiens
  CDR3 for alpha chain variable domain of TCR clone 229011 (TRAV1-2, TRAJ20)
CALNDYKLSF

SEQ ID NO: 458022 - protein, 16 aa, Homo sapiens
  CDR3 for beta chain variable domain of TCR clone 229011 (TRBV20-1, TRBJ1-1)
CSARALTQGMNTEAFV

SEQ ID NO: 458023 - protein, 15 aa, Homo sapiens
  CDR3 for alpha chain variable domain of TCR clone 229012 (TRAV21, TRAJ24)
CAARSSTGSWGKWQF

SEQ ID NO: 458024 - protein, 13 aa, Homo sapiens
  CDR3 for beta chain variable domain of TCR clone 229012 (TRBV10-3, TRBJ2-7)
CASKLAVNYEQYF

SEQ ID NO: 458025 - protein, 19 aa, Homo sapiens
  CDR3 for alpha chain variable domain of TCR clone 229013 (TRAV26-1, TRAJ28)
CIVRVAHAYSGAGSYQLTF

SEQ ID NO: 458026 - protein, 14 aa, Homo sapiens
  CDR3 for beta chain variable domain of TCR clone 229013 (TRBV25-1, TRBJ1-1)
CASTHLGGNTEAFF

SEQ ID NO: 458027 - protein, 14 aa, Homo sapiens
  CDR3 for alpha chain variable domain of TCR clone 229014 (TRAV8-4, TRAJ5)
CAVSTDTGRRALTF

SEQ ID NO: 458028 - protein, 21 aa, Homo sapiens
  CDR3 for beta chain variable domain of TCR clone 229014 (TRBV15, TRBJ2-1)
AWGTQPCTCVPPAEVDTARFF

SEQ ID NO: 458029 - protein, 14 aa, Homo sapiens
  CDR3 for alpha chain variable domain of TCR clone 229015 (TRAV9-2, TRAJ39)
CDLYIYNAGNMLTF

SEQ ID NO: 458030 - protein, 14 aa, Homo sapiens
  CDR3 for beta chain variable domain of TCR clone 229015 (TRBV19, TRBJ2-1)
CASPTFVLSGEQFF

SEQ ID NO: 458031 - protein, 17 aa, Homo sapiens
  CDR3 for alpha chain variable domain of TCR clone 229016 (TRAV3, TRAJ28)
CAVREAYSGAGRYQLIF

SEQ ID NO: 458032 - protein, 18 aa, Homo sapiens
  CDR3 for beta chain variable domain of TCR clone 229016 (TRBV27, TRBJ2-1)
CASGNRAVGVGSKNEQFF

SEQ ID NO: 458033 - protein, 16 aa, Homo sapiens
  CDR3 for alpha chain variable domain of TCR clone 229017 (TRAV21, TRAJ37)
CAVRPRGSSNPGKLIF

SEQ ID NO: 458034 - protein, 13 aa, Homo sapiens
  CDR3 for beta chain variable domain of TCR clone 229017 (TRBV20-1, TRBJ2-2)
CSALSGGAGELFF

SEQ ID NO: 458035 - protein, 14 aa, Homo sapiens
  CDR3 for alpha chain variable domain of TCR clone 229018 (TRAV20, TRAJ10)
CAVRVEGGGNKLTF

SEQ ID NO: 458036 - protein, 18 aa, Homo sapiens
  CDR3 for beta chain variable domain of TCR clone 229018 (TRBV24-1, TRBJ2-1)
CATSDLMFLGRGVDEQFF

SEQ ID NO: 458037 - protein, 11 aa, Homo sapiens
  CDR3 for alpha chain variable domain of TCR clone 229019 (TRAV12-1, TRAJ24)
CVVEGWGKFQF

SEQ ID NO: 458038 - protein, 13 aa, Homo sapiens
  CDR3 for beta chain variable domain of TCR clone 229019 (TRBV7-9, TRBJ1-2)
CASSLKQNYGYTF

SEQ ID NO: 458039 - protein, 16 aa, Homo sapiens
  CDR3 for alpha chain variable domain of TCR clone 229020 (TRAV27, TRAJ34)
CAGGGLGDYNTDTLIF

SEQ ID NO: 458040 - protein, 15 aa, Homo sapiens
  CDR3 for beta chain variable domain of TCR clone 229020 (TRBV9, TRBJ1-4)
CASSVGGSTNEKLFF

SEQ ID NO: 458041 - protein, 12 aa, Homo sapiens
  CDR3 for alpha chain variable domain of TCR clone 229021 (TRAV16, TRAJ56)
CAPTGANSKLTF

SEQ ID NO: 458042 - protein, 13 aa, Homo sapiens
  CDR3 for beta chain variable domain of TCR clone 229021 (TRBV15, TRBJ1-6)
CATSGGLNSPLHF

SEQ ID NO: 458043 - protein, 11 aa, Homo sapiens
  CDR3 for alpha chain variable domain of TCR clone 229022 (TRAV1-1, TRAJ23)
CAVRQGGKLIF

SEQ ID NO: 458044 - protein, 15 aa, Homo sapiens
  CDR3 for beta chain variable domain of TCR clone 229022 (TRBV7-8, TRBJ2-2)
CASSETGQGTGELFF

SEQ ID NO: 458045 - protein, 14 aa, Homo sapiens
  CDR3 for alpha chain variable domain of TCR clone 229023 (TRAV12-2, TRAJ5)
CAVNRSTGRRALTF

SEQ ID NO: 458046 - protein, 13 aa, Homo sapiens
  CDR3 for beta chain variable domain of TCR clone 229023 (TRBV7-3, TRBJ1-1)
CASSQDWGAEAFF

SEQ ID NO: 458047 - protein, 13 aa, Homo sapiens
  CDR3 for alpha chain variable domain of TCR clone 229024 (TRAV12-3, TRAJ13)
CAMSSGGYQKVTF

SEQ ID NO: 458048 - protein, 13 aa, Homo sapiens
  CDR3 for beta chain variable domain of TCR clone 229024 (TRBV20-1, TRBJ1-1)
CTAPPGGHTEAFF

SEQ ID NO: 458049 - protein, 14 aa, Homo sapiens
  CDR3 for alpha chain variable domain of TCR clone 229025 (TRAV17, TRAJ39)
CATDPVRAGNMLNF

SEQ ID NO: 458050 - protein, 15 aa, Homo sapiens
  CDR3 for beta chain variable domain of TCR clone 229025 (TRBV13, TRBJ1-5)
CASSFGQGGVQPQHY

SEQ ID NO: 458051 - protein, 10 aa, Homo sapiens
  CDR3 for alpha chain variable domain of TCR clone 229026 (TRAV8-1, TRAJ21)
CAVNGTKFYF

SEQ ID NO: 458052 - protein, 19 aa, Homo sapiens
  CDR3 for beta chain variable domain of TCR clone 229026 (TRBV2, TRBJ2-7)
CASSDDETSGRANDYEQYF

SEQ ID NO: 458053 - protein, 13 aa, Homo sapiens
  CDR3 for alpha chain variable domain of TCR clone 229027 (TRAV13-1, TRAJ9)
CAASGTGGFKTIF

SEQ ID NO: 458054 - protein, 11 aa, Homo sapiens
  CDR3 for beta chain variable domain of TCR clone 229027 (TRBV12-4, TRBJ2-3)
CASTATDTQYF

SEQ ID NO: 458055 - protein, 12 aa, Homo sapiens
  CDR3 for alpha chain variable domain of TCR clone 229028 (TRAV17, TRAJ20)
CATDSNDYKLSF

SEQ ID NO: 458056 - protein, 13 aa, Homo sapiens
  CDR3 for beta chain variable domain of TCR clone 229028 (TRBV9, TRBJ2-1)
CASSVGQGGEQFF

SEQ ID NO: 458057 - protein, 16 aa, Homo sapiens
  CDR3 for alpha chain variable domain of TCR clone 229029 (TRAV30, TRAJ24)
FGTEIVDADSWGKFQF

SEQ ID NO: 458058 - protein, 14 aa, Homo sapiens
  CDR3 for beta chain variable domain of TCR clone 229029 (TRBV12-5, TRBJ2-5)
CASGSRTHQETHYF

SEQ ID NO: 458059 - protein, 20 aa, Homo sapiens
  CDR3 for alpha chain variable domain of TCR clone 229030 (TRAV4, TRAJ29)
CCVLLPRGPHPYSGNTPLVF

SEQ ID NO: 458060 - protein, 14 aa, Homo sapiens
  CDR3 for beta chain variable domain of TCR clone 229030 (TRBV5-1, TRBJ2-3)
CASSFPGNTDTQYF

SEQ ID NO: 458061 - protein, 13 aa, Homo sapiens
  CDR3 for alpha chain variable domain of TCR clone 229031 (TRAV22, TRAJ9)
CAVGSTGGFKTIF

SEQ ID NO: 458062 - protein, 17 aa, Homo sapiens
  CDR3 for beta chain variable domain of TCR clone 229031 (TRBV18, TRBJ2-2)
CASSQRSSGQGPGELFF

SEQ ID NO: 458063 - protein, 15 aa, Homo sapiens
  CDR3 for alpha chain variable domain of TCR clone 229032 (TRAV21, TRAJ24)
CAARSSTDSCGKLQF

SEQ ID NO: 458064 - protein, 13 aa, Homo sapiens
  CDR3 for beta chain variable domain of TCR clone 229032 (TRBV11-2, TRBJ2-5)
CASSSTGEETQYL

SEQ ID NO: 458065 - protein, 14 aa, Homo sapiens
  CDR3 for alpha chain variable domain of TCR clone 229033 (TRAV26-1, TRAJ22)
CIVRVYGSARQLTF

SEQ ID NO: 458066 - protein, 16 aa, Homo sapiens
  CDR3 for beta chain variable domain of TCR clone 229033 (TRBV7-3, TRBJ2-3)
CQQPRWTSGFGDTQYF

SEQ ID NO: 458067 - protein, 15 aa, Homo sapiens
  CDR3 for alpha chain variable domain of TCR clone 229034 (TRAV3, TRAJ3)
CAVRDGHSSASMIIF

SEQ ID NO: 458068 - protein, 14 aa, Homo sapiens
  CDR3 for beta chain variable domain of TCR clone 229034 (TRBV28, TRBJ1-4)
CASSFGTLDEKLFF

SEQ ID NO: 458069 - protein, 14 aa, Homo sapiens
  CDR3 for alpha chain variable domain of TCR clone 229035 (TRAV1-2, TRAJ16)
CAVNRFSAGQKLLF

SEQ ID NO: 458070 - protein, 13 aa, Homo sapiens
  CDR3 for beta chain variable domain of TCR clone 229035 (TRBV20-1, TRBJ1-1)
CSARAGGNTEAFF

SEQ ID NO: 458071 - protein, 21 aa, Homo sapiens
  CDR3 for alpha chain variable domain of TCR clone 229036 (TRAV36/DV7, TRAJ39)
TATQTGDSAIYLPNAGNMPTF

SEQ ID NO: 458072 - protein, 16 aa, Homo sapiens
  CDR3 for beta chain variable domain of TCR clone 229036 (TRBV19, TRBJ2-1)
CASSKAGPSSYNEQFF

SEQ ID NO: 458073 - protein, 14 aa, Homo sapiens
  CDR3 for alpha chain variable domain of TCR clone 229037 (TRAV1-2, TRAJ8)
CAVREDTGFQKLVF

SEQ ID NO: 458074 - protein, 14 aa, Homo sapiens
  CDR3 for beta chain variable domain of TCR clone 229037 (TRBV29-1, TRBJ2-5)
CSVEASGSGETQYF

SEQ ID NO: 458075 - protein, 15 aa, Homo sapiens
  CDR3 for alpha chain variable domain of TCR clone 229038 (TRAV21, TRAJ53)
CATLNSGGSNYKLTF

SEQ ID NO: 458076 - protein, 12 aa, Homo sapiens
  CDR3 for beta chain variable domain of TCR clone 229038 (TRBV28, TRBJ2-3)
CASSLYRDTQYF

SEQ ID NO: 458077 - protein, 15 aa, Homo sapiens
  CDR3 for alpha chain variable domain of TCR clone 229039 (TRAV8-3, TRAJ27)
CAVGPSKTNAGKSTF

SEQ ID NO: 458078 - protein, 17 aa, Homo sapiens
  CDR3 for beta chain variable domain of TCR clone 229039 (TRBV20-1, TRBJ2-1)
CSAPPRLAGTRYNEQFF

SEQ ID NO: 458079 - protein, 12 aa, Homo sapiens
  CDR3 for alpha chain variable domain of TCR clone 229040 (TRAV3, TRAJ43)
CAVRDPNNDMRF

SEQ ID NO: 458080 - protein, 12 aa, Homo sapiens
  CDR3 for beta chain variable domain of TCR clone 229040 (TRBV3-1, TRBJ2-3)
CASSQDRDTQYF

SEQ ID NO: 458081 - protein, 16 aa, Homo sapiens
  CDR3 for alpha chain variable domain of TCR clone 229041 (TRAV26-1, TRAJ44)
IASSESRTGTASKLTL

SEQ ID NO: 458082 - protein, 13 aa, Homo sapiens
  CDR3 for beta chain variable domain of TCR clone 229041 (TRBV7-2, TRBJ1-5)
CASSFARNQPQHF

SEQ ID NO: 458083 - protein, 13 aa, Homo sapiens
  CDR3 for alpha chain variable domain of TCR clone 229042 (TRAV5, TRAJ13)
CAESLGGYQKVTF

SEQ ID NO: 458084 - protein, 15 aa, Homo sapiens
  CDR3 for beta chain variable domain of TCR clone 229042 (TRBV9, TRBJ1-6)
CASSVAGTGDSPLHF

SEQ ID NO: 458085 - protein, 14 aa, Homo sapiens
  CDR3 for alpha chain variable domain of TCR clone 229043 (TRAV1-2, TRAJ16)
CPVNRFSDGQKLLF

SEQ ID NO: 458086 - protein, 13 aa, Homo sapiens
  CDR3 for beta chain variable domain of TCR clone 229043 (TRBV9, TRBJ2-1)
CASSPSGGSEQFF

SEQ ID NO: 458087 - protein, 16 aa, Homo sapiens
  CDR3 for alpha chain variable domain of TCR clone 229044 (TRAV12-3, TRAJ53)
CAMSPGSGGSNYKLTF

SEQ ID NO: 458088 - protein, 15 aa, Homo sapiens
  CDR3 for beta chain variable domain of TCR clone 229044 (TRBV7-9, TRBJ2-7)
CASSLDLDRGYEQYF

SEQ ID NO: 458089 - protein, 13 aa, Homo sapiens
  CDR3 for alpha chain variable domain of TCR clone 229045 (TRAV8-3, TRAJ22)
CAVIQGSARQLTF

SEQ ID NO: 458090 - protein, 15 aa, Homo sapiens
  CDR3 for beta chain variable domain of TCR clone 229045 (TRBV20-1, TRBJ2-7)
CSARDRVSGMDEQYF

SEQ ID NO: 458091 - protein, 13 aa, Homo sapiens
  CDR3 for alpha chain variable domain of TCR clone 229046 (TRAV12-1, TRAJ49)
CVVNTNTGNQFYF

SEQ ID NO: 458092 - protein, 15 aa, Homo sapiens
  CDR3 for beta chain variable domain of TCR clone 229046 (TRBV18, TRBJ1-2)
CASSPGNGLGYGYTF

SEQ ID NO: 458093 - protein, 10 aa, Homo sapiens
  CDR3 for alpha chain variable domain of TCR clone 229047 (TRAV21, TRAJ49)
CAVTGNQCYF

SEQ ID NO: 458094 - protein, 15 aa, Homo sapiens
  CDR3 for beta chain variable domain of TCR clone 229047 (TRBV6-1, TRBJ2-3)
CASTTLAGHTDTQYF

SEQ ID NO: 458095 - protein, 17 aa, Homo sapiens
  CDR3 for alpha chain variable domain of TCR clone 229048 (TRAV13-1, TRAJ52)
CAASSGAGGTSYGKLTF

SEQ ID NO: 458096 - protein, 15 aa, Homo sapiens
  CDR3 for beta chain variable domain of TCR clone 229048 (TRBV19, TRBJ1-1)
CASTSGQIQNTEAFF

SEQ ID NO: 458097 - protein, 15 aa, Homo sapiens
  CDR3 for alpha chain variable domain of TCR clone 229049 (TRAV17, TRAJ57)
CATCPSQVGSEKLVF

SEQ ID NO: 458098 - protein, 14 aa, Homo sapiens
  CDR3 for beta chain variable domain of TCR clone 229049 (TRBV12-5, TRBJ2-5)
CASGSRTHQETQYF

SEQ ID NO: 458099 - protein, 12 aa, Homo sapiens
  CDR3 for alpha chain variable domain of TCR clone 229050 (TRAV6, TRAJ27)
CSRIRGAGKSTF

SEQ ID NO: 458100 - protein, 12 aa, Homo sapiens
  CDR3 for beta chain variable domain of TCR clone 229050 (TRBV7-8, TRBJ2-7)
CASSLGDREQYF

SEQ ID NO: 458101 - protein, 16 aa, Homo sapiens
  CDR3 for alpha chain variable domain of TCR clone 229051 (TRAV17, TRAJ28)
CDTASVSGAGSYQLTF

SEQ ID NO: 458102 - protein, 11 aa, Homo sapiens
  CDR3 for beta chain variable domain of TCR clone 229051 (TRBV7-9, TRBJ2-5)
CASSLGETQYF

SEQ ID NO: 458103 - protein, 14 aa, Homo sapiens
  CDR3 for alpha chain variable domain of TCR clone 229052 (TRAV8-4, TRAJ54)
CAVSEVVGAQKLVF

SEQ ID NO: 458104 - protein, 13 aa, Homo sapiens
  CDR3 for beta chain variable domain of TCR clone 229052 (TRBV27, TRBJ2-7)
CASSFVSSYEQYF

SEQ ID NO: 458105 - protein, 14 aa, Homo sapiens
  CDR3 for alpha chain variable domain of TCR clone 229053 (TRAV1-2, TRAJ8)
CAVREDTGFQKLVF

SEQ ID NO: 458106 - protein, 15 aa, Homo sapiens
  CDR3 for beta chain variable domain of TCR clone 229053 (TRBV6-3, TRBJ2-7)
CASSSPPTVFYEQYF

SEQ ID NO: 458107 - protein, 14 aa, Homo sapiens
  CDR3 for alpha chain variable domain of TCR clone 229054 (TRAV8-4, TRAJ9)
CAVRINTGGFETIL

SEQ ID NO: 458108 - protein, 15 aa, Homo sapiens
  CDR3 for beta chain variable domain of TCR clone 229054 (TRBV10-2, TRBJ2-6)
CASSEQGTGANVLTF

SEQ ID NO: 458109 - protein, 12 aa, Homo sapiens
  CDR3 for alpha chain variable domain of TCR clone 229055 (TRAV21, TRAJ49)
CAVTNTGNQFYF

SEQ ID NO: 458110 - protein, 17 aa, Homo sapiens
  CDR3 for beta chain variable domain of TCR clone 229055 (TRBV13, TRBJ2-3)
CASRLSRVAGGRNTQYF

SEQ ID NO: 458111 - protein, 15 aa, Homo sapiens
  CDR3 for alpha chain variable domain of TCR clone 229056 (TRAV12-1, TRAJ44)
CVVFVNTGTARKLTF

SEQ ID NO: 458112 - protein, 15 aa, Homo sapiens
  CDR3 for beta chain variable domain of TCR clone 229056 (TRBV6-3, TRBJ2-7)
CASSSPGTVFYEQYF

SEQ ID NO: 458113 - protein, 12 aa, Homo sapiens
  CDR3 for alpha chain variable domain of TCR clone 229057 (TRAV12-3, TRAJ17)
CAMTLTGNKLTF

SEQ ID NO: 458114 - protein, 14 aa, Homo sapiens
  CDR3 for beta chain variable domain of TCR clone 229057 (TRBV12-4, TRBJ1-1)
FASSFSQMNTEAFF

SEQ ID NO: 458115 - protein, 14 aa, Homo sapiens
  CDR3 for alpha chain variable domain of TCR clone 229058 (TRAV1-2, TRAJ16)
CAVNRFSDGQKLLF

SEQ ID NO: 458116 - protein, 12 aa, Homo sapiens
  CDR3 for beta chain variable domain of TCR clone 229058 (TRBV28, TRBJ1-6)
CASLSVPGPLHF

SEQ ID NO: 458117 - protein, 12 aa, Homo sapiens
  CDR3 for alpha chain variable domain of TCR clone 229059 (TRAV12-1, TRAJ34)
CVVAGATDKLIF

SEQ ID NO: 458118 - protein, 16 aa, Homo sapiens
  CDR3 for beta chain variable domain of TCR clone 229059 (TRBV12-4, TRBJ1-5)
CASSSGPRGSNQPQHF

SEQ ID NO: 458119 - protein, 15 aa, Homo sapiens
  CDR3 for alpha chain variable domain of TCR clone 229060 (TRAV25, TRAJ53)
CPTSNCGGSNYKLTF

SEQ ID NO: 458120 - protein, 14 aa, Homo sapiens
  CDR3 for beta chain variable domain of TCR clone 229060 (TRBV11-2, TRBJ2-3)
CASSRLARTDTQYF

SEQ ID NO: 458121 - protein, 14 aa, Homo sapiens
  CDR3 for alpha chain variable domain of TCR clone 229061 (TRAV14/DV4, TRAJ42)
CPRGSVRSQGNLIF

SEQ ID NO: 458122 - protein, 15 aa, Homo sapiens
  CDR3 for beta chain variable domain of TCR clone 229061 (TRBV13, TRBJ1-3)
CASSSQGTSGNTIYF

SEQ ID NO: 458123 - protein, 12 aa, Homo sapiens
  CDR3 for alpha chain variable domain of TCR clone 229062 (TRAV13-1, TRAJ21)
CAAKEGFNKFYF

SEQ ID NO: 458124 - protein, 14 aa, Homo sapiens
  CDR3 for beta chain variable domain of TCR clone 229062 (TRBV11-2, TRBJ2-7)
CASSLGAGAYEQYF

SEQ ID NO: 458125 - protein, 13 aa, Homo sapiens
  CDR3 for alpha chain variable domain of TCR clone 229063 (TRAV1-2, TRAJ20)
CAVRDGNDYKLSF

SEQ ID NO: 458126 - protein, 14 aa, Homo sapiens
  CDR3 for beta chain variable domain of TCR clone 229063 (TRBV7-2, TRBJ2-3)
CASSLGGGEIYAVF

SEQ ID NO: 458127 - protein, 12 aa, Homo sapiens
  CDR3 for alpha chain variable domain of TCR clone 229064 (TRAV30, TRAJ43)
CGTEERGNDMRF

SEQ ID NO: 458128 - protein, 15 aa, Homo sapiens
  CDR3 for beta chain variable domain of TCR clone 229064 (TRBV3-1, TRBJ2-7)
CASSQEWTGSYEQYF

SEQ ID NO: 458129 - protein, 13 aa, Homo sapiens
  CDR3 for alpha chain variable domain of TCR clone 229065 (TRAV16, TRAJ5)
CALTNTGRRALTF

SEQ ID NO: 458130 - protein, 15 aa, Homo sapiens
  CDR3 for beta chain variable domain of TCR clone 229065 (TRBV11-2, TRBJ2-4)
CASSRPGTGINIQCF

SEQ ID NO: 458131 - protein, 11 aa, Homo sapiens
  CDR3 for alpha chain variable domain of TCR clone 229066 (TRAV12-2, TRAJ54)
CAVVGAQKLVF

SEQ ID NO: 458132 - protein, 13 aa, Homo sapiens
  CDR3 for beta chain variable domain of TCR clone 229066 (TRBV12-4, TRBJ2-1)
CASSPSDGNEQVF

SEQ ID NO: 458133 - protein, 12 aa, Homo sapiens
  CDR3 for alpha chain variable domain of TCR clone 229067 (TRAV3, TRAJ43)
CAVRDPNNDMRF

SEQ ID NO: 458134 - protein, 10 aa, Homo sapiens
  CDR3 for beta chain variable domain of TCR clone 229067 (TRBV27, TRBJ1-5)
CASSLGTGFD

SEQ ID NO: 458135 - protein, 12 aa, Homo sapiens
  CDR3 for alpha chain variable domain of TCR clone 229068 (TRAV21, TRAJ6)
CAVKVGSYIPTF

SEQ ID NO: 458136 - protein, 13 aa, Homo sapiens
  CDR3 for beta chain variable domain of TCR clone 229068 (TRBV11-2, TRBJ1-1)
CASSFTENTEAFF

SEQ ID NO: 458137 - protein, 13 aa, Homo sapiens
  CDR3 for alpha chain variable domain of TCR clone 229069 (TRAV8-3, TRAJ48)
CCGCNFGNEKLTF

SEQ ID NO: 458138 - protein, 15 aa, Homo sapiens
  CDR3 for beta chain variable domain of TCR clone 229069 (TRBV6-3, TRBJ2-7)
CASSSPGTVFYEQYF

SEQ ID NO: 458139 - protein, 14 aa, Homo sapiens
  CDR3 for alpha chain variable domain of TCR clone 229070 (TRAV14/DV4, TRAJ34)
CAMREGRPQRQAHL

SEQ ID NO: 458140 - protein, 14 aa, Homo sapiens
  CDR3 for beta chain variable domain of TCR clone 229070 (TRBV19, TRBJ2-1)
CASPTFVLSGEQFF

SEQ ID NO: 458141 - protein, 13 aa, Homo sapiens
  CDR3 for alpha chain variable domain of TCR clone 229071 (TRAV13-1, TRAJ5)
CAARVTGRRALTF

SEQ ID NO: 458142 - protein, 12 aa, Homo sapiens
  CDR3 for beta chain variable domain of TCR clone 229071 (TRBV3-1, TRBJ2-5)
CARSQRGETQYF

SEQ ID NO: 458143 - protein, 12 aa, Homo sapiens
  CDR3 for alpha chain variable domain of TCR clone 229072 (TRAV12-1, TRAJ6)
CVVSERSYIPTF

SEQ ID NO: 458144 - protein, 14 aa, Homo sapiens
  CDR3 for beta chain variable domain of TCR clone 229072 (TRBV19, TRBJ1-1)
CASSKVTGVTEAFF

SEQ ID NO: 458145 - protein, 14 aa, Homo sapiens
  CDR3 for alpha chain variable domain of TCR clone 229073 (TRAV38-2/DV8, TRAJ54)
AAMYQIKGAQKLVF

SEQ ID NO: 458146 - protein, 17 aa, Homo sapiens
  CDR3 for beta chain variable domain of TCR clone 229073 (TRBV6-1, TRBJ2-3)
CASSEALRLISTDTQYF

SEQ ID NO: 458147 - protein, 11 aa, Homo sapiens
  CDR3 for alpha chain variable domain of TCR clone 229074 (TRAV12-3, TRAJ49)
CAANTGNQFYF

SEQ ID NO: 458148 - protein, 13 aa, Homo sapiens
  CDR3 for beta chain variable domain of TCR clone 229074 (TRBV19, TRBJ2-7)
CASSPRQSYEQYF

SEQ ID NO: 458149 - protein, 14 aa, Homo sapiens
  CDR3 for alpha chain variable domain of TCR clone 229075 (TRAV12-3, TRAJ10)
SHLPLTGGGNKLTF

SEQ ID NO: 458150 - protein, 13 aa, Homo sapiens
  CDR3 for beta chain variable domain of TCR clone 229075 (TRBV18, TRBJ1-1)
CASSGGRNTEAFF

SEQ ID NO: 458151 - protein, 14 aa, Homo sapiens
  CDR3 for alpha chain variable domain of TCR clone 229076 (TRAV17, TRAJ57)
CATDPQGGSEKLVF

SEQ ID NO: 458152 - protein, 16 aa, Homo sapiens
  CDR3 for beta chain variable domain of TCR clone 229076 (TRBV7-3, TRBJ2-1)
CASSLSSGGGAKQQFF

SEQ ID NO: 458153 - protein, 17 aa, Homo sapiens
  CDR3 for alpha chain variable domain of TCR clone 229077 (TRAV3, TRAJ6)
CAVRDGPRAGGSYIPTF

SEQ ID NO: 458154 - protein, 14 aa, Homo sapiens
  CDR3 for beta chain variable domain of TCR clone 229077 (TRBV3-1, TRBJ2-3)
CASSQLAGTDTQYF

SEQ ID NO: 458155 - protein, 14 aa, Homo sapiens
  CDR3 for alpha chain variable domain of TCR clone 229078 (TRAV23/DV6, TRAJ37)
CAASTSSNTGKLIF

SEQ ID NO: 458156 - protein, 12 aa, Homo sapiens
  CDR3 for beta chain variable domain of TCR clone 229078 (TRBV11-2, TRBJ2-2)
CASSLGGGELFF

SEQ ID NO: 458157 - protein, 13 aa, Homo sapiens
  CDR3 for alpha chain variable domain of TCR clone 229079 (TRAV12-3, TRAJ13)
CAMSSGGYQKVTF

SEQ ID NO: 458158 - protein, 13 aa, Homo sapiens
  CDR3 for beta chain variable domain of TCR clone 229079 (TRBV20-1, TRBJ1-1)
CSAPPGGHAEAFF

SEQ ID NO: 458159 - protein, 14 aa, Homo sapiens
  CDR3 for alpha chain variable domain of TCR clone 229080 (TRAV12-1, TRAJ30)
CVVNIGGRDDKIIF

SEQ ID NO: 458160 - protein, 15 aa, Homo sapiens
  CDR3 for beta chain variable domain of TCR clone 229080 (TRBV18, TRBJ1-2)
CASSPANTPNYGYTF

SEQ ID NO: 458161 - protein, 12 aa, Homo sapiens
  CDR3 for alpha chain variable domain of TCR clone 229081 (TRAV1-2, TRAJ26)
CAVRYYGQNFVF

SEQ ID NO: 458162 - protein, 14 aa, Homo sapiens
  CDR3 for beta chain variable domain of TCR clone 229081 (TRBV11-1, TRBJ2-7)
CASSFRQGSYDQYF

SEQ ID NO: 458163 - protein, 17 aa, Homo sapiens
  CDR3 for alpha chain variable domain of TCR clone 229082 (TRAV17, TRAJ52)
CATDANAGGTSYGKLTF

SEQ ID NO: 458164 - protein, 13 aa, Homo sapiens
  CDR3 for beta chain variable domain of TCR clone 229082 (TRBV11-2, TRBJ2-1)
CASSLDLVNEQFF

SEQ ID NO: 458165 - protein, 14 aa, Homo sapiens
  CDR3 for alpha chain variable domain of TCR clone 229083 (TRAV27, TRAJ22)
CAGVGPGSARQLTF

SEQ ID NO: 458166 - protein, 16 aa, Homo sapiens
  CDR3 for beta chain variable domain of TCR clone 229083 (TRBV9, TRBJ2-7)
CASSVGLGGGTYEQYF

SEQ ID NO: 458167 - protein, 16 aa, Homo sapiens
  CDR3 for alpha chain variable domain of TCR clone 229084 (TRAV30, TRAJ24)
CGTEIVDADSWGKCQF

SEQ ID NO: 458168 - protein, 17 aa, Homo sapiens
  CDR3 for beta chain variable domain of TCR clone 229084 (TRBV7-8, TRBJ2-6)
CASSAGTGGAGANVLTF

SEQ ID NO: 458169 - protein, 14 aa, Homo sapiens
  CDR3 for alpha chain variable domain of TCR clone 229085 (TRAV16, TRAJ37)
CALDISGNTCKLIF

SEQ ID NO: 458170 - protein, 14 aa, Homo sapiens
  CDR3 for beta chain variable domain of TCR clone 229085 (TRBV7-6, TRBJ2-7)
CASGFRQGADEQYF

SEQ ID NO: 458171 - protein, 14 aa, Homo sapiens
  CDR3 for alpha chain variable domain of TCR clone 229086 (TRAV12-2, TRAJ45)
CALPERGGADGLTF

SEQ ID NO: 458172 - protein, 14 aa, Homo sapiens
  CDR3 for beta chain variable domain of TCR clone 229086 (TRBV18, TRBJ1-5)
CASSPGNSNQPQDF

SEQ ID NO: 458173 - protein, 15 aa, Homo sapiens
  CDR3 for alpha chain variable domain of TCR clone 229087 (TRAV8-3, TRAJ15)
CAVGAPNQAGTALIF

SEQ ID NO: 458174 - protein, 14 aa, Homo sapiens
  CDR3 for beta chain variable domain of TCR clone 229087 (TRBV20-1, TRBJ2-1)
GSPNDEASYNEQFF

SEQ ID NO: 458175 - protein, 14 aa, Homo sapiens
  CDR3 for alpha chain variable domain of TCR clone 229088 (TRAV8-4, TRAJ16)
CAVSPVGRWPEAAL

SEQ ID NO: 458176 - protein, 17 aa, Homo sapiens
  CDR3 for beta chain variable domain of TCR clone 229088 (TRBV11-3, TRBJ2-7)
CASSPDQRAPTSSTSGR

SEQ ID NO: 458177 - protein, 14 aa, Homo sapiens
  CDR3 for alpha chain variable domain of TCR clone 229089 (TRAV12-2, TRAJ6)
CAVIASGGSYIPTF

SEQ ID NO: 458178 - protein, 13 aa, Homo sapiens
  CDR3 for beta chain variable domain of TCR clone 229089 (TRBV4-2, TRBJ2-2)
CASEDRGTGELFF

SEQ ID NO: 458179 - protein, 14 aa, Homo sapiens
  CDR3 for alpha chain variable domain of TCR clone 229090 (TRAV17, TRAJ11)
CATDTSRGYSTLTF

SEQ ID NO: 458180 - protein, 14 aa, Homo sapiens
  CDR3 for beta chain variable domain of TCR clone 229090 (TRBV7-2, TRBJ2-7)
CASSPKTSFYEQYF

SEQ ID NO: 458181 - protein, 11 aa, Homo sapiens
  CDR3 for alpha chain variable domain of TCR clone 229091 (TRAV3, TRAJ21)
CAVGKVNKFYF

SEQ ID NO: 458182 - protein, 16 aa, Homo sapiens
  CDR3 for beta chain variable domain of TCR clone 229091 (TRBV19, TRBJ2-1)
CASSKAGPSSYNEQFF

SEQ ID NO: 458183 - protein, 18 aa, Homo sapiens
  CDR3 for alpha chain variable domain of TCR clone 229092 (TRAV21, TRAJ52)
CAVRPSPAGGTSYGKLTF

SEQ ID NO: 458184 - protein, 13 aa, Homo sapiens
  CDR3 for beta chain variable domain of TCR clone 229092 (TRBV7-3, TRBJ1-1)
CASSQNWGAEAFF

SEQ ID NO: 458185 - protein, 13 aa, Homo sapiens
  CDR3 for alpha chain variable domain of TCR clone 229093 (TRAV13-1, TRAJ5)
CAAEHTGRRALTF

SEQ ID NO: 458186 - protein, 13 aa, Homo sapiens
  CDR3 for beta chain variable domain of TCR clone 229093 (TRBV7-3, TRBJ1-1)
CASSQDWGAEAFF

SEQ ID NO: 458187 - protein, 11 aa, Homo sapiens
  CDR3 for alpha chain variable domain of TCR clone 229094 (TRAV3, TRAJ21)
CAVGNLNKFYF

SEQ ID NO: 458188 - protein, 13 aa, Homo sapiens
  CDR3 for beta chain variable domain of TCR clone 229094 (TRBV12-5, TRBJ2-3)
CASGDRQSDTQYF

SEQ ID NO: 458189 - protein, 12 aa, Homo sapiens
  CDR3 for alpha chain variable domain of TCR clone 229095 (TRAV1-1, TRAJ24)
YAVRGSWGKFQF

SEQ ID NO: 458190 - protein, 14 aa, Homo sapiens
  CDR3 for beta chain variable domain of TCR clone 229095 (TRBV20-1, TRBJ2-3)
CSARGGTSTDTQYF

SEQ ID NO: 458191 - protein, 13 aa, Homo sapiens
  CDR3 for alpha chain variable domain of TCR clone 229096 (TRAV12-3, TRAJ54)
CVLVPQGAQKLVF

SEQ ID NO: 458192 - protein, 15 aa, Homo sapiens
  CDR3 for beta chain variable domain of TCR clone 229096 (TRBV4-1, TRBJ2-2)
CASSQDSRGTGVLFF

SEQ ID NO: 458193 - protein, 11 aa, Homo sapiens
  CDR3 for alpha chain variable domain of TCR clone 229097 (TRAV26-1, TRAJ37)
CIVRVGRKLIF

SEQ ID NO: 458194 - protein, 15 aa, Homo sapiens
  CDR3 for beta chain variable domain of TCR clone 229097 (TRBV2, TRBJ2-1)
CASSELAGSYNEQFF

SEQ ID NO: 458195 - protein, 15 aa, Homo sapiens
  CDR3 for alpha chain variable domain of TCR clone 229098 (TRAV12-3, TRAJ13)
CAMSARSGGYQKVTF

SEQ ID NO: 458196 - protein, 18 aa, Homo sapiens
  CDR3 for beta chain variable domain of TCR clone 229098 (TRBV3-1, TRBJ2-7)
CASSQEGGGRAWHYEQYF

SEQ ID NO: 458197 - protein, 15 aa, Homo sapiens
  CDR3 for alpha chain variable domain of TCR clone 229099 (TRAV2, TRAJ13)
CATPSYSGGYQKVTF

SEQ ID NO: 458198 - protein, 13 aa, Homo sapiens
  CDR3 for beta chain variable domain of TCR clone 229099 (TRBV12-4, TRBJ1-2)
CASSSGLTVISTF

SEQ ID NO: 458199 - protein, 10 aa, Homo sapiens
  CDR3 for alpha chain variable domain of TCR clone 229100 (TRAV12-3, TRAJ49)
CAMNDDQFYF

SEQ ID NO: 458200 - protein, 13 aa, Homo sapiens
  CDR3 for beta chain variable domain of TCR clone 229100 (TRBV12-4, TRBJ1-1)
CASRPGTGWEAFF

SEQ ID NO: 458201 - protein, 14 aa, Homo sapiens
  CDR3 for alpha chain variable domain of TCR clone 229101 (TRAV21, TRAJ21)
CAVKGVGNFNKFYF

SEQ ID NO: 458202 - protein, 13 aa, Homo sapiens
  CDR3 for beta chain variable domain of TCR clone 229101 (TRBV18, TRBJ1-1)
CASSPETKPEAFF

SEQ ID NO: 458203 - protein, 16 aa, Homo sapiens
  CDR3 for alpha chain variable domain of TCR clone 229102 (TRAV12-2, TRAJ32)
CAMNMNYGGATNKLIF

SEQ ID NO: 458204 - protein, 16 aa, Homo sapiens
  CDR3 for beta chain variable domain of TCR clone 229102 (TRBV7-8, TRBJ2-3)
CASSTEGQRETDTQYF

SEQ ID NO: 458205 - protein, 16 aa, Homo sapiens
  CDR3 for alpha chain variable domain of TCR clone 229103 (TRAV30, TRAJ24)
CGTEIVDADSWGEFQF

SEQ ID NO: 458206 - protein, 16 aa, Homo sapiens
  CDR3 for beta chain variable domain of TCR clone 229103 (TRBV7-3, TRBJ2-2)
CASSLKRGTLSGELFF

SEQ ID NO: 458207 - protein, 13 aa, Homo sapiens
  CDR3 for alpha chain variable domain of TCR clone 229104 (TRAV16, TRAJ28)
CALTGAGSYQLTC

SEQ ID NO: 458208 - protein, 16 aa, Homo sapiens
  CDR3 for beta chain variable domain of TCR clone 229104 (TRBV28, TRBJ1-5)
CASSLTGQGWNQPQHF

SEQ ID NO: 458209 - protein, 14 aa, Homo sapiens
  CDR3 for alpha chain variable domain of TCR clone 229105 (TRAV35, TRAJ40)
CAGSTTSGTYKYIF

SEQ ID NO: 458210 - protein, 13 aa, Homo sapiens
  CDR3 for beta chain variable domain of TCR clone 229105 (TRBV20-1, TRBJ1-6)
CSAPLGVGSPPHF

SEQ ID NO: 458211 - protein, 14 aa, Homo sapiens
  CDR3 for alpha chain variable domain of TCR clone 229106 (TRAV25, TRAJ22)
CAVRSSGSARQLTF

SEQ ID NO: 458212 - protein, 16 aa, Homo sapiens
  CDR3 for beta chain variable domain of TCR clone 229106 (TRBV4-2, TRBJ1-1)
CASSPAPGRAAPEAFF

SEQ ID NO: 458213 - protein, 14 aa, Homo sapiens
  CDR3 for alpha chain variable domain of TCR clone 229107 (TRAV1-2, TRAJ8)
CAVREDTGFQKLVF

SEQ ID NO: 458214 - protein, 16 aa, Homo sapiens
  CDR3 for beta chain variable domain of TCR clone 229107 (TRBV4-1, TRBJ2-7)
CASSQEWTSGPLEQYF

SEQ ID NO: 458215 - protein, 14 aa, Homo sapiens
  CDR3 for alpha chain variable domain of TCR clone 229108 (TRAV12-1, TRAJ12)
CVVNRPDSSYKLIF

SEQ ID NO: 458216 - protein, 11 aa, Homo sapiens
  CDR3 for beta chain variable domain of TCR clone 229108 (TRBV11-2, TRBJ1-1)
CASSINTEAFF

SEQ ID NO: 458217 - protein, 16 aa, Homo sapiens
  CDR3 for alpha chain variable domain of TCR clone 229109 (TRAV16, TRAJ21)
CACGWATTPTNFTLYL

SEQ ID NO: 458218 - protein, 15 aa, Homo sapiens
  CDR3 for beta chain variable domain of TCR clone 229109 (TRBV19, TRBJ2-1)
CASSIQATSYNEQFF

SEQ ID NO: 458219 - protein, 16 aa, Homo sapiens
  CDR3 for alpha chain variable domain of TCR clone 229110 (TRAV39, TRAJ53)
CAVDAGSGGSNYKLTF

SEQ ID NO: 458220 - protein, 16 aa, Homo sapiens
  CDR3 for beta chain variable domain of TCR clone 229110 (TRBV12-4, TRBJ2-2)
CASSFWILGNTGELFF

SEQ ID NO: 458221 - protein, 20 aa, Homo sapiens
  CDR3 for alpha chain variable domain of TCR clone 229111 (TRAV12-1, TRAJ42)
GSVIQPPTSVNGGSQGNLIF

SEQ ID NO: 458222 - protein, 18 aa, Homo sapiens
  CDR3 for beta chain variable domain of TCR clone 229111 (TRBV11-2, TRBJ2-3)
CASSLGGASRGAPNTQYF

SEQ ID NO: 458223 - protein, 16 aa, Homo sapiens
  CDR3 for alpha chain variable domain of TCR clone 229112 (TRAV26-1, )
CIEIQNPDPAVYQLRD

SEQ ID NO: 458224 - protein, 19 aa, Homo sapiens
  CDR3 for beta chain variable domain of TCR clone 229112 (TRBV19, TRBJ2-5)
CASSIGQVTDFFLGETQYF

SEQ ID NO: 458225 - protein, 16 aa, Homo sapiens
  CDR3 for alpha chain variable domain of TCR clone 229113 (TRAV3, TRAJ10)
CAVSDMRAGGGNKLTF

SEQ ID NO: 458226 - protein, 14 aa, Homo sapiens
  CDR3 for beta chain variable domain of TCR clone 229113 (TRBV25-1, TRBJ1-1)
CASTHLGGNTEAFF

SEQ ID NO: 458227 - protein, 17 aa, Homo sapiens
  CDR3 for alpha chain variable domain of TCR clone 229114 (TRAV12-3, TRAJ6)
CAMSARGGEGGSYIPTF

SEQ ID NO: 458228 - protein, 15 aa, Homo sapiens
  CDR3 for beta chain variable domain of TCR clone 229114 (TRBV9, TRBJ1-6)
CASSVAGTGDSPLHF

SEQ ID NO: 458229 - protein, 13 aa, Homo sapiens
  CDR3 for alpha chain variable domain of TCR clone 229115 (TRAV21, TRAJ27)
CAARPGHAGKSTF

SEQ ID NO: 458230 - protein, 15 aa, Homo sapiens
  CDR3 for beta chain variable domain of TCR clone 229115 (TRBV19, TRBJ2-5)
CASSIGGGPRETQYF

SEQ ID NO: 458231 - protein, 15 aa, Homo sapiens
  CDR3 for alpha chain variable domain of TCR clone 229116 (TRAV8-4, TRAJ40)
CAVSDDTSGTYTYIF

SEQ ID NO: 458232 - protein, 11 aa, Homo sapiens
  CDR3 for beta chain variable domain of TCR clone 229116 (TRBV19, TRBJ1-2)
CASSISSGYTF

SEQ ID NO: 458233 - protein, 15 aa, Homo sapiens
  CDR3 for alpha chain variable domain of TCR clone 229117 (TRAV8-4, TRAJ3)
CAVTGESLVKQCFQD

SEQ ID NO: 458234 - protein, 16 aa, Homo sapiens
  CDR3 for beta chain variable domain of TCR clone 229117 (TRBV4-2, TRBJ1-1)
CASSQAGFGMNTEAFF

SEQ ID NO: 458235 - protein, 13 aa, Homo sapiens
  CDR3 for alpha chain variable domain of TCR clone 229118 (TRAV22, TRAJ29)
CAVGGSGNTPLVF

SEQ ID NO: 458236 - protein, 14 aa, Homo sapiens
  CDR3 for beta chain variable domain of TCR clone 229118 (TRBV7-7, TRBJ2-2)
CATRQDSDTGELFF

SEQ ID NO: 458237 - protein, 12 aa, Homo sapiens
  CDR3 for alpha chain variable domain of TCR clone 229119 (TRAV12-3, TRAJ17)
CAMTLTGNKLTF

SEQ ID NO: 458238 - protein, 12 aa, Homo sapiens
  CDR3 for beta chain variable domain of TCR clone 229119 (TRBV11-2, TRBJ2-4)
CASSSASGSEYF

SEQ ID NO: 458239 - protein, 13 aa, Homo sapiens
  CDR3 for alpha chain variable domain of TCR clone 229120 (TRAV4, TRAJ42)
CLVGGGSQGNLIF

SEQ ID NO: 458240 - protein, 14 aa, Homo sapiens
  CDR3 for beta chain variable domain of TCR clone 229120 (TRBV18, TRBJ2-7)
CASSPRGGAYEQYF

SEQ ID NO: 458241 - protein, 13 aa, Homo sapiens
  CDR3 for alpha chain variable domain of TCR clone 229121 (TRAV20, TRAJ40)
CAVRTSGTYKYIF

SEQ ID NO: 458242 - protein, 13 aa, Homo sapiens
  CDR3 for beta chain variable domain of TCR clone 229121 (TRBV19, TRBJ1-1)
CASSITGESEAFF

SEQ ID NO: 458243 - protein, 14 aa, Homo sapiens
  CDR3 for alpha chain variable domain of TCR clone 229122 (TRAV12-1, TRAJ8)
CVVNSNTGFQKLVF

SEQ ID NO: 458244 - protein, 16 aa, Homo sapiens
  CDR3 for beta chain variable domain of TCR clone 229122 (TRBV20-1, TRBJ2-2)
CSARDGRVGLTGELFF

SEQ ID NO: 458245 - protein, 14 aa, Homo sapiens
  CDR3 for alpha chain variable domain of TCR clone 229123 (TRAV10, TRAJ29)
CVVSANSGNTPLVF

SEQ ID NO: 458246 - protein, 16 aa, Homo sapiens
  CDR3 for beta chain variable domain of TCR clone 229123 (TRBV29-1, TRBJ2-7)
CSVADAEDGTAYEQYF

SEQ ID NO: 458247 - protein, 19 aa, Homo sapiens
  CDR3 for alpha chain variable domain of TCR clone 229124 (TRAV1-2, TRAJ26)
CLLPLCCERHDNYGQNFVF

SEQ ID NO: 458248 - protein, 13 aa, Homo sapiens
  CDR3 for beta chain variable domain of TCR clone 229124 (TRBV19, TRBJ1-2)
CASSQGQVYGYTF

SEQ ID NO: 458249 - protein, 15 aa, Homo sapiens
  CDR3 for alpha chain variable domain of TCR clone 229125 (TRAV27, TRAJ38)
CAARRNAGNNRTLSW

SEQ ID NO: 458250 - protein, 13 aa, Homo sapiens
  CDR3 for beta chain variable domain of TCR clone 229125 (TRBV20-1, TRBJ1-1)
CSARAGGNTEAFF

SEQ ID NO: 458251 - protein, 13 aa, Homo sapiens
  CDR3 for alpha chain variable domain of TCR clone 229126 (TRAV12-1, TRAJ34)
CVVTGYNTDKLIF

SEQ ID NO: 458252 - protein, 15 aa, Homo sapiens
  CDR3 for beta chain variable domain of TCR clone 229126 (TRBV4-3, TRBJ2-1)
CASSQVLSSYNEQFF

SEQ ID NO: 458253 - protein, 16 aa, Homo sapiens
  CDR3 for alpha chain variable domain of TCR clone 229127 (TRAV4, TRAJ18)
CCVLLIGGSTLGRLYF

SEQ ID NO: 458254 - protein, 14 aa, Homo sapiens
  CDR3 for beta chain variable domain of TCR clone 229127 (TRBV27, TRBJ2-2)
CASRPGVNTGELFF

SEQ ID NO: 458255 - protein, 13 aa, Homo sapiens
  CDR3 for alpha chain variable domain of TCR clone 229128 (TRAV27, TRAJ49)
CAPRPYAGNQFYF

SEQ ID NO: 458256 - protein, 18 aa, Homo sapiens
  CDR3 for beta chain variable domain of TCR clone 229128 (TRBV7-3, TRBJ2-5)
CASSLGGAAQGRWETQCF

SEQ ID NO: 458257 - protein, 14 aa, Homo sapiens
  CDR3 for alpha chain variable domain of TCR clone 229129 (TRAV13-1, TRAJ44)
CAAKATGTASKLTF

SEQ ID NO: 458258 - protein, 13 aa, Homo sapiens
  CDR3 for beta chain variable domain of TCR clone 229129 (TRBV5-5, TRBJ1-2)
CASSFSRGEDYTF

SEQ ID NO: 458259 - protein, 17 aa, Homo sapiens
  CDR3 for alpha chain variable domain of TCR clone 229130 (TRAV3, TRAJ42)
CAVRDRDYGGSQGNLIF

SEQ ID NO: 458260 - protein, 18 aa, Homo sapiens
  CDR3 for beta chain variable domain of TCR clone 229130 (TRBV20-1, TRBJ2-3)
CSASGLGGGPGTTDTQYF

SEQ ID NO: 458261 - protein, 15 aa, Homo sapiens
  CDR3 for alpha chain variable domain of TCR clone 229131 (TRAV20, TRAJ24)
CAVQAAPDSWGKFKF

SEQ ID NO: 458262 - protein, 14 aa, Homo sapiens
  CDR3 for beta chain variable domain of TCR clone 229131 (TRBV20-1, TRBJ1-1)
CSARDRGQGSEAFF

SEQ ID NO: 458263 - protein, 15 aa, Homo sapiens
  CDR3 for alpha chain variable domain of TCR clone 229132 (TRAV20, TRAJ43)
CALQAGKSSNNDIRF

SEQ ID NO: 458264 - protein, 13 aa, Homo sapiens
  CDR3 for beta chain variable domain of TCR clone 229132 (TRBV27, TRBJ1-1)
CASSLSIGAEAFF

SEQ ID NO: 458265 - protein, 14 aa, Homo sapiens
  CDR3 for alpha chain variable domain of TCR clone 229133 (TRAV1-2, TRAJ16)
CAVNRFSDGQKLLF

SEQ ID NO: 458266 - protein, 14 aa, Homo sapiens
  CDR3 for beta chain variable domain of TCR clone 229133 (TRBV4-1, TRBJ2-2)
CASSQAVNTVELFF

SEQ ID NO: 458267 - protein, 15 aa, Homo sapiens
  CDR3 for alpha chain variable domain of TCR clone 229134 (TRAV38-1, TRAJ37)
CAFIFGSGNTGKPIF

SEQ ID NO: 458268 - protein, 15 aa, Homo sapiens
  CDR3 for beta chain variable domain of TCR clone 229134 (TRBV4-3, TRBJ2-7)
CASSQGGRGIYEQHF

SEQ ID NO: 458269 - protein, 14 aa, Homo sapiens
  CDR3 for alpha chain variable domain of TCR clone 229135 (TRAV4, TRAJ26)
CLVGDQGYCQNFVF

SEQ ID NO: 458270 - protein, 16 aa, Homo sapiens
  CDR3 for beta chain variable domain of TCR clone 229135 (TRBV2, TRBJ2-1)
CASSVGGSLSYNEQFF

SEQ ID NO: 458271 - protein, 16 aa, Homo sapiens
  CDR3 for alpha chain variable domain of TCR clone 229136 (TRAV30, TRAJ24)
CGTEIVGADSWGKFEF

SEQ ID NO: 458272 - protein, 14 aa, Homo sapiens
  CDR3 for beta chain variable domain of TCR clone 229136 (TRBV12-5, TRBJ2-5)
CASGSRTHQETQYF

SEQ ID NO: 458273 - protein, 14 aa, Homo sapiens
  CDR3 for alpha chain variable domain of TCR clone 229137 (TRAV17, TRAJ57)
CATDPQGGSEKLVF

SEQ ID NO: 458274 - protein, 18 aa, Homo sapiens
  CDR3 for beta chain variable domain of TCR clone 229137 (TRBV11-2, TRBJ2-3)
WASSLGGASRGAPNTQYF

SEQ ID NO: 458275 - protein, 18 aa, Homo sapiens
  CDR3 for alpha chain variable domain of TCR clone 229138 (TRAV12-3, TRAJ52)
CAMRRTNAGGTSYGKLTF

SEQ ID NO: 458276 - protein, 17 aa, Homo sapiens
  CDR3 for beta chain variable domain of TCR clone 229138 (TRBV7-3, TRBJ2-3)
CASSLRKRMRGADTQYF

SEQ ID NO: 458277 - protein, 14 aa, Homo sapiens
  CDR3 for alpha chain variable domain of TCR clone 229139 (TRAV30, TRAJ26)
CGTEIVSYGQNFVF

SEQ ID NO: 458278 - protein, 10 aa, Homo sapiens
  CDR3 for beta chain variable domain of TCR clone 229139 (TRBV7-9, TRBJ1-1)
CASSFTEAFF

SEQ ID NO: 458279 - protein, 14 aa, Homo sapiens
  CDR3 for alpha chain variable domain of TCR clone 229140 (TRAV1-1, TRAJ27)
CAVIYNTNAGKSTF

SEQ ID NO: 458280 - protein, 16 aa, Homo sapiens
  CDR3 for beta chain variable domain of TCR clone 229140 (TRBV19, TRBJ2-2)
CASSFPGQGLAGELFF

SEQ ID NO: 458281 - protein, 14 aa, Homo sapiens
  CDR3 for alpha chain variable domain of TCR clone 229141 (TRAV3, TRAJ36)
CAVRDGTGGNNLFF

SEQ ID NO: 458282 - protein, 16 aa, Homo sapiens
  CDR3 for beta chain variable domain of TCR clone 229141 (TRBV7-3, TRBJ2-5)
CASIRPGGSVQETQYF

SEQ ID NO: 458283 - protein, 13 aa, Homo sapiens
  CDR3 for alpha chain variable domain of TCR clone 229142 (TRAV2, TRAJ40)
CAVVTSGTYKYIS

SEQ ID NO: 458284 - protein, 14 aa, Homo sapiens
  CDR3 for beta chain variable domain of TCR clone 229142 (TRBV19, TRBJ2-1)
CASPTVGLSGEQFF

SEQ ID NO: 458285 - protein, 16 aa, Homo sapiens
  CDR3 for alpha chain variable domain of TCR clone 229143 (TRAV30, TRAJ24)
CGTEIVDADSWGKFQF

SEQ ID NO: 458286 - protein, 14 aa, Homo sapiens
  CDR3 for beta chain variable domain of TCR clone 229143 (TRBV20-1, TRBJ1-5)
CSARDDRGNQPQHF

SEQ ID NO: 458287 - protein, 14 aa, Homo sapiens
  CDR3 for alpha chain variable domain of TCR clone 229144 (TRAV17, TRAJ32)
CATDPGGATNKLIF

SEQ ID NO: 458288 - protein, 14 aa, Homo sapiens
  CDR3 for beta chain variable domain of TCR clone 229144 (TRBV2, TRBJ1-5)
CASSDNRGGQPQHF

SEQ ID NO: 458289 - protein, 13 aa, Homo sapiens
  CDR3 for alpha chain variable domain of TCR clone 229145 (TRAV38-1, TRAJ57)
CALVQGGSEKLVF

SEQ ID NO: 458290 - protein, 17 aa, Homo sapiens
  CDR3 for beta chain variable domain of TCR clone 229145 (TRBV29-1, TRBJ2-3)
CSVDSPPREARTDTQYF

SEQ ID NO: 458291 - protein, 14 aa, Homo sapiens
  CDR3 for alpha chain variable domain of TCR clone 229146 (TRAV16, TRAJ33)
CALSAMDSNYQLIW

SEQ ID NO: 458292 - protein, 13 aa, Homo sapiens
  CDR3 for beta chain variable domain of TCR clone 229146 (TRBV7-2, TRBJ2-7)
CASSSPSGSEQYF

SEQ ID NO: 458293 - protein, 14 aa, Homo sapiens
  CDR3 for alpha chain variable domain of TCR clone 229147 (TRAV3, TRAJ22)
CCERPGRFCRQLTF

SEQ ID NO: 458294 - protein, 16 aa, Homo sapiens
  CDR3 for beta chain variable domain of TCR clone 229147 (TRBV5-4, TRBJ2-3)
CASQQPGAGGADTQYF

SEQ ID NO: 458295 - protein, 14 aa, Homo sapiens
  CDR3 for alpha chain variable domain of TCR clone 229148 (TRAV13-2, TRAJ22)
CADGTLVSARQLTF

SEQ ID NO: 458296 - protein, 16 aa, Homo sapiens
  CDR3 for beta chain variable domain of TCR clone 229148 (TRBV19, TRBJ2-1)
CAGSSKGTRAYNEQFF

SEQ ID NO: 458297 - protein, 10 aa, Homo sapiens
  CDR3 for alpha chain variable domain of TCR clone 229149 (TRAV12-3, TRAJ49)
CAMNDDQFYF

SEQ ID NO: 458298 - protein, 15 aa, Homo sapiens
  CDR3 for beta chain variable domain of TCR clone 229149 (TRBV11-3, TRBJ2-2)
CASSLGGRPTGELFF

SEQ ID NO: 458299 - protein, 14 aa, Homo sapiens
  CDR3 for alpha chain variable domain of TCR clone 229150 (TRAV35, TRAJ22)
CAGLRPGSARQLTF

SEQ ID NO: 458300 - protein, 17 aa, Homo sapiens
  CDR3 for beta chain variable domain of TCR clone 229150 (TRBV19, TRBJ2-7)
CASSISFYDSYPYEQYF

SEQ ID NO: 458301 - protein, 17 aa, Homo sapiens
  CDR3 for alpha chain variable domain of TCR clone 229151 (TRAV23/DV6, TRAJ57)
CAASSTLSQGGSEKLVF

SEQ ID NO: 458302 - protein, 13 aa, Homo sapiens
  CDR3 for beta chain variable domain of TCR clone 229151 (TRBV20-1, TRBJ2-5)
CSAREAFQETQYF

SEQ ID NO: 458303 - protein, 15 aa, Homo sapiens
  CDR3 for alpha chain variable domain of TCR clone 229152 (TRAV35, TRAJ41)
CAGQLFSNSGYALNF

SEQ ID NO: 458304 - protein, 14 aa, Homo sapiens
  CDR3 for beta chain variable domain of TCR clone 229152 (TRBV7-2, TRBJ1-2)
CASSRGRTNYGYTF

SEQ ID NO: 458305 - protein, 14 aa, Homo sapiens
  CDR3 for alpha chain variable domain of TCR clone 229153 (TRAV12-1, TRAJ22)
CVAFSSGSARQLTF

SEQ ID NO: 458306 - protein, 13 aa, Homo sapiens
  CDR3 for beta chain variable domain of TCR clone 229153 (TRBV7-2, TRBJ2-1)
CASSPGTSNEQFF

SEQ ID NO: 458307 - protein, 13 aa, Homo sapiens
  CDR3 for alpha chain variable domain of TCR clone 229154 (TRAV10, TRAJ45)
CVGPGGGADGLTF

SEQ ID NO: 458308 - protein, 15 aa, Homo sapiens
  CDR3 for beta chain variable domain of TCR clone 229154 (TRBV5-1, TRBJ2-7)
CASSLYPDGGYEQYF

SEQ ID NO: 458309 - protein, 14 aa, Homo sapiens
  CDR3 for alpha chain variable domain of TCR clone 229155 (TRAV12-2, TRAJ13)
CAVKKTGGYQKVTF

SEQ ID NO: 458310 - protein, 16 aa, Homo sapiens
  CDR3 for beta chain variable domain of TCR clone 229155 (TRBV4-1, TRBJ2-3)
CASSQATSGAEDTQYF

SEQ ID NO: 458311 - protein, 14 aa, Homo sapiens
  CDR3 for alpha chain variable domain of TCR clone 229156 (TRAV38-1, TRAJ29)
CTFINPSGNTPLDF

SEQ ID NO: 458312 - protein, 14 aa, Homo sapiens
  CDR3 for beta chain variable domain of TCR clone 229156 (TRBV18, TRBJ2-7)
CASSPRGGAYEQYF

SEQ ID NO: 458313 - protein, 13 aa, Homo sapiens
  CDR3 for alpha chain variable domain of TCR clone 229157 (TRAV1-1, TRAJ9)
CAAKNTGGFKTIS

SEQ ID NO: 458314 - protein, 17 aa, Homo sapiens
  CDR3 for beta chain variable domain of TCR clone 229157 (TRBV13, TRBJ2-3)
CASSLSRVAGGRNTQYF

SEQ ID NO: 458315 - protein, 17 aa, Homo sapiens
  CDR3 for alpha chain variable domain of TCR clone 229158 (TRAV8-6, TRAJ58)
CTVSSWVGETSGSRFTF

SEQ ID NO: 458316 - protein, 14 aa, Homo sapiens
  CDR3 for beta chain variable domain of TCR clone 229158 (TRBV4-2, TRBJ2-1)
CASGLDRAYNEQFF

SEQ ID NO: 458317 - protein, 13 aa, Homo sapiens
  CDR3 for alpha chain variable domain of TCR clone 229159 (TRAV2, TRAJ15)
CAVEAQAGTALIF

SEQ ID NO: 458318 - protein, 13 aa, Homo sapiens
  CDR3 for beta chain variable domain of TCR clone 229159 (TRBV6-5, TRBJ2-5)
CASSPQGGEIQYF

SEQ ID NO: 458319 - protein, 16 aa, Homo sapiens
  CDR3 for alpha chain variable domain of TCR clone 229160 (TRAV3, TRAJ42)
CAVRANYGGSQGNLIF

SEQ ID NO: 458320 - protein, 16 aa, Homo sapiens
  CDR3 for beta chain variable domain of TCR clone 229160 (TRBV2, TRBJ2-1)
CASRSPAGGKYNEQFF

SEQ ID NO: 458321 - protein, 17 aa, Homo sapiens
  CDR3 for alpha chain variable domain of TCR clone 229161 (TRAV3, TRAJ6)
CAVRDGPRAGGSYIPTF

SEQ ID NO: 458322 - protein, 16 aa, Homo sapiens
  CDR3 for beta chain variable domain of TCR clone 229161 (TRBV7-8, TRBJ2-3)
CASSTEGQRETDTRYF

SEQ ID NO: 458323 - protein, 17 aa, Homo sapiens
  CDR3 for alpha chain variable domain of TCR clone 229162 (TRAV29/DV5, TRAJ40)
CAASVIYTTSGTYKYIF

SEQ ID NO: 458324 - protein, 13 aa, Homo sapiens
  CDR3 for beta chain variable domain of TCR clone 229162 (TRBV6-1, TRBJ2-1)
CASSHDMNNEQFF

SEQ ID NO: 458325 - protein, 12 aa, Homo sapiens
  CDR3 for alpha chain variable domain of TCR clone 229163 (TRAV21, TRAJ11)
CAATSGYSTLTL

SEQ ID NO: 458326 - protein, 14 aa, Homo sapiens
  CDR3 for beta chain variable domain of TCR clone 229163 (TRBV20-1, TRBJ2-7)
CSAPELAGVGKQYF

SEQ ID NO: 458327 - protein, 13 aa, Homo sapiens
  CDR3 for alpha chain variable domain of TCR clone 229164 (TRAV36/DV7, TRAJ38)
CIANAGNNRKLIW

SEQ ID NO: 458328 - protein, 14 aa, Homo sapiens
  CDR3 for beta chain variable domain of TCR clone 229164 (TRBV7-2, TRBJ2-7)
CASSLRWEVNEQYF

SEQ ID NO: 458329 - protein, 17 aa, Homo sapiens
  CDR3 for alpha chain variable domain of TCR clone 229165 (TRAV3, TRAJ6)
CAVRDGPRAEGSYIPTF

SEQ ID NO: 458330 - protein, 14 aa, Homo sapiens
  CDR3 for beta chain variable domain of TCR clone 229165 (TRBV7-2, TRBJ2-7)
CASSPKTSFYEQYL

SEQ ID NO: 458331 - protein, 15 aa, Homo sapiens
  CDR3 for alpha chain variable domain of TCR clone 229166 (TRAV4, TRAJ29)
CLVGAYRSQETPLLS

SEQ ID NO: 458332 - protein, 17 aa, Homo sapiens
  CDR3 for beta chain variable domain of TCR clone 229166 (TRBV25-1, TRBJ2-7)
CASSDARVVFSSYEQYF

SEQ ID NO: 458333 - protein, 14 aa, Homo sapiens
  CDR3 for alpha chain variable domain of TCR clone 229167 (TRAV38-1, TRAJ40)
CALRPTSGTYKYIF

SEQ ID NO: 458334 - protein, 18 aa, Homo sapiens
  CDR3 for beta chain variable domain of TCR clone 229167 (TRBV28, TRBJ2-7)
CASSLYAGDNSGLNEQYF

SEQ ID NO: 458335 - protein, 15 aa, Homo sapiens
  CDR3 for alpha chain variable domain of TCR clone 229168 (TRAV13-1, TRAJ17)
CAASIERAAGNKRTF

SEQ ID NO: 458336 - protein, 17 aa, Homo sapiens
  CDR3 for beta chain variable domain of TCR clone 229168 (TRBV7-2, TRBJ2-2)
CASSPRGAGEGTGELFF

SEQ ID NO: 458337 - protein, 12 aa, Homo sapiens
  CDR3 for alpha chain variable domain of TCR clone 229169 (TRAV17, TRAJ4)
CAVSGGYNKLMF

SEQ ID NO: 458338 - protein, 13 aa, Homo sapiens
  CDR3 for beta chain variable domain of TCR clone 229169 (TRBV6-1, TRBJ1-1)
CASSEGWGTEAFF

SEQ ID NO: 458339 - protein, 16 aa, Homo sapiens
  CDR3 for alpha chain variable domain of TCR clone 229170 (TRAV16, TRAJ4)
CSLSRMFSGGYNKLIF

SEQ ID NO: 458340 - protein, 16 aa, Homo sapiens
  CDR3 for beta chain variable domain of TCR clone 229170 (TRBV24-1, TRBJ2-3)
CATSAPGTGATDTQYF

SEQ ID NO: 458341 - protein, 15 aa, Homo sapiens
  CDR3 for alpha chain variable domain of TCR clone 229171 (TRAV34, TRAJ36)
CVAPSRLGGANNLFF

SEQ ID NO: 458342 - protein, 16 aa, Homo sapiens
  CDR3 for beta chain variable domain of TCR clone 229171 (TRBV4-3, TRBJ2-1)
CASSYRRLGSWDEQFF

SEQ ID NO: 458343 - protein, 15 aa, Homo sapiens
  CDR3 for alpha chain variable domain of TCR clone 229172 (TRAV3, TRAJ22)
CAVRDRGGSARQLPF

SEQ ID NO: 458344 - protein, 14 aa, Homo sapiens
  CDR3 for beta chain variable domain of TCR clone 229172 (TRBV19, TRBJ1-5)
CASSLGLIGQPQHF

SEQ ID NO: 458345 - protein, 11 aa, Homo sapiens
  CDR3 for alpha chain variable domain of TCR clone 229173 (TRAV12-3, TRAJ27)
CAMANAGKSTF

SEQ ID NO: 458346 - protein, 15 aa, Homo sapiens
  CDR3 for beta chain variable domain of TCR clone 229173 (TRBV10-3, TRBJ2-3)
CAISLTSGGTDTQYF

SEQ ID NO: 458347 - protein, 22 aa, Homo sapiens
  CDR3 for alpha chain variable domain of TCR clone 229174 (TRAV12-1, TRAJ30)
CVVNIGGEMTRSSLEKGHDFIF

SEQ ID NO: 458348 - protein, 14 aa, Homo sapiens
  CDR3 for beta chain variable domain of TCR clone 229174 (TRBV7-6, TRBJ2-3)
CASSLGTVTDTQYF

SEQ ID NO: 458349 - protein, 17 aa, Homo sapiens
  CDR3 for alpha chain variable domain of TCR clone 229175 (TRAV17, TRAJ28)
CATDPRRGGAGSYQLTF

SEQ ID NO: 458350 - protein, 14 aa, Homo sapiens
  CDR3 for beta chain variable domain of TCR clone 229175 (TRBV18, TRBJ2-7)
CASSPRGGAYEQYF

SEQ ID NO: 458351 - protein, 16 aa, Homo sapiens
  CDR3 for alpha chain variable domain of TCR clone 229176 (TRAV3, TRAJ10)
CAVRDMTAGGGNKLTF

SEQ ID NO: 458352 - protein, 15 aa, Homo sapiens
  CDR3 for beta chain variable domain of TCR clone 229176 (TRBV9, TRBJ1-6)
CASSVAGTGDSPLHF

SEQ ID NO: 458353 - protein, 14 aa, Homo sapiens
  CDR3 for alpha chain variable domain of TCR clone 229177 (TRAV13-1, TRAJ57)
CAARTQGGSEKLVF

SEQ ID NO: 458354 - protein, 16 aa, Homo sapiens
  CDR3 for beta chain variable domain of TCR clone 229177 (TRBV20-1, TRBJ1-2)
CSASMGQGVANYGYTF

SEQ ID NO: 458355 - protein, 14 aa, Homo sapiens
  CDR3 for alpha chain variable domain of TCR clone 229178 (TRAV3, TRAJ37)
CAVKESGNTGKLIF

SEQ ID NO: 458356 - protein, 13 aa, Homo sapiens
  CDR3 for beta chain variable domain of TCR clone 229178 (TRBV20-1, TRBJ1-6)
CSTFREGNSPLHF

SEQ ID NO: 458357 - protein, 11 aa, Homo sapiens
  CDR3 for alpha chain variable domain of TCR clone 229179 (TRAV17, TRAJ43)
CATPRSNDMRF

SEQ ID NO: 458358 - protein, 17 aa, Homo sapiens
  CDR3 for beta chain variable domain of TCR clone 229179 (TRBV15, TRBJ1-2)
CATSGREIDVVNYGYTF

SEQ ID NO: 458359 - protein, 13 aa, Homo sapiens
  CDR3 for alpha chain variable domain of TCR clone 229180 (TRAV8-3, TRAJ41)
CAVGADSWDALNF

SEQ ID NO: 458360 - protein, 14 aa, Homo sapiens
  CDR3 for beta chain variable domain of TCR clone 229180 (TRBV2, TRBJ1-1)
CASRALLMNTEAFF

SEQ ID NO: 458361 - protein, 15 aa, Homo sapiens
  CDR3 for alpha chain variable domain of TCR clone 229181 (TRAV41, TRAJ22)
CASDLSWGSARQLTF

SEQ ID NO: 458362 - protein, 16 aa, Homo sapiens
  CDR3 for beta chain variable domain of TCR clone 229181 (TRBV7-3, TRBJ2-2)
CASSLKRGTLSGELFF

SEQ ID NO: 458363 - protein, 12 aa, Homo sapiens
  CDR3 for alpha chain variable domain of TCR clone 229182 (TRAV8-6, TRAJ43)
CAVSNNNNDMRF

SEQ ID NO: 458364 - protein, 15 aa, Homo sapiens
  CDR3 for beta chain variable domain of TCR clone 229182 (TRBV7-3, TRBJ2-6)
CASSLGGSGANVLNF

SEQ ID NO: 458365 - protein, 13 aa, Homo sapiens
  CDR3 for alpha chain variable domain of TCR clone 229183 (TRAV27, TRAJ41)
CAGEGNSGYALNF

SEQ ID NO: 458366 - protein, 13 aa, Homo sapiens
  CDR3 for beta chain variable domain of TCR clone 229183 (TRBV2, TRBJ2-7)
CASSVGGSGEQYF

SEQ ID NO: 458367 - protein, 12 aa, Homo sapiens
  CDR3 for alpha chain variable domain of TCR clone 229184 (TRAV35, TRAJ31)
CAAASNNARLMF

SEQ ID NO: 458368 - protein, 15 aa, Homo sapiens
  CDR3 for beta chain variable domain of TCR clone 229184 (TRBV11-2, TRBJ2-1)
CASSKNRGLIYEQFF

SEQ ID NO: 458369 - protein, 13 aa, Homo sapiens
  CDR3 for alpha chain variable domain of TCR clone 229185 (TRAV12-3, TRAJ9)
CAMSADGGFKTIF

SEQ ID NO: 458370 - protein, 14 aa, Homo sapiens
  CDR3 for beta chain variable domain of TCR clone 229185 (TRBV5-8, TRBJ2-3)
CASSLGQGTDTQYF

SEQ ID NO: 458371 - protein, 12 aa, Homo sapiens
  CDR3 for alpha chain variable domain of TCR clone 229186 (TRAV21, TRAJ11)
CAATSGYSTLTF

SEQ ID NO: 458372 - protein, 15 aa, Homo sapiens
  CDR3 for beta chain variable domain of TCR clone 229186 (TRBV4-1, TRBJ1-4)
CASSDTGGTNEKLFF

SEQ ID NO: 458373 - protein, 13 aa, Homo sapiens
  CDR3 for alpha chain variable domain of TCR clone 229187 (TRAV13-2, TRAJ15)
CAERPKAGTALIF

SEQ ID NO: 458374 - protein, 15 aa, Homo sapiens
  CDR3 for beta chain variable domain of TCR clone 229187 (TRBV11-2, TRBJ2-7)
CASRFPGTGGYEQYF

SEQ ID NO: 458375 - protein, 16 aa, Homo sapiens
  CDR3 for alpha chain variable domain of TCR clone 229188 (TRAV1-2, TRAJ10)
CAVRGVLTGGGNKLTF

SEQ ID NO: 458376 - protein, 15 aa, Homo sapiens
  CDR3 for beta chain variable domain of TCR clone 229188 (TRBV11-2, TRBJ1-2)
CASSLEGVQRNGYTF

SEQ ID NO: 458377 - protein, 17 aa, Homo sapiens
  CDR3 for alpha chain variable domain of TCR clone 229189 (TRAV26-2, TRAJ42)
CILRDVGYGGSQGNLIF

SEQ ID NO: 458378 - protein, 16 aa, Homo sapiens
  CDR3 for beta chain variable domain of TCR clone 229189 (TRBV12-4, TRBJ2-7)
CASSWIGGTGTYGQYF

SEQ ID NO: 458379 - protein, 15 aa, Homo sapiens
  CDR3 for alpha chain variable domain of TCR clone 229190 (TRAV27, TRAJ38)
RAGRFNAGNNRKLIW

SEQ ID NO: 458380 - protein, 13 aa, Homo sapiens
  CDR3 for beta chain variable domain of TCR clone 229190 (TRBV12-5, TRBJ2-3)
CASQNRGTDTQYF

SEQ ID NO: 458381 - protein, 14 aa, Homo sapiens
  CDR3 for alpha chain variable domain of TCR clone 229191 (TRAV12-3, TRAJ10)
SHLPLAGGGNKLTF

SEQ ID NO: 458382 - protein, 15 aa, Homo sapiens
  CDR3 for beta chain variable domain of TCR clone 229191 (TRBV7-3, TRBJ2-2)
CASSETGQGTGELFF

SEQ ID NO: 458383 - protein, 16 aa, Homo sapiens
  CDR3 for alpha chain variable domain of TCR clone 229192 (TRAV3, TRAJ10)
CAVRDMRAGGGNKHTF

SEQ ID NO: 458384 - protein, 16 aa, Homo sapiens
  CDR3 for beta chain variable domain of TCR clone 229192 (TRBV12-4, TRBJ1-5)
CASSRPVGGSNQPQHF

SEQ ID NO: 458385 - protein, 14 aa, Homo sapiens
  CDR3 for alpha chain variable domain of TCR clone 229193 (TRAV17, TRAJ22)
CATSTSGSARQLTF

SEQ ID NO: 458386 - protein, 15 aa, Homo sapiens
  CDR3 for beta chain variable domain of TCR clone 229193 (TRBV4-1, TRBJ2-5)
FASSQWDLYQETQYF

SEQ ID NO: 458387 - protein, 15 aa, Homo sapiens
  CDR3 for alpha chain variable domain of TCR clone 229194 (TRAV8-3, TRAJ45)
CASSYSGGGADGLTF

SEQ ID NO: 458388 - protein, 13 aa, Homo sapiens
  CDR3 for beta chain variable domain of TCR clone 229194 (TRBV20-1, TRBJ1-1)
CSAGTVGNTEAFF

SEQ ID NO: 458389 - protein, 13 aa, Homo sapiens
  CDR3 for alpha chain variable domain of TCR clone 229195 (TRAV20, TRAJ37)
CAGCSSNTGKLIF

SEQ ID NO: 458390 - protein, 17 aa, Homo sapiens
  CDR3 for beta chain variable domain of TCR clone 229195 (TRBV28, TRBJ2-5)
CASGRQGGLAGAETQHF

SEQ ID NO: 458391 - protein, 12 aa, Homo sapiens
  CDR3 for alpha chain variable domain of TCR clone 229196 (TRAV27, TRAJ35)
CSGADFGNVLHC

SEQ ID NO: 458392 - protein, 15 aa, Homo sapiens
  CDR3 for beta chain variable domain of TCR clone 229196 (TRBV20-1, TRBJ2-7)
CSARDRVSGMDEQYF

SEQ ID NO: 458393 - protein, 15 aa, Homo sapiens
  CDR3 for alpha chain variable domain of TCR clone 229197 (TRAV3, TRAJ42)
CAVRGGTGSQGNLIF

SEQ ID NO: 458394 - protein, 14 aa, Homo sapiens
  CDR3 for beta chain variable domain of TCR clone 229197 (TRBV2, TRBJ1-5)
CASSGTVSNQPQHF

SEQ ID NO: 458395 - protein, 19 aa, Homo sapiens
  CDR3 for alpha chain variable domain of TCR clone 229198 (TRAV12-2, TRAJ13)
CAVKKTGGYQKVTLELETS

SEQ ID NO: 458396 - protein, 15 aa, Homo sapiens
  CDR3 for beta chain variable domain of TCR clone 229198 (TRBV27, TRBJ2-1)
CASSNGGGSSNEQFF

SEQ ID NO: 458397 - protein, 14 aa, Homo sapiens
  CDR3 for alpha chain variable domain of TCR clone 229199 (TRAV13-1, TRAJ35)
CSSSKGGFGNVLHC

SEQ ID NO: 458398 - protein, 13 aa, Homo sapiens
  CDR3 for beta chain variable domain of TCR clone 229199 (TRBV7-3, TRBJ1-1)
CASSQDWGAEAFF

SEQ ID NO: 458399 - protein, 15 aa, Homo sapiens
  CDR3 for alpha chain variable domain of TCR clone 229200 (TRAV36/DV7, TRAJ40)
CAVEGFPSGTYKYIF

SEQ ID NO: 458400 - protein, 14 aa, Homo sapiens
  CDR3 for beta chain variable domain of TCR clone 229200 (TRBV19, TRBJ2-1)
CASPTFVLSGEQFF

SEQ ID NO: 458401 - protein, 16 aa, Homo sapiens
  CDR3 for alpha chain variable domain of TCR clone 229201 (TRAV30, TRAJ24)
CGTEMVDADSWGKFQF

SEQ ID NO: 458402 - protein, 13 aa, Homo sapiens
  CDR3 for beta chain variable domain of TCR clone 229201 (TRBV20-1, TRBJ1-1)
CSVRGGGNTEAFF

SEQ ID NO: 458403 - protein, 10 aa, Homo sapiens
  CDR3 for alpha chain variable domain of TCR clone 229202 (TRAV23/DV6, TRAJ57)
CAASSTLSQG

SEQ ID NO: 458404 - protein, 14 aa, Homo sapiens
  CDR3 for beta chain variable domain of TCR clone 229202 (TRBV13, TRBJ2-5)
CASSLGKGKETQYF

SEQ ID NO: 458405 - protein, 15 aa, Homo sapiens
  CDR3 for alpha chain variable domain of TCR clone 229203 (TRAV3, TRAJ9)
CAVRARDTGGFKTIF

SEQ ID NO: 458406 - protein, 12 aa, Homo sapiens
  CDR3 for beta chain variable domain of TCR clone 229203 (TRBV12-4, TRBJ2-1)
CASSLQGSEQFF

SEQ ID NO: 458407 - protein, 13 aa, Homo sapiens
  CDR3 for alpha chain variable domain of TCR clone 229204 (TRAV4, TRAJ22)
CLGGSGSARQLTF

SEQ ID NO: 458408 - protein, 15 aa, Homo sapiens
  CDR3 for beta chain variable domain of TCR clone 229204 (TRBV7-9, TRBJ1-6)
CASSSSGRGNSPLHF

SEQ ID NO: 458409 - protein, 13 aa, Homo sapiens
  CDR3 for alpha chain variable domain of TCR clone 229205 (TRAV21, TRAJ27)
CAARPGYAGQSTF

SEQ ID NO: 458410 - protein, 14 aa, Homo sapiens
  CDR3 for beta chain variable domain of TCR clone 229205 (TRBV7-6, TRBJ2-3)
CASSLGTVTDTQYF

SEQ ID NO: 458411 - protein, 18 aa, Homo sapiens
  CDR3 for alpha chain variable domain of TCR clone 229206 (TRAV12-2, )
CAVEDIQNPDPAVYQLRD

SEQ ID NO: 458412 - protein, 14 aa, Homo sapiens
  CDR3 for beta chain variable domain of TCR clone 229206 (TRBV7-7, TRBJ2-2)
CATRQDSDTGELFF

SEQ ID NO: 458413 - protein, 15 aa, Homo sapiens
  CDR3 for alpha chain variable domain of TCR clone 229207 (TRAV23/DV6, TRAJ13)
CAAWPGGGGYQKVTF

SEQ ID NO: 458414 - protein, 16 aa, Homo sapiens
  CDR3 for beta chain variable domain of TCR clone 229207 (TRBV11-1, TRBJ2-2)
CASSAEGLKNTGELFF

SEQ ID NO: 458415 - protein, 16 aa, Homo sapiens
  CDR3 for alpha chain variable domain of TCR clone 229208 (TRAV12-2, TRAJ32)
CAVNLGQGGATNKLIF

SEQ ID NO: 458416 - protein, 16 aa, Homo sapiens
  CDR3 for beta chain variable domain of TCR clone 229208 (TRBV20-1, TRBJ1-4)
CSAPGQGLLTNEKLFF

SEQ ID NO: 458417 - protein, 13 aa, Homo sapiens
  CDR3 for alpha chain variable domain of TCR clone 229209 (TRAV21, TRAJ6)
CAGGSGGSYIPTF

SEQ ID NO: 458418 - protein, 13 aa, Homo sapiens
  CDR3 for beta chain variable domain of TCR clone 229209 (TRBV3-1, TRBJ1-5)
CAITRRDGQPQHF

SEQ ID NO: 458419 - protein, 15 aa, Homo sapiens
  CDR3 for alpha chain variable domain of TCR clone 229210 (TRAV23/DV6, TRAJ44)
CAARLLTGTASQLTF

SEQ ID NO: 458420 - protein, 15 aa, Homo sapiens
  CDR3 for beta chain variable domain of TCR clone 229210 (TRBV12-4, TRBJ1-5)
CASTLNRVSNQPQHF

SEQ ID NO: 458421 - protein, 14 aa, Homo sapiens
  CDR3 for alpha chain variable domain of TCR clone 229211 (TRAV2, TRAJ44)
CAVRNTGTASKLTF

SEQ ID NO: 458422 - protein, 14 aa, Homo sapiens
  CDR3 for beta chain variable domain of TCR clone 229211 (TRBV19, TRBJ2-1)
CASPTFVLSGEQFF

SEQ ID NO: 458423 - protein, 18 aa, Homo sapiens
  CDR3 for alpha chain variable domain of TCR clone 229212 (TRAV13-1, TRAJ52)
CSAKNPNAGGTSYGKLKF

SEQ ID NO: 458424 - protein, 15 aa, Homo sapiens
  CDR3 for beta chain variable domain of TCR clone 229212 (TRBV6-1, TRBJ2-3)
GASSERGGITDTQYF

SEQ ID NO: 458425 - protein, 13 aa, Homo sapiens
  CDR3 for alpha chain variable domain of TCR clone 229213 (TRAV13-2, TRAJ53)
CAENMGSNYKLTF

SEQ ID NO: 458426 - protein, 13 aa, Homo sapiens
  CDR3 for beta chain variable domain of TCR clone 229213 (TRBV4-2, TRBJ2-5)
CASSRGGGETQYF

SEQ ID NO: 458427 - protein, 14 aa, Homo sapiens
  CDR3 for alpha chain variable domain of TCR clone 229214 (TRAV8-4, TRAJ13)
CAVTLSGGYQKVTF

SEQ ID NO: 458428 - protein, 15 aa, Homo sapiens
  CDR3 for beta chain variable domain of TCR clone 229214 (TRBV5-1, TRBJ2-5)
CASSFKGGDQETQYF

SEQ ID NO: 458429 - protein, 12 aa, Homo sapiens
  CDR3 for alpha chain variable domain of TCR clone 229215 (TRAV21, TRAJ33)
CAKMDSNYQLIW

SEQ ID NO: 458430 - protein, 15 aa, Homo sapiens
  CDR3 for beta chain variable domain of TCR clone 229215 (TRBV3-1, TRBJ2-5)
CASSANLGGPETQYF

SEQ ID NO: 458431 - protein, 15 aa, Homo sapiens
  CDR3 for alpha chain variable domain of TCR clone 229216 (TRAV4, TRAJ36)
CLVGDRQTGANNLFF

SEQ ID NO: 458432 - protein, 14 aa, Homo sapiens
  CDR3 for beta chain variable domain of TCR clone 229216 (TRBV12-5, TRBJ2-5)
CASGSRTHQETQYF

SEQ ID NO: 458433 - protein, 18 aa, Homo sapiens
  CDR3 for alpha chain variable domain of TCR clone 229217 (TRAV21, TRAJ52)
CAVRPSPAGGTSYGKLAF

SEQ ID NO: 458434 - protein, 13 aa, Homo sapiens
  CDR3 for beta chain variable domain of TCR clone 229217 (TRBV29-1, TRBJ2-1)
CSVEGGRVNEQFF

SEQ ID NO: 458435 - protein, 13 aa, Homo sapiens
  CDR3 for alpha chain variable domain of TCR clone 229218 (TRAV13-1, TRAJ39)
CAASTWAGNMLTF

SEQ ID NO: 458436 - protein, 13 aa, Homo sapiens
  CDR3 for beta chain variable domain of TCR clone 229218 (TRBV11-2, TRBJ1-3)
CASSLEPVNTIYF

SEQ ID NO: 458437 - protein, 14 aa, Homo sapiens
  CDR3 for alpha chain variable domain of TCR clone 229219 (TRAV12-2, TRAJ18)
CAVKRGSTLWRLYV

SEQ ID NO: 458438 - protein, 16 aa, Homo sapiens
  CDR3 for beta chain variable domain of TCR clone 229219 (TRBV27, TRBJ2-3)
CASSFRGQLLRDTPYF

SEQ ID NO: 458439 - protein, 13 aa, Homo sapiens
  CDR3 for alpha chain variable domain of TCR clone 229220 (TRAV8-6, TRAJ24)
CAVSSDSWGKLQF

SEQ ID NO: 458440 - protein, 14 aa, Homo sapiens
  CDR3 for beta chain variable domain of TCR clone 229220 (TRBV7-2, TRBJ1-1)
CASSFLTGTTEAFF

SEQ ID NO: 458441 - protein, 15 aa, Homo sapiens
  CDR3 for alpha chain variable domain of TCR clone 229221 (TRAV8-2, TRAJ16)
CVVSDGFSDGRKLLF

SEQ ID NO: 458442 - protein, 15 aa, Homo sapiens
  CDR3 for beta chain variable domain of TCR clone 229221 (TRBV12-4, TRBJ2-5)
CASSPPTGLQETQYF

SEQ ID NO: 458443 - protein, 13 aa, Homo sapiens
  CDR3 for alpha chain variable domain of TCR clone 229222 (TRAV21, TRAJ27)
CAARPGNAGQSTF

SEQ ID NO: 458444 - protein, 14 aa, Homo sapiens
  CDR3 for beta chain variable domain of TCR clone 229222 (TRBV11-2, TRBJ2-7)
CASSSTGEGYEQYF

SEQ ID NO: 458445 - protein, 13 aa, Homo sapiens
  CDR3 for alpha chain variable domain of TCR clone 229223 (TRAV12-3, TRAJ43)
CAMRPYNNTDMRF

SEQ ID NO: 458446 - protein, 16 aa, Homo sapiens
  CDR3 for beta chain variable domain of TCR clone 229223 (TRBV11-2, TRBJ2-1)
CASSLLLLSSYNEQFF

SEQ ID NO: 458447 - protein, 12 aa, Homo sapiens
  CDR3 for alpha chain variable domain of TCR clone 229224 (TRAV12-2, TRAJ45)
CASGGGADVLPF

SEQ ID NO: 458448 - protein, 16 aa, Homo sapiens
  CDR3 for beta chain variable domain of TCR clone 229224 (TRBV19, TRBJ2-3)
CASSPGLLASTDTQYF

SEQ ID NO: 458449 - protein, 11 aa, Homo sapiens
  CDR3 for alpha chain variable domain of TCR clone 229225 (TRAV1-2, TRAJ20)
CAVSNDYKLSF

SEQ ID NO: 458450 - protein, 15 aa, Homo sapiens
  CDR3 for beta chain variable domain of TCR clone 229225 (TRBV5-1, TRBJ2-2)
CASSSQWGNTGELFF

SEQ ID NO: 458451 - protein, 14 aa, Homo sapiens
  CDR3 for alpha chain variable domain of TCR clone 229226 (TRAV12-3, TRAJ29)
CAMSPYSGNTHLIF

SEQ ID NO: 458452 - protein, 15 aa, Homo sapiens
  CDR3 for beta chain variable domain of TCR clone 229226 (TRBV27, TRBJ2-1)
CASSNGGGSSNEQFF

SEQ ID NO: 458453 - protein, 11 aa, Homo sapiens
  CDR3 for alpha chain variable domain of TCR clone 229227 (TRAV12-1, TRAJ37)
CVVNTPGKLIF

SEQ ID NO: 458454 - protein, 13 aa, Homo sapiens
  CDR3 for beta chain variable domain of TCR clone 229227 (TRBV12-4, TRBJ1-5)
CAGSPDRAQPQHF

SEQ ID NO: 458455 - protein, 15 aa, Homo sapiens
  CDR3 for alpha chain variable domain of TCR clone 229228 (TRAV8-3, TRAJ40)
CAVGCRTSGTYQYIF

SEQ ID NO: 458456 - protein, 15 aa, Homo sapiens
  CDR3 for beta chain variable domain of TCR clone 229228 (TRBV19, TRBJ1-1)
CASSGDGLGNTEAFF

SEQ ID NO: 458457 - protein, 14 aa, Homo sapiens
  CDR3 for alpha chain variable domain of TCR clone 229229 (TRAV8-2, TRAJ4)
CVASPSGGHNKLIF

SEQ ID NO: 458458 - protein, 15 aa, Homo sapiens
  CDR3 for beta chain variable domain of TCR clone 229229 (TRBV4-1, TRBJ1-4)
CASSDTGGTNEKLFF

SEQ ID NO: 458459 - protein, 15 aa, Homo sapiens
  CDR3 for alpha chain variable domain of TCR clone 229230 (TRAV8-3, TRAJ44)
CAAGAGASTASKLTF

SEQ ID NO: 458460 - protein, 12 aa, Homo sapiens
  CDR3 for beta chain variable domain of TCR clone 229230 (TRBV7-8, TRBJ2-4)
CASSLGGNIQYF

SEQ ID NO: 458461 - protein, 14 aa, Homo sapiens
  CDR3 for alpha chain variable domain of TCR clone 229231 (TRAV17, TRAJ22)
CATSPSGSARQLTF

SEQ ID NO: 458462 - protein, 14 aa, Homo sapiens
  CDR3 for beta chain variable domain of TCR clone 229231 (TRBV10-2, TRBJ1-5)
CASSSTGRNQPQHF

SEQ ID NO: 458463 - protein, 15 aa, Homo sapiens
  CDR3 for alpha chain variable domain of TCR clone 229232 (TRAV2, TRAJ13)
CATPSYSGGYQKVTF

SEQ ID NO: 458464 - protein, 15 aa, Homo sapiens
  CDR3 for beta chain variable domain of TCR clone 229232 (TRBV7-2, TRBJ2-1)
CASSLVGSSYNEQFF

SEQ ID NO: 458465 - protein, 14 aa, Homo sapiens
  CDR3 for alpha chain variable domain of TCR clone 229233 (TRAV9-2, TRAJ39)
CALYIYNAGNMLIF

SEQ ID NO: 458466 - protein, 15 aa, Homo sapiens
  CDR3 for beta chain variable domain of TCR clone 229233 (TRBV7-3, TRBJ2-2)
CASSLEVLPTGELFF

SEQ ID NO: 458467 - protein, 12 aa, Homo sapiens
  CDR3 for alpha chain variable domain of TCR clone 229234 (TRAV12-3, TRAJ17)
CAMTLTGNKLTF

SEQ ID NO: 458468 - protein, 15 aa, Homo sapiens
  CDR3 for beta chain variable domain of TCR clone 229234 (TRBV28, TRBJ2-5)
CASSAPRQVQETQYF

SEQ ID NO: 458469 - protein, 14 aa, Homo sapiens
  CDR3 for alpha chain variable domain of TCR clone 229235 (TRAV38-1, TRAJ40)
CALRPTSGTYKYIF

SEQ ID NO: 458470 - protein, 12 aa, Homo sapiens
  CDR3 for beta chain variable domain of TCR clone 229235 (TRBV20-1, TRBJ2-7)
CSAITPTKEQYF

SEQ ID NO: 458471 - protein, 12 aa, Homo sapiens
  CDR3 for alpha chain variable domain of TCR clone 229236 (TRAV12-3, TRAJ17)
CAMMLTGNKLTF

SEQ ID NO: 458472 - protein, 15 aa, Homo sapiens
  CDR3 for beta chain variable domain of TCR clone 229236 (TRBV20-1, TRBJ2-7)
CSARDRVSGMDEQYL

SEQ ID NO: 458473 - protein, 15 aa, Homo sapiens
  CDR3 for alpha chain variable domain of TCR clone 229237 (TRAV2, TRAJ15)
CAVEDRGQAGTALLF

SEQ ID NO: 458474 - protein, 13 aa, Homo sapiens
  CDR3 for beta chain variable domain of TCR clone 229237 (TRBV10-2, TRBJ2-7)
CASRASGGYEQYF

SEQ ID NO: 458475 - protein, 14 aa, Homo sapiens
  CDR3 for alpha chain variable domain of TCR clone 229238 (TRAV12-2, TRAJ13)
CAVKKTGGYQKVTF

SEQ ID NO: 458476 - protein, 16 aa, Homo sapiens
  CDR3 for beta chain variable domain of TCR clone 229238 (TRBV9, TRBJ1-2)
CASSVEEKVSPYGYSF

SEQ ID NO: 458477 - protein, 14 aa, Homo sapiens
  CDR3 for alpha chain variable domain of TCR clone 229239 (TRAV1-2, TRAJ8)
CAVREDTGFQNLVF

SEQ ID NO: 458478 - protein, 14 aa, Homo sapiens
  CDR3 for beta chain variable domain of TCR clone 229239 (TRBV11-3, TRBJ2-3)
CASSRLARTDTQYF

SEQ ID NO: 458479 - protein, 14 aa, Homo sapiens
  CDR3 for alpha chain variable domain of TCR clone 229240 (TRAV38-1, TRAJ45)
CAYYSGGGADGLTF

SEQ ID NO: 458480 - protein, 20 aa, Homo sapiens
  CDR3 for beta chain variable domain of TCR clone 229240 (TRBV28, TRBJ2-1)
CASTPIGRSPGLAGGNEHFF

SEQ ID NO: 458481 - protein, 13 aa, Homo sapiens
  CDR3 for alpha chain variable domain of TCR clone 229241 (TRAV12-2, TRAJ4)
CAVLSGGYNKLIF

SEQ ID NO: 458482 - protein, 15 aa, Homo sapiens
  CDR3 for beta chain variable domain of TCR clone 229241 (TRBV10-3, TRBJ2-1)
CPISDVQDRAYEQFF

SEQ ID NO: 458483 - protein, 14 aa, Homo sapiens
  CDR3 for alpha chain variable domain of TCR clone 229242 (TRAV26-1, TRAJ38)
CIADNAGNNRKLIW

SEQ ID NO: 458484 - protein, 15 aa, Homo sapiens
  CDR3 for beta chain variable domain of TCR clone 229242 (TRBV7-9, TRBJ2-1)
CASSLGLAGGTEQFF

SEQ ID NO: 458485 - protein, 14 aa, Homo sapiens
  CDR3 for alpha chain variable domain of TCR clone 229243 (TRAV17, TRAJ32)
CATDPGGATNKLIF

SEQ ID NO: 458486 - protein, 14 aa, Homo sapiens
  CDR3 for beta chain variable domain of TCR clone 229243 (TRBV2, TRBJ1-5)
CASSVNRGGQPQHF

SEQ ID NO: 458487 - protein, 14 aa, Homo sapiens
  CDR3 for alpha chain variable domain of TCR clone 229244 (TRAV36/DV7, TRAJ57)
CALGFPGGSEKLFF

SEQ ID NO: 458488 - protein, 12 aa, Homo sapiens
  CDR3 for beta chain variable domain of TCR clone 229244 (TRBV19, TRBJ2-7)
CASTSGTYEQYF

SEQ ID NO: 458489 - protein, 15 aa, Homo sapiens
  CDR3 for alpha chain variable domain of TCR clone 229245 (TRAV12-1, TRAJ44)
CVVFVNTGTASKLTF

SEQ ID NO: 458490 - protein, 17 aa, Homo sapiens
  CDR3 for beta chain variable domain of TCR clone 229245 (TRBV7-8, TRBJ2-6)
CARSAGTGGAGANVLTF

SEQ ID NO: 458491 - protein, 15 aa, Homo sapiens
  CDR3 for alpha chain variable domain of TCR clone 229246 (TRAV17, TRAJ57)
CATGPSQGGSEELVF

SEQ ID NO: 458492 - protein, 16 aa, Homo sapiens
  CDR3 for beta chain variable domain of TCR clone 229246 (TRBV12-4, TRBJ1-5)
CASSRPIGGSNQPQHF

SEQ ID NO: 458493 - protein, 14 aa, Homo sapiens
  CDR3 for alpha chain variable domain of TCR clone 229247 (TRAV1-2, TRAJ8)
CAVREDTGFQKLVF

SEQ ID NO: 458494 - protein, 15 aa, Homo sapiens
  CDR3 for beta chain variable domain of TCR clone 229247 (TRBV20-1, TRBJ2-7)
CSARDRVSGIDEQYF

SEQ ID NO: 458495 - protein, 14 aa, Homo sapiens
  CDR3 for alpha chain variable domain of TCR clone 229248 (TRAV1-2, TRAJ8)
CAVREDTGFQKLVF

SEQ ID NO: 458496 - protein, 15 aa, Homo sapiens
  CDR3 for beta chain variable domain of TCR clone 229248 (TRBV4-1, TRBJ2-1)
CASSQVLAGGDEQFF

SEQ ID NO: 458497 - protein, 14 aa, Homo sapiens
  CDR3 for alpha chain variable domain of TCR clone 229249 (TRAV8-4, TRAJ15)
CAVTIREAGTALIF

SEQ ID NO: 458498 - protein, 12 aa, Homo sapiens
  CDR3 for beta chain variable domain of TCR clone 229249 (TRBV11-2, TRBJ2-2)
CASSLGGGELFF

SEQ ID NO: 458499 - protein, 11 aa, Homo sapiens
  CDR3 for alpha chain variable domain of TCR clone 229250 (TRAV1-2, TRAJ31)
CAVNNNARLMF

SEQ ID NO: 458500 - protein, 19 aa, Homo sapiens
  CDR3 for beta chain variable domain of TCR clone 229250 (TRBV28, TRBJ2-1)
CASSFSIRGSGRTRYEQFF

SEQ ID NO: 458501 - protein, 14 aa, Homo sapiens
  CDR3 for alpha chain variable domain of TCR clone 229251 (TRAV1-2, TRAJ8)
CAVRADTGFQKLVF

SEQ ID NO: 458502 - protein, 16 aa, Homo sapiens
  CDR3 for beta chain variable domain of TCR clone 229251 (TRBV4-2, TRBJ1-5)
CASSQGQGASNQPQHF

SEQ ID NO: 458503 - protein, 17 aa, Homo sapiens
  CDR3 for alpha chain variable domain of TCR clone 229252 (TRAV26-1, TRAJ58)
CIVRVGAEETSGSRLTF

SEQ ID NO: 458504 - protein, 15 aa, Homo sapiens
  CDR3 for beta chain variable domain of TCR clone 229252 (TRBV19, TRBJ2-3)
CAAGDTNAPNDTQYF

SEQ ID NO: 458505 - protein, 16 aa, Homo sapiens
  CDR3 for alpha chain variable domain of TCR clone 229253 (TRAV12-3, TRAJ53)
CAMSPVSGGSNYKLTF

SEQ ID NO: 458506 - protein, 14 aa, Homo sapiens
  CDR3 for beta chain variable domain of TCR clone 229253 (TRBV15, TRBJ2-5)
CATSGDRGQETQYF

SEQ ID NO: 458507 - protein, 11 aa, Homo sapiens
  CDR3 for alpha chain variable domain of TCR clone 229254 (TRAV23/DV6, TRAJ48)
CATRWGEKLTF

SEQ ID NO: 458508 - protein, 13 aa, Homo sapiens
  CDR3 for beta chain variable domain of TCR clone 229254 (TRBV12-4, TRBJ2-5)
CASSPGTEETQYF

SEQ ID NO: 458509 - protein, 13 aa, Homo sapiens
  CDR3 for alpha chain variable domain of TCR clone 229255 (TRAV26-2, TRAJ33)
CILTLDSNYQLIW

SEQ ID NO: 458510 - protein, 14 aa, Homo sapiens
  CDR3 for beta chain variable domain of TCR clone 229255 (TRBV11-2, TRBJ2-7)
CASSSTGEGYEQYF

SEQ ID NO: 458511 - protein, 13 aa, Homo sapiens
  CDR3 for alpha chain variable domain of TCR clone 229256 (TRAV26-2, TRAJ43)
CILRAANNNDMSF

SEQ ID NO: 458512 - protein, 15 aa, Homo sapiens
  CDR3 for beta chain variable domain of TCR clone 229256 (TRBV7-2, TRBJ2-1)
CASTHGTGIYNEQFF

SEQ ID NO: 458513 - protein, 15 aa, Homo sapiens
  CDR3 for alpha chain variable domain of TCR clone 229257 (TRAV27, TRAJ38)
CAARRIAGNNRKLIW

SEQ ID NO: 458514 - protein, 13 aa, Homo sapiens
  CDR3 for beta chain variable domain of TCR clone 229257 (TRBV12-5, TRBJ2-3)
CASGDRQSDTQYF

SEQ ID NO: 458515 - protein, 11 aa, Homo sapiens
  CDR3 for alpha chain variable domain of TCR clone 229258 (TRAV12-3, TRAJ26)
CAMSHGQNFVF

SEQ ID NO: 458516 - protein, 15 aa, Homo sapiens
  CDR3 for beta chain variable domain of TCR clone 229258 (TRBV6-3, TRBJ2-7)
CASSSPGTVVYEQYF

SEQ ID NO: 458517 - protein, 14 aa, Homo sapiens
  CDR3 for alpha chain variable domain of TCR clone 229259 (TRAV17, TRAJ15)
CATDRGQAGTALLF

SEQ ID NO: 458518 - protein, 17 aa, Homo sapiens
  CDR3 for beta chain variable domain of TCR clone 229259 (TRBV29-1, TRBJ2-1)
CSVVGLAGAYSYNEQFF

SEQ ID NO: 458519 - protein, 12 aa, Homo sapiens
  CDR3 for alpha chain variable domain of TCR clone 229260 (TRAV13-1, TRAJ9)
CASHTGGFKIIF

SEQ ID NO: 458520 - protein, 13 aa, Homo sapiens
  CDR3 for beta chain variable domain of TCR clone 229260 (TRBV12-4, TRBJ1-2)
CTSSSGSKDGYTF

SEQ ID NO: 458521 - protein, 16 aa, Homo sapiens
  CDR3 for alpha chain variable domain of TCR clone 229261 (TRAV12-3, TRAJ53)
CAMSPGSGGSNYKLTF

SEQ ID NO: 458522 - protein, 16 aa, Homo sapiens
  CDR3 for beta chain variable domain of TCR clone 229261 (TRBV7-9, TRBJ1-2)
CASSLGFASGEDGYTF

SEQ ID NO: 458523 - protein, 13 aa, Homo sapiens
  CDR3 for alpha chain variable domain of TCR clone 229262 (TRAV12-2, TRAJ20)
CAVYPSNDYKLSF

SEQ ID NO: 458524 - protein, 16 aa, Homo sapiens
  CDR3 for beta chain variable domain of TCR clone 229262 (TRBV25-1, TRBJ1-1)
CASSGDRDRGRIEAFF

SEQ ID NO: 458525 - protein, 13 aa, Homo sapiens
  CDR3 for alpha chain variable domain of TCR clone 229263 (TRAV8-3, TRAJ48)
CAVVPFVNEKLTF

SEQ ID NO: 458526 - protein, 14 aa, Homo sapiens
  CDR3 for beta chain variable domain of TCR clone 229263 (TRBV18, TRBJ2-7)
CASSPRGGAYEQYF

SEQ ID NO: 458527 - protein, 16 aa, Homo sapiens
  CDR3 for alpha chain variable domain of TCR clone 229264 (TRAV26-1, TRAJ53)
CIVRVAMGGSKYKLKF

SEQ ID NO: 458528 - protein, 12 aa, Homo sapiens
  CDR3 for beta chain variable domain of TCR clone 229264 (TRBV7-9, TRBJ1-5)
CASSPQGQPQHF

SEQ ID NO: 458529 - protein, 12 aa, Homo sapiens
  CDR3 for alpha chain variable domain of TCR clone 229265 (TRAV13-1, TRAJ3)
CAATGVQQCFQD

SEQ ID NO: 458530 - protein, 16 aa, Homo sapiens
  CDR3 for beta chain variable domain of TCR clone 229265 (TRBV7-3, TRBJ2-2)
GASSLKRGTLSGELFF

SEQ ID NO: 458531 - protein, 15 aa, Homo sapiens
  CDR3 for alpha chain variable domain of TCR clone 229266 (TRAV2, TRAJ24)
CAVEVLIDSWGKFQF

SEQ ID NO: 458532 - protein, 13 aa, Homo sapiens
  CDR3 for beta chain variable domain of TCR clone 229266 (TRBV10-2, TRBJ2-7)
CASGTSGGYEQYF

SEQ ID NO: 458533 - protein, 11 aa, Homo sapiens
  CDR3 for alpha chain variable domain of TCR clone 229267 (TRAV2, TRAJ33)
CAVESNYQLIW

SEQ ID NO: 458534 - protein, 13 aa, Homo sapiens
  CDR3 for beta chain variable domain of TCR clone 229267 (TRBV7-3, TRBJ1-1)
CASSQDWGAEALF

SEQ ID NO: 458535 - protein, 13 aa, Homo sapiens
  CDR3 for alpha chain variable domain of TCR clone 229268 (TRAV2, TRAJ40)
CAVVISGTYKYIF

SEQ ID NO: 458536 - protein, 13 aa, Homo sapiens
  CDR3 for beta chain variable domain of TCR clone 229268 (TRBV28, TRBJ2-7)
CASRSSGVYEQYF

SEQ ID NO: 458537 - protein, 13 aa, Homo sapiens
  CDR3 for alpha chain variable domain of TCR clone 229269 (TRAV22, TRAJ29)
CAVRGSGNTPLVF

SEQ ID NO: 458538 - protein, 13 aa, Homo sapiens
  CDR3 for beta chain variable domain of TCR clone 229269 (TRBV12-4, TRBJ2-7)
CASSPTETYEQYF

SEQ ID NO: 458539 - protein, 12 aa, Homo sapiens
  CDR3 for alpha chain variable domain of TCR clone 229270 (TRAV8-4, TRAJ43)
CAVSVNNNDRRF

SEQ ID NO: 458540 - protein, 13 aa, Homo sapiens
  CDR3 for beta chain variable domain of TCR clone 229270 (TRBV7-9, TRBJ1-2)
CASSLKQNYGYTF

SEQ ID NO: 458541 - protein, 14 aa, Homo sapiens
  CDR3 for alpha chain variable domain of TCR clone 229271 (TRAV12-3, TRAJ6)
CAMSATGGSYIPIF

SEQ ID NO: 458542 - protein, 16 aa, Homo sapiens
  CDR3 for beta chain variable domain of TCR clone 229271 (TRBV4-2, TRBJ2-1)
CASSPRAGQGANEQFF

SEQ ID NO: 458543 - protein, 15 aa, Homo sapiens
  CDR3 for alpha chain variable domain of TCR clone 229272 (TRAV8-3, TRAJ7)
CAVGSISYGNNGRAF

SEQ ID NO: 458544 - protein, 17 aa, Homo sapiens
  CDR3 for beta chain variable domain of TCR clone 229272 (TRBV7-8, TRBJ2-6)
CASSAGTGGAGANVLTF

SEQ ID NO: 458545 - protein, 11 aa, Homo sapiens
  CDR3 for alpha chain variable domain of TCR clone 229273 (TRAV27, TRAJ43)
CAGANNNDMRF

SEQ ID NO: 458546 - protein, 17 aa, Homo sapiens
  CDR3 for beta chain variable domain of TCR clone 229273 (TRBV13, TRBJ2-3)
CASSLSRVAGGRNTQYF

SEQ ID NO: 458547 - protein, 15 aa, Homo sapiens
  CDR3 for alpha chain variable domain of TCR clone 229274 (TRAV3, TRAJ7)
CAVRDKDNGNNRLAF

SEQ ID NO: 458548 - protein, 19 aa, Homo sapiens
  CDR3 for beta chain variable domain of TCR clone 229274 (TRBV5-8, TRBJ2-3)
CASSFLGASGSHRTDTQYF

SEQ ID NO: 458549 - protein, 15 aa, Homo sapiens
  CDR3 for alpha chain variable domain of TCR clone 229275 (TRAV27, TRAJ38)
CAGRFNAGNNRKLIW

SEQ ID NO: 458550 - protein, 14 aa, Homo sapiens
  CDR3 for beta chain variable domain of TCR clone 229275 (TRBV25-1, TRBJ1-1)
CASTHLGGNTEAFF

SEQ ID NO: 458551 - protein, 11 aa, Homo sapiens
  CDR3 for alpha chain variable domain of TCR clone 229276 (TRAV2, TRAJ13)
CASGGYQKVTF

SEQ ID NO: 458552 - protein, 17 aa, Homo sapiens
  CDR3 for beta chain variable domain of TCR clone 229276 (TRBV10-3, TRBJ2-4)
CTSVPSVNKGSKNIQYF

SEQ ID NO: 458553 - protein, 13 aa, Homo sapiens
  CDR3 for alpha chain variable domain of TCR clone 229277 (TRAV8-3, TRAJ15)
CATINQAGAALIF

SEQ ID NO: 458554 - protein, 13 aa, Homo sapiens
  CDR3 for beta chain variable domain of TCR clone 229277 (TRBV12-4, TRBJ2-1)
CASRQPSNNEQFF

SEQ ID NO: 458555 - protein, 12 aa, Homo sapiens
  CDR3 for alpha chain variable domain of TCR clone 229278 (TRAV8-3, TRAJ40)
CAVTSGTYKYIF

SEQ ID NO: 458556 - protein, 15 aa, Homo sapiens
  CDR3 for beta chain variable domain of TCR clone 229278 (TRBV7-9, TRBJ1-5)
CASSQGHQPNQPQHF

SEQ ID NO: 458557 - protein, 14 aa, Homo sapiens
  CDR3 for alpha chain variable domain of TCR clone 229279 (TRAV12-3, TRAJ17)
CAVLFKAAGNKLTF

SEQ ID NO: 458558 - protein, 17 aa, Homo sapiens
  CDR3 for beta chain variable domain of TCR clone 229279 (TRBV20-1, TRBJ2-2)
CSASGSGQGGLTGELFF

SEQ ID NO: 458559 - protein, 18 aa, Homo sapiens
  CDR3 for alpha chain variable domain of TCR clone 229280 (TRAV21, TRAJ52)
CAVRPSPAGGTSYGKLTF

SEQ ID NO: 458560 - protein, 16 aa, Homo sapiens
  CDR3 for beta chain variable domain of TCR clone 229280 (TRBV5-1, TRBJ2-5)
CASSLALLRAGETQYF

SEQ ID NO: 458561 - protein, 16 aa, Homo sapiens
  CDR3 for alpha chain variable domain of TCR clone 229281 (TRAV3, TRAJ3)
CAVSDRAKSSAYKIIF

SEQ ID NO: 458562 - protein, 13 aa, Homo sapiens
  CDR3 for beta chain variable domain of TCR clone 229281 (TRBV10-3, TRBJ2-7)
CASKLAVNYEQYF

SEQ ID NO: 458563 - protein, 13 aa, Homo sapiens
  CDR3 for alpha chain variable domain of TCR clone 229282 (TRAV8-3, TRAJ4)
WVFYSGGYNKLLF

SEQ ID NO: 458564 - protein, 15 aa, Homo sapiens
  CDR3 for beta chain variable domain of TCR clone 229282 (TRBV19, TRBJ2-5)
CASSIARARGETQYF

SEQ ID NO: 458565 - protein, 14 aa, Homo sapiens
  CDR3 for alpha chain variable domain of TCR clone 229283 (TRAV23/DV6, TRAJ13)
CAASETGGYQKVTF

SEQ ID NO: 458566 - protein, 14 aa, Homo sapiens
  CDR3 for beta chain variable domain of TCR clone 229283 (TRBV28, TRBJ2-4)
CASTQVTGVNIQYF

SEQ ID NO: 458567 - protein, 14 aa, Homo sapiens
  CDR3 for alpha chain variable domain of TCR clone 229284 (TRAV8-6, TRAJ39)
CAVSERDAGNMLTF

SEQ ID NO: 458568 - protein, 13 aa, Homo sapiens
  CDR3 for beta chain variable domain of TCR clone 229284 (TRBV6-1, TRBJ1-1)
CASSRQGNTEAFF

SEQ ID NO: 458569 - protein, 16 aa, Homo sapiens
  CDR3 for alpha chain variable domain of TCR clone 229285 (TRAV8-3, TRAJ8)
CAVPRDGYTGFQKLVF

SEQ ID NO: 458570 - protein, 14 aa, Homo sapiens
  CDR3 for beta chain variable domain of TCR clone 229285 (TRBV28, TRBJ1-1)
CASSESGRGTEAFF

SEQ ID NO: 458571 - protein, 15 aa, Homo sapiens
  CDR3 for alpha chain variable domain of TCR clone 229286 (TRAV2, TRAJ37)
CAVVDGSSNTGKLIF

SEQ ID NO: 458572 - protein, 13 aa, Homo sapiens
  CDR3 for beta chain variable domain of TCR clone 229286 (TRBV20-1, TRBJ1-6)
CSTFREGNSHLHF

SEQ ID NO: 458573 - protein, 13 aa, Homo sapiens
  CDR3 for alpha chain variable domain of TCR clone 229287 (TRAV30, TRAJ24)
CGTVTDSLGTLQF

SEQ ID NO: 458574 - protein, 15 aa, Homo sapiens
  CDR3 for beta chain variable domain of TCR clone 229287 (TRBV25-1, TRBJ1-4)
CASSPGDSTNDKLFF

SEQ ID NO: 458575 - protein, 13 aa, Homo sapiens
  CDR3 for alpha chain variable domain of TCR clone 229288 (TRAV21, TRAJ27)
CAARPGNAGKSTF

SEQ ID NO: 458576 - protein, 16 aa, Homo sapiens
  CDR3 for beta chain variable domain of TCR clone 229288 (TRBV7-3, TRBJ2-1)
CASSLEGYRSYNEQFF

SEQ ID NO: 458577 - protein, 14 aa, Homo sapiens
  CDR3 for alpha chain variable domain of TCR clone 229289 (TRAV4, TRAJ17)
CLVGDMAAGNKVTF

SEQ ID NO: 458578 - protein, 14 aa, Homo sapiens
  CDR3 for beta chain variable domain of TCR clone 229289 (TRBV7-6, TRBJ2-3)
CASSLGTVTDTQYF

SEQ ID NO: 458579 - protein, 16 aa, Homo sapiens
  CDR3 for alpha chain variable domain of TCR clone 229290 (TRAV16, TRAJ4)
CALSRMFSGGYIKLIF

SEQ ID NO: 458580 - protein, 16 aa, Homo sapiens
  CDR3 for beta chain variable domain of TCR clone 229290 (TRBV24-1, TRBJ2-3)
CATSGPGTGATDTQYF

SEQ ID NO: 458581 - protein, 14 aa, Homo sapiens
  CDR3 for alpha chain variable domain of TCR clone 229291 (TRAV13-1, TRAJ35)
CAASKGGFGNVLHC

SEQ ID NO: 458582 - protein, 14 aa, Homo sapiens
  CDR3 for beta chain variable domain of TCR clone 229291 (TRBV7-9, TRBJ2-2)
CASSLVQDTGELFF

SEQ ID NO: 458583 - protein, 14 aa, Homo sapiens
  CDR3 for alpha chain variable domain of TCR clone 229292 (TRAV12-2, TRAJ13)
CAVKKTGGYQKVTF

SEQ ID NO: 458584 - protein, 11 aa, Homo sapiens
  CDR3 for beta chain variable domain of TCR clone 229292 (TRBV12-4, TRBJ2-2)
CASSSVGELFF

SEQ ID NO: 458585 - protein, 13 aa, Homo sapiens
  CDR3 for alpha chain variable domain of TCR clone 229293 (TRAV29/DV5, TRAJ38)
CAANTGNNRKLIW

SEQ ID NO: 458586 - protein, 13 aa, Homo sapiens
  CDR3 for beta chain variable domain of TCR clone 229293 (TRBV19, TRBJ1-1)
CASSPSNGGEAFF

SEQ ID NO: 458587 - protein, 16 aa, Homo sapiens
  CDR3 for alpha chain variable domain of TCR clone 229294 (TRAV30, TRAJ24)
CGTEIVDADSWGKFQL

SEQ ID NO: 458588 - protein, 14 aa, Homo sapiens
  CDR3 for beta chain variable domain of TCR clone 229294 (TRBV12-5, TRBJ2-5)
CASGSRTHQEDQYF

SEQ ID NO: 458589 - protein, 14 aa, Homo sapiens
  CDR3 for alpha chain variable domain of TCR clone 229295 (TRAV1-2, TRAJ16)
CAVNRFSDGQNLLF

SEQ ID NO: 458590 - protein, 13 aa, Homo sapiens
  CDR3 for beta chain variable domain of TCR clone 229295 (TRBV10-3, TRBJ2-7)
CASKLAVNYEQYF

SEQ ID NO: 458591 - protein, 14 aa, Homo sapiens
  CDR3 for alpha chain variable domain of TCR clone 229296 (TRAV12-2, TRAJ48)
CAVNAFFGNEKLTF

SEQ ID NO: 458592 - protein, 16 aa, Homo sapiens
  CDR3 for beta chain variable domain of TCR clone 229296 (TRBV5-1, TRBJ2-5)
CASSPSSGARTETQYF

SEQ ID NO: 458593 - protein, 12 aa, Homo sapiens
  CDR3 for alpha chain variable domain of TCR clone 229297 (TRAV16, TRAJ12)
CAHGDSSYNLIF

SEQ ID NO: 458594 - protein, 12 aa, Homo sapiens
  CDR3 for beta chain variable domain of TCR clone 229297 (TRBV28, TRBJ2-1)
CASSRLVGEQFF

SEQ ID NO: 458595 - protein, 12 aa, Homo sapiens
  CDR3 for alpha chain variable domain of TCR clone 229298 (TRAV5, TRAJ27)
CAEITNAGKSTF

SEQ ID NO: 458596 - protein, 14 aa, Homo sapiens
  CDR3 for beta chain variable domain of TCR clone 229298 (TRBV12-5, TRBJ2-5)
CASGSRTHQETQYC

SEQ ID NO: 458597 - protein, 14 aa, Homo sapiens
  CDR3 for alpha chain variable domain of TCR clone 229299 (TRAV27, TRAJ45)
CAGAQEEGLTDSPL

SEQ ID NO: 458598 - protein, 13 aa, Homo sapiens
  CDR3 for beta chain variable domain of TCR clone 229299 (TRBV7-6, TRBJ2-3)
CASSLRSDNTQYF

SEQ ID NO: 458599 - protein, 17 aa, Homo sapiens
  CDR3 for alpha chain variable domain of TCR clone 229300 (TRAV3, TRAJ42)
CAVRERDYGGSQGKLIF

SEQ ID NO: 458600 - protein, 15 aa, Homo sapiens
  CDR3 for beta chain variable domain of TCR clone 229300 (TRBV6-6, TRBJ2-7)
CASSYSYGGSYEQYF

SEQ ID NO: 458601 - protein, 13 aa, Homo sapiens
  CDR3 for alpha chain variable domain of TCR clone 229301 (TRAV17, TRAJ9)
CATDYTGGFKTIF

SEQ ID NO: 458602 - protein, 16 aa, Homo sapiens
  CDR3 for beta chain variable domain of TCR clone 229301 (TRBV7-7, TRBJ2-1)
CVSSLASGTSYNEQFF

SEQ ID NO: 458603 - protein, 15 aa, Homo sapiens
  CDR3 for alpha chain variable domain of TCR clone 229302 (TRAV17, TRAJ28)
CATVDSGAVSYQLTF

SEQ ID NO: 458604 - protein, 13 aa, Homo sapiens
  CDR3 for beta chain variable domain of TCR clone 229302 (TRBV4-2, TRBJ1-1)
CASSQAGNTEAFF

SEQ ID NO: 458605 - protein, 17 aa, Homo sapiens
  CDR3 for alpha chain variable domain of TCR clone 229303 (TRAV3, TRAJ6)
CSVRDGPRAGGRCIPTF

SEQ ID NO: 458606 - protein, 14 aa, Homo sapiens
  CDR3 for beta chain variable domain of TCR clone 229303 (TRBV7-2, TRBJ2-7)
CASSPKTSFYEQYF

SEQ ID NO: 458607 - protein, 15 aa, Homo sapiens
  CDR3 for alpha chain variable domain of TCR clone 229304 (TRAV38-1, TRAJ37)
CAFIFGSGNTGKLIF

SEQ ID NO: 458608 - protein, 14 aa, Homo sapiens
  CDR3 for beta chain variable domain of TCR clone 229304 (TRBV20-1, TRBJ2-5)
CSARDGRAGETQYF

SEQ ID NO: 458609 - protein, 14 aa, Homo sapiens
  CDR3 for alpha chain variable domain of TCR clone 229305 (TRAV12-2, TRAJ13)
CAVKKTGGYQIVTF

SEQ ID NO: 458610 - protein, 15 aa, Homo sapiens
  CDR3 for beta chain variable domain of TCR clone 229305 (TRBV7-2, TRBJ2-1)
CASSSGLAGGNEQFF

SEQ ID NO: 458611 - protein, 13 aa, Homo sapiens
  CDR3 for alpha chain variable domain of TCR clone 229306 (TRAV1-2, TRAJ12)
CAVSMDSSDKLIF

SEQ ID NO: 458612 - protein, 17 aa, Homo sapiens
  CDR3 for beta chain variable domain of TCR clone 229306 (TRBV11-2, TRBJ2-1)
CASSLYPPGVEYNEQFF

SEQ ID NO: 458613 - protein, 11 aa, Homo sapiens
  CDR3 for alpha chain variable domain of TCR clone 229307 (TRAV13-2, TRAJ20)
CADSNDYKLSF

SEQ ID NO: 458614 - protein, 16 aa, Homo sapiens
  CDR3 for beta chain variable domain of TCR clone 229307 (TRBV15, TRBJ1-2)
CATSRGPRTGGGGYTF

SEQ ID NO: 458615 - protein, 12 aa, Homo sapiens
  CDR3 for alpha chain variable domain of TCR clone 229308 (TRAV27, TRAJ35)
CAGADFGNVLHC

SEQ ID NO: 458616 - protein, 16 aa, Homo sapiens
  CDR3 for beta chain variable domain of TCR clone 229308 (TRBV2, TRBJ2-3)
CASSTSVEGVTDTQYF

SEQ ID NO: 458617 - protein, 15 aa, Homo sapiens
  CDR3 for alpha chain variable domain of TCR clone 229309 (TRAV12-3, TRAJ6)
CAVSATTGGSYIPTF

SEQ ID NO: 458618 - protein, 13 aa, Homo sapiens
  CDR3 for beta chain variable domain of TCR clone 229309 (TRBV4-2, TRBJ1-1)
CASSQAGNTEAFF

SEQ ID NO: 458619 - protein, 14 aa, Homo sapiens
  CDR3 for alpha chain variable domain of TCR clone 229310 (TRAV1-2, TRAJ8)
CAVREYTGFQKLVF

SEQ ID NO: 458620 - protein, 15 aa, Homo sapiens
  CDR3 for beta chain variable domain of TCR clone 229310 (TRBV7-2, TRBJ2-1)
CASSSGLAGGNEQFF

SEQ ID NO: 458621 - protein, 13 aa, Homo sapiens
  CDR3 for alpha chain variable domain of TCR clone 229311 (TRAV2, TRAJ21)
CAVEDLDFNKFYF

SEQ ID NO: 458622 - protein, 15 aa, Homo sapiens
  CDR3 for beta chain variable domain of TCR clone 229311 (TRBV28, TRBJ2-5)
CASSPGQGSIETPYC

SEQ ID NO: 458623 - protein, 15 aa, Homo sapiens
  CDR3 for alpha chain variable domain of TCR clone 229312 (TRAV12-3, TRAJ23)
CAMIMIYNQGGKLIF

SEQ ID NO: 458624 - protein, 14 aa, Homo sapiens
  CDR3 for beta chain variable domain of TCR clone 229312 (TRBV27, TRBJ1-5)
CASSLDPRNQPQHF

SEQ ID NO: 458625 - protein, 13 aa, Homo sapiens
  CDR3 for alpha chain variable domain of TCR clone 229313 (TRAV17, TRAJ44)
CATDYTGGFKTTF

SEQ ID NO: 458626 - protein, 16 aa, Homo sapiens
  CDR3 for beta chain variable domain of TCR clone 229313 (TRBV7-7, TRBJ2-1)
CASSLASGTSYNEQFF

SEQ ID NO: 458627 - protein, 15 aa, Homo sapiens
  CDR3 for alpha chain variable domain of TCR clone 229314 (TRAV13-1, TRAJ5)
CSASPRGHGQESTYF

SEQ ID NO: 458628 - protein, 17 aa, Homo sapiens
  CDR3 for beta chain variable domain of TCR clone 229314 (TRBV3-1, TRBJ2-2)
CASSQFRDKVDTGELFF

SEQ ID NO: 458629 - protein, 14 aa, Homo sapiens
  CDR3 for alpha chain variable domain of TCR clone 229315 (TRAV12-2, TRAJ13)
CAVKKTGGYQKVTF

SEQ ID NO: 458630 - protein, 13 aa, Homo sapiens
  CDR3 for beta chain variable domain of TCR clone 229315 (TRBV28, TRBJ2-7)
CASSTTRSYEQYF

SEQ ID NO: 458631 - protein, 11 aa, Homo sapiens
  CDR3 for alpha chain variable domain of TCR clone 229316 (TRAV12-1, TRAJ34)
CVVNKGRELIF

SEQ ID NO: 458632 - protein, 12 aa, Homo sapiens
  CDR3 for beta chain variable domain of TCR clone 229316 (TRBV19, TRBJ2-1)
CASSRQGSEQFF

SEQ ID NO: 458633 - protein, 14 aa, Homo sapiens
  CDR3 for alpha chain variable domain of TCR clone 229317 (TRAV12-2, TRAJ44)
YAVNPAGTASKLTF

SEQ ID NO: 458634 - protein, 13 aa, Homo sapiens
  CDR3 for beta chain variable domain of TCR clone 229317 (TRBV20-1, TRBJ1-6)
CSAPLGVGSPLHF

SEQ ID NO: 458635 - protein, 14 aa, Homo sapiens
  CDR3 for alpha chain variable domain of TCR clone 229318 (TRAV21, TRAJ35)
CSVMPIVFGNVLHC

SEQ ID NO: 458636 - protein, 12 aa, Homo sapiens
  CDR3 for beta chain variable domain of TCR clone 229318 (TRBV7-9, TRBJ2-7)
CASSIKREEQYF

SEQ ID NO: 458637 - protein, 13 aa, Homo sapiens
  CDR3 for alpha chain variable domain of TCR clone 229319 (TRAV1-2, TRAJ9)
CAALYTGGFKTIF

SEQ ID NO: 458638 - protein, 12 aa, Homo sapiens
  CDR3 for beta chain variable domain of TCR clone 229319 (TRBV11-3, TRBJ1-1)
CASSHRQGEAFF

SEQ ID NO: 458639 - protein, 13 aa, Homo sapiens
  CDR3 for alpha chain variable domain of TCR clone 229320 (TRAV8-6, TRAJ49)
CAVITNTGNQFYF

SEQ ID NO: 458640 - protein, 13 aa, Homo sapiens
  CDR3 for beta chain variable domain of TCR clone 229320 (TRBV12-4, TRBJ2-5)
CASRLAVQETQYF

SEQ ID NO: 458641 - protein, 14 aa, Homo sapiens
  CDR3 for alpha chain variable domain of TCR clone 229321 (TRAV2, TRAJ20)
CAVEDGTNDYKLSF

SEQ ID NO: 458642 - protein, 15 aa, Homo sapiens
  CDR3 for beta chain variable domain of TCR clone 229321 (TRBV5-1, TRBJ1-1)
CASSLGEGENTEAFF

SEQ ID NO: 458643 - protein, 10 aa, Homo sapiens
  CDR3 for alpha chain variable domain of TCR clone 229322 (TRAV20, TRAJ3)
CFSLQQCFQD

SEQ ID NO: 458644 - protein, 16 aa, Homo sapiens
  CDR3 for beta chain variable domain of TCR clone 229322 (TRBV6-1, TRBJ1-6)
CASSSDGSPRNSTLHF

SEQ ID NO: 458645 - protein, 14 aa, Homo sapiens
  CDR3 for alpha chain variable domain of TCR clone 229323 (TRAV3, TRAJ21)
CAVRDKYNFNKFYF

SEQ ID NO: 458646 - protein, 14 aa, Homo sapiens
  CDR3 for beta chain variable domain of TCR clone 229323 (TRBV27, TRBJ2-3)
CASRHSPITDTQYF

SEQ ID NO: 458647 - protein, 14 aa, Homo sapiens
  CDR3 for alpha chain variable domain of TCR clone 229324 (TRAV35, TRAJ33)
CAGSSQDSNYQLIW

SEQ ID NO: 458648 - protein, 14 aa, Homo sapiens
  CDR3 for beta chain variable domain of TCR clone 229324 (TRBV19, TRBJ2-7)
CASNFRDTFTGMYF

SEQ ID NO: 458649 - protein, 13 aa, Homo sapiens
  CDR3 for alpha chain variable domain of TCR clone 229325 (TRAV20, TRAJ42)
CAVQGGSQGNLIF

SEQ ID NO: 458650 - protein, 15 aa, Homo sapiens
  CDR3 for beta chain variable domain of TCR clone 229325 (TRBV10-1, TRBJ2-1)
CASSEWRGTYNKQFF

SEQ ID NO: 458651 - protein, 14 aa, Homo sapiens
  CDR3 for alpha chain variable domain of TCR clone 229326 (TRAV1-2, TRAJ6)
CAVRASGGSYIPTF

SEQ ID NO: 458652 - protein, 15 aa, Homo sapiens
  CDR3 for beta chain variable domain of TCR clone 229326 (TRBV5-1, TRBJ2-3)
CASSVTSGSTDTQYF

SEQ ID NO: 458653 - protein, 13 aa, Homo sapiens
  CDR3 for alpha chain variable domain of TCR clone 229327 (TRAV8-6, TRAJ49)
CSVITNTGNQFYF

SEQ ID NO: 458654 - protein, 14 aa, Homo sapiens
  CDR3 for beta chain variable domain of TCR clone 229327 (TRBV19, TRBJ2-1)
CASKDPGLSNEQFF

SEQ ID NO: 458655 - protein, 14 aa, Homo sapiens
  CDR3 for alpha chain variable domain of TCR clone 229328 (TRAV1-2, TRAJ16)
CAVNRFSDGQKLLF

SEQ ID NO: 458656 - protein, 16 aa, Homo sapiens
  CDR3 for beta chain variable domain of TCR clone 229328 (TRBV12-4, TRBJ1-5)
CASIRPVGGSNQPQHF

SEQ ID NO: 458657 - protein, 18 aa, Homo sapiens
  CDR3 for alpha chain variable domain of TCR clone 229329 (TRAV21, TRAJ52)
CAVRPSPAGGTSYGKLTF

SEQ ID NO: 458658 - protein, 13 aa, Homo sapiens
  CDR3 for beta chain variable domain of TCR clone 229329 (TRBV29-1, TRBJ2-1)
CSVEGGRFNEQFF

SEQ ID NO: 458659 - protein, 12 aa, Homo sapiens
  CDR3 for alpha chain variable domain of TCR clone 229330 (TRAV13-2, TRAJ8)
FAPWVGFQKLVF

SEQ ID NO: 458660 - protein, 15 aa, Homo sapiens
  CDR3 for beta chain variable domain of TCR clone 229330 (TRBV7-2, TRBJ2-1)
CASSSGLAGGNEQFF

SEQ ID NO: 458661 - protein, 13 aa, Homo sapiens
  CDR3 for alpha chain variable domain of TCR clone 229331 (TRAV30, TRAJ20)
CGTEDRSDYKLSF

SEQ ID NO: 458662 - protein, 15 aa, Homo sapiens
  CDR3 for beta chain variable domain of TCR clone 229331 (TRBV2, TRBJ1-2)
CASNQVQDSNYGYTF

SEQ ID NO: 458663 - protein, 10 aa, Homo sapiens
  CDR3 for alpha chain variable domain of TCR clone 229332 (TRAV1-2, TRAJ23)
CAGQGGKLIF

SEQ ID NO: 458664 - protein, 16 aa, Homo sapiens
  CDR3 for beta chain variable domain of TCR clone 229332 (TRBV11-2, TRBJ1-1)
CASSLRQGGEHSKSFF

SEQ ID NO: 458665 - protein, 16 aa, Homo sapiens
  CDR3 for alpha chain variable domain of TCR clone 229333 (TRAV14/DV4, TRAJ53)
CAMREGGGGSNYKLTF

SEQ ID NO: 458666 - protein, 18 aa, Homo sapiens
  CDR3 for beta chain variable domain of TCR clone 229333 (TRBV18, TRBJ1-3)
CANSPRGGAGPSGNTIYF

SEQ ID NO: 458667 - protein, 13 aa, Homo sapiens
  CDR3 for alpha chain variable domain of TCR clone 229334 (TRAV12-2, TRAJ9)
CAGGNTGGFKTIL

SEQ ID NO: 458668 - protein, 17 aa, Homo sapiens
  CDR3 for beta chain variable domain of TCR clone 229334 (TRBV4-1, TRBJ2-1)
CASSQGRGGGLYNEQFF

SEQ ID NO: 458669 - protein, 11 aa, Homo sapiens
  CDR3 for alpha chain variable domain of TCR clone 229335 (TRAV12-3, TRAJ27)
CAMANAGKSIF

SEQ ID NO: 458670 - protein, 13 aa, Homo sapiens
  CDR3 for beta chain variable domain of TCR clone 229335 (TRBV20-1, TRBJ1-1)
CSARVGGNTEAFF

SEQ ID NO: 458671 - protein, 12 aa, Homo sapiens
  CDR3 for alpha chain variable domain of TCR clone 229336 (TRAV17, TRAJ28)
WDSGAGSYQLTF

SEQ ID NO: 458672 - protein, 11 aa, Homo sapiens
  CDR3 for beta chain variable domain of TCR clone 229336 (TRBV12-4, TRBJ2-3)
CASTATDTQYF

SEQ ID NO: 458673 - protein, 16 aa, Homo sapiens
  CDR3 for alpha chain variable domain of TCR clone 229337 (TRAV17, TRAJ35)
CATAEGGIGFGNVLHC

SEQ ID NO: 458674 - protein, 16 aa, Homo sapiens
  CDR3 for beta chain variable domain of TCR clone 229337 (TRBV6-5, TRBJ2-7)
CASSSDPTRGFYEQYF

SEQ ID NO: 458675 - protein, 17 aa, Homo sapiens
  CDR3 for alpha chain variable domain of TCR clone 229338 (TRAV3, TRAJ6)
CAVRDGPRAGGSYIPTF

SEQ ID NO: 458676 - protein, 19 aa, Homo sapiens
  CDR3 for beta chain variable domain of TCR clone 229338 (TRBV28, TRBJ2-1)
CQHPIGRSPGLAGGNEQFF

SEQ ID NO: 458677 - protein, 13 aa, Homo sapiens
  CDR3 for alpha chain variable domain of TCR clone 229339 (TRAV2, TRAJ40)
CAVVTSGTYKYIF

SEQ ID NO: 458678 - protein, 12 aa, Homo sapiens
  CDR3 for beta chain variable domain of TCR clone 229339 (TRBV11-2, TRBJ2-7)
CASSLPTYEQYF

SEQ ID NO: 458679 - protein, 16 aa, Homo sapiens
  CDR3 for alpha chain variable domain of TCR clone 229340 (TRAV3, TRAJ37)
CAVRPHGSVNTGKLIF

SEQ ID NO: 458680 - protein, 17 aa, Homo sapiens
  CDR3 for beta chain variable domain of TCR clone 229340 (TRBV7-2, TRBJ2-7)
CASSFETSGSTSSTSGR

SEQ ID NO: 458681 - protein, 14 aa, Homo sapiens
  CDR3 for alpha chain variable domain of TCR clone 229341 (TRAV1-2, TRAJ8)
CAVREDTGFQKLVF

SEQ ID NO: 458682 - protein, 17 aa, Homo sapiens
  CDR3 for beta chain variable domain of TCR clone 229341 (TRBV12-4, TRBJ2-2)
CASSLGVGRGGTGELFF

SEQ ID NO: 458683 - protein, 11 aa, Homo sapiens
  CDR3 for alpha chain variable domain of TCR clone 229342 (TRAV36/DV7, TRAJ54)
CAVEGAQKLVF

SEQ ID NO: 458684 - protein, 11 aa, Homo sapiens
  CDR3 for beta chain variable domain of TCR clone 229342 (TRBV6-5, TRBJ1-1)
CATGTGGAAFF

SEQ ID NO: 458685 - protein, 11 aa, Homo sapiens
  CDR3 for alpha chain variable domain of TCR clone 229343 (TRAV2, TRAJ33)
CAVDSNYQLIW

SEQ ID NO: 458686 - protein, 17 aa, Homo sapiens
  CDR3 for beta chain variable domain of TCR clone 229343 (TRBV28, TRBJ2-5)
CASSRQGGLAGAETQYF

SEQ ID NO: 458687 - protein, 16 aa, Homo sapiens
  CDR3 for alpha chain variable domain of TCR clone 229344 (TRAV3, TRAJ3)
CAVRDRAKSSASKIIF

SEQ ID NO: 458688 - protein, 16 aa, Homo sapiens
  CDR3 for beta chain variable domain of TCR clone 229344 (TRBV20-1, TRBJ2-4)
CSATSLAGLAKNIQFF

SEQ ID NO: 458689 - protein, 14 aa, Homo sapiens
  CDR3 for alpha chain variable domain of TCR clone 229345 (TRAV1-2, TRAJ8)
CAVREDTGFQKLVF

SEQ ID NO: 458690 - protein, 15 aa, Homo sapiens
  CDR3 for beta chain variable domain of TCR clone 229345 (TRBV12-4, TRBJ2-1)
CASSPPTGLQETQYF

SEQ ID NO: 458691 - protein, 15 aa, Homo sapiens
  CDR3 for alpha chain variable domain of TCR clone 229346 (TRAV12-1, TRAJ43)
CAFDMRFGAGTRLTV

SEQ ID NO: 458692 - protein, 18 aa, Homo sapiens
  CDR3 for beta chain variable domain of TCR clone 229346 (TRBV20-1, TRBJ2-3)
CSASGLAGGPGTTDTQYF

SEQ ID NO: 458693 - protein, 15 aa, Homo sapiens
  CDR3 for alpha chain variable domain of TCR clone 229347 (TRAV13-1, TRAJ10)
CAATILTGGRNKLTF

SEQ ID NO: 458694 - protein, 13 aa, Homo sapiens
  CDR3 for beta chain variable domain of TCR clone 229347 (TRBV12-4, TRBJ1-2)
CASSLRQGKGYTF

SEQ ID NO: 458695 - protein, 16 aa, Homo sapiens
  CDR3 for alpha chain variable domain of TCR clone 229348 (TRAV3, TRAJ37)
CAVRGTGSGNTGKLIF

SEQ ID NO: 458696 - protein, 13 aa, Homo sapiens
  CDR3 for beta chain variable domain of TCR clone 229348 (TRBV14, TRBJ2-7)
CASSQDRRYEQYF

SEQ ID NO: 458697 - protein, 14 aa, Homo sapiens
  CDR3 for alpha chain variable domain of TCR clone 229349 (TRAV17, TRAJ49)
CATDARDTGNQFYF

SEQ ID NO: 458698 - protein, 14 aa, Homo sapiens
  CDR3 for beta chain variable domain of TCR clone 229349 (TRBV5-5, TRBJ1-2)
CASSFGHINYGYTF

SEQ ID NO: 458699 - protein, 16 aa, Homo sapiens
  CDR3 for alpha chain variable domain of TCR clone 229350 (TRAV27, TRAJ13)
CAGAKSDSGGYQKVTF

SEQ ID NO: 458700 - protein, 20 aa, Homo sapiens
  CDR3 for beta chain variable domain of TCR clone 229350 (TRBV7-8, TRBJ2-2)
CASSHLFPGPTINITGGLFF

SEQ ID NO: 458701 - protein, 15 aa, Homo sapiens
  CDR3 for alpha chain variable domain of TCR clone 229351 (TRAV17, TRAJ56)
CATDANTGANSKLTF

SEQ ID NO: 458702 - protein, 14 aa, Homo sapiens
  CDR3 for beta chain variable domain of TCR clone 229351 (TRBV11-2, TRBJ2-5)
CASSRTGGIETQYF

SEQ ID NO: 458703 - protein, 15 aa, Homo sapiens
  CDR3 for alpha chain variable domain of TCR clone 229352 (TRAV29/DV5, TRAJ42)
CAAKTDGGSQGNLIF

SEQ ID NO: 458704 - protein, 12 aa, Homo sapiens
  CDR3 for beta chain variable domain of TCR clone 229352 (TRBV11-2, TRBJ2-1)
CASSPGNNEQLF

SEQ ID NO: 458705 - protein, 11 aa, Homo sapiens
  CDR3 for alpha chain variable domain of TCR clone 229353 (TRAV8-3, TRAJ15)
CAVGPGTALIF

SEQ ID NO: 458706 - protein, 13 aa, Homo sapiens
  CDR3 for beta chain variable domain of TCR clone 229353 (TRBV7-3, TRBJ1-1)
CASSQDWGAEAFF

SEQ ID NO: 458707 - protein, 13 aa, Homo sapiens
  CDR3 for alpha chain variable domain of TCR clone 229354 (TRAV35, TRAJ42)
CAGFPGSQGNLIF

SEQ ID NO: 458708 - protein, 14 aa, Homo sapiens
  CDR3 for beta chain variable domain of TCR clone 229354 (TRBV7-8, TRBJ2-3)
CASSLEAGTDTQYF

SEQ ID NO: 458709 - protein, 15 aa, Homo sapiens
  CDR3 for alpha chain variable domain of TCR clone 229355 (TRAV26-1, TRAJ29)
CIFRVEGSGNTPLVF

SEQ ID NO: 458710 - protein, 14 aa, Homo sapiens
  CDR3 for beta chain variable domain of TCR clone 229355 (TRBV20-1, TRBJ2-1)
CSAQIGGSANEQFF

SEQ ID NO: 458711 - protein, 14 aa, Homo sapiens
  CDR3 for alpha chain variable domain of TCR clone 229356 (TRAV17, TRAJ56)
CTTVPAGANSKLTF

SEQ ID NO: 458712 - protein, 17 aa, Homo sapiens
  CDR3 for beta chain variable domain of TCR clone 229356 (TRBV19, TRBJ2-6)
CASSTGQVFSGANVLTF

SEQ ID NO: 458713 - protein, 20 aa, Homo sapiens
  CDR3 for alpha chain variable domain of TCR clone 229357 (TRAV21, TRAJ4)
AASQPGDSATLAGGYNKLIF

SEQ ID NO: 458714 - protein, 11 aa, Homo sapiens
  CDR3 for beta chain variable domain of TCR clone 229357 (TRBV12-4, TRBJ2-3)
CASTATDTQYF

SEQ ID NO: 458715 - protein, 14 aa, Homo sapiens
  CDR3 for alpha chain variable domain of TCR clone 229358 (TRAV1-2, TRAJ8)
CAVREDTGFQKPVF

SEQ ID NO: 458716 - protein, 15 aa, Homo sapiens
  CDR3 for beta chain variable domain of TCR clone 229358 (TRBV6-1, TRBJ2-6)
CASSSRPSGANVLTF

SEQ ID NO: 458717 - protein, 13 aa, Homo sapiens
  CDR3 for alpha chain variable domain of TCR clone 229359 (TRAV8-3, TRAJ48)
CAVVPFGKEKLTF

SEQ ID NO: 458718 - protein, 19 aa, Homo sapiens
  CDR3 for beta chain variable domain of TCR clone 229359 (TRBV25-1, TRBJ2-2)
CAILVYRVDRGRKTGELFF

SEQ ID NO: 458719 - protein, 15 aa, Homo sapiens
  CDR3 for alpha chain variable domain of TCR clone 229360 (TRAV22, TRAJ45)
CAAKYSGGGADGLTF

SEQ ID NO: 458720 - protein, 14 aa, Homo sapiens
  CDR3 for beta chain variable domain of TCR clone 229360 (TRBV5-1, TRBJ2-3)
CASSSFGPTDTQYF

SEQ ID NO: 458721 - protein, 14 aa, Homo sapiens
  CDR3 for alpha chain variable domain of TCR clone 229361 (TRAV12-2, TRAJ24)
CAVTPADSWGKLQF

SEQ ID NO: 458722 - protein, 12 aa, Homo sapiens
  CDR3 for beta chain variable domain of TCR clone 229361 (TRBV11-2, TRBJ2-1)
CASSPGNNEQFF

SEQ ID NO: 458723 - protein, 13 aa, Homo sapiens
  CDR3 for alpha chain variable domain of TCR clone 229362 (TRAV3, TRAJ26)
CAVSRGYGQNFVF

SEQ ID NO: 458724 - protein, 13 aa, Homo sapiens
  CDR3 for beta chain variable domain of TCR clone 229362 (TRBV7-3, TRBJ1-1)
CASSQDWGAEAFF

SEQ ID NO: 458725 - protein, 14 aa, Homo sapiens
  CDR3 for alpha chain variable domain of TCR clone 229363 (TRAV24, TRAJ42)
CAQNYGGSQGNRIF

SEQ ID NO: 458726 - protein, 15 aa, Homo sapiens
  CDR3 for beta chain variable domain of TCR clone 229363 (TRBV19, TRBJ1-5)
CASSIPGGAGQPQHF

SEQ ID NO: 458727 - protein, 11 aa, Homo sapiens
  CDR3 for alpha chain variable domain of TCR clone 229364 (TRAV17, TRAJ9)
CGFTGGFKTIF

SEQ ID NO: 458728 - protein, 15 aa, Homo sapiens
  CDR3 for beta chain variable domain of TCR clone 229364 (TRBV4-1, TRBJ1-2)
CASSQGQGAAYGYTF

SEQ ID NO: 458729 - protein, 13 aa, Homo sapiens
  CDR3 for alpha chain variable domain of TCR clone 229365 (TRAV39, TRAJ58)
CAGEETSGSRLTF

SEQ ID NO: 458730 - protein, 13 aa, Homo sapiens
  CDR3 for beta chain variable domain of TCR clone 229365 (TRBV15, TRBJ2-7)
CGTSTTGHYEQYF

SEQ ID NO: 458731 - protein, 14 aa, Homo sapiens
  CDR3 for alpha chain variable domain of TCR clone 229366 (TRAV2, TRAJ9)
CAVEDRCGGFKTIF

SEQ ID NO: 458732 - protein, 14 aa, Homo sapiens
  CDR3 for beta chain variable domain of TCR clone 229366 (TRBV20-1, TRBJ2-1)
CSAQIGGSANEQFF

SEQ ID NO: 458733 - protein, 14 aa, Homo sapiens
  CDR3 for alpha chain variable domain of TCR clone 229367 (TRAV10, TRAJ48)
CVGVFHFGNEKLTF

SEQ ID NO: 458734 - protein, 18 aa, Homo sapiens
  CDR3 for beta chain variable domain of TCR clone 229367 (TRBV27, TRBJ2-3)
CVSSLSGTSGRGTDTQYF

SEQ ID NO: 458735 - protein, 15 aa, Homo sapiens
  CDR3 for alpha chain variable domain of TCR clone 229368 (TRAV12-3, TRAJ6)
CAMSATSGGSYIPTF

SEQ ID NO: 458736 - protein, 15 aa, Homo sapiens
  CDR3 for beta chain variable domain of TCR clone 229368 (TRBV5-1, TRBJ2-6)
CAGSLDPSGANVLTF

SEQ ID NO: 458737 - protein, 15 aa, Homo sapiens
  CDR3 for alpha chain variable domain of TCR clone 229369 (TRAV35, TRAJ20)
CAGQLVGSNDYKLSF

SEQ ID NO: 458738 - protein, 13 aa, Homo sapiens
  CDR3 for beta chain variable domain of TCR clone 229369 (TRBV19, TRBJ2-7)
CASSITGTHEQYF

SEQ ID NO: 458739 - protein, 14 aa, Homo sapiens
  CDR3 for alpha chain variable domain of TCR clone 229370 (TRAV13-1, TRAJ45)
CAAIGGGGADGLTF

SEQ ID NO: 458740 - protein, 17 aa, Homo sapiens
  CDR3 for beta chain variable domain of TCR clone 229370 (TRBV11-2, TRBJ2-1)
CASSLYPPGVEYNEQFF

SEQ ID NO: 458741 - protein, 14 aa, Homo sapiens
  CDR3 for alpha chain variable domain of TCR clone 229371 (TRAV26-2, TRAJ32)
CILLRGGATNKLIF

SEQ ID NO: 458742 - protein, 15 aa, Homo sapiens
  CDR3 for beta chain variable domain of TCR clone 229371 (TRBV2, TRBJ2-2)
CASSGFGAGTGELFF

SEQ ID NO: 458743 - protein, 11 aa, Homo sapiens
  CDR3 for alpha chain variable domain of TCR clone 229372 (TRAV3, TRAJ21)
CAVGNFNKFYF

SEQ ID NO: 458744 - protein, 15 aa, Homo sapiens
  CDR3 for beta chain variable domain of TCR clone 229372 (TRBV12-4, TRBJ2-1)
CASSGSGGTLGEQFF

SEQ ID NO: 458745 - protein, 14 aa, Homo sapiens
  CDR3 for alpha chain variable domain of TCR clone 229373 (TRAV26-1, TRAJ34)
CIVRVAYNTDKLIF

SEQ ID NO: 458746 - protein, 15 aa, Homo sapiens
  CDR3 for beta chain variable domain of TCR clone 229373 (TRBV7-9, TRBJ1-4)
CTSSRTGGFNEKLFF

SEQ ID NO: 458747 - protein, 12 aa, Homo sapiens
  CDR3 for alpha chain variable domain of TCR clone 229374 (TRAV13-1, TRAJ21)
YAAFFNFNKFYF

SEQ ID NO: 458748 - protein, 14 aa, Homo sapiens
  CDR3 for beta chain variable domain of TCR clone 229374 (TRBV4-1, TRBJ2-7)
CASRLTSGSYEQYF

SEQ ID NO: 458749 - protein, 14 aa, Homo sapiens
  CDR3 for alpha chain variable domain of TCR clone 229375 (TRAV8-4, TRAJ54)
CAVSEVLGAQKLVF

SEQ ID NO: 458750 - protein, 13 aa, Homo sapiens
  CDR3 for beta chain variable domain of TCR clone 229375 (TRBV29-1, TRBJ2-1)
CSVEGGRVNEQFF

SEQ ID NO: 458751 - protein, 14 aa, Homo sapiens
  CDR3 for alpha chain variable domain of TCR clone 229376 (TRAV3, TRAJ8)
CAVSLNTGFQKLVF

SEQ ID NO: 458752 - protein, 13 aa, Homo sapiens
  CDR3 for beta chain variable domain of TCR clone 229376 (TRBV4-2, TRBJ2-1)
CASSPGTYNEQFF

SEQ ID NO: 458753 - protein, 13 aa, Homo sapiens
  CDR3 for alpha chain variable domain of TCR clone 229377 (TRAV8-3, TRAJ36)
CAVGATGANNIFF

SEQ ID NO: 458754 - protein, 15 aa, Homo sapiens
  CDR3 for beta chain variable domain of TCR clone 229377 (TRBV7-2, TRBJ1-2)
CASSPRAGWNYGDTF

SEQ ID NO: 458755 - protein, 13 aa, Homo sapiens
  CDR3 for alpha chain variable domain of TCR clone 229378 (TRAV20, TRAJ21)
CAVEGYNFNKFYF

SEQ ID NO: 458756 - protein, 14 aa, Homo sapiens
  CDR3 for beta chain variable domain of TCR clone 229378 (TRBV9, TRBJ2-3)
CTSSVGLSTDTQYF

SEQ ID NO: 458757 - protein, 17 aa, Homo sapiens
  CDR3 for alpha chain variable domain of TCR clone 229379 (TRAV3, TRAJ42)
CAVRDREYGGRQGNLIF

SEQ ID NO: 458758 - protein, 14 aa, Homo sapiens
  CDR3 for beta chain variable domain of TCR clone 229379 (TRBV19, TRBJ2-5)
CASSMTGQQETQYF

SEQ ID NO: 458759 - protein, 14 aa, Homo sapiens
  CDR3 for alpha chain variable domain of TCR clone 229380 (TRAV1-2, TRAJ16)
CAVNRFSDGQKLLF

SEQ ID NO: 458760 - protein, 14 aa, Homo sapiens
  CDR3 for beta chain variable domain of TCR clone 229380 (TRBV25-1, TRBJ1-1)
CASTHRGGNTEAFF

SEQ ID NO: 458761 - protein, 13 aa, Homo sapiens
  CDR3 for alpha chain variable domain of TCR clone 229381 (TRAV3, TRAJ27)
CAVRPLGAGQSTF

SEQ ID NO: 458762 - protein, 13 aa, Homo sapiens
  CDR3 for beta chain variable domain of TCR clone 229381 (TRBV7-9, TRBJ2-3)
CASSPESTDTQYF

SEQ ID NO: 458763 - protein, 14 aa, Homo sapiens
  CDR3 for alpha chain variable domain of TCR clone 229382 (TRAV16, TRAJ33)
CALSAMDSNYQLIW

SEQ ID NO: 458764 - protein, 15 aa, Homo sapiens
  CDR3 for beta chain variable domain of TCR clone 229382 (TRBV28, TRBJ2-7)
CASSVEAYPIYEQYF

SEQ ID NO: 458765 - protein, 14 aa, Homo sapiens
  CDR3 for alpha chain variable domain of TCR clone 229383 (TRAV12-1, TRAJ17)
CVVNYRAAGNKLTF

SEQ ID NO: 458766 - protein, 14 aa, Homo sapiens
  CDR3 for beta chain variable domain of TCR clone 229383 (TRBV7-2, TRBJ2-7)
CASRSQGAAYEQYF

SEQ ID NO: 458767 - protein, 16 aa, Homo sapiens
  CDR3 for alpha chain variable domain of TCR clone 229384 (TRAV21, TRAJ37)
CAVRTAGSSNTGTLLF

SEQ ID NO: 458768 - protein, 13 aa, Homo sapiens
  CDR3 for beta chain variable domain of TCR clone 229384 (TRBV7-9, TRBJ2-5)
CASLPSGRETQYF

SEQ ID NO: 458769 - protein, 12 aa, Homo sapiens
  CDR3 for alpha chain variable domain of TCR clone 229385 (TRAV12-1, TRAJ16)
CVVFRDGQKLLF

SEQ ID NO: 458770 - protein, 16 aa, Homo sapiens
  CDR3 for beta chain variable domain of TCR clone 229385 (TRBV27, TRBJ2-5)
CASSYGPGGQKETQYV

SEQ ID NO: 458771 - protein, 17 aa, Homo sapiens
  CDR3 for alpha chain variable domain of TCR clone 229386 (TRAV3, TRAJ6)
CAVRDGPRAVGSYIPTF

SEQ ID NO: 458772 - protein, 14 aa, Homo sapiens
  CDR3 for beta chain variable domain of TCR clone 229386 (TRBV7-2, TRBJ2-7)
CASSPKTSFYEKYF

SEQ ID NO: 458773 - protein, 12 aa, Homo sapiens
  CDR3 for alpha chain variable domain of TCR clone 229387 (TRAV1-2, TRAJ26)
CAVSPYGQNFGF

SEQ ID NO: 458774 - protein, 14 aa, Homo sapiens
  CDR3 for beta chain variable domain of TCR clone 229387 (TRBV5-1, TRBJ2-7)
CASSFASGVNEQYF

SEQ ID NO: 458775 - protein, 13 aa, Homo sapiens
  CDR3 for alpha chain variable domain of TCR clone 229388 (TRAV3, TRAJ21)
CAVREPDFNNFYF

SEQ ID NO: 458776 - protein, 15 aa, Homo sapiens
  CDR3 for beta chain variable domain of TCR clone 229388 (TRBV9, TRBJ1-6)
CASSVAGTGDSPLHF

SEQ ID NO: 458777 - protein, 18 aa, Homo sapiens
  CDR3 for alpha chain variable domain of TCR clone 229389 (TRAV21, TRAJ52)
CAVRPSPAGGTSYGKLTF

SEQ ID NO: 458778 - protein, 17 aa, Homo sapiens
  CDR3 for beta chain variable domain of TCR clone 229389 (TRBV13, TRBJ2-3)
CASCLARVAGGRNTQYF

SEQ ID NO: 458779 - protein, 15 aa, Homo sapiens
  CDR3 for alpha chain variable domain of TCR clone 229390 (TRAV4, TRAJ17)
CLVGDVGAAGNKLTF

SEQ ID NO: 458780 - protein, 14 aa, Homo sapiens
  CDR3 for beta chain variable domain of TCR clone 229390 (TRBV6-3, TRBJ2-7)
CASSYSVRVYEQYF

SEQ ID NO: 458781 - protein, 14 aa, Homo sapiens
  CDR3 for alpha chain variable domain of TCR clone 229391 (TRAV34, TRAJ44)
CGADGTGTASKLTF

SEQ ID NO: 458782 - protein, 16 aa, Homo sapiens
  CDR3 for beta chain variable domain of TCR clone 229391 (TRBV2, TRBJ2-5)
CASSETQGVGEETQFF

SEQ ID NO: 458783 - protein, 12 aa, Homo sapiens
  CDR3 for alpha chain variable domain of TCR clone 229392 (TRAV20, TRAJ56)
CAVTGANSKLTF

SEQ ID NO: 458784 - protein, 14 aa, Homo sapiens
  CDR3 for beta chain variable domain of TCR clone 229392 (TRBV20-1, TRBJ2-5)
CSALVPGYQETQYP

SEQ ID NO: 458785 - protein, 13 aa, Homo sapiens
  CDR3 for alpha chain variable domain of TCR clone 229393 (TRAV1-2, TRAJ31)
CAVRPNNNARLMF

SEQ ID NO: 458786 - protein, 15 aa, Homo sapiens
  CDR3 for beta chain variable domain of TCR clone 229393 (TRBV7-9, TRBJ1-4)
CASSRTGGFNEKLFF

SEQ ID NO: 458787 - protein, 15 aa, Homo sapiens
  CDR3 for alpha chain variable domain of TCR clone 229394 (TRAV8-4, TRAJ5)
CAVKSRDTGRRALTF

SEQ ID NO: 458788 - protein, 16 aa, Homo sapiens
  CDR3 for beta chain variable domain of TCR clone 229394 (TRBV28, TRBJ2-1)
CASSSPGYPRDNEQFF

SEQ ID NO: 458789 - protein, 14 aa, Homo sapiens
  CDR3 for alpha chain variable domain of TCR clone 229395 (TRAV3, TRAJ5)
CAVRSDAGRRALTF

SEQ ID NO: 458790 - protein, 14 aa, Homo sapiens
  CDR3 for beta chain variable domain of TCR clone 229395 (TRBV7-2, TRBJ2-3)
SASSFVMPTDTQYF

SEQ ID NO: 458791 - protein, 16 aa, Homo sapiens
  CDR3 for alpha chain variable domain of TCR clone 229396 (TRAV12-2, TRAJ45)
CAVKRSQGGGADGLTF

SEQ ID NO: 458792 - protein, 12 aa, Homo sapiens
  CDR3 for beta chain variable domain of TCR clone 229396 (TRBV6-1, TRBJ2-5)
CASSEGRETQYF

SEQ ID NO: 458793 - protein, 17 aa, Homo sapiens
  CDR3 for alpha chain variable domain of TCR clone 229397 (TRAV36/DV7, TRAJ52)
CAVAQRAGGTSHGKLTF

SEQ ID NO: 458794 - protein, 14 aa, Homo sapiens
  CDR3 for beta chain variable domain of TCR clone 229397 (TRBV20-1, TRBJ1-1)
CSAQTRIGGTEAFF

SEQ ID NO: 458795 - protein, 11 aa, Homo sapiens
  CDR3 for alpha chain variable domain of TCR clone 229398 (TRAV17, TRAJ56)
CATGANSKLTF

SEQ ID NO: 458796 - protein, 16 aa, Homo sapiens
  CDR3 for beta chain variable domain of TCR clone 229398 (TRBV9, TRBJ2-2)
CASSAMGKGNTGELFF

SEQ ID NO: 458797 - protein, 12 aa, Homo sapiens
  CDR3 for alpha chain variable domain of TCR clone 229399 (TRAV12-1, TRAJ40)
CVVYSGTYKYIF

SEQ ID NO: 458798 - protein, 14 aa, Homo sapiens
  CDR3 for beta chain variable domain of TCR clone 229399 (TRBV7-9, TRBJ2-5)
CASSLDKAQETQYF

SEQ ID NO: 458799 - protein, 14 aa, Homo sapiens
  CDR3 for alpha chain variable domain of TCR clone 229400 (TRAV27, TRAJ40)
CAGSLLRGTYKYIF

SEQ ID NO: 458800 - protein, 17 aa, Homo sapiens
  CDR3 for beta chain variable domain of TCR clone 229400 (TRBV6-3, TRBJ1-4)
CASSSPGRKMKNCFLAV

SEQ ID NO: 458801 - protein, 13 aa, Homo sapiens
  CDR3 for alpha chain variable domain of TCR clone 229401 (TRAV3, TRAJ4)
CAVRDGGYKKLIF

SEQ ID NO: 458802 - protein, 15 aa, Homo sapiens
  CDR3 for beta chain variable domain of TCR clone 229401 (TRBV5-1, TRBJ2-1)
CASSPPRAPYNEQFF

SEQ ID NO: 458803 - protein, 12 aa, Homo sapiens
  CDR3 for alpha chain variable domain of TCR clone 229402 (TRAV21, TRAJ33)
CAKMDSNYQLIL

SEQ ID NO: 458804 - protein, 15 aa, Homo sapiens
  CDR3 for beta chain variable domain of TCR clone 229402 (TRBV12-4, TRBJ2-5)
CASSPPTGLQETQYF

SEQ ID NO: 458805 - protein, 14 aa, Homo sapiens
  CDR3 for alpha chain variable domain of TCR clone 229403 (TRAV12-3, TRAJ13)
CATLDAGGHQKVTF

SEQ ID NO: 458806 - protein, 13 aa, Homo sapiens
  CDR3 for beta chain variable domain of TCR clone 229403 (TRBV2, TRBJ2-7)
CASRINTGWEQYF

SEQ ID NO: 458807 - protein, 13 aa, Homo sapiens
  CDR3 for alpha chain variable domain of TCR clone 229404 (TRAV13-1, TRAJ6)
CARGSGGSYIPTF

SEQ ID NO: 458808 - protein, 17 aa, Homo sapiens
  CDR3 for beta chain variable domain of TCR clone 229404 (TRBV7-8, TRBJ2-1)
CASSPPTGTLAYNEQFI

SEQ ID NO: 458809 - protein, 14 aa, Homo sapiens
  CDR3 for alpha chain variable domain of TCR clone 229405 (TRAV12-2, TRAJ13)
CAVKTTGGYQKGTF

SEQ ID NO: 458810 - protein, 13 aa, Homo sapiens
  CDR3 for beta chain variable domain of TCR clone 229405 (TRBV9, TRBJ2-7)
CASSASDSYEQYF

SEQ ID NO: 458811 - protein, 17 aa, Homo sapiens
  CDR3 for alpha chain variable domain of TCR clone 229406 (TRAV26-1, TRAJ53)
CIVRVDDSGGINYKLTF

SEQ ID NO: 458812 - protein, 19 aa, Homo sapiens
  CDR3 for beta chain variable domain of TCR clone 229406 (TRBV25-1, TRBJ2-2)
CAILVYRVDRGRKTGELFF

SEQ ID NO: 458813 - protein, 14 aa, Homo sapiens
  CDR3 for alpha chain variable domain of TCR clone 229407 (TRAV16, TRAJ42)
CALLAGGSQGNLIF

SEQ ID NO: 458814 - protein, 15 aa, Homo sapiens
  CDR3 for beta chain variable domain of TCR clone 229407 (TRBV2, TRBJ2-7)
CSSSEGLARSYEQYF

SEQ ID NO: 458815 - protein, 16 aa, Homo sapiens
  CDR3 for alpha chain variable domain of TCR clone 229408 (TRAV21, TRAJ52)
CAVTNAGGTSYGKLTF

SEQ ID NO: 458816 - protein, 14 aa, Homo sapiens
  CDR3 for beta chain variable domain of TCR clone 229408 (TRBV12-4, TRBJ1-6)
CASNLQGKGSPLHF

SEQ ID NO: 458817 - protein, 18 aa, Homo sapiens
  CDR3 for alpha chain variable domain of TCR clone 229409 (TRAV13-1, TRAJ52)
CAAKNPNAGGTSYGKLTF

SEQ ID NO: 458818 - protein, 13 aa, Homo sapiens
  CDR3 for beta chain variable domain of TCR clone 229409 (TRBV7-2, TRBJ2-2)
CASSSVRAGELFF

SEQ ID NO: 458819 - protein, 13 aa, Homo sapiens
  CDR3 for alpha chain variable domain of TCR clone 229410 (TRAV20, TRAJ37)
CAGCSSNTGKLIF

SEQ ID NO: 458820 - protein, 14 aa, Homo sapiens
  CDR3 for beta chain variable domain of TCR clone 229410 (TRBV7-2, TRBJ2-3)
CASSQTGSSYTQYF

SEQ ID NO: 458821 - protein, 15 aa, Homo sapiens
  CDR3 for alpha chain variable domain of TCR clone 229411 (TRAV8-3, TRAJ32)
CAVDLYGGATNKLIF

SEQ ID NO: 458822 - protein, 16 aa, Homo sapiens
  CDR3 for beta chain variable domain of TCR clone 229411 (TRBV12-4, TRBJ1-5)
CASSRPVGGSNQPQHF

SEQ ID NO: 458823 - protein, 14 aa, Homo sapiens
  CDR3 for alpha chain variable domain of TCR clone 229412 (TRAV13-1, TRAJ40)
CAASMTSGTYKYIF

SEQ ID NO: 458824 - protein, 15 aa, Homo sapiens
  CDR3 for beta chain variable domain of TCR clone 229412 (TRBV11-2, TRBJ2-2)
CASSLDTGNTGELFF

SEQ ID NO: 458825 - protein, 13 aa, Homo sapiens
  CDR3 for alpha chain variable domain of TCR clone 229413 (TRAV13-2, TRAJ48)
CAEMDFGNEKLTF

SEQ ID NO: 458826 - protein, 14 aa, Homo sapiens
  CDR3 for beta chain variable domain of TCR clone 229413 (TRBV4-2, TRBJ2-1)
CASGLDRAYNEQFF

SEQ ID NO: 458827 - protein, 12 aa, Homo sapiens
  CDR3 for alpha chain variable domain of TCR clone 229414 (TRAV12-2, TRAJ21)
CAPSANFNKFYF

SEQ ID NO: 458828 - protein, 13 aa, Homo sapiens
  CDR3 for beta chain variable domain of TCR clone 229414 (TRBV12-4, TRBJ1-1)
CQQFRSSGTEAFF

SEQ ID NO: 458829 - protein, 16 aa, Homo sapiens
  CDR3 for alpha chain variable domain of TCR clone 229415 (TRAV3, TRAJ23)
CAVEPLIFNQGGKLIF

SEQ ID NO: 458830 - protein, 15 aa, Homo sapiens
  CDR3 for beta chain variable domain of TCR clone 229415 (TRBV19, TRBJ1-5)
CASSPEGRPNQPQHF

SEQ ID NO: 458831 - protein, 18 aa, Homo sapiens
  CDR3 for alpha chain variable domain of TCR clone 229416 (TRAV13-1, TRAJ52)
CAAKNPNAGGTSYGKLRF

SEQ ID NO: 458832 - protein, 15 aa, Homo sapiens
  CDR3 for beta chain variable domain of TCR clone 229416 (TRBV28, TRBJ2-4)
CAAGSGTLLMGIQYF

SEQ ID NO: 458833 - protein, 14 aa, Homo sapiens
  CDR3 for alpha chain variable domain of TCR clone 229417 (TRAV23/DV6, TRAJ6)
CAASRSGGSYIPTV

SEQ ID NO: 458834 - protein, 17 aa, Homo sapiens
  CDR3 for beta chain variable domain of TCR clone 229417 (TRBV20-1, TRBJ2-1)
CSASASGLAGSYNEQFF

SEQ ID NO: 458835 - protein, 15 aa, Homo sapiens
  CDR3 for alpha chain variable domain of TCR clone 229418 (TRAV3, TRAJ5)
CAVRDLDTGRRALPF

SEQ ID NO: 458836 - protein, 13 aa, Homo sapiens
  CDR3 for beta chain variable domain of TCR clone 229418 (TRBV12-4, TRBJ2-7)
CASSPTETYEQYF

SEQ ID NO: 458837 - protein, 14 aa, Homo sapiens
  CDR3 for alpha chain variable domain of TCR clone 229419 (TRAV38-1, TRAJ45)
CAYDSGGGADGLTF

SEQ ID NO: 458838 - protein, 20 aa, Homo sapiens
  CDR3 for beta chain variable domain of TCR clone 229419 (TRBV28, TRBJ2-1)
CASTPIGRSPRLAGGNEQFF

SEQ ID NO: 458839 - protein, 18 aa, Homo sapiens
  CDR3 for alpha chain variable domain of TCR clone 229420 (TRAV26-2, TRAJ45)
FILRLWGYSGGGADGLNF

SEQ ID NO: 458840 - protein, 13 aa, Homo sapiens
  CDR3 for beta chain variable domain of TCR clone 229420 (TRBV7-8, TRBJ2-7)
CASSLTGGREQYF

SEQ ID NO: 458841 - protein, 14 aa, Homo sapiens
  CDR3 for alpha chain variable domain of TCR clone 229421 (TRAV29/DV5, TRAJ20)
CAASAPIEDYKLSF

SEQ ID NO: 458842 - protein, 14 aa, Homo sapiens
  CDR3 for beta chain variable domain of TCR clone 229421 (TRBV25-1, TRBJ1-1)
CASTHLGGNTEAFF

SEQ ID NO: 458843 - protein, 17 aa, Homo sapiens
  CDR3 for alpha chain variable domain of TCR clone 229422 (TRAV38-2/DV8, TRAJ28)
CAFLTLYSGAGSYQLTF

SEQ ID NO: 458844 - protein, 14 aa, Homo sapiens
  CDR3 for beta chain variable domain of TCR clone 229422 (TRBV11-2, TRBJ2-5)
CASSRTGGIETQYF

SEQ ID NO: 458845 - protein, 14 aa, Homo sapiens
  CDR3 for alpha chain variable domain of TCR clone 229423 (TRAV16, TRAJ39)
CALSKNNAGNMLTS

SEQ ID NO: 458846 - protein, 19 aa, Homo sapiens
  CDR3 for beta chain variable domain of TCR clone 229423 (TRBV6-6, TRBJ2-1)
AAPSQTSVYFCASSYEQFF

SEQ ID NO: 458847 - protein, 14 aa, Homo sapiens
  CDR3 for alpha chain variable domain of TCR clone 229424 (TRAV1-2, TRAJ16)
CAVNRFSDGQKLHF

SEQ ID NO: 458848 - protein, 14 aa, Homo sapiens
  CDR3 for beta chain variable domain of TCR clone 229424 (TRBV25-1, TRBJ1-1)
CASTHLGGNTEAFF

SEQ ID NO: 458849 - protein, 12 aa, Homo sapiens
  CDR3 for alpha chain variable domain of TCR clone 229425 (TRAV5, TRAJ3)
CAEDSSASTIIF

SEQ ID NO: 458850 - protein, 15 aa, Homo sapiens
  CDR3 for beta chain variable domain of TCR clone 229425 (TRBV6-5, TRBJ2-1)
CASSYDAGAGNEQFF

SEQ ID NO: 458851 - protein, 17 aa, Homo sapiens
  CDR3 for alpha chain variable domain of TCR clone 229426 (TRAV8-1, TRAJ43)
CAVTNDMRFGAGTRLTV

SEQ ID NO: 458852 - protein, 12 aa, Homo sapiens
  CDR3 for beta chain variable domain of TCR clone 229426 (TRBV11-2, TRBJ2-2)
CASGLGGGELFF

SEQ ID NO: 458853 - protein, 12 aa, Homo sapiens
  CDR3 for alpha chain variable domain of TCR clone 229427 (TRAV36/DV7, TRAJ50)
CAVEPENLLRQG

SEQ ID NO: 458854 - protein, 13 aa, Homo sapiens
  CDR3 for beta chain variable domain of TCR clone 229427 (TRBV7-2, TRBJ2-7)
CASSSPGGSEQYF

SEQ ID NO: 458855 - protein, 14 aa, Homo sapiens
  CDR3 for alpha chain variable domain of TCR clone 229428 (TRAV12-3, TRAJ10)
SHLPLPGGGNKLTF

SEQ ID NO: 458856 - protein, 14 aa, Homo sapiens
  CDR3 for beta chain variable domain of TCR clone 229428 (TRBV18, TRBJ2-3)
RASSGLADTDTQYF

SEQ ID NO: 458857 - protein, 14 aa, Homo sapiens
  CDR3 for alpha chain variable domain of TCR clone 229429 (TRAV1-2, TRAJ16)
CAVNRFSDGQKLLF

SEQ ID NO: 458858 - protein, 14 aa, Homo sapiens
  CDR3 for beta chain variable domain of TCR clone 229429 (TRBV4-3, TRBJ1-5)
CASSQGGQGWPQHF

SEQ ID NO: 458859 - protein, 13 aa, Homo sapiens
  CDR3 for alpha chain variable domain of TCR clone 229430 (TRAV3, TRAJ27)
CAVRPLGAGKSTF

SEQ ID NO: 458860 - protein, 15 aa, Homo sapiens
  CDR3 for beta chain variable domain of TCR clone 229430 (TRBV7-8, TRBJ2-3)
CASSPRTGSTDTQYF

SEQ ID NO: 458861 - protein, 14 aa, Homo sapiens
  CDR3 for alpha chain variable domain of TCR clone 229431 (TRAV14/DV4, TRAJ54)
CAMREAPGAQKLVF

SEQ ID NO: 458862 - protein, 14 aa, Homo sapiens
  CDR3 for beta chain variable domain of TCR clone 229431 (TRBV5-1, TRBJ2-7)
CASSRGESLYEQYF

SEQ ID NO: 458863 - protein, 12 aa, Homo sapiens
  CDR3 for alpha chain variable domain of TCR clone 229432 (TRAV3, TRAJ20)
CAVRDGGYKLSF

SEQ ID NO: 458864 - protein, 13 aa, Homo sapiens
  CDR3 for beta chain variable domain of TCR clone 229432 (TRBV7-3, TRBJ1-1)
CASSQDWGAEAFF

SEQ ID NO: 458865 - protein, 17 aa, Homo sapiens
  CDR3 for alpha chain variable domain of TCR clone 229433 (TRAV26-2, TRAJ52)
CILSSSSGGTSYGKLTF

SEQ ID NO: 458866 - protein, 10 aa, Homo sapiens
  CDR3 for beta chain variable domain of TCR clone 229433 (TRBV19, TRBJ1-1)
CHLRNTEAFF

SEQ ID NO: 458867 - protein, 13 aa, Homo sapiens
  CDR3 for alpha chain variable domain of TCR clone 229434 (TRAV12-3, TRAJ54)
CAMFAQGAQKLVF

SEQ ID NO: 458868 - protein, 16 aa, Homo sapiens
  CDR3 for beta chain variable domain of TCR clone 229434 (TRBV7-6, TRBJ2-3)
CASTPRRGGLGDTQYF

SEQ ID NO: 458869 - protein, 12 aa, Homo sapiens
  CDR3 for alpha chain variable domain of TCR clone 229435 (TRAV12-3, TRAJ17)
CAMTLTGSKLTF

SEQ ID NO: 458870 - protein, 15 aa, Homo sapiens
  CDR3 for beta chain variable domain of TCR clone 229435 (TRBV6-3, TRBJ2-7)
CASCSPGTVFYEQYF

SEQ ID NO: 458871 - protein, 15 aa, Homo sapiens
  CDR3 for alpha chain variable domain of TCR clone 229436 (TRAV8-3, TRAJ45)
CAPSYSGGGADGLTF

SEQ ID NO: 458872 - protein, 15 aa, Homo sapiens
  CDR3 for beta chain variable domain of TCR clone 229436 (TRBV11-3, TRBJ2-3)
CASLKDGREGDTQYF

SEQ ID NO: 458873 - protein, 13 aa, Homo sapiens
  CDR3 for alpha chain variable domain of TCR clone 229437 (TRAV21, TRAJ27)
CAARPGNAGKSTF

SEQ ID NO: 458874 - protein, 13 aa, Homo sapiens
  CDR3 for beta chain variable domain of TCR clone 229437 (TRBV9, TRBJ2-1)
CASSVGQGGEQFF

SEQ ID NO: 458875 - protein, 16 aa, Homo sapiens
  CDR3 for alpha chain variable domain of TCR clone 229438 (TRAV30, TRAJ24)
CGTEIVDADSWGKFQF

SEQ ID NO: 458876 - protein, 16 aa, Homo sapiens
  CDR3 for beta chain variable domain of TCR clone 229438 (TRBV20-1, TRBJ1-1)
CSARALTQGMNTEAVF

SEQ ID NO: 458877 - protein, 18 aa, Homo sapiens
  CDR3 for alpha chain variable domain of TCR clone 229439 (TRAV12-3, TRAJ52)
CAMSVGGAGGTSYGKLTF

SEQ ID NO: 458878 - protein, 13 aa, Homo sapiens
  CDR3 for beta chain variable domain of TCR clone 229439 (TRBV20-1, TRBJ1-5)
CSASWGRSQPQHF

SEQ ID NO: 458879 - protein, 15 aa, Homo sapiens
  CDR3 for alpha chain variable domain of TCR clone 229440 (TRAV39, TRAJ42)
CAVVHYGGSQGNLIF

SEQ ID NO: 458880 - protein, 15 aa, Homo sapiens
  CDR3 for beta chain variable domain of TCR clone 229440 (TRBV10-3, TRBJ1-1)
CAISDLGRANTEAFF

SEQ ID NO: 458881 - protein, 15 aa, Homo sapiens
  CDR3 for alpha chain variable domain of TCR clone 229441 (TRAV3, TRAJ22)
CAVRDRGGSARKLTF

SEQ ID NO: 458882 - protein, 16 aa, Homo sapiens
  CDR3 for beta chain variable domain of TCR clone 229441 (TRBV25-1, TRBJ1-1)
CASSGDRDRGRIEAFF

SEQ ID NO: 458883 - protein, 13 aa, Homo sapiens
  CDR3 for alpha chain variable domain of TCR clone 229442 (TRAV20, TRAJ56)
CAVQAGANSKLTL

SEQ ID NO: 458884 - protein, 14 aa, Homo sapiens
  CDR3 for beta chain variable domain of TCR clone 229442 (TRBV28, TRBJ1-1)
CASSPRTRWAEAFF

SEQ ID NO: 458885 - protein, 10 aa, Homo sapiens
  CDR3 for alpha chain variable domain of TCR clone 229443 (TRAV21, TRAJ22)
SSGSARQLTF

SEQ ID NO: 458886 - protein, 14 aa, Homo sapiens
  CDR3 for beta chain variable domain of TCR clone 229443 (TRBV19, TRBJ1-5)
CASRAPDSFLSQHF

SEQ ID NO: 458887 - protein, 14 aa, Homo sapiens
  CDR3 for alpha chain variable domain of TCR clone 229444 (TRAV13-1, TRAJ32)
CAARGSGATNKLIF

SEQ ID NO: 458888 - protein, 14 aa, Homo sapiens
  CDR3 for beta chain variable domain of TCR clone 229444 (TRBV5-5, TRBJ1-1)
CQQLVGKDNTEAFF

SEQ ID NO: 458889 - protein, 15 aa, Homo sapiens
  CDR3 for alpha chain variable domain of TCR clone 229445 (TRAV3, TRAJ29)
CAVRDINSGNAPLVF

SEQ ID NO: 458890 - protein, 16 aa, Homo sapiens
  CDR3 for beta chain variable domain of TCR clone 229445 (TRBV4-1, TRBJ2-5)
CASSQTFYGDQETQYF

SEQ ID NO: 458891 - protein, 13 aa, Homo sapiens
  CDR3 for alpha chain variable domain of TCR clone 229446 (TRAV38-1, TRAJ20)
CAFMRDNDYRLSF

SEQ ID NO: 458892 - protein, 12 aa, Homo sapiens
  CDR3 for beta chain variable domain of TCR clone 229446 (TRBV18, TRBJ2-5)
CASSPSKETQYF

SEQ ID NO: 458893 - protein, 11 aa, Homo sapiens
  CDR3 for alpha chain variable domain of TCR clone 229447 (TRAV1-2, TRAJ40)
CAVPGTYKYFF

SEQ ID NO: 458894 - protein, 16 aa, Homo sapiens
  CDR3 for beta chain variable domain of TCR clone 229447 (TRBV29-1, TRBJ2-7)
CSVEVVGTSGSYEQYF

SEQ ID NO: 458895 - protein, 16 aa, Homo sapiens
  CDR3 for alpha chain variable domain of TCR clone 229448 (TRAV17, TRAJ22)
CATGQISSGSARQLTF

SEQ ID NO: 458896 - protein, 13 aa, Homo sapiens
  CDR3 for beta chain variable domain of TCR clone 229448 (TRBV11-2, TRBJ2-1)
CASSLGLAGGRFF

SEQ ID NO: 458897 - protein, 14 aa, Homo sapiens
  CDR3 for alpha chain variable domain of TCR clone 229449 (TRAV9-2, TRAJ39)
CALYIYNAGNMLTF

SEQ ID NO: 458898 - protein, 13 aa, Homo sapiens
  CDR3 for beta chain variable domain of TCR clone 229449 (TRBV2, TRBJ2-5)
CASGTPYQETQYF

SEQ ID NO: 458899 - protein, 14 aa, Homo sapiens
  CDR3 for alpha chain variable domain of TCR clone 229450 (TRAV1-2, TRAJ17)
CAVRLEAAGNKLTF

SEQ ID NO: 458900 - protein, 16 aa, Homo sapiens
  CDR3 for beta chain variable domain of TCR clone 229450 (TRBV12-5, TRBJ2-5)
CASGPRTSGNQETQYF

SEQ ID NO: 458901 - protein, 12 aa, Homo sapiens
  CDR3 for alpha chain variable domain of TCR clone 229451 (TRAV12-3, TRAJ17)
CAMALTGNKPTF

SEQ ID NO: 458902 - protein, 15 aa, Homo sapiens
  CDR3 for beta chain variable domain of TCR clone 229451 (TRBV20-1, TRBJ2-7)
CSARDRVSGMDEQYF

SEQ ID NO: 458903 - protein, 13 aa, Homo sapiens
  CDR3 for alpha chain variable domain of TCR clone 229452 (TRAV27, TRAJ3)
ASVRGSSASKIIF

SEQ ID NO: 458904 - protein, 15 aa, Homo sapiens
  CDR3 for beta chain variable domain of TCR clone 229452 (TRBV28, TRBJ1-3)
CASSMGWASGNTIYF

SEQ ID NO: 458905 - protein, 15 aa, Homo sapiens
  CDR3 for alpha chain variable domain of TCR clone 229453 (TRAV4, TRAJ39)
CLVGPNNNAGNKLTF

SEQ ID NO: 458906 - protein, 16 aa, Homo sapiens
  CDR3 for beta chain variable domain of TCR clone 229453 (TRBV13, TRBJ2-2)
CASSPRTGEHTGELFF

SEQ ID NO: 458907 - protein, 15 aa, Homo sapiens
  CDR3 for alpha chain variable domain of TCR clone 229454 (TRAV12-3, TRAJ6)
CAMSATTGGSYIPTF

SEQ ID NO: 458908 - protein, 16 aa, Homo sapiens
  CDR3 for beta chain variable domain of TCR clone 229454 (TRBV20-1, TRBJ1-2)
GSASMGQGVANYGYIF

SEQ ID NO: 458909 - protein, 14 aa, Homo sapiens
  CDR3 for alpha chain variable domain of TCR clone 229455 (TRAV12-2, TRAJ13)
CAVKKTGGYQKVTF

SEQ ID NO: 458910 - protein, 13 aa, Homo sapiens
  CDR3 for beta chain variable domain of TCR clone 229455 (TRBV19, TRBJ1-2)
CASSVPGQDGWTF

SEQ ID NO: 458911 - protein, 13 aa, Homo sapiens
  CDR3 for alpha chain variable domain of TCR clone 229456 (TRAV12-3, TRAJ33)
CAMSVNSNYQLIC

SEQ ID NO: 458912 - protein, 16 aa, Homo sapiens
  CDR3 for beta chain variable domain of TCR clone 229456 (TRBV7-3, TRBJ2-3)
CASSLSGYRPEDTQYF

SEQ ID NO: 458913 - protein, 15 aa, Homo sapiens
  CDR3 for alpha chain variable domain of TCR clone 229457 (TRAV3, TRAJ5)
CAVRELDTGRRALTF

SEQ ID NO: 458914 - protein, 14 aa, Homo sapiens
  CDR3 for beta chain variable domain of TCR clone 229457 (TRBV25-1, TRBJ1-4)
CASSGGGQPEKLFF

SEQ ID NO: 458915 - protein, 14 aa, Homo sapiens
  CDR3 for alpha chain variable domain of TCR clone 229458 (TRAV12-2, TRAJ9)
CAVNMEGGGFKTIF

SEQ ID NO: 458916 - protein, 13 aa, Homo sapiens
  CDR3 for beta chain variable domain of TCR clone 229458 (TRBV4-2, TRBJ1-1)
CASSQAGNTEAFF

SEQ ID NO: 458917 - protein, 14 aa, Homo sapiens
  CDR3 for alpha chain variable domain of TCR clone 229459 (TRAV17, TRAJ58)
CATDGETSGSRLTF

SEQ ID NO: 458918 - protein, 15 aa, Homo sapiens
  CDR3 for beta chain variable domain of TCR clone 229459 (TRBV6-3, TRBJ2-7)
CASRSPGTVFYEQYF

SEQ ID NO: 458919 - protein, 15 aa, Homo sapiens
  CDR3 for alpha chain variable domain of TCR clone 229460 (TRAV38-1, TRAJ45)
CSFMKGGGGADGLTF

SEQ ID NO: 458920 - protein, 13 aa, Homo sapiens
  CDR3 for beta chain variable domain of TCR clone 229460 (TRBV7-9, TRBJ1-2)
CASSLKQNYGYTF

SEQ ID NO: 458921 - protein, 12 aa, Homo sapiens
  CDR3 for alpha chain variable domain of TCR clone 229461 (TRAV3, TRAJ39)
CAVIEWSNMLTF

SEQ ID NO: 458922 - protein, 16 aa, Homo sapiens
  CDR3 for beta chain variable domain of TCR clone 229461 (TRBV7-9, TRBJ1-1)
CASSLTQVRSNTEAFF

SEQ ID NO: 458923 - protein, 15 aa, Homo sapiens
  CDR3 for alpha chain variable domain of TCR clone 229462 (TRAV3, TRAJ22)
CAVRDRGGSARQLTF

SEQ ID NO: 458924 - protein, 14 aa, Homo sapiens
  CDR3 for beta chain variable domain of TCR clone 229462 (TRBV20-1, TRBJ1-1)
CNAQTRIGGTEAFF

SEQ ID NO: 458925 - protein, 15 aa, Homo sapiens
  CDR3 for alpha chain variable domain of TCR clone 229463 (TRAV27, TRAJ38)
CAGRFNAGNNRKLIW

SEQ ID NO: 458926 - protein, 13 aa, Homo sapiens
  CDR3 for beta chain variable domain of TCR clone 229463 (TRBV3-1, TRBJ2-2)
CASLARGSGELFF

SEQ ID NO: 458927 - protein, 17 aa, Homo sapiens
  CDR3 for alpha chain variable domain of TCR clone 229464 (TRAV19, TRAJ28)
CALSEASSGAGSYQLTF

SEQ ID NO: 458928 - protein, 13 aa, Homo sapiens
  CDR3 for beta chain variable domain of TCR clone 229464 (TRBV3-1, TRBJ1-1)
CASSPGVITEALF

SEQ ID NO: 458929 - protein, 12 aa, Homo sapiens
  CDR3 for alpha chain variable domain of TCR clone 229465 (TRAV13-1, TRAJ21)
CAAKAGFNKFYF

SEQ ID NO: 458930 - protein, 14 aa, Homo sapiens
  CDR3 for beta chain variable domain of TCR clone 229465 (TRBV5-4, TRBJ1-1)
CASSVDSRRDEAFF

SEQ ID NO: 458931 - protein, 14 aa, Homo sapiens
  CDR3 for alpha chain variable domain of TCR clone 229466 (TRAV26-1, TRAJ38)
CIADNAGNNRKLIW

SEQ ID NO: 458932 - protein, 16 aa, Homo sapiens
  CDR3 for beta chain variable domain of TCR clone 229466 (TRBV20-1, TRBJ2-7)
CSASTSGRHSSYEQYF

SEQ ID NO: 458933 - protein, 15 aa, Homo sapiens
  CDR3 for alpha chain variable domain of TCR clone 229467 (TRAV12-1, TRAJ44)
CVVFVNACTASKLTF

SEQ ID NO: 458934 - protein, 17 aa, Homo sapiens
  CDR3 for beta chain variable domain of TCR clone 229467 (TRBV7-8, TRBJ2-6)
CASSAGTGGAGANVLTF

SEQ ID NO: 458935 - protein, 16 aa, Homo sapiens
  CDR3 for alpha chain variable domain of TCR clone 229468 (TRAV30, TRAJ24)
CGTEIVDADSWGKFQF

SEQ ID NO: 458936 - protein, 18 aa, Homo sapiens
  CDR3 for beta chain variable domain of TCR clone 229468 (TRBV11-2, TRBJ2-7)
CASSPRGVAGFLIYEQYF

SEQ ID NO: 458937 - protein, 12 aa, Homo sapiens
  CDR3 for alpha chain variable domain of TCR clone 229469 (TRAV2, TRAJ34)
CAVERNTNKLIF

SEQ ID NO: 458938 - protein, 14 aa, Homo sapiens
  CDR3 for beta chain variable domain of TCR clone 229469 (TRBV7-9, TRBJ2-1)
CASSDNSGYNEQFF

SEQ ID NO: 458939 - protein, 14 aa, Homo sapiens
  CDR3 for alpha chain variable domain of TCR clone 229470 (TRAV8-3, TRAJ10)
CAVGNAGGGNKLTF

SEQ ID NO: 458940 - protein, 17 aa, Homo sapiens
  CDR3 for beta chain variable domain of TCR clone 229470 (TRBV7-3, TRBJ2-3)
CASSLMKRMRGADTQYF

SEQ ID NO: 458941 - protein, 15 aa, Homo sapiens
  CDR3 for alpha chain variable domain of TCR clone 229471 (TRAV3, TRAJ4)
CAVIDGTGGYNKLIF

SEQ ID NO: 458942 - protein, 13 aa, Homo sapiens
  CDR3 for beta chain variable domain of TCR clone 229471 (TRBV12-5, TRBJ1-2)
CASGVRTGNGYTF

SEQ ID NO: 458943 - protein, 14 aa, Homo sapiens
  CDR3 for alpha chain variable domain of TCR clone 229472 (TRAV13-1, TRAJ50)
CAARSKTSYDKVIF

SEQ ID NO: 458944 - protein, 17 aa, Homo sapiens
  CDR3 for beta chain variable domain of TCR clone 229472 (TRBV13, TRBJ2-3)
CASSLSRVAGGRDTQYF

SEQ ID NO: 458945 - protein, 14 aa, Homo sapiens
  CDR3 for alpha chain variable domain of TCR clone 229473 (TRAV26-1, TRAJ38)
CIVVGAGNNCKLIW

SEQ ID NO: 458946 - protein, 12 aa, Homo sapiens
  CDR3 for beta chain variable domain of TCR clone 229473 (TRBV5-1, TRBJ2-5)
CASSWDQETQYF

SEQ ID NO: 458947 - protein, 13 aa, Homo sapiens
  CDR3 for alpha chain variable domain of TCR clone 229474 (TRAV8-3, TRAJ36)
CAVGATGADHLFF

SEQ ID NO: 458948 - protein, 15 aa, Homo sapiens
  CDR3 for beta chain variable domain of TCR clone 229474 (TRBV7-2, TRBJ1-2)
CASSPRAGWNYGYSF

SEQ ID NO: 458949 - protein, 17 aa, Homo sapiens
  CDR3 for alpha chain variable domain of TCR clone 229475 (TRAV3, TRAJ6)
CAVRDGPRAGGSFIPTF

SEQ ID NO: 458950 - protein, 20 aa, Homo sapiens
  CDR3 for beta chain variable domain of TCR clone 229475 (TRBV28, TRBJ2-1)
CASTPIGRSPGLAGGNEQFF

SEQ ID NO: 458951 - protein, 14 aa, Homo sapiens
  CDR3 for alpha chain variable domain of TCR clone 229476 (TRAV1-2, TRAJ16)
CAVNRFSDGQKLFF

SEQ ID NO: 458952 - protein, 17 aa, Homo sapiens
  CDR3 for beta chain variable domain of TCR clone 229476 (TRBV13, TRBJ2-3)
CASSLSRVAGGRNTQYF

SEQ ID NO: 458953 - protein, 13 aa, Homo sapiens
  CDR3 for alpha chain variable domain of TCR clone 229477 (TRAV12-3, TRAJ39)
CAMIDNAGNMLTF

SEQ ID NO: 458954 - protein, 18 aa, Homo sapiens
  CDR3 for beta chain variable domain of TCR clone 229477 (TRBV9, TRBJ2-5)
CASSVAEGTNAVGETQYF

SEQ ID NO: 458955 - protein, 17 aa, Homo sapiens
  CDR3 for alpha chain variable domain of TCR clone 229478 (TRAV3, TRAJ42)
CAVRDRDYGGSKGNLIF

SEQ ID NO: 458956 - protein, 17 aa, Homo sapiens
  CDR3 for beta chain variable domain of TCR clone 229478 (TRBV6-1, TRBJ1-2)
CASSGTHSQRGNYGYTF

SEQ ID NO: 458957 - protein, 15 aa, Homo sapiens
  CDR3 for alpha chain variable domain of TCR clone 229479 (TRAV12-1, TRAJ4)
CVLNPFSGGYNKLIF

SEQ ID NO: 458958 - protein, 13 aa, Homo sapiens
  CDR3 for beta chain variable domain of TCR clone 229479 (TRBV20-1, TRBJ1-2)
CSARGTADYGYTF

SEQ ID NO: 458959 - protein, 14 aa, Homo sapiens
  CDR3 for alpha chain variable domain of TCR clone 229480 (TRAV4, TRAJ17)
CLVGDPLGGNKLTF

SEQ ID NO: 458960 - protein, 20 aa, Homo sapiens
  CDR3 for beta chain variable domain of TCR clone 229480 (TRBV20-1, TRBJ2-1)
CSARPYSVAGGPSYYNEQFF

SEQ ID NO: 458961 - protein, 12 aa, Homo sapiens
  CDR3 for alpha chain variable domain of TCR clone 229481 (TRAV29/DV5, TRAJ26)
CAAIPSGQKFVF

SEQ ID NO: 458962 - protein, 15 aa, Homo sapiens
  CDR3 for beta chain variable domain of TCR clone 229481 (TRBV19, TRBJ1-5)
CASSDSGPRNQPQHF

SEQ ID NO: 458963 - protein, 14 aa, Homo sapiens
  CDR3 for alpha chain variable domain of TCR clone 229482 (TRAV29/DV5, TRAJ45)
CAASLRGGADGLPF

SEQ ID NO: 458964 - protein, 11 aa, Homo sapiens
  CDR3 for beta chain variable domain of TCR clone 229482 (TRBV11-2, TRBJ2-2)
CASSLPGELFF

SEQ ID NO: 458965 - protein, 13 aa, Homo sapiens
  CDR3 for alpha chain variable domain of TCR clone 229483 (TRAV2, TRAJ40)
CAVVTSGTYKYIF

SEQ ID NO: 458966 - protein, 14 aa, Homo sapiens
  CDR3 for beta chain variable domain of TCR clone 229483 (TRBV19, TRBJ2-1)
CASPTVVLSGQQFF
